United States Patent Application Publication US 2005/0255487 A1 - sequence listing, part 68

SEQ ID NO: 1866330 - RNA, 19 nt, Homo sapiens
  misc_RNA (1)...(19): siRNA sense strand
ucaaagauuggagcuggaa

SEQ ID NO: 1866331 - RNA, 19 nt, Homo sapiens
  misc_RNA (1)...(19): siRNA sense strand
gaaaaucucccaguuugag

SEQ ID NO: 1866332 - RNA, 19 nt, Homo sapiens
  misc_RNA (1)...(19): siRNA sense strand
ucgcagagccaaggagaga

SEQ ID NO: 1866333 - RNA, 19 nt, Homo sapiens
  misc_RNA (1)...(19): siRNA sense strand
gggaaaaccaggacaaaag

SEQ ID NO: 1866334 - RNA, 19 nt, Homo sapiens
  misc_RNA (1)...(19): siRNA sense strand
gauacagcagguuauaguc

SEQ ID NO: 1866335 - RNA, 19 nt, Homo sapiens
  misc_RNA (1)...(19): siRNA sense strand
agauacagcagguuauagu

SEQ ID NO: 1866336 - RNA, 19 nt, Homo sapiens
  misc_RNA (1)...(19): siRNA sense strand
ggacaucacucccaucaug

SEQ ID NO: 1866337 - RNA, 19 nt, Homo sapiens
  misc_RNA (1)...(19): siRNA sense strand
gcagaggccuguucucaaa

SEQ ID NO: 1866338 - RNA, 19 nt, Homo sapiens
  misc_RNA (1)...(19): siRNA sense strand
ggacagaccuucauguaca

SEQ ID NO: 1866339 - RNA, 19 nt, Homo sapiens
  misc_RNA (1)...(19): siRNA sense strand
gaaacugggucuccuauuc

SEQ ID NO: 1866340 - RNA, 19 nt, Homo sapiens
  misc_RNA (1)...(19): siRNA sense strand
gguggaaccugauggauuu

SEQ ID NO: 1866341 - RNA, 19 nt, Homo sapiens
  misc_RNA (1)...(19): siRNA sense strand
gcugagaucuacuauaaug

SEQ ID NO: 1866342 - RNA, 19 nt, Homo sapiens
  misc_RNA (1)...(19): siRNA sense strand
gagccaauguacacaauuu

SEQ ID NO: 1866343 - RNA, 19 nt, Homo sapiens
  misc_RNA (1)...(19): siRNA sense strand
gaacaacuccuaucagcuu

SEQ ID NO: 1866344 - RNA, 19 nt, Homo sapiens
  misc_RNA (1)...(19): siRNA sense strand
gggagaggcuugugacuug

SEQ ID NO: 1866345 - RNA, 19 nt, Homo sapiens
  misc_RNA (1)...(19): siRNA sense strand
aggcugagaucuacuauaa

SEQ ID NO: 1866346 - RNA, 19 nt, Homo sapiens
  misc_RNA (1)...(19): siRNA sense strand
gcaguucucugaauucaca

SEQ ID NO: 1866347 - RNA, 19 nt, Homo sapiens
  misc_RNA (1)...(19): siRNA sense strand
ggacaggaagaacaaguua

SEQ ID NO: 1866348 - RNA, 19 nt, Homo sapiens
  misc_RNA (1)...(19): siRNA sense strand
gaaguuaucaggaauuuag

SEQ ID NO: 1866349 - RNA, 19 nt, Homo sapiens
  misc_RNA (1)...(19): siRNA sense strand
uauuugaccuuccucuuua

SEQ ID NO: 1866350 - RNA, 19 nt, Homo sapiens
  misc_RNA (1)...(19): siRNA sense strand
caagacaucuccagcuuuc

SEQ ID NO: 1866351 - RNA, 19 nt, Homo sapiens
  misc_RNA (1)...(19): siRNA sense strand
gcaacuauuucccugaaga

SEQ ID NO: 1866352 - RNA, 19 nt, Homo sapiens
  misc_RNA (1)...(19): siRNA sense strand
ggacgcaugcugcuugaua

SEQ ID NO: 1866353 - RNA, 19 nt, Homo sapiens
  misc_RNA (1)...(19): siRNA sense strand
ucagcaagguggagaauga

SEQ ID NO: 1866354 - RNA, 19 nt, Homo sapiens
  misc_RNA (1)...(19): siRNA sense strand
aaagauauguggcugcuau

SEQ ID NO: 1866355 - RNA, 19 nt, Homo sapiens
  misc_RNA (1)...(19): siRNA sense strand
ggacgaagcucuggaugag

SEQ ID NO: 1866356 - RNA, 19 nt, Homo sapiens
  misc_RNA (1)...(19): siRNA sense strand
gaugguggauuuacugaau

SEQ ID NO: 1866357 - RNA, 19 nt, Homo sapiens
  misc_RNA (1)...(19): siRNA sense strand
gauauugccuuggguucua

SEQ ID NO: 1866358 - RNA, 19 nt, Homo sapiens
  misc_RNA (1)...(19): siRNA sense strand
ucaaauaccaccagaaaga

SEQ ID NO: 1866359 - RNA, 19 nt, Homo sapiens
  misc_RNA (1)...(19): siRNA sense strand
caagaaacccuuuaucaag

SEQ ID NO: 1866360 - RNA, 19 nt, Homo sapiens
  misc_RNA (1)...(19): siRNA sense strand
ccacacagcauccuauuug

SEQ ID NO: 1866361 - RNA, 19 nt, Homo sapiens
  misc_RNA (1)...(19): siRNA sense strand
ccaaggagcuuuuccacua

SEQ ID NO: 1866362 - RNA, 19 nt, Homo sapiens
  misc_RNA (1)...(19): siRNA sense strand
guacacaauuucugaugga

SEQ ID NO: 1866363 - RNA, 19 nt, Homo sapiens
  misc_RNA (1)...(19): siRNA sense strand
guaugugggugaugcauug

SEQ ID NO: 1866364 - RNA, 19 nt, Homo sapiens
  misc_RNA (1)...(19): siRNA sense strand
gagagacgauaauaaugau

SEQ ID NO: 1866365 - RNA, 19 nt, Homo sapiens
  misc_RNA (1)...(19): siRNA sense strand
uggccuaugucaaguauaa

SEQ ID NO: 1866366 - RNA, 19 nt, Homo sapiens
  misc_RNA (1)...(19): siRNA sense strand
gacaucagauauucucaga

SEQ ID NO: 1866367 - RNA, 19 nt, Homo sapiens
  misc_RNA (1)...(19): siRNA sense strand
auauguggcugcuaugaua

SEQ ID NO: 1866368 - RNA, 19 nt, Homo sapiens
  misc_RNA (1)...(19): siRNA sense strand
gcaacuguguggagugugu

SEQ ID NO: 1866369 - RNA, 19 nt, Homo sapiens
  misc_RNA (1)...(19): siRNA sense strand
gaggauguauuugaaacuu

SEQ ID NO: 1866370 - RNA, 19 nt, Homo sapiens
  misc_RNA (1)...(19): siRNA sense strand
uaauuuaggcugcaagaaa

SEQ ID NO: 1866371 - RNA, 19 nt, Homo sapiens
  misc_RNA (1)...(19): siRNA sense strand
gauaucgaguggaaguuug

SEQ ID NO: 1866372 - RNA, 19 nt, Homo sapiens
  misc_RNA (1)...(19): siRNA sense strand
ucaagaaacccuuuaucaa

SEQ ID NO: 1866373 - RNA, 19 nt, Homo sapiens
  misc_RNA (1)...(19): siRNA sense strand
ucagagagacgauaauaau

SEQ ID NO: 1866374 - RNA, 19 nt, Homo sapiens
  misc_RNA (1)...(19): siRNA sense strand
ggaauuaaagcaagacauc

SEQ ID NO: 1866375 - RNA, 19 nt, Homo sapiens
  misc_RNA (1)...(19): siRNA sense strand
cagcuuuacuucuauuaug

SEQ ID NO: 1866376 - RNA, 19 nt, Homo sapiens
  misc_RNA (1)...(19): siRNA sense strand
acacgcaguucucugaauu

SEQ ID NO: 1866377 - RNA, 19 nt, Homo sapiens
  misc_RNA (1)...(19): siRNA sense strand
gaagguggcaaucaaauac

SEQ ID NO: 1866378 - RNA, 19 nt, Homo sapiens
  misc_RNA (1)...(19): siRNA sense strand
ucaaggagcucagcaaggu

SEQ ID NO: 1866379 - RNA, 19 nt, Homo sapiens
  misc_RNA (1)...(19): siRNA sense strand
caacaacuacgaaaucauc

SEQ ID NO: 1866380 - RNA, 19 nt, Homo sapiens
  misc_RNA (1)...(19): siRNA sense strand
caacuacgaaaucaucaaa

SEQ ID NO: 1866381 - RNA, 19 nt, Homo sapiens
  misc_RNA (1)...(19): siRNA sense strand
caacuccuaucagcuuauu

SEQ ID NO: 1866382 - RNA, 19 nt, Homo sapiens
  misc_RNA (1)...(19): siRNA sense strand
aagaaacccuuuaucaagu

SEQ ID NO: 1866383 - RNA, 19 nt, Homo sapiens
  misc_RNA (1)...(19): siRNA sense strand
ucaaauugcuuguccaaaa

SEQ ID NO: 1866384 - RNA, 19 nt, Homo sapiens
  misc_RNA (1)...(19): siRNA sense strand
aaugugggaugguggauuu

SEQ ID NO: 1866385 - RNA, 19 nt, Homo sapiens
  misc_RNA (1)...(19): siRNA sense strand
gcaagacaucuccagcuuu

SEQ ID NO: 1866386 - RNA, 19 nt, Homo sapiens
  misc_RNA (1)...(19): siRNA sense strand
ugaacaugcugauugcuau

SEQ ID NO: 1866387 - RNA, 19 nt, Homo sapiens
  misc_RNA (1)...(19): siRNA sense strand
uaugauggcuucccuggau

SEQ ID NO: 1866388 - RNA, 19 nt, Homo sapiens
  misc_RNA (1)...(19): siRNA sense strand
caagucauuucuauaccuu

SEQ ID NO: 1866389 - RNA, 19 nt, Homo sapiens
  misc_RNA (1)...(19): siRNA sense strand
aaucaaauaccaccagaaa

SEQ ID NO: 1866390 - RNA, 19 nt, Homo sapiens
  misc_RNA (1)...(19): siRNA sense strand
cuccuauucuccaaauuua

SEQ ID NO: 1866391 - RNA, 19 nt, Homo sapiens
  misc_RNA (1)...(19): siRNA sense strand
agagagacgauaauaauga

SEQ ID NO: 1866392 - RNA, 19 nt, Homo sapiens
  misc_RNA (1)...(19): siRNA sense strand
ggagugcccugcucauugc

SEQ ID NO: 1866393 - RNA, 19 nt, Homo sapiens
  misc_RNA (1)...(19): siRNA sense strand
ggagcaaccuugggcuguu

SEQ ID NO: 1866394 - RNA, 19 nt, Homo sapiens
  misc_RNA (1)...(19): siRNA sense strand
ugaagugcuugaccucuug

SEQ ID NO: 1866395 - RNA, 19 nt, Homo sapiens
  misc_RNA (1)...(19): siRNA sense strand
cgaauucaccgaguuugua

SEQ ID NO: 1866396 - RNA, 19 nt, Homo sapiens
  misc_RNA (1)...(19): siRNA sense strand
gaaagccagacacgaauuc

SEQ ID NO: 1866397 - RNA, 19 nt, Homo sapiens
  misc_RNA (1)...(19): siRNA sense strand
uauaaugguucucguccaa

SEQ ID NO: 1866398 - RNA, 19 nt, Homo sapiens
  misc_RNA (1)...(19): siRNA sense strand
agaaacccuuuaucaaguu

SEQ ID NO: 1866399 - RNA, 19 nt, Homo sapiens
  misc_RNA (1)...(19): siRNA sense strand
ugaagguggcaaucaaaua

SEQ ID NO: 1866400 - RNA, 19 nt, Homo sapiens
  misc_RNA (1)...(19): siRNA sense strand
uagcagcacugaacugucu

SEQ ID NO: 1866401 - RNA, 19 nt, Homo sapiens
  misc_RNA (1)...(19): siRNA sense strand
caggacagaccuucaugua

SEQ ID NO: 1866402 - RNA, 19 nt, Homo sapiens
  misc_RNA (1)...(19): siRNA sense strand
ggugaugcauugcucuaug

SEQ ID NO: 1866403 - RNA, 19 nt, Homo sapiens
  misc_RNA (1)...(19): siRNA sense strand
ucauggagcuacugcugaa

SEQ ID NO: 1866404 - RNA, 19 nt, Homo sapiens
  misc_RNA (1)...(19): siRNA sense strand
ggaaagcagaggccuguuc

SEQ ID NO: 1866405 - RNA, 19 nt, Homo sapiens
  misc_RNA (1)...(19): siRNA sense strand
ggcaggacaucagauauuc

SEQ ID NO: 1866406 - RNA, 19 nt, Homo sapiens
  misc_RNA (1)...(19): siRNA sense strand
gcucccgacugaacaucua

SEQ ID NO: 1866407 - RNA, 19 nt, Homo sapiens
  misc_RNA (1)...(19): siRNA sense strand
caauguacacaauuucuga

SEQ ID NO: 1866408 - RNA, 19 nt, Homo sapiens
  misc_RNA (1)...(19): siRNA sense strand
uggcugcuaugauaagaaa

SEQ ID NO: 1866409 - RNA, 19 nt, Homo sapiens
  misc_RNA (1)...(19): siRNA sense strand
cuugagaaguuucacagaa

SEQ ID NO: 1866410 - RNA, 19 nt, Homo sapiens
  misc_RNA (1)...(19): siRNA sense strand
acgaagcucuggaugaguu

SEQ ID NO: 1866411 - RNA, 19 nt, Homo sapiens
  misc_RNA (1)...(19): siRNA sense strand
ucacucuucuggucuguau

SEQ ID NO: 1866412 - RNA, 19 nt, Homo sapiens
  misc_RNA (1)...(19): siRNA sense strand
gacgcaugcugcuugauau

SEQ ID NO: 1866413 - RNA, 19 nt, Homo sapiens
  misc_RNA (1)...(19): siRNA sense strand
gcaagccccucacucauug

SEQ ID NO: 1866414 - RNA, 19 nt, Homo sapiens
  misc_RNA (1)...(19): siRNA sense strand
gguaacugguucaacaaca

SEQ ID NO: 1866415 - RNA, 19 nt, Homo sapiens
  misc_RNA (1)...(19): siRNA sense strand
ugaagauuguggccuaugu

SEQ ID NO: 1866416 - RNA, 19 nt, Homo sapiens
  misc_RNA (1)...(19): siRNA sense strand
cgacugaacaucuauaagg

SEQ ID NO: 1866417 - RNA, 19 nt, Homo sapiens
  misc_RNA (1)...(19): siRNA sense strand
ggucuccuauucuccaaau

SEQ ID NO: 1866418 - RNA, 19 nt, Homo sapiens
  misc_RNA (1)...(19): siRNA sense strand
caagaaacugggucuccua

SEQ ID NO: 1866419 - RNA, 19 nt, Homo sapiens
  misc_RNA (1)...(19): siRNA sense strand
ugagggacuuacagaagaa

SEQ ID NO: 1866420 - RNA, 19 nt, Homo sapiens
  misc_RNA (1)...(19): siRNA sense strand
gacacgaauucaccgaguu

SEQ ID NO: 1866421 - RNA, 19 nt, Homo sapiens
  misc_RNA (1)...(19): siRNA sense strand
caacugucguggaauggau

SEQ ID NO: 1866422 - RNA, 19 nt, Homo sapiens
  misc_RNA (1)...(19): siRNA sense strand
gaccauuggguuccuguuu

SEQ ID NO: 1866423 - RNA, 19 nt, Homo sapiens
  misc_RNA (1)...(19): siRNA sense strand
gagaugaccacagugaaga

SEQ ID NO: 1866424 - RNA, 19 nt, Homo sapiens
  misc_RNA (1)...(19): siRNA sense strand
caacauuaucaggaaguua

SEQ ID NO: 1866425 - RNA, 19 nt, Homo sapiens
  misc_RNA (1)...(19): siRNA sense strand
ggagaaggcgcaacuugag

SEQ ID NO: 1866426 - RNA, 19 nt, Homo sapiens
  misc_RNA (1)...(19): siRNA sense strand
gcaccuugccaccuccuuu

SEQ ID NO: 1866427 - RNA, 19 nt, Homo sapiens
  misc_RNA (1)...(19): siRNA sense strand
gcaagguggagaaugaguu

SEQ ID NO: 1866428 - RNA, 19 nt, Homo sapiens
  misc_RNA (1)...(19): siRNA sense strand
cuugaccucuugggaaaua

SEQ ID NO: 1866429 - RNA, 19 nt, Homo sapiens
  misc_RNA (1)...(19): siRNA sense strand
gaguggaaguuugcaagga

SEQ ID NO: 1866430 - RNA, 19 nt, Homo sapiens
  misc_RNA (1)...(19): siRNA sense strand
ugauugcuaugaugaacaa

SEQ ID NO: 1866431 - RNA, 19 nt, Homo sapiens
  misc_RNA (1)...(19): siRNA sense strand
gaugugagaaacagaacaa

SEQ ID NO: 1866432 - RNA, 19 nt, Homo sapiens
  misc_RNA (1)...(19): siRNA sense strand
cuauuucccugaagauugu

SEQ ID NO: 1866433 - RNA, 19 nt, Homo sapiens
  misc_RNA (1)...(19): siRNA sense strand
gagcaaccuugggcuguuc

SEQ ID NO: 1866434 - RNA, 19 nt, Homo sapiens
  misc_RNA (1)...(19): siRNA sense strand
gagcuugacccucagaagu

SEQ ID NO: 1866435 - RNA, 19 nt, Homo sapiens
  misc_RNA (1)...(19): siRNA sense strand
gaaagcagaggccuguucu

SEQ ID NO: 1866436 - RNA, 19 nt, Homo sapiens
  misc_RNA (1)...(19): siRNA sense strand
gaaagaccauucuaucaga

SEQ ID NO: 1866437 - RNA, 19 nt, Homo sapiens
  misc_RNA (1)...(19): siRNA sense strand
gaccagcuauagcaauuaa

SEQ ID NO: 1866438 - RNA, 19 nt, Homo sapiens
  misc_RNA (1)...(19): siRNA sense strand
gaaaacagcuccauauguc

SEQ ID NO: 1866439 - RNA, 19 nt, Homo sapiens
  misc_RNA (1)...(19): siRNA sense strand
aaaccugcauccaucauuu

SEQ ID NO: 1866440 - RNA, 19 nt, Homo sapiens
  misc_RNA (1)...(19): siRNA sense strand
cauaugucccaauguauua

SEQ ID NO: 1866441 - RNA, 19 nt, Homo sapiens
  misc_RNA (1)...(19): siRNA sense strand
cugcauccaucauuuauug

SEQ ID NO: 1866442 - RNA, 19 nt, Homo sapiens
  misc_RNA (1)...(19): siRNA sense strand
gaugaaagaccauucuauc

SEQ ID NO: 1866443 - RNA, 19 nt, Homo sapiens
  misc_RNA (1)...(19): siRNA sense strand
ccagcuauagcaauuaaua

SEQ ID NO: 1866444 - RNA, 19 nt, Homo sapiens
  misc_RNA (1)...(19): siRNA sense strand
caacguagaccagcuauag

SEQ ID NO: 1866445 - RNA, 19 nt, Homo sapiens
  misc_RNA (1)...(19): siRNA sense strand
gcaaacccagcuguaguua

SEQ ID NO: 1866446 - RNA, 19 nt, Homo sapiens
  misc_RNA (1)...(19): siRNA sense strand
ccaugagaaugaugaaaga

SEQ ID NO: 1866447 - RNA, 19 nt, Homo sapiens
  misc_RNA (1)...(19): siRNA sense strand
uagaccagcuauagcaauu

SEQ ID NO: 1866448 - RNA, 19 nt, Homo sapiens
  misc_RNA (1)...(19): siRNA sense strand
cuccauaugucccaaugua

SEQ ID NO: 1866449 - RNA, 19 nt, Homo sapiens
  misc_RNA (1)...(19): siRNA sense strand
aaacccagcuguaguuagg

SEQ ID NO: 1866450 - RNA, 19 nt, Homo sapiens
  misc_RNA (1)...(19): siRNA sense strand
aaucaucccuaccaucaau

SEQ ID NO: 1866451 - RNA, 19 nt, Homo sapiens
  misc_RNA (1)...(19): siRNA sense strand
ccauaugucccaauguauu

SEQ ID NO: 1866452 - RNA, 19 nt, Homo sapiens
  misc_RNA (1)...(19): siRNA sense strand
uagcuauccuuauuaugga

SEQ ID NO: 1866453 - RNA, 19 nt, Homo sapiens
  misc_RNA (1)...(19): siRNA sense strand
uaccauugcuacuguugaa

SEQ ID NO: 1866454 - RNA, 19 nt, Homo sapiens
  misc_RNA (1)...(19): siRNA sense strand
ugccaaauagcuauccuua

SEQ ID NO: 1866455 - RNA, 19 nt, Homo sapiens
  misc_RNA (1)...(19): siRNA sense strand
ccaaagaaaauucaggaua

SEQ ID NO: 1866456 - RNA, 19 nt, Homo sapiens
  misc_RNA (1)...(19): siRNA sense strand
caccagcuccugccacuga

SEQ ID NO: 1866457 - RNA, 19 nt, Homo sapiens
  misc_RNA (1)...(19): siRNA sense strand
aaccaacgguggacagugu

SEQ ID NO: 1866458 - RNA, 19 nt, Homo sapiens
  misc_RNA (1)...(19): siRNA sense strand
uaggccacaugcccaaauu

SEQ ID NO: 1866459 - RNA, 19 nt, Homo sapiens
  misc_RNA (1)...(19): siRNA sense strand
caaaccugcauccaucauu

SEQ ID NO: 1866460 - RNA, 19 nt, Homo sapiens
  misc_RNA (1)...(19): siRNA sense strand
ugaaagaccauucuaucag

SEQ ID NO: 1866461 - RNA, 19 nt, Homo sapiens
  misc_RNA (1)...(19): siRNA sense strand
uuacuccaccuacggcaua

SEQ ID NO: 1866462 - RNA, 19 nt, Homo sapiens
  misc_RNA (1)...(19): siRNA sense strand
caauguauuaugugccaaa

SEQ ID NO: 1866463 - RNA, 19 nt, Homo sapiens
  misc_RNA (1)...(19): siRNA sense strand
auaaucaucccuaccauca

SEQ ID NO: 1866464 - RNA, 19 nt, Homo sapiens
  misc_RNA (1)...(19): siRNA sense strand
caauuuguaccaacguaga

SEQ ID NO: 1866465 - RNA, 19 nt, Homo sapiens
  misc_RNA (1)...(19): siRNA sense strand
gccaugagaaugaugaaag

SEQ ID NO: 1866466 - RNA, 19 nt, Homo sapiens
  misc_RNA (1)...(19): siRNA sense strand
ugaugaaagaccauucuau

SEQ ID NO: 1866467 - RNA, 19 nt, Homo sapiens
  misc_RNA (1)...(19): siRNA sense strand
guagaccagcuauagcaau

SEQ ID NO: 1866468 - RNA, 19 nt, Homo sapiens
  misc_RNA (1)...(19): siRNA sense strand
aaccugcauccaucauuua

SEQ ID NO: 1866469 - RNA, 19 nt, Homo sapiens
  misc_RNA (1)...(19): siRNA sense strand
uguagucacuccagaagcu

SEQ ID NO: 1866470 - RNA, 19 nt, Homo sapiens
  misc_RNA (1)...(19): siRNA sense strand
gccaaauagcuauccuuau

SEQ ID NO: 1866471 - RNA, 19 nt, Homo sapiens
  misc_RNA (1)...(19): siRNA sense strand
auagcuauccuuauuaugg

SEQ ID NO: 1866472 - RNA, 19 nt, Homo sapiens
  misc_RNA (1)...(19): siRNA sense strand
aaauaaucaucccuaccau

SEQ ID NO: 1866473 - RNA, 19 nt, Homo sapiens
  misc_RNA (1)...(19): siRNA sense strand
ucagaaaacagcuccauau

SEQ ID NO: 1866474 - RNA, 19 nt, Homo sapiens
  misc_RNA (1)...(19): siRNA sense strand
gaagaacucugucuggauu

SEQ ID NO: 1866475 - RNA, 19 nt, Homo sapiens
  misc_RNA (1)...(19): siRNA sense strand
gagaaugucuguuaugaug

SEQ ID NO: 1866476 - RNA, 19 nt, Homo sapiens
  misc_RNA (1)...(19): siRNA sense strand
gaggagaauccaucuauua

SEQ ID NO: 1866477 - RNA, 19 nt, Homo sapiens
  misc_RNA (1)...(19): siRNA sense strand
ucacaaccauuccacauuu

SEQ ID NO: 1866478 - RNA, 19 nt, Homo sapiens
  misc_RNA (1)...(19): siRNA sense strand
gagacucacuaaacaguaa

SEQ ID NO: 1866479 - RNA, 19 nt, Homo sapiens
  misc_RNA (1)...(19): siRNA sense strand
gcaaugcgcuggaaacaac

SEQ ID NO: 1866480 - RNA, 19 nt, Homo sapiens
  misc_RNA (1)...(19): siRNA sense strand
gagaauccaucuauuacga

SEQ ID NO: 1866481 - RNA, 19 nt, Homo sapiens
  misc_RNA (1)...(19): siRNA sense strand
ggaggagaauccaucuauu

SEQ ID NO: 1866482 - RNA, 19 nt, Homo sapiens
  misc_RNA (1)...(19): siRNA sense strand
cgaagaggauccuaugaug

SEQ ID NO: 1866483 - RNA, 19 nt, Homo sapiens
  misc_RNA (1)...(19): siRNA sense strand
uaacauugcugucaaacca

SEQ ID NO: 1866484 - RNA, 19 nt, Homo sapiens
  misc_RNA (1)...(19): siRNA sense strand
gcugugagaaugucuguua

SEQ ID NO: 1866485 - RNA, 19 nt, Homo sapiens
  misc_RNA (1)...(19): siRNA sense strand
guuagaaagugauaaggaa

SEQ ID NO: 1866486 - RNA, 19 nt, Homo sapiens
  misc_RNA (1)...(19): siRNA sense strand
gugagaaugucuguuauga

SEQ ID NO: 1866487 - RNA, 19 nt, Homo sapiens
  misc_RNA (1)...(19): siRNA sense strand
gagcaagcccuaugcaaug

SEQ ID NO: 1866488 - RNA, 19 nt, Homo sapiens
  misc_RNA (1)...(19): siRNA sense strand
gcaccucucucccauguac

SEQ ID NO: 1866489 - RNA, 19 nt, Homo sapiens
  misc_RNA (1)...(19): siRNA sense strand
gcuauaacauugcugucaa

SEQ ID NO: 1866490 - RNA, 19 nt, Homo sapiens
  misc_RNA (1)...(19): siRNA sense strand
uaagaucgccuacaagcaa

SEQ ID NO: 1866491 - RNA, 19 nt, Homo sapiens
  misc_RNA (1)...(19): siRNA sense strand
agacuuccuuguccucaua

SEQ ID NO: 1866492 - RNA, 19 nt, Homo sapiens
  misc_RNA (1)...(19): siRNA sense strand
cauaagauagacugcuuua

SEQ ID NO: 1866493 - RNA, 19 nt, Homo sapiens
  misc_RNA (1)...(19): siRNA sense strand
gcaacucccucugugaugu

SEQ ID NO: 1866494 - RNA, 19 nt, Homo sapiens
  misc_RNA (1)...(19): siRNA sense strand
gcuaugcuauccacaagau

SEQ ID NO: 1866495 - RNA, 19 nt, Homo sapiens
  misc_RNA (1)...(19): siRNA sense strand
ggagcaagcccuaugcaau

SEQ ID NO: 1866496 - RNA, 19 nt, Homo sapiens
  misc_RNA (1)...(19): siRNA sense strand
gaccaucuuccuucugaua

SEQ ID NO: 1866497 - RNA, 19 nt, Homo sapiens
  misc_RNA (1)...(19): siRNA sense strand
aagaggauccuaugaugua

SEQ ID NO: 1866498 - RNA, 19 nt, Homo sapiens
  misc_RNA (1)...(19): siRNA sense strand
gaagaggauccuaugaugu

SEQ ID NO: 1866499 - RNA, 19 nt, Homo sapiens
  misc_RNA (1)...(19): siRNA sense strand
gagauggaguuagaaagug

SEQ ID NO: 1866500 - RNA, 19 nt, Homo sapiens
  misc_RNA (1)...(19): siRNA sense strand
uuugggagaugcuucauuu

SEQ ID NO: 1866501 - RNA, 19 nt, Homo sapiens
  misc_RNA (1)...(19): siRNA sense strand
caacgaagaggauccuaug

SEQ ID NO: 1866502 - RNA, 19 nt, Homo sapiens
  misc_RNA (1)...(19): siRNA sense strand
gaagaugggcucaugaaaa

SEQ ID NO: 1866503 - RNA, 19 nt, Homo sapiens
  misc_RNA (1)...(19): siRNA sense strand
ggaagaugggcucaugaaa

SEQ ID NO: 1866504 - RNA, 19 nt, Homo sapiens
  misc_RNA (1)...(19): siRNA sense strand
agaacucugucuggauuua

SEQ ID NO: 1866505 - RNA, 19 nt, Homo sapiens
  misc_RNA (1)...(19): siRNA sense strand
gagcagagccaacccaaac

SEQ ID NO: 1866506 - RNA, 19 nt, Homo sapiens
  misc_RNA (1)...(19): siRNA sense strand
ggccuuugccucuugcuua

SEQ ID NO: 1866507 - RNA, 19 nt, Homo sapiens
  misc_RNA (1)...(19): siRNA sense strand
uagaggagauucacaacca

SEQ ID NO: 1866508 - RNA, 19 nt, Homo sapiens
  misc_RNA (1)...(19): siRNA sense strand
cugauaauguaugguguua

SEQ ID NO: 1866509 - RNA, 19 nt, Homo sapiens
  misc_RNA (1)...(19): siRNA sense strand
uaugauguauccagagaug

SEQ ID NO: 1866510 - RNA, 19 nt, Homo sapiens
  misc_RNA (1)...(19): siRNA sense strand
gcuuggaucuggcaguuca

SEQ ID NO: 1866511 - RNA, 19 nt, Homo sapiens
  misc_RNA (1)...(19): siRNA sense strand
gaagaucuggcucacuguu

SEQ ID NO: 1866512 - RNA, 19 nt, Homo sapiens
  misc_RNA (1)...(19): siRNA sense strand
gggagaugcuucauuuagg

SEQ ID NO: 1866513 - RNA, 19 nt, Homo sapiens
  misc_RNA (1)...(19): siRNA sense strand
gaugcuucauuuaggguuu

SEQ ID NO: 1866514 - RNA, 19 nt, Homo sapiens
  misc_RNA (1)...(19): siRNA sense strand
gccuuugccucuugcuuaa

SEQ ID NO: 1866515 - RNA, 19 nt, Homo sapiens
  misc_RNA (1)...(19): siRNA sense strand
gaacucugucuggauuuaa

SEQ ID NO: 1866516 - RNA, 19 nt, Homo sapiens
  misc_RNA (1)...(19): siRNA sense strand
ggaagaacucugucuggau

SEQ ID NO: 1866517 - RNA, 19 nt, Homo sapiens
  misc_RNA (1)...(19): siRNA sense strand
ccuaugauguauccagaga

SEQ ID NO: 1866518 - RNA, 19 nt, Homo sapiens
  misc_RNA (1)...(19): siRNA sense strand
cuauaacauugcugucaaa

SEQ ID NO: 1866519 - RNA, 19 nt, Homo sapiens
  misc_RNA (1)...(19): siRNA sense strand
gggaagaugggcucaugaa

SEQ ID NO: 1866520 - RNA, 19 nt, Homo sapiens
  misc_RNA (1)...(19): siRNA sense strand
ggagaagaaggccaaagug

SEQ ID NO: 1866521 - RNA, 19 nt, Homo sapiens
  misc_RNA (1)...(19): siRNA sense strand
acaccgggcucuggaagaa

SEQ ID NO: 1866522 - RNA, 19 nt, Homo sapiens
  misc_RNA (1)...(19): siRNA sense strand
ugagguggguuuucugaua

SEQ ID NO: 1866523 - RNA, 19 nt, Homo sapiens
  misc_RNA (1)...(19): siRNA sense strand
ucacuguucugauugucuu

SEQ ID NO: 1866524 - RNA, 19 nt, Homo sapiens
  misc_RNA (1)...(19): siRNA sense strand
ccagagauggaguuagaaa

SEQ ID NO: 1866525 - RNA, 19 nt, Homo sapiens
  misc_RNA (1)...(19): siRNA sense strand
gauccgggugcuuauaauu

SEQ ID NO: 1866526 - RNA, 19 nt, Homo sapiens
  misc_RNA (1)...(19): siRNA sense strand
aaaucuaugugcugcaguu

SEQ ID NO: 1866527 - RNA, 19 nt, Homo sapiens
  misc_RNA (1)...(19): siRNA sense strand
ggaguuagaaagugauaag

SEQ ID NO: 1866528 - RNA, 19 nt, Homo sapiens
  misc_RNA (1)...(19): siRNA sense strand
agauggaguuagaaaguga

SEQ ID NO: 1866529 - RNA, 19 nt, Homo sapiens
  misc_RNA (1)...(19): siRNA sense strand
gggcuaugcuauccacaag

SEQ ID NO: 1866530 - RNA, 19 nt, Homo sapiens
  misc_RNA (1)...(19): siRNA sense strand
gauagacugcuuuauuucu

SEQ ID NO: 1866531 - RNA, 19 nt, Homo sapiens
  misc_RNA (1)...(19): siRNA sense strand
aaagcaaauuugugugcaa

SEQ ID NO: 1866532 - RNA, 19 nt, Homo sapiens
  misc_RNA (1)...(19): siRNA sense strand
gggagaagaaggccaaagu

SEQ ID NO: 1866533 - RNA, 19 nt, Homo sapiens
  misc_RNA (1)...(19): siRNA sense strand
ugucaaaccagaucaaauc

SEQ ID NO: 1866534 - RNA, 19 nt, Homo sapiens
  misc_RNA (1)...(19): siRNA sense strand
ggauccgggugcuuauaau

SEQ ID NO: 1866535 - RNA, 19 nt, Homo sapiens
  misc_RNA (1)...(19): siRNA sense strand
caacucccucugugaugua

SEQ ID NO: 1866536 - RNA, 19 nt, Homo sapiens
  misc_RNA (1)...(19): siRNA sense strand
caacacagcccaggaacag

SEQ ID NO: 1866537 - RNA, 19 nt, Homo sapiens
  misc_RNA (1)...(19): siRNA sense strand
augcuaagaucgccuacaa

SEQ ID NO: 1866538 - RNA, 19 nt, Homo sapiens
  misc_RNA (1)...(19): siRNA sense strand
gaacuguccaaugcuaaga

SEQ ID NO: 1866539 - RNA, 19 nt, Homo sapiens
  misc_RNA (1)...(19): siRNA sense strand
gaggagauucacaaccauu

SEQ ID NO: 1866540 - RNA, 19 nt, Homo sapiens
  misc_RNA (1)...(19): siRNA sense strand
caucuuccuucugauaaug

SEQ ID NO: 1866541 - RNA, 19 nt, Homo sapiens
  misc_RNA (1)...(19): siRNA sense strand
ccacaagauugccaaaaug

SEQ ID NO: 1866542 - RNA, 19 nt, Homo sapiens
  misc_RNA (1)...(19): siRNA sense strand
ccaaagcuggguccaacaa

SEQ ID NO: 1866543 - RNA, 19 nt, Homo sapiens
  misc_RNA (1)...(19): siRNA sense strand
cacaaccauuccacauuug

SEQ ID NO: 1866544 - RNA, 19 nt, Homo sapiens
  misc_RNA (1)...(19): siRNA sense strand
aaacggaggaggacaacga

SEQ ID NO: 1866545 - RNA, 19 nt, Homo sapiens
  misc_RNA (1)...(19): siRNA sense strand
gaggauccgggugcuuaua

SEQ ID NO: 1866546 - RNA, 19 nt, Homo sapiens
  misc_RNA (1)...(19): siRNA sense strand
uggcaaggaccguguuuga

SEQ ID NO: 1866547 - RNA, 19 nt, Homo sapiens
  misc_RNA (1)...(19): siRNA sense strand
ugucuguuaugaugcguuu

SEQ ID NO: 1866548 - RNA, 19 nt, Homo sapiens
  misc_RNA (1)...(19): siRNA sense strand
gccucuugcuuaacauuug

SEQ ID NO: 1866549 - RNA, 19 nt, Homo sapiens
  misc_RNA (1)...(19): siRNA sense strand
ggaggacaacgaagaggau

SEQ ID NO: 1866550 - RNA, 19 nt, Homo sapiens
  misc_RNA (1)...(19): siRNA sense strand
caaagcuggguccaacaaa

SEQ ID NO: 1866551 - RNA, 19 nt, Homo sapiens
  misc_RNA (1)...(19): siRNA sense strand
gaucaggauggcucaggaa

SEQ ID NO: 1866552 - RNA, 19 nt, Homo sapiens
  misc_RNA (1)...(19): siRNA sense strand
aaccagaucaaauccagua

SEQ ID NO: 1866553 - RNA, 19 nt, Homo sapiens
  misc_RNA (1)...(19): siRNA sense strand
aagaugggcucaugaaaau

SEQ ID NO: 1866554 - RNA, 19 nt, Homo sapiens
  misc_RNA (1)...(19): siRNA sense strand
gacgacggauucgggaaga

SEQ ID NO: 1866555 - RNA, 19 nt, Homo sapiens
  misc_RNA (1)...(19): siRNA sense strand
auucgagacucacuaaaca

SEQ ID NO: 1866556 - RNA, 19 nt, Homo sapiens
  misc_RNA (1)...(19): siRNA sense strand
uccgggugcuuauaauuau

SEQ ID NO: 1866557 - RNA, 19 nt, Homo sapiens
  misc_RNA (1)...(19): siRNA sense strand
cgagacucacuaaacagua

SEQ ID NO: 1866558 - RNA, 19 nt, Homo sapiens
  misc_RNA (1)...(19): siRNA sense strand
ccaucuuccuucugauaau

SEQ ID NO: 1866559 - RNA, 19 nt, Homo sapiens
  misc_RNA (1)...(19): siRNA sense strand
gggaugggaagaacucugu

SEQ ID NO: 1866560 - RNA, 19 nt, Homo sapiens
  misc_RNA (1)...(19): siRNA sense strand
aagaucgccuacaagcaaa

SEQ ID NO: 1866561 - RNA, 19 nt, Homo sapiens
  misc_RNA (1)...(19): siRNA sense strand
ggaggaggacaacgaagag

SEQ ID NO: 1866562 - RNA, 19 nt, Homo sapiens
  misc_RNA (1)...(19): siRNA sense strand
agacugcuuuauuucuaga

SEQ ID NO: 1866563 - RNA, 19 nt, Homo sapiens
  misc_RNA (1)...(19): siRNA sense strand
agagauggaguuagaaagu

SEQ ID NO: 1866564 - RNA, 19 nt, Homo sapiens
  misc_RNA (1)...(19): siRNA sense strand
uaugcuauccacaagauug

SEQ ID NO: 1866565 - RNA, 19 nt, Homo sapiens
  misc_RNA (1)...(19): siRNA sense strand
ggccaacacagcccaggaa

SEQ ID NO: 1866566 - RNA, 19 nt, Homo sapiens
  misc_RNA (1)...(19): siRNA sense strand
uauccuuucacuuggaaua

SEQ ID NO: 1866567 - RNA, 19 nt, Homo sapiens
  misc_RNA (1)...(19): siRNA sense strand
aacccaaaccuaagcauga

SEQ ID NO: 1866568 - RNA, 19 nt, Homo sapiens
  misc_RNA (1)...(19): siRNA sense strand
cuggcucacuguucugauu

SEQ ID NO: 1866569 - RNA, 19 nt, Homo sapiens
  misc_RNA (1)...(19): siRNA sense strand
agagccaacccaaaccuaa

SEQ ID NO: 1866570 - RNA, 19 nt, Homo sapiens
  misc_RNA (1)...(19): siRNA sense strand
cgaugagcaaagcaaauuu

SEQ ID NO: 1866571 - RNA, 19 nt, Homo sapiens
  misc_RNA (1)...(19): siRNA sense strand
cagaucaaauccaguacac

SEQ ID NO: 1866572 - RNA, 19 nt, Homo sapiens
  misc_RNA (1)...(19): siRNA sense strand
cucauaagauagacugcuu

SEQ ID NO: 1866573 - RNA, 19 nt, Homo sapiens
  misc_RNA (1)...(19): siRNA sense strand
uccuuguccucauaagaua

SEQ ID NO: 1866574 - RNA, 19 nt, Homo sapiens
  misc_RNA (1)...(19): siRNA sense strand
gagaugacauugaaauuug

SEQ ID NO: 1866575 - RNA, 19 nt, Homo sapiens
  misc_RNA (1)...(19): siRNA sense strand
gaacaugaauucaagaaag

SEQ ID NO: 1866576 - RNA, 19 nt, Homo sapiens
  misc_RNA (1)...(19): siRNA sense strand
gcaaugagguggcccaguu

SEQ ID NO: 1866577 - RNA, 19 nt, Homo sapiens
  misc_RNA (1)...(19): siRNA sense strand
ggacagagauuuacaaacg

SEQ ID NO: 1866578 - RNA, 19 nt, Homo sapiens
  misc_RNA (1)...(19): siRNA sense strand
caagaaagcugcagaugag

SEQ ID NO: 1866579 - RNA, 19 nt, Homo sapiens
  misc_RNA (1)...(19): siRNA sense strand
ccaacuagauuccugaaga

SEQ ID NO: 1866580 - RNA, 19 nt, Homo sapiens
  misc_RNA (1)...(19): siRNA sense strand
ugaacuagcuagcuccuuu

SEQ ID NO: 1866581 - RNA, 19 nt, Homo sapiens
  misc_RNA (1)...(19): siRNA sense strand
caacuagauuccugaagaa

SEQ ID NO: 1866582 - RNA, 19 nt, Homo sapiens
  misc_RNA (1)...(19): siRNA sense strand
gaacugagcaugccgauac

SEQ ID NO: 1866583 - RNA, 19 nt, Homo sapiens
  misc_RNA (1)...(19): siRNA sense strand
gagcagagccagauucuca

SEQ ID NO: 1866584 - RNA, 19 nt, Homo sapiens
  misc_RNA (1)...(19): siRNA sense strand
gaagaaggccgaagaacuc

SEQ ID NO: 1866585 - RNA, 19 nt, Homo sapiens
  misc_RNA (1)...(19): siRNA sense strand
caccaagucuccucaauca

SEQ ID NO: 1866586 - RNA, 19 nt, Homo sapiens
  misc_RNA (1)...(19): siRNA sense strand
acucaaggcuauuuagaaa

SEQ ID NO: 1866587 - RNA, 19 nt, Homo sapiens
  misc_RNA (1)...(19): siRNA sense strand
uaacaguaguggcuccauu

SEQ ID NO: 1866588 - RNA, 19 nt, Homo sapiens
  misc_RNA (1)...(19): siRNA sense strand
gaucaaacgccuacuccaa

SEQ ID NO: 1866589 - RNA, 19 nt, Homo sapiens
  misc_RNA (1)...(19): siRNA sense strand
ucaagaaagcugcagauga

SEQ ID NO: 1866590 - RNA, 19 nt, Homo sapiens
  misc_RNA (1)...(19): siRNA sense strand
caagucuccucaaucaaug

SEQ ID NO: 1866591 - RNA, 19 nt, Homo sapiens
  misc_RNA (1)...(19): siRNA sense strand
ccaagucuccucaaucaau

SEQ ID NO: 1866592 - RNA, 19 nt, Homo sapiens
  misc_RNA (1)...(19): siRNA sense strand
caaccucugucaucacaca

SEQ ID NO: 1866593 - RNA, 19 nt, Homo sapiens
  misc_RNA (1)...(19): siRNA sense strand
ccaccucgguccucacuca

SEQ ID NO: 1866594 - RNA, 19 nt, Homo sapiens
  misc_RNA (1)...(19): siRNA sense strand
ccaccuggcaguucauaaa

SEQ ID NO: 1866595 - RNA, 19 nt, Homo sapiens
  misc_RNA (1)...(19): siRNA sense strand
caauggugguuguggaaug

SEQ ID NO: 1866596 - RNA, 19 nt, Homo sapiens
  misc_RNA (1)...(19): siRNA sense strand
gaacuagcuagcuccuuug

SEQ ID NO: 1866597 - RNA, 19 nt, Homo sapiens
  misc_RNA (1)...(19): siRNA sense strand
gacagagauuuacaaacga

SEQ ID NO: 1866598 - RNA, 19 nt, Homo sapiens
  misc_RNA (1)...(19): siRNA sense strand
ucaugcaucuugcuaaugg

SEQ ID NO: 1866599 - RNA, 19 nt, Homo sapiens
  misc_RNA (1)...(19): siRNA sense strand
gaagccaagaugagacuga

SEQ ID NO: 1866600 - RNA, 19 nt, Homo sapiens
  misc_RNA (1)...(19): siRNA sense strand
agcaugagaugacauugaa

SEQ ID NO: 1866601 - RNA, 19 nt, Homo sapiens
  misc_RNA (1)...(19): siRNA sense strand
cuagcuagcuccuuugaac

SEQ ID NO: 1866602 - RNA, 19 nt, Homo sapiens
  misc_RNA (1)...(19): siRNA sense strand
gaggugggacucuucaaug

SEQ ID NO: 1866603 - RNA, 19 nt, Homo sapiens
  misc_RNA (1)...(19): siRNA sense strand
cuagauuccugaagaacug

SEQ ID NO: 1866604 - RNA, 19 nt, Homo sapiens
  misc_RNA (1)...(19): siRNA sense strand
gaaagcugcagaugaggau

SEQ ID NO: 1866605 - RNA, 19 nt, Homo sapiens
  misc_RNA (1)...(19): siRNA sense strand
ggagacgacagaccguuug

SEQ ID NO: 1866606 - RNA, 19 nt, Homo sapiens
  misc_RNA (1)...(19): siRNA sense strand
ucaaggcuauuuagaaagc

SEQ ID NO: 1866607 - RNA, 19 nt, Homo sapiens
  misc_RNA (1)...(19): siRNA sense strand
ggaggugggacucuucaau

SEQ ID NO: 1866608 - RNA, 19 nt, Homo sapiens
  misc_RNA (1)...(19): siRNA sense strand
cagcacagcucagcaacag

SEQ ID NO: 1866609 - RNA, 19 nt, Homo sapiens
  misc_RNA (1)...(19): siRNA sense strand
cacccuaacucaccaaguc

SEQ ID NO: 1866610 - RNA, 19 nt, Homo sapiens
  misc_RNA (1)...(19): siRNA sense strand
ugaaagccacccuaacuca

SEQ ID NO: 1866611 - RNA, 19 nt, Homo sapiens
  misc_RNA (1)...(19): siRNA sense strand
cccaaagccuguucugauc

SEQ ID NO: 1866612 - RNA, 19 nt, Homo sapiens
  misc_RNA (1)...(19): siRNA sense strand
cacaguagaugaagaucca

SEQ ID NO: 1866613 - RNA, 19 nt, Homo sapiens
  misc_RNA (1)...(19): siRNA sense strand
gacucaaggcuauuuagaa

SEQ ID NO: 1866614 - RNA, 19 nt, Homo sapiens
  misc_RNA (1)...(19): siRNA sense strand
acuguuagcucauaaagac

SEQ ID NO: 1866615 - RNA, 19 nt, Homo sapiens
  misc_RNA (1)...(19): siRNA sense strand
gcugaguaaugaagucaca

SEQ ID NO: 1866616 - RNA, 19 nt, Homo sapiens
  misc_RNA (1)...(19): siRNA sense strand
gacgacagaccguuugugu

SEQ ID NO: 1866617 - RNA, 19 nt, Homo sapiens
  misc_RNA (1)...(19): siRNA sense strand
uagaugaagauccagauga

SEQ ID NO: 1866618 - RNA, 19 nt, Homo sapiens
  misc_RNA (1)...(19): siRNA sense strand
gcccaccaguuaacaguag

SEQ ID NO: 1866619 - RNA, 19 nt, Homo sapiens
  misc_RNA (1)...(19): siRNA sense strand
gggagacgacagaccguuu

SEQ ID NO: 1866620 - RNA, 19 nt, Homo sapiens
  misc_RNA (1)...(19): siRNA sense strand
cauaaacacaagcaugaga

SEQ ID NO: 1866621 - RNA, 19 nt, Homo sapiens
  misc_RNA (1)...(19): siRNA sense strand
agacugaaagccacccuaa

SEQ ID NO: 1866622 - RNA, 19 nt, Homo sapiens
  misc_RNA (1)...(19): siRNA sense strand
ugucaugcaucuugcuaau

SEQ ID NO: 1866623 - RNA, 19 nt, Homo sapiens
  misc_RNA (1)...(19): siRNA sense strand
agaaggagguuaccccaaa

SEQ ID NO: 1866624 - RNA, 19 nt, Homo sapiens
  misc_RNA (1)...(19): siRNA sense strand
aaagacucaaggcuauuua

SEQ ID NO: 1866625 - RNA, 19 nt, Homo sapiens
  misc_RNA (1)...(19): siRNA sense strand
caugagaugacauugaaau

SEQ ID NO: 1866626 - RNA, 19 nt, Homo sapiens
  misc_RNA (1)...(19): siRNA sense strand
caaagccuguucugaucuc

SEQ ID NO: 1866627 - RNA, 19 nt, Homo sapiens
  misc_RNA (1)...(19): siRNA sense strand
aggugggacucuucaauga

SEQ ID NO: 1866628 - RNA, 19 nt, Homo sapiens
  misc_RNA (1)...(19): siRNA sense strand
ugagguggcccaguugaaa

SEQ ID NO: 1866629 - RNA, 19 nt, Homo sapiens
  misc_RNA (1)...(19): siRNA sense strand
acacaagcaugagaugaca

SEQ ID NO: 1866630 - RNA, 19 nt, Homo sapiens
  misc_RNA (1)...(19): siRNA sense strand
gaugccgucuguuauaucg

SEQ ID NO: 1866631 - RNA, 19 nt, Homo sapiens
  misc_RNA (1)...(19): siRNA sense strand
uagagaagaaggccgaaga

SEQ ID NO: 1866632 - RNA, 19 nt, Homo sapiens
  misc_RNA (1)...(19): siRNA sense strand
ugauagcccugccucuagu

SEQ ID NO: 1866633 - RNA, 19 nt, Homo sapiens
  misc_RNA (1)...(19): siRNA sense strand
cagaacauucagcugagua

SEQ ID NO: 1866634 - RNA, 19 nt, Homo sapiens
  misc_RNA (1)...(19): siRNA sense strand
agaugaagauccagaugag

SEQ ID NO: 1866635 - RNA, 19 nt, Homo sapiens
  misc_RNA (1)...(19): siRNA sense strand
aaacacaagcaugagauga

SEQ ID NO: 1866636 - RNA, 19 nt, Homo sapiens
  misc_RNA (1)...(19): siRNA sense strand
cuagcuccuuugaacauga

SEQ ID NO: 1866637 - RNA, 19 nt, Homo sapiens
  misc_RNA (1)...(19): siRNA sense strand
gaacauucagcugaguaau

SEQ ID NO: 1866638 - RNA, 19 nt, Homo sapiens
  misc_RNA (1)...(19): siRNA sense strand
ucaaacgccuacuccaacu

SEQ ID NO: 1866639 - RNA, 19 nt, Homo sapiens
  misc_RNA (1)...(19): siRNA sense strand
uguccucccuagagaagaa

SEQ ID NO: 1866640 - RNA, 19 nt, Homo sapiens
  misc_RNA (1)...(19): siRNA sense strand
gcgcacaguagaugaagau

SEQ ID NO: 1866641 - RNA, 19 nt, Homo sapiens
  misc_RNA (1)...(19): siRNA sense strand
gcuagcuccuuugaacaug

SEQ ID NO: 1866642 - RNA, 19 nt, Homo sapiens
  misc_RNA (1)...(19): siRNA sense strand
ccucuugucaugcaucuug

SEQ ID NO: 1866643 - RNA, 19 nt, Homo sapiens
  misc_RNA (1)...(19): siRNA sense strand
gugaggaggugggacucuu

SEQ ID NO: 1866644 - RNA, 19 nt, Homo sapiens
  misc_RNA (1)...(19): siRNA sense strand
guggacagagauuuacaaa

SEQ ID NO: 1866645 - RNA, 19 nt, Homo sapiens
  misc_RNA (1)...(19): siRNA sense strand
caaacgccuacuccaacua

SEQ ID NO: 1866646 - RNA, 19 nt, Homo sapiens
  misc_RNA (1)...(19): siRNA sense strand
acaagcaugagaugacauu

SEQ ID NO: 1866647 - RNA, 19 nt, Homo sapiens
  misc_RNA (1)...(19): siRNA sense strand
caguggagguagacucauc

SEQ ID NO: 1866648 - RNA, 19 nt, Homo sapiens
  misc_RNA (1)...(19): siRNA sense strand
acagaccguuugugugcaa

SEQ ID NO: 1866649 - RNA, 19 nt, Homo sapiens
  misc_RNA (1)...(19): siRNA sense strand
gcagaucaaacgccuacuc

SEQ ID NO: 1866650 - RNA, 19 nt, Homo sapiens
  misc_RNA (1)...(19): siRNA sense strand
uaaacacaagcaugagaug

SEQ ID NO: 1866651 - RNA, 19 nt, Homo sapiens
  misc_RNA (1)...(19): siRNA sense strand
aagcaugagaugacauuga

SEQ ID NO: 1866652 - RNA, 19 nt, Homo sapiens
  misc_RNA (1)...(19): siRNA sense strand
guagaugaagauccagaug

SEQ ID NO: 1866653 - RNA, 19 nt, Homo sapiens
  misc_RNA (1)...(19): siRNA sense strand
cccaaccucugucaucaca

SEQ ID NO: 1866654 - RNA, 19 nt, Homo sapiens
  misc_RNA (1)...(19): siRNA sense strand
ccugauagcccugccucua

SEQ ID NO: 1866655 - RNA, 19 nt, Homo sapiens
  misc_RNA (1)...(19): siRNA sense strand
uagcuccuuugaacaugaa

SEQ ID NO: 1866656 - RNA, 19 nt, Homo sapiens
  misc_RNA (1)...(19): siRNA sense strand
gcccaacauuccugguauc

SEQ ID NO: 1866657 - RNA, 19 nt, Homo sapiens
  misc_RNA (1)...(19): siRNA sense strand
aagccaagaugagacugaa

SEQ ID NO: 1866658 - RNA, 19 nt, Homo sapiens
  misc_RNA (1)...(19): siRNA sense strand
aguaguggcuccauuucuc

SEQ ID NO: 1866659 - RNA, 19 nt, Homo sapiens
  misc_RNA (1)...(19): siRNA sense strand
agaacauucagcugaguaa

SEQ ID NO: 1866660 - RNA, 19 nt, Homo sapiens
  misc_RNA (1)...(19): siRNA sense strand
agaagaaggccgaagaacu

SEQ ID NO: 1866661 - RNA, 19 nt, Homo sapiens
  misc_RNA (1)...(19): siRNA sense strand
gcagagccagauucucauc

SEQ ID NO: 1866662 - RNA, 19 nt, Homo sapiens
  misc_RNA (1)...(19): siRNA sense strand
caccagacaucaaaaucaa

SEQ ID NO: 1866663 - RNA, 19 nt, Homo sapiens
  misc_RNA (1)...(19): siRNA sense strand
uuagaaagccccaaggaaa

SEQ ID NO: 1866664 - RNA, 19 nt, Homo sapiens
  misc_RNA (1)...(19): siRNA sense strand
agagaagaaggccgaagaa

SEQ ID NO: 1866665 - RNA, 19 nt, Homo sapiens
  misc_RNA (1)...(19): siRNA sense strand
ucaccaagucuccucaauc

SEQ ID NO: 1866666 - RNA, 19 nt, Homo sapiens
  misc_RNA (1)...(19): siRNA sense strand
gccaagaugagacugaaag

SEQ ID NO: 1866667 - RNA, 19 nt, Homo sapiens
  misc_RNA (1)...(19): siRNA sense strand
gugcccaacauuccuggua

SEQ ID NO: 1866668 - RNA, 19 nt, Homo sapiens
  misc_RNA (1)...(19): siRNA sense strand
ccagaccuguguccauggu

SEQ ID NO: 1866669 - RNA, 19 nt, Homo sapiens
  misc_RNA (1)...(19): siRNA sense strand
agucaucauugcagaucaa

SEQ ID NO: 1866670 - RNA, 19 nt, Homo sapiens
  misc_RNA (1)...(19): siRNA sense strand
ugaaggagaaggagguuac

SEQ ID NO: 1866671 - RNA, 19 nt, Homo sapiens
  misc_RNA (1)...(19): siRNA sense strand
ccagagcagagccagauuc

SEQ ID NO: 1866672 - RNA, 19 nt, Homo sapiens
  misc_RNA (1)...(19): siRNA sense strand
agacucaaggcuauuuaga

SEQ ID NO: 1866673 - RNA, 19 nt, Homo sapiens
  misc_RNA (1)...(19): siRNA sense strand
gcucagcccaccccuagua

SEQ ID NO: 1866674 - RNA, 19 nt, Homo sapiens
  misc_RNA (1)...(19): siRNA sense strand
gaacagagaucaggucuua

SEQ ID NO: 1866675 - RNA, 19 nt, Homo sapiens
  misc_RNA (1)...(19): siRNA sense strand
caaaugagcuagaucuuga

SEQ ID NO: 1866676 - RNA, 19 nt, Homo sapiens
  misc_RNA (1)...(19): siRNA sense strand
ccucagagcuccauucuug

SEQ ID NO: 1866677 - RNA, 19 nt, Homo sapiens
  misc_RNA (1)...(19): siRNA sense strand
gagaauaacccuaugaaug

SEQ ID NO: 1866678 - RNA, 19 nt, Homo sapiens
  misc_RNA (1)...(19): siRNA sense strand
gcaagcaaaugugaucuuu

SEQ ID NO: 1866679 - RNA, 19 nt, Homo sapiens
  misc_RNA (1)...(19): siRNA sense strand
gaucaggucuuauggcaau

SEQ ID NO: 1866680 - RNA, 19 nt, Homo sapiens
  misc_RNA (1)...(19): siRNA sense strand
ccacggagccauuuacuuu

SEQ ID NO: 1866681 - RNA, 19 nt, Homo sapiens
  misc_RNA (1)...(19): siRNA sense strand
gggaucagcuauucgauuc

SEQ ID NO: 1866682 - RNA, 19 nt, Homo sapiens
  misc_RNA (1)...(19): siRNA sense strand
ccacagggaucagcuauuc

SEQ ID NO: 1866683 - RNA, 19 nt, Homo sapiens
  misc_RNA (1)...(19): siRNA sense strand
gcaggucccuccauugaca

SEQ ID NO: 1866684 - RNA, 19 nt, Homo sapiens
  misc_RNA (1)...(19): siRNA sense strand
cauuacugcuggagaauaa

SEQ ID NO: 1866685 - RNA, 19 nt, Homo sapiens
  misc_RNA (1)...(19): siRNA sense strand
ucaagacccuucuccaaau

SEQ ID NO: 1866686 - RNA, 19 nt, Homo sapiens
  misc_RNA (1)...(19): siRNA sense strand
gaagaugucacccuugcaa

SEQ ID NO: 1866687 - RNA, 19 nt, Homo sapiens
  misc_RNA (1)...(19): siRNA sense strand
ccaaguuacuggcauguca

SEQ ID NO: 1866688 - RNA, 19 nt, Homo sapiens
  misc_RNA (1)...(19): siRNA sense strand
gggcucaccauuuguagua

SEQ ID NO: 1866689 - RNA, 19 nt, Homo sapiens
  misc_RNA (1)...(19): siRNA sense strand
ccacuguuccuuacuauga

SEQ ID NO: 1866690 - RNA, 19 nt, Homo sapiens
  misc_RNA (1)...(19): siRNA sense strand
caagacccuucuccaaaug

SEQ ID NO: 1866691 - RNA, 19 nt, Homo sapiens
  misc_RNA (1)...(19): siRNA sense strand
gcagcuccuuugcucauga

SEQ ID NO: 1866692 - RNA, 19 nt, Homo sapiens
  misc_RNA (1)...(19): siRNA sense strand
agaauaacccuaugaaugg

SEQ ID NO: 1866693 - RNA, 19 nt, Homo sapiens
  misc_RNA (1)...(19): siRNA sense strand
ggccuugccuugaagaugu

SEQ ID NO: 1866694 - RNA, 19 nt, Homo sapiens
  misc_RNA (1)...(19): siRNA sense strand
cagauagugucaccgaguu

SEQ ID NO: 1866695 - RNA, 19 nt, Homo sapiens
  misc_RNA (1)...(19): siRNA sense strand
caagcaaaugugaucuuua

SEQ ID NO: 1866696 - RNA, 19 nt, Homo sapiens
  misc_RNA (1)...(19): siRNA sense strand
ccaggacucucuccaccuu

SEQ ID NO: 1866697 - RNA, 19 nt, Homo sapiens
  misc_RNA (1)...(19): siRNA sense strand
ucaccgaguucuucaaugg

SEQ ID NO: 1866698 - RNA, 19 nt, Homo sapiens
  misc_RNA (1)...(19): siRNA sense strand
gcagcagccugaccauucu

SEQ ID NO: 1866699 - RNA, 19 nt, Homo sapiens
  misc_RNA (1)...(19): siRNA sense strand
uagaggagcucaccaaaau

SEQ ID NO: 1866700 - RNA, 19 nt, Homo sapiens
  misc_RNA (1)...(19): siRNA sense strand
gaucaguggccucagauuc

SEQ ID NO: 1866701 - RNA, 19 nt, Homo sapiens
  misc_RNA (1)...(19): siRNA sense strand
cuacagaagugggacugaa

SEQ ID NO: 1866702 - RNA, 19 nt, Homo sapiens
  misc_RNA (1)...(19): siRNA sense strand
ugagcuagaucuugagaag

SEQ ID NO: 1866703 - RNA, 19 nt, Homo sapiens
  misc_RNA (1)...(19): siRNA sense strand
ggagaauaacccuaugaau

SEQ ID NO: 1866704 - RNA, 19 nt, Homo sapiens
  misc_RNA (1)...(19): siRNA sense strand
gggcuacccuaauaaaauu

SEQ ID NO: 1866705 - RNA, 19 nt, Homo sapiens
  misc_RNA (1)...(19): siRNA sense strand
ccaaaugagcuagaucuug

SEQ ID NO: 1866706 - RNA, 19 nt, Homo sapiens
  misc_RNA (1)...(19): siRNA sense strand
gugucaccgucuaacauua

SEQ ID NO: 1866707 - RNA, 19 nt, Homo sapiens
  misc_RNA (1)...(19): siRNA sense strand
gcauggacuucugcagcua

SEQ ID NO: 1866708 - RNA, 19 nt, Homo sapiens
  misc_RNA (1)...(19): siRNA sense strand
ggcccacuguuccuuacua

SEQ ID NO: 1866709 - RNA, 19 nt, Homo sapiens
  misc_RNA (1)...(19): siRNA sense strand
gcaaaugugaucuuuaagc

SEQ ID NO: 1866710 - RNA, 19 nt, Homo sapiens
  misc_RNA (1)...(19): siRNA sense strand
gcccugcucucacucaaca

SEQ ID NO: 1866711 - RNA, 19 nt, Homo sapiens
  misc_RNA (1)...(19): siRNA sense strand
cauguccucuaccaucaaa

SEQ ID NO: 1866712 - RNA, 19 nt, Homo sapiens
  misc_RNA (1)...(19): siRNA sense strand
ucuaguugcagccaaguua

SEQ ID NO: 1866713 - RNA, 19 nt, Homo sapiens
  misc_RNA (1)...(19): siRNA sense strand
acagagaucaggucuuaug

SEQ ID NO: 1866714 - RNA, 19 nt, Homo sapiens
  misc_RNA (1)...(19): siRNA sense strand
gcagcaagcaaaugugauc

SEQ ID NO: 1866715 - RNA, 19 nt, Homo sapiens
  misc_RNA (1)...(19): siRNA sense strand
ugaccauucuucauuccuu

SEQ ID NO: 1866716 - RNA, 19 nt, Homo sapiens
  misc_RNA (1)...(19): siRNA sense strand
gcaagaggaacagagauca

SEQ ID NO: 1866717 - RNA, 19 nt, Homo sapiens
  misc_RNA (1)...(19): siRNA sense strand
agucauuacugcuggagaa

SEQ ID NO: 1866718 - RNA, 19 nt, Homo sapiens
  misc_RNA (1)...(19): siRNA sense strand
gcccuaugcuccugagaag

SEQ ID NO: 1866719 - RNA, 19 nt, Homo sapiens
  misc_RNA (1)...(19): siRNA sense strand
ggucuguugccaucuguuu

SEQ ID NO: 1866720 - RNA, 19 nt, Homo sapiens
  misc_RNA (1)...(19): siRNA sense strand
cagcagcaagcaaauguga

SEQ ID NO: 1866721 - RNA, 19 nt, Homo sapiens
  misc_RNA (1)...(19): siRNA sense strand
cccaaugccuuacugucaa

SEQ ID NO: 1866722 - RNA, 19 nt, Homo sapiens
  misc_RNA (1)...(19): siRNA sense strand
gcuagaggagcucaccaaa

SEQ ID NO: 1866723 - RNA, 19 nt, Homo sapiens
  misc_RNA (1)...(19): siRNA sense strand
ggagccacggagccauuua

SEQ ID NO: 1866724 - RNA, 19 nt, Homo sapiens
  misc_RNA (1)...(19): siRNA sense strand
gccuuacugucaagcauga

SEQ ID NO: 1866725 - RNA, 19 nt, Homo sapiens
  misc_RNA (1)...(19): siRNA sense strand
ucgauuccuuccaccagua

SEQ ID NO: 1866726 - RNA, 19 nt, Homo sapiens
  misc_RNA (1)...(19): siRNA sense strand
uuacuggcaugucacuuca

SEQ ID NO: 1866727 - RNA, 19 nt, Homo sapiens
  misc_RNA (1)...(19): siRNA sense strand
caaggaguuugcuucuagu

SEQ ID NO: 1866728 - RNA, 19 nt, Homo sapiens
  misc_RNA (1)...(19): siRNA sense strand
gcccacuguuccuuacuau

SEQ ID NO: 1866729 - RNA, 19 nt, Homo sapiens
  misc_RNA (1)...(19): siRNA sense strand
cagaagagccacugguuuu

SEQ ID NO: 1866730 - RNA, 19 nt, Homo sapiens
  misc_RNA (1)...(19): siRNA sense strand
cauuacucauguagacaaa

SEQ ID NO: 1866731 - RNA, 19 nt, Homo sapiens
  misc_RNA (1)...(19): siRNA sense strand
gaacugcaggucccuccau

SEQ ID NO: 1866732 - RNA, 19 nt, Homo sapiens
  misc_RNA (1)...(19): siRNA sense strand
ucacucaacagccgcaguu

SEQ ID NO: 1866733 - RNA, 19 nt, Homo sapiens
  misc_RNA (1)...(19): siRNA sense strand
cuccgaggcucucccaaug

SEQ ID NO: 1866734 - RNA, 19 nt, Homo sapiens
  misc_RNA (1)...(19): siRNA sense strand
cugcaggucccuccauuga

SEQ ID NO: 1866735 - RNA, 19 nt, Homo sapiens
  misc_RNA (1)...(19): siRNA sense strand
gcccauaagcagcaacuca

SEQ ID NO: 1866736 - RNA, 19 nt, Homo sapiens
  misc_RNA (1)...(19): siRNA sense strand
gcuggagaauaacccuaug

SEQ ID NO: 1866737 - RNA, 19 nt, Homo sapiens
  misc_RNA (1)...(19): siRNA sense strand
gcaugucguccaauaccuu

SEQ ID NO: 1866738 - RNA, 19 nt, Homo sapiens
  misc_RNA (1)...(19): siRNA sense strand
caucaaaaccccucaagga

SEQ ID NO: 1866739 - RNA, 19 nt, Homo sapiens
  misc_RNA (1)...(19): siRNA sense strand
ccaaugccuuacugucaag

SEQ ID NO: 1866740 - RNA, 19 nt, Homo sapiens
  misc_RNA (1)...(19): siRNA sense strand
aagcagcaacucauccaaa

SEQ ID NO: 1866741 - RNA, 19 nt, Homo sapiens
  misc_RNA (1)...(19): siRNA sense strand
gaucagcuauucgauuccu

SEQ ID NO: 1866742 - RNA, 19 nt, Homo sapiens
  misc_RNA (1)...(19): siRNA sense strand
gaugucacccuugcaaugg

SEQ ID NO: 1866743 - RNA, 19 nt, Homo sapiens
  misc_RNA (1)...(19): siRNA sense strand
gccugaccauucuucauuc

SEQ ID NO: 1866744 - RNA, 19 nt, Homo sapiens
  misc_RNA (1)...(19): siRNA sense strand
uucaagacccuucuccaaa

SEQ ID NO: 1866745 - RNA, 19 nt, Homo sapiens
  misc_RNA (1)...(19): siRNA sense strand
agccuucccugcuccacua

SEQ ID NO: 1866746 - RNA, 19 nt, Homo sapiens
  misc_RNA (1)...(19): siRNA sense strand
cccagaagaugcccuccau

SEQ ID NO: 1866747 - RNA, 19 nt, Homo sapiens
  misc_RNA (1)...(19): siRNA sense strand
ccaggugcucauccuagua

SEQ ID NO: 1866748 - RNA, 19 nt, Homo sapiens
  misc_RNA (1)...(19): siRNA sense strand
guuacuggcaugucacuuc

SEQ ID NO: 1866749 - RNA, 19 nt, Homo sapiens
  misc_RNA (1)...(19): siRNA sense strand
cgguucagaugucacacuu

SEQ ID NO: 1866750 - RNA, 19 nt, Homo sapiens
  misc_RNA (1)...(19): siRNA sense strand
gaaagggcccacuguuccu

SEQ ID NO: 1866751 - RNA, 19 nt, Homo sapiens
  misc_RNA (1)...(19): siRNA sense strand
uacagaagugggacugaaa

SEQ ID NO: 1866752 - RNA, 19 nt, Homo sapiens
  misc_RNA (1)...(19): siRNA sense strand
gaguuugcuucuaguugca

SEQ ID NO: 1866753 - RNA, 19 nt, Homo sapiens
  misc_RNA (1)...(19): siRNA sense strand
caggcaacccuaagcacaa

SEQ ID NO: 1866754 - RNA, 19 nt, Homo sapiens
  misc_RNA (1)...(19): siRNA sense strand
ucauuacugcuggagaaua

SEQ ID NO: 1866755 - RNA, 19 nt, Homo sapiens
  misc_RNA (1)...(19): siRNA sense strand
ucaauggcacaguccaaga

SEQ ID NO: 1866756 - RNA, 19 nt, Homo sapiens
  misc_RNA (1)...(19): siRNA sense strand
uaccacagacuacagaagu

SEQ ID NO: 1866757 - RNA, 19 nt, Homo sapiens
  misc_RNA (1)...(19): siRNA sense strand
cgugucaccgucuaacauu

SEQ ID NO: 1866758 - RNA, 19 nt, Homo sapiens
  misc_RNA (1)...(19): siRNA sense strand
ccaaaacccugagcaugau

SEQ ID NO: 1866759 - RNA, 19 nt, Homo sapiens
  misc_RNA (1)...(19): siRNA sense strand
ccucaaggacaccugaugu

SEQ ID NO: 1866760 - RNA, 19 nt, Homo sapiens
  misc_RNA (1)...(19): siRNA sense strand
uccugcaugucguccaaua

SEQ ID NO: 1866761 - RNA, 19 nt, Homo sapiens
  misc_RNA (1)...(19): siRNA sense strand
gaggagcucaccaaaauuc

SEQ ID NO: 1866762 - RNA, 19 nt, Homo sapiens
  misc_RNA (1)...(19): siRNA sense strand
gagcuggaaugucuuauua

SEQ ID NO: 1866763 - RNA, 19 nt, Homo sapiens
  misc_RNA (1)...(19): siRNA sense strand
gaacaagaagcacuaguua

SEQ ID NO: 1866764 - RNA, 19 nt, Homo sapiens
  misc_RNA (1)...(19): siRNA sense strand
gaagaagaauuccucacua

SEQ ID NO: 1866765 - RNA, 19 nt, Homo sapiens
  misc_RNA (1)...(19): siRNA sense strand
gaaagaaacccuugcugua

SEQ ID NO: 1866766 - RNA, 19 nt, Homo sapiens
  misc_RNA (1)...(19): siRNA sense strand
cuaaugagcucuccagaaa

SEQ ID NO: 1866767 - RNA, 19 nt, Homo sapiens
  misc_RNA (1)...(19): siRNA sense strand
caacaguccugacaaauuc

SEQ ID NO: 1866768 - RNA, 19 nt, Homo sapiens
  misc_RNA (1)...(19): siRNA sense strand
ucaacaaacugaugaagaa

SEQ ID NO: 1866769 - RNA, 19 nt, Homo sapiens
  misc_RNA (1)...(19): siRNA sense strand
gggagaagauugaccuuga

SEQ ID NO: 1866770 - RNA, 19 nt, Homo sapiens
  misc_RNA (1)...(19): siRNA sense strand
gaagaauuccucacuaaug

SEQ ID NO: 1866771 - RNA, 19 nt, Homo sapiens
  misc_RNA (1)...(19): siRNA sense strand
ggaggaacgucacaugaga

SEQ ID NO: 1866772 - RNA, 19 nt, Homo sapiens
  misc_RNA (1)...(19): siRNA sense strand
gcaacaguccugacaaauu

SEQ ID NO: 1866773 - RNA, 19 nt, Homo sapiens
  misc_RNA (1)...(19): siRNA sense strand
agauagagcuggagaccua

SEQ ID NO: 1866774 - RNA, 19 nt, Homo sapiens
  misc_RNA (1)...(19): siRNA sense strand
gaacaaggugcugaagaua

SEQ ID NO: 1866775 - RNA, 19 nt, Homo sapiens
  misc_RNA (1)...(19): siRNA sense strand
gcaggaagaagaauucauu

SEQ ID NO: 1866776 - RNA, 19 nt, Homo sapiens
  misc_RNA (1)...(19): siRNA sense strand
aagaagaauuccucacuaa

SEQ ID NO: 1866777 - RNA, 19 nt, Homo sapiens
  misc_RNA (1)...(19): siRNA sense strand
ggagaagauugaccuugaa

SEQ ID NO: 1866778 - RNA, 19 nt, Homo sapiens
  misc_RNA (1)...(19): siRNA sense strand
aagaauuccucacuaauga

SEQ ID NO: 1866779 - RNA, 19 nt, Homo sapiens
  misc_RNA (1)...(19): siRNA sense strand
gcuggaaccuucgcuguuu

SEQ ID NO: 1866780 - RNA, 19 nt, Homo sapiens
  misc_RNA (1)...(19): siRNA sense strand
ugagaugucugcacaagga

SEQ ID NO: 1866781 - RNA, 19 nt, Homo sapiens
  misc_RNA (1)...(19): siRNA sense strand
uauaucaccuggucuauca

SEQ ID NO: 1866782 - RNA, 19 nt, Homo sapiens
  misc_RNA (1)...(19): siRNA sense strand
ggaagaagaauucauuagu

SEQ ID NO: 1866783 - RNA, 19 nt, Homo sapiens
  misc_RNA (1)...(19): siRNA sense strand
gaacuagaacagcaucuug

SEQ ID NO: 1866784 - RNA, 19 nt, Homo sapiens
  misc_RNA (1)...(19): siRNA sense strand
aaagaaacccuugcuguaa

SEQ ID NO: 1866785 - RNA, 19 nt, Homo sapiens
  misc_RNA (1)...(19): siRNA sense strand
cagcagcagugugcaauuu

SEQ ID NO: 1866786 - RNA, 19 nt, Homo sapiens
  misc_RNA (1)...(19): siRNA sense strand
gacuagagcuggaaugucu

SEQ ID NO: 1866787 - RNA, 19 nt, Homo sapiens
  misc_RNA (1)...(19): siRNA sense strand
caacuuacauuagaacagu

SEQ ID NO: 1866788 - RNA, 19 nt, Homo sapiens
  misc_RNA (1)...(19): siRNA sense strand
ugagaaaggcgaacuagaa

SEQ ID NO: 1866789 - RNA, 19 nt, Homo sapiens
  misc_RNA (1)...(19): siRNA sense strand
aagaaacccuugcuguaaa

SEQ ID NO: 1866790 - RNA, 19 nt, Homo sapiens
  misc_RNA (1)...(19): siRNA sense strand
ugagaaagaagaagaauuc

SEQ ID NO: 1866791 - RNA, 19 nt, Homo sapiens
  misc_RNA (1)...(19): siRNA sense strand
acaaggugcugaagauaga

SEQ ID NO: 1866792 - RNA, 19 nt, Homo sapiens
  misc_RNA (1)...(19): siRNA sense strand
caauggagccgucuacuca

SEQ ID NO: 1866793 - RNA, 19 nt, Homo sapiens
  misc_RNA (1)...(19): siRNA sense strand
gaaaauacauuggaacaag

SEQ ID NO: 1866794 - RNA, 19 nt, Homo sapiens
  misc_RNA (1)...(19): siRNA sense strand
acacuaaccagacgacuuu

SEQ ID NO: 1866795 - RNA, 19 nt, Homo sapiens
  misc_RNA (1)...(19): siRNA sense strand
gcuggaaugucuuauuaca

SEQ ID NO: 1866796 - RNA, 19 nt, Homo sapiens
  misc_RNA (1)...(19): siRNA sense strand
gaacgucacaugagagaag

SEQ ID NO: 1866797 - RNA, 19 nt, Homo sapiens
  misc_RNA (1)...(19): siRNA sense strand
agaacaaggugcugaagau

SEQ ID NO: 1866798 - RNA, 19 nt, Homo sapiens
  misc_RNA (1)...(19): siRNA sense strand
aagcaacaguccugacaaa

SEQ ID NO: 1866799 - RNA, 19 nt, Homo sapiens
  misc_RNA (1)...(19): siRNA sense strand
ccaccaacuucacugacua

SEQ ID NO: 1866800 - RNA, 19 nt, Homo sapiens
  misc_RNA (1)...(19): siRNA sense strand
gggcugagcaggaagaaga

SEQ ID NO: 1866801 - RNA, 19 nt, Homo sapiens
  misc_RNA (1)...(19): siRNA sense strand
gaugucugcacaaggauua

SEQ ID NO: 1866802 - RNA, 19 nt, Homo sapiens
  misc_RNA (1)...(19): siRNA sense strand
gaaguggaacggcugaaga

SEQ ID NO: 1866803 - RNA, 19 nt, Homo sapiens
  misc_RNA (1)...(19): siRNA sense strand
acaagaagcacuaguuaau

SEQ ID NO: 1866804 - RNA, 19 nt, Homo sapiens
  misc_RNA (1)...(19): siRNA sense strand
gaaccuucgcuguuuggua

SEQ ID NO: 1866805 - RNA, 19 nt, Homo sapiens
  misc_RNA (1)...(19): siRNA sense strand
gagagugaguccagcuuag

SEQ ID NO: 1866806 - RNA, 19 nt, Homo sapiens
  misc_RNA (1)...(19): siRNA sense strand
ggaacaagaacaagaagca

SEQ ID NO: 1866807 - RNA, 19 nt, Homo sapiens
  misc_RNA (1)...(19): siRNA sense strand
gaggaggaacgucacauga

SEQ ID NO: 1866808 - RNA, 19 nt, Homo sapiens
  misc_RNA (1)...(19): siRNA sense strand
ccuacaaacugaagugcaa

SEQ ID NO: 1866809 - RNA, 19 nt, Homo sapiens
  misc_RNA (1)...(19): siRNA sense strand
uuccuucucuggcauauuu

SEQ ID NO: 1866810 - RNA, 19 nt, Homo sapiens
  misc_RNA (1)...(19): siRNA sense strand
gagaagauugaccuugaaa

SEQ ID NO: 1866811 - RNA, 19 nt, Homo sapiens
  misc_RNA (1)...(19): siRNA sense strand
cuggagaccuacaaacuga

SEQ ID NO: 1866812 - RNA, 19 nt, Homo sapiens
  misc_RNA (1)...(19): siRNA sense strand
gaacaagagcaggaauuuc

SEQ ID NO: 1866813 - RNA, 19 nt, Homo sapiens
  misc_RNA (1)...(19): siRNA sense strand
ucaagaaaauucaggcuuu

SEQ ID NO: 1866814 - RNA, 19 nt, Homo sapiens
  misc_RNA (1)...(19): siRNA sense strand
gacgaaagguauuuuaaug

SEQ ID NO: 1866815 - RNA, 19 nt, Homo sapiens
  misc_RNA (1)...(19): siRNA sense strand
guuacagcauucagagaaa

SEQ ID NO: 1866816 - RNA, 19 nt, Homo sapiens
  misc_RNA (1)...(19): siRNA sense strand
ggaauuucaggucaacaaa

SEQ ID NO: 1866817 - RNA, 19 nt, Homo sapiens
  misc_RNA (1)...(19): siRNA sense strand
caagucacacgguugguuu

SEQ ID NO: 1866818 - RNA, 19 nt, Homo sapiens
  misc_RNA (1)...(19): siRNA sense strand
gcaguugcagcaugagaaa

SEQ ID NO: 1866819 - RNA, 19 nt, Homo sapiens
  misc_RNA (1)...(19): siRNA sense strand
aaccuucgcuguuugguau

SEQ ID NO: 1866820 - RNA, 19 nt, Homo sapiens
  misc_RNA (1)...(19): siRNA sense strand
gagaacaaggugcugaaga

SEQ ID NO: 1866821 - RNA, 19 nt, Homo sapiens
  misc_RNA (1)...(19): siRNA sense strand
uaucuaggcuucacuaucc

SEQ ID NO: 1866822 - RNA, 19 nt, Homo sapiens
  misc_RNA (1)...(19): siRNA sense strand
gaaaggcgaacuagaacag

SEQ ID NO: 1866823 - RNA, 19 nt, Homo sapiens
  misc_RNA (1)...(19): siRNA sense strand
ugaacaagagcaggaauuu

SEQ ID NO: 1866824 - RNA, 19 nt, Homo sapiens
  misc_RNA (1)...(19): siRNA sense strand
cacuauccauuguguugua

SEQ ID NO: 1866825 - RNA, 19 nt, Homo sapiens
  misc_RNA (1)...(19): siRNA sense strand
caggaagaagaauucauua

SEQ ID NO: 1866826 - RNA, 19 nt, Homo sapiens
  misc_RNA (1)...(19): siRNA sense strand
ggaaaaggauggauaagcu

SEQ ID NO: 1866827 - RNA, 19 nt, Homo sapiens
  misc_RNA (1)...(19): siRNA sense strand
cgagagugaguccagcuua

SEQ ID NO: 1866828 - RNA, 19 nt, Homo sapiens
  misc_RNA (1)...(19): siRNA sense strand
agaaacccuugcuguaaau

SEQ ID NO: 1866829 - RNA, 19 nt, Homo sapiens
  misc_RNA (1)...(19): siRNA sense strand
cagagaaaauggcacagua

SEQ ID NO: 1866830 - RNA, 19 nt, Homo sapiens
  misc_RNA (1)...(19): siRNA sense strand
aaacccuugcuguaaauua

SEQ ID NO: 1866831 - RNA, 19 nt, Homo sapiens
  misc_RNA (1)...(19): siRNA sense strand
agaacagcaucuugaacaa

SEQ ID NO: 1866832 - RNA, 19 nt, Homo sapiens
  misc_RNA (1)...(19): siRNA sense strand
caacaaacugaugaagaaa

SEQ ID NO: 1866833 - RNA, 19 nt, Homo sapiens
  misc_RNA (1)...(19): siRNA sense strand
ucucuggcauauuuggaua

SEQ ID NO: 1866834 - RNA, 19 nt, Homo sapiens
  misc_RNA (1)...(19): siRNA sense strand
gaagcaacaguccugacaa

SEQ ID NO: 1866835 - RNA, 19 nt, Homo sapiens
  misc_RNA (1)...(19): siRNA sense strand
ggaggaggaacgucacaug

SEQ ID NO: 1866836 - RNA, 19 nt, Homo sapiens
  misc_RNA (1)...(19): siRNA sense strand
uggaacggcugaagaagca

SEQ ID NO: 1866837 - RNA, 19 nt, Homo sapiens
  misc_RNA (1)...(19): siRNA sense strand
gaagauugaccuugaaaau

SEQ ID NO: 1866838 - RNA, 19 nt, Homo sapiens
  misc_RNA (1)...(19): siRNA sense strand
ugacaccauuucuaagcaa

SEQ ID NO: 1866839 - RNA, 19 nt, Homo sapiens
  misc_RNA (1)...(19): siRNA sense strand
uagaacagcaucuugaaca

SEQ ID NO: 1866840 - RNA, 19 nt, Homo sapiens
  misc_RNA (1)...(19): siRNA sense strand
gaaccgcgaccugcgcaaa

SEQ ID NO: 1866841 - RNA, 19 nt, Homo sapiens
  misc_RNA (1)...(19): siRNA sense strand
gcaagucacacgguugguu

SEQ ID NO: 1866842 - RNA, 19 nt, Homo sapiens
  misc_RNA (1)...(19): siRNA sense strand
gaaaauaugaugcgucaca

SEQ ID NO: 1866843 - RNA, 19 nt, Homo sapiens
  misc_RNA (1)...(19): siRNA sense strand
aacaagagcaggaauuuca

SEQ ID NO: 1866844 - RNA, 19 nt, Homo sapiens
  misc_RNA (1)...(19): siRNA sense strand
agaacaagaagcacuaguu

SEQ ID NO: 1866845 - RNA, 19 nt, Homo sapiens
  misc_RNA (1)...(19): siRNA sense strand
gaaaugcagccaguguugu

SEQ ID NO: 1866846 - RNA, 19 nt, Homo sapiens
  misc_RNA (1)...(19): siRNA sense strand
gaguccagcuuagaaaugg

SEQ ID NO: 1866847 - RNA, 19 nt, Homo sapiens
  misc_RNA (1)...(19): siRNA sense strand
aagaagcacuaguuaaucg

SEQ ID NO: 1866848 - RNA, 19 nt, Homo sapiens
  misc_RNA (1)...(19): siRNA sense strand
caagaagcacuaguuaauc

SEQ ID NO: 1866849 - RNA, 19 nt, Homo sapiens
  misc_RNA (1)...(19): siRNA sense strand
gcaugagaaaggcgaacua

SEQ ID NO: 1866850 - RNA, 19 nt, Homo sapiens
  misc_RNA (1)...(19): siRNA sense strand
gcuguuugguauuugguau

SEQ ID NO: 1866851 - RNA, 19 nt, Homo sapiens
  misc_RNA (1)...(19): siRNA sense strand
cuagagcuggaaugucuua

SEQ ID NO: 1866852 - RNA, 19 nt, Homo sapiens
  misc_RNA (1)...(19): siRNA sense strand
acaagaacaagaagcacua

SEQ ID NO: 1866853 - RNA, 19 nt, Homo sapiens
  misc_RNA (1)...(19): siRNA sense strand
gagaaaggcgaacuagaac

SEQ ID NO: 1866854 - RNA, 19 nt, Homo sapiens
  misc_RNA (1)...(19): siRNA sense strand
caccaucgccuagagauau

SEQ ID NO: 1866855 - RNA, 19 nt, Homo sapiens
  misc_RNA (1)...(19): siRNA sense strand
ugcaugagcuuagucugaa

SEQ ID NO: 1866856 - RNA, 19 nt, Homo sapiens
  misc_RNA (1)...(19): siRNA sense strand
ccagaaaauugaugcaguu

SEQ ID NO: 1866857 - RNA, 19 nt, Homo sapiens
  misc_RNA (1)...(19): siRNA sense strand
gcaugagcuuagucugaau

SEQ ID NO: 1866858 - RNA, 19 nt, Homo sapiens
  misc_RNA (1)...(19): siRNA sense strand
uaucaccuggucuaucaua

SEQ ID NO: 1866859 - RNA, 19 nt, Homo sapiens
  misc_RNA (1)...(19): siRNA sense strand
caugagagaagagaacuug

SEQ ID NO: 1866860 - RNA, 19 nt, Homo sapiens
  misc_RNA (1)...(19): siRNA sense strand
uggccucgcugcagcaaga

SEQ ID NO: 1866861 - RNA, 19 nt, Homo sapiens
  misc_RNA (1)...(19): siRNA sense strand
gcaggaauuucaggucaac

SEQ ID NO: 1866862 - RNA, 19 nt, Homo sapiens
  misc_RNA (1)...(19): siRNA sense strand
gauucuggcucaauuauua

SEQ ID NO: 1866863 - RNA, 19 nt, Homo sapiens
  misc_RNA (1)...(19): siRNA sense strand
gaagucagaugaaggcuuu

SEQ ID NO: 1866864 - RNA, 19 nt, Homo sapiens
  misc_RNA (1)...(19): siRNA sense strand
gagguuauauuaucgguua

SEQ ID NO: 1866865 - RNA, 19 nt, Homo sapiens
  misc_RNA (1)...(19): siRNA sense strand
ucaccuaccucaauucuua

SEQ ID NO: 1866866 - RNA, 19 nt, Homo sapiens
  misc_RNA (1)...(19): siRNA sense strand
gaagaaagauggcauucau

SEQ ID NO: 1866867 - RNA, 19 nt, Homo sapiens
  misc_RNA (1)...(19): siRNA sense strand
gcaaagaccauccaaugua

SEQ ID NO: 1866868 - RNA, 19 nt, Homo sapiens
  misc_RNA (1)...(19): siRNA sense strand
gaacgagcauugaauacaa

SEQ ID NO: 1866869 - RNA, 19 nt, Homo sapiens
  misc_RNA (1)...(19): siRNA sense strand
caaccaagcucucuucaug

SEQ ID NO: 1866870 - RNA, 19 nt, Homo sapiens
  misc_RNA (1)...(19): siRNA sense strand
caacaggccucaaaccaaa

SEQ ID NO: 1866871 - RNA, 19 nt, Homo sapiens
  misc_RNA (1)...(19): siRNA sense strand
gcauggauauugaguuuga

SEQ ID NO: 1866872 - RNA, 19 nt, Homo sapiens
  misc_RNA (1)...(19): siRNA sense strand
ggaagcaacuuacggauac

SEQ ID NO: 1866873 - RNA, 19 nt, Homo sapiens
  misc_RNA (1)...(19): siRNA sense strand
gauagaagcacccuaaaug

SEQ ID NO: 1866874 - RNA, 19 nt, Homo sapiens
  misc_RNA (1)...(19): siRNA sense strand
gaagacacaacaucucuaa

SEQ ID NO: 1866875 - RNA, 19 nt, Homo sapiens
  misc_RNA (1)...(19): siRNA sense strand
gcagcgauauuauuccauu

SEQ ID NO: 1866876 - RNA, 19 nt, Homo sapiens
  misc_RNA (1)...(19): siRNA sense strand
gugaacaaauggcaaguuu

SEQ ID NO: 1866877 - RNA, 19 nt, Homo sapiens
  misc_RNA (1)...(19): siRNA sense strand
gaaaggaagucaguacagu

SEQ ID NO: 1866878 - RNA, 19 nt, Homo sapiens
  misc_RNA (1)...(19): siRNA sense strand
gacaagaacaucccaauug

SEQ ID NO: 1866879 - RNA, 19 nt, Homo sapiens
  misc_RNA (1)...(19): siRNA sense strand
acaagaacaucccaauuga

SEQ ID NO: 1866880 - RNA, 19 nt, Homo sapiens
  misc_RNA (1)...(19): siRNA sense strand
caaagaccauccaauguag

SEQ ID NO: 1866881 - RNA, 19 nt, Homo sapiens
  misc_RNA (1)...(19): siRNA sense strand
ggaagcagcaacuuucaaa

SEQ ID NO: 1866882 - RNA, 19 nt, Homo sapiens
  misc_RNA (1)...(19): siRNA sense strand
gacacaacaucucuaaguu

SEQ ID NO: 1866883 - RNA, 19 nt, Homo sapiens
  misc_RNA (1)...(19): siRNA sense strand
gcaagcagcgauauuauuc

SEQ ID NO: 1866884 - RNA, 19 nt, Homo sapiens
  misc_RNA (1)...(19): siRNA sense strand
caagaaguaucaaaguuag

SEQ ID NO: 1866885 - RNA, 19 nt, Homo sapiens
  misc_RNA (1)...(19): siRNA sense strand
ggagaauagucuuagaugu

SEQ ID NO: 1866886 - RNA, 19 nt, Homo sapiens
  misc_RNA (1)...(19): siRNA sense strand
aagcauggauauugaguuu

SEQ ID NO: 1866887 - RNA, 19 nt, Homo sapiens
  misc_RNA (1)...(19): siRNA sense strand
ugaauuggaugaagaaugg

SEQ ID NO: 1866888 - RNA, 19 nt, Homo sapiens
  misc_RNA (1)...(19): siRNA sense strand
gaauauagagguugaugga

SEQ ID NO: 1866889 - RNA, 19 nt, Homo sapiens
  misc_RNA (1)...(19): siRNA sense strand
gaaagccugugcccacugu

SEQ ID NO: 1866890 - RNA, 19 nt, Homo sapiens
  misc_RNA (1)...(19): siRNA sense strand
ggaagaagucagucaguga

SEQ ID NO: 1866891 - RNA, 19 nt, Homo sapiens
  misc_RNA (1)...(19): siRNA sense strand
gaagcagaagucagaauuu

SEQ ID NO: 1866892 - RNA, 19 nt, Homo sapiens
  misc_RNA (1)...(19): siRNA sense strand
ggacaagaacaucccaauu

SEQ ID NO: 1866893 - RNA, 19 nt, Homo sapiens
  misc_RNA (1)...(19): siRNA sense strand
gagaauagucuuagaugug

SEQ ID NO: 1866894 - RNA, 19 nt, Homo sapiens
  misc_RNA (1)...(19): siRNA sense strand
cagacuaacugcaucauca

SEQ ID NO: 1866895 - RNA, 19 nt, Homo sapiens
  misc_RNA (1)...(19): siRNA sense strand
caacaagaccugacuccaa

SEQ ID NO: 1866896 - RNA, 19 nt, Homo sapiens
  misc_RNA (1)...(19): siRNA sense strand
uaaaugagccgccaauugg

SEQ ID NO: 1866897 - RNA, 19 nt, Homo sapiens
  misc_RNA (1)...(19): siRNA sense strand
gaaaauuacugcuuacauc

SEQ ID NO: 1866898 - RNA, 19 nt, Homo sapiens
  misc_RNA (1)...(19): siRNA sense strand
ggucauuccuagugauuau

SEQ ID NO: 1866899 - RNA, 19 nt, Homo sapiens
  misc_RNA (1)...(19): siRNA sense strand
caaccuguaugccuaugaa

SEQ ID NO: 1866900 - RNA, 19 nt, Homo sapiens
  misc_RNA (1)...(19): siRNA sense strand
cgucugaggugcgacuuua

SEQ ID NO: 1866901 - RNA, 19 nt, Homo sapiens
  misc_RNA (1)...(19): siRNA sense strand
gaaguggucaauucaagaa

SEQ ID NO: 1866902 - RNA, 19 nt, Homo sapiens
  misc_RNA (1)...(19): siRNA sense strand
guugauggacuaucuuaua

SEQ ID NO: 1866903 - RNA, 19 nt, Homo sapiens
  misc_RNA (1)...(19): siRNA sense strand
caacagggaacgagcauug

SEQ ID NO: 1866904 - RNA, 19 nt, Homo sapiens
  misc_RNA (1)...(19): siRNA sense strand
aagggaacauucaaacuuu

SEQ ID NO: 1866905 - RNA, 19 nt, Homo sapiens
  misc_RNA (1)...(19): siRNA sense strand
gaugaagaauggagaugug

SEQ ID NO: 1866906 - RNA, 19 nt, Homo sapiens
  misc_RNA (1)...(19): siRNA sense strand
ggagauucuggcucaauua

SEQ ID NO: 1866907 - RNA, 19 nt, Homo sapiens
  misc_RNA (1)...(19): siRNA sense strand
acacaacaucucuaaguua

SEQ ID NO: 1866908 - RNA, 19 nt, Homo sapiens
  misc_RNA (1)...(19): siRNA sense strand
agaaugaucuagaugaauc

SEQ ID NO: 1866909 - RNA, 19 nt, Homo sapiens
  misc_RNA (1)...(19): siRNA sense strand
gaugaaggcuuuuaucaau

SEQ ID NO: 1866910 - RNA, 19 nt, Homo sapiens
  misc_RNA (1)...(19): siRNA sense strand
uugcuuaucuccaauguga

SEQ ID NO: 1866911 - RNA, 19 nt, Homo sapiens
  misc_RNA (1)...(19): siRNA sense strand
uaacaaugccggagaagga

SEQ ID NO: 1866912 - RNA, 19 nt, Homo sapiens
  misc_RNA (1)...(19): siRNA sense strand
ucacaggacuggagaaagg

SEQ ID NO: 1866913 - RNA, 19 nt, Homo sapiens
  misc_RNA (1)...(19): siRNA sense strand
gcaacaggccucaaaccaa

SEQ ID NO: 1866914 - RNA, 19 nt, Homo sapiens
  misc_RNA (1)...(19): siRNA sense strand
gaggagagccacaaaccaa

SEQ ID NO: 1866915 - RNA, 19 nt, Homo sapiens
  misc_RNA (1)...(19): siRNA sense strand
caaaauggcuaaugaccaa

SEQ ID NO: 1866916 - RNA, 19 nt, Homo sapiens
  misc_RNA (1)...(19): siRNA sense strand
gauggacuaucuuauaaac

SEQ ID NO: 1866917 - RNA, 19 nt, Homo sapiens
  misc_RNA (1)...(19): siRNA sense strand
gauccaucaugaagaaaug

SEQ ID NO: 1866918 - RNA, 19 nt, Homo sapiens
  misc_RNA (1)...(19): siRNA sense strand
uggaaacacuggagccaaa

SEQ ID NO: 1866919 - RNA, 19 nt, Homo sapiens
  misc_RNA (1)...(19): siRNA sense strand
gaacgucucccuggaagug

SEQ ID NO: 1866920 - RNA, 19 nt, Homo sapiens
  misc_RNA (1)...(19): siRNA sense strand
aaaugggucucugcugaua

SEQ ID NO: 1866921 - RNA, 19 nt, Homo sapiens
  misc_RNA (1)...(19): siRNA sense strand
ggauucagccaauguguau

SEQ ID NO: 1866922 - RNA, 19 nt, Homo sapiens
  misc_RNA (1)...(19): siRNA sense strand
gaagucagucagugaguga

SEQ ID NO: 1866923 - RNA, 19 nt, Homo sapiens
  misc_RNA (1)...(19): siRNA sense strand
gcuagaaagugcccaguac

SEQ ID NO: 1866924 - RNA, 19 nt, Homo sapiens
  misc_RNA (1)...(19): siRNA sense strand
cagcgcgcaucuucaagua

SEQ ID NO: 1866925 - RNA, 19 nt, Homo sapiens
  misc_RNA (1)...(19): siRNA sense strand
ugacccaguugauuauuau

SEQ ID NO: 1866926 - RNA, 19 nt, Homo sapiens
  misc_RNA (1)...(19): siRNA sense strand
gaugacaguggaauguaua

SEQ ID NO: 1866927 - RNA, 19 nt, Homo sapiens
  misc_RNA (1)...(19): siRNA sense strand
acacagugcuacucaagug

SEQ ID NO: 1866928 - RNA, 19 nt, Homo sapiens
  misc_RNA (1)...(19): siRNA sense strand
ucauggagauggagguuau

SEQ ID NO: 1866929 - RNA, 19 nt, Homo sapiens
  misc_RNA (1)...(19): siRNA sense strand
aaucauggaucucaaccuu

SEQ ID NO: 1866930 - RNA, 19 nt, Homo sapiens
  misc_RNA (1)...(19): siRNA sense strand
gcacaugccaccacguaug

SEQ ID NO: 1866931 - RNA, 19 nt, Homo sapiens
  misc_RNA (1)...(19): siRNA sense strand
ggugcgagguuauauuauc

SEQ ID NO: 1866932 - RNA, 19 nt, Homo sapiens
  misc_RNA (1)...(19): siRNA sense strand
guggugcgagguuauauua

SEQ ID NO: 1866933 - RNA, 19 nt, Homo sapiens
  misc_RNA (1)...(19): siRNA sense strand
guaaccgguuuucaaauua

SEQ ID NO: 1866934 - RNA, 19 nt, Homo sapiens
  misc_RNA (1)...(19): siRNA sense strand
agagaaugaucuagaugaa

SEQ ID NO: 1866935 - RNA, 19 nt, Homo sapiens
  misc_RNA (1)...(19): siRNA sense strand
cgucucuacugaugauaua

SEQ ID NO: 1866936 - RNA, 19 nt, Homo sapiens
  misc_RNA (1)...(19): siRNA sense strand
uauagagguugauggacua

SEQ ID NO: 1866937 - RNA, 19 nt, Homo sapiens
  misc_RNA (1)...(19): siRNA sense strand
uaugaaagcauggauauug

SEQ ID NO: 1866938 - RNA, 19 nt, Homo sapiens
  misc_RNA (1)...(19): siRNA sense strand
ugagggacuuuaccaaugu

SEQ ID NO: 1866939 - RNA, 19 nt, Homo sapiens
  misc_RNA (1)...(19): siRNA sense strand
ggaacacccugacaaaaug

SEQ ID NO: 1866940 - RNA, 19 nt, Homo sapiens
  misc_RNA (1)...(19): siRNA sense strand
ggaguuccucuuuaugaaa

SEQ ID NO: 1866941 - RNA, 19 nt, Homo sapiens
  misc_RNA (1)...(19): siRNA sense strand
guggucaauucaagaagua

SEQ ID NO: 1866942 - RNA, 19 nt, Homo sapiens
  misc_RNA (1)...(19): siRNA sense strand
ggagauguggucauuccua

SEQ ID NO: 1866943 - RNA, 19 nt, Homo sapiens
  misc_RNA (1)...(19): siRNA sense strand
gaauguacagucucuggaa

SEQ ID NO: 1866944 - RNA, 19 nt, Homo sapiens
  misc_RNA (1)...(19): siRNA sense strand
cugcagagcucacagucuu

SEQ ID NO: 1866945 - RNA, 19 nt, Homo sapiens
  misc_RNA (1)...(19): siRNA sense strand
guccuggaauguuguguuu

SEQ ID NO: 1866946 - RNA, 19 nt, Homo sapiens
  misc_RNA (1)...(19): siRNA sense strand
cagaagccauguacaccuu

SEQ ID NO: 1866947 - RNA, 19 nt, Homo sapiens
  misc_RNA (1)...(19): siRNA sense strand
cagcuuugcuaauccuuug

SEQ ID NO: 1866948 - RNA, 19 nt, Homo sapiens
  misc_RNA (1)...(19): siRNA sense strand
cuaaaugagccgccaauug

SEQ ID NO: 1866949 - RNA, 19 nt, Homo sapiens
  misc_RNA (1)...(19): siRNA sense strand
ugaauucucggucauggua

SEQ ID NO: 1866950 - RNA, 19 nt, Homo sapiens
  misc_RNA (1)...(19): siRNA sense strand
ccaaugugaggcaucuuua

SEQ ID NO: 1866951 - RNA, 19 nt, Homo sapiens
  misc_RNA (1)...(19): siRNA sense strand
ggagguuauuggccaguug

SEQ ID NO: 1866952 - RNA, 19 nt, Homo sapiens
  misc_RNA (1)...(19): siRNA sense strand
ggugauaggcuuacucauc

SEQ ID NO: 1866953 - RNA, 19 nt, Homo sapiens
  misc_RNA (1)...(19): siRNA sense strand
acagcaagcagcgauauua

SEQ ID NO: 1866954 - RNA, 19 nt, Homo sapiens
  misc_RNA (1)...(19): siRNA sense strand
ggaaguggucaauucaaga

SEQ ID NO: 1866955 - RNA, 19 nt, Homo sapiens
  misc_RNA (1)...(19): siRNA sense strand
agaauagucuuagaugugu

SEQ ID NO: 1866956 - RNA, 19 nt, Homo sapiens
  misc_RNA (1)...(19): siRNA sense strand
acucaagugugaagucauu

SEQ ID NO: 1866957 - RNA, 19 nt, Homo sapiens
  misc_RNA (1)...(19): siRNA sense strand
gagucaaguucccauuaug

SEQ ID NO: 1866958 - RNA, 19 nt, Homo sapiens
  misc_RNA (1)...(19): siRNA sense strand
aacaagaccugacuccaau

SEQ ID NO: 1866959 - RNA, 19 nt, Homo sapiens
  misc_RNA (1)...(19): siRNA sense strand
acaauccacuggcagaaga

SEQ ID NO: 1866960 - RNA, 19 nt, Homo sapiens
  misc_RNA (1)...(19): siRNA sense strand
cacaacaucucuaaguuac

SEQ ID NO: 1866961 - RNA, 19 nt, Homo sapiens
  misc_RNA (1)...(19): siRNA sense strand
aacagaagguccaguacuu

SEQ ID NO: 1866962 - RNA, 19 nt, Homo sapiens
  misc_RNA (1)...(19): siRNA sense strand
gaggaaagaugccaauuaa

SEQ ID NO: 1866963 - RNA, 19 nt, Homo sapiens
  misc_RNA (1)...(19): siRNA sense strand
gcaggaaacaucuauauua

SEQ ID NO: 1866964 - RNA, 19 nt, Homo sapiens
  misc_RNA (1)...(19): siRNA sense strand
gaucacaacugcugcuuaa

SEQ ID NO: 1866965 - RNA, 19 nt, Homo sapiens
  misc_RNA (1)...(19): siRNA sense strand
ccucaaagauaccuaguua

SEQ ID NO: 1866966 - RNA, 19 nt, Homo sapiens
  misc_RNA (1)...(19): siRNA sense strand
gacaguagaccuaaauuua

SEQ ID NO: 1866967 - RNA, 19 nt, Homo sapiens
  misc_RNA (1)...(19): siRNA sense strand
ggaaacaucuauauuacug

SEQ ID NO: 1866968 - RNA, 19 nt, Homo sapiens
  misc_RNA (1)...(19): siRNA sense strand
ggaaggaucugcauagagu

SEQ ID NO: 1866969 - RNA, 19 nt, Homo sapiens
  misc_RNA (1)...(19): siRNA sense strand
ggaaagaugccaauuaaau

SEQ ID NO: 1866970 - RNA, 19 nt, Homo sapiens
  misc_RNA (1)...(19): siRNA sense strand
ccaguaacauugacaaauu

SEQ ID NO: 1866971 - RNA, 19 nt, Homo sapiens
  misc_RNA (1)...(19): siRNA sense strand
gaagaggauuuggaagaua

SEQ ID NO: 1866972 - RNA, 19 nt, Homo sapiens
  misc_RNA (1)...(19): siRNA sense strand
gaaagaaacugagcugaag

SEQ ID NO: 1866973 - RNA, 19 nt, Homo sapiens
  misc_RNA (1)...(19): siRNA sense strand
gaacuuggauuaaagaacu

SEQ ID NO: 1866974 - RNA, 19 nt, Homo sapiens
  misc_RNA (1)...(19): siRNA sense strand
ggaggaaagaugccaauua

SEQ ID NO: 1866975 - RNA, 19 nt, Homo sapiens
  misc_RNA (1)...(19): siRNA sense strand
gauugcagcuggaguaauu

SEQ ID NO: 1866976 - RNA, 19 nt, Homo sapiens
  misc_RNA (1)...(19): siRNA sense strand
gcacaaggauaacauugga

SEQ ID NO: 1866977 - RNA, 19 nt, Homo sapiens
  misc_RNA (1)...(19): siRNA sense strand
gaaagaugccaauuaaaug

SEQ ID NO: 1866978 - RNA, 19 nt, Homo sapiens
  misc_RNA (1)...(19): siRNA sense strand
gagcaagaauugacucgaa

SEQ ID NO: 1866979 - RNA, 19 nt, Homo sapiens
  misc_RNA (1)...(19): siRNA sense strand
gaacuugacagaaauccua

SEQ ID NO: 1866980 - RNA, 19 nt, Homo sapiens
  misc_RNA (1)...(19): siRNA sense strand
guacacauauggagcauuc

SEQ ID NO: 1866981 - RNA, 19 nt, Homo sapiens
  misc_RNA (1)...(19): siRNA sense strand
ucagagagauaacagguuu

SEQ ID NO: 1866982 - RNA, 19 nt, Homo sapiens
  misc_RNA (1)...(19): siRNA sense strand
ugacagaaauccuaaaugg

SEQ ID NO: 1866983 - RNA, 19 nt, Homo sapiens
  misc_RNA (1)...(19): siRNA sense strand
guacaaagugcucucauuu

SEQ ID NO: 1866984 - RNA, 19 nt, Homo sapiens
  misc_RNA (1)...(19): siRNA sense strand
ggucaaauguuggaugauu

SEQ ID NO: 1866985 - RNA, 19 nt, Homo sapiens
  misc_RNA (1)...(19): siRNA sense strand
gaauaggagugaaauugga

SEQ ID NO: 1866986 - RNA, 19 nt, Homo sapiens
  misc_RNA (1)...(19): siRNA sense strand
gaagauuccuguggcuauu

SEQ ID NO: 1866987 - RNA, 19 nt, Homo sapiens
  misc_RNA (1)...(19): siRNA sense strand
ggucugacauuugcuguuu

SEQ ID NO: 1866988 - RNA, 19 nt, Homo sapiens
  misc_RNA (1)...(19): siRNA sense strand
cagacuaccugcaggagua

SEQ ID NO: 1866989 - RNA, 19 nt, Homo sapiens
  misc_RNA (1)...(19): siRNA sense strand
ggauggcucuggaguguau

SEQ ID NO: 1866990 - RNA, 19 nt, Homo sapiens
  misc_RNA (1)...(19): siRNA sense strand
gaaauucacccaucagagu

SEQ ID NO: 1866991 - RNA, 19 nt, Homo sapiens
  misc_RNA (1)...(19): siRNA sense strand
gauggaaacuuuggacuuc

SEQ ID NO: 1866992 - RNA, 19 nt, Homo sapiens
  misc_RNA (1)...(19): siRNA sense strand
caagaucaaugggaauuug

SEQ ID NO: 1866993 - RNA, 19 nt, Homo sapiens
  misc_RNA (1)...(19): siRNA sense strand
gcucuggaguguauacauu

SEQ ID NO: 1866994 - RNA, 19 nt, Homo sapiens
  misc_RNA (1)...(19): siRNA sense strand
ccagauagcuaagggaaug

SEQ ID NO: 1866995 - RNA, 19 nt, Homo sapiens
  misc_RNA (1)...(19): siRNA sense strand
acaaagugcucucauuuua

SEQ ID NO: 1866996 - RNA, 19 nt, Homo sapiens
  misc_RNA (1)...(19): siRNA sense strand
agaauugacucgaauagga

SEQ ID NO: 1866997 - RNA, 19 nt, Homo sapiens
  misc_RNA (1)...(19): siRNA sense strand
ggacgggccauuccacuuu

SEQ ID NO: 1866998 - RNA, 19 nt, Homo sapiens
  misc_RNA (1)...(19): siRNA sense strand
gagcacaauuucaaugcaa

SEQ ID NO: 1866999 - RNA, 19 nt, Homo sapiens
  misc_RNA (1)...(19): siRNA sense strand
gaagauggccuccucacau

SEQ ID NO: 1867000 - RNA, 19 nt, Homo sapiens
  misc_RNA (1)...(19): siRNA sense strand
ccucuaugauggugaauuu

SEQ ID NO: 1867001 - RNA, 19 nt, Homo sapiens
  misc_RNA (1)...(19): siRNA sense strand
ggaauuugaucuuucuagu

SEQ ID NO: 1867002 - RNA, 19 nt, Homo sapiens
  misc_RNA (1)...(19): siRNA sense strand
cagaaaagcugaaaauugu

SEQ ID NO: 1867003 - RNA, 19 nt, Homo sapiens
  misc_RNA (1)...(19): siRNA sense strand
cugaauaccucucugaguu

SEQ ID NO: 1867004 - RNA, 19 nt, Homo sapiens
  misc_RNA (1)...(19): siRNA sense strand
ggaacgguuuauaaaggua

SEQ ID NO: 1867005 - RNA, 19 nt, Homo sapiens
  misc_RNA (1)...(19): siRNA sense strand
cuggagaauuuacgcauua

SEQ ID NO: 1867006 - RNA, 19 nt, Homo sapiens
  misc_RNA (1)...(19): siRNA sense strand
gcaagaauugacucgaaua

SEQ ID NO: 1867007 - RNA, 19 nt, Homo sapiens
  misc_RNA (1)...(19): siRNA sense strand
gcuauggaguuacuauaug

SEQ ID NO: 1867008 - RNA, 19 nt, Homo sapiens
  misc_RNA (1)...(19): siRNA sense strand
gaaaagagccuugagaaga

SEQ ID NO: 1867009 - RNA, 19 nt, Homo sapiens
  misc_RNA (1)...(19): siRNA sense strand
caagauggaaguagaagaa

SEQ ID NO: 1867010 - RNA, 19 nt, Homo sapiens
  misc_RNA (1)...(19): siRNA sense strand
gacaguggagcauguguua

SEQ ID NO: 1867011 - RNA, 19 nt, Homo sapiens
  misc_RNA (1)...(19): siRNA sense strand
gagacaaacccaaacaaga

SEQ ID NO: 1867012 - RNA, 19 nt, Homo sapiens
  misc_RNA (1)...(19): siRNA sense strand
guuuggagcuauggaguua

SEQ ID NO: 1867013 - RNA, 19 nt, Homo sapiens
  misc_RNA (1)...(19): siRNA sense strand
gacgggccauuccacuuua

SEQ ID NO: 1867014 - RNA, 19 nt, Homo sapiens
  misc_RNA (1)...(19): siRNA sense strand
caaguaugcugauccagau

SEQ ID NO: 1867015 - RNA, 19 nt, Homo sapiens
  misc_RNA (1)...(19): siRNA sense strand
cagagaaacugaacgucuu

SEQ ID NO: 1867016 - RNA, 19 nt, Homo sapiens
  misc_RNA (1)...(19): siRNA sense strand
agacaaacccaaacaagaa

SEQ ID NO: 1867017 - RNA, 19 nt, Homo sapiens
  misc_RNA (1)...(19): siRNA sense strand
gaugacuccugcuguaaug

SEQ ID NO: 1867018 - RNA, 19 nt, Homo sapiens
  misc_RNA (1)...(19): siRNA sense strand
gaggaaggaucugcauaga

SEQ ID NO: 1867019 - RNA, 19 nt, Homo sapiens
  misc_RNA (1)...(19): siRNA sense strand
gaaaucagcgcaggaaaca

SEQ ID NO: 1867020 - RNA, 19 nt, Homo sapiens
  misc_RNA (1)...(19): siRNA sense strand
gaccagaacaaauuccuuu

SEQ ID NO: 1867021 - RNA, 19 nt, Homo sapiens
  misc_RNA (1)...(19): siRNA sense strand
gaagaacaacauacuguca

SEQ ID NO: 1867022 - RNA, 19 nt, Homo sapiens
  misc_RNA (1)...(19): siRNA sense strand
gacagcaaguucuuucaga

SEQ ID NO: 1867023 - RNA, 19 nt, Homo sapiens
  misc_RNA (1)...(19): siRNA sense strand
caucaccucucuacaguuc

SEQ ID NO: 1867024 - RNA, 19 nt, Homo sapiens
  misc_RNA (1)...(19): siRNA sense strand
caaugggaauuugaucuuu

SEQ ID NO: 1867025 - RNA, 19 nt, Homo sapiens
  misc_RNA (1)...(19): siRNA sense strand
caacuggucccaaggcaaa

SEQ ID NO: 1867026 - RNA, 19 nt, Homo sapiens
  misc_RNA (1)...(19): siRNA sense strand
caggaaacaucuauauuac

SEQ ID NO: 1867027 - RNA, 19 nt, Homo sapiens
  misc_RNA (1)...(19): siRNA sense strand
cuacggaccuuacgucagu

SEQ ID NO: 1867028 - RNA, 19 nt, Homo sapiens
  misc_RNA (1)...(19): siRNA sense strand
caagaaagcguuugacaac

SEQ ID NO: 1867029 - RNA, 19 nt, Homo sapiens
  misc_RNA (1)...(19): siRNA sense strand
gauuaaagaacuugacaga

SEQ ID NO: 1867030 - RNA, 19 nt, Homo sapiens
  misc_RNA (1)...(19): siRNA sense strand
ggauaacauuggaucacaa

SEQ ID NO: 1867031 - RNA, 19 nt, Homo sapiens
  misc_RNA (1)...(19): siRNA sense strand
caagcucaacuucguauuu

SEQ ID NO: 1867032 - RNA, 19 nt, Homo sapiens
  misc_RNA (1)...(19): siRNA sense strand
ggauguggacguugccaua

SEQ ID NO: 1867033 - RNA, 19 nt, Homo sapiens
  misc_RNA (1)...(19): siRNA sense strand
cugaguaccugaagaacaa

SEQ ID NO: 1867034 - RNA, 19 nt, Homo sapiens
  misc_RNA (1)...(19): siRNA sense strand
aaacaagaauaccugaauc

SEQ ID NO: 1867035 - RNA, 19 nt, Homo sapiens
  misc_RNA (1)...(19): siRNA sense strand
gaugauugaugcugacagu

SEQ ID NO: 1867036 - RNA, 19 nt, Homo sapiens
  misc_RNA (1)...(19): siRNA sense strand
gugcaggaacggagaauaa

SEQ ID NO: 1867037 - RNA, 19 nt, Homo sapiens
  misc_RNA (1)...(19): siRNA sense strand
gugcgugccugcccuaguu

SEQ ID NO: 1867038 - RNA, 19 nt, Homo sapiens
  misc_RNA (1)...(19): siRNA sense strand
uggcagagaauccugaaua

SEQ ID NO: 1867039 - RNA, 19 nt, Homo sapiens
  misc_RNA (1)...(19): siRNA sense strand
caaacaagaauaccugaau

SEQ ID NO: 1867040 - RNA, 19 nt, Homo sapiens
  misc_RNA (1)...(19): siRNA sense strand
caucugcacuauugacguu

SEQ ID NO: 1867041 - RNA, 19 nt, Homo sapiens
  misc_RNA (1)...(19): siRNA sense strand
ggaauuccaacgcgagaaa

SEQ ID NO: 1867042 - RNA, 19 nt, Homo sapiens
  misc_RNA (1)...(19): siRNA sense strand
caccaaacaugacugacuu

SEQ ID NO: 1867043 - RNA, 19 nt, Homo sapiens
  misc_RNA (1)...(19): siRNA sense strand
ccuaaaugguggagucuau

SEQ ID NO: 1867044 - RNA, 19 nt, Homo sapiens
  misc_RNA (1)...(19): siRNA sense strand
gaggagaacccuuuuguuu

SEQ ID NO: 1867045 - RNA, 19 nt, Homo sapiens
  misc_RNA (1)...(19): siRNA sense strand
gaagguuacaugacuccua

SEQ ID NO: 1867046 - RNA, 19 nt, Homo sapiens
  misc_RNA (1)...(19): siRNA sense strand
ggaugaagaggauuuggaa

SEQ ID NO: 1867047 - RNA, 19 nt, Homo sapiens
  misc_RNA (1)...(19): siRNA sense strand
ccucccaucugcacuauug

SEQ ID NO: 1867048 - RNA, 19 nt, Homo sapiens
  misc_RNA (1)...(19): siRNA sense strand
gcucugaucauggcaagua

SEQ ID NO: 1867049 - RNA, 19 nt, Homo sapiens
  misc_RNA (1)...(19): siRNA sense strand
ccugacaacuguacaaagu

SEQ ID NO: 1867050 - RNA, 19 nt, Homo sapiens
  misc_RNA (1)...(19): siRNA sense strand
gauugaugcugacaguaga

SEQ ID NO: 1867051 - RNA, 19 nt, Homo sapiens
  misc_RNA (1)...(19): siRNA sense strand
uaugggaacugaugaccuu

SEQ ID NO: 1867052 - RNA, 19 nt, Homo sapiens
  misc_RNA (1)...(19): siRNA sense strand
cguaaugucuuagugaaau

SEQ ID NO: 1867053 - RNA, 19 nt, Homo sapiens
  misc_RNA (1)...(19): siRNA sense strand
ggagaaacugugaagauuc

SEQ ID NO: 1867054 - RNA, 19 nt, Homo sapiens
  misc_RNA (1)...(19): siRNA sense strand
ugaaagaaacugagcugaa

SEQ ID NO: 1867055 - RNA, 19 nt, Homo sapiens
  misc_RNA (1)...(19): siRNA sense strand
ggaaacagaguugguggaa

SEQ ID NO: 1867056 - RNA, 19 nt, Homo sapiens
  misc_RNA (1)...(19): siRNA sense strand
agucacaggcuacguguua

SEQ ID NO: 1867057 - RNA, 19 nt, Homo sapiens
  misc_RNA (1)...(19): siRNA sense strand
caucccaccucccaucuau

SEQ ID NO: 1867058 - RNA, 19 nt, Homo sapiens
  misc_RNA (1)...(19): siRNA sense strand
uaaccucuaugauggugaa

SEQ ID NO: 1867059 - RNA, 19 nt, Homo sapiens
  misc_RNA (1)...(19): siRNA sense strand
ucaaugcaaaguacacaua

SEQ ID NO: 1867060 - RNA, 19 nt, Homo sapiens
  misc_RNA (1)...(19): siRNA sense strand
gaaaaucauugccagacuu

SEQ ID NO: 1867061 - RNA, 19 nt, Homo sapiens
  misc_RNA (1)...(19): siRNA sense strand
aagaggauuuggaagauau

SEQ ID NO: 1867062 - RNA, 19 nt, Homo sapiens
  misc_RNA (1)...(19): siRNA sense strand
gaaggaggcuggcuguaaa

SEQ ID NO: 1867063 - RNA, 19 nt, Homo sapiens
  misc_RNA (1)...(19): siRNA sense strand
uggcagacauccugaagua

SEQ ID NO: 1867064 - RNA, 19 nt, Homo sapiens
  misc_RNA (1)...(19): siRNA sense strand
gguacaaugucaccuggua

SEQ ID NO: 1867065 - RNA, 19 nt, Homo sapiens
  misc_RNA (1)...(19): siRNA sense strand
gggaggacauucaggagaa

SEQ ID NO: 1867066 - RNA, 19 nt, Homo sapiens
  misc_RNA (1)...(19): siRNA sense strand
gaaccugcgucugcucauu

SEQ ID NO: 1867067 - RNA, 19 nt, Homo sapiens
  misc_RNA (1)...(19): siRNA sense strand
gauccaggcugcucugaag

SEQ ID NO: 1867068 - RNA, 19 nt, Homo sapiens
  misc_RNA (1)...(19): siRNA sense strand
ugaaggaggcuggcuguaa

SEQ ID NO: 1867069 - RNA, 19 nt, Homo sapiens
  misc_RNA (1)...(19): siRNA sense strand
gaggagaaguuggcagaca

SEQ ID NO: 1867070 - RNA, 19 nt, Homo sapiens
  misc_RNA (1)...(19): siRNA sense strand
guaaacugcgcaucaugaa

SEQ ID NO: 1867071 - RNA, 19 nt, Homo sapiens
  misc_RNA (1)...(19): siRNA sense strand
gggaggaucuggagaaccu

SEQ ID NO: 1867072 - RNA, 19 nt, Homo sapiens
  misc_RNA (1)...(19): siRNA sense strand
gcaagaagagggugaaucc

SEQ ID NO: 1867073 - RNA, 19 nt, Homo sapiens
  misc_RNA (1)...(19): siRNA sense strand
ccugccaacuucuuuaaau

SEQ ID NO: 1867074 - RNA, 19 nt, Homo sapiens
  misc_RNA (1)...(19): siRNA sense strand
ggggauaccuagaggauga

SEQ ID NO: 1867075 - RNA, 19 nt, Homo sapiens
  misc_RNA (1)...(19): siRNA sense strand
cugccaacuucuuuaaauu

SEQ ID NO: 1867076 - RNA, 19 nt, Homo sapiens
  misc_RNA (1)...(19): siRNA sense strand
acaagaccuuccucugcua

SEQ ID NO: 1867077 - RNA, 19 nt, Homo sapiens
  misc_RNA (1)...(19): siRNA sense strand
aaugucaccugguaugugu

SEQ ID NO: 1867078 - RNA, 19 nt, Homo sapiens
  misc_RNA (1)...(19): siRNA sense strand
ggagaacuuccuauacuac

SEQ ID NO: 1867079 - RNA, 19 nt, Homo sapiens
  misc_RNA (1)...(19): siRNA sense strand
gcccugcgguacaauguca

SEQ ID NO: 1867080 - RNA, 19 nt, Homo sapiens
  misc_RNA (1)...(19): siRNA sense strand
gcuguaaacugcgcaucau

SEQ ID NO: 1867081 - RNA, 19 nt, Homo sapiens
  misc_RNA (1)...(19): siRNA sense strand
uguaaacugcgcaucauga

SEQ ID NO: 1867082 - RNA, 19 nt, Homo sapiens
  misc_RNA (1)...(19): siRNA sense strand
aagaagagggugaauccaa

SEQ ID NO: 1867083 - RNA, 19 nt, Homo sapiens
  misc_RNA (1)...(19): siRNA sense strand
guacaaugucaccugguau

SEQ ID NO: 1867084 - RNA, 19 nt, Homo sapiens
  misc_RNA (1)...(19): siRNA sense strand
ucuggugggucgacucuuc

SEQ ID NO: 1867085 - RNA, 19 nt, Homo sapiens
  misc_RNA (1)...(19): siRNA sense strand
ggacauucaggagaacuuc

SEQ ID NO: 1867086 - RNA, 19 nt, Homo sapiens
  misc_RNA (1)...(19): siRNA sense strand
ggagaaguuggcagacauc

SEQ ID NO: 1867087 - RNA, 19 nt, Homo sapiens
  misc_RNA (1)...(19): siRNA sense strand
ccucugcuaugugguugaa

SEQ ID NO: 1867088 - RNA, 19 nt, Homo sapiens
  misc_RNA (1)...(19): siRNA sense strand
aggcugcuguggccacuga

SEQ ID NO: 1867089 - RNA, 19 nt, Homo sapiens
  misc_RNA (1)...(19): siRNA sense strand
caagaccuuccucugcuau

SEQ ID NO: 1867090 - RNA, 19 nt, Homo sapiens
  misc_RNA (1)...(19): siRNA sense strand
uauacuacgaggagaaguu

SEQ ID NO: 1867091 - RNA, 19 nt, Homo sapiens
  misc_RNA (1)...(19): siRNA sense strand
agaacuuccuauacuacga

SEQ ID NO: 1867092 - RNA, 19 nt, Homo sapiens
  misc_RNA (1)...(19): siRNA sense strand
agaccuuccucugcuaugu

SEQ ID NO: 1867093 - RNA, 19 nt, Homo sapiens
  misc_RNA (1)...(19): siRNA sense strand
ggagcaagaagagggugaa

SEQ ID NO: 1867094 - RNA, 19 nt, Homo sapiens
  misc_RNA (1)...(19): siRNA sense strand
gccaacuucuuuaaauucc

SEQ ID NO: 1867095 - RNA, 19 nt, Homo sapiens
  misc_RNA (1)...(19): siRNA sense strand
ggaggacauucaggagaac

SEQ ID NO: 1867096 - RNA, 19 nt, Homo sapiens
  misc_RNA (1)...(19): siRNA sense strand
cagcgaaggagacucguuu

SEQ ID NO: 1867097 - RNA, 19 nt, Homo sapiens
  misc_RNA (1)...(19): siRNA sense strand
ugaggcagcacuggcauua

SEQ ID NO: 1867098 - RNA, 19 nt, Homo sapiens
  misc_RNA (1)...(19): siRNA sense strand
gggcaucaccaccagagaa

SEQ ID NO: 1867099 - RNA, 19 nt, Homo sapiens
  misc_RNA (1)...(19): siRNA sense strand
ccaaagcaaggcccuacaa

SEQ ID NO: 1867100 - RNA, 19 nt, Homo sapiens
  misc_RNA (1)...(19): siRNA sense strand
cgaaggagacucguuugga

SEQ ID NO: 1867101 - RNA, 19 nt, Homo sapiens
  misc_RNA (1)...(19): siRNA sense strand
caaagcaaggcccuacaag

SEQ ID NO: 1867102 - RNA, 19 nt, Homo sapiens
  misc_RNA (1)...(19): siRNA sense strand
gagcccaggguccagauuc

SEQ ID NO: 1867103 - RNA, 19 nt, Homo sapiens
  misc_RNA (1)...(19): siRNA sense strand
gaggcagcacuggcauuaa

SEQ ID NO: 1867104 - RNA, 19 nt, Homo sapiens
  misc_RNA (1)...(19): siRNA sense strand
ccaaacagcuuuaugauuu

SEQ ID NO: 1867105 - RNA, 19 nt, Homo sapiens
  misc_RNA (1)...(19): siRNA sense strand
gaagaagucuggaugaaau

SEQ ID NO: 1867106 - RNA, 19 nt, Homo sapiens
  misc_RNA (1)...(19): siRNA sense strand
gaccuuaacucaaauggua

SEQ ID NO: 1867107 - RNA, 19 nt, Homo sapiens
  misc_RNA (1)...(19): siRNA sense strand
ggaaggagaugucgaggaa

SEQ ID NO: 1867108 - RNA, 19 nt, Homo sapiens
  misc_RNA (1)...(19): siRNA sense strand
gaagacaguucaaagagaa

SEQ ID NO: 1867109 - RNA, 19 nt, Homo sapiens
  misc_RNA (1)...(19): siRNA sense strand
gaacuuugcugcaguaucu

SEQ ID NO: 1867110 - RNA, 19 nt, Homo sapiens
  misc_RNA (1)...(19): siRNA sense strand
gcaccucgauguuuauaaa

SEQ ID NO: 1867111 - RNA, 19 nt, Homo sapiens
  misc_RNA (1)...(19): siRNA sense strand
ggaaggauaucgucgagaa

SEQ ID NO: 1867112 - RNA, 19 nt, Homo sapiens
  misc_RNA (1)...(19): siRNA sense strand
guauagagcccacagaaua

SEQ ID NO: 1867113 - RNA, 19 nt, Homo sapiens
  misc_RNA (1)...(19): siRNA sense strand
caaaugaaaucacaagcaa

SEQ ID NO: 1867114 - RNA, 19 nt, Homo sapiens
  misc_RNA (1)...(19): siRNA sense strand
ggcacugacugaaguauua

SEQ ID NO: 1867115 - RNA, 19 nt, Homo sapiens
  misc_RNA (1)...(19): siRNA sense strand
gaagauagaaggaguugaa

SEQ ID NO: 1867116 - RNA, 19 nt, Homo sapiens
  misc_RNA (1)...(19): siRNA sense strand
ucaaucagcugaagauaga

SEQ ID NO: 1867117 - RNA, 19 nt, Homo sapiens
  misc_RNA (1)...(19): siRNA sense strand
ggaagacaguucaaagaga

SEQ ID NO: 1867118 - RNA, 19 nt, Homo sapiens
  misc_RNA (1)...(19): siRNA sense strand
gccauuaucuggauccuuu

SEQ ID NO: 1867119 - RNA, 19 nt, Homo sapiens
  misc_RNA (1)...(19): siRNA sense strand
aaacggaaguugaccuuaa

SEQ ID NO: 1867120 - RNA, 19 nt, Homo sapiens
  misc_RNA (1)...(19): siRNA sense strand
uagcaaagcugaagaaguc

SEQ ID NO: 1867121 - RNA, 19 nt, Homo sapiens
  misc_RNA (1)...(19): siRNA sense strand
gaauucagguuggcuguuu

SEQ ID NO: 1867122 - RNA, 19 nt, Homo sapiens
  misc_RNA (1)...(19): siRNA sense strand
cggaagaaauuaagcauga

SEQ ID NO: 1867123 - RNA, 19 nt, Homo sapiens
  misc_RNA (1)...(19): siRNA sense strand
gaaagccgguggccaggaa

SEQ ID NO: 1867124 - RNA, 19 nt, Homo sapiens
  misc_RNA (1)...(19): siRNA sense strand
agacaaugcuguugccuuu

SEQ ID NO: 1867125 - RNA, 19 nt, Homo sapiens
  misc_RNA (1)...(19): siRNA sense strand
gagcaaggguuuaucaucu

SEQ ID NO: 1867126 - RNA, 19 nt, Homo sapiens
  misc_RNA (1)...(19): siRNA sense strand
acaaggugguguuauauuu

SEQ ID NO: 1867127 - RNA, 19 nt, Homo sapiens
  misc_RNA (1)...(19): siRNA sense strand
gauacgugguucuuuauga

SEQ ID NO: 1867128 - RNA, 19 nt, Homo sapiens
  misc_RNA (1)...(19): siRNA sense strand
gcggaggccuucuuauuga

SEQ ID NO: 1867129 - RNA, 19 nt, Homo sapiens
  misc_RNA (1)...(19): siRNA sense strand
gauagaauaccuucagauu

SEQ ID NO: 1867130 - RNA, 19 nt, Homo sapiens
  misc_RNA (1)...(19): siRNA sense strand
ugacaaggguacuacauga

SEQ ID NO: 1867131 - RNA, 19 nt, Homo sapiens
  misc_RNA (1)...(19): siRNA sense strand
uaacucaaaugguaggaaa

SEQ ID NO: 1867132 - RNA, 19 nt, Homo sapiens
  misc_RNA (1)...(19): siRNA sense strand
gagcggaggccuucuuauu

SEQ ID NO: 1867133 - RNA, 19 nt, Homo sapiens
  misc_RNA (1)...(19): siRNA sense strand
gcaugaagaauuugaugua

SEQ ID NO: 1867134 - RNA, 19 nt, Homo sapiens
  misc_RNA (1)...(19): siRNA sense strand
gaagucuggaugaaauuua

SEQ ID NO: 1867135 - RNA, 19 nt, Homo sapiens
  misc_RNA (1)...(19): siRNA sense strand
gcaaaugccaaacagcuuu

SEQ ID NO: 1867136 - RNA, 19 nt, Homo sapiens
  misc_RNA (1)...(19): siRNA sense strand
caaacucacucuucuuaca

SEQ ID NO: 1867137 - RNA, 19 nt, Homo sapiens
  misc_RNA (1)...(19): siRNA sense strand
gcuaugaaguuuacacaca

SEQ ID NO: 1867138 - RNA, 19 nt, Homo sapiens
  misc_RNA (1)...(19): siRNA sense strand
gaagauauuacgaacuuug

SEQ ID NO: 1867139 - RNA, 19 nt, Homo sapiens
  misc_RNA (1)...(19): siRNA sense strand
cagguuggcuguuucuuga

SEQ ID NO: 1867140 - RNA, 19 nt, Homo sapiens
  misc_RNA (1)...(19): siRNA sense strand
caaagagaauuaggaaauc

SEQ ID NO: 1867141 - RNA, 19 nt, Homo sapiens
  misc_RNA (1)...(19): siRNA sense strand
cgacagcacuggccauuac

SEQ ID NO: 1867142 - RNA, 19 nt, Homo sapiens
  misc_RNA (1)...(19): siRNA sense strand
gaacgggcuucuaccaaag

SEQ ID NO: 1867143 - RNA, 19 nt, Homo sapiens
  misc_RNA (1)...(19): siRNA sense strand
ggaagaaauuaagcaugaa

SEQ ID NO: 1867144 - RNA, 19 nt, Homo sapiens
  misc_RNA (1)...(19): siRNA sense strand
gaaagagugaugagaaauc

SEQ ID NO: 1867145 - RNA, 19 nt, Homo sapiens
  misc_RNA (1)...(19): siRNA sense strand
aagacgagcucacgaguau

SEQ ID NO: 1867146 - RNA, 19 nt, Homo sapiens
  misc_RNA (1)...(19): siRNA sense strand
uagcagcccugucacaaga

SEQ ID NO: 1867147 - RNA, 19 nt, Homo sapiens
  misc_RNA (1)...(19): siRNA sense strand
ugcaguaucucucucagua

SEQ ID NO: 1867148 - RNA, 19 nt, Homo sapiens
  misc_RNA (1)...(19): siRNA sense strand
acaagacaauccgccauua

SEQ ID NO: 1867149 - RNA, 19 nt, Homo sapiens
  misc_RNA (1)...(19): siRNA sense strand
guaggauacuugugguuga

SEQ ID NO: 1867150 - RNA, 19 nt, Homo sapiens
  misc_RNA (1)...(19): siRNA sense strand
gcaaggguuuaucaucuuc

SEQ ID NO: 1867151 - RNA, 19 nt, Homo sapiens
  misc_RNA (1)...(19): siRNA sense strand
guugacuucuugacugaua

SEQ ID NO: 1867152 - RNA, 19 nt, Homo sapiens
  misc_RNA (1)...(19): siRNA sense strand
gcagauguuuccacugaca

SEQ ID NO: 1867153 - RNA, 19 nt, Homo sapiens
  misc_RNA (1)...(19): siRNA sense strand
ggauaucgucgagaaauaa

SEQ ID NO: 1867154 - RNA, 19 nt, Homo sapiens
  misc_RNA (1)...(19): siRNA sense strand
gaaggaagacaguucaaag

SEQ ID NO: 1867155 - RNA, 19 nt, Homo sapiens
  misc_RNA (1)...(19): siRNA sense strand
acaaugcuguugccuuuga

SEQ ID NO: 1867156 - RNA, 19 nt, Homo sapiens
  misc_RNA (1)...(19): siRNA sense strand
caaacagcuuuaugauuuc

SEQ ID NO: 1867157 - RNA, 19 nt, Homo sapiens
  misc_RNA (1)...(19): siRNA sense strand
cauccucacuccagaaaug

SEQ ID NO: 1867158 - RNA, 19 nt, Homo sapiens
  misc_RNA (1)...(19): siRNA sense strand
cugcagauguuuccacuga

SEQ ID NO: 1867159 - RNA, 19 nt, Homo sapiens
  misc_RNA (1)...(19): siRNA sense strand
gguugucccugaagaaaga

SEQ ID NO: 1867160 - RNA, 19 nt, Homo sapiens
  misc_RNA (1)...(19): siRNA sense strand
uggaaagagugaugagaaa

SEQ ID NO: 1867161 - RNA, 19 nt, Homo sapiens
  misc_RNA (1)...(19): siRNA sense strand
cuuuagagguuggagauua

SEQ ID NO: 1867162 - RNA, 19 nt, Homo sapiens
  misc_RNA (1)...(19): siRNA sense strand
gaaagagaaggcagagaug

SEQ ID NO: 1867163 - RNA, 19 nt, Homo sapiens
  misc_RNA (1)...(19): siRNA sense strand
uucggcagcuugaaauuua

SEQ ID NO: 1867164 - RNA, 19 nt, Homo sapiens
  misc_RNA (1)...(19): siRNA sense strand
uugcagaagucguaucaaa

SEQ ID NO: 1867165 - RNA, 19 nt, Homo sapiens
  misc_RNA (1)...(19): siRNA sense strand
ggauaugcgugaauuucga

SEQ ID NO: 1867166 - RNA, 19 nt, Homo sapiens
  misc_RNA (1)...(19): siRNA sense strand
ugaaacaaacuuagaccua

SEQ ID NO: 1867167 - RNA, 19 nt, Homo sapiens
  misc_RNA (1)...(19): siRNA sense strand
gagaugaaacaaacuuaga

SEQ ID NO: 1867168 - RNA, 19 nt, Homo sapiens
  misc_RNA (1)...(19): siRNA sense strand
caacagucgcuaugaaguu

SEQ ID NO: 1867169 - RNA, 19 nt, Homo sapiens
  misc_RNA (1)...(19): siRNA sense strand
gaaauuuacagggcgagua

SEQ ID NO: 1867170 - RNA, 19 nt, Homo sapiens
  misc_RNA (1)...(19): siRNA sense strand
guacugauuugugcaagug

SEQ ID NO: 1867171 - RNA, 19 nt, Homo sapiens
  misc_RNA (1)...(19): siRNA sense strand
gaacagcacaaaccugaag

SEQ ID NO: 1867172 - RNA, 19 nt, Homo sapiens
  misc_RNA (1)...(19): siRNA sense strand
uccagcaccucgauguuua

SEQ ID NO: 1867173 - RNA, 19 nt, Homo sapiens
  misc_RNA (1)...(19): siRNA sense strand
caaaugccaaacagcuuua

SEQ ID NO: 1867174 - RNA, 19 nt, Homo sapiens
  misc_RNA (1)...(19): siRNA sense strand
acgcagagcuaaccuuugu

SEQ ID NO: 1867175 - RNA, 19 nt, Homo sapiens
  misc_RNA (1)...(19): siRNA sense strand
caaagaaagaacccucaaa

SEQ ID NO: 1867176 - RNA, 19 nt, Homo sapiens
  misc_RNA (1)...(19): siRNA sense strand
ggaaggaagacaguucaaa

SEQ ID NO: 1867177 - RNA, 19 nt, Homo sapiens
  misc_RNA (1)...(19): siRNA sense strand
gaacugguccuagaaagca

SEQ ID NO: 1867178 - RNA, 19 nt, Homo sapiens
  misc_RNA (1)...(19): siRNA sense strand
agccaagacuaaauccuua

SEQ ID NO: 1867179 - RNA, 19 nt, Homo sapiens
  misc_RNA (1)...(19): siRNA sense strand
gcagagaugaaacaaacuu

SEQ ID NO: 1867180 - RNA, 19 nt, Homo sapiens
  misc_RNA (1)...(19): siRNA sense strand
gaaagcugcccggaagaaa

SEQ ID NO: 1867181 - RNA, 19 nt, Homo sapiens
  misc_RNA (1)...(19): siRNA sense strand
gaugaaauuuaggaaggaa

SEQ ID NO: 1867182 - RNA, 19 nt, Homo sapiens
  misc_RNA (1)...(19): siRNA sense strand
gggaggcacugacugaagu

SEQ ID NO: 1867183 - RNA, 19 nt, Homo sapiens
  misc_RNA (1)...(19): siRNA sense strand
uauagagcccacagaauaa

SEQ ID NO: 1867184 - RNA, 19 nt, Homo sapiens
  misc_RNA (1)...(19): siRNA sense strand
gaggguuuacuuucuuaua

SEQ ID NO: 1867185 - RNA, 19 nt, Homo sapiens
  misc_RNA (1)...(19): siRNA sense strand
ggaugaaauuuaggaagga

SEQ ID NO: 1867186 - RNA, 19 nt, Homo sapiens
  misc_RNA (1)...(19): siRNA sense strand
gagccaagacuaaauccuu

SEQ ID NO: 1867187 - RNA, 19 nt, Homo sapiens
  misc_RNA (1)...(19): siRNA sense strand
gcuugaaguggaagauuua

SEQ ID NO: 1867188 - RNA, 19 nt, Homo sapiens
  misc_RNA (1)...(19): siRNA sense strand
uaggaaaucucacaaaaga

SEQ ID NO: 1867189 - RNA, 19 nt, Homo sapiens
  misc_RNA (1)...(19): siRNA sense strand
uuacuggcaucuuggugua

SEQ ID NO: 1867190 - RNA, 19 nt, Homo sapiens
  misc_RNA (1)...(19): siRNA sense strand
uauugaggcucuacaggaa

SEQ ID NO: 1867191 - RNA, 19 nt, Homo sapiens
  misc_RNA (1)...(19): siRNA sense strand
uuaaaugcaugucuaaagg

SEQ ID NO: 1867192 - RNA, 19 nt, Homo sapiens
  misc_RNA (1)...(19): siRNA sense strand
acagaauaaucgagucuug

SEQ ID NO: 1867193 - RNA, 19 nt, Homo sapiens
  misc_RNA (1)...(19): siRNA sense strand
gccaaacagcuuuaugauu

SEQ ID NO: 1867194 - RNA, 19 nt, Homo sapiens
  misc_RNA (1)...(19): siRNA sense strand
agaauuagcagcccuguca

SEQ ID NO: 1867195 - RNA, 19 nt, Homo sapiens
  misc_RNA (1)...(19): siRNA sense strand
aagcaacagucgcuaugaa

SEQ ID NO: 1867196 - RNA, 19 nt, Homo sapiens
  misc_RNA (1)...(19): siRNA sense strand
uuuaauuacuggcaucuug

SEQ ID NO: 1867197 - RNA, 19 nt, Homo sapiens
  misc_RNA (1)...(19): siRNA sense strand
caagacgagcucacgagua

SEQ ID NO: 1867198 - RNA, 19 nt, Homo sapiens
  misc_RNA (1)...(19): siRNA sense strand
uugaggagcugaaacaaag

SEQ ID NO: 1867199 - RNA, 19 nt, Homo sapiens
  misc_RNA (1)...(19): siRNA sense strand
acauugaacccgugacuuu

SEQ ID NO: 1867200 - RNA, 19 nt, Homo sapiens
  misc_RNA (1)...(19): siRNA sense strand
gcagagcuaaccuuuguuc

SEQ ID NO: 1867201 - RNA, 19 nt, Homo sapiens
  misc_RNA (1)...(19): siRNA sense strand
ggauagcaaagcugaagaa

SEQ ID NO: 1867202 - RNA, 19 nt, Homo sapiens
  misc_RNA (1)...(19): siRNA sense strand
caguaucucucucaguaug

SEQ ID NO: 1867203 - RNA, 19 nt, Homo sapiens
  misc_RNA (1)...(19): siRNA sense strand
aaaugcaugucuaaaggaa

SEQ ID NO: 1867204 - RNA, 19 nt, Homo sapiens
  misc_RNA (1)...(19): siRNA sense strand
gcgaucaugugaagcauua

SEQ ID NO: 1867205 - RNA, 19 nt, Homo sapiens
  misc_RNA (1)...(19): siRNA sense strand
gcacuaagguggcggugaa

SEQ ID NO: 1867206 - RNA, 19 nt, Homo sapiens
  misc_RNA (1)...(19): siRNA sense strand
ggacauggcagcccaggua

SEQ ID NO: 1867207 - RNA, 19 nt, Homo sapiens
  misc_RNA (1)...(19): siRNA sense strand
ucacugagcucaucaccaa

SEQ ID NO: 1867208 - RNA, 19 nt, Homo sapiens
  misc_RNA (1)...(19): siRNA sense strand
gaagagugguacuuuggaa

SEQ ID NO: 1867209 - RNA, 19 nt, Homo sapiens
  misc_RNA (1)...(19): siRNA sense strand
cccagaagcugcccucuuu

SEQ ID NO: 1867210 - RNA, 19 nt, Homo sapiens
  misc_RNA (1)...(19): siRNA sense strand
ggaggaugcuggccuggaa

SEQ ID NO: 1867211 - RNA, 19 nt, Homo sapiens
  misc_RNA (1)...(19): siRNA sense strand
gaauaaacgggaaguguug

SEQ ID NO: 1867212 - RNA, 19 nt, Homo sapiens
  misc_RNA (1)...(19): siRNA sense strand
caucaacccuggcuuccuu

SEQ ID NO: 1867213 - RNA, 19 nt, Homo sapiens
  misc_RNA (1)...(19): siRNA sense strand
gcugaagagugguacuuug

SEQ ID NO: 1867214 - RNA, 19 nt, Homo sapiens
  misc_RNA (1)...(19): siRNA sense strand
ccacacggguucaguucaa

SEQ ID NO: 1867215 - RNA, 19 nt, Homo sapiens
  misc_RNA (1)...(19): siRNA sense strand
aacccuggcuuccuugaua

SEQ ID NO: 1867216 - RNA, 19 nt, Homo sapiens
  misc_RNA (1)...(19): siRNA sense strand
ggaaagcgagaccaccaaa

SEQ ID NO: 1867217 - RNA, 19 nt, Homo sapiens
  misc_RNA (1)...(19): siRNA sense strand
gaccagaggcgaucaugug

SEQ ID NO: 1867218 - RNA, 19 nt, Homo sapiens
  misc_RNA (1)...(19): siRNA sense strand
gaacgcaugaacuacauuc

SEQ ID NO: 1867219 - RNA, 19 nt, Homo sapiens
  misc_RNA (1)...(19): siRNA sense strand
ggaaagauugggagaaagg

SEQ ID NO: 1867220 - RNA, 19 nt, Homo sapiens
  misc_RNA (1)...(19): siRNA sense strand
cagaggcgaucaugugaag

SEQ ID NO: 1867221 - RNA, 19 nt, Homo sapiens
  misc_RNA (1)...(19): siRNA sense strand
ucgaguaccugcaguccuu

SEQ ID NO: 1867222 - RNA, 19 nt, Homo sapiens
  misc_RNA (1)...(19): siRNA sense strand
ugaauaaacgggaaguguu

SEQ ID NO: 1867223 - RNA, 19 nt, Homo sapiens
  misc_RNA (1)...(19): siRNA sense strand
uuggaaagauugggagaaa

SEQ ID NO: 1867224 - RNA, 19 nt, Homo sapiens
  misc_RNA (1)...(19): siRNA sense strand
gauucaccaucaagucaga

SEQ ID NO: 1867225 - RNA, 19 nt, Homo sapiens
  misc_RNA (1)...(19): siRNA sense strand
ucagacgugugguccuuug

SEQ ID NO: 1867226 - RNA, 19 nt, Homo sapiens
  misc_RNA (1)...(19): siRNA sense strand
gugcaagaucgcagacuuu

SEQ ID NO: 1867227 - RNA, 19 nt, Homo sapiens
  misc_RNA (1)...(19): siRNA sense strand
ucaccaagggcgagaaguu

SEQ ID NO: 1867228 - RNA, 19 nt, Homo sapiens
  misc_RNA (1)...(19): siRNA sense strand
ggagcagggcuaccacaug

SEQ ID NO: 1867229 - RNA, 19 nt, Homo sapiens
  misc_RNA (1)...(19): siRNA sense strand
caaggacgaugaguacaac

SEQ ID NO: 1867230 - RNA, 19 nt, Homo sapiens
  misc_RNA (1)...(19): siRNA sense strand
ucaaggacgaugaguacaa

SEQ ID NO: 1867231 - RNA, 19 nt, Homo sapiens
  misc_RNA (1)...(19): siRNA sense strand
ccagagggccaggauuuga

SEQ ID NO: 1867232 - RNA, 19 nt, Homo sapiens
  misc_RNA (1)...(19): siRNA sense strand
uuccacauccugaacaaua

SEQ ID NO: 1867233 - RNA, 19 nt, Homo sapiens
  misc_RNA (1)...(19): siRNA sense strand
gcagauucaccaucaaguc

SEQ ID NO: 1867234 - RNA, 19 nt, Homo sapiens
  misc_RNA (1)...(19): siRNA sense strand
cugccaagguuccaaguuc

SEQ ID NO: 1867235 - RNA, 19 nt, Homo sapiens
  misc_RNA (1)...(19): siRNA sense strand
cggaggagcccaucuacau

SEQ ID NO: 1867236 - RNA, 19 nt, Homo sapiens
  misc_RNA (1)...(19): siRNA sense strand
gaacccagagggccaggau

SEQ ID NO: 1867237 - RNA, 19 nt, Homo sapiens
  misc_RNA (1)...(19): siRNA sense strand
ggaggagcccaucuacauc

SEQ ID NO: 1867238 - RNA, 19 nt, Homo sapiens
  misc_RNA (1)...(19): siRNA sense strand
gaaagauugggagaaagga

SEQ ID NO: 1867239 - RNA, 19 nt, Homo sapiens
  misc_RNA (1)...(19): siRNA sense strand
cagauucaccaucaaguca

SEQ ID NO: 1867240 - RNA, 19 nt, Homo sapiens
  misc_RNA (1)...(19): siRNA sense strand
ugugaagcauuacaagauc

SEQ ID NO: 1867241 - RNA, 19 nt, Homo sapiens
  misc_RNA (1)...(19): siRNA sense strand
cgugcaagaucgcagacuu

SEQ ID NO: 1867242 - RNA, 19 nt, Homo sapiens
  misc_RNA (1)...(19): siRNA sense strand
gaaagcgagaccaccaaag

SEQ ID NO: 1867243 - RNA, 19 nt, Homo sapiens
  misc_RNA (1)...(19): siRNA sense strand
cggccugcauccucauuug

SEQ ID NO: 1867244 - RNA, 19 nt, Homo sapiens
  misc_RNA (1)...(19): siRNA sense strand
gaucaugugaagcauuaca

SEQ ID NO: 1867245 - RNA, 19 nt, Homo sapiens
  misc_RNA (1)...(19): siRNA sense strand
gcgagaaguuccacauccu

SEQ ID NO: 1867246 - RNA, 19 nt, Homo sapiens
  misc_RNA (1)...(19): siRNA sense strand
uggcgcgucucaucaagga

SEQ ID NO: 1867247 - RNA, 19 nt, Homo sapiens
  misc_RNA (1)...(19): siRNA sense strand
caaggacgccugggagauc

SEQ ID NO: 1867248 - RNA, 19 nt, Homo sapiens
  misc_RNA (1)...(19): siRNA sense strand
caugugaagcauuacaaga

SEQ ID NO: 1867249 - RNA, 19 nt, Homo sapiens
  misc_RNA (1)...(19): siRNA sense strand
cagagaggcagcugcuuuc

SEQ ID NO: 1867250 - RNA, 19 nt, Homo sapiens
  misc_RNA (1)...(19): siRNA sense strand
acagcaacuucuccucuca

SEQ ID NO: 1867251 - RNA, 19 nt, Homo sapiens
  misc_RNA (1)...(19): siRNA sense strand
gaggcgaucaugugaagca

SEQ ID NO: 1867252 - RNA, 19 nt, Homo sapiens
  misc_RNA (1)...(19): siRNA sense strand
ccuguucauugcccuguau

SEQ ID NO: 1867253 - RNA, 19 nt, Homo sapiens
  misc_RNA (1)...(19): siRNA sense strand
ggaacgcaugaacuacauu

SEQ ID NO: 1867254 - RNA, 19 nt, Homo sapiens
  misc_RNA (1)...(19): siRNA sense strand
ggcuguguguucugcaaga

SEQ ID NO: 1867255 - RNA, 19 nt, Homo sapiens
  misc_RNA (1)...(19): siRNA sense strand
uuuggcagauucaccauca

SEQ ID NO: 1867256 - RNA, 19 nt, Homo sapiens
  misc_RNA (1)...(19): siRNA sense strand
ugaaugacgggcugugcaa

SEQ ID NO: 1867257 - RNA, 19 nt, Homo sapiens
  misc_RNA (1)...(19): siRNA sense strand
acccagagggccaggauuu

SEQ ID NO: 1867258 - RNA, 19 nt, Homo sapiens
  misc_RNA (1)...(19): siRNA sense strand
ccugaacaauacugaaggu

SEQ ID NO: 1867259 - RNA, 19 nt, Homo sapiens
  misc_RNA (1)...(19): siRNA sense strand
gggcagcagaccacuaugg

SEQ ID NO: 1867260 - RNA, 19 nt, Homo sapiens
  misc_RNA (1)...(19): siRNA sense strand
uggaacgcaugaacuacau

SEQ ID NO: 1867261 - RNA, 19 nt, Homo sapiens
  misc_RNA (1)...(19): siRNA sense strand
caucgugaccgaguucaug

SEQ ID NO: 1867262 - RNA, 19 nt, Homo sapiens
  misc_RNA (1)...(19): siRNA sense strand
gggaaagcgagaccaccaa

SEQ ID NO: 1867263 - RNA, 19 nt, Homo sapiens
  misc_RNA (1)...(19): siRNA sense strand
aaagcgagaccaccaaagg

SEQ ID NO: 1867264 - RNA, 19 nt, Homo sapiens
  misc_RNA (1)...(19): siRNA sense strand
ucaccacacggguucaguu

SEQ ID NO: 1867265 - RNA, 19 nt, Homo sapiens
  misc_RNA (1)...(19): siRNA sense strand
gcauuacaagauccgcaaa

SEQ ID NO: 1867266 - RNA, 19 nt, Homo sapiens
  misc_RNA (1)...(19): siRNA sense strand
gugcuggacuucaucuaca

SEQ ID NO: 1867267 - RNA, 19 nt, Homo sapiens
  misc_RNA (1)...(19): siRNA sense strand
cagcagcgccuaccucaag

SEQ ID NO: 1867268 - RNA, 19 nt, Homo sapiens
  misc_RNA (1)...(19): siRNA sense strand
ggccuagucuccucuaucg

SEQ ID NO: 1867269 - RNA, 19 nt, Homo sapiens
  misc_RNA (1)...(19): siRNA sense strand
gaccaucgaccguuucucu

SEQ ID NO: 1867270 - RNA, 19 nt, Homo sapiens
  misc_RNA (1)...(19): siRNA sense strand
gcgacaagagcuacaagga

SEQ ID NO: 1867271 - RNA, 19 nt, Homo sapiens
  misc_RNA (1)...(19): siRNA sense strand
cagcaacgcaaccucauca

SEQ ID NO: 1867272 - RNA, 19 nt, Homo sapiens
  misc_RNA (1)...(19): siRNA sense strand
ucuacccgcuggccaaguu

SEQ ID NO: 1867273 - RNA, 19 nt, Homo sapiens
  misc_RNA (1)...(19): siRNA sense strand
gcaagggcaagcucgacuu

SEQ ID NO: 1867274 - RNA, 19 nt, Homo sapiens
  misc_RNA (1)...(19): siRNA sense strand
ccgagcagcugagccugaa

SEQ ID NO: 1867275 - RNA, 19 nt, Homo sapiens
  misc_RNA (1)...(19): siRNA sense strand
cgacggcgacgacuacaag

SEQ ID NO: 1867276 - RNA, 19 nt, Homo sapiens
  misc_RNA (1)...(19): siRNA sense strand
caagggcaagcucgacuuc

SEQ ID NO: 1867277 - RNA, 19 nt, Homo sapiens
  misc_RNA (1)...(19): siRNA sense strand
caaccuguacgugugcauu

SEQ ID NO: 1867278 - RNA, 19 nt, Homo sapiens
  misc_RNA (1)...(19): siRNA sense strand
ucguggcgcugugcaagaa

SEQ ID NO: 1867279 - RNA, 19 nt, Homo sapiens
  misc_RNA (1)...(19): siRNA sense strand
gaacggagcuuugacugua

SEQ ID NO: 1867280 - RNA, 19 nt, Homo sapiens
  misc_RNA (1)...(19): siRNA sense strand
gaacggagcucggaguuug

SEQ ID NO: 1867281 - RNA, 19 nt, Homo sapiens
  misc_RNA (1)...(19): siRNA sense strand
gcaagaaggcucacagcua

SEQ ID NO: 1867282 - RNA, 19 nt, Homo sapiens
  misc_RNA (1)...(19): siRNA sense strand
gcagacagcacuucaaaug

SEQ ID NO: 1867283 - RNA, 19 nt, Homo sapiens
  misc_RNA (1)...(19): siRNA sense strand
gcaagagguuccaccagaa

SEQ ID NO: 1867284 - RNA, 19 nt, Homo sapiens
  misc_RNA (1)...(19): siRNA sense strand
caaaggcgcuggcgucaag

SEQ ID NO: 1867285 - RNA, 19 nt, Homo sapiens
  misc_RNA (1)...(19): siRNA sense strand
gagcagacagcacuucaaa

SEQ ID NO: 1867286 - RNA, 19 nt, Homo sapiens
  misc_RNA (1)...(19): siRNA sense strand
gcucggaguuugaggacuu

SEQ ID NO: 1867287 - RNA, 19 nt, Homo sapiens
  misc_RNA (1)...(19): siRNA sense strand
gcgcucauuucucgucaaa

SEQ ID NO: 1867288 - RNA, 19 nt, Homo sapiens
  misc_RNA (1)...(19): siRNA sense strand
agacagcacuucaaaugca

SEQ ID NO: 1867289 - RNA, 19 nt, Homo sapiens
  misc_RNA (1)...(19): siRNA sense strand
gaagucagacaugaagaaa

SEQ ID NO: 1867290 - RNA, 19 nt, Homo sapiens
  misc_RNA (1)...(19): siRNA sense strand
ccacacaccugcuuaucca

SEQ ID NO: 1867291 - RNA, 19 nt, Homo sapiens
  misc_RNA (1)...(19): siRNA sense strand
uguaagaucugugggaaga

SEQ ID NO: 1867292 - RNA, 19 nt, Homo sapiens
  misc_RNA (1)...(19): siRNA sense strand
caccagaagucagacauga

SEQ ID NO: 1867293 - RNA, 19 nt, Homo sapiens
  misc_RNA (1)...(19): siRNA sense strand
agucagacaugaagaaaca

SEQ ID NO: 1867294 - RNA, 19 nt, Homo sapiens
  misc_RNA (1)...(19): siRNA sense strand
agacuauucccuccguuua

SEQ ID NO: 1867295 - RNA, 19 nt, Homo sapiens
  misc_RNA (1)...(19): siRNA sense strand
ggaacggagcuuugacugu

SEQ ID NO: 1867296 - RNA, 19 nt, Homo sapiens
  misc_RNA (1)...(19): siRNA sense strand
cauccacacuguccacaca

SEQ ID NO: 1867297 - RNA, 19 nt, Homo sapiens
  misc_RNA (1)...(19): siRNA sense strand
gccugggccucuucuguga

SEQ ID NO: 1867298 - RNA, 19 nt, Homo sapiens
  misc_RNA (1)...(19): siRNA sense strand
gagcuuugacuguaagauc

SEQ ID NO: 1867299 - RNA, 19 nt, Homo sapiens
  misc_RNA (1)...(19): siRNA sense strand
cauccacacuggugagaag

SEQ ID NO: 1867300 - RNA, 19 nt, Homo sapiens
  misc_RNA (1)...(19): siRNA sense strand
gcagcaugggcucaaauga

SEQ ID NO: 1867301 - RNA, 19 nt, Homo sapiens
  misc_RNA (1)...(19): siRNA sense strand
gcucauuucucgucaaaag

SEQ ID NO: 1867302 - RNA, 19 nt, Homo sapiens
  misc_RNA (1)...(19): siRNA sense strand
gcaaacacacaggcuucaa

SEQ ID NO: 1867303 - RNA, 19 nt, Homo sapiens
  misc_RNA (1)...(19): siRNA sense strand
ccagaagucagacaugaag

SEQ ID NO: 1867304 - RNA, 19 nt, Homo sapiens
  misc_RNA (1)...(19): siRNA sense strand
agaagucagacaugaagaa

SEQ ID NO: 1867305 - RNA, 19 nt, Homo sapiens
  misc_RNA (1)...(19): siRNA sense strand
acaugaagaaacacacuuu

SEQ ID NO: 1867306 - RNA, 19 nt, Homo sapiens
  misc_RNA (1)...(19): siRNA sense strand
ccacacuggugagaagcuu

SEQ ID NO: 1867307 - RNA, 19 nt, Homo sapiens
  misc_RNA (1)...(19): siRNA sense strand
caaacacacaggcuucaag

SEQ ID NO: 1867308 - RNA, 19 nt, Homo sapiens
  misc_RNA (1)...(19): siRNA sense strand
caagugcagcaagguguuu

SEQ ID NO: 1867309 - RNA, 19 nt, Homo sapiens
  misc_RNA (1)...(19): siRNA sense strand
cagacuauucccuccguuu

SEQ ID NO: 1867310 - RNA, 19 nt, Homo sapiens
  misc_RNA (1)...(19): siRNA sense strand
acuauucccuccguuuaga

SEQ ID NO: 1867311 - RNA, 19 nt, Homo sapiens
  misc_RNA (1)...(19): siRNA sense strand
ccagagcuccaaccucauc

SEQ ID NO: 1867312 - RNA, 19 nt, Homo sapiens
  misc_RNA (1)...(19): siRNA sense strand
ugucaguacuguggcaaga

SEQ ID NO: 1867313 - RNA, 19 nt, Homo sapiens
  misc_RNA (1)...(19): siRNA sense strand
gaccgaagccccagacaga

SEQ ID NO: 1867314 - RNA, 19 nt, Homo sapiens
  misc_RNA (1)...(19): siRNA sense strand
gcgaacggagcucggaguu

SEQ ID NO: 1867315 - RNA, 19 nt, Homo sapiens
  misc_RNA (1)...(19): siRNA sense strand
aacggagcuuugacuguaa

SEQ ID NO: 1867316 - RNA, 19 nt, Homo sapiens
  misc_RNA (1)...(19): siRNA sense strand
caagagguuccaccagaag

SEQ ID NO: 1867317 - RNA, 19 nt, Homo sapiens
  misc_RNA (1)...(19): siRNA sense strand
gacaugaagaaacacacuu

SEQ ID NO: 1867318 - RNA, 19 nt, Homo sapiens
  misc_RNA (1)...(19): siRNA sense strand
ccacagccgcaaacacaca

SEQ ID NO: 1867319 - RNA, 19 nt, Homo sapiens
  misc_RNA (1)...(19): siRNA sense strand
cgaacggagcucggaguuu

SEQ ID NO: 1867320 - RNA, 19 nt, Homo sapiens
  misc_RNA (1)...(19): siRNA sense strand
gacgcagcaugggcucaaa

SEQ ID NO: 1867321 - RNA, 19 nt, Homo sapiens
  misc_RNA (1)...(19): siRNA sense strand
gagccuggagcagcacaaa

SEQ ID NO: 1867322 - RNA, 19 nt, Homo sapiens
  misc_RNA (1)...(19): siRNA sense strand
gcgccaagcuguacgacaa

SEQ ID NO: 1867323 - RNA, 19 nt, Homo sapiens
  misc_RNA (1)...(19): siRNA sense strand
ugagcggugugaacaagua

SEQ ID NO: 1867324 - RNA, 19 nt, Homo sapiens
  misc_RNA (1)...(19): siRNA sense strand
gggaugagcagaaggacuu

SEQ ID NO: 1867325 - RNA, 19 nt, Homo sapiens
  misc_RNA (1)...(19): siRNA sense strand
gcaccaacgucugcuacga

SEQ ID NO: 1867326 - RNA, 19 nt, Homo sapiens
  misc_RNA (1)...(19): siRNA sense strand
gauccagacccaggcaaua

SEQ ID NO: 1867327 - RNA, 19 nt, Homo sapiens
  misc_RNA (1)...(19): siRNA sense strand
caucguggacugcuacauu

SEQ ID NO: 1867328 - RNA, 19 nt, Homo sapiens
  misc_RNA (1)...(19): siRNA sense strand
agaaggacuuugacugcaa

SEQ ID NO: 1867329 - RNA, 19 nt, Homo sapiens
  misc_RNA (1)...(19): siRNA sense strand
cgacaacgcaggcaagaag

SEQ ID NO: 1867330 - RNA, 19 nt, Homo sapiens
  misc_RNA (1)...(19): siRNA sense strand
ccaacaucguggacugcua

SEQ ID NO: 1867331 - RNA, 19 nt, Homo sapiens
  misc_RNA (1)...(19): siRNA sense strand
gagcucugcuaccucaucu

SEQ ID NO: 1867332 - RNA, 19 nt, Homo sapiens
  misc_RNA (1)...(19): siRNA sense strand
caucuucaagcucaucauu

SEQ ID NO: 1867333 - RNA, 19 nt, Homo sapiens
  misc_RNA (1)...(19): siRNA sense strand
aaucuucaccuacuucaug

SEQ ID NO: 1867334 - RNA, 19 nt, Homo sapiens
  misc_RNA (1)...(19): siRNA sense strand
caucauugaguuccucuuc

SEQ ID NO: 1867335 - RNA, 19 nt, Homo sapiens
  misc_RNA (1)...(19): siRNA sense strand
ucucuggcauggcuucaau

SEQ ID NO: 1867336 - RNA, 19 nt, Homo sapiens
  misc_RNA (1)...(19): siRNA sense strand
cagcucaucuucgucacau

SEQ ID NO: 1867337 - RNA, 19 nt, Homo sapiens
  misc_RNA (1)...(19): siRNA sense strand
caacgucugcuacgacaac

SEQ ID NO: 1867338 - RNA, 19 nt, Homo sapiens
  misc_RNA (1)...(19): siRNA sense strand
gcaucguacucaccaucug

SEQ ID NO: 1867339 - RNA, 19 nt, Homo sapiens
  misc_RNA (1)...(19): siRNA sense strand
gaaaaucuucaccuacuuc

SEQ ID NO: 1867340 - RNA, 19 nt, Homo sapiens
  misc_RNA (1)...(19): siRNA sense strand
ugcgaggccugcacaagga

SEQ ID NO: 1867341 - RNA, 19 nt, Homo sapiens
  misc_RNA (1)...(19): siRNA sense strand
gagcagaaggacuuugacu

SEQ ID NO: 1867342 - RNA, 19 nt, Homo sapiens
  misc_RNA (1)...(19): siRNA sense strand
cuacugagcggugugaaca

SEQ ID NO: 1867343 - RNA, 19 nt, Homo sapiens
  misc_RNA (1)...(19): siRNA sense strand
gugguggaccuaccuguuc

SEQ ID NO: 1867344 - RNA, 19 nt, Homo sapiens
  misc_RNA (1)...(19): siRNA sense strand
gcaaauaaccucaucugua

SEQ ID NO: 1867345 - RNA, 19 nt, Homo sapiens
  misc_RNA (1)...(19): siRNA sense strand
gcuaugaccuucccaagua

SEQ ID NO: 1867346 - RNA, 19 nt, Homo sapiens
  misc_RNA (1)...(19): siRNA sense strand
ggacgcggaucccaaguua

SEQ ID NO: 1867347 - RNA, 19 nt, Homo sapiens
  misc_RNA (1)...(19): siRNA sense strand
caaauaaccucaucuguag

SEQ ID NO: 1867348 - RNA, 19 nt, Homo sapiens
  misc_RNA (1)...(19): siRNA sense strand
gaacagaaccucccaagga

SEQ ID NO: 1867349 - RNA, 19 nt, Homo sapiens
  misc_RNA (1)...(19): siRNA sense strand
gaggaugccuugucaauga

SEQ ID NO: 1867350 - RNA, 19 nt, Homo sapiens
  misc_RNA (1)...(19): siRNA sense strand
cagaagaccuuaauaaaca

SEQ ID NO: 1867351 - RNA, 19 nt, Homo sapiens
  misc_RNA (1)...(19): siRNA sense strand
ggaagagacuauuucugua

SEQ ID NO: 1867352 - RNA, 19 nt, Homo sapiens
  misc_RNA (1)...(19): siRNA sense strand
ggagagacaucacaaggaa

SEQ ID NO: 1867353 - RNA, 19 nt, Homo sapiens
  misc_RNA (1)...(19): siRNA sense strand
gaauuuagcugugagguau

SEQ ID NO: 1867354 - RNA, 19 nt, Homo sapiens
  misc_RNA (1)...(19): siRNA sense strand
ggaagaagccugucagaug

SEQ ID NO: 1867355 - RNA, 19 nt, Homo sapiens
  misc_RNA (1)...(19): siRNA sense strand
gaagacaucucugagguau

SEQ ID NO: 1867356 - RNA, 19 nt, Homo sapiens
  misc_RNA (1)...(19): siRNA sense strand
gaagagacuauuucuguaa

SEQ ID NO: 1867357 - RNA, 19 nt, Homo sapiens
  misc_RNA (1)...(19): siRNA sense strand
cacugaagaugcacuauua

SEQ ID NO: 1867358 - RNA, 19 nt, Homo sapiens
  misc_RNA (1)...(19): siRNA sense strand
gaaaagaauugcaaggaaa

SEQ ID NO: 1867359 - RNA, 19 nt, Homo sapiens
  misc_RNA (1)...(19): siRNA sense strand
ugacagugcugauaaagug

SEQ ID NO: 1867360 - RNA, 19 nt, Homo sapiens
  misc_RNA (1)...(19): siRNA sense strand
gaaagggaccgcuguuguu

SEQ ID NO: 1867361 - RNA, 19 nt, Homo sapiens
  misc_RNA (1)...(19): siRNA sense strand
caaaugugcugacuguuca

SEQ ID NO: 1867362 - RNA, 19 nt, Homo sapiens
  misc_RNA (1)...(19): siRNA sense strand
uaaauacaauccugacguu

SEQ ID NO: 1867363 - RNA, 19 nt, Homo sapiens
  misc_RNA (1)...(19): siRNA sense strand
gaaagugacaggaaacaug

SEQ ID NO: 1867364 - RNA, 19 nt, Homo sapiens
  misc_RNA (1)...(19): siRNA sense strand
acaaagauacucaggauuu

SEQ ID NO: 1867365 - RNA, 19 nt, Homo sapiens
  misc_RNA (1)...(19): siRNA sense strand
gcaaagcuuucagaaccua

SEQ ID NO: 1867366 - RNA, 19 nt, Homo sapiens
  misc_RNA (1)...(19): siRNA sense strand
ucaagagaguguaguuauu

SEQ ID NO: 1867367 - RNA, 19 nt, Homo sapiens
  misc_RNA (1)...(19): siRNA sense strand
gagcuuggagaaacaaaua

SEQ ID NO: 1867368 - RNA, 19 nt, Homo sapiens
  misc_RNA (1)...(19): siRNA sense strand
gaucccaaguuacccagua

SEQ ID NO: 1867369 - RNA, 19 nt, Homo sapiens
  misc_RNA (1)...(19): siRNA sense strand
guacauggaugggccagaa

SEQ ID NO: 1867370 - RNA, 19 nt, Homo sapiens
  misc_RNA (1)...(19): siRNA sense strand
gggaagagacuauuucugu

SEQ ID NO: 1867371 - RNA, 19 nt, Homo sapiens
  misc_RNA (1)...(19): siRNA sense strand
gacagacucuccacaagga

SEQ ID NO: 1867372 - RNA, 19 nt, Homo sapiens
  misc_RNA (1)...(19): siRNA sense strand
gaaggagcuuggagaaaca

SEQ ID NO: 1867373 - RNA, 19 nt, Homo sapiens
  misc_RNA (1)...(19): siRNA sense strand
ggaaacaugccaacucaau

SEQ ID NO: 1867374 - RNA, 19 nt, Homo sapiens
  misc_RNA (1)...(19): siRNA sense strand
gauggaggaugccuuguca

SEQ ID NO: 1867375 - RNA, 19 nt, Homo sapiens
  misc_RNA (1)...(19): siRNA sense strand
gcagcuggcuaccaaagga

SEQ ID NO: 1867376 - RNA, 19 nt, Homo sapiens
  misc_RNA (1)...(19): siRNA sense strand
ggaccgcuguuguuccauu

SEQ ID NO: 1867377 - RNA, 19 nt, Homo sapiens
  misc_RNA (1)...(19): siRNA sense strand
caucuccucuccuuacaaa

SEQ ID NO: 1867378 - RNA, 19 nt, Homo sapiens
  misc_RNA (1)...(19): siRNA sense strand
ggaaaagaauugcaaggaa

SEQ ID NO: 1867379 - RNA, 19 nt, Homo sapiens
  misc_RNA (1)...(19): siRNA sense strand
acacaaagauacucaggau

SEQ ID NO: 1867380 - RNA, 19 nt, Homo sapiens
  misc_RNA (1)...(19): siRNA sense strand
agacaucucugagguauca

SEQ ID NO: 1867381 - RNA, 19 nt, Homo sapiens
  misc_RNA (1)...(19): siRNA sense strand
ccaacucaaucccucuuaa

SEQ ID NO: 1867382 - RNA, 19 nt, Homo sapiens
  misc_RNA (1)...(19): siRNA sense strand
caggaaacaugccaacuca

SEQ ID NO: 1867383 - RNA, 19 nt, Homo sapiens
  misc_RNA (1)...(19): siRNA sense strand
gcaaggagaagcccacuca

SEQ ID NO: 1867384 - RNA, 19 nt, Homo sapiens
  misc_RNA (1)...(19): siRNA sense strand
gccaagaagugaaggaauc

SEQ ID NO: 1867385 - RNA, 19 nt, Homo sapiens
  misc_RNA (1)...(19): siRNA sense strand
caaagauacucaggauuuc

SEQ ID NO: 1867386 - RNA, 19 nt, Homo sapiens
  misc_RNA (1)...(19): siRNA sense strand
gugcaggccucucgcaaga

SEQ ID NO: 1867387 - RNA, 19 nt, Homo sapiens
  misc_RNA (1)...(19): siRNA sense strand
cgaggucgauucuccaaau

SEQ ID NO: 1867388 - RNA, 19 nt, Homo sapiens
  misc_RNA (1)...(19): siRNA sense strand
gaaguuagccccaaagaga

SEQ ID NO: 1867389 - RNA, 19 nt, Homo sapiens
  misc_RNA (1)...(19): siRNA sense strand
cucaaucccucuuaaugua

SEQ ID NO: 1867390 - RNA, 19 nt, Homo sapiens
  misc_RNA (1)...(19): siRNA sense strand
auugaaaccucuuccagua

SEQ ID NO: 1867391 - RNA, 19 nt, Homo sapiens
  misc_RNA (1)...(19): siRNA sense strand
caagagaguguaguuauug

SEQ ID NO: 1867392 - RNA, 19 nt, Homo sapiens
  misc_RNA (1)...(19): siRNA sense strand
gcagacagacucuccacaa

SEQ ID NO: 1867393 - RNA, 19 nt, Homo sapiens
  misc_RNA (1)...(19): siRNA sense strand
agccagaccuucacacauu

SEQ ID NO: 1867394 - RNA, 19 nt, Homo sapiens
  misc_RNA (1)...(19): siRNA sense strand
aaucgaaagugacaggaaa

SEQ ID NO: 1867395 - RNA, 19 nt, Homo sapiens
  misc_RNA (1)...(19): siRNA sense strand
aaagagaucagcaguugaa

SEQ ID NO: 1867396 - RNA, 19 nt, Homo sapiens
  misc_RNA (1)...(19): siRNA sense strand
gaguguaguuauuguggaa

SEQ ID NO: 1867397 - RNA, 19 nt, Homo sapiens
  misc_RNA (1)...(19): siRNA sense strand
gcaguccgauggagaugga

SEQ ID NO: 1867398 - RNA, 19 nt, Homo sapiens
  misc_RNA (1)...(19): siRNA sense strand
uaacaugugcggaagaaga

SEQ ID NO: 1867399 - RNA, 19 nt, Homo sapiens
  misc_RNA (1)...(19): siRNA sense strand
gguauaugcccuuggauug

SEQ ID NO: 1867400 - RNA, 19 nt, Homo sapiens
  misc_RNA (1)...(19): siRNA sense strand
gcccuuggauugcauguuc

SEQ ID NO: 1867401 - RNA, 19 nt, Homo sapiens
  misc_RNA (1)...(19): siRNA sense strand
ggaaggugguucugaagac

SEQ ID NO: 1867402 - RNA, 19 nt, Homo sapiens
  misc_RNA (1)...(19): siRNA sense strand
gcagauacaggccaagugu

SEQ ID NO: 1867403 - RNA, 19 nt, Homo sapiens
  misc_RNA (1)...(19): siRNA sense strand
ggccaaguguggauuguca

SEQ ID NO: 1867404 - RNA, 19 nt, Homo sapiens
  misc_RNA (1)...(19): siRNA sense strand
gcauccagcucgacguuag

SEQ ID NO: 1867405 - RNA, 19 nt, Homo sapiens
  misc_RNA (1)...(19): siRNA sense strand
ggucagaggcaucacauca

SEQ ID NO: 1867406 - RNA, 19 nt, Homo sapiens
  misc_RNA (1)...(19): siRNA sense strand
cagaagaggcuaugaccuu

SEQ ID NO: 1867407 - RNA, 19 nt, Homo sapiens
  misc_RNA (1)...(19): siRNA sense strand
guuuguggcuuccuauuuc

SEQ ID NO: 1867408 - RNA, 19 nt, Homo sapiens
  misc_RNA (1)...(19): siRNA sense strand
aaaugcagcugaugacagu

SEQ ID NO: 1867409 - RNA, 19 nt, Homo sapiens
  misc_RNA (1)...(19): siRNA sense strand
aacagaaccucccaaggaa

SEQ ID NO: 1867410 - RNA, 19 nt, Homo sapiens
  misc_RNA (1)...(19): siRNA sense strand
ccaaaugugcugacuguuc

SEQ ID NO: 1867411 - RNA, 19 nt, Homo sapiens
  misc_RNA (1)...(19): siRNA sense strand
ggucgauucuccaaaugug

SEQ ID NO: 1867412 - RNA, 19 nt, Homo sapiens
  misc_RNA (1)...(19): siRNA sense strand
ggcaauuucuuugaguaaa

SEQ ID NO: 1867413 - RNA, 19 nt, Homo sapiens
  misc_RNA (1)...(19): siRNA sense strand
gcggacacauaauggcaaa

SEQ ID NO: 1867414 - RNA, 19 nt, Homo sapiens
  misc_RNA (1)...(19): siRNA sense strand
gcucgacguuagaaggaaa

SEQ ID NO: 1867415 - RNA, 19 nt, Homo sapiens
  misc_RNA (1)...(19): siRNA sense strand
gaaacaugccaacucaauc

SEQ ID NO: 1867416 - RNA, 19 nt, Homo sapiens
  misc_RNA (1)...(19): siRNA sense strand
uacaaaaucugcaugguuu

SEQ ID NO: 1867417 - RNA, 19 nt, Homo sapiens
  misc_RNA (1)...(19): siRNA sense strand
gagaaggagcuuggagaaa

SEQ ID NO: 1867418 - RNA, 19 nt, Homo sapiens
  misc_RNA (1)...(19): siRNA sense strand
aggcaucacaucacuguua

SEQ ID NO: 1867419 - RNA, 19 nt, Homo sapiens
  misc_RNA (1)...(19): siRNA sense strand
gugcugauaaagugaauaa

SEQ ID NO: 1867420 - RNA, 19 nt, Homo sapiens
  misc_RNA (1)...(19): siRNA sense strand
ugaugacagugcugauaaa

SEQ ID NO: 1867421 - RNA, 19 nt, Homo sapiens
  misc_RNA (1)...(19): siRNA sense strand
aaucacaugcggacacaua

SEQ ID NO: 1867422 - RNA, 19 nt, Homo sapiens
  misc_RNA (1)...(19): siRNA sense strand
ggacacugaagaugcacua

SEQ ID NO: 1867423 - RNA, 19 nt, Homo sapiens
  misc_RNA (1)...(19): siRNA sense strand
agaaggagcuuggagaaac

SEQ ID NO: 1867424 - RNA, 19 nt, Homo sapiens
  misc_RNA (1)...(19): siRNA sense strand
caugagaacacacaaagau

SEQ ID NO: 1867425 - RNA, 19 nt, Homo sapiens
  misc_RNA (1)...(19): siRNA sense strand
aaaggccugugucauauca

SEQ ID NO: 1867426 - RNA, 19 nt, Homo sapiens
  misc_RNA (1)...(19): siRNA sense strand
gacuggagcauaaauacaa

SEQ ID NO: 1867427 - RNA, 19 nt, Homo sapiens
  misc_RNA (1)...(19): siRNA sense strand
gagcaucuccucuccuuac

SEQ ID NO: 1867428 - RNA, 19 nt, Homo sapiens
  misc_RNA (1)...(19): siRNA sense strand
aaacaaauaagggcaguug

SEQ ID NO: 1867429 - RNA, 19 nt, Homo sapiens
  misc_RNA (1)...(19): siRNA sense strand
gaggucgauucuccaaaug

SEQ ID NO: 1867430 - RNA, 19 nt, Homo sapiens
  misc_RNA (1)...(19): siRNA sense strand
uugaaacucaggcaaauaa

SEQ ID NO: 1867431 - RNA, 19 nt, Homo sapiens
  misc_RNA (1)...(19): siRNA sense strand
ucagaagaccuuaauaaac

SEQ ID NO: 1867432 - RNA, 19 nt, Homo sapiens
  misc_RNA (1)...(19): siRNA sense strand
ggaugggccagaagugauu

SEQ ID NO: 1867433 - RNA, 19 nt, Homo sapiens
  misc_RNA (1)...(19): siRNA sense strand
gcugaugacagugcugaua

SEQ ID NO: 1867434 - RNA, 19 nt, Homo sapiens
  misc_RNA (1)...(19): siRNA sense strand
gauggugccaaagauguua

SEQ ID NO: 1867435 - RNA, 19 nt, Homo sapiens
  misc_RNA (1)...(19): siRNA sense strand
ugacagugcgcaaaccaaa

SEQ ID NO: 1867436 - RNA, 19 nt, Homo sapiens
  misc_RNA (1)...(19): siRNA sense strand
ggacacauaauggcaaauc

SEQ ID NO: 1867437 - RNA, 19 nt, Homo sapiens
  misc_RNA (1)...(19): siRNA sense strand
gugauuggcagcucucuug

SEQ ID NO: 1867438 - RNA, 19 nt, Homo sapiens
  misc_RNA (1)...(19): siRNA sense strand
cugcuuaccuggaccuguu

SEQ ID NO: 1867439 - RNA, 19 nt, Homo sapiens
  misc_RNA (1)...(19): siRNA sense strand
guuguuccauuccgagcua

SEQ ID NO: 1867440 - RNA, 19 nt, Homo sapiens
  misc_RNA (1)...(19): siRNA sense strand
ugagaacacacaaagauuc

SEQ ID NO: 1867441 - RNA, 19 nt, Homo sapiens
  misc_RNA (1)...(19): siRNA sense strand
guugagauccacaugagaa

SEQ ID NO: 1867442 - RNA, 19 nt, Homo sapiens
  misc_RNA (1)...(19): siRNA sense strand
gaccuucacacauucagaa

SEQ ID NO: 1867443 - RNA, 19 nt, Homo sapiens
  misc_RNA (1)...(19): siRNA sense strand
caacucaaucccucuuaau

SEQ ID NO: 1867444 - RNA, 19 nt, Homo sapiens
  misc_RNA (1)...(19): siRNA sense strand
caucaacccugucauauau

SEQ ID NO: 1867445 - RNA, 19 nt, Homo sapiens
  misc_RNA (1)...(19): siRNA sense strand
gcacccauguuccugcuaa

SEQ ID NO: 1867446 - RNA, 19 nt, Homo sapiens
  misc_RNA (1)...(19): siRNA sense strand
ucagaccgcucaccaagaa

SEQ ID NO: 1867447 - RNA, 19 nt, Homo sapiens
  misc_RNA (1)...(19): siRNA sense strand
aaagcgcucugucucauuu

SEQ ID NO: 1867448 - RNA, 19 nt, Homo sapiens
  misc_RNA (1)...(19): siRNA sense strand
ugucauauaugcuuucaga

SEQ ID NO: 1867449 - RNA, 19 nt, Homo sapiens
  misc_RNA (1)...(19): siRNA sense strand
gagaggacggucacguuua

SEQ ID NO: 1867450 - RNA, 19 nt, Homo sapiens
  misc_RNA (1)...(19): siRNA sense strand
ggagaggacggucacguuu

SEQ ID NO: 1867451 - RNA, 19 nt, Homo sapiens
  misc_RNA (1)...(19): siRNA sense strand
gaggcacgcccaucagaua

SEQ ID NO: 1867452 - RNA, 19 nt, Homo sapiens
  misc_RNA (1)...(19): siRNA sense strand
caucaucaacccugucaua

SEQ ID NO: 1867453 - RNA, 19 nt, Homo sapiens
  misc_RNA (1)...(19): siRNA sense strand
gaacccucaucuccuguga

SEQ ID NO: 1867454 - RNA, 19 nt, Homo sapiens
  misc_RNA (1)...(19): siRNA sense strand
gaaagcgcucugucucauu

SEQ ID NO: 1867455 - RNA, 19 nt, Homo sapiens
  misc_RNA (1)...(19): siRNA sense strand
cacccucuauuccuugaua

SEQ ID NO: 1867456 - RNA, 19 nt, Homo sapiens
  misc_RNA (1)...(19): siRNA sense strand
ucaucaacccugucauaua

SEQ ID NO: 1867457 - RNA, 19 nt, Homo sapiens
  misc_RNA (1)...(19): siRNA sense strand
gaaaccaagagauccagaa

SEQ ID NO: 1867458 - RNA, 19 nt, Homo sapiens
  misc_RNA (1)...(19): siRNA sense strand
ggacggucacguuuaccua

SEQ ID NO: 1867459 - RNA, 19 nt, Homo sapiens
  misc_RNA (1)...(19): siRNA sense strand
aaaccaagagauccagaaa

SEQ ID NO: 1867460 - RNA, 19 nt, Homo sapiens
  misc_RNA (1)...(19): siRNA sense strand
acccucaucuccugugaaa

SEQ ID NO: 1867461 - RNA, 19 nt, Homo sapiens
  misc_RNA (1)...(19): siRNA sense strand
agaaagcgcucugucucau

SEQ ID NO: 1867462 - RNA, 19 nt, Homo sapiens
  misc_RNA (1)...(19): siRNA sense strand
ggacucaucaccaauuuug

SEQ ID NO: 1867463 - RNA, 19 nt, Homo sapiens
  misc_RNA (1)...(19): siRNA sense strand
ucacuguacuacgcucuga

SEQ ID NO: 1867464 - RNA, 19 nt, Homo sapiens
  misc_RNA (1)...(19): siRNA sense strand
caccuacaauuccaucauc

SEQ ID NO: 1867465 - RNA, 19 nt, Homo sapiens
  misc_RNA (1)...(19): siRNA sense strand
ucuguaagauugugaugag

SEQ ID NO: 1867466 - RNA, 19 nt, Homo sapiens
  misc_RNA (1)...(19): siRNA sense strand
agaggacggucacguuuac

SEQ ID NO: 1867467 - RNA, 19 nt, Homo sapiens
  misc_RNA (1)...(19): siRNA sense strand
agccugagcucguagucaa

SEQ ID NO: 1867468 - RNA, 19 nt, Homo sapiens
  misc_RNA (1)...(19): siRNA sense strand
ggaugccuuucacccucua

SEQ ID NO: 1867469 - RNA, 19 nt, Homo sapiens
  misc_RNA (1)...(19): siRNA sense strand
ugauagcggauuacaccua

SEQ ID NO: 1867470 - RNA, 19 nt, Homo sapiens
  misc_RNA (1)...(19): siRNA sense strand
uguuugcgcucaugcuuca

SEQ ID NO: 1867471 - RNA, 19 nt, Homo sapiens
  misc_RNA (1)...(19): siRNA sense strand
accaagagauccagaaagc

SEQ ID NO: 1867472 - RNA, 19 nt, Homo sapiens
  misc_RNA (1)...(19): siRNA sense strand
gcucaugcuucagcucuac

SEQ ID NO: 1867473 - RNA, 19 nt, Homo sapiens
  misc_RNA (1)...(19): siRNA sense strand
ccuaccugcuucagucaga

SEQ ID NO: 1867474 - RNA, 19 nt, Homo sapiens
  misc_RNA (1)...(19): siRNA sense strand
gacggucacguuuaccuau

SEQ ID NO: 1867475 - RNA, 19 nt, Homo sapiens
  misc_RNA (1)...(19): siRNA sense strand
ggucacgaucggccucauu

SEQ ID NO: 1867476 - RNA, 19 nt, Homo sapiens
  misc_RNA (1)...(19): siRNA sense strand
gccucgggauuauuuagau

SEQ ID NO: 1867477 - RNA, 19 nt, Homo sapiens
  misc_RNA (1)...(19): siRNA sense strand
uguccuuccucuucauguu

SEQ ID NO: 1867478 - RNA, 19 nt, Homo sapiens
  misc_RNA (1)...(19): siRNA sense strand
ucaacccugucauauaugc

SEQ ID NO: 1867479 - RNA, 19 nt, Homo sapiens
  misc_RNA (1)...(19): siRNA sense strand
ccucgggauuauuuagaug

SEQ ID NO: 1867480 - RNA, 19 nt, Homo sapiens
  misc_RNA (1)...(19): siRNA sense strand
gccauugugguccuuauca

SEQ ID NO: 1867481 - RNA, 19 nt, Homo sapiens
  misc_RNA (1)...(19): siRNA sense strand
auuccuugauagcggauua

SEQ ID NO: 1867482 - RNA, 19 nt, Homo sapiens
  misc_RNA (1)...(19): siRNA sense strand
ccauguuccugcuaauagg

SEQ ID NO: 1867483 - RNA, 19 nt, Homo sapiens
  misc_RNA (1)...(19): siRNA sense strand
ccauugugguccuuaucau

SEQ ID NO: 1867484 - RNA, 19 nt, Homo sapiens
  misc_RNA (1)...(19): siRNA sense strand
guccuuccucuucauguuu

SEQ ID NO: 1867485 - RNA, 19 nt, Homo sapiens
  misc_RNA (1)...(19): siRNA sense strand
aaagggagcuccuacauga

SEQ ID NO: 1867486 - RNA, 19 nt, Homo sapiens
  misc_RNA (1)...(19): siRNA sense strand
aaaggcaacuccaauuaaa

SEQ ID NO: 1867487 - RNA, 19 nt, Homo sapiens
  misc_RNA (1)...(19): siRNA sense strand
uaaagaagcaucucuagga

SEQ ID NO: 1867488 - RNA, 19 nt, Homo sapiens
  misc_RNA (1)...(19): siRNA sense strand
uacaugaucuccgucaaua

SEQ ID NO: 1867489 - RNA, 19 nt, Homo sapiens
  misc_RNA (1)...(19): siRNA sense strand
ucacgcugauugaugauaa

SEQ ID NO: 1867490 - RNA, 19 nt, Homo sapiens
  misc_RNA (1)...(19): siRNA sense strand
ggauaaagaagcaucucua

SEQ ID NO: 1867491 - RNA, 19 nt, Homo sapiens
  misc_RNA (1)...(19): siRNA sense strand
ccagggagcucacgcugau

SEQ ID NO: 1867492 - RNA, 19 nt, Homo sapiens
  misc_RNA (1)...(19): siRNA sense strand
gcggcaagaacacuauuua

SEQ ID NO: 1867493 - RNA, 19 nt, Homo sapiens
  misc_RNA (1)...(19): siRNA sense strand
agacugaucgacaucuuua

SEQ ID NO: 1867494 - RNA, 19 nt, Homo sapiens
  misc_RNA (1)...(19): siRNA sense strand
gccauacugugcagagaaa

SEQ ID NO: 1867495 - RNA, 19 nt, Homo sapiens
  misc_RNA (1)...(19): siRNA sense strand
cgacaucuuuaucaucaau

SEQ ID NO: 1867496 - RNA, 19 nt, Homo sapiens
  misc_RNA (1)...(19): siRNA sense strand
gcaaagggagcuccuacau

SEQ ID NO: 1867497 - RNA, 19 nt, Homo sapiens
  misc_RNA (1)...(19): siRNA sense strand
gaguagcacugagacauca

SEQ ID NO: 1867498 - RNA, 19 nt, Homo sapiens
  misc_RNA (1)...(19): siRNA sense strand
gaagcugugugcccauuac

SEQ ID NO: 1867499 - RNA, 19 nt, Homo sapiens
  misc_RNA (1)...(19): siRNA sense strand
gagacccacucccauguuc

SEQ ID NO: 1867500 - RNA, 19 nt, Homo sapiens
  misc_RNA (1)...(19): siRNA sense strand
gauaaagaagcaucucuag

SEQ ID NO: 1867501 - RNA, 19 nt, Homo sapiens
  misc_RNA (1)...(19): siRNA sense strand
ugucaacccuuucauuuac

SEQ ID NO: 1867502 - RNA, 19 nt, Homo sapiens
  misc_RNA (1)...(19): siRNA sense strand
gugucaacccuuucauuua

SEQ ID NO: 1867503 - RNA, 19 nt, Homo sapiens
  misc_RNA (1)...(19): siRNA sense strand
ucaaguuccuggccauugu

SEQ ID NO: 1867504 - RNA, 19 nt, Homo sapiens
  misc_RNA (1)...(19): siRNA sense strand
uuacaccucugucuuccuu

SEQ ID NO: 1867505 - RNA, 19 nt, Homo sapiens
  misc_RNA (1)...(19): siRNA sense strand
ggaagcugugugcccauua

SEQ ID NO: 1867506 - RNA, 19 nt, Homo sapiens
  misc_RNA (1)...(19): siRNA sense strand
caaagggagcuccuacaug

SEQ ID NO: 1867507 - RNA, 19 nt, Homo sapiens
  misc_RNA (1)...(19): siRNA sense strand
uggcugcccuucaauacuu

SEQ ID NO: 1867508 - RNA, 19 nt, Homo sapiens
  misc_RNA (1)...(19): siRNA sense strand
gaguggacccuuggcauuu

SEQ ID NO: 1867509 - RNA, 19 nt, Homo sapiens
  misc_RNA (1)...(19): siRNA sense strand
caugaucuccgucaauaug

SEQ ID NO: 1867510 - RNA, 19 nt, Homo sapiens
  misc_RNA (1)...(19): siRNA sense strand
gagcucacgcugauugaug

SEQ ID NO: 1867511 - RNA, 19 nt, Homo sapiens
  misc_RNA (1)...(19): siRNA sense strand
ucaacccuuucauuuacua

SEQ ID NO: 1867512 - RNA, 19 nt, Homo sapiens
  misc_RNA (1)...(19): siRNA sense strand
ccaauuaaacucauauggu

SEQ ID NO: 1867513 - RNA, 19 nt, Homo sapiens
  misc_RNA (1)...(19): siRNA sense strand
caacuccaauuaaacucau

SEQ ID NO: 1867514 - RNA, 19 nt, Homo sapiens
  misc_RNA (1)...(19): siRNA sense strand
gcaacuccaauuaaacuca

SEQ ID NO: 1867515 - RNA, 19 nt, Homo sapiens
  misc_RNA (1)...(19): siRNA sense strand
uccaggaaauucagaagga

SEQ ID NO: 1867516 - RNA, 19 nt, Homo sapiens
  misc_RNA (1)...(19): siRNA sense strand
gccgaagacugaucgacau

SEQ ID NO: 1867517 - RNA, 19 nt, Homo sapiens
  misc_RNA (1)...(19): siRNA sense strand
ggaguagcacugagacauc

SEQ ID NO: 1867518 - RNA, 19 nt, Homo sapiens
  misc_RNA (1)...(19): siRNA sense strand
cuugugcccuugccugaaa

SEQ ID NO: 1867519 - RNA, 19 nt, Homo sapiens
  misc_RNA (1)...(19): siRNA sense strand
ugugucaacccuuucauuu

SEQ ID NO: 1867520 - RNA, 19 nt, Homo sapiens
  misc_RNA (1)...(19): siRNA sense strand
cuauuuacccucagcuauu

SEQ ID NO: 1867521 - RNA, 19 nt, Homo sapiens
  misc_RNA (1)...(19): siRNA sense strand
ccagucguauccaggaaau

SEQ ID NO: 1867522 - RNA, 19 nt, Homo sapiens
  misc_RNA (1)...(19): siRNA sense strand
ugauugaugauaagccaua

SEQ ID NO: 1867523 - RNA, 19 nt, Homo sapiens
  misc_RNA (1)...(19): siRNA sense strand
gaucgacaucuuuaucauc

SEQ ID NO: 1867524 - RNA, 19 nt, Homo sapiens
  misc_RNA (1)...(19): siRNA sense strand
acagcugugucaacccuuu

SEQ ID NO: 1867525 - RNA, 19 nt, Homo sapiens
  misc_RNA (1)...(19): siRNA sense strand
cuacgagcccaaacucuga

SEQ ID NO: 1867526 - RNA, 19 nt, Homo sapiens
  misc_RNA (1)...(19): siRNA sense strand
gaccugcuacuguugcauu

SEQ ID NO: 1867527 - RNA, 19 nt, Homo sapiens
  misc_RNA (1)...(19): siRNA sense strand
caccuucauucaugcagaa

SEQ ID NO: 1867528 - RNA, 19 nt, Homo sapiens
  misc_RNA (1)...(19): siRNA sense strand
gcugaagaaaucuauaaag

SEQ ID NO: 1867529 - RNA, 19 nt, Homo sapiens
  misc_RNA (1)...(19): siRNA sense strand
ggaagaggucugugucacu

SEQ ID NO: 1867530 - RNA, 19 nt, Homo sapiens
  misc_RNA (1)...(19): siRNA sense strand
gaggaagaggucuguguca

SEQ ID NO: 1867531 - RNA, 19 nt, Homo sapiens
  misc_RNA (1)...(19): siRNA sense strand
ugaguggacccuuggcauu

SEQ ID NO: 1867532 - RNA, 19 nt, Homo sapiens
  misc_RNA (1)...(19): siRNA sense strand
uauuuacccucagcuauuc

SEQ ID NO: 1867533 - RNA, 19 nt, Homo sapiens
  misc_RNA (1)...(19): siRNA sense strand
ggcugccucugacuucauu

SEQ ID NO: 1867534 - RNA, 19 nt, Homo sapiens
  misc_RNA (1)...(19): siRNA sense strand
gcuauucuucagcuuggua

SEQ ID NO: 1867535 - RNA, 19 nt, Homo sapiens
  misc_RNA (1)...(19): siRNA sense strand
gauuauuacuaugcuacga

SEQ ID NO: 1867536 - RNA, 19 nt, Homo sapiens
  misc_RNA (1)...(19): siRNA sense strand
ucuccuggcugcccuucaa

SEQ ID NO: 1867537 - RNA, 19 nt, Homo sapiens
  misc_RNA (1)...(19): siRNA sense strand
ggccuuaauuuucaccuuu

SEQ ID NO: 1867538 - RNA, 19 nt, Homo sapiens
  misc_RNA (1)...(19): siRNA sense strand
aacuaugacuuugggagua

SEQ ID NO: 1867539 - RNA, 19 nt, Homo sapiens
  misc_RNA (1)...(19): siRNA sense strand
gcccuucaauacuuucaag

SEQ ID NO: 1867540 - RNA, 19 nt, Homo sapiens
  misc_RNA (1)...(19): siRNA sense strand
ccacucccauguuccuuac

SEQ ID NO: 1867541 - RNA, 19 nt, Homo sapiens
  misc_RNA (1)...(19): siRNA sense strand
ucaugggagcguugcauuu

SEQ ID NO: 1867542 - RNA, 19 nt, Homo sapiens
  misc_RNA (1)...(19): siRNA sense strand
cuacaugaucuccgucaau

SEQ ID NO: 1867543 - RNA, 19 nt, Homo sapiens
  misc_RNA (1)...(19): siRNA sense strand
ucauucaugcagaagauuu

SEQ ID NO: 1867544 - RNA, 19 nt, Homo sapiens
  misc_RNA (1)...(19): siRNA sense strand
ugggagcguugcauuucaa

SEQ ID NO: 1867545 - RNA, 19 nt, Homo sapiens
  misc_RNA (1)...(19): siRNA sense strand
aaaaggcaacuccaauuaa

SEQ ID NO: 1867546 - RNA, 19 nt, Homo sapiens
  misc_RNA (1)...(19): siRNA sense strand
ggccagucguauccaggaa

SEQ ID NO: 1867547 - RNA, 19 nt, Homo sapiens
  misc_RNA (1)...(19): siRNA sense strand
auugugaccugcuacuguu

SEQ ID NO: 1867548 - RNA, 19 nt, Homo sapiens
  misc_RNA (1)...(19): siRNA sense strand
caugggagcguugcauuuc

SEQ ID NO: 1867549 - RNA, 19 nt, Homo sapiens
  misc_RNA (1)...(19): siRNA sense strand
aucgacaucuuuaucauca

SEQ ID NO: 1867550 - RNA, 19 nt, Homo sapiens
  misc_RNA (1)...(19): siRNA sense strand
ucaaucuggcugccucuga

SEQ ID NO: 1867551 - RNA, 19 nt, Homo sapiens
  misc_RNA (1)...(19): siRNA sense strand
gagcccaaacucugacauc

SEQ ID NO: 1867552 - RNA, 19 nt, Homo sapiens
  misc_RNA (1)...(19): siRNA sense strand
gggaguagcacugagacau

SEQ ID NO: 1867553 - RNA, 19 nt, Homo sapiens
  misc_RNA (1)...(19): siRNA sense strand
ggaggaggaagaggucugu

SEQ ID NO: 1867554 - RNA, 19 nt, Homo sapiens
  misc_RNA (1)...(19): siRNA sense strand
ggaaauucagaaggacaga

SEQ ID NO: 1867555 - RNA, 19 nt, Homo sapiens
  misc_RNA (1)...(19): siRNA sense strand
guggcagccuuucuugucu

SEQ ID NO: 1867556 - RNA, 19 nt, Homo sapiens
  misc_RNA (1)...(19): siRNA sense strand
ggugaccgaucuacuggua

SEQ ID NO: 1867557 - RNA, 19 nt, Homo sapiens
  misc_RNA (1)...(19): siRNA sense strand
ucaacgggcuggcgcugua

SEQ ID NO: 1867558 - RNA, 19 nt, Homo sapiens
  misc_RNA (1)...(19): siRNA sense strand
ucacggugcucaucaucuu

SEQ ID NO: 1867559 - RNA, 19 nt, Homo sapiens
  misc_RNA (1)...(19): siRNA sense strand
gcacugcuccauccucuuc

SEQ ID NO: 1867560 - RNA, 19 nt, Homo sapiens
  misc_RNA (1)...(19): siRNA sense strand
caagacacccucagucauc

SEQ ID NO: 1867561 - RNA, 19 nt, Homo sapiens
  misc_RNA (1)...(19): siRNA sense strand
ucagucaucuacaccauca

SEQ ID NO: 1867562 - RNA, 19 nt, Homo sapiens
  misc_RNA (1)...(19): siRNA sense strand
gcgcuucgcuguguacuac

SEQ ID NO: 1867563 - RNA, 19 nt, Homo sapiens
  misc_RNA (1)...(19): siRNA sense strand
caacagugcggaccaaugc

SEQ ID NO: 1867564 - RNA, 19 nt, Homo sapiens
  misc_RNA (1)...(19): siRNA sense strand
gcacguccucgguuacuuc

SEQ ID NO: 1867565 - RNA, 19 nt, Homo sapiens
  misc_RNA (1)...(19): siRNA sense strand
uggcagggcuggugcucaa

SEQ ID NO: 1867566 - RNA, 19 nt, Homo sapiens
  misc_RNA (1)...(19): siRNA sense strand
gccaagacacccucaguca

SEQ ID NO: 1867567 - RNA, 19 nt, Homo sapiens
  misc_RNA (1)...(19): siRNA sense strand
ugacaacagugcggaccaa

SEQ ID NO: 1867568 - RNA, 19 nt, Homo sapiens
  misc_RNA (1)...(19): siRNA sense strand
ccacgcgcuucgcugugua

SEQ ID NO: 1867569 - RNA, 19 nt, Homo sapiens
  misc_RNA (1)...(19): siRNA sense strand
ccaccgcagugacaacagu

SEQ ID NO: 1867570 - RNA, 19 nt, Homo sapiens
  misc_RNA (1)...(19): siRNA sense strand
ucccgcacguccucgguua

SEQ ID NO: 1867571 - RNA, 19 nt, Homo sapiens
  misc_RNA (1)...(19): siRNA sense strand
gcccugcugccgugucuuu

SEQ ID NO: 1867572 - RNA, 19 nt, Homo sapiens
  misc_RNA (1)...(19): siRNA sense strand
gguggugaccgaucuacug

SEQ ID NO: 1867573 - RNA, 19 nt, Homo sapiens
  misc_RNA (1)...(19): siRNA sense strand
ggcuggcgcuguacgucuu

SEQ ID NO: 1867574 - RNA, 19 nt, Homo sapiens
  misc_RNA (1)...(19): siRNA sense strand
gcucaggccgucaucacau

SEQ ID NO: 1867575 - RNA, 19 nt, Homo sapiens
  misc_RNA (1)...(19): siRNA sense strand
ccaagacacccucagucau

SEQ ID NO: 1867576 - RNA, 19 nt, Homo sapiens
  misc_RNA (1)...(19): siRNA sense strand
caacgacccuuacacaguu

SEQ ID NO: 1867577 - RNA, 19 nt, Homo sapiens
  misc_RNA (1)...(19): siRNA sense strand
gcauuuggcuauuuggaaa

SEQ ID NO: 1867578 - RNA, 19 nt, Homo sapiens
  misc_RNA (1)...(19): siRNA sense strand
caacagcacacaaaggaua

SEQ ID NO: 1867579 - RNA, 19 nt, Homo sapiens
  misc_RNA (1)...(19): siRNA sense strand
caaaggcccucuuaaugga

SEQ ID NO: 1867580 - RNA, 19 nt, Homo sapiens
  misc_RNA (1)...(19): siRNA sense strand
ucgaaucacuaguguauuu

SEQ ID NO: 1867581 - RNA, 19 nt, Homo sapiens
  misc_RNA (1)...(19): siRNA sense strand
agacuacgccuguguauuu

SEQ ID NO: 1867582 - RNA, 19 nt, Homo sapiens
  misc_RNA (1)...(19): siRNA sense strand
uaauggaugucauaucuga

SEQ ID NO: 1867583 - RNA, 19 nt, Homo sapiens
  misc_RNA (1)...(19): siRNA sense strand
gcaaaggcccucuuaaugg

SEQ ID NO: 1867584 - RNA, 19 nt, Homo sapiens
  misc_RNA (1)...(19): siRNA sense strand
gggcaaaccuggauaucau

SEQ ID NO: 1867585 - RNA, 19 nt, Homo sapiens
  misc_RNA (1)...(19): siRNA sense strand
gcaacuguguaauuuauag

SEQ ID NO: 1867586 - RNA, 19 nt, Homo sapiens
  misc_RNA (1)...(19): siRNA sense strand
guccuugacuugccagaua

SEQ ID NO: 1867587 - RNA, 19 nt, Homo sapiens
  misc_RNA (1)...(19): siRNA sense strand
ccaccuggcuugcuauuag

SEQ ID NO: 1867588 - RNA, 19 nt, Homo sapiens
  misc_RNA (1)...(19): siRNA sense strand
cagcauugauagauacauu

SEQ ID NO: 1867589 - RNA, 19 nt, Homo sapiens
  misc_RNA (1)...(19): siRNA sense strand
gcacaccgacuccuacuuc

SEQ ID NO: 1867590 - RNA, 19 nt, Homo sapiens
  misc_RNA (1)...(19): siRNA sense strand
caaaggauaucagcgaaag

SEQ ID NO: 1867591 - RNA, 19 nt, Homo sapiens
  misc_RNA (1)...(19): siRNA sense strand
gauagauacauugccauua

SEQ ID NO: 1867592 - RNA, 19 nt, Homo sapiens
  misc_RNA (1)...(19): siRNA sense strand
gaagcaaaggcccucuuaa

SEQ ID NO: 1867593 - RNA, 19 nt, Homo sapiens
  misc_RNA (1)...(19): siRNA sense strand
gauuauuucuggcaacauc

SEQ ID NO: 1867594 - RNA, 19 nt, Homo sapiens
  misc_RNA (1)...(19): siRNA sense strand
ugccauauaucaucuacuu

SEQ ID NO: 1867595 - RNA, 19 nt, Homo sapiens
  misc_RNA (1)...(19): siRNA sense strand
cuuaauggaugucauaucu

SEQ ID NO: 1867596 - RNA, 19 nt, Homo sapiens
  misc_RNA (1)...(19): siRNA sense strand
cguggucccuucuuuauca

SEQ ID NO: 1867597 - RNA, 19 nt, Homo sapiens
  misc_RNA (1)...(19): siRNA sense strand
uuacacaguuagaagcaaa

SEQ ID NO: 1867598 - RNA, 19 nt, Homo sapiens
  misc_RNA (1)...(19): siRNA sense strand
cugcaacuguguaauuuau

SEQ ID NO: 1867599 - RNA, 19 nt, Homo sapiens
  misc_RNA (1)...(19): siRNA sense strand
ccagauauuugguuuugua

SEQ ID NO: 1867600 - RNA, 19 nt, Homo sapiens
  misc_RNA (1)...(19): siRNA sense strand
caacaguguauuccaaaga

SEQ ID NO: 1867601 - RNA, 19 nt, Homo sapiens
  misc_RNA (1)...(19): siRNA sense strand
uaucaucuacuucuuguug

SEQ ID NO: 1867602 - RNA, 19 nt, Homo sapiens
  misc_RNA (1)...(19): siRNA sense strand
gauacauugccauuacuaa

SEQ ID NO: 1867603 - RNA, 19 nt, Homo sapiens
  misc_RNA (1)...(19): siRNA sense strand
gcuaugccaugguccuguu

SEQ ID NO: 1867604 - RNA, 19 nt, Homo sapiens
  misc_RNA (1)...(19): siRNA sense strand
uggcuucucuggccuguau

SEQ ID NO: 1867605 - RNA, 19 nt, Homo sapiens
  misc_RNA (1)...(19): siRNA sense strand
ucaccuauuucaacaucuu

SEQ ID NO: 1867606 - RNA, 19 nt, Homo sapiens
  misc_RNA (1)...(19): siRNA sense strand
gccaacagcacacaaagga

SEQ ID NO: 1867607 - RNA, 19 nt, Homo sapiens
  misc_RNA (1)...(19): siRNA sense strand
auagauacauugccauuac

SEQ ID NO: 1867608 - RNA, 19 nt, Homo sapiens
  misc_RNA (1)...(19): siRNA sense strand
agaagcaaaggcccucuua

SEQ ID NO: 1867609 - RNA, 19 nt, Homo sapiens
  misc_RNA (1)...(19): siRNA sense strand
cuacagccaacgacccuua

SEQ ID NO: 1867610 - RNA, 19 nt, Homo sapiens
  misc_RNA (1)...(19): siRNA sense strand
gcugcguggucccuucuuu

SEQ ID NO: 1867611 - RNA, 19 nt, Homo sapiens
  misc_RNA (1)...(19): siRNA sense strand
aagcaaaggcccucuuaau

SEQ ID NO: 1867612 - RNA, 19 nt, Homo sapiens
  misc_RNA (1)...(19): siRNA sense strand
ucacugugcaccuuuguug

SEQ ID NO: 1867613 - RNA, 19 nt, Homo sapiens
  misc_RNA (1)...(19): siRNA sense strand
guauuucacugugcaccuu

SEQ ID NO: 1867614 - RNA, 19 nt, Homo sapiens
  misc_RNA (1)...(19): siRNA sense strand
ccucuuaauggaugucaua

SEQ ID NO: 1867615 - RNA, 19 nt, Homo sapiens
  misc_RNA (1)...(19): siRNA sense strand
ccaacgacccuuacacagu

SEQ ID NO: 1867616 - RNA, 19 nt, Homo sapiens
  misc_RNA (1)...(19): siRNA sense strand
ggagacuacgccuguguau

SEQ ID NO: 1867617 - RNA, 19 nt, Homo sapiens
  misc_RNA (1)...(19): siRNA sense strand
gccaugguccuguuucgaa

SEQ ID NO: 1867618 - RNA, 19 nt, Homo sapiens
  misc_RNA (1)...(19): siRNA sense strand
ccaucacacuacaaguuau

SEQ ID NO: 1867619 - RNA, 19 nt, Homo sapiens
  misc_RNA (1)...(19): siRNA sense strand
ccgcuucgcauccuucuug

SEQ ID NO: 1867620 - RNA, 19 nt, Homo sapiens
  misc_RNA (1)...(19): siRNA sense strand
caucacacuacaaguuauu

SEQ ID NO: 1867621 - RNA, 19 nt, Homo sapiens
  misc_RNA (1)...(19): siRNA sense strand
guugaaccaucacacuaca

SEQ ID NO: 1867622 - RNA, 19 nt, Homo sapiens
  misc_RNA (1)...(19): siRNA sense strand
agcaaaggcccucuuaaug

SEQ ID NO: 1867623 - RNA, 19 nt, Homo sapiens
  misc_RNA (1)...(19): siRNA sense strand
ggaaguauugauuauuguc

SEQ ID NO: 1867624 - RNA, 19 nt, Homo sapiens
  misc_RNA (1)...(19): siRNA sense strand
guuacacccuggagacuac

SEQ ID NO: 1867625 - RNA, 19 nt, Homo sapiens
  misc_RNA (1)...(19): siRNA sense strand
cuuuaucacuccuccauca

SEQ ID NO: 1867626 - RNA, 19 nt, Homo sapiens
  misc_RNA (1)...(19): siRNA sense strand
ugauagauacauugccauu

SEQ ID NO: 1867627 - RNA, 19 nt, Homo sapiens
  misc_RNA (1)...(19): siRNA sense strand
ccaacaguguauuccaaag

SEQ ID NO: 1867628 - RNA, 19 nt, Homo sapiens
  misc_RNA (1)...(19): siRNA sense strand
gcaaccgcuucgcauccuu

SEQ ID NO: 1867629 - RNA, 19 nt, Homo sapiens
  misc_RNA (1)...(19): siRNA sense strand
ccauauaucaucuacuucu

SEQ ID NO: 1867630 - RNA, 19 nt, Homo sapiens
  misc_RNA (1)...(19): siRNA sense strand
gagacuacgccuguguauu

SEQ ID NO: 1867631 - RNA, 19 nt, Homo sapiens
  misc_RNA (1)...(19): siRNA sense strand
ccucuuggcauuuggcuau

SEQ ID NO: 1867632 - RNA, 19 nt, Homo sapiens
  misc_RNA (1)...(19): siRNA sense strand
ccaugguccuguuucgaau

SEQ ID NO: 1867633 - RNA, 19 nt, Homo sapiens
  misc_RNA (1)...(19): siRNA sense strand
aaccaucacacuacaaguu

SEQ ID NO: 1867634 - RNA, 19 nt, Homo sapiens
  misc_RNA (1)...(19): siRNA sense strand
caccuuuguugaaccauca

SEQ ID NO: 1867635 - RNA, 19 nt, Homo sapiens
  misc_RNA (1)...(19): siRNA sense strand
ccuuuaaccuauaauacuc

SEQ ID NO: 1867636 - RNA, 19 nt, Homo sapiens
  misc_RNA (1)...(19): siRNA sense strand
accaucacacuacaaguua

SEQ ID NO: 1867637 - RNA, 19 nt, Homo sapiens
  misc_RNA (1)...(19): siRNA sense strand
ugacuugccagauauuugg

SEQ ID NO: 1867638 - RNA, 19 nt, Homo sapiens
  misc_RNA (1)...(19): siRNA sense strand
ggcauuuggcuauuuggaa

SEQ ID NO: 1867639 - RNA, 19 nt, Homo sapiens
  misc_RNA (1)...(19): siRNA sense strand
uuucgaaucacuaguguau

SEQ ID NO: 1867640 - RNA, 19 nt, Homo sapiens
  misc_RNA (1)...(19): siRNA sense strand
cuucaccuauuucaacauc

SEQ ID NO: 1867641 - RNA, 19 nt, Homo sapiens
  misc_RNA (1)...(19): siRNA sense strand
gauaucauggagauguguu

SEQ ID NO: 1867642 - RNA, 19 nt, Homo sapiens
  misc_RNA (1)...(19): siRNA sense strand
cugcguggucccuucuuua

SEQ ID NO: 1867643 - RNA, 19 nt, Homo sapiens
  misc_RNA (1)...(19): siRNA sense strand
cuccaacaguguauuccaa

SEQ ID NO: 1867644 - RNA, 19 nt, Homo sapiens
  misc_RNA (1)...(19): siRNA sense strand
uuucugcaacuguguaauu

SEQ ID NO: 1867645 - RNA, 19 nt, Homo sapiens
  misc_RNA (1)...(19): siRNA sense strand
uugaccaccuggcuugcua

SEQ ID NO: 1867646 - RNA, 19 nt, Homo sapiens
  misc_RNA (1)...(19): siRNA sense strand
ucaucuacuucuuguugga

SEQ ID NO: 1867647 - RNA, 19 nt, Homo sapiens
  misc_RNA (1)...(19): siRNA sense strand
gguuacacccuggagacua

SEQ ID NO: 1867648 - RNA, 19 nt, Homo sapiens
  misc_RNA (1)...(19): siRNA sense strand
cuugccagauauuugguuu

SEQ ID NO: 1867649 - RNA, 19 nt, Homo sapiens
  misc_RNA (1)...(19): siRNA sense strand
aacgacccuuacacaguua

SEQ ID NO: 1867650 - RNA, 19 nt, Homo sapiens
  misc_RNA (1)...(19): siRNA sense strand
gggcuauguguacuucuug

SEQ ID NO: 1867651 - RNA, 19 nt, Homo sapiens
  misc_RNA (1)...(19): siRNA sense strand
gcuauuaguaacaguuucu

SEQ ID NO: 1867652 - RNA, 19 nt, Homo sapiens
  misc_RNA (1)...(19): siRNA sense strand
gaaccaucacacuacaagu

SEQ ID NO: 1867653 - RNA, 19 nt, Homo sapiens
  misc_RNA (1)...(19): siRNA sense strand
acaaaggauaucagcgaaa

SEQ ID NO: 1867654 - RNA, 19 nt, Homo sapiens
  misc_RNA (1)...(19): siRNA sense strand
ggucuuccugccuuccuuu

SEQ ID NO: 1867655 - RNA, 19 nt, Homo sapiens
  misc_RNA (1)...(19): siRNA sense strand
caccuuggaugguaaucag

SEQ ID NO: 1867656 - RNA, 19 nt, Homo sapiens
  misc_RNA (1)...(19): siRNA sense strand
cuauaauacucugguuaca

SEQ ID NO: 1867657 - RNA, 19 nt, Homo sapiens
  misc_RNA (1)...(19): siRNA sense strand
uuuauagucucuccaacag

SEQ ID NO: 1867658 - RNA, 19 nt, Homo sapiens
  misc_RNA (1)...(19): siRNA sense strand
uucaacaucuuccgcaucu

SEQ ID NO: 1867659 - RNA, 19 nt, Homo sapiens
  misc_RNA (1)...(19): siRNA sense strand
gggcagagcuguaauguua

SEQ ID NO: 1867660 - RNA, 19 nt, Homo sapiens
  misc_RNA (1)...(19): siRNA sense strand
gaagaaagcaagaaagaaa

SEQ ID NO: 1867661 - RNA, 19 nt, Homo sapiens
  misc_RNA (1)...(19): siRNA sense strand
gauaugacaucucuguaaa

SEQ ID NO: 1867662 - RNA, 19 nt, Homo sapiens
  misc_RNA (1)...(19): siRNA sense strand
caaccucacuguauuggua

SEQ ID NO: 1867663 - RNA, 19 nt, Homo sapiens
  misc_RNA (1)...(19): siRNA sense strand
caaaaggucuugaaaagua

SEQ ID NO: 1867664 - RNA, 19 nt, Homo sapiens
  misc_RNA (1)...(19): siRNA sense strand
gcaagugucucaacagcaa

SEQ ID NO: 1867665 - RNA, 19 nt, Homo sapiens
  misc_RNA (1)...(19): siRNA sense strand
gaaauuguguugggacuug

SEQ ID NO: 1867666 - RNA, 19 nt, Homo sapiens
  misc_RNA (1)...(19): siRNA sense strand
gcagcaaccucacuguauu

SEQ ID NO: 1867667 - RNA, 19 nt, Homo sapiens
  misc_RNA (1)...(19): siRNA sense strand
caggaugucuuuauugauu

SEQ ID NO: 1867668 - RNA, 19 nt, Homo sapiens
  misc_RNA (1)...(19): siRNA sense strand
gaguaacacugcucucauu

SEQ ID NO: 1867669 - RNA, 19 nt, Homo sapiens
  misc_RNA (1)...(19): siRNA sense strand
caacagggcagaagaagaa

SEQ ID NO: 1867670 - RNA, 19 nt, Homo sapiens
  misc_RNA (1)...(19): siRNA sense strand
caccggauuucuuauguua

SEQ ID NO: 1867671 - RNA, 19 nt, Homo sapiens
  misc_RNA (1)...(19): siRNA sense strand
guacuuuacugcaugaaau

SEQ ID NO: 1867672 - RNA, 19 nt, Homo sapiens
  misc_RNA (1)...(19): siRNA sense strand
gcgaguuguuucuauagua

SEQ ID NO: 1867673 - RNA, 19 nt, Homo sapiens
  misc_RNA (1)...(19): siRNA sense strand
ggagaaauguagucuuugg

SEQ ID NO: 1867674 - RNA, 19 nt, Homo sapiens
  misc_RNA (1)...(19): siRNA sense strand
acacugaacugggaaugua

SEQ ID NO: 1867675 - RNA, 19 nt, Homo sapiens
  misc_RNA (1)...(19): siRNA sense strand
guacagaucccaauauucu

SEQ ID NO: 1867676 - RNA, 19 nt, Homo sapiens
  misc_RNA (1)...(19): siRNA sense strand
gcagagcuguaauguuaau

SEQ ID NO: 1867677 - RNA, 19 nt, Homo sapiens
  misc_RNA (1)...(19): siRNA sense strand
aaagcgaguuguuucuaua

SEQ ID NO: 1867678 - RNA, 19 nt, Homo sapiens
  misc_RNA (1)...(19): siRNA sense strand
gaacgacgagaaagacaaa

SEQ ID NO: 1867679 - RNA, 19 nt, Homo sapiens
  misc_RNA (1)...(19): siRNA sense strand
gagaugacauugaugacau

SEQ ID NO: 1867680 - RNA, 19 nt, Homo sapiens
  misc_RNA (1)...(19): siRNA sense strand
ugggagaaauguagucuuu

SEQ ID NO: 1867681 - RNA, 19 nt, Homo sapiens
  misc_RNA (1)...(19): siRNA sense strand
gaacugggaauguauuauc

SEQ ID NO: 1867682 - RNA, 19 nt, Homo sapiens
  misc_RNA (1)...(19): siRNA sense strand
ggaaauaccugggaaaaca

SEQ ID NO: 1867683 - RNA, 19 nt, Homo sapiens
  misc_RNA (1)...(19): siRNA sense strand
cuacagacaugucacaaag

SEQ ID NO: 1867684 - RNA, 19 nt, Homo sapiens
  misc_RNA (1)...(19): siRNA sense strand
uuaaucaacucugucagua

SEQ ID NO: 1867685 - RNA, 19 nt, Homo sapiens
  misc_RNA (1)...(19): siRNA sense strand
ucacuguauugguacuuua

SEQ ID NO: 1867686 - RNA, 19 nt, Homo sapiens
  misc_RNA (1)...(19): siRNA sense strand
auacacaacucuuggauag

SEQ ID NO: 1867687 - RNA, 19 nt, Homo sapiens
  misc_RNA (1)...(19): siRNA sense strand
caaaugaauacuacacuga

SEQ ID NO: 1867688 - RNA, 19 nt, Homo sapiens
  misc_RNA (1)...(19): siRNA sense strand
caacagcaaucaacguuuu

SEQ ID NO: 1867689 - RNA, 19 nt, Homo sapiens
  misc_RNA (1)...(19): siRNA sense strand
gccuaauaaugcuguaaua

SEQ ID NO: 1867690 - RNA, 19 nt, Homo sapiens
  misc_RNA (1)...(19): siRNA sense strand
guaccaaccacuaucauau

SEQ ID NO: 1867691 - RNA, 19 nt, Homo sapiens
  misc_RNA (1)...(19): siRNA sense strand
uaguacagaucccaauauu

SEQ ID NO: 1867692 - RNA, 19 nt, Homo sapiens
  misc_RNA (1)...(19): siRNA sense strand
ccaugaggcuuguguaucu

SEQ ID NO: 1867693 - RNA, 19 nt, Homo sapiens
  misc_RNA (1)...(19): siRNA sense strand
uaucauauccguuaagcuu

SEQ ID NO: 1867694 - RNA, 19 nt, Homo sapiens
  misc_RNA (1)...(19): siRNA sense strand
gaagauagugaaauaagag

SEQ ID NO: 1867695 - RNA, 19 nt, Homo sapiens
  misc_RNA (1)...(19): siRNA sense strand
ggacaccaauuucuguuuu

SEQ ID NO: 1867696 - RNA, 19 nt, Homo sapiens
  misc_RNA (1)...(19): siRNA sense strand
gaaacgacaccgugaacga

SEQ ID NO: 1867697 - RNA, 19 nt, Homo sapiens
  misc_RNA (1)...(19): siRNA sense strand
cagucugaaucuaacauua

SEQ ID NO: 1867698 - RNA, 19 nt, Homo sapiens
  misc_RNA (1)...(19): siRNA sense strand
ggauguauuccucuaacua

SEQ ID NO: 1867699 - RNA, 19 nt, Homo sapiens
  misc_RNA (1)...(19): siRNA sense strand
ccguuaagcuuucaagugu

SEQ ID NO: 1867700 - RNA, 19 nt, Homo sapiens
  misc_RNA (1)...(19): siRNA sense strand
acacaacucuuggauagau

SEQ ID NO: 1867701 - RNA, 19 nt, Homo sapiens
  misc_RNA (1)...(19): siRNA sense strand
uaacacugcucucauuugc

SEQ ID NO: 1867702 - RNA, 19 nt, Homo sapiens
  misc_RNA (1)...(19): siRNA sense strand
ucgaauaggcacaagauuu

SEQ ID NO: 1867703 - RNA, 19 nt, Homo sapiens
  misc_RNA (1)...(19): siRNA sense strand
agucauggcuuauggaaca

SEQ ID NO: 1867704 - RNA, 19 nt, Homo sapiens
  misc_RNA (1)...(19): siRNA sense strand
ccacuaucauauccguuaa

SEQ ID NO: 1867705 - RNA, 19 nt, Homo sapiens
  misc_RNA (1)...(19): siRNA sense strand
gaagaagaaagcaagaaag

SEQ ID NO: 1867706 - RNA, 19 nt, Homo sapiens
  misc_RNA (1)...(19): siRNA sense strand
aaaucaacaugcagucuga

SEQ ID NO: 1867707 - RNA, 19 nt, Homo sapiens
  misc_RNA (1)...(19): siRNA sense strand
gagcuguaauguuaaugau

SEQ ID NO: 1867708 - RNA, 19 nt, Homo sapiens
  misc_RNA (1)...(19): siRNA sense strand
gcaaaccgaauucugacaa

SEQ ID NO: 1867709 - RNA, 19 nt, Homo sapiens
  misc_RNA (1)...(19): siRNA sense strand
ugcaugaaauccaacuuaa

SEQ ID NO: 1867710 - RNA, 19 nt, Homo sapiens
  misc_RNA (1)...(19): siRNA sense strand
caugaaauccaacuuaauc

SEQ ID NO: 1867711 - RNA, 19 nt, Homo sapiens
  misc_RNA (1)...(19): siRNA sense strand
caaaccgaauucugacaau

SEQ ID NO: 1867712 - RNA, 19 nt, Homo sapiens
  misc_RNA (1)...(19): siRNA sense strand
gauguauuccucuaacuau

SEQ ID NO: 1867713 - RNA, 19 nt, Homo sapiens
  misc_RNA (1)...(19): siRNA sense strand
aauguagucuuugguguaa

SEQ ID NO: 1867714 - RNA, 19 nt, Homo sapiens
  misc_RNA (1)...(19): siRNA sense strand
caauuucucuaaccacaca

SEQ ID NO: 1867715 - RNA, 19 nt, Homo sapiens
  misc_RNA (1)...(19): siRNA sense strand
caauauguaccaaccacua

SEQ ID NO: 1867716 - RNA, 19 nt, Homo sapiens
  misc_RNA (1)...(19): siRNA sense strand
ccggauuucuuauguuaga

SEQ ID NO: 1867717 - RNA, 19 nt, Homo sapiens
  misc_RNA (1)...(19): siRNA sense strand
guuaaucacauacaccaaa

SEQ ID NO: 1867718 - RNA, 19 nt, Homo sapiens
  misc_RNA (1)...(19): siRNA sense strand
ucucuuuccugauuccuuu

SEQ ID NO: 1867719 - RNA, 19 nt, Homo sapiens
  misc_RNA (1)...(19): siRNA sense strand
ucucucaccggauuucuua

SEQ ID NO: 1867720 - RNA, 19 nt, Homo sapiens
  misc_RNA (1)...(19): siRNA sense strand
cgaguuguuucuauaguag

SEQ ID NO: 1867721 - RNA, 19 nt, Homo sapiens
  misc_RNA (1)...(19): siRNA sense strand
gcuuauggaacaacuauau

SEQ ID NO: 1867722 - RNA, 19 nt, Homo sapiens
  misc_RNA (1)...(19): siRNA sense strand
caacaugcagucugaaucu

SEQ ID NO: 1867723 - RNA, 19 nt, Homo sapiens
  misc_RNA (1)...(19): siRNA sense strand
auaguuauccuucugcuuu

SEQ ID NO: 1867724 - RNA, 19 nt, Homo sapiens
  misc_RNA (1)...(19): siRNA sense strand
gaaauccaacuuaaucaac

SEQ ID NO: 1867725 - RNA, 19 nt, Homo sapiens
  misc_RNA (1)...(19): siRNA sense strand
guaacacugcucucauuug

SEQ ID NO: 1867726 - RNA, 19 nt, Homo sapiens
  misc_RNA (1)...(19): siRNA sense strand
aagaagaaagcaagaaaga

SEQ ID NO: 1867727 - RNA, 19 nt, Homo sapiens
  misc_RNA (1)...(19): siRNA sense strand
agaagaagaaagcaagaaa

SEQ ID NO: 1867728 - RNA, 19 nt, Homo sapiens
  misc_RNA (1)...(19): siRNA sense strand
gacaaugggcagagcugua

SEQ ID NO: 1867729 - RNA, 19 nt, Homo sapiens
  misc_RNA (1)...(19): siRNA sense strand
gcaugaaauccaacuuaau

SEQ ID NO: 1867730 - RNA, 19 nt, Homo sapiens
  misc_RNA (1)...(19): siRNA sense strand
guuaguacagaucccaaua

SEQ ID NO: 1867731 - RNA, 19 nt, Homo sapiens
  misc_RNA (1)...(19): siRNA sense strand
ccaagugaccuuuuaguaa

SEQ ID NO: 1867732 - RNA, 19 nt, Homo sapiens
  misc_RNA (1)...(19): siRNA sense strand
ucauauccguuaagcuuuc

SEQ ID NO: 1867733 - RNA, 19 nt, Homo sapiens
  misc_RNA (1)...(19): siRNA sense strand
acagacaugucacaaagca

SEQ ID NO: 1867734 - RNA, 19 nt, Homo sapiens
  misc_RNA (1)...(19): siRNA sense strand
gcagaagaagaaagcaaga

SEQ ID NO: 1867735 - RNA, 19 nt, Homo sapiens
  misc_RNA (1)...(19): siRNA sense strand
caacaccaauauguaccaa

SEQ ID NO: 1867736 - RNA, 19 nt, Homo sapiens
  misc_RNA (1)...(19): siRNA sense strand
acagaucccaauauucuuu

SEQ ID NO: 1867737 - RNA, 19 nt, Homo sapiens
  misc_RNA (1)...(19): siRNA sense strand
cugcaugaaauccaacuua

SEQ ID NO: 1867738 - RNA, 19 nt, Homo sapiens
  misc_RNA (1)...(19): siRNA sense strand
aaauguagucuuuggugua

SEQ ID NO: 1867739 - RNA, 19 nt, Homo sapiens
  misc_RNA (1)...(19): siRNA sense strand
caacaugaggcuacagaca

SEQ ID NO: 1867740 - RNA, 19 nt, Homo sapiens
  misc_RNA (1)...(19): siRNA sense strand
auacuucaggcucuuaaua

SEQ ID NO: 1867741 - RNA, 19 nt, Homo sapiens
  misc_RNA (1)...(19): siRNA sense strand
uaauuugugugggauguau

SEQ ID NO: 1867742 - RNA, 19 nt, Homo sapiens
  misc_RNA (1)...(19): siRNA sense strand
gaaucuucauguacuugau

SEQ ID NO: 1867743 - RNA, 19 nt, Homo sapiens
  misc_RNA (1)...(19): siRNA sense strand
ccaacuuaaucaacucugu

SEQ ID NO: 1867744 - RNA, 19 nt, Homo sapiens
  misc_RNA (1)...(19): siRNA sense strand
gaauguauuaucaccuguu

SEQ ID NO: 1867745 - RNA, 19 nt, Homo sapiens
  misc_RNA (1)...(19): siRNA sense strand
uucaggaugucuuuauuga

SEQ ID NO: 1867746 - RNA, 19 nt, Homo sapiens
  misc_RNA (1)...(19): siRNA sense strand
gcuacagacaugucacaaa

SEQ ID NO: 1867747 - RNA, 19 nt, Homo sapiens
  misc_RNA (1)...(19): siRNA sense strand
cgaauaggcacaagauuuu

SEQ ID NO: 1867748 - RNA, 19 nt, Homo sapiens
  misc_RNA (1)...(19): siRNA sense strand
ucaccggauuucuuauguu

SEQ ID NO: 1867749 - RNA, 19 nt, Homo sapiens
  misc_RNA (1)...(19): siRNA sense strand
gcugauccccugccuaaua

SEQ ID NO: 1867750 - RNA, 19 nt, Homo sapiens
  misc_RNA (1)...(19): siRNA sense strand
ucacuguuguaguaauguu

SEQ ID NO: 1867751 - RNA, 19 nt, Homo sapiens
  misc_RNA (1)...(19): siRNA sense strand
acaaugggcagagcuguaa

SEQ ID NO: 1867752 - RNA, 19 nt, Homo sapiens
  misc_RNA (1)...(19): siRNA sense strand
guuaagcuuucaagugucu

SEQ ID NO: 1867753 - RNA, 19 nt, Homo sapiens
  misc_RNA (1)...(19): siRNA sense strand
ggcagcaaccucacuguau

SEQ ID NO: 1867754 - RNA, 19 nt, Homo sapiens
  misc_RNA (1)...(19): siRNA sense strand
uaaucaacucugucaguaa

SEQ ID NO: 1867755 - RNA, 19 nt, Homo sapiens
  misc_RNA (1)...(19): siRNA sense strand
gacaccaauuucuguuuua

SEQ ID NO: 1867756 - RNA, 19 nt, Homo sapiens
  misc_RNA (1)...(19): siRNA sense strand
gcagucugaaucuaacauu

SEQ ID NO: 1867757 - RNA, 19 nt, Homo sapiens
  misc_RNA (1)...(19): siRNA sense strand
aaaccgaauucugacaaug

SEQ ID NO: 1867758 - RNA, 19 nt, Homo sapiens
  misc_RNA (1)...(19): siRNA sense strand
aaucaacucugucaguaac

SEQ ID NO: 1867759 - RNA, 19 nt, Homo sapiens
  misc_RNA (1)...(19): siRNA sense strand
ggacgacaguuccguguuc

SEQ ID NO: 1867760 - RNA, 19 nt, Homo sapiens
  misc_RNA (1)...(19): siRNA sense strand
ggaacucgcugcgcaucau

SEQ ID NO: 1867761 - RNA, 19 nt, Homo sapiens
  misc_RNA (1)...(19): siRNA sense strand
gcgccaacccgcucaucua

SEQ ID NO: 1867762 - RNA, 19 nt, Homo sapiens
  misc_RNA (1)...(19): siRNA sense strand
ccaacccgcucaucuaccu

SEQ ID NO: 1867763 - RNA, 19 nt, Homo sapiens
  misc_RNA (1)...(19): siRNA sense strand
gcgauggccucugcaagcu

SEQ ID NO: 1867764 - RNA, 19 nt, Homo sapiens
  misc_RNA (1)...(19): siRNA sense strand
cagcugaccugggcuucgu

SEQ ID NO: 1867765 - RNA, 19 nt, Homo sapiens
  misc_RNA (1)...(19): siRNA sense strand
gaacucgcugcgcaucauc

SEQ ID NO: 1867766 - RNA, 19 nt, Homo sapiens
  misc_RNA (1)...(19): siRNA sense strand
caucagggcucuccagaaa

SEQ ID NO: 1867767 - RNA, 19 nt, Homo sapiens
  misc_RNA (1)...(19): siRNA sense strand
gcucauaccucggauguca

SEQ ID NO: 1867768 - RNA, 19 nt, Homo sapiens
  misc_RNA (1)...(19): siRNA sense strand
ucaccuaccugcacagugu

SEQ ID NO: 1867769 - RNA, 19 nt, Homo sapiens
  misc_RNA (1)...(19): siRNA sense strand
gcuguuugcucugugcuuu

SEQ ID NO: 1867770 - RNA, 19 nt, Homo sapiens
  misc_RNA (1)...(19): siRNA sense strand
gcacucuccugccuucagu

SEQ ID NO: 1867771 - RNA, 19 nt, Homo sapiens
  misc_RNA (1)...(19): siRNA sense strand
agaaacagcccaagcuuca

SEQ ID NO: 1867772 - RNA, 19 nt, Homo sapiens
  misc_RNA (1)...(19): siRNA sense strand
ccagaguccugaugcacau

SEQ ID NO: 1867773 - RNA, 19 nt, Homo sapiens
  misc_RNA (1)...(19): siRNA sense strand
gcuguggaccuuccuguuc

SEQ ID NO: 1867774 - RNA, 19 nt, Homo sapiens
  misc_RNA (1)...(19): siRNA sense strand
cgggcuugcucaucucuga

SEQ ID NO: 1867775 - RNA, 19 nt, Homo sapiens
  misc_RNA (1)...(19): siRNA sense strand
augcacaucuuccagaauc

SEQ ID NO: 1867776 - RNA, 19 nt, Homo sapiens
  misc_RNA (1)...(19): siRNA sense strand
ucuccugccuucaguuugu

SEQ ID NO: 1867777 - RNA, 19 nt, Homo sapiens
  misc_RNA (1)...(19): siRNA sense strand
gacggcuccuucagcauca

SEQ ID NO: 1867778 - RNA, 19 nt, Homo sapiens
  misc_RNA (1)...(19): siRNA sense strand
ugagaaacagcccaagcuu

SEQ ID NO: 1867779 - RNA, 19 nt, Homo sapiens
  misc_RNA (1)...(19): siRNA sense strand
ggaagccguacgcugucua

SEQ ID NO: 1867780 - RNA, 19 nt, Homo sapiens
  misc_RNA (1)...(19): siRNA sense strand
ccuuuggccucaucguguu

SEQ ID NO: 1867781 - RNA, 19 nt, Homo sapiens
  misc_RNA (1)...(19): siRNA sense strand
gagcugcagggcccuuugu

SEQ ID NO: 1867782 - RNA, 19 nt, Homo sapiens
  misc_RNA (1)...(19): siRNA sense strand
gguccacccucggcuuaag

SEQ ID NO: 1867783 - RNA, 19 nt, Homo sapiens
  misc_RNA (1)...(19): siRNA sense strand
gcaacgagcugggcgucua

SEQ ID NO: 1867784 - RNA, 19 nt, Homo sapiens
  misc_RNA (1)...(19): siRNA sense strand
caaccacaccuucugcuuu

SEQ ID NO: 1867785 - RNA, 19 nt, Homo sapiens
  misc_RNA (1)...(19): siRNA sense strand
ucaccagccucaacugugu

SEQ ID NO: 1867786 - RNA, 19 nt, Homo sapiens
  misc_RNA (1)...(19): siRNA sense strand
gcacaaccugcuccgcuuu

SEQ ID NO: 1867787 - RNA, 19 nt, Homo sapiens
  misc_RNA (1)...(19): siRNA sense strand
aaccacaccuucugcuuug

SEQ ID NO: 1867788 - RNA, 19 nt, Homo sapiens
  misc_RNA (1)...(19): siRNA sense strand
gggaccaggugcagcugaa

SEQ ID NO: 1867789 - RNA, 19 nt, Homo sapiens
  misc_RNA (1)...(19): siRNA sense strand
cgccaucccucuacaucuu

SEQ ID NO: 1867790 - RNA, 19 nt, Homo sapiens
  misc_RNA (1)...(19): siRNA sense strand
ggagaaggccaagaucaag

SEQ ID NO: 1867791 - RNA, 19 nt, Homo sapiens
  misc_RNA (1)...(19): siRNA sense strand
cuacaccaauaucuacauc

SEQ ID NO: 1867792 - RNA, 19 nt, Homo sapiens
  misc_RNA (1)...(19): siRNA sense strand
ccaaggcccugcacaaccu

SEQ ID NO: 1867793 - RNA, 19 nt, Homo sapiens
  misc_RNA (1)...(19): siRNA sense strand
gaggaacagcacagccaaa

SEQ ID NO: 1867794 - RNA, 19 nt, Homo sapiens
  misc_RNA (1)...(19): siRNA sense strand
cccaggagauggccaaugc

SEQ ID NO: 1867795 - RNA, 19 nt, Homo sapiens
  misc_RNA (1)...(19): siRNA sense strand
guucgugggcuuccucuuc

SEQ ID NO: 1867796 - RNA, 19 nt, Homo sapiens
  misc_RNA (1)...(19): siRNA sense strand
ucgccgaccugcuguacau

SEQ ID NO: 1867797 - RNA, 19 nt, Homo sapiens
  misc_RNA (1)...(19): siRNA sense strand
gaccaggugcagcugaaga

SEQ ID NO: 1867798 - RNA, 19 nt, Homo sapiens
  misc_RNA (1)...(19): siRNA sense strand
caggagaaggccaagauca

SEQ ID NO: 1867799 - RNA, 19 nt, Homo sapiens
  misc_RNA (1)...(19): siRNA sense strand
acaccaauaucuacaucag

SEQ ID NO: 1867800 - RNA, 19 nt, Homo sapiens
  misc_RNA (1)...(19): siRNA sense strand
uggccuggaugaaccucua

SEQ ID NO: 1867801 - RNA, 19 nt, Homo sapiens
  misc_RNA (1)...(19): siRNA sense strand
gccaggagaaggccaagau

SEQ ID NO: 1867802 - RNA, 19 nt, Homo sapiens
  misc_RNA (1)...(19): siRNA sense strand
gcucuuuggguucaucuuc

SEQ ID NO: 1867803 - RNA, 19 nt, Homo sapiens
  misc_RNA (1)...(19): siRNA sense strand
ucuacugccuggucaacga

SEQ ID NO: 1867804 - RNA, 19 nt, Homo sapiens
  misc_RNA (1)...(19): siRNA sense strand
ccaucgugcuggucugcuu

SEQ ID NO: 1867805 - RNA, 19 nt, Homo sapiens
  misc_RNA (1)...(19): siRNA sense strand
ucuuuggguucaucuucua

SEQ ID NO: 1867806 - RNA, 19 nt, Homo sapiens
  misc_RNA (1)...(19): siRNA sense strand
ggucugcuuugcgcccuau

SEQ ID NO: 1867807 - RNA, 19 nt, Homo sapiens
  misc_RNA (1)...(19): siRNA sense strand
ccacagcucacuggcuuuc

SEQ ID NO: 1867808 - RNA, 19 nt, Homo sapiens
  misc_RNA (1)...(19): siRNA sense strand
gcaaugaugugacuucuuu

SEQ ID NO: 1867809 - RNA, 19 nt, Homo sapiens
  misc_RNA (1)...(19): siRNA sense strand
gcacagaaauuauagaaga

SEQ ID NO: 1867810 - RNA, 19 nt, Homo sapiens
  misc_RNA (1)...(19): siRNA sense strand
gcagcuggcuuuagcaaua

SEQ ID NO: 1867811 - RNA, 19 nt, Homo sapiens
  misc_RNA (1)...(19): siRNA sense strand
gcagugauauuuaggcaua

SEQ ID NO: 1867812 - RNA, 19 nt, Homo sapiens
  misc_RNA (1)...(19): siRNA sense strand
ggagauccuuacaguguua

SEQ ID NO: 1867813 - RNA, 19 nt, Homo sapiens
  misc_RNA (1)...(19): siRNA sense strand
ucacauggcucagcacuuu

SEQ ID NO: 1867814 - RNA, 19 nt, Homo sapiens
  misc_RNA (1)...(19): siRNA sense strand
gaagaagacuuugaauuac

SEQ ID NO: 1867815 - RNA, 19 nt, Homo sapiens
  misc_RNA (1)...(19): siRNA sense strand
uaucagaccugguaaagga

SEQ ID NO: 1867816 - RNA, 19 nt, Homo sapiens
  misc_RNA (1)...(19): siRNA sense strand
caggaaauauggccaguuu

SEQ ID NO: 1867817 - RNA, 19 nt, Homo sapiens
  misc_RNA (1)...(19): siRNA sense strand
ugaggagacugaugacuuu

SEQ ID NO: 1867818 - RNA, 19 nt, Homo sapiens
  misc_RNA (1)...(19): siRNA sense strand
ggaugaauauggcauggaa

SEQ ID NO: 1867819 - RNA, 19 nt, Homo sapiens
  misc_RNA (1)...(19): siRNA sense strand
gaaucacccugacacugua

SEQ ID NO: 1867820 - RNA, 19 nt, Homo sapiens
  misc_RNA (1)...(19): siRNA sense strand
gaagggaugugugcaaaca

SEQ ID NO: 1867821 - RNA, 19 nt, Homo sapiens
  misc_RNA (1)...(19): siRNA sense strand
gaucucagaccaguuguua

SEQ ID NO: 1867822 - RNA, 19 nt, Homo sapiens
  misc_RNA (1)...(19): siRNA sense strand
acaaacaacuuacagacuu

SEQ ID NO: 1867823 - RNA, 19 nt, Homo sapiens
  misc_RNA (1)...(19): siRNA sense strand
gaagugcucugggagauca

SEQ ID NO: 1867824 - RNA, 19 nt, Homo sapiens
  misc_RNA (1)...(19): siRNA sense strand
gcagaauggucuccagaau

SEQ ID NO: 1867825 - RNA, 19 nt, Homo sapiens
  misc_RNA (1)...(19): siRNA sense strand
gcaauggcauauccucaga

SEQ ID NO: 1867826 - RNA, 19 nt, Homo sapiens
  misc_RNA (1)...(19): siRNA sense strand
agaauggucuccagaauca

SEQ ID NO: 1867827 - RNA, 19 nt, Homo sapiens
  misc_RNA (1)...(19): siRNA sense strand
aguguuaccugaagaagua

SEQ ID NO: 1867828 - RNA, 19 nt, Homo sapiens
  misc_RNA (1)...(19): siRNA sense strand
ggaaauauggccaguuuua

SEQ ID NO: 1867829 - RNA, 19 nt, Homo sapiens
  misc_RNA (1)...(19): siRNA sense strand
uuacgggacucauugcuaa

SEQ ID NO: 1867830 - RNA, 19 nt, Homo sapiens
  misc_RNA (1)...(19): siRNA sense strand
gaaagucauacaggaaaua

SEQ ID NO: 1867831 - RNA, 19 nt, Homo sapiens
  misc_RNA (1)...(19): siRNA sense strand
caaagccauucauaacauu

SEQ ID NO: 1867832 - RNA, 19 nt, Homo sapiens
  misc_RNA (1)...(19): siRNA sense strand
cuucauggcuaacaauaaa

SEQ ID NO: 1867833 - RNA, 19 nt, Homo sapiens
  misc_RNA (1)...(19): siRNA sense strand
gcacagaccaugaaaauga

SEQ ID NO: 1867834 - RNA, 19 nt, Homo sapiens
  misc_RNA (1)...(19): siRNA sense strand
ccaaagccauucauaacau

SEQ ID NO: 1867835 - RNA, 19 nt, Homo sapiens
  misc_RNA (1)...(19): siRNA sense strand
cugaauuacugccguauuu

SEQ ID NO: 1867836 - RNA, 19 nt, Homo sapiens
  misc_RNA (1)...(19): siRNA sense strand
aaagacuugucaccuguua

SEQ ID NO: 1867837 - RNA, 19 nt, Homo sapiens
  misc_RNA (1)...(19): siRNA sense strand
guacaaaacuaacgaugaa

SEQ ID NO: 1867838 - RNA, 19 nt, Homo sapiens
  misc_RNA (1)...(19): siRNA sense strand
uauccgagacucuaaauaa

SEQ ID NO: 1867839 - RNA, 19 nt, Homo sapiens
  misc_RNA (1)...(19): siRNA sense strand
ggagaucucagaccaguug

SEQ ID NO: 1867840 - RNA, 19 nt, Homo sapiens
  misc_RNA (1)...(19): siRNA sense strand
ggacuugauuuucuugaua

SEQ ID NO: 1867841 - RNA, 19 nt, Homo sapiens
  misc_RNA (1)...(19): siRNA sense strand
cuacgagaccucauucaua

SEQ ID NO: 1867842 - RNA, 19 nt, Homo sapiens
  misc_RNA (1)...(19): siRNA sense strand
gaacuugaaagacuuguca

SEQ ID NO: 1867843 - RNA, 19 nt, Homo sapiens
  misc_RNA (1)...(19): siRNA sense strand
ugaggaauguaaacaaguu

SEQ ID NO: 1867844 - RNA, 19 nt, Homo sapiens
  misc_RNA (1)...(19): siRNA sense strand
ccaaugaucaugaagaaga

SEQ ID NO: 1867845 - RNA, 19 nt, Homo sapiens
  misc_RNA (1)...(19): siRNA sense strand
uggauaagauuaccgaaug

SEQ ID NO: 1867846 - RNA, 19 nt, Homo sapiens
  misc_RNA (1)...(19): siRNA sense strand
gaaauccucaguuccuuga

SEQ ID NO: 1867847 - RNA, 19 nt, Homo sapiens
  misc_RNA (1)...(19): siRNA sense strand
gaagaaguacauagucguu

SEQ ID NO: 1867848 - RNA, 19 nt, Homo sapiens
  misc_RNA (1)...(19): siRNA sense strand
gauguggagucaugcuauu

SEQ ID NO: 1867849 - RNA, 19 nt, Homo sapiens
  misc_RNA (1)...(19): siRNA sense strand
aguaguaucucuauugaug

SEQ ID NO: 1867850 - RNA, 19 nt, Homo sapiens
  misc_RNA (1)...(19): siRNA sense strand
gcuaaucggcgcacagaaa

SEQ ID NO: 1867851 - RNA, 19 nt, Homo sapiens
  misc_RNA (1)...(19): siRNA sense strand
gauuuggccuucuacucua

SEQ ID NO: 1867852 - RNA, 19 nt, Homo sapiens
  misc_RNA (1)...(19): siRNA sense strand
gaggguaucagaccuggua

SEQ ID NO: 1867853 - RNA, 19 nt, Homo sapiens
  misc_RNA (1)...(19): siRNA sense strand
guacaguaguaucucuauu

SEQ ID NO: 1867854 - RNA, 19 nt, Homo sapiens
  misc_RNA (1)...(19): siRNA sense strand
uagcagaucuugcccuaca

SEQ ID NO: 1867855 - RNA, 19 nt, Homo sapiens
  misc_RNA (1)...(19): siRNA sense strand
ucaccagguuguuucgaua

SEQ ID NO: 1867856 - RNA, 19 nt, Homo sapiens
  misc_RNA (1)...(19): siRNA sense strand
uaacccauauccagaacuu

SEQ ID NO: 1867857 - RNA, 19 nt, Homo sapiens
  misc_RNA (1)...(19): siRNA sense strand
ugaauugguuggagagaug

SEQ ID NO: 1867858 - RNA, 19 nt, Homo sapiens
  misc_RNA (1)...(19): siRNA sense strand
acaaaguucugaauuacug

SEQ ID NO: 1867859 - RNA, 19 nt, Homo sapiens
  misc_RNA (1)...(19): siRNA sense strand
acaguaguaucucuauuga

SEQ ID NO: 1867860 - RNA, 19 nt, Homo sapiens
  misc_RNA (1)...(19): siRNA sense strand
caaacaacuuacagacuuc

SEQ ID NO: 1867861 - RNA, 19 nt, Homo sapiens
  misc_RNA (1)...(19): siRNA sense strand
ggauaagauuaccgaaugu

SEQ ID NO: 1867862 - RNA, 19 nt, Homo sapiens
  misc_RNA (1)...(19): siRNA sense strand
ugaagucguugaucgaaau

SEQ ID NO: 1867863 - RNA, 19 nt, Homo sapiens
  misc_RNA (1)...(19): siRNA sense strand
uaacgcagcuggcuuuagc

SEQ ID NO: 1867864 - RNA, 19 nt, Homo sapiens
  misc_RNA (1)...(19): siRNA sense strand
uugagaauguggagacuaa

SEQ ID NO: 1867865 - RNA, 19 nt, Homo sapiens
  misc_RNA (1)...(19): siRNA sense strand
acaguaacuucauggcuaa

SEQ ID NO: 1867866 - RNA, 19 nt, Homo sapiens
  misc_RNA (1)...(19): siRNA sense strand
gaagauucagaccucauuu

SEQ ID NO: 1867867 - RNA, 19 nt, Homo sapiens
  misc_RNA (1)...(19): siRNA sense strand
gagacugccuaucauaugg

SEQ ID NO: 1867868 - RNA, 19 nt, Homo sapiens
  misc_RNA (1)...(19): siRNA sense strand
ggagacugccuaucauaug

SEQ ID NO: 1867869 - RNA, 19 nt, Homo sapiens
  misc_RNA (1)...(19): siRNA sense strand
ggaaaacaauccaacacuu

SEQ ID NO: 1867870 - RNA, 19 nt, Homo sapiens
  misc_RNA (1)...(19): siRNA sense strand
ggcaggauguggagucaug

SEQ ID NO: 1867871 - RNA, 19 nt, Homo sapiens
  misc_RNA (1)...(19): siRNA sense strand
uagggucuauggaguguuu

SEQ ID NO: 1867872 - RNA, 19 nt, Homo sapiens
  misc_RNA (1)...(19): siRNA sense strand
cuucaaagcuuacauucag

SEQ ID NO: 1867873 - RNA, 19 nt, Homo sapiens
  misc_RNA (1)...(19): siRNA sense strand
gugcaggccauccucaaua

SEQ ID NO: 1867874 - RNA, 19 nt, Homo sapiens
  misc_RNA (1)...(19): siRNA sense strand
cuugucaccuguuauugua

SEQ ID NO: 1867875 - RNA, 19 nt, Homo sapiens
  misc_RNA (1)...(19): siRNA sense strand
gcugaggaauguaaacaag

SEQ ID NO: 1867876 - RNA, 19 nt, Homo sapiens
  misc_RNA (1)...(19): siRNA sense strand
gguagccaaugaucaugaa

SEQ ID NO: 1867877 - RNA, 19 nt, Homo sapiens
  misc_RNA (1)...(19): siRNA sense strand
guucuuagaucgccuugca

SEQ ID NO: 1867878 - RNA, 19 nt, Homo sapiens
  misc_RNA (1)...(19): siRNA sense strand
agagaugagugaagucguu

SEQ ID NO: 1867879 - RNA, 19 nt, Homo sapiens
  misc_RNA (1)...(19): siRNA sense strand
gugaagauuuagacaaagu

SEQ ID NO: 1867880 - RNA, 19 nt, Homo sapiens
  misc_RNA (1)...(19): siRNA sense strand
cgacauugcagcucgugua

SEQ ID NO: 1867881 - RNA, 19 nt, Homo sapiens
  misc_RNA (1)...(19): siRNA sense strand
ccaccgggaugccaauugu

SEQ ID NO: 1867882 - RNA, 19 nt, Homo sapiens
  misc_RNA (1)...(19): siRNA sense strand
ggucaucccuaucuuacag

SEQ ID NO: 1867883 - RNA, 19 nt, Homo sapiens
  misc_RNA (1)...(19): siRNA sense strand
guguugggcuauuugauga

SEQ ID NO: 1867884 - RNA, 19 nt, Homo sapiens
  misc_RNA (1)...(19): siRNA sense strand
guaaaggacuugauuuucu

SEQ ID NO: 1867885 - RNA, 19 nt, Homo sapiens
  misc_RNA (1)...(19): siRNA sense strand
cauggcaucuucaaagcuu

SEQ ID NO: 1867886 - RNA, 19 nt, Homo sapiens
  misc_RNA (1)...(19): siRNA sense strand
agacaaaguucugaauuac

SEQ ID NO: 1867887 - RNA, 19 nt, Homo sapiens
  misc_RNA (1)...(19): siRNA sense strand
gcgcacagaaauuauagaa

SEQ ID NO: 1867888 - RNA, 19 nt, Homo sapiens
  misc_RNA (1)...(19): siRNA sense strand
guacauagucguuccuuac

SEQ ID NO: 1867889 - RNA, 19 nt, Homo sapiens
  misc_RNA (1)...(19): siRNA sense strand
aaucggcgcacagaaauua

SEQ ID NO: 1867890 - RNA, 19 nt, Homo sapiens
  misc_RNA (1)...(19): siRNA sense strand
cagaaagucauacaggaaa

SEQ ID NO: 1867891 - RNA, 19 nt, Homo sapiens
  misc_RNA (1)...(19): siRNA sense strand
cagccaaagccauucauaa

SEQ ID NO: 1867892 - RNA, 19 nt, Homo sapiens
  misc_RNA (1)...(19): siRNA sense strand
guaacuucauggcuaacaa

SEQ ID NO: 1867893 - RNA, 19 nt, Homo sapiens
  misc_RNA (1)...(19): siRNA sense strand
gaauguggagacuaacuug

SEQ ID NO: 1867894 - RNA, 19 nt, Homo sapiens
  misc_RNA (1)...(19): siRNA sense strand
gaucaugcagguugacaga

SEQ ID NO: 1867895 - RNA, 19 nt, Homo sapiens
  misc_RNA (1)...(19): siRNA sense strand
uacgagaccucauucauac

SEQ ID NO: 1867896 - RNA, 19 nt, Homo sapiens
  misc_RNA (1)...(19): siRNA sense strand
ucagaccaguuguuacaga

SEQ ID NO: 1867897 - RNA, 19 nt, Homo sapiens
  misc_RNA (1)...(19): siRNA sense strand
gcagccaaagccauucaua

SEQ ID NO: 1867898 - RNA, 19 nt, Homo sapiens
  misc_RNA (1)...(19): siRNA sense strand
ggagacuaacuugccauua

SEQ ID NO: 1867899 - RNA, 19 nt, Homo sapiens
  misc_RNA (1)...(19): siRNA sense strand
acgugaagauuuagacaaa

SEQ ID NO: 1867900 - RNA, 19 nt, Homo sapiens
  misc_RNA (1)...(19): siRNA sense strand
uuacagacuuccacaagca

SEQ ID NO: 1867901 - RNA, 19 nt, Homo sapiens
  misc_RNA (1)...(19): siRNA sense strand
gccaaguggucaucccuau

SEQ ID NO: 1867902 - RNA, 19 nt, Homo sapiens
  misc_RNA (1)...(19): siRNA sense strand
gugaagucguugaucgaaa

SEQ ID NO: 1867903 - RNA, 19 nt, Homo sapiens
  misc_RNA (1)...(19): siRNA sense strand
gaaaacaauccaacacuug

SEQ ID NO: 1867904 - RNA, 19 nt, Homo sapiens
  misc_RNA (1)...(19): siRNA sense strand
agacucucaugccucuuua

SEQ ID NO: 1867905 - RNA, 19 nt, Homo sapiens
  misc_RNA (1)...(19): siRNA sense strand
gaugaaaggccugugugaa

SEQ ID NO: 1867906 - RNA, 19 nt, Homo sapiens
  misc_RNA (1)...(19): siRNA sense strand
gaagcgguucucuuuauca

SEQ ID NO: 1867907 - RNA, 19 nt, Homo sapiens
  misc_RNA (1)...(19): siRNA sense strand
gaauauggcauggaagaag

SEQ ID NO: 1867908 - RNA, 19 nt, Homo sapiens
  misc_RNA (1)...(19): siRNA sense strand
gggcaagucccagaaguaa

SEQ ID NO: 1867909 - RNA, 19 nt, Homo sapiens
  misc_RNA (1)...(19): siRNA sense strand
ucaccugggucuggucuuu

SEQ ID NO: 1867910 - RNA, 19 nt, Homo sapiens
  misc_RNA (1)...(19): siRNA sense strand
ggaguguggugcuuaaucc

SEQ ID NO: 1867911 - RNA, 19 nt, Homo sapiens
  misc_RNA (1)...(19): siRNA sense strand
gcuggugaccgguuacuug

SEQ ID NO: 1867912 - RNA, 19 nt, Homo sapiens
  misc_RNA (1)...(19): siRNA sense strand
ccuggaguguggugcuuaa

SEQ ID NO: 1867913 - RNA, 19 nt, Homo sapiens
  misc_RNA (1)...(19): siRNA sense strand
gacagugugugcggcaaga

SEQ ID NO: 1867914 - RNA, 19 nt, Homo sapiens
  misc_RNA (1)...(19): siRNA sense strand
ccacuucuucccacucuau

SEQ ID NO: 1867915 - RNA, 19 nt, Homo sapiens
  misc_RNA (1)...(19): siRNA sense strand
guccuggccugaagacagu

SEQ ID NO: 1867916 - RNA, 19 nt, Homo sapiens
  misc_RNA (1)...(19): siRNA sense strand
gcccacuucuucccacucu

SEQ ID NO: 1867917 - RNA, 19 nt, Homo sapiens
  misc_RNA (1)...(19): siRNA sense strand
ccuccaacguggccagcuu

SEQ ID NO: 1867918 - RNA, 19 nt, Homo sapiens
  misc_RNA (1)...(19): siRNA sense strand
caacuuccuugucugcuuu

SEQ ID NO: 1867919 - RNA, 19 nt, Homo sapiens
  misc_RNA (1)...(19): siRNA sense strand
ggaccgaccagcugaaaga

SEQ ID NO: 1867920 - RNA, 19 nt, Homo sapiens
  misc_RNA (1)...(19): siRNA sense strand
cgguguaccuucucacuuu

SEQ ID NO: 1867921 - RNA, 19 nt, Homo sapiens
  misc_RNA (1)...(19): siRNA sense strand
ggcuauaucugcggugaaa

SEQ ID NO: 1867922 - RNA, 19 nt, Homo sapiens
  misc_RNA (1)...(19): siRNA sense strand
gaaagaaagaccagugaac

SEQ ID NO: 1867923 - RNA, 19 nt, Homo sapiens
  misc_RNA (1)...(19): siRNA sense strand
gcaccaaugggaccugcua

SEQ ID NO: 1867924 - RNA, 19 nt, Homo sapiens
  misc_RNA (1)...(19): siRNA sense strand
cagcguggucuacgucaua

SEQ ID NO: 1867925 - RNA, 19 nt, Homo sapiens
  misc_RNA (1)...(19): siRNA sense strand
gcaggcaggucuggugagu

SEQ ID NO: 1867926 - RNA, 19 nt, Homo sapiens
  misc_RNA (1)...(19): siRNA sense strand
cggccacgcugcucaacuu

SEQ ID NO: 1867927 - RNA, 19 nt, Homo sapiens
  misc_RNA (1)...(19): siRNA sense strand
aggcaggucuggugagugu

SEQ ID NO: 1867928 - RNA, 19 nt, Homo sapiens
  misc_RNA (1)...(19): siRNA sense strand
aaagaaagaccagugaaca

SEQ ID NO: 1867929 - RNA, 19 nt, Homo sapiens
  misc_RNA (1)...(19): siRNA sense strand
ccgaccagcugaaagaaag

SEQ ID NO: 1867930 - RNA, 19 nt, Homo sapiens
  misc_RNA (1)...(19): siRNA sense strand
ucaacuuccuugucugcuu

SEQ ID NO: 1867931 - RNA, 19 nt, Homo sapiens
  misc_RNA (1)...(19): siRNA sense strand
ccuacaacgugucccaugu

SEQ ID NO: 1867932 - RNA, 19 nt, Homo sapiens
  misc_RNA (1)...(19): siRNA sense strand
ggaucuacgugacgcuucu

SEQ ID NO: 1867933 - RNA, 19 nt, Homo sapiens
  misc_RNA (1)...(19): siRNA sense strand
ccuggcagcugugagcauu

SEQ ID NO: 1867934 - RNA, 19 nt, Homo sapiens
  misc_RNA (1)...(19): siRNA sense strand
ugaaagaaagaccagugaa

SEQ ID NO: 1867935 - RNA, 19 nt, Homo sapiens
  misc_RNA (1)...(19): siRNA sense strand
gguguaccuucucacuuuc

SEQ ID NO: 1867936 - RNA, 19 nt, Homo sapiens
  misc_RNA (1)...(19): siRNA sense strand
uggcagcugugagcauuga

SEQ ID NO: 1867937 - RNA, 19 nt, Homo sapiens
  misc_RNA (1)...(19): siRNA sense strand
cugcucaacuuccuugucu

SEQ ID NO: 1867938 - RNA, 19 nt, Homo sapiens
  misc_RNA (1)...(19): siRNA sense strand
guuccaagccgacuuucau

SEQ ID NO: 1867939 - RNA, 19 nt, Homo sapiens
  misc_RNA (1)...(19): siRNA sense strand
gcaaucacugguucgucuu

SEQ ID NO: 1867940 - RNA, 19 nt, Homo sapiens
  misc_RNA (1)...(19): siRNA sense strand
uggcugugguccucuuugu

SEQ ID NO: 1867941 - RNA, 19 nt, Homo sapiens
  misc_RNA (1)...(19): siRNA sense strand
ucucuggauucaucuucuu

SEQ ID NO: 1867942 - RNA, 19 nt, Homo sapiens
  misc_RNA (1)...(19): siRNA sense strand
gcagcguggucuacgucau

SEQ ID NO: 1867943 - RNA, 19 nt, Homo sapiens
  misc_RNA (1)...(19): siRNA sense strand
gcaaugaaauuaccugcua

SEQ ID NO: 1867944 - RNA, 19 nt, Homo sapiens
  misc_RNA (1)...(19): siRNA sense strand
gaucaucguucaauacuug

SEQ ID NO: 1867945 - RNA, 19 nt, Homo sapiens
  misc_RNA (1)...(19): siRNA sense strand
gagaagggaugccaaguuc

SEQ ID NO: 1867946 - RNA, 19 nt, Homo sapiens
  misc_RNA (1)...(19): siRNA sense strand
ggucagaaguggcaaugaa

SEQ ID NO: 1867947 - RNA, 19 nt, Homo sapiens
  misc_RNA (1)...(19): siRNA sense strand
uacgagaacuucaccgaua

SEQ ID NO: 1867948 - RNA, 19 nt, Homo sapiens
  misc_RNA (1)...(19): siRNA sense strand
ccucauggcuuacaucauc

SEQ ID NO: 1867949 - RNA, 19 nt, Homo sapiens
  misc_RNA (1)...(19): siRNA sense strand
ggagaagggaugccaaguu

SEQ ID NO: 1867950 - RNA, 19 nt, Homo sapiens
  misc_RNA (1)...(19): siRNA sense strand
uggugacgcugcucaauuu

SEQ ID NO: 1867951 - RNA, 19 nt, Homo sapiens
  misc_RNA (1)...(19): siRNA sense strand
agaaguggcaaugaaauua

SEQ ID NO: 1867952 - RNA, 19 nt, Homo sapiens
  misc_RNA (1)...(19): siRNA sense strand
ucaauuuccuggugugcuu

SEQ ID NO: 1867953 - RNA, 19 nt, Homo sapiens
  misc_RNA (1)...(19): siRNA sense strand
guucggacuucacuacaga

SEQ ID NO: 1867954 - RNA, 19 nt, Homo sapiens
  misc_RNA (1)...(19): siRNA sense strand
acgagaacuucaccgauaa

SEQ ID NO: 1867955 - RNA, 19 nt, Homo sapiens
  misc_RNA (1)...(19): siRNA sense strand
cagaaguggcaaugaaauu

SEQ ID NO: 1867956 - RNA, 19 nt, Homo sapiens
  misc_RNA (1)...(19): siRNA sense strand
gcucuucuauuucucuucu

SEQ ID NO: 1867957 - RNA, 19 nt, Homo sapiens
  misc_RNA (1)...(19): siRNA sense strand
uggcuuacaucaucaucuu

SEQ ID NO: 1867958 - RNA, 19 nt, Homo sapiens
  misc_RNA (1)...(19): siRNA sense strand
gggugugggucaaggagaa

SEQ ID NO: 1867959 - RNA, 19 nt, Homo sapiens
  misc_RNA (1)...(19): siRNA sense strand
ggacgcagaggcaaagaca

SEQ ID NO: 1867960 - RNA, 19 nt, Homo sapiens
  misc_RNA (1)...(19): siRNA sense strand
gaaguggcaaugaaauuac

SEQ ID NO: 1867961 - RNA, 19 nt, Homo sapiens
  misc_RNA (1)...(19): siRNA sense strand
ccuugauccucauggcuua

SEQ ID NO: 1867962 - RNA, 19 nt, Homo sapiens
  misc_RNA (1)...(19): siRNA sense strand
gcucugguggccuggguua

SEQ ID NO: 1867963 - RNA, 19 nt, Homo sapiens
  misc_RNA (1)...(19): siRNA sense strand
cugcugcccuucaagauca

SEQ ID NO: 1867964 - RNA, 19 nt, Homo sapiens
  misc_RNA (1)...(19): siRNA sense strand
gucaauagccgugguguuc

SEQ ID NO: 1867965 - RNA, 19 nt, Homo sapiens
  misc_RNA (1)...(19): siRNA sense strand
ucugcgcccucacgaguuu

SEQ ID NO: 1867966 - RNA, 19 nt, Homo sapiens
  misc_RNA (1)...(19): siRNA sense strand
cuucaccgauaaccaguug

SEQ ID NO: 1867967 - RNA, 19 nt, Homo sapiens
  misc_RNA (1)...(19): siRNA sense strand
cgucgaacuuccgcuggua

SEQ ID NO: 1867968 - RNA, 19 nt, Homo sapiens
  misc_RNA (1)...(19): siRNA sense strand
guggugacgcugcucaauu

SEQ ID NO: 1867969 - RNA, 19 nt, Homo sapiens
  misc_RNA (1)...(19): siRNA sense strand
gguguucaguucacucaac

SEQ ID NO: 1867970 - RNA, 19 nt, Homo sapiens
  misc_RNA (1)...(19): siRNA sense strand
caauagccgugguguucag

SEQ ID NO: 1867971 - RNA, 19 nt, Homo sapiens
  misc_RNA (1)...(19): siRNA sense strand
cagcagaggggacaaauga

SEQ ID NO: 1867972 - RNA, 19 nt, Homo sapiens
  misc_RNA (1)...(19): siRNA sense strand
gucagaaguggcaaugaaa

SEQ ID NO: 1867973 - RNA, 19 nt, Homo sapiens
  misc_RNA (1)...(19): siRNA sense strand
ucgugaucaucguucaaua

SEQ ID NO: 1867974 - RNA, 19 nt, Homo sapiens
  misc_RNA (1)...(19): siRNA sense strand
ucagaaguggcaaugaaau

SEQ ID NO: 1867975 - RNA, 19 nt, Homo sapiens
  misc_RNA (1)...(19): siRNA sense strand
ggccuggguuauguccuuu

SEQ ID NO: 1867976 - RNA, 19 nt, Homo sapiens
  misc_RNA (1)...(19): siRNA sense strand
uagccgugguguucaguuc

SEQ ID NO: 1867977 - RNA, 19 nt, Homo sapiens
  misc_RNA (1)...(19): siRNA sense strand
gcaccaucgugaucaucgu

SEQ ID NO: 1867978 - RNA, 19 nt, Homo sapiens
  misc_RNA (1)...(19): siRNA sense strand
ggacaggggugugggucaa

SEQ ID NO: 1867979 - RNA, 19 nt, Homo sapiens
  misc_RNA (1)...(19): siRNA sense strand
cagucaccaucuucugcua

SEQ ID NO: 1867980 - RNA, 19 nt, Homo sapiens
  misc_RNA (1)...(19): siRNA sense strand
gccucuguauggagugauu

SEQ ID NO: 1867981 - RNA, 19 nt, Homo sapiens
  misc_RNA (1)...(19): siRNA sense strand
uggccuggguuauguccuu

SEQ ID NO: 1867982 - RNA, 19 nt, Homo sapiens
  misc_RNA (1)...(19): siRNA sense strand
ggucaauagccgugguguu

SEQ ID NO: 1867983 - RNA, 19 nt, Homo sapiens
  misc_RNA (1)...(19): siRNA sense strand
caccaucuguguccucuau

SEQ ID NO: 1867984 - RNA, 19 nt, Homo sapiens
  misc_RNA (1)...(19): siRNA sense strand
gaaccuccgccagcugaua

SEQ ID NO: 1867985 - RNA, 19 nt, Homo sapiens
  misc_RNA (1)...(19): siRNA sense strand
ggcgguggcuguaccaguu

SEQ ID NO: 1867986 - RNA, 19 nt, Homo sapiens
  misc_RNA (1)...(19): siRNA sense strand
ccaagaagcgggugaccuu

SEQ ID NO: 1867987 - RNA, 19 nt, Homo sapiens
  misc_RNA (1)...(19): siRNA sense strand
gcaugaagaccgucaccaa

SEQ ID NO: 1867988 - RNA, 19 nt, Homo sapiens
  misc_RNA (1)...(19): siRNA sense strand
gcaagcucaucguggcuau

SEQ ID NO: 1867989 - RNA, 19 nt, Homo sapiens
  misc_RNA (1)...(19): siRNA sense strand
gcaacuccgccgugcugua

SEQ ID NO: 1867990 - RNA, 19 nt, Homo sapiens
  misc_RNA (1)...(19): siRNA sense strand
gcuaucuccuacuucauca

SEQ ID NO: 1867991 - RNA, 19 nt, Homo sapiens
  misc_RNA (1)...(19): siRNA sense strand
ccagugcgugcuagucuuu

SEQ ID NO: 1867992 - RNA, 19 nt, Homo sapiens
  misc_RNA (1)...(19): siRNA sense strand
ccaucaacaucgccgacuu

SEQ ID NO: 1867993 - RNA, 19 nt, Homo sapiens
  misc_RNA (1)...(19): siRNA sense strand
gaccgucaccaaccuguuc

SEQ ID NO: 1867994 - RNA, 19 nt, Homo sapiens
  misc_RNA (1)...(19): siRNA sense strand
uccgccagcugauaacuug

SEQ ID NO: 1867995 - RNA, 19 nt, Homo sapiens
  misc_RNA (1)...(19): siRNA sense strand
ucaccaaccuguucauccu

SEQ ID NO: 1867996 - RNA, 19 nt, Homo sapiens
  misc_RNA (1)...(19): siRNA sense strand
ccaucuguguccucuauac

SEQ ID NO: 1867997 - RNA, 19 nt, Homo sapiens
  misc_RNA (1)...(19): siRNA sense strand
caucaacaucgccgacuuc

SEQ ID NO: 1867998 - RNA, 19 nt, Homo sapiens
  misc_RNA (1)...(19): siRNA sense strand
ucaucgcuaucuccuacuu

SEQ ID NO: 1867999 - RNA, 19 nt, Homo sapiens
  misc_RNA (1)...(19): siRNA sense strand
gccagugcgugcuagucuu

SEQ ID NO: 1868000 - RNA, 19 nt, Homo sapiens
  misc_RNA (1)...(19): siRNA sense strand
caacuccgccgugcuguac

SEQ ID NO: 1868001 - RNA, 19 nt, Homo sapiens
  misc_RNA (1)...(19): siRNA sense strand
ucguggcuaucgaccagua

SEQ ID NO: 1868002 - RNA, 19 nt, Homo sapiens
  misc_RNA (1)...(19): siRNA sense strand
ugaagaccgucaccaaccu

SEQ ID NO: 1868003 - RNA, 19 nt, Homo sapiens
  misc_RNA (1)...(19): siRNA sense strand
ccgccgugcuguacguguu

SEQ ID NO: 1868004 - RNA, 19 nt, Homo sapiens
  misc_RNA (1)...(19): siRNA sense strand
ggaagaaguucaacauuua

SEQ ID NO: 1868005 - RNA, 19 nt, Homo sapiens
  misc_RNA (1)...(19): siRNA sense strand
gaagauggauguagagaaa

SEQ ID NO: 1868006 - RNA, 19 nt, Homo sapiens
  misc_RNA (1)...(19): siRNA sense strand
gcagaaaccuccagaguug

SEQ ID NO: 1868007 - RNA, 19 nt, Homo sapiens
  misc_RNA (1)...(19): siRNA sense strand
gaagaggugugaagagcua

SEQ ID NO: 1868008 - RNA, 19 nt, Homo sapiens
  misc_RNA (1)...(19): siRNA sense strand
gaaacagguucuagaaaug

SEQ ID NO: 1868009 - RNA, 19 nt, Homo sapiens
  misc_RNA (1)...(19): siRNA sense strand
guagagaaauggcguguga

SEQ ID NO: 1868010 - RNA, 19 nt, Homo sapiens
  misc_RNA (1)...(19): siRNA sense strand
gcaccaaauuuguuccuuu

SEQ ID NO: 1868011 - RNA, 19 nt, Homo sapiens
  misc_RNA (1)...(19): siRNA sense strand
gcgauucuuuguuggauua

SEQ ID NO: 1868012 - RNA, 19 nt, Homo sapiens
  misc_RNA (1)...(19): siRNA sense strand
gaggagggcucgagagaga

SEQ ID NO: 1868013 - RNA, 19 nt, Homo sapiens
  misc_RNA (1)...(19): siRNA sense strand
ugagagaagucacuaagaa

SEQ ID NO: 1868014 - RNA, 19 nt, Homo sapiens
  misc_RNA (1)...(19): siRNA sense strand
ugaaacagguucuagaaau

SEQ ID NO: 1868015 - RNA, 19 nt, Homo sapiens
  misc_RNA (1)...(19): siRNA sense strand
ccacaaaucgccucacuuu

SEQ ID NO: 1868016 - RNA, 19 nt, Homo sapiens
  misc_RNA (1)...(19): siRNA sense strand
caucaaaguucaauaacga

SEQ ID NO: 1868017 - RNA, 19 nt, Homo sapiens
  misc_RNA (1)...(19): siRNA sense strand
ggaaagauagugaggaaga

SEQ ID NO: 1868018 - RNA, 19 nt, Homo sapiens
  misc_RNA (1)...(19): siRNA sense strand
ggaagggcuuucugcguuu

SEQ ID NO: 1868019 - RNA, 19 nt, Homo sapiens
  misc_RNA (1)...(19): siRNA sense strand
gaaagauagugaggaagaa

SEQ ID NO: 1868020 - RNA, 19 nt, Homo sapiens
  misc_RNA (1)...(19): siRNA sense strand
gggaauauuuaaccacuug

SEQ ID NO: 1868021 - RNA, 19 nt, Homo sapiens
  misc_RNA (1)...(19): siRNA sense strand
aggaagaaguucaacauuu

SEQ ID NO: 1868022 - RNA, 19 nt, Homo sapiens
  misc_RNA (1)...(19): siRNA sense strand
ccacaagguuaagaagaua

SEQ ID NO: 1868023 - RNA, 19 nt, Homo sapiens
  misc_RNA (1)...(19): siRNA sense strand
agagagcgauucuuuguug

SEQ ID NO: 1868024 - RNA, 19 nt, Homo sapiens
  misc_RNA (1)...(19): siRNA sense strand
gcauugauccuauuuggaa

SEQ ID NO: 1868025 - RNA, 19 nt, Homo sapiens
  misc_RNA (1)...(19): siRNA sense strand
gcaggaguauguccagaga

SEQ ID NO: 1868026 - RNA, 19 nt, Homo sapiens
  misc_RNA (1)...(19): siRNA sense strand
gcuacacacuuauaaggaa

SEQ ID NO: 1868027 - RNA, 19 nt, Homo sapiens
  misc_RNA (1)...(19): siRNA sense strand
gugaagagcuagagcgaau

SEQ ID NO: 1868028 - RNA, 19 nt, Homo sapiens
  misc_RNA (1)...(19): siRNA sense strand
caaauuuguuccuuucuca

SEQ ID NO: 1868029 - RNA, 19 nt, Homo sapiens
  misc_RNA (1)...(19): siRNA sense strand
caaagucagucaaccuguu

SEQ ID NO: 1868030 - RNA, 19 nt, Homo sapiens
  misc_RNA (1)...(19): siRNA sense strand
cuaaaucagucacaagaga

SEQ ID NO: 1868031 - RNA, 19 nt, Homo sapiens
  misc_RNA (1)...(19): siRNA sense strand
gcagcuggauccaagcauu

SEQ ID NO: 1868032 - RNA, 19 nt, Homo sapiens
  misc_RNA (1)...(19): siRNA sense strand
ugaggcaagugcuauguaa

SEQ ID NO: 1868033 - RNA, 19 nt, Homo sapiens
  misc_RNA (1)...(19): siRNA sense strand
gaacaaauucuacguuggu

SEQ ID NO: 1868034 - RNA, 19 nt, Homo sapiens
  misc_RNA (1)...(19): siRNA sense strand
gguggaagauggauguaga

SEQ ID NO: 1868035 - RNA, 19 nt, Homo sapiens
  misc_RNA (1)...(19): siRNA sense strand
caagagaucaugaggaugu

SEQ ID NO: 1868036 - RNA, 19 nt, Homo sapiens
  misc_RNA (1)...(19): siRNA sense strand
auaagaagauggugcuuug

SEQ ID NO: 1868037 - RNA, 19 nt, Homo sapiens
  misc_RNA (1)...(19): siRNA sense strand
cacaagagaucaugaggau

SEQ ID NO: 1868038 - RNA, 19 nt, Homo sapiens
  misc_RNA (1)...(19): siRNA sense strand
gguagaauuucagaacaaa

SEQ ID NO: 1868039 - RNA, 19 nt, Homo sapiens
  misc_RNA (1)...(19): siRNA sense strand
cagauuggccacaagguua

SEQ ID NO: 1868040 - RNA, 19 nt, Homo sapiens
  misc_RNA (1)...(19): siRNA sense strand
gaaauggcgugugaagagu

SEQ ID NO: 1868041 - RNA, 19 nt, Homo sapiens
  misc_RNA (1)...(19): siRNA sense strand
gaaccggaguggcuacaca

SEQ ID NO: 1868042 - RNA, 19 nt, Homo sapiens
  misc_RNA (1)...(19): siRNA sense strand
gaacugagagaagucacua

SEQ ID NO: 1868043 - RNA, 19 nt, Homo sapiens
  misc_RNA (1)...(19): siRNA sense strand
acacuggccucaucuacaa

SEQ ID NO: 1868044 - RNA, 19 nt, Homo sapiens
  misc_RNA (1)...(19): siRNA sense strand
gaagagcuagagcgaauau

SEQ ID NO: 1868045 - RNA, 19 nt, Homo sapiens
  misc_RNA (1)...(19): siRNA sense strand
ugaacccacuuaugaagaa

SEQ ID NO: 1868046 - RNA, 19 nt, Homo sapiens
  misc_RNA (1)...(19): siRNA sense strand
caucaucaccuucccguuu

SEQ ID NO: 1868047 - RNA, 19 nt, Homo sapiens
  misc_RNA (1)...(19): siRNA sense strand
gcugggaagccaagauaua

SEQ ID NO: 1868048 - RNA, 19 nt, Homo sapiens
  misc_RNA (1)...(19): siRNA sense strand
gcucgagguugaacugaga

SEQ ID NO: 1868049 - RNA, 19 nt, Homo sapiens
  misc_RNA (1)...(19): siRNA sense strand
gccacaagguuaagaagau

SEQ ID NO: 1868050 - RNA, 19 nt, Homo sapiens
  misc_RNA (1)...(19): siRNA sense strand
ggguagaauuucagaacaa

SEQ ID NO: 1868051 - RNA, 19 nt, Homo sapiens
  misc_RNA (1)...(19): siRNA sense strand
ugcagaagcucgagguuga

SEQ ID NO: 1868052 - RNA, 19 nt, Homo sapiens
  misc_RNA (1)...(19): siRNA sense strand
aaggaaagauagugaggaa

SEQ ID NO: 1868053 - RNA, 19 nt, Homo sapiens
  misc_RNA (1)...(19): siRNA sense strand
gaaaaucaucccagacuaa

SEQ ID NO: 1868054 - RNA, 19 nt, Homo sapiens
  misc_RNA (1)...(19): siRNA sense strand
ggaaauuaauagagcugau

SEQ ID NO: 1868055 - RNA, 19 nt, Homo sapiens
  misc_RNA (1)...(19): siRNA sense strand
ccagcucucuuuaccauca

SEQ ID NO: 1868056 - RNA, 19 nt, Homo sapiens
  misc_RNA (1)...(19): siRNA sense strand
ucacuaagaacaaggagaa

SEQ ID NO: 1868057 - RNA, 19 nt, Homo sapiens
  misc_RNA (1)...(19): siRNA sense strand
guucaacauuuaccugguu

SEQ ID NO: 1868058 - RNA, 19 nt, Homo sapiens
  misc_RNA (1)...(19): siRNA sense strand
gaacgugucggccauguac

SEQ ID NO: 1868059 - RNA, 19 nt, Homo sapiens
  misc_RNA (1)...(19): siRNA sense strand
gagagcagauuggccacaa

SEQ ID NO: 1868060 - RNA, 19 nt, Homo sapiens
  misc_RNA (1)...(19): siRNA sense strand
ggauuugugucuggccuaa

SEQ ID NO: 1868061 - RNA, 19 nt, Homo sapiens
  misc_RNA (1)...(19): siRNA sense strand
agaauucccuuccuuagag

SEQ ID NO: 1868062 - RNA, 19 nt, Homo sapiens
  misc_RNA (1)...(19): siRNA sense strand
gaauucccuuccuuagaga

SEQ ID NO: 1868063 - RNA, 19 nt, Homo sapiens
  misc_RNA (1)...(19): siRNA sense strand
ucagucuacuuucaucaaa

SEQ ID NO: 1868064 - RNA, 19 nt, Homo sapiens
  misc_RNA (1)...(19): siRNA sense strand
gcagauuggccacaagguu

SEQ ID NO: 1868065 - RNA, 19 nt, Homo sapiens
  misc_RNA (1)...(19): siRNA sense strand
gcuuugacgugaccaacaa

SEQ ID NO: 1868066 - RNA, 19 nt, Homo sapiens
  misc_RNA (1)...(19): siRNA sense strand
ugaggaagaaguuucauug

SEQ ID NO: 1868067 - RNA, 19 nt, Homo sapiens
  misc_RNA (1)...(19): siRNA sense strand
gagaagucacuaagaacaa

SEQ ID NO: 1868068 - RNA, 19 nt, Homo sapiens
  misc_RNA (1)...(19): siRNA sense strand
cgacgacaguguggcauga

SEQ ID NO: 1868069 - RNA, 19 nt, Homo sapiens
  misc_RNA (1)...(19): siRNA sense strand
caccaaauuuguuccuuuc

SEQ ID NO: 1868070 - RNA, 19 nt, Homo sapiens
  misc_RNA (1)...(19): siRNA sense strand
ggaagauggauguagagaa

SEQ ID NO: 1868071 - RNA, 19 nt, Homo sapiens
  misc_RNA (1)...(19): siRNA sense strand
cuacacacuuauaaggaaa

SEQ ID NO: 1868072 - RNA, 19 nt, Homo sapiens
  misc_RNA (1)...(19): siRNA sense strand
agaagauggugcuuuggaa

SEQ ID NO: 1868073 - RNA, 19 nt, Homo sapiens
  misc_RNA (1)...(19): siRNA sense strand
ccgcagagcauaagaagau

SEQ ID NO: 1868074 - RNA, 19 nt, Homo sapiens
  misc_RNA (1)...(19): siRNA sense strand
aaaugaaggccaucuauca

SEQ ID NO: 1868075 - RNA, 19 nt, Homo sapiens
  misc_RNA (1)...(19): siRNA sense strand
gagagagaguggugcuaca

SEQ ID NO: 1868076 - RNA, 19 nt, Homo sapiens
  misc_RNA (1)...(19): siRNA sense strand
gggaagccaagauauagaa

SEQ ID NO: 1868077 - RNA, 19 nt, Homo sapiens
  misc_RNA (1)...(19): siRNA sense strand
acacagggcaggaguaugu

SEQ ID NO: 1868078 - RNA, 19 nt, Homo sapiens
  misc_RNA (1)...(19): siRNA sense strand
ucuuguggguguuaaauga

SEQ ID NO: 1868079 - RNA, 19 nt, Homo sapiens
  misc_RNA (1)...(19): siRNA sense strand
gaccucaaccagaacguaa

SEQ ID NO: 1868080 - RNA, 19 nt, Homo sapiens
  misc_RNA (1)...(19): siRNA sense strand
uccgagaccucaaccagaa

SEQ ID NO: 1868081 - RNA, 19 nt, Homo sapiens
  misc_RNA (1)...(19): siRNA sense strand
cgugugaagaguuuaauuu

SEQ ID NO: 1868082 - RNA, 19 nt, Homo sapiens
  misc_RNA (1)...(19): siRNA sense strand
gaagccaagauauagaaga

SEQ ID NO: 1868083 - RNA, 19 nt, Homo sapiens
  misc_RNA (1)...(19): siRNA sense strand
aagcauuccuggaguguuc

SEQ ID NO: 1868084 - RNA, 19 nt, Homo sapiens
  misc_RNA (1)...(19): siRNA sense strand
gcacaaaaccgaggacuau

SEQ ID NO: 1868085 - RNA, 19 nt, Homo sapiens
  misc_RNA (1)...(19): siRNA sense strand
gagcgauucuuuguuggau

SEQ ID NO: 1868086 - RNA, 19 nt, Homo sapiens
  misc_RNA (1)...(19): siRNA sense strand
gcucccagcauucugauug

SEQ ID NO: 1868087 - RNA, 19 nt, Homo sapiens
  misc_RNA (1)...(19): siRNA sense strand
gaagaaguucaacauuuac

SEQ ID NO: 1868088 - RNA, 19 nt, Homo sapiens
  misc_RNA (1)...(19): siRNA sense strand
gauccgcaccaacaaauuc

SEQ ID NO: 1868089 - RNA, 19 nt, Homo sapiens
  misc_RNA (1)...(19): siRNA sense strand
gaaaaugaaggccaucuau

SEQ ID NO: 1868090 - RNA, 19 nt, Homo sapiens
  misc_RNA (1)...(19): siRNA sense strand
guacaggaaauuaauagag

SEQ ID NO: 1868091 - RNA, 19 nt, Homo sapiens
  misc_RNA (1)...(19): siRNA sense strand
uccaggaucucuacacugu

SEQ ID NO: 1868092 - RNA, 19 nt, Homo sapiens
  misc_RNA (1)...(19): siRNA sense strand
augcagaacuggaugaauc

SEQ ID NO: 1868093 - RNA, 19 nt, Homo sapiens
  misc_RNA (1)...(19): siRNA sense strand
caucguguccuaugcagaa

SEQ ID NO: 1868094 - RNA, 19 nt, Homo sapiens
  misc_RNA (1)...(19): siRNA sense strand
ugcuggaacugauagagua

SEQ ID NO: 1868095 - RNA, 19 nt, Homo sapiens
  misc_RNA (1)...(19): siRNA sense strand
gaagggcuuucugcguuuc

SEQ ID NO: 1868096 - RNA, 19 nt, Homo sapiens
  misc_RNA (1)...(19): siRNA sense strand
aaacuugcuggaacugaua

SEQ ID NO: 1868097 - RNA, 19 nt, Homo sapiens
  misc_RNA (1)...(19): siRNA sense strand
agagagugcugcugguugu

SEQ ID NO: 1868098 - RNA, 19 nt, Homo sapiens
  misc_RNA (1)...(19): siRNA sense strand
gaccaacaagugccucauu

SEQ ID NO: 1868099 - RNA, 19 nt, Homo sapiens
  misc_RNA (1)...(19): siRNA sense strand
gaacccacuuaugaagaau

SEQ ID NO: 1868100 - RNA, 19 nt, Homo sapiens
  misc_RNA (1)...(19): siRNA sense strand
gaauauaauccccacaaaa

SEQ ID NO: 1868101 - RNA, 19 nt, Homo sapiens
  misc_RNA (1)...(19): siRNA sense strand
ccaaauuuguuccuuucuc

SEQ ID NO: 1868102 - RNA, 19 nt, Homo sapiens
  misc_RNA (1)...(19): siRNA sense strand
agauggauguagagaaaug

SEQ ID NO: 1868103 - RNA, 19 nt, Homo sapiens
  misc_RNA (1)...(19): siRNA sense strand
caucuacaacgacugcuuu

SEQ ID NO: 1868104 - RNA, 19 nt, Homo sapiens
  misc_RNA (1)...(19): siRNA sense strand
ggaaagaaauccugaaguu

SEQ ID NO: 1868105 - RNA, 19 nt, Homo sapiens
  misc_RNA (1)...(19): siRNA sense strand
ggaaggaaauuaugaccaa

SEQ ID NO: 1868106 - RNA, 19 nt, Homo sapiens
  misc_RNA (1)...(19): siRNA sense strand
ggccugggcuggaguguua

SEQ ID NO: 1868107 - RNA, 19 nt, Homo sapiens
  misc_RNA (1)...(19): siRNA sense strand
gcaagaugcugcucacgaa

SEQ ID NO: 1868108 - RNA, 19 nt, Homo sapiens
  misc_RNA (1)...(19): siRNA sense strand
gauagaaacagaaugcuuu

SEQ ID NO: 1868109 - RNA, 19 nt, Homo sapiens
  misc_RNA (1)...(19): siRNA sense strand
gaaacagaaugcuuuaagg

SEQ ID NO: 1868110 - RNA, 19 nt, Homo sapiens
  misc_RNA (1)...(19): siRNA sense strand
uuaaggagcugaacguguu

SEQ ID NO: 1868111 - RNA, 19 nt, Homo sapiens
  misc_RNA (1)...(19): siRNA sense strand
gaaggaccauagacagaga

SEQ ID NO: 1868112 - RNA, 19 nt, Homo sapiens
  misc_RNA (1)...(19): siRNA sense strand
gaacguguuuggaccuaau

SEQ ID NO: 1868113 - RNA, 19 nt, Homo sapiens
  misc_RNA (1)...(19): siRNA sense strand
gaacuucaagcgcuuagaa

SEQ ID NO: 1868114 - RNA, 19 nt, Homo sapiens
  misc_RNA (1)...(19): siRNA sense strand
gagaaagggaaggaaauua

SEQ ID NO: 1868115 - RNA, 19 nt, Homo sapiens
  misc_RNA (1)...(19): siRNA sense strand
gaaguucccucacauuagc

SEQ ID NO: 1868116 - RNA, 19 nt, Homo sapiens
  misc_RNA (1)...(19): siRNA sense strand
gaaggucaacagucaguuu

SEQ ID NO: 1868117 - RNA, 19 nt, Homo sapiens
  misc_RNA (1)...(19): siRNA sense strand
gaaagggaaggaaauuaug

SEQ ID NO: 1868118 - RNA, 19 nt, Homo sapiens
  misc_RNA (1)...(19): siRNA sense strand
gcaagaaguggaaagaaau

SEQ ID NO: 1868119 - RNA, 19 nt, Homo sapiens
  misc_RNA (1)...(19): siRNA sense strand
gaccugggcuuggcuguga

SEQ ID NO: 1868120 - RNA, 19 nt, Homo sapiens
  misc_RNA (1)...(19): siRNA sense strand
ggagagaaagggaaggaaa

SEQ ID NO: 1868121 - RNA, 19 nt, Homo sapiens
  misc_RNA (1)...(19): siRNA sense strand
ugaaguuacuccagaugaa

SEQ ID NO: 1868122 - RNA, 19 nt, Homo sapiens
  misc_RNA (1)...(19): siRNA sense strand
gaaagaaauccugaaguuc

SEQ ID NO: 1868123 - RNA, 19 nt, Homo sapiens
  misc_RNA (1)...(19): siRNA sense strand
agaagcagauccucgagaa

SEQ ID NO: 1868124 - RNA, 19 nt, Homo sapiens
  misc_RNA (1)...(19): siRNA sense strand
agagauuacugcaguuuau

SEQ ID NO: 1868125 - RNA, 19 nt, Homo sapiens
  misc_RNA (1)...(19): siRNA sense strand
gaaguuacuccagaugaaa

SEQ ID NO: 1868126 - RNA, 19 nt, Homo sapiens
  misc_RNA (1)...(19): siRNA sense strand
cagaacaauuccaagaguu

SEQ ID NO: 1868127 - RNA, 19 nt, Homo sapiens
  misc_RNA (1)...(19): siRNA sense strand
gggcuggaguguuacauuc

SEQ ID NO: 1868128 - RNA, 19 nt, Homo sapiens
  misc_RNA (1)...(19): siRNA sense strand
guaaggacgugcuggacau

SEQ ID NO: 1868129 - RNA, 19 nt, Homo sapiens
  misc_RNA (1)...(19): siRNA sense strand
ucgagaaggucaacaguca

SEQ ID NO: 1868130 - RNA, 19 nt, Homo sapiens
  misc_RNA (1)...(19): siRNA sense strand
gaccugaaguuccacaucu

SEQ ID NO: 1868131 - RNA, 19 nt, Homo sapiens
  misc_RNA (1)...(19): siRNA sense strand
ccacacagacgacgacuuc

SEQ ID NO: 1868132 - RNA, 19 nt, Homo sapiens
  misc_RNA (1)...(19): siRNA sense strand
aggaaauuaugaccaagua

SEQ ID NO: 1868133 - RNA, 19 nt, Homo sapiens
  misc_RNA (1)...(19): siRNA sense strand
agcaagaaguggaaagaaa

SEQ ID NO: 1868134 - RNA, 19 nt, Homo sapiens
  misc_RNA (1)...(19): siRNA sense strand
ccaacacggucuugcugaa

SEQ ID NO: 1868135 - RNA, 19 nt, Homo sapiens
  misc_RNA (1)...(19): siRNA sense strand
gggcuuggcugugaagauc

SEQ ID NO: 1868136 - RNA, 19 nt, Homo sapiens
  misc_RNA (1)...(19): siRNA sense strand
gauuauggccacauuagga

SEQ ID NO: 1868137 - RNA, 19 nt, Homo sapiens
  misc_RNA (1)...(19): siRNA sense strand
ccaaguaccucaccccaaa

SEQ ID NO: 1868138 - RNA, 19 nt, Homo sapiens
  misc_RNA (1)...(19): siRNA sense strand
ucagaacaauuccaagagu

SEQ ID NO: 1868139 - RNA, 19 nt, Homo sapiens
  misc_RNA (1)...(19): siRNA sense strand
gaacaccgucuaccgagau

SEQ ID NO: 1868140 - RNA, 19 nt, Homo sapiens
  misc_RNA (1)...(19): siRNA sense strand
gggagaaccauuccacgaa

SEQ ID NO: 1868141 - RNA, 19 nt, Homo sapiens
  misc_RNA (1)...(19): siRNA sense strand
ccacauaaacucaaaccau

SEQ ID NO: 1868142 - RNA, 19 nt, Homo sapiens
  misc_RNA (1)...(19): siRNA sense strand
caucagaacaauuccaaga

SEQ ID NO: 1868143 - RNA, 19 nt, Homo sapiens
  misc_RNA (1)...(19): siRNA sense strand
gagagaaagggaaggaaau

SEQ ID NO: 1868144 - RNA, 19 nt, Homo sapiens
  misc_RNA (1)...(19): siRNA sense strand
aaacagaaugcuuuaagga

SEQ ID NO: 1868145 - RNA, 19 nt, Homo sapiens
  misc_RNA (1)...(19): siRNA sense strand
cugcagaggucaagagaca

SEQ ID NO: 1868146 - RNA, 19 nt, Homo sapiens
  misc_RNA (1)...(19): siRNA sense strand
gaugauuauggccacauua

SEQ ID NO: 1868147 - RNA, 19 nt, Homo sapiens
  misc_RNA (1)...(19): siRNA sense strand
agaaagggaaggaaauuau

SEQ ID NO: 1868148 - RNA, 19 nt, Homo sapiens
  misc_RNA (1)...(19): siRNA sense strand
ggccuuggcugccucaucu

SEQ ID NO: 1868149 - RNA, 19 nt, Homo sapiens
  misc_RNA (1)...(19): siRNA sense strand
cugaaguucccucacauua

SEQ ID NO: 1868150 - RNA, 19 nt, Homo sapiens
  misc_RNA (1)...(19): siRNA sense strand
gaccauagacagagauuac

SEQ ID NO: 1868151 - RNA, 19 nt, Homo sapiens
  misc_RNA (1)...(19): siRNA sense strand
caaaccaugucagcucgaa

SEQ ID NO: 1868152 - RNA, 19 nt, Homo sapiens
  misc_RNA (1)...(19): siRNA sense strand
ggacuccguggcagaauau

SEQ ID NO: 1868153 - RNA, 19 nt, Homo sapiens
  misc_RNA (1)...(19): siRNA sense strand
ggucaacagucaguuugug

SEQ ID NO: 1868154 - RNA, 19 nt, Homo sapiens
  misc_RNA (1)...(19): siRNA sense strand
acgaauaucuggacagcau

SEQ ID NO: 1868155 - RNA, 19 nt, Homo sapiens
  misc_RNA (1)...(19): siRNA sense strand
ggcagaauaugaaguuacu

SEQ ID NO: 1868156 - RNA, 19 nt, Homo sapiens
  misc_RNA (1)...(19): siRNA sense strand
gagaugauagaaacagaau

SEQ ID NO: 1868157 - RNA, 19 nt, Homo sapiens
  misc_RNA (1)...(19): siRNA sense strand
guuggacccucccuucguu

SEQ ID NO: 1868158 - RNA, 19 nt, Homo sapiens
  misc_RNA (1)...(19): siRNA sense strand
gagguguacucccacaagu

SEQ ID NO: 1868159 - RNA, 19 nt, Homo sapiens
  misc_RNA (1)...(19): siRNA sense strand
caguggaagugguuggaaa

SEQ ID NO: 1868160 - RNA, 19 nt, Homo sapiens
  misc_RNA (1)...(19): siRNA sense strand
aaagggaaggaaauuauga

SEQ ID NO: 1868161 - RNA, 19 nt, Homo sapiens
  misc_RNA (1)...(19): siRNA sense strand
cagagauuacugcaguuua

SEQ ID NO: 1868162 - RNA, 19 nt, Homo sapiens
  misc_RNA (1)...(19): siRNA sense strand
gaaagggcugcuccagaga

SEQ ID NO: 1868163 - RNA, 19 nt, Homo sapiens
  misc_RNA (1)...(19): siRNA sense strand
gaugauagaaacagaaugc

SEQ ID NO: 1868164 - RNA, 19 nt, Homo sapiens
  misc_RNA (1)...(19): siRNA sense strand
aaaguccccuguuuucaua

SEQ ID NO: 1868165 - RNA, 19 nt, Homo sapiens
  misc_RNA (1)...(19): siRNA sense strand
gauccucugcggcuuagaa

SEQ ID NO: 1868166 - RNA, 19 nt, Homo sapiens
  misc_RNA (1)...(19): siRNA sense strand
caacacggucuugcugaaa

SEQ ID NO: 1868167 - RNA, 19 nt, Homo sapiens
  misc_RNA (1)...(19): siRNA sense strand
acacagacgacgacuucua

SEQ ID NO: 1868168 - RNA, 19 nt, Homo sapiens
  misc_RNA (1)...(19): siRNA sense strand
uggacuccguggcagaaua

SEQ ID NO: 1868169 - RNA, 19 nt, Homo sapiens
  misc_RNA (1)...(19): siRNA sense strand
gacagagauuacugcaguu

SEQ ID NO: 1868170 - RNA, 19 nt, Homo sapiens
  misc_RNA (1)...(19): siRNA sense strand
acagaagccgugcaaagaa

SEQ ID NO: 1868171 - RNA, 19 nt, Homo sapiens
  misc_RNA (1)...(19): siRNA sense strand
gguguacucccacaaguuc

SEQ ID NO: 1868172 - RNA, 19 nt, Homo sapiens
  misc_RNA (1)...(19): siRNA sense strand
ggaccauagacagagauua

SEQ ID NO: 1868173 - RNA, 19 nt, Homo sapiens
  misc_RNA (1)...(19): siRNA sense strand
gagaagaagaggaucaaaa

SEQ ID NO: 1868174 - RNA, 19 nt, Homo sapiens
  misc_RNA (1)...(19): siRNA sense strand
cagaagccgugcaaagaac

SEQ ID NO: 1868175 - RNA, 19 nt, Homo sapiens
  misc_RNA (1)...(19): siRNA sense strand
uacagaagccgugcaaaga

SEQ ID NO: 1868176 - RNA, 19 nt, Homo sapiens
  misc_RNA (1)...(19): siRNA sense strand
gggcacuguuggcuacaug

SEQ ID NO: 1868177 - RNA, 19 nt, Homo sapiens
  misc_RNA (1)...(19): siRNA sense strand
caagaaguggaaagaaauc

SEQ ID NO: 1868178 - RNA, 19 nt, Homo sapiens
  misc_RNA (1)...(19): siRNA sense strand
ggcagcaucagaacaauuc

SEQ ID NO: 1868179 - RNA, 19 nt, Homo sapiens
  misc_RNA (1)...(19): siRNA sense strand
gagauccucugcggcuuag

SEQ ID NO: 1868180 - RNA, 19 nt, Homo sapiens
  misc_RNA (1)...(19): siRNA sense strand
gagaaggucaacagucagu

SEQ ID NO: 1868181 - RNA, 19 nt, Homo sapiens
  misc_RNA (1)...(19): siRNA sense strand
gaauaucuggacagcaugu

SEQ ID NO: 1868182 - RNA, 19 nt, Homo sapiens
  misc_RNA (1)...(19): siRNA sense strand
cuacagaagccgugcaaag

SEQ ID NO: 1868183 - RNA, 19 nt, Homo sapiens
  misc_RNA (1)...(19): siRNA sense strand
gggaguccauggcccucaa

SEQ ID NO: 1868184 - RNA, 19 nt, Homo sapiens
  misc_RNA (1)...(19): siRNA sense strand
guggcagaauaugaaguua

SEQ ID NO: 1868185 - RNA, 19 nt, Homo sapiens
  misc_RNA (1)...(19): siRNA sense strand
agaaacagaaugcuuuaag

SEQ ID NO: 1868186 - RNA, 19 nt, Homo sapiens
  misc_RNA (1)...(19): siRNA sense strand
agaugcugcucacgaaaga

SEQ ID NO: 1868187 - RNA, 19 nt, Homo sapiens
  misc_RNA (1)...(19): siRNA sense strand
ggagaagaagaggaucaaa

SEQ ID NO: 1868188 - RNA, 19 nt, Homo sapiens
  misc_RNA (1)...(19): siRNA sense strand
agagaaagggaaggaaauu

SEQ ID NO: 1868189 - RNA, 19 nt, Homo sapiens
  misc_RNA (1)...(19): siRNA sense strand
ucaagcggcagcaucagaa

SEQ ID NO: 1868190 - RNA, 19 nt, Homo sapiens
  misc_RNA (1)...(19): siRNA sense strand
caagaugcugcucacgaaa

SEQ ID NO: 1868191 - RNA, 19 nt, Homo sapiens
  misc_RNA (1)...(19): siRNA sense strand
caggcaguaucgagugcua

SEQ ID NO: 1868192 - RNA, 19 nt, Homo sapiens
  misc_RNA (1)...(19): siRNA sense strand
gaaguuccacaucuacaac

SEQ ID NO: 1868193 - RNA, 19 nt, Homo sapiens
  misc_RNA (1)...(19): siRNA sense strand
guguuuggaccuaauggua

SEQ ID NO: 1868194 - RNA, 19 nt, Homo sapiens
  misc_RNA (1)...(19): siRNA sense strand
cuuagaagccgggauguug

SEQ ID NO: 1868195 - RNA, 19 nt, Homo sapiens
  misc_RNA (1)...(19): siRNA sense strand
ugaaguucccucacauuag

SEQ ID NO: 1868196 - RNA, 19 nt, Homo sapiens
  misc_RNA (1)...(19): siRNA sense strand
cgagaucugaaaccugaaa

SEQ ID NO: 1868197 - RNA, 19 nt, Homo sapiens
  misc_RNA (1)...(19): siRNA sense strand
ccgaaguccugaacaacca

SEQ ID NO: 1868198 - RNA, 19 nt, Homo sapiens
  misc_RNA (1)...(19): siRNA sense strand
ccgaaggaccauagacaga

SEQ ID NO: 1868199 - RNA, 19 nt, Homo sapiens
  misc_RNA (1)...(19): siRNA sense strand
gagauuacugcaguuuaug

SEQ ID NO: 1868200 - RNA, 19 nt, Homo sapiens
  misc_RNA (1)...(19): siRNA sense strand
cgagaugauagaaacagaa

SEQ ID NO: 1868201 - RNA, 19 nt, Homo sapiens
  misc_RNA (1)...(19): siRNA sense strand
ugaaguuccacaucuacaa

SEQ ID NO: 1868202 - RNA, 19 nt, Homo sapiens
  misc_RNA (1)...(19): siRNA sense strand
aaaggcaaccggugaccaa

SEQ ID NO: 1868203 - RNA, 19 nt, Homo sapiens
  misc_RNA (1)...(19): siRNA sense strand
agaugauuauggccacauu

SEQ ID NO: 1868204 - RNA, 19 nt, Homo sapiens
  misc_RNA (1)...(19): siRNA sense strand
caacccaggucauaucuaa

SEQ ID NO: 1868205 - RNA, 19 nt, Homo sapiens
  misc_RNA (1)...(19): siRNA sense strand
gaagggcucugaaggagaa

SEQ ID NO: 1868206 - RNA, 19 nt, Homo sapiens
  misc_RNA (1)...(19): siRNA sense strand
ggaagaacaugcgauauac

SEQ ID NO: 1868207 - RNA, 19 nt, Homo sapiens
  misc_RNA (1)...(19): siRNA sense strand
caaggaagaacaugcgaua

SEQ ID NO: 1868208 - RNA, 19 nt, Homo sapiens
  misc_RNA (1)...(19): siRNA sense strand
ggagaacccaguugacuug

SEQ ID NO: 1868209 - RNA, 19 nt, Homo sapiens
  misc_RNA (1)...(19): siRNA sense strand
ggaaguauaaggguccaua

SEQ ID NO: 1868210 - RNA, 19 nt, Homo sapiens
  misc_RNA (1)...(19): siRNA sense strand
ucuaucaccucuucucuug

SEQ ID NO: 1868211 - RNA, 19 nt, Homo sapiens
  misc_RNA (1)...(19): siRNA sense strand
gucaugcuguuucccuuua

SEQ ID NO: 1868212 - RNA, 19 nt, Homo sapiens
  misc_RNA (1)...(19): siRNA sense strand
gauauacacagcagaccua

SEQ ID NO: 1868213 - RNA, 19 nt, Homo sapiens
  misc_RNA (1)...(19): siRNA sense strand
cacagcagcuucaggaugu

SEQ ID NO: 1868214 - RNA, 19 nt, Homo sapiens
  misc_RNA (1)...(19): siRNA sense strand
gaagaguucagucccaaug

SEQ ID NO: 1868215 - RNA, 19 nt, Homo sapiens
  misc_RNA (1)...(19): siRNA sense strand
cagaggcuccuguggauuu

SEQ ID NO: 1868216 - RNA, 19 nt, Homo sapiens
  misc_RNA (1)...(19): siRNA sense strand
aggaagaacaugcgauaua

SEQ ID NO: 1868217 - RNA, 19 nt, Homo sapiens
  misc_RNA (1)...(19): siRNA sense strand
caagagcacccuccaaugg

SEQ ID NO: 1868218 - RNA, 19 nt, Homo sapiens
  misc_RNA (1)...(19): siRNA sense strand
caaagcaggaucugaggaa

SEQ ID NO: 1868219 - RNA, 19 nt, Homo sapiens
  misc_RNA (1)...(19): siRNA sense strand
aaucaccacuuuccagaau

SEQ ID NO: 1868220 - RNA, 19 nt, Homo sapiens
  misc_RNA (1)...(19): siRNA sense strand
ccucgaagcugcaggaacu

SEQ ID NO: 1868221 - RNA, 19 nt, Homo sapiens
  misc_RNA (1)...(19): siRNA sense strand
ggagaaagcacugccuaca

SEQ ID NO: 1868222 - RNA, 19 nt, Homo sapiens
  misc_RNA (1)...(19): siRNA sense strand
ugaaggagaacccaguuga

SEQ ID NO: 1868223 - RNA, 19 nt, Homo sapiens
  misc_RNA (1)...(19): siRNA sense strand
uaucuaauccugagagcaa

SEQ ID NO: 1868224 - RNA, 19 nt, Homo sapiens
  misc_RNA (1)...(19): siRNA sense strand
gaagaacaugcgauauaca

SEQ ID NO: 1868225 - RNA, 19 nt, Homo sapiens
  misc_RNA (1)...(19): siRNA sense strand
gcacaagagcacccuccaa

SEQ ID NO: 1868226 - RNA, 19 nt, Homo sapiens
  misc_RNA (1)...(19): siRNA sense strand
ccacgaacgccuuuguaug

SEQ ID NO: 1868227 - RNA, 19 nt, Homo sapiens
  misc_RNA (1)...(19): siRNA sense strand
gaaucaccacuuuccagaa

SEQ ID NO: 1868228 - RNA, 19 nt, Homo sapiens
  misc_RNA (1)...(19): siRNA sense strand
cagggaccaucuucaagga

SEQ ID NO: 1868229 - RNA, 19 nt, Homo sapiens
  misc_RNA (1)...(19): siRNA sense strand
acagaauccuccucagcaa

SEQ ID NO: 1868230 - RNA, 19 nt, Homo sapiens
  misc_RNA (1)...(19): siRNA sense strand
gaugcagccuggagucucu

SEQ ID NO: 1868231 - RNA, 19 nt, Homo sapiens
  misc_RNA (1)...(19): siRNA sense strand
gucagaggcuccuguggau

SEQ ID NO: 1868232 - RNA, 19 nt, Homo sapiens
  misc_RNA (1)...(19): siRNA sense strand
gaagcugcaggaacuugaa

SEQ ID NO: 1868233 - RNA, 19 nt, Homo sapiens
  misc_RNA (1)...(19): siRNA sense strand
ccuccaaugggaaguauaa

SEQ ID NO: 1868234 - RNA, 19 nt, Homo sapiens
  misc_RNA (1)...(19): siRNA sense strand
gagucucuaucaccucuuc

SEQ ID NO: 1868235 - RNA, 19 nt, Homo sapiens
  misc_RNA (1)...(19): siRNA sense strand
cacaagagcacccuccaau

SEQ ID NO: 1868236 - RNA, 19 nt, Homo sapiens
  misc_RNA (1)...(19): siRNA sense strand
gcaccacgaacgccuuugu

SEQ ID NO: 1868237 - RNA, 19 nt, Homo sapiens
  misc_RNA (1)...(19): siRNA sense strand
cacgaacgccuuuguaugg

SEQ ID NO: 1868238 - RNA, 19 nt, Homo sapiens
  misc_RNA (1)...(19): siRNA sense strand
gacuagcacuccacaaucc

SEQ ID NO: 1868239 - RNA, 19 nt, Homo sapiens
  misc_RNA (1)...(19): siRNA sense strand
acaauaugguguggacaug

SEQ ID NO: 1868240 - RNA, 19 nt, Homo sapiens
  misc_RNA (1)...(19): siRNA sense strand
gacaauaugguguggacau

SEQ ID NO: 1868241 - RNA, 19 nt, Homo sapiens
  misc_RNA (1)...(19): siRNA sense strand
ucaccacuuuccagaaucu

SEQ ID NO: 1868242 - RNA, 19 nt, Homo sapiens
  misc_RNA (1)...(19): siRNA sense strand
uggaggcacaggaaacuuu

SEQ ID NO: 1868243 - RNA, 19 nt, Homo sapiens
  misc_RNA (1)...(19): siRNA sense strand
gaauccuccucagcaacaa

SEQ ID NO: 1868244 - RNA, 19 nt, Homo sapiens
  misc_RNA (1)...(19): siRNA sense strand
ccucagggaccaucuucaa

SEQ ID NO: 1868245 - RNA, 19 nt, Homo sapiens
  misc_RNA (1)...(19): siRNA sense strand
gaaggagaacccaguugac

SEQ ID NO: 1868246 - RNA, 19 nt, Homo sapiens
  misc_RNA (1)...(19): siRNA sense strand
cgaagcugcaggaacuuga

SEQ ID NO: 1868247 - RNA, 19 nt, Homo sapiens
  misc_RNA (1)...(19): siRNA sense strand
aagacuagcacuccacaau

SEQ ID NO: 1868248 - RNA, 19 nt, Homo sapiens
  misc_RNA (1)...(19): siRNA sense strand
ugugucagcuggagaaagc

SEQ ID NO: 1868249 - RNA, 19 nt, Homo sapiens
  misc_RNA (1)...(19): siRNA sense strand
gagaaagcacugccuacac

SEQ ID NO: 1868250 - RNA, 19 nt, Homo sapiens
  misc_RNA (1)...(19): siRNA sense strand
caccacgaacgccuuugua

SEQ ID NO: 1868251 - RNA, 19 nt, Homo sapiens
  misc_RNA (1)...(19): siRNA sense strand
acaagagcacccuccaaug

SEQ ID NO: 1868252 - RNA, 19 nt, Homo sapiens
  misc_RNA (1)...(19): siRNA sense strand
cagccuggagucucuauca

SEQ ID NO: 1868253 - RNA, 19 nt, Homo sapiens
  misc_RNA (1)...(19): siRNA sense strand
ucaccaacccaggucauau

SEQ ID NO: 1868254 - RNA, 19 nt, Homo sapiens
  misc_RNA (1)...(19): siRNA sense strand
gaauauacaugucaagaag

SEQ ID NO: 1868255 - RNA, 19 nt, Homo sapiens
  misc_RNA (1)...(19): siRNA sense strand
gaucaucucuguuuacuac

SEQ ID NO: 1868256 - RNA, 19 nt, Homo sapiens
  misc_RNA (1)...(19): siRNA sense strand
gcugacagauggcuauuug

SEQ ID NO: 1868257 - RNA, 19 nt, Homo sapiens
  misc_RNA (1)...(19): siRNA sense strand
acacucagcugcucuguug

SEQ ID NO: 1868258 - RNA, 19 nt, Homo sapiens
  misc_RNA (1)...(19): siRNA sense strand
gaccugcuccuccuaauaa

SEQ ID NO: 1868259 - RNA, 19 nt, Homo sapiens
  misc_RNA (1)...(19): siRNA sense strand
ccagagugcuuacaaucuu

SEQ ID NO: 1868260 - RNA, 19 nt, Homo sapiens
  misc_RNA (1)...(19): siRNA sense strand
ggaauauacaugucaagaa

SEQ ID NO: 1868261 - RNA, 19 nt, Homo sapiens
  misc_RNA (1)...(19): siRNA sense strand
ugucaucccugcaguuuau

SEQ ID NO: 1868262 - RNA, 19 nt, Homo sapiens
  misc_RNA (1)...(19): siRNA sense strand
agacagugcugguguuugu

SEQ ID NO: 1868263 - RNA, 19 nt, Homo sapiens
  misc_RNA (1)...(19): siRNA sense strand
guuccaaaccuguucauuu

SEQ ID NO: 1868264 - RNA, 19 nt, Homo sapiens
  misc_RNA (1)...(19): siRNA sense strand
aggauuggcugcaaacuga

SEQ ID NO: 1868265 - RNA, 19 nt, Homo sapiens
  misc_RNA (1)...(19): siRNA sense strand
ggagguggaccauuucaug

SEQ ID NO: 1868266 - RNA, 19 nt, Homo sapiens
  misc_RNA (1)...(19): siRNA sense strand
ggaagggaauauacauguc

SEQ ID NO: 1868267 - RNA, 19 nt, Homo sapiens
  misc_RNA (1)...(19): siRNA sense strand
gauccagagugcuuacaau

SEQ ID NO: 1868268 - RNA, 19 nt, Homo sapiens
  misc_RNA (1)...(19): siRNA sense strand
gaagggaauauacauguca

SEQ ID NO: 1868269 - RNA, 19 nt, Homo sapiens
  misc_RNA (1)...(19): siRNA sense strand
ccaagacagugcugguguu

SEQ ID NO: 1868270 - RNA, 19 nt, Homo sapiens
  misc_RNA (1)...(19): siRNA sense strand
caacaucuccagucacagu

SEQ ID NO: 1868271 - RNA, 19 nt, Homo sapiens
  misc_RNA (1)...(19): siRNA sense strand
uuccaaaccuguucauuuc

SEQ ID NO: 1868272 - RNA, 19 nt, Homo sapiens
  misc_RNA (1)...(19): siRNA sense strand
gaucuucuguacagucaag

SEQ ID NO: 1868273 - RNA, 19 nt, Homo sapiens
  misc_RNA (1)...(19): siRNA sense strand
gaugaagaucugccucaaa

SEQ ID NO: 1868274 - RNA, 19 nt, Homo sapiens
  misc_RNA (1)...(19): siRNA sense strand
ugucgaucaucucuguuua

SEQ ID NO: 1868275 - RNA, 19 nt, Homo sapiens
  misc_RNA (1)...(19): siRNA sense strand
ccucaucaauggaaacauc

SEQ ID NO: 1868276 - RNA, 19 nt, Homo sapiens
  misc_RNA (1)...(19): siRNA sense strand
gcaaacugauccccuuuau

SEQ ID NO: 1868277 - RNA, 19 nt, Homo sapiens
  misc_RNA (1)...(19): siRNA sense strand
gcuccuaccacuacucuga

SEQ ID NO: 1868278 - RNA, 19 nt, Homo sapiens
  misc_RNA (1)...(19): siRNA sense strand
ucaucucuguuuacuacua

SEQ ID NO: 1868279 - RNA, 19 nt, Homo sapiens
  misc_RNA (1)...(19): siRNA sense strand
ugcaugaccucccucaaga

SEQ ID NO: 1868280 - RNA, 19 nt, Homo sapiens
  misc_RNA (1)...(19): siRNA sense strand
acuuggagguggaccauuu

SEQ ID NO: 1868281 - RNA, 19 nt, Homo sapiens
  misc_RNA (1)...(19): siRNA sense strand
agacagauacaaagccauu

SEQ ID NO: 1868282 - RNA, 19 nt, Homo sapiens
  misc_RNA (1)...(19): siRNA sense strand
gccuuuaucuggaucaucu

SEQ ID NO: 1868283 - RNA, 19 nt, Homo sapiens
  misc_RNA (1)...(19): siRNA sense strand
ugaccucccucaagaguac

SEQ ID NO: 1868284 - RNA, 19 nt, Homo sapiens
  misc_RNA (1)...(19): siRNA sense strand
augaagaucugccucaaag

SEQ ID NO: 1868285 - RNA, 19 nt, Homo sapiens
  misc_RNA (1)...(19): siRNA sense strand
caagacagugcugguguuu

SEQ ID NO: 1868286 - RNA, 19 nt, Homo sapiens
  misc_RNA (1)...(19): siRNA sense strand
aaccagaccuucauuagcu

SEQ ID NO: 1868287 - RNA, 19 nt, Homo sapiens
  misc_RNA (1)...(19): siRNA sense strand
gaaacguuccaaaccuguu

SEQ ID NO: 1868288 - RNA, 19 nt, Homo sapiens
  misc_RNA (1)...(19): siRNA sense strand
gggaauauacaugucaaga

SEQ ID NO: 1868289 - RNA, 19 nt, Homo sapiens
  misc_RNA (1)...(19): siRNA sense strand
gagaccugcuccuccuaau

SEQ ID NO: 1868290 - RNA, 19 nt, Homo sapiens
  misc_RNA (1)...(19): siRNA sense strand
ccaaaccuguucauuucca

SEQ ID NO: 1868291 - RNA, 19 nt, Homo sapiens
  misc_RNA (1)...(19): siRNA sense strand
gcaccaaccagaccuucau

SEQ ID NO: 1868292 - RNA, 19 nt, Homo sapiens
  misc_RNA (1)...(19): siRNA sense strand
ccaaucaugucaucuaccu

SEQ ID NO: 1868293 - RNA, 19 nt, Homo sapiens
  misc_RNA (1)...(19): siRNA sense strand
acuacuacuucauugcuaa

SEQ ID NO: 1868294 - RNA, 19 nt, Homo sapiens
  misc_RNA (1)...(19): siRNA sense strand
cccaugcccugaugaagau

SEQ ID NO: 1868295 - RNA, 19 nt, Homo sapiens
  misc_RNA (1)...(19): siRNA sense strand
ugcaacaucuccagucaca

SEQ ID NO: 1868296 - RNA, 19 nt, Homo sapiens
  misc_RNA (1)...(19): siRNA sense strand
ccaaccagaccuucauuag

SEQ ID NO: 1868297 - RNA, 19 nt, Homo sapiens
  misc_RNA (1)...(19): siRNA sense strand
cagagugcuuacaaucuuc

SEQ ID NO: 1868298 - RNA, 19 nt, Homo sapiens
  misc_RNA (1)...(19): siRNA sense strand
ccuccaugcuccacuuugu

SEQ ID NO: 1868299 - RNA, 19 nt, Homo sapiens
  misc_RNA (1)...(19): siRNA sense strand
agaccugcuccuccuaaua

SEQ ID NO: 1868300 - RNA, 19 nt, Homo sapiens
  misc_RNA (1)...(19): siRNA sense strand
ccuuuagccucaucaaugg

SEQ ID NO: 1868301 - RNA, 19 nt, Homo sapiens
  misc_RNA (1)...(19): siRNA sense strand
aagaucuucuguacaguca

SEQ ID NO: 1868302 - RNA, 19 nt, Homo sapiens
  misc_RNA (1)...(19): siRNA sense strand
ugagcaagaguuucaggaa

SEQ ID NO: 1868303 - RNA, 19 nt, Homo sapiens
  misc_RNA (1)...(19): siRNA sense strand
guuuacuacuacuucauug

SEQ ID NO: 1868304 - RNA, 19 nt, Homo sapiens
  misc_RNA (1)...(19): siRNA sense strand
gaacuuggagguggaccau

SEQ ID NO: 1868305 - RNA, 19 nt, Homo sapiens
  misc_RNA (1)...(19): siRNA sense strand
ugaugaagaucugccucaa

SEQ ID NO: 1868306 - RNA, 19 nt, Homo sapiens
  misc_RNA (1)...(19): siRNA sense strand
ucaauggaaacaucuguca

SEQ ID NO: 1868307 - RNA, 19 nt, Homo sapiens
  misc_RNA (1)...(19): siRNA sense strand
guaccgcuccuaccacuac

SEQ ID NO: 1868308 - RNA, 19 nt, Homo sapiens
  misc_RNA (1)...(19): siRNA sense strand
cauacccacacucuaauga

SEQ ID NO: 1868309 - RNA, 19 nt, Homo sapiens
  misc_RNA (1)...(19): siRNA sense strand
uaugucaucccugcaguuu

SEQ ID NO: 1868310 - RNA, 19 nt, Homo sapiens
  misc_RNA (1)...(19): siRNA sense strand
gaaggaguacaaccugcau

SEQ ID NO: 1868311 - RNA, 19 nt, Homo sapiens
  misc_RNA (1)...(19): siRNA sense strand
aaugacuguuuccuucuga

SEQ ID NO: 1868312 - RNA, 19 nt, Homo sapiens
  misc_RNA (1)...(19): siRNA sense strand
aaaugacuguuuccuucug

SEQ ID NO: 1868313 - RNA, 19 nt, Homo sapiens
  misc_RNA (1)...(19): siRNA sense strand
aaacugauccccuuuauac

SEQ ID NO: 1868314 - RNA, 19 nt, Homo sapiens
  misc_RNA (1)...(19): siRNA sense strand
cacugucgaucaucucugu

SEQ ID NO: 1868315 - RNA, 19 nt, Homo sapiens
  misc_RNA (1)...(19): siRNA sense strand
uggaagggaauauacaugu

SEQ ID NO: 1868316 - RNA, 19 nt, Homo sapiens
  misc_RNA (1)...(19): siRNA sense strand
acaccuccaugcuccacuu

SEQ ID NO: 1868317 - RNA, 19 nt, Homo sapiens
  misc_RNA (1)...(19): siRNA sense strand
auauacaugucaagaagca

SEQ ID NO: 1868318 - RNA, 19 nt, Homo sapiens
  misc_RNA (1)...(19): siRNA sense strand
caaccagaccuucauuagc

SEQ ID NO: 1868319 - RNA, 19 nt, Homo sapiens
  misc_RNA (1)...(19): siRNA sense strand
ucauuggcaacaucacuuu

SEQ ID NO: 1868320 - RNA, 19 nt, Homo sapiens
  misc_RNA (1)...(19): siRNA sense strand
cuuccuuucuggucuucua

SEQ ID NO: 1868321 - RNA, 19 nt, Homo sapiens
  misc_RNA (1)...(19): siRNA sense strand
aucaagaucuucuguacag

SEQ ID NO: 1868322 - RNA, 19 nt, Homo sapiens
  misc_RNA (1)...(19): siRNA sense strand
acuguuuccuucugaacuu

SEQ ID NO: 1868323 - RNA, 19 nt, Homo sapiens
  misc_RNA (1)...(19): siRNA sense strand
ggcucuaaaugacuguuuc

SEQ ID NO: 1868324 - RNA, 19 nt, Homo sapiens
  misc_RNA (1)...(19): siRNA sense strand
aagggaauauacaugucaa

SEQ ID NO: 1868325 - RNA, 19 nt, Homo sapiens
  misc_RNA (1)...(19): siRNA sense strand
uacuacuacuucauugcua

SEQ ID NO: 1868326 - RNA, 19 nt, Homo sapiens
  misc_RNA (1)...(19): siRNA sense strand
uaaaugacuguuuccuucu

SEQ ID NO: 1868327 - RNA, 19 nt, Homo sapiens
  misc_RNA (1)...(19): siRNA sense strand
caucucuguuuacuacuac

SEQ ID NO: 1868328 - RNA, 19 nt, Homo sapiens
  misc_RNA (1)...(19): siRNA sense strand
gaacaaggauggauuuauu

SEQ ID NO: 1868329 - RNA, 19 nt, Homo sapiens
  misc_RNA (1)...(19): siRNA sense strand
ggaauugacuuuagaagaa

SEQ ID NO: 1868330 - RNA, 19 nt, Homo sapiens
  misc_RNA (1)...(19): siRNA sense strand
ggaaaugguucuauugaca

SEQ ID NO: 1868331 - RNA, 19 nt, Homo sapiens
  misc_RNA (1)...(19): siRNA sense strand
gaaagcaguuccuacacaa

SEQ ID NO: 1868332 - RNA, 19 nt, Homo sapiens
  misc_RNA (1)...(19): siRNA sense strand
guacagaacauuuaugaug

SEQ ID NO: 1868333 - RNA, 19 nt, Homo sapiens
  misc_RNA (1)...(19): siRNA sense strand
gcaaacacuacaugaauuu

SEQ ID NO: 1868334 - RNA, 19 nt, Homo sapiens
  misc_RNA (1)...(19): siRNA sense strand
ggauggauuuauugacuuu

SEQ ID NO: 1868335 - RNA, 19 nt, Homo sapiens
  misc_RNA (1)...(19): siRNA sense strand
gagacagacuccuccaaau

SEQ ID NO: 1868336 - RNA, 19 nt, Homo sapiens
  misc_RNA (1)...(19): siRNA sense strand
ugaaucagaaggccaauaa

SEQ ID NO: 1868337 - RNA, 19 nt, Homo sapiens
  misc_RNA (1)...(19): siRNA sense strand
ucaacuugguguuccauaa

SEQ ID NO: 1868338 - RNA, 19 nt, Homo sapiens
  misc_RNA (1)...(19): siRNA sense strand
gaaaugguucuauugacaa

SEQ ID NO: 1868339 - RNA, 19 nt, Homo sapiens
  misc_RNA (1)...(19): siRNA sense strand
guaugaugcugauggaaau

SEQ ID NO: 1868340 - RNA, 19 nt, Homo sapiens
  misc_RNA (1)...(19): siRNA sense strand
cagaaggccaauaaacaua

SEQ ID NO: 1868341 - RNA, 19 nt, Homo sapiens
  misc_RNA (1)...(19): siRNA sense strand
ggaagcagccagacaugga

SEQ ID NO: 1868342 - RNA, 19 nt, Homo sapiens
  misc_RNA (1)...(19): siRNA sense strand
ggaguuuauugcugcugua

SEQ ID NO: 1868343 - RNA, 19 nt, Homo sapiens
  misc_RNA (1)...(19): siRNA sense strand
gggaauggcaaaucuauag

SEQ ID NO: 1868344 - RNA, 19 nt, Homo sapiens
  misc_RNA (1)...(19): siRNA sense strand
ugauggaaaugguucuauu

SEQ ID NO: 1868345 - RNA, 19 nt, Homo sapiens
  misc_RNA (1)...(19): siRNA sense strand
agaaagcaguuccuacaca

SEQ ID NO: 1868346 - RNA, 19 nt, Homo sapiens
  misc_RNA (1)...(19): siRNA sense strand
gggaauugacuuuagaaga

SEQ ID NO: 1868347 - RNA, 19 nt, Homo sapiens
  misc_RNA (1)...(19): siRNA sense strand
gauggaaaugguucuauug

SEQ ID NO: 1868348 - RNA, 19 nt, Homo sapiens
  misc_RNA (1)...(19): siRNA sense strand
ugcaaacacuacaugaauu

SEQ ID NO: 1868349 - RNA, 19 nt, Homo sapiens
  misc_RNA (1)...(19): siRNA sense strand
gaucagaaagcaguuccua

SEQ ID NO: 1868350 - RNA, 19 nt, Homo sapiens
  misc_RNA (1)...(19): siRNA sense strand
ccaaugugcugagaguaau

SEQ ID NO: 1868351 - RNA, 19 nt, Homo sapiens
  misc_RNA (1)...(19): siRNA sense strand
gagcuucgacuucuccaau

SEQ ID NO: 1868352 - RNA, 19 nt, Homo sapiens
  misc_RNA (1)...(19): siRNA sense strand
gugcugagaguaaucugua

SEQ ID NO: 1868353 - RNA, 19 nt, Homo sapiens
  misc_RNA (1)...(19): siRNA sense strand
ucagaaagcaguuccuaca

SEQ ID NO: 1868354 - RNA, 19 nt, Homo sapiens
  misc_RNA (1)...(19): siRNA sense strand
ucugaguccugaagaauuc

SEQ ID NO: 1868355 - RNA, 19 nt, Homo sapiens
  misc_RNA (1)...(19): siRNA sense strand
uauagcuggugaucagaaa

SEQ ID NO: 1868356 - RNA, 19 nt, Homo sapiens
  misc_RNA (1)...(19): siRNA sense strand
acagaacauuuaugaugga

SEQ ID NO: 1868357 - RNA, 19 nt, Homo sapiens
  misc_RNA (1)...(19): siRNA sense strand
gacagacuccuccaaaucu

SEQ ID NO: 1868358 - RNA, 19 nt, Homo sapiens
  misc_RNA (1)...(19): siRNA sense strand
uacaagagcuucgacuucu

SEQ ID NO: 1868359 - RNA, 19 nt, Homo sapiens
  misc_RNA (1)...(19): siRNA sense strand
gaaucagaaggccaauaaa

SEQ ID NO: 1868360 - RNA, 19 nt, Homo sapiens
  misc_RNA (1)...(19): siRNA sense strand
cuccaaaucuccugacaag

SEQ ID NO: 1868361 - RNA, 19 nt, Homo sapiens
  misc_RNA (1)...(19): siRNA sense strand
gcuguaugaugcugaugga

SEQ ID NO: 1868362 - RNA, 19 nt, Homo sapiens
  misc_RNA (1)...(19): siRNA sense strand
ucagaaggccaauaaacau

SEQ ID NO: 1868363 - RNA, 19 nt, Homo sapiens
  misc_RNA (1)...(19): siRNA sense strand
auaauaccuuugacacgaa

SEQ ID NO: 1868364 - RNA, 19 nt, Homo sapiens
  misc_RNA (1)...(19): siRNA sense strand
acaaggauggauuuauuga

SEQ ID NO: 1868365 - RNA, 19 nt, Homo sapiens
  misc_RNA (1)...(19): siRNA sense strand
agacagacuccuccaaauc

SEQ ID NO: 1868366 - RNA, 19 nt, Homo sapiens
  misc_RNA (1)...(19): siRNA sense strand
aaggauggauuuauugacu

SEQ ID NO: 1868367 - RNA, 19 nt, Homo sapiens
  misc_RNA (1)...(19): siRNA sense strand
cagaacauuuaugauggaa

SEQ ID NO: 1868368 - RNA, 19 nt, Homo sapiens
  misc_RNA (1)...(19): siRNA sense strand
agccagacauggagacaga

SEQ ID NO: 1868369 - RNA, 19 nt, Homo sapiens
  misc_RNA (1)...(19): siRNA sense strand
uauugcugcuguaaaucua

SEQ ID NO: 1868370 - RNA, 19 nt, Homo sapiens
  misc_RNA (1)...(19): siRNA sense strand
cgaacaaggauggauuuau

SEQ ID NO: 1868371 - RNA, 19 nt, Homo sapiens
  misc_RNA (1)...(19): siRNA sense strand
uuacaagagcuucgacuuc

SEQ ID NO: 1868372 - RNA, 19 nt, Homo sapiens
  misc_RNA (1)...(19): siRNA sense strand
uguaugaugcugauggaaa

SEQ ID NO: 1868373 - RNA, 19 nt, Homo sapiens
  misc_RNA (1)...(19): siRNA sense strand
gcuucgacuucuccaaugu

SEQ ID NO: 1868374 - RNA, 19 nt, Homo sapiens
  misc_RNA (1)...(19): siRNA sense strand
ucaauggcauggcaaaaga

SEQ ID NO: 1868375 - RNA, 19 nt, Homo sapiens
  misc_RNA (1)...(19): siRNA sense strand
caacuugguguuccauaag

SEQ ID NO: 1868376 - RNA, 19 nt, Homo sapiens
  misc_RNA (1)...(19): siRNA sense strand
cugcaaacacuacaugaau

SEQ ID NO: 1868377 - RNA, 19 nt, Homo sapiens
  misc_RNA (1)...(19): siRNA sense strand
uaagcuguaugaugcugau

SEQ ID NO: 1868378 - RNA, 19 nt, Homo sapiens
  misc_RNA (1)...(19): siRNA sense strand
acacgaacaaggauggauu

SEQ ID NO: 1868379 - RNA, 19 nt, Homo sapiens
  misc_RNA (1)...(19): siRNA sense strand
agaaggccaauaaacauau

SEQ ID NO: 1868380 - RNA, 19 nt, Homo sapiens
  misc_RNA (1)...(19): siRNA sense strand
uccaaugugcugagaguaa

SEQ ID NO: 1868381 - RNA, 19 nt, Homo sapiens
  misc_RNA (1)...(19): siRNA sense strand
gcaguuccuacacaagaga

SEQ ID NO: 1868382 - RNA, 19 nt, Homo sapiens
  misc_RNA (1)...(19): siRNA sense strand
aagagacccauguguggua

SEQ ID NO: 1868383 - RNA, 19 nt, Homo sapiens
  misc_RNA (1)...(19): siRNA sense strand
ugagaguaaucuguaaugg

SEQ ID NO: 1868384 - RNA, 19 nt, Homo sapiens
  misc_RNA (1)...(19): siRNA sense strand
uagggaaggugaaaaugaa

SEQ ID NO: 1868385 - RNA, 19 nt, Homo sapiens
  misc_RNA (1)...(19): siRNA sense strand
cacgaacaaggauggauuu

SEQ ID NO: 1868386 - RNA, 19 nt, Homo sapiens
  misc_RNA (1)...(19): siRNA sense strand
aagcaguuccuacacaaga

SEQ ID NO: 1868387 - RNA, 19 nt, Homo sapiens
  misc_RNA (1)...(19): siRNA sense strand
ugguacagaacauuuauga

SEQ ID NO: 1868388 - RNA, 19 nt, Homo sapiens
  misc_RNA (1)...(19): siRNA sense strand
gugugguacagaacauuua

SEQ ID NO: 1868389 - RNA, 19 nt, Homo sapiens
  misc_RNA (1)...(19): siRNA sense strand
acccaugugugguacagaa

SEQ ID NO: 1868390 - RNA, 19 nt, Homo sapiens
  misc_RNA (1)...(19): siRNA sense strand
aaaaugaacuacuggacau

SEQ ID NO: 1868391 - RNA, 19 nt, Homo sapiens
  misc_RNA (1)...(19): siRNA sense strand
gaguuuauugcugcuguaa

SEQ ID NO: 1868392 - RNA, 19 nt, Homo sapiens
  misc_RNA (1)...(19): siRNA sense strand
ggaaggugaaaaugaagua

SEQ ID NO: 1868393 - RNA, 19 nt, Homo sapiens
  misc_RNA (1)...(19): siRNA sense strand
cauccggccugcaaacacu

SEQ ID NO: 1868394 - RNA, 19 nt, Homo sapiens
  misc_RNA (1)...(19): siRNA sense strand
gauggggaauugacuuuag

SEQ ID NO: 1868395 - RNA, 19 nt, Homo sapiens
  misc_RNA (1)...(19): siRNA sense strand
cuacacaagagacccaugu

SEQ ID NO: 1868396 - RNA, 19 nt, Homo sapiens
  misc_RNA (1)...(19): siRNA sense strand
cuguaaaucuaaucaugca

SEQ ID NO: 1868397 - RNA, 19 nt, Homo sapiens
  misc_RNA (1)...(19): siRNA sense strand
ugcuguaaaucuaaucaug

SEQ ID NO: 1868398 - RNA, 19 nt, Homo sapiens
  misc_RNA (1)...(19): siRNA sense strand
aagaauucaucaacuuggu

SEQ ID NO: 1868399 - RNA, 19 nt, Homo sapiens
  misc_RNA (1)...(19): siRNA sense strand
gaauggcaaaucuauagcu

SEQ ID NO: 1868400 - RNA, 19 nt, Homo sapiens
  misc_RNA (1)...(19): siRNA sense strand
gcugagaguaaucuguaau

SEQ ID NO: 1868401 - RNA, 19 nt, Homo sapiens
  misc_RNA (1)...(19): siRNA sense strand
ucaauggccagcaaacucu

SEQ ID NO: 1868402 - RNA, 19 nt, Homo sapiens
  misc_RNA (1)...(19): siRNA sense strand
gacagaaucuagaaaguuu

SEQ ID NO: 1868403 - RNA, 19 nt, Homo sapiens
  misc_RNA (1)...(19): siRNA sense strand
gaaguaagcgcucuaagaa

SEQ ID NO: 1868404 - RNA, 19 nt, Homo sapiens
  misc_RNA (1)...(19): siRNA sense strand
ccacaggccuucggaauuu

SEQ ID NO: 1868405 - RNA, 19 nt, Homo sapiens
  misc_RNA (1)...(19): siRNA sense strand
guagaagaguuuagaaaga

SEQ ID NO: 1868406 - RNA, 19 nt, Homo sapiens
  misc_RNA (1)...(19): siRNA sense strand
ccaagucaguucagaagua

SEQ ID NO: 1868407 - RNA, 19 nt, Homo sapiens
  misc_RNA (1)...(19): siRNA sense strand
gagauugucuucgcaguuu

SEQ ID NO: 1868408 - RNA, 19 nt, Homo sapiens
  misc_RNA (1)...(19): siRNA sense strand
uuaugaagaugcacaagua

SEQ ID NO: 1868409 - RNA, 19 nt, Homo sapiens
  misc_RNA (1)...(19): siRNA sense strand
ggaagauuaugccaaacuu

SEQ ID NO: 1868410 - RNA, 19 nt, Homo sapiens
  misc_RNA (1)...(19): siRNA sense strand
cuagaaaguuugauccauu

SEQ ID NO: 1868411 - RNA, 19 nt, Homo sapiens
  misc_RNA (1)...(19): siRNA sense strand
gcaggacgcccaugaauuc

SEQ ID NO: 1868412 - RNA, 19 nt, Homo sapiens
  misc_RNA (1)...(19): siRNA sense strand
gagacagaguuauauaugu

SEQ ID NO: 1868413 - RNA, 19 nt, Homo sapiens
  misc_RNA (1)...(19): siRNA sense strand
gugcuaugcuuacauuuga

SEQ ID NO: 1868414 - RNA, 19 nt, Homo sapiens
  misc_RNA (1)...(19): siRNA sense strand
caagucaguucagaaguaa

SEQ ID NO: 1868415 - RNA, 19 nt, Homo sapiens
  misc_RNA (1)...(19): siRNA sense strand
ggacagaaucuagaaaguu

SEQ ID NO: 1868416 - RNA, 19 nt, Homo sapiens
  misc_RNA (1)...(19): siRNA sense strand
gaugagacagaguuauaua

SEQ ID NO: 1868417 - RNA, 19 nt, Homo sapiens
  misc_RNA (1)...(19): siRNA sense strand
ggacagcauauuuaagaaa

SEQ ID NO: 1868418 - RNA, 19 nt, Homo sapiens
  misc_RNA (1)...(19): siRNA sense strand
ucaguaacauugagcaguu

SEQ ID NO: 1868419 - RNA, 19 nt, Homo sapiens
  misc_RNA (1)...(19): siRNA sense strand
gccuagacaugaaauggua

SEQ ID NO: 1868420 - RNA, 19 nt, Homo sapiens
  misc_RNA (1)...(19): siRNA sense strand
ggacgcccaugaauucaau

SEQ ID NO: 1868421 - RNA, 19 nt, Homo sapiens
  misc_RNA (1)...(19): siRNA sense strand
caaugugucuuugguagaa

SEQ ID NO: 1868422 - RNA, 19 nt, Homo sapiens
  misc_RNA (1)...(19): siRNA sense strand
gagaacacuuacagaacuu

SEQ ID NO: 1868423 - RNA, 19 nt, Homo sapiens
  misc_RNA (1)...(19): siRNA sense strand
gggauaacaaugugucuuu

SEQ ID NO: 1868424 - RNA, 19 nt, Homo sapiens
  misc_RNA (1)...(19): siRNA sense strand
cauuagauauuccaaguca

SEQ ID NO: 1868425 - RNA, 19 nt, Homo sapiens
  misc_RNA (1)...(19): siRNA sense strand
ggauaacaaugugucuuug

SEQ ID NO: 1868426 - RNA, 19 nt, Homo sapiens
  misc_RNA (1)...(19): siRNA sense strand
agacagaguuauauaugug

SEQ ID NO: 1868427 - RNA, 19 nt, Homo sapiens
  misc_RNA (1)...(19): siRNA sense strand
aaaguuugauccauuccua

SEQ ID NO: 1868428 - RNA, 19 nt, Homo sapiens
  misc_RNA (1)...(19): siRNA sense strand
gaagauuaugccaaacuuu

SEQ ID NO: 1868429 - RNA, 19 nt, Homo sapiens
  misc_RNA (1)...(19): siRNA sense strand
cuagaccuuucauuagaua

SEQ ID NO: 1868430 - RNA, 19 nt, Homo sapiens
  misc_RNA (1)...(19): siRNA sense strand
ccggagagcugccuguaug

SEQ ID NO: 1868431 - RNA, 19 nt, Homo sapiens
  misc_RNA (1)...(19): siRNA sense strand
ggagaauucuacucugucu

SEQ ID NO: 1868432 - RNA, 19 nt, Homo sapiens
  misc_RNA (1)...(19): siRNA sense strand
ggaagcaccacugccauuu

SEQ ID NO: 1868433 - RNA, 19 nt, Homo sapiens
  misc_RNA (1)...(19): siRNA sense strand
gacaugaaaugguacuuac

SEQ ID NO: 1868434 - RNA, 19 nt, Homo sapiens
  misc_RNA (1)...(19): siRNA sense strand
ugagaggccuagacaugaa

SEQ ID NO: 1868435 - RNA, 19 nt, Homo sapiens
  misc_RNA (1)...(19): siRNA sense strand
ucagagaacacuuacagaa

SEQ ID NO: 1868436 - RNA, 19 nt, Homo sapiens
  misc_RNA (1)...(19): siRNA sense strand
aguaagcgcucuaagaauc

SEQ ID NO: 1868437 - RNA, 19 nt, Homo sapiens
  misc_RNA (1)...(19): siRNA sense strand
gcacaaguaccuuuaacca

SEQ ID NO: 1868438 - RNA, 19 nt, Homo sapiens
  misc_RNA (1)...(19): siRNA sense strand
caugaaaugguacuuacua

SEQ ID NO: 1868439 - RNA, 19 nt, Homo sapiens
  misc_RNA (1)...(19): siRNA sense strand
uaaccaaccauaagaaauc

SEQ ID NO: 1868440 - RNA, 19 nt, Homo sapiens
  misc_RNA (1)...(19): siRNA sense strand
caggagaauucuacucugu

SEQ ID NO: 1868441 - RNA, 19 nt, Homo sapiens
  misc_RNA (1)...(19): siRNA sense strand
uagaaaguuugauccauuc

SEQ ID NO: 1868442 - RNA, 19 nt, Homo sapiens
  misc_RNA (1)...(19): siRNA sense strand
uaacaaugugucuuuggua

SEQ ID NO: 1868443 - RNA, 19 nt, Homo sapiens
  misc_RNA (1)...(19): siRNA sense strand
ucauuggacagcauauuua

SEQ ID NO: 1868444 - RNA, 19 nt, Homo sapiens
  misc_RNA (1)...(19): siRNA sense strand
gaagcaccacugccauuug

SEQ ID NO: 1868445 - RNA, 19 nt, Homo sapiens
  misc_RNA (1)...(19): siRNA sense strand
gcacacaguauguauggau

SEQ ID NO: 1868446 - RNA, 19 nt, Homo sapiens
  misc_RNA (1)...(19): siRNA sense strand
agaaguaagcgcucuaaga

SEQ ID NO: 1868447 - RNA, 19 nt, Homo sapiens
  misc_RNA (1)...(19): siRNA sense strand
ccucauaugugggacagaa

SEQ ID NO: 1868448 - RNA, 19 nt, Homo sapiens
  misc_RNA (1)...(19): siRNA sense strand
cguagaauuuccacugaga

SEQ ID NO: 1868449 - RNA, 19 nt, Homo sapiens
  misc_RNA (1)...(19): siRNA sense strand
gggacagaaucuagaaagu

SEQ ID NO: 1868450 - RNA, 19 nt, Homo sapiens
  misc_RNA (1)...(19): siRNA sense strand
agacaugaaaugguacuua

SEQ ID NO: 1868451 - RNA, 19 nt, Homo sapiens
  misc_RNA (1)...(19): siRNA sense strand
agaagaacuugaugagaca

SEQ ID NO: 1868452 - RNA, 19 nt, Homo sapiens
  misc_RNA (1)...(19): siRNA sense strand
cgacuuagaagaacuugau

SEQ ID NO: 1868453 - RNA, 19 nt, Homo sapiens
  misc_RNA (1)...(19): siRNA sense strand
uggaccaguuuguucguua

SEQ ID NO: 1868454 - RNA, 19 nt, Homo sapiens
  misc_RNA (1)...(19): siRNA sense strand
agagaacacuuacagaacu

SEQ ID NO: 1868455 - RNA, 19 nt, Homo sapiens
  misc_RNA (1)...(19): siRNA sense strand
ccaaagcuggaucggauaa

SEQ ID NO: 1868456 - RNA, 19 nt, Homo sapiens
  misc_RNA (1)...(19): siRNA sense strand
gguagaagaguuuagaaag

SEQ ID NO: 1868457 - RNA, 19 nt, Homo sapiens
  misc_RNA (1)...(19): siRNA sense strand
acacuaaacagcaaguuau

SEQ ID NO: 1868458 - RNA, 19 nt, Homo sapiens
  misc_RNA (1)...(19): siRNA sense strand
ggaguuaaggaaugggaaa

SEQ ID NO: 1868459 - RNA, 19 nt, Homo sapiens
  misc_RNA (1)...(19): siRNA sense strand
gaccuuucauuagauauuc

SEQ ID NO: 1868460 - RNA, 19 nt, Homo sapiens
  misc_RNA (1)...(19): siRNA sense strand
uguuaucgcugugaugauu

SEQ ID NO: 1868461 - RNA, 19 nt, Homo sapiens
  misc_RNA (1)...(19): siRNA sense strand
ugagacagaguuauauaug

SEQ ID NO: 1868462 - RNA, 19 nt, Homo sapiens
  misc_RNA (1)...(19): siRNA sense strand
aagcaccacugccauuugu

SEQ ID NO: 1868463 - RNA, 19 nt, Homo sapiens
  misc_RNA (1)...(19): siRNA sense strand
gaaacaaaaguccacaaaa

SEQ ID NO: 1868464 - RNA, 19 nt, Homo sapiens
  misc_RNA (1)...(19): siRNA sense strand
gaaaauggaccaguuuguu

SEQ ID NO: 1868465 - RNA, 19 nt, Homo sapiens
  misc_RNA (1)...(19): siRNA sense strand
uccuagaccuuucauuaga

SEQ ID NO: 1868466 - RNA, 19 nt, Homo sapiens
  misc_RNA (1)...(19): siRNA sense strand
gcccagaguccuuauuuua

SEQ ID NO: 1868467 - RNA, 19 nt, Homo sapiens
  misc_RNA (1)...(19): siRNA sense strand
gacacucugugcuuuaugg

SEQ ID NO: 1868468 - RNA, 19 nt, Homo sapiens
  misc_RNA (1)...(19): siRNA sense strand
agaaagacacucugugcuu

SEQ ID NO: 1868469 - RNA, 19 nt, Homo sapiens
  misc_RNA (1)...(19): siRNA sense strand
guacagaaagucagagaac

SEQ ID NO: 1868470 - RNA, 19 nt, Homo sapiens
  misc_RNA (1)...(19): siRNA sense strand
aaggugcuaugcuuacauu

SEQ ID NO: 1868471 - RNA, 19 nt, Homo sapiens
  misc_RNA (1)...(19): siRNA sense strand
auuccuagaccuuucauua

SEQ ID NO: 1868472 - RNA, 19 nt, Homo sapiens
  misc_RNA (1)...(19): siRNA sense strand
cagcugacaggcauaagaa

SEQ ID NO: 1868473 - RNA, 19 nt, Homo sapiens
  misc_RNA (1)...(19): siRNA sense strand
gcuguuauuucaaagaacu

SEQ ID NO: 1868474 - RNA, 19 nt, Homo sapiens
  misc_RNA (1)...(19): siRNA sense strand
uagaagaguuuagaaagac

SEQ ID NO: 1868475 - RNA, 19 nt, Homo sapiens
  misc_RNA (1)...(19): siRNA sense strand
uacguagaauuuccacuga

SEQ ID NO: 1868476 - RNA, 19 nt, Homo sapiens
  misc_RNA (1)...(19): siRNA sense strand
ggugcuaugcuuacauuug

SEQ ID NO: 1868477 - RNA, 19 nt, Homo sapiens
  misc_RNA (1)...(19): siRNA sense strand
uaaaguucagcacacagua

SEQ ID NO: 1868478 - RNA, 19 nt, Homo sapiens
  misc_RNA (1)...(19): siRNA sense strand
uugaugagacagaguuaua

SEQ ID NO: 1868479 - RNA, 19 nt, Homo sapiens
  misc_RNA (1)...(19): siRNA sense strand
ggaccaguuuguucguuac

SEQ ID NO: 1868480 - RNA, 19 nt, Homo sapiens
  misc_RNA (1)...(19): siRNA sense strand
ucaagaaaauggaccaguu

SEQ ID NO: 1868481 - RNA, 19 nt, Homo sapiens
  misc_RNA (1)...(19): siRNA sense strand
gaugcacaaguaccuuuaa

SEQ ID NO: 1868482 - RNA, 19 nt, Homo sapiens
  misc_RNA (1)...(19): siRNA sense strand
aauggagcaucuacuguug

SEQ ID NO: 1868483 - RNA, 19 nt, Homo sapiens
  misc_RNA (1)...(19): siRNA sense strand
uuggaaaacucaacacuaa

SEQ ID NO: 1868484 - RNA, 19 nt, Homo sapiens
  misc_RNA (1)...(19): siRNA sense strand
ccacugagaggccuagaca

SEQ ID NO: 1868485 - RNA, 19 nt, Homo sapiens
  misc_RNA (1)...(19): siRNA sense strand
gaaucuagaaaguuugauc

SEQ ID NO: 1868486 - RNA, 19 nt, Homo sapiens
  misc_RNA (1)...(19): siRNA sense strand
aaauggagcaucuacuguu

SEQ ID NO: 1868487 - RNA, 19 nt, Homo sapiens
  misc_RNA (1)...(19): siRNA sense strand
gccacaggccuucggaauu

SEQ ID NO: 1868488 - RNA, 19 nt, Homo sapiens
  misc_RNA (1)...(19): siRNA sense strand
acucaacacuaaacagcaa

SEQ ID NO: 1868489 - RNA, 19 nt, Homo sapiens
  misc_RNA (1)...(19): siRNA sense strand
ugcaguagcuacaguacau

SEQ ID NO: 1868490 - RNA, 19 nt, Homo sapiens
  misc_RNA (1)...(19): siRNA sense strand
ccacuucaaugacaguacu

SEQ ID NO: 1868491 - RNA, 19 nt, Homo sapiens
  misc_RNA (1)...(19): siRNA sense strand
guugauacauacguagaau

SEQ ID NO: 1868492 - RNA, 19 nt, Homo sapiens
  misc_RNA (1)...(19): siRNA sense strand
caaaagcccuugggucugu

SEQ ID NO: 1868493 - RNA, 19 nt, Homo sapiens
  misc_RNA (1)...(19): siRNA sense strand
cauuggacagcauauuuaa

SEQ ID NO: 1868494 - RNA, 19 nt, Homo sapiens
  misc_RNA (1)...(19): siRNA sense strand
cagaaucuagaaaguuuga

SEQ ID NO: 1868495 - RNA, 19 nt, Homo sapiens
  misc_RNA (1)...(19): siRNA sense strand
gaacuucagggcgguuuca

SEQ ID NO: 1868496 - RNA, 19 nt, Homo sapiens
  misc_RNA (1)...(19): siRNA sense strand
uagcccagaguccuuauuu

SEQ ID NO: 1868497 - RNA, 19 nt, Homo sapiens
  misc_RNA (1)...(19): siRNA sense strand
ggauugcaguagcuacagu

SEQ ID NO: 1868498 - RNA, 19 nt, Homo sapiens
  misc_RNA (1)...(19): siRNA sense strand
gcaguagcuacaguacaua

SEQ ID NO: 1868499 - RNA, 19 nt, Homo sapiens
  misc_RNA (1)...(19): siRNA sense strand
guauguauggauugcagua

SEQ ID NO: 1868500 - RNA, 19 nt, Homo sapiens
  misc_RNA (1)...(19): siRNA sense strand
ugaaaugguacuuacuaga

SEQ ID NO: 1868501 - RNA, 19 nt, Homo sapiens
  misc_RNA (1)...(19): siRNA sense strand
gcuaugcuuacauuugaaa

SEQ ID NO: 1868502 - RNA, 19 nt, Homo sapiens
  misc_RNA (1)...(19): siRNA sense strand
cauuugagcuucuagauua

SEQ ID NO: 1868503 - RNA, 19 nt, Homo sapiens
  misc_RNA (1)...(19): siRNA sense strand
caagaagacuggagaagga

SEQ ID NO: 1868504 - RNA, 19 nt, Homo sapiens
  misc_RNA (1)...(19): siRNA sense strand
ugacacugcuaugaaauua

SEQ ID NO: 1868505 - RNA, 19 nt, Homo sapiens
  misc_RNA (1)...(19): siRNA sense strand
gcagagaacccauuacauc

SEQ ID NO: 1868506 - RNA, 19 nt, Homo sapiens
  misc_RNA (1)...(19): siRNA sense strand
ggacaaguuugcugcugaa

SEQ ID NO: 1868507 - RNA, 19 nt, Homo sapiens
  misc_RNA (1)...(19): siRNA sense strand
gaggaaagccuuaggaaag

SEQ ID NO: 1868508 - RNA, 19 nt, Homo sapiens
  misc_RNA (1)...(19): siRNA sense strand
ggacacuccuggguuuauu

SEQ ID NO: 1868509 - RNA, 19 nt, Homo sapiens
  misc_RNA (1)...(19): siRNA sense strand
ccaagaagauaaucgucaa

SEQ ID NO: 1868510 - RNA, 19 nt, Homo sapiens
  misc_RNA (1)...(19): siRNA sense strand
gcgaugaauuuguggagaa

SEQ ID NO: 1868511 - RNA, 19 nt, Homo sapiens
  misc_RNA (1)...(19): siRNA sense strand
ggaaaguggcaaagaagaa

SEQ ID NO: 1868512 - RNA, 19 nt, Homo sapiens
  misc_RNA (1)...(19): siRNA sense strand
ucaaaaggcuggacaaguu

SEQ ID NO: 1868513 - RNA, 19 nt, Homo sapiens
  misc_RNA (1)...(19): siRNA sense strand
caaguuugcugcugaacau

SEQ ID NO: 1868514 - RNA, 19 nt, Homo sapiens
  misc_RNA (1)...(19): siRNA sense strand
ggaauugaggaaagccuua

SEQ ID NO: 1868515 - RNA, 19 nt, Homo sapiens
  misc_RNA (1)...(19): siRNA sense strand
gcaaagcccuaggaaagca

SEQ ID NO: 1868516 - RNA, 19 nt, Homo sapiens
  misc_RNA (1)...(19): siRNA sense strand
gaagacuggagaaggauuu

SEQ ID NO: 1868517 - RNA, 19 nt, Homo sapiens
  misc_RNA (1)...(19): siRNA sense strand
uuaggaaaguggcaaagaa

SEQ ID NO: 1868518 - RNA, 19 nt, Homo sapiens
  misc_RNA (1)...(19): siRNA sense strand
gaaauuaggagccgguuac

SEQ ID NO: 1868519 - RNA, 19 nt, Homo sapiens
  misc_RNA (1)...(19): siRNA sense strand
aagaagaaguuugcagaaa

SEQ ID NO: 1868520 - RNA, 19 nt, Homo sapiens
  misc_RNA (1)...(19): siRNA sense strand
cauugacacugcuaugaaa

SEQ ID NO: 1868521 - RNA, 19 nt, Homo sapiens
  misc_RNA (1)...(19): siRNA sense strand
uggagaaucugaaggugaa

SEQ ID NO: 1868522 - RNA, 19 nt, Homo sapiens
  misc_RNA (1)...(19): siRNA sense strand
ggaugcagagaacccauua

SEQ ID NO: 1868523 - RNA, 19 nt, Homo sapiens
  misc_RNA (1)...(19): siRNA sense strand
gauuaugucggacuggaua

SEQ ID NO: 1868524 - RNA, 19 nt, Homo sapiens
  misc_RNA (1)...(19): siRNA sense strand
uagcaaagcccuaggaaag

SEQ ID NO: 1868525 - RNA, 19 nt, Homo sapiens
  misc_RNA (1)...(19): siRNA sense strand
ccaaugaccagccagaaga

SEQ ID NO: 1868526 - RNA, 19 nt, Homo sapiens
  misc_RNA (1)...(19): siRNA sense strand
gaagcaaucaggcuguaug

SEQ ID NO: 1868527 - RNA, 19 nt, Homo sapiens
  misc_RNA (1)...(19): siRNA sense strand
ggaaagccuuaggaaagug

SEQ ID NO: 1868528 - RNA, 19 nt, Homo sapiens
  misc_RNA (1)...(19): siRNA sense strand
gcaaucaggcuguaugaac

SEQ ID NO: 1868529 - RNA, 19 nt, Homo sapiens
  misc_RNA (1)...(19): siRNA sense strand
aaaacgagcucuucaaaag

SEQ ID NO: 1868530 - RNA, 19 nt, Homo sapiens
  misc_RNA (1)...(19): siRNA sense strand
cccagugccugucaugaaa

SEQ ID NO: 1868531 - RNA, 19 nt, Homo sapiens
  misc_RNA (1)...(19): siRNA sense strand
caaagaagacauugacacu

SEQ ID NO: 1868532 - RNA, 19 nt, Homo sapiens
  misc_RNA (1)...(19): siRNA sense strand
cccagcccauccuuaaaua

SEQ ID NO: 1868533 - RNA, 19 nt, Homo sapiens
  misc_RNA (1)...(19): siRNA sense strand
gaaaguggcaaagaagaag

SEQ ID NO: 1868534 - RNA, 19 nt, Homo sapiens
  misc_RNA (1)...(19): siRNA sense strand
cagagaacccauuacauca

SEQ ID NO: 1868535 - RNA, 19 nt, Homo sapiens
  misc_RNA (1)...(19): siRNA sense strand
gaagacauugacacugcua

SEQ ID NO: 1868536 - RNA, 19 nt, Homo sapiens
  misc_RNA (1)...(19): siRNA sense strand
gacauuugaaucuuuggua

SEQ ID NO: 1868537 - RNA, 19 nt, Homo sapiens
  misc_RNA (1)...(19): siRNA sense strand
agaagaaguuugcagaaaa

SEQ ID NO: 1868538 - RNA, 19 nt, Homo sapiens
  misc_RNA (1)...(19): siRNA sense strand
ccagaagacauuugaaucu

SEQ ID NO: 1868539 - RNA, 19 nt, Homo sapiens
  misc_RNA (1)...(19): siRNA sense strand
gaggugacgcauccaaaga

SEQ ID NO: 1868540 - RNA, 19 nt, Homo sapiens
  misc_RNA (1)...(19): siRNA sense strand
cagcccagcccauccuuaa

SEQ ID NO: 1868541 - RNA, 19 nt, Homo sapiens
  misc_RNA (1)...(19): siRNA sense strand
uggaagccaucguggagaa

SEQ ID NO: 1868542 - RNA, 19 nt, Homo sapiens
  misc_RNA (1)...(19): siRNA sense strand
gacauugacacugcuauga

SEQ ID NO: 1868543 - RNA, 19 nt, Homo sapiens
  misc_RNA (1)...(19): siRNA sense strand
ugaggaaagccuuaggaaa

SEQ ID NO: 1868544 - RNA, 19 nt, Homo sapiens
  misc_RNA (1)...(19): siRNA sense strand
acuccuggguuuauuguga

SEQ ID NO: 1868545 - RNA, 19 nt, Homo sapiens
  misc_RNA (1)...(19): siRNA sense strand
aaagaagaaguuugcagaa

SEQ ID NO: 1868546 - RNA, 19 nt, Homo sapiens
  misc_RNA (1)...(19): siRNA sense strand
gacuggauacuacgaaguu

SEQ ID NO: 1868547 - RNA, 19 nt, Homo sapiens
  misc_RNA (1)...(19): siRNA sense strand
gcccagcccauccuuaaau

SEQ ID NO: 1868548 - RNA, 19 nt, Homo sapiens
  misc_RNA (1)...(19): siRNA sense strand
ccgauucgcuggccuccau

SEQ ID NO: 1868549 - RNA, 19 nt, Homo sapiens
  misc_RNA (1)...(19): siRNA sense strand
acacugcuaugaaauuagg

SEQ ID NO: 1868550 - RNA, 19 nt, Homo sapiens
  misc_RNA (1)...(19): siRNA sense strand
gaagacccugagcaccaua

SEQ ID NO: 1868551 - RNA, 19 nt, Homo sapiens
  misc_RNA (1)...(19): siRNA sense strand
ccauuugagcuucuagauu

SEQ ID NO: 1868552 - RNA, 19 nt, Homo sapiens
  misc_RNA (1)...(19): siRNA sense strand
ucgcuggccuccauuucuu

SEQ ID NO: 1868553 - RNA, 19 nt, Homo sapiens
  misc_RNA (1)...(19): siRNA sense strand
ggaugcagccuccguuguc

SEQ ID NO: 1868554 - RNA, 19 nt, Homo sapiens
  misc_RNA (1)...(19): siRNA sense strand
aaacuuguggaggucauua

SEQ ID NO: 1868555 - RNA, 19 nt, Homo sapiens
  misc_RNA (1)...(19): siRNA sense strand
ggugacgcauccaaagaag

SEQ ID NO: 1868556 - RNA, 19 nt, Homo sapiens
  misc_RNA (1)...(19): siRNA sense strand
gccagaagacauuugaauc

SEQ ID NO: 1868557 - RNA, 19 nt, Homo sapiens
  misc_RNA (1)...(19): siRNA sense strand
ugaaauuaggagccgguua

SEQ ID NO: 1868558 - RNA, 19 nt, Homo sapiens
  misc_RNA (1)...(19): siRNA sense strand
aggaaagccuuaggaaagu

SEQ ID NO: 1868559 - RNA, 19 nt, Homo sapiens
  misc_RNA (1)...(19): siRNA sense strand
uggaagcaaucaggcugua

SEQ ID NO: 1868560 - RNA, 19 nt, Homo sapiens
  misc_RNA (1)...(19): siRNA sense strand
agaagauaaucgucaagca

SEQ ID NO: 1868561 - RNA, 19 nt, Homo sapiens
  misc_RNA (1)...(19): siRNA sense strand
ugaccagccagaagacauu

SEQ ID NO: 1868562 - RNA, 19 nt, Homo sapiens
  misc_RNA (1)...(19): siRNA sense strand
ccagccagaagacauuuga

SEQ ID NO: 1868563 - RNA, 19 nt, Homo sapiens
  misc_RNA (1)...(19): siRNA sense strand
ugcugaacauacaaucuuu

SEQ ID NO: 1868564 - RNA, 19 nt, Homo sapiens
  misc_RNA (1)...(19): siRNA sense strand
aaucuuugguagacuuuag

SEQ ID NO: 1868565 - RNA, 19 nt, Homo sapiens
  misc_RNA (1)...(19): siRNA sense strand
gaaacuuguggaggucauu

SEQ ID NO: 1868566 - RNA, 19 nt, Homo sapiens
  misc_RNA (1)...(19): siRNA sense strand
gaaucuuugguagacuuua

SEQ ID NO: 1868567 - RNA, 19 nt, Homo sapiens
  misc_RNA (1)...(19): siRNA sense strand
ggacuggauacuacgaagu

SEQ ID NO: 1868568 - RNA, 19 nt, Homo sapiens
  misc_RNA (1)...(19): siRNA sense strand
caccagacaagaccgauuc

SEQ ID NO: 1868569 - RNA, 19 nt, Homo sapiens
  misc_RNA (1)...(19): siRNA sense strand
ccagcccauccuuaaauaa

SEQ ID NO: 1868570 - RNA, 19 nt, Homo sapiens
  misc_RNA (1)...(19): siRNA sense strand
caaaaggcuggacaaguuu

SEQ ID NO: 1868571 - RNA, 19 nt, Homo sapiens
  misc_RNA (1)...(19): siRNA sense strand
acauugacacugcuaugaa

SEQ ID NO: 1868572 - RNA, 19 nt, Homo sapiens
  misc_RNA (1)...(19): siRNA sense strand
ggaagcaaucaggcuguau

SEQ ID NO: 1868573 - RNA, 19 nt, Homo sapiens
  misc_RNA (1)...(19): siRNA sense strand
gugccugucaugaaacuug

SEQ ID NO: 1868574 - RNA, 19 nt, Homo sapiens
  misc_RNA (1)...(19): siRNA sense strand
gcugaacauacaaucuuug

SEQ ID NO: 1868575 - RNA, 19 nt, Homo sapiens
  misc_RNA (1)...(19): siRNA sense strand
caacccagugccugucaug

SEQ ID NO: 1868576 - RNA, 19 nt, Homo sapiens
  misc_RNA (1)...(19): siRNA sense strand
ugcagcaacuggucacaca

SEQ ID NO: 1868577 - RNA, 19 nt, Homo sapiens
  misc_RNA (1)...(19): siRNA sense strand
gaagccaucguggagaauc

SEQ ID NO: 1868578 - RNA, 19 nt, Homo sapiens
  misc_RNA (1)...(19): siRNA sense strand
cauccaaagaagacauuga

SEQ ID NO: 1868579 - RNA, 19 nt, Homo sapiens
  misc_RNA (1)...(19): siRNA sense strand
gaauugaggaaagccuuag

SEQ ID NO: 1868580 - RNA, 19 nt, Homo sapiens
  misc_RNA (1)...(19): siRNA sense strand
uugaaucuuugguagacuu

SEQ ID NO: 1868581 - RNA, 19 nt, Homo sapiens
  misc_RNA (1)...(19): siRNA sense strand
gaccagccagaagacauuu

SEQ ID NO: 1868582 - RNA, 19 nt, Homo sapiens
  misc_RNA (1)...(19): siRNA sense strand
agaagacccugagcaccau

SEQ ID NO: 1868583 - RNA, 19 nt, Homo sapiens
  misc_RNA (1)...(19): siRNA sense strand
gcugguagcagagaacaag

SEQ ID NO: 1868584 - RNA, 19 nt, Homo sapiens
  misc_RNA (1)...(19): siRNA sense strand
gggcccauuugagcuucua

SEQ ID NO: 1868585 - RNA, 19 nt, Homo sapiens
  misc_RNA (1)...(19): siRNA sense strand
gaaagcaucuccuuaauga

SEQ ID NO: 1868586 - RNA, 19 nt, Homo sapiens
  misc_RNA (1)...(19): siRNA sense strand
gaacggaucuuuaugcaaa

SEQ ID NO: 1868587 - RNA, 19 nt, Homo sapiens
  misc_RNA (1)...(19): siRNA sense strand
caacguagcuuacagaguu

SEQ ID NO: 1868588 - RNA, 19 nt, Homo sapiens
  misc_RNA (1)...(19): siRNA sense strand
gaagaaagcaucuccuuaa

SEQ ID NO: 1868589 - RNA, 19 nt, Homo sapiens
  misc_RNA (1)...(19): siRNA sense strand
ggaauuagggugucauuua

SEQ ID NO: 1868590 - RNA, 19 nt, Homo sapiens
  misc_RNA (1)...(19): siRNA sense strand
gaagagagauuacauacuc

SEQ ID NO: 1868591 - RNA, 19 nt, Homo sapiens
  misc_RNA (1)...(19): siRNA sense strand
gguguaaaguucagaaaua

SEQ ID NO: 1868592 - RNA, 19 nt, Homo sapiens
  misc_RNA (1)...(19): siRNA sense strand
ugacaaagcuuucaaacau

SEQ ID NO: 1868593 - RNA, 19 nt, Homo sapiens
  misc_RNA (1)...(19): siRNA sense strand
gaaaggcugugucagauau

SEQ ID NO: 1868594 - RNA, 19 nt, Homo sapiens
  misc_RNA (1)...(19): siRNA sense strand
gaacugauuugcuuucuca

SEQ ID NO: 1868595 - RNA, 19 nt, Homo sapiens
  misc_RNA (1)...(19): siRNA sense strand
gaacagcgguuggcuuuau

SEQ ID NO: 1868596 - RNA, 19 nt, Homo sapiens
  misc_RNA (1)...(19): siRNA sense strand
gaaagaagaacgaggaauu

SEQ ID NO: 1868597 - RNA, 19 nt, Homo sapiens
  misc_RNA (1)...(19): siRNA sense strand
ggaagacacugaagcaaau

SEQ ID NO: 1868598 - RNA, 19 nt, Homo sapiens
  misc_RNA (1)...(19): siRNA sense strand
guacagccauguuaacaaa

SEQ ID NO: 1868599 - RNA, 19 nt, Homo sapiens
  misc_RNA (1)...(19): siRNA sense strand
uagaagaacuggacagaaa

SEQ ID NO: 1868600 - RNA, 19 nt, Homo sapiens
  misc_RNA (1)...(19): siRNA sense strand
gcagaaauauugaaaggau

SEQ ID NO: 1868601 - RNA, 19 nt, Homo sapiens
  misc_RNA (1)...(19): siRNA sense strand
gaacaaaggaaacguuuau

SEQ ID NO: 1868602 - RNA, 19 nt, Homo sapiens
  misc_RNA (1)...(19): siRNA sense strand
gagaguagaugcacugaau

SEQ ID NO: 1868603 - RNA, 19 nt, Homo sapiens
  misc_RNA (1)...(19): siRNA sense strand
gaagucagcacgaagauuu

SEQ ID NO: 1868604 - RNA, 19 nt, Homo sapiens
  misc_RNA (1)...(19): siRNA sense strand
gaacucaagucuuuagauc

SEQ ID NO: 1868605 - RNA, 19 nt, Homo sapiens
  misc_RNA (1)...(19): siRNA sense strand
cagcagagauggccaaaga

SEQ ID NO: 1868606 - RNA, 19 nt, Homo sapiens
  misc_RNA (1)...(19): siRNA sense strand
gaacauauggaugcuauaa

SEQ ID NO: 1868607 - RNA, 19 nt, Homo sapiens
  misc_RNA (1)...(19): siRNA sense strand
gaagccaguuuacaucaaa

SEQ ID NO: 1868608 - RNA, 19 nt, Homo sapiens
  misc_RNA (1)...(19): siRNA sense strand
ggaagaaagcaucuccuua

SEQ ID NO: 1868609 - RNA, 19 nt, Homo sapiens
  misc_RNA (1)...(19): siRNA sense strand
agucaaagcucgaguagaa

SEQ ID NO: 1868610 - RNA, 19 nt, Homo sapiens
  misc_RNA (1)...(19): siRNA sense strand
ggaccaggaucuuaaugaa

SEQ ID NO: 1868611 - RNA, 19 nt, Homo sapiens
  misc_RNA (1)...(19): siRNA sense strand
gaaagacaagagcagauua

SEQ ID NO: 1868612 - RNA, 19 nt, Homo sapiens
  misc_RNA (1)...(19): siRNA sense strand
ucaaacagguaucuaagaa

SEQ ID NO: 1868613 - RNA, 19 nt, Homo sapiens
  misc_RNA (1)...(19): siRNA sense strand
caaaauggcuaucauggua

SEQ ID NO: 1868614 - RNA, 19 nt, Homo sapiens
  misc_RNA (1)...(19): siRNA sense strand
caaauucuaugguguaaag

SEQ ID NO: 1868615 - RNA, 19 nt, Homo sapiens
  misc_RNA (1)...(19): siRNA sense strand
guacaugcucaguuuauua

SEQ ID NO: 1868616 - RNA, 19 nt, Homo sapiens
  misc_RNA (1)...(19): siRNA sense strand
gaagaacgaggaauugcua

SEQ ID NO: 1868617 - RNA, 19 nt, Homo sapiens
  misc_RNA (1)...(19): siRNA sense strand
guagaucccuucaguucaa

SEQ ID NO: 1868618 - RNA, 19 nt, Homo sapiens
  misc_RNA (1)...(19): siRNA sense strand
gcagugcaacacagaauua

SEQ ID NO: 1868619 - RNA, 19 nt, Homo sapiens
  misc_RNA (1)...(19): siRNA sense strand
gaaagaagaguguaugaag

SEQ ID NO: 1868620 - RNA, 19 nt, Homo sapiens
  misc_RNA (1)...(19): siRNA sense strand
cagaagauuuggacaauuc

SEQ ID NO: 1868621 - RNA, 19 nt, Homo sapiens
  misc_RNA (1)...(19): siRNA sense strand
acaagaagauggucacgaa

SEQ ID NO: 1868622 - RNA, 19 nt, Homo sapiens
  misc_RNA (1)...(19): siRNA sense strand
ggaauaaaccagcauguuc

SEQ ID NO: 1868623 - RNA, 19 nt, Homo sapiens
  misc_RNA (1)...(19): siRNA sense strand
gaagcaaagcucaaugaaa

SEQ ID NO: 1868624 - RNA, 19 nt, Homo sapiens
  misc_RNA (1)...(19): siRNA sense strand
gaauuagggugucauuuac

SEQ ID NO: 1868625 - RNA, 19 nt, Homo sapiens
  misc_RNA (1)...(19): siRNA sense strand
uugaugagcuuucugcuaa

SEQ ID NO: 1868626 - RNA, 19 nt, Homo sapiens
  misc_RNA (1)...(19): siRNA sense strand
guuaguaccugguggcaaa

SEQ ID NO: 1868627 - RNA, 19 nt, Homo sapiens
  misc_RNA (1)...(19): siRNA sense strand
uagaugcacugaaugauga

SEQ ID NO: 1868628 - RNA, 19 nt, Homo sapiens
  misc_RNA (1)...(19): siRNA sense strand
aaacagaacccaaauucaa

SEQ ID NO: 1868629 - RNA, 19 nt, Homo sapiens
  misc_RNA (1)...(19): siRNA sense strand
acagacaguugcuaaauga

SEQ ID NO: 1868630 - RNA, 19 nt, Homo sapiens
  misc_RNA (1)...(19): siRNA sense strand
aaagacagauugcugcuau

SEQ ID NO: 1868631 - RNA, 19 nt, Homo sapiens
  misc_RNA (1)...(19): siRNA sense strand
gcaauucaguuuguucuca

SEQ ID NO: 1868632 - RNA, 19 nt, Homo sapiens
  misc_RNA (1)...(19): siRNA sense strand
ggaagucacugcuggaaac

SEQ ID NO: 1868633 - RNA, 19 nt, Homo sapiens
  misc_RNA (1)...(19): siRNA sense strand
gaaagggauaaguggauua

SEQ ID NO: 1868634 - RNA, 19 nt, Homo sapiens
  misc_RNA (1)...(19): siRNA sense strand
gaaagaaacagagggcaaa

SEQ ID NO: 1868635 - RNA, 19 nt, Homo sapiens
  misc_RNA (1)...(19): siRNA sense strand
ccaaggauuuacaagauga

SEQ ID NO: 1868636 - RNA, 19 nt, Homo sapiens
  misc_RNA (1)...(19): siRNA sense strand
aaagaagaguguaugaaga

SEQ ID NO: 1868637 - RNA, 19 nt, Homo sapiens
  misc_RNA (1)...(19): siRNA sense strand
gaauagacagcauaaacaa

SEQ ID NO: 1868638 - RNA, 19 nt, Homo sapiens
  misc_RNA (1)...(19): siRNA sense strand
aagaugaacuacaaaguga

SEQ ID NO: 1868639 - RNA, 19 nt, Homo sapiens
  misc_RNA (1)...(19): siRNA sense strand
gaaacuacuuguggagaga

SEQ ID NO: 1868640 - RNA, 19 nt, Homo sapiens
  misc_RNA (1)...(19): siRNA sense strand
gcuauucaguuaacuuuca

SEQ ID NO: 1868641 - RNA, 19 nt, Homo sapiens
  misc_RNA (1)...(19): siRNA sense strand
uaauaaagcgucaagaaga

SEQ ID NO: 1868642 - RNA, 19 nt, Homo sapiens
  misc_RNA (1)...(19): siRNA sense strand
gcacgaagauuuuaaugga

SEQ ID NO: 1868643 - RNA, 19 nt, Homo sapiens
  misc_RNA (1)...(19): siRNA sense strand
gaauaaaccagcauguuca

SEQ ID NO: 1868644 - RNA, 19 nt, Homo sapiens
  misc_RNA (1)...(19): siRNA sense strand
gauaucgaacgccaaguua

SEQ ID NO: 1868645 - RNA, 19 nt, Homo sapiens
  misc_RNA (1)...(19): siRNA sense strand
gaauuaaggagcuucagaa

SEQ ID NO: 1868646 - RNA, 19 nt, Homo sapiens
  misc_RNA (1)...(19): siRNA sense strand
uaggugaacuugaagcaaa

SEQ ID NO: 1868647 - RNA, 19 nt, Homo sapiens
  misc_RNA (1)...(19): siRNA sense strand
ggaaacagguuauuuuauc

SEQ ID NO: 1868648 - RNA, 19 nt, Homo sapiens
  misc_RNA (1)...(19): siRNA sense strand
aggaagaacuagcucagua

SEQ ID NO: 1868649 - RNA, 19 nt, Homo sapiens
  misc_RNA (1)...(19): siRNA sense strand
gaagaaaauucgagaacuu

SEQ ID NO: 1868650 - RNA, 19 nt, Homo sapiens
  misc_RNA (1)...(19): siRNA sense strand
aaacagaagcuggaauuaa

SEQ ID NO: 1868651 - RNA, 19 nt, Homo sapiens
  misc_RNA (1)...(19): siRNA sense strand
agaacuaggugaacuugaa

SEQ ID NO: 1868652 - RNA, 19 nt, Homo sapiens
  misc_RNA (1)...(19): siRNA sense strand
ggaauagacagcauaaaca

SEQ ID NO: 1868653 - RNA, 19 nt, Homo sapiens
  misc_RNA (1)...(19): siRNA sense strand
agaaagaacuggcagaaac

SEQ ID NO: 1868654 - RNA, 19 nt, Homo sapiens
  misc_RNA (1)...(19): siRNA sense strand
gagauuacauacucuagag

SEQ ID NO: 1868655 - RNA, 19 nt, Homo sapiens
  misc_RNA (1)...(19): siRNA sense strand
gacaaauucuaugguguaa

SEQ ID NO: 1868656 - RNA, 19 nt, Homo sapiens
  misc_RNA (1)...(19): siRNA sense strand
aagcaaagcucaaugaaaa

SEQ ID NO: 1868657 - RNA, 19 nt, Homo sapiens
  misc_RNA (1)...(19): siRNA sense strand
ggaagccaguuuacaucaa

SEQ ID NO: 1868658 - RNA, 19 nt, Homo sapiens
  misc_RNA (1)...(19): siRNA sense strand
gacaagagcagauuaagca

SEQ ID NO: 1868659 - RNA, 19 nt, Homo sapiens
  misc_RNA (1)...(19): siRNA sense strand
ucaaugagaaucugagaaa

SEQ ID NO: 1868660 - RNA, 19 nt, Homo sapiens
  misc_RNA (1)...(19): siRNA sense strand
aagcagaacugggaacuga

SEQ ID NO: 1868661 - RNA, 19 nt, Homo sapiens
  misc_RNA (1)...(19): siRNA sense strand
gacaaagcuuucaaacaug

SEQ ID NO: 1868662 - RNA, 19 nt, Homo sapiens
  misc_RNA (1)...(19): siRNA sense strand
gacgagcccuggaauauac

SEQ ID NO: 1868663 - RNA, 19 nt, Homo sapiens
  misc_RNA (1)...(19): siRNA sense strand
cuacuuuggugaugaagaa

SEQ ID NO: 1868664 - RNA, 19 nt, Homo sapiens
  misc_RNA (1)...(19): siRNA sense strand
gaagaaagaagaguguaug

SEQ ID NO: 1868665 - RNA, 19 nt, Homo sapiens
  misc_RNA (1)...(19): siRNA sense strand
ugaaaccaaugaugcuauu

SEQ ID NO: 1868666 - RNA, 19 nt, Homo sapiens
  misc_RNA (1)...(19): siRNA sense strand
gagaagagaaugcagaaca

SEQ ID NO: 1868667 - RNA, 19 nt, Homo sapiens
  misc_RNA (1)...(19): siRNA sense strand
gugaugaaccuccuugaaa

SEQ ID NO: 1868668 - RNA, 19 nt, Homo sapiens
  misc_RNA (1)...(19): siRNA sense strand
ucaguuaacuuucaaacag

SEQ ID NO: 1868669 - RNA, 19 nt, Homo sapiens
  misc_RNA (1)...(19): siRNA sense strand
gaagaagaaagaagagugu

SEQ ID NO: 1868670 - RNA, 19 nt, Homo sapiens
  misc_RNA (1)...(19): siRNA sense strand
gcgcagaaauauugaaagg

SEQ ID NO: 1868671 - RNA, 19 nt, Homo sapiens
  misc_RNA (1)...(19): siRNA sense strand
gaaaaccugcgcagaaaua

SEQ ID NO: 1868672 - RNA, 19 nt, Homo sapiens
  misc_RNA (1)...(19): siRNA sense strand
ugaaccagcuuucuacaca

SEQ ID NO: 1868673 - RNA, 19 nt, Homo sapiens
  misc_RNA (1)...(19): siRNA sense strand
gaaacagaacccaaauuca

SEQ ID NO: 1868674 - RNA, 19 nt, Homo sapiens
  misc_RNA (1)...(19): siRNA sense strand
gaaagaacuggcagaaaca

SEQ ID NO: 1868675 - RNA, 19 nt, Homo sapiens
  misc_RNA (1)...(19): siRNA sense strand
ggauuuacaagaugaacua

SEQ ID NO: 1868676 - RNA, 19 nt, Homo sapiens
  misc_RNA (1)...(19): siRNA sense strand
gagacgagcccuggaauau

SEQ ID NO: 1868677 - RNA, 19 nt, Homo sapiens
  misc_RNA (1)...(19): siRNA sense strand
cgaagcaauccuuauuaua

SEQ ID NO: 1868678 - RNA, 19 nt, Homo sapiens
  misc_RNA (1)...(19): siRNA sense strand
gaacuacaaagugaaagaa

SEQ ID NO: 1868679 - RNA, 19 nt, Homo sapiens
  misc_RNA (1)...(19): siRNA sense strand
gaaagaugaacuacaaagu

SEQ ID NO: 1868680 - RNA, 19 nt, Homo sapiens
  misc_RNA (1)...(19): siRNA sense strand
gagauaaaauggaggauau

SEQ ID NO: 1868681 - RNA, 19 nt, Homo sapiens
  misc_RNA (1)...(19): siRNA sense strand
caacagcaccagauucuca

SEQ ID NO: 1868682 - RNA, 19 nt, Homo sapiens
  misc_RNA (1)...(19): siRNA sense strand
gcagucagucucaagauga

SEQ ID NO: 1868683 - RNA, 19 nt, Homo sapiens
  misc_RNA (1)...(19): siRNA sense strand
ugacaaauucuauggugua

SEQ ID NO: 1868684 - RNA, 19 nt, Homo sapiens
  misc_RNA (1)...(19): siRNA sense strand
ugucagauaugauuaugga

SEQ ID NO: 1868685 - RNA, 19 nt, Homo sapiens
  misc_RNA (1)...(19): siRNA sense strand
gaaccuagauccuucaaau

SEQ ID NO: 1868686 - RNA, 19 nt, Homo sapiens
  misc_RNA (1)...(19): siRNA sense strand
ggaaugcaauguuaaagaa

SEQ ID NO: 1868687 - RNA, 19 nt, Homo sapiens
  misc_RNA (1)...(19): siRNA sense strand
ggacagaaguuagauaugu

SEQ ID NO: 1868688 - RNA, 19 nt, Homo sapiens
  misc_RNA (1)...(19): siRNA sense strand
gaaguuagauaugugauug

SEQ ID NO: 1868689 - RNA, 19 nt, Homo sapiens
  misc_RNA (1)...(19): siRNA sense strand
gagagcagauucagagaaa

SEQ ID NO: 1868690 - RNA, 19 nt, Homo sapiens
  misc_RNA (1)...(19): siRNA sense strand
gaaaggcuguccagugaau

SEQ ID NO: 1868691 - RNA, 19 nt, Homo sapiens
  misc_RNA (1)...(19): siRNA sense strand
guucuggaaugcaauguua

SEQ ID NO: 1868692 - RNA, 19 nt, Homo sapiens
  misc_RNA (1)...(19): siRNA sense strand
ggaaggagauuuugaagug

SEQ ID NO: 1868693 - RNA, 19 nt, Homo sapiens
  misc_RNA (1)...(19): siRNA sense strand
caacaaggacuaccaguuc

SEQ ID NO: 1868694 - RNA, 19 nt, Homo sapiens
  misc_RNA (1)...(19): siRNA sense strand
guucaggccucaaaugcuu

SEQ ID NO: 1868695 - RNA, 19 nt, Homo sapiens
  misc_RNA (1)...(19): siRNA sense strand
gaucagccauuugcauugu

SEQ ID NO: 1868696 - RNA, 19 nt, Homo sapiens
  misc_RNA (1)...(19): siRNA sense strand
gucagaaggauauguauaa

SEQ ID NO: 1868697 - RNA, 19 nt, Homo sapiens
  misc_RNA (1)...(19): siRNA sense strand
augaaaggcuguccaguga

SEQ ID NO: 1868698 - RNA, 19 nt, Homo sapiens
  misc_RNA (1)...(19): siRNA sense strand
gacagaaguuagauaugug

SEQ ID NO: 1868699 - RNA, 19 nt, Homo sapiens
  misc_RNA (1)...(19): siRNA sense strand
ggaacgcgccuaugaguac

SEQ ID NO: 1868700 - RNA, 19 nt, Homo sapiens
  misc_RNA (1)...(19): siRNA sense strand
agagaagagucauccauuc

SEQ ID NO: 1868701 - RNA, 19 nt, Homo sapiens
  misc_RNA (1)...(19): siRNA sense strand
uacguggagugucccauua

SEQ ID NO: 1868702 - RNA, 19 nt, Homo sapiens
  misc_RNA (1)...(19): siRNA sense strand
guggugaagucaacaagga

SEQ ID NO: 1868703 - RNA, 19 nt, Homo sapiens
  misc_RNA (1)...(19): siRNA sense strand
gaauaaggagaaccuagau

SEQ ID NO: 1868704 - RNA, 19 nt, Homo sapiens
  misc_RNA (1)...(19): siRNA sense strand
gguaugaguugccuuuuga

SEQ ID NO: 1868705 - RNA, 19 nt, Homo sapiens
  misc_RNA (1)...(19): siRNA sense strand
cagagaagagucauccauu

SEQ ID NO: 1868706 - RNA, 19 nt, Homo sapiens
  misc_RNA (1)...(19): siRNA sense strand
cagaucagccauuugcauu

SEQ ID NO: 1868707 - RNA, 19 nt, Homo sapiens
  misc_RNA (1)...(19): siRNA sense strand
gauccgguuuggagggaaa

SEQ ID NO: 1868708 - RNA, 19 nt, Homo sapiens
  misc_RNA (1)...(19): siRNA sense strand
ggauaucagucagaaggau

SEQ ID NO: 1868709 - RNA, 19 nt, Homo sapiens
  misc_RNA (1)...(19): siRNA sense strand
guacguggagugucccauu

SEQ ID NO: 1868710 - RNA, 19 nt, Homo sapiens
  misc_RNA (1)...(19): siRNA sense strand
gcaaaagaguauucaccaa

SEQ ID NO: 1868711 - RNA, 19 nt, Homo sapiens
  misc_RNA (1)...(19): siRNA sense strand
gcaguucaggccucaaaug

SEQ ID NO: 1868712 - RNA, 19 nt, Homo sapiens
  misc_RNA (1)...(19): siRNA sense strand
ucagucagaaggauaugua

SEQ ID NO: 1868713 - RNA, 19 nt, Homo sapiens
  misc_RNA (1)...(19): siRNA sense strand
gcaguaugggacagaauga

SEQ ID NO: 1868714 - RNA, 19 nt, Homo sapiens
  misc_RNA (1)...(19): siRNA sense strand
uaggcacgauuggaucaua

SEQ ID NO: 1868715 - RNA, 19 nt, Homo sapiens
  misc_RNA (1)...(19): siRNA sense strand
ggcccaaccugugagaaga

SEQ ID NO: 1868716 - RNA, 19 nt, Homo sapiens
  misc_RNA (1)...(19): siRNA sense strand
agaauaaggagaaccuaga

SEQ ID NO: 1868717 - RNA, 19 nt, Homo sapiens
  misc_RNA (1)...(19): siRNA sense strand
gauaggcacgauuggauca

SEQ ID NO: 1868718 - RNA, 19 nt, Homo sapiens
  misc_RNA (1)...(19): siRNA sense strand
ucaccaagggcacgaauuc

SEQ ID NO: 1868719 - RNA, 19 nt, Homo sapiens
  misc_RNA (1)...(19): siRNA sense strand
gaaggaugaggauaucagu

SEQ ID NO: 1868720 - RNA, 19 nt, Homo sapiens
  misc_RNA (1)...(19): siRNA sense strand
gaaguggaaggaugaggau

SEQ ID NO: 1868721 - RNA, 19 nt, Homo sapiens
  misc_RNA (1)...(19): siRNA sense strand
ccauuugcauugucuacug

SEQ ID NO: 1868722 - RNA, 19 nt, Homo sapiens
  misc_RNA (1)...(19): siRNA sense strand
gguggaaguggaaggauga

SEQ ID NO: 1868723 - RNA, 19 nt, Homo sapiens
  misc_RNA (1)...(19): siRNA sense strand
ucaacaaggacuaccaguu

SEQ ID NO: 1868724 - RNA, 19 nt, Homo sapiens
  misc_RNA (1)...(19): siRNA sense strand
aggcacgauuggaucauaa

SEQ ID NO: 1868725 - RNA, 19 nt, Homo sapiens
  misc_RNA (1)...(19): siRNA sense strand
ucaaacaccagcuccagau

SEQ ID NO: 1868726 - RNA, 19 nt, Homo sapiens
  misc_RNA (1)...(19): siRNA sense strand
caucuggcccaaccuguga

SEQ ID NO: 1868727 - RNA, 19 nt, Homo sapiens
  misc_RNA (1)...(19): siRNA sense strand
aaacaccagcuccagauca

SEQ ID NO: 1868728 - RNA, 19 nt, Homo sapiens
  misc_RNA (1)...(19): siRNA sense strand
ggaaggaugaggauaucag

SEQ ID NO: 1868729 - RNA, 19 nt, Homo sapiens
  misc_RNA (1)...(19): siRNA sense strand
guggaaggaugaggauauc

SEQ ID NO: 1868730 - RNA, 19 nt, Homo sapiens
  misc_RNA (1)...(19): siRNA sense strand
uaaagaaaggguggaagug

SEQ ID NO: 1868731 - RNA, 19 nt, Homo sapiens
  misc_RNA (1)...(19): siRNA sense strand
cgagagcagauucagagaa

SEQ ID NO: 1868732 - RNA, 19 nt, Homo sapiens
  misc_RNA (1)...(19): siRNA sense strand
gaugaggauaucagucaga

SEQ ID NO: 1868733 - RNA, 19 nt, Homo sapiens
  misc_RNA (1)...(19): siRNA sense strand
uggaaugcaauguuaaaga

SEQ ID NO: 1868734 - RNA, 19 nt, Homo sapiens
  misc_RNA (1)...(19): siRNA sense strand
aacaaggacuaccaguuca

SEQ ID NO: 1868735 - RNA, 19 nt, Homo sapiens
  misc_RNA (1)...(19): siRNA sense strand
cccgaugcaugaagggaaa

SEQ ID NO: 1868736 - RNA, 19 nt, Homo sapiens
  misc_RNA (1)...(19): siRNA sense strand
ugcauugucuacugucaga

SEQ ID NO: 1868737 - RNA, 19 nt, Homo sapiens
  misc_RNA (1)...(19): siRNA sense strand
ggagaaccuagauccuuca

SEQ ID NO: 1868738 - RNA, 19 nt, Homo sapiens
  misc_RNA (1)...(19): siRNA sense strand
uuaaagaaaggguggaagu

SEQ ID NO: 1868739 - RNA, 19 nt, Homo sapiens
  misc_RNA (1)...(19): siRNA sense strand
cgggacagaaguuagauau

SEQ ID NO: 1868740 - RNA, 19 nt, Homo sapiens
  misc_RNA (1)...(19): siRNA sense strand
auaacgagcaggcuuggaa

SEQ ID NO: 1868741 - RNA, 19 nt, Homo sapiens
  misc_RNA (1)...(19): siRNA sense strand
agucagaaggauauguaua

SEQ ID NO: 1868742 - RNA, 19 nt, Homo sapiens
  misc_RNA (1)...(19): siRNA sense strand
agaaaggguggaaguggaa

SEQ ID NO: 1868743 - RNA, 19 nt, Homo sapiens
  misc_RNA (1)...(19): siRNA sense strand
gagaagagucauccauucc

SEQ ID NO: 1868744 - RNA, 19 nt, Homo sapiens
  misc_RNA (1)...(19): siRNA sense strand
ugccuuagauucacuuucg

SEQ ID NO: 1868745 - RNA, 19 nt, Homo sapiens
  misc_RNA (1)...(19): siRNA sense strand
gcgggacagaaguuagaua

SEQ ID NO: 1868746 - RNA, 19 nt, Homo sapiens
  misc_RNA (1)...(19): siRNA sense strand
caggaacgcgccuaugagu

SEQ ID NO: 1868747 - RNA, 19 nt, Homo sapiens
  misc_RNA (1)...(19): siRNA sense strand
ggcaguaugggacagaaug

SEQ ID NO: 1868748 - RNA, 19 nt, Homo sapiens
  misc_RNA (1)...(19): siRNA sense strand
acagaaguuagauauguga

SEQ ID NO: 1868749 - RNA, 19 nt, Homo sapiens
  misc_RNA (1)...(19): siRNA sense strand
ggaaagcaaaagaguauuc

SEQ ID NO: 1868750 - RNA, 19 nt, Homo sapiens
  misc_RNA (1)...(19): siRNA sense strand
cauuugcauugucuacugu

SEQ ID NO: 1868751 - RNA, 19 nt, Homo sapiens
  misc_RNA (1)...(19): siRNA sense strand
gcugcagaguguccuugug

SEQ ID NO: 1868752 - RNA, 19 nt, Homo sapiens
  misc_RNA (1)...(19): siRNA sense strand
cauuagaauucacaaucag

SEQ ID NO: 1868753 - RNA, 19 nt, Homo sapiens
  misc_RNA (1)...(19): siRNA sense strand
ugucuacugucagagaaga

SEQ ID NO: 1868754 - RNA, 19 nt, Homo sapiens
  misc_RNA (1)...(19): siRNA sense strand
ccagaucagccauuugcau

SEQ ID NO: 1868755 - RNA, 19 nt, Homo sapiens
  misc_RNA (1)...(19): siRNA sense strand
uuauuaugaugguggugaa

SEQ ID NO: 1868756 - RNA, 19 nt, Homo sapiens
  misc_RNA (1)...(19): siRNA sense strand
gaaaucugcuccaaagaaa

SEQ ID NO: 1868757 - RNA, 19 nt, Homo sapiens
  misc_RNA (1)...(19): siRNA sense strand
ggaagagacucaaagcaaa

SEQ ID NO: 1868758 - RNA, 19 nt, Homo sapiens
  misc_RNA (1)...(19): siRNA sense strand
gaaaugaaaucugcuccaa

SEQ ID NO: 1868759 - RNA, 19 nt, Homo sapiens
  misc_RNA (1)...(19): siRNA sense strand
gcaaugaccucuacgaacu

SEQ ID NO: 1868760 - RNA, 19 nt, Homo sapiens
  misc_RNA (1)...(19): siRNA sense strand
gagaaggaguggaagugua

SEQ ID NO: 1868761 - RNA, 19 nt, Homo sapiens
  misc_RNA (1)...(19): siRNA sense strand
caagguaccugaaugacuu

SEQ ID NO: 1868762 - RNA, 19 nt, Homo sapiens
  misc_RNA (1)...(19): siRNA sense strand
caacaugaguucaaaccaa

SEQ ID NO: 1868763 - RNA, 19 nt, Homo sapiens
  misc_RNA (1)...(19): siRNA sense strand
guaccugaaugacuuauau

SEQ ID NO: 1868764 - RNA, 19 nt, Homo sapiens
  misc_RNA (1)...(19): siRNA sense strand
gcagugcucugauuuccaa

SEQ ID NO: 1868765 - RNA, 19 nt, Homo sapiens
  misc_RNA (1)...(19): siRNA sense strand
caaccaccaucggaaauaa

SEQ ID NO: 1868766 - RNA, 19 nt, Homo sapiens
  misc_RNA (1)...(19): siRNA sense strand
ggaggcagcugcuucucuu

SEQ ID NO: 1868767 - RNA, 19 nt, Homo sapiens
  misc_RNA (1)...(19): siRNA sense strand
agaacaacauuccaaggua

SEQ ID NO: 1868768 - RNA, 19 nt, Homo sapiens
  misc_RNA (1)...(19): siRNA sense strand
ugacuuauauauccuggaa

SEQ ID NO: 1868769 - RNA, 19 nt, Homo sapiens
  misc_RNA (1)...(19): siRNA sense strand
gcaccgucccugacuauaa

SEQ ID NO: 1868770 - RNA, 19 nt, Homo sapiens
  misc_RNA (1)...(19): siRNA sense strand
gaacggugauuggcaguag

SEQ ID NO: 1868771 - RNA, 19 nt, Homo sapiens
  misc_RNA (1)...(19): siRNA sense strand
gcaccaagccagccaacaa

SEQ ID NO: 1868772 - RNA, 19 nt, Homo sapiens
  misc_RNA (1)...(19): siRNA sense strand
ggcaguagcccacagauga

SEQ ID NO: 1868773 - RNA, 19 nt, Homo sapiens
  misc_RNA (1)...(19): siRNA sense strand
agacgugccugccugguuu

SEQ ID NO: 1868774 - RNA, 19 nt, Homo sapiens
  misc_RNA (1)...(19): siRNA sense strand
ccaaaccaguucagacuuc

SEQ ID NO: 1868775 - RNA, 19 nt, Homo sapiens
  misc_RNA (1)...(19): siRNA sense strand
gcaaccaccaucggaaaua

SEQ ID NO: 1868776 - RNA, 19 nt, Homo sapiens
  misc_RNA (1)...(19): siRNA sense strand
uaaggccgauggucaguga

SEQ ID NO: 1868777 - RNA, 19 nt, Homo sapiens
  misc_RNA (1)...(19): siRNA sense strand
gccuauaaguuucguguug

SEQ ID NO: 1868778 - RNA, 19 nt, Homo sapiens
  misc_RNA (1)...(19): siRNA sense strand
guagaccaguuaucacuuc

SEQ ID NO: 1868779 - RNA, 19 nt, Homo sapiens
  misc_RNA (1)...(19): siRNA sense strand
ugacccagguggugcuuaa

SEQ ID NO: 1868780 - RNA, 19 nt, Homo sapiens
  misc_RNA (1)...(19): siRNA sense strand
ugaaaucugcuccaaagaa

SEQ ID NO: 1868781 - RNA, 19 nt, Homo sapiens
  misc_RNA (1)...(19): siRNA sense strand
cgaaguagaccaguuauca

SEQ ID NO: 1868782 - RNA, 19 nt, Homo sapiens
  misc_RNA (1)...(19): siRNA sense strand
aaugaaaucugcuccaaag

SEQ ID NO: 1868783 - RNA, 19 nt, Homo sapiens
  misc_RNA (1)...(19): siRNA sense strand
gugcaguccuccagccuuu

SEQ ID NO: 1868784 - RNA, 19 nt, Homo sapiens
  misc_RNA (1)...(19): siRNA sense strand
ccggcaagauuaucgagua

SEQ ID NO: 1868785 - RNA, 19 nt, Homo sapiens
  misc_RNA (1)...(19): siRNA sense strand
gcagcugcuucucuuguga

SEQ ID NO: 1868786 - RNA, 19 nt, Homo sapiens
  misc_RNA (1)...(19): siRNA sense strand
cugagcagcccaagcauua

SEQ ID NO: 1868787 - RNA, 19 nt, Homo sapiens
  misc_RNA (1)...(19): siRNA sense strand
aguccaagcuggugaucua

SEQ ID NO: 1868788 - RNA, 19 nt, Homo sapiens
  misc_RNA (1)...(19): siRNA sense strand
gcaagauuaucgaguacuc

SEQ ID NO: 1868789 - RNA, 19 nt, Homo sapiens
  misc_RNA (1)...(19): siRNA sense strand
ccaacacgcuggcuugucu

SEQ ID NO: 1868790 - RNA, 19 nt, Homo sapiens
  misc_RNA (1)...(19): siRNA sense strand
ccaaagaacaacauuccaa

SEQ ID NO: 1868791 - RNA, 19 nt, Homo sapiens
  misc_RNA (1)...(19): siRNA sense strand
gcaaggaccucugguaccu

SEQ ID NO: 1868792 - RNA, 19 nt, Homo sapiens
  misc_RNA (1)...(19): siRNA sense strand
ggaggcagugcucugauuu

SEQ ID NO: 1868793 - RNA, 19 nt, Homo sapiens
  misc_RNA (1)...(19): siRNA sense strand
ccaauccggucccaucugu

SEQ ID NO: 1868794 - RNA, 19 nt, Homo sapiens
  misc_RNA (1)...(19): siRNA sense strand
gaguggaaguguaccaaca

SEQ ID NO: 1868795 - RNA, 19 nt, Homo sapiens
  misc_RNA (1)...(19): siRNA sense strand
cauguccucuccagaaaug

SEQ ID NO: 1868796 - RNA, 19 nt, Homo sapiens
  misc_RNA (1)...(19): siRNA sense strand
ggugaugacuucaggaacu

SEQ ID NO: 1868797 - RNA, 19 nt, Homo sapiens
  misc_RNA (1)...(19): siRNA sense strand
gaagagacucaaagcaaag

SEQ ID NO: 1868798 - RNA, 19 nt, Homo sapiens
  misc_RNA (1)...(19): siRNA sense strand
gaaaucucagccuuuaaga

SEQ ID NO: 1868799 - RNA, 19 nt, Homo sapiens
  misc_RNA (1)...(19): siRNA sense strand
gcgaggacccaaagaacaa

SEQ ID NO: 1868800 - RNA, 19 nt, Homo sapiens
  misc_RNA (1)...(19): siRNA sense strand
gcaaugagaagggcuaugg

SEQ ID NO: 1868801 - RNA, 19 nt, Homo sapiens
  misc_RNA (1)...(19): siRNA sense strand
agcgaaaucucagccuuua

SEQ ID NO: 1868802 - RNA, 19 nt, Homo sapiens
  misc_RNA (1)...(19): siRNA sense strand
gcacgaccaccaucaucaa

SEQ ID NO: 1868803 - RNA, 19 nt, Homo sapiens
  misc_RNA (1)...(19): siRNA sense strand
gcaccaccaugacugugau

SEQ ID NO: 1868804 - RNA, 19 nt, Homo sapiens
  misc_RNA (1)...(19): siRNA sense strand
cagcuacccugaccgaagu

SEQ ID NO: 1868805 - RNA, 19 nt, Homo sapiens
  misc_RNA (1)...(19): siRNA sense strand
ccacguugguugugaaagg

SEQ ID NO: 1868806 - RNA, 19 nt, Homo sapiens
  misc_RNA (1)...(19): siRNA sense strand
uaagggcaccaauguaaug

SEQ ID NO: 1868807 - RNA, 19 nt, Homo sapiens
  misc_RNA (1)...(19): siRNA sense strand
ugaccgaaguggccaaugg

SEQ ID NO: 1868808 - RNA, 19 nt, Homo sapiens
  misc_RNA (1)...(19): siRNA sense strand
ccagaaauaugacauuccu

SEQ ID NO: 1868809 - RNA, 19 nt, Homo sapiens
  misc_RNA (1)...(19): siRNA sense strand
cgaaaucucagccuuuaag

SEQ ID NO: 1868810 - RNA, 19 nt, Homo sapiens
  misc_RNA (1)...(19): siRNA sense strand
ccaauguaauggugacaca

SEQ ID NO: 1868811 - RNA, 19 nt, Homo sapiens
  misc_RNA (1)...(19): siRNA sense strand
ggcaucaagucacccauca

SEQ ID NO: 1868812 - RNA, 19 nt, Homo sapiens
  misc_RNA (1)...(19): siRNA sense strand
gacccacggugcugagugu

SEQ ID NO: 1868813 - RNA, 19 nt, Homo sapiens
  misc_RNA (1)...(19): siRNA sense strand
gcccauguccucuccagaa

SEQ ID NO: 1868814 - RNA, 19 nt, Homo sapiens
  misc_RNA (1)...(19): siRNA sense strand
gcaggaaaccaguaaagac

SEQ ID NO: 1868815 - RNA, 19 nt, Homo sapiens
  misc_RNA (1)...(19): siRNA sense strand
ugagguggcugcaggaaac

SEQ ID NO: 1868816 - RNA, 19 nt, Homo sapiens
  misc_RNA (1)...(19): siRNA sense strand
guccgaaguagaccaguua

SEQ ID NO: 1868817 - RNA, 19 nt, Homo sapiens
  misc_RNA (1)...(19): siRNA sense strand
ccacggguccugugacuca

SEQ ID NO: 1868818 - RNA, 19 nt, Homo sapiens
  misc_RNA (1)...(19): siRNA sense strand
acacccgccuguacauuug

SEQ ID NO: 1868819 - RNA, 19 nt, Homo sapiens
  misc_RNA (1)...(19): siRNA sense strand
uaugggaaauacagcaaug

SEQ ID NO: 1868820 - RNA, 19 nt, Homo sapiens
  misc_RNA (1)...(19): siRNA sense strand
auaaccagcugaagaagca

SEQ ID NO: 1868821 - RNA, 19 nt, Homo sapiens
  misc_RNA (1)...(19): siRNA sense strand
gacuauaaccagcugaaga

SEQ ID NO: 1868822 - RNA, 19 nt, Homo sapiens
  misc_RNA (1)...(19): siRNA sense strand
guaauggugacacacuauu

SEQ ID NO: 1868823 - RNA, 19 nt, Homo sapiens
  misc_RNA (1)...(19): siRNA sense strand
ccaccacugucacuuccaa

SEQ ID NO: 1868824 - RNA, 19 nt, Homo sapiens
  misc_RNA (1)...(19): siRNA sense strand
gcuccaacccaccauguga

SEQ ID NO: 1868825 - RNA, 19 nt, Homo sapiens
  misc_RNA (1)...(19): siRNA sense strand
caccaacacugccacuaca

SEQ ID NO: 1868826 - RNA, 19 nt, Homo sapiens
  misc_RNA (1)...(19): siRNA sense strand
cagcaguccuggcaucaag

SEQ ID NO: 1868827 - RNA, 19 nt, Homo sapiens
  misc_RNA (1)...(19): siRNA sense strand
uggauacacuggaggacaa

SEQ ID NO: 1868828 - RNA, 19 nt, Homo sapiens
  misc_RNA (1)...(19): siRNA sense strand
uggaagagacucaaagcaa

SEQ ID NO: 1868829 - RNA, 19 nt, Homo sapiens
  misc_RNA (1)...(19): siRNA sense strand
cugaaugacuuauauaucc

SEQ ID NO: 1868830 - RNA, 19 nt, Homo sapiens
  misc_RNA (1)...(19): siRNA sense strand
ccacacaguccgaaguaga

SEQ ID NO: 1868831 - RNA, 19 nt, Homo sapiens
  misc_RNA (1)...(19): siRNA sense strand
ccucugagcagcaaaguca

SEQ ID NO: 1868832 - RNA, 19 nt, Homo sapiens
  misc_RNA (1)...(19): siRNA sense strand
caacaggaacuccauuggu

SEQ ID NO: 1868833 - RNA, 19 nt, Homo sapiens
  misc_RNA (1)...(19): siRNA sense strand
caaaccaguucagacuuca

SEQ ID NO: 1868834 - RNA, 19 nt, Homo sapiens
  misc_RNA (1)...(19): siRNA sense strand
cagcgaaaucucagccuuu

SEQ ID NO: 1868835 - RNA, 19 nt, Homo sapiens
  misc_RNA (1)...(19): siRNA sense strand
uaauggugacacacuauuu

SEQ ID NO: 1868836 - RNA, 19 nt, Homo sapiens
  misc_RNA (1)...(19): siRNA sense strand
cagcccaccgccacaguua

SEQ ID NO: 1868837 - RNA, 19 nt, Homo sapiens
  misc_RNA (1)...(19): siRNA sense strand
uguggacccuagauauuga

SEQ ID NO: 1868838 - RNA, 19 nt, Homo sapiens
  misc_RNA (1)...(19): siRNA sense strand
caggaaaccaguaaagaca

SEQ ID NO: 1868839 - RNA, 19 nt, Homo sapiens
  misc_RNA (1)...(19): siRNA sense strand
auuaagggcaccaauguaa

SEQ ID NO: 1868840 - RNA, 19 nt, Homo sapiens
  misc_RNA (1)...(19): siRNA sense strand
gcgaccagcaccaccauga

SEQ ID NO: 1868841 - RNA, 19 nt, Homo sapiens
  misc_RNA (1)...(19): siRNA sense strand
gcuccaacccacccuguga

SEQ ID NO: 1868842 - RNA, 19 nt, Homo sapiens
  misc_RNA (1)...(19): siRNA sense strand
gaccuguggacccuagaua

SEQ ID NO: 1868843 - RNA, 19 nt, Homo sapiens
  misc_RNA (1)...(19): siRNA sense strand
gcaccauccuccgcacugu

SEQ ID NO: 1868844 - RNA, 19 nt, Homo sapiens
  misc_RNA (1)...(19): siRNA sense strand
gugaagaccauggcuguga

SEQ ID NO: 1868845 - RNA, 19 nt, Homo sapiens
  misc_RNA (1)...(19): siRNA sense strand
gaccaaaccaguucagacu

SEQ ID NO: 1868846 - RNA, 19 nt, Homo sapiens
  misc_RNA (1)...(19): siRNA sense strand
cagcaaugaccucuacgaa

SEQ ID NO: 1868847 - RNA, 19 nt, Homo sapiens
  misc_RNA (1)...(19): siRNA sense strand
ugaccucccuguguccauu

SEQ ID NO: 1868848 - RNA, 19 nt, Homo sapiens
  misc_RNA (1)...(19): siRNA sense strand
gugcaugaccucccugugu

SEQ ID NO: 1868849 - RNA, 19 nt, Homo sapiens
  misc_RNA (1)...(19): siRNA sense strand
auacagcaaugaccucuac

SEQ ID NO: 1868850 - RNA, 19 nt, Homo sapiens
  misc_RNA (1)...(19): siRNA sense strand
ggacccaaagaacaacauu

SEQ ID NO: 1868851 - RNA, 19 nt, Homo sapiens
  misc_RNA (1)...(19): siRNA sense strand
ccaccaccaucaucacuac

SEQ ID NO: 1868852 - RNA, 19 nt, Homo sapiens
  misc_RNA (1)...(19): siRNA sense strand
caacacccgccuguacauu

SEQ ID NO: 1868853 - RNA, 19 nt, Homo sapiens
  misc_RNA (1)...(19): siRNA sense strand
ggacauucccaucacuuac

SEQ ID NO: 1868854 - RNA, 19 nt, Homo sapiens
  misc_RNA (1)...(19): siRNA sense strand
acuauaaccagcugaagaa

SEQ ID NO: 1868855 - RNA, 19 nt, Homo sapiens
  misc_RNA (1)...(19): siRNA sense strand
cccauguccucuccagaaa

SEQ ID NO: 1868856 - RNA, 19 nt, Homo sapiens
  misc_RNA (1)...(19): siRNA sense strand
ucaaagugcugacaaauaa

SEQ ID NO: 1868857 - RNA, 19 nt, Homo sapiens
  misc_RNA (1)...(19): siRNA sense strand
ucccaaagcucccaaauua

SEQ ID NO: 1868858 - RNA, 19 nt, Homo sapiens
  misc_RNA (1)...(19): siRNA sense strand
gcaaacaaauucuggaaau

SEQ ID NO: 1868859 - RNA, 19 nt, Homo sapiens
  misc_RNA (1)...(19): siRNA sense strand
gaaagaaaauggugaauug

SEQ ID NO: 1868860 - RNA, 19 nt, Homo sapiens
  misc_RNA (1)...(19): siRNA sense strand
aaauaaagcuucugugaug

SEQ ID NO: 1868861 - RNA, 19 nt, Homo sapiens
  misc_RNA (1)...(19): siRNA sense strand
guacugguguugaauauga

SEQ ID NO: 1868862 - RNA, 19 nt, Homo sapiens
  misc_RNA (1)...(19): siRNA sense strand
uaaagaagaucucaaccuu

SEQ ID NO: 1868863 - RNA, 19 nt, Homo sapiens
  misc_RNA (1)...(19): siRNA sense strand
caacauacccucagcugua

SEQ ID NO: 1868864 - RNA, 19 nt, Homo sapiens
  misc_RNA (1)...(19): siRNA sense strand
gcaagcagaugguggaaau

SEQ ID NO: 1868865 - RNA, 19 nt, Homo sapiens
  misc_RNA (1)...(19): siRNA sense strand
agaagcaucugaagaacua

SEQ ID NO: 1868866 - RNA, 19 nt, Homo sapiens
  misc_RNA (1)...(19): siRNA sense strand
gaaacaaacaggaagcaaa

SEQ ID NO: 1868867 - RNA, 19 nt, Homo sapiens
  misc_RNA (1)...(19): siRNA sense strand
cuaaagaacucccucaagu

SEQ ID NO: 1868868 - RNA, 19 nt, Homo sapiens
  misc_RNA (1)...(19): siRNA sense strand
gaaaggaaacaaacaggaa

SEQ ID NO: 1868869 - RNA, 19 nt, Homo sapiens
  misc_RNA (1)...(19): siRNA sense strand
gcuagaagcaucugaagaa

SEQ ID NO: 1868870 - RNA, 19 nt, Homo sapiens
  misc_RNA (1)...(19): siRNA sense strand
gcacagaugaacgaaguua

SEQ ID NO: 1868871 - RNA, 19 nt, Homo sapiens
  misc_RNA (1)...(19): siRNA sense strand
gauuggauauugugaagga

SEQ ID NO: 1868872 - RNA, 19 nt, Homo sapiens
  misc_RNA (1)...(19): siRNA sense strand
gguggaaauucuucacaaa

SEQ ID NO: 1868873 - RNA, 19 nt, Homo sapiens
  misc_RNA (1)...(19): siRNA sense strand
ccaaagcucccaaauuaga

SEQ ID NO: 1868874 - RNA, 19 nt, Homo sapiens
  misc_RNA (1)...(19): siRNA sense strand
cauaggaggacuugauaua

SEQ ID NO: 1868875 - RNA, 19 nt, Homo sapiens
  misc_RNA (1)...(19): siRNA sense strand
guuggaagcugaagguguu

SEQ ID NO: 1868876 - RNA, 19 nt, Homo sapiens
  misc_RNA (1)...(19): siRNA sense strand
ugaagguguuccugaagua

SEQ ID NO: 1868877 - RNA, 19 nt, Homo sapiens
  misc_RNA (1)...(19): siRNA sense strand
ggaaauucuucacaaacau

SEQ ID NO: 1868878 - RNA, 19 nt, Homo sapiens
  misc_RNA (1)...(19): siRNA sense strand
ugaaggaacugaaagaaaa

SEQ ID NO: 1868879 - RNA, 19 nt, Homo sapiens
  misc_RNA (1)...(19): siRNA sense strand
ggaggacuugauauaauua

SEQ ID NO: 1868880 - RNA, 19 nt, Homo sapiens
  misc_RNA (1)...(19): siRNA sense strand
uaggaggacuugauauaau

SEQ ID NO: 1868881 - RNA, 19 nt, Homo sapiens
  misc_RNA (1)...(19): siRNA sense strand
gaaguucggcaaggauuaa

SEQ ID NO: 1868882 - RNA, 19 nt, Homo sapiens
  misc_RNA (1)...(19): siRNA sense strand
gaauugcugccuauacuga

SEQ ID NO: 1868883 - RNA, 19 nt, Homo sapiens
  misc_RNA (1)...(19): siRNA sense strand
ccucaaguuucauuuguga

SEQ ID NO: 1868884 - RNA, 19 nt, Homo sapiens
  misc_RNA (1)...(19): siRNA sense strand
acaaauaaagcuucuguga

SEQ ID NO: 1868885 - RNA, 19 nt, Homo sapiens
  misc_RNA (1)...(19): siRNA sense strand
cugaagaacuagauacaau

SEQ ID NO: 1868886 - RNA, 19 nt, Homo sapiens
  misc_RNA (1)...(19): siRNA sense strand
uggcagaguuagcuaaaga

SEQ ID NO: 1868887 - RNA, 19 nt, Homo sapiens
  misc_RNA (1)...(19): siRNA sense strand
aaauaguacugguguugaa

SEQ ID NO: 1868888 - RNA, 19 nt, Homo sapiens
  misc_RNA (1)...(19): siRNA sense strand
gugcacagaugaacgaagu

SEQ ID NO: 1868889 - RNA, 19 nt, Homo sapiens
  misc_RNA (1)...(19): siRNA sense strand
uugaagaaauugacucaug

SEQ ID NO: 1868890 - RNA, 19 nt, Homo sapiens
  misc_RNA (1)...(19): siRNA sense strand
ggauucagcaaacaaauuc

SEQ ID NO: 1868891 - RNA, 19 nt, Homo sapiens
  misc_RNA (1)...(19): siRNA sense strand
caaauaaagcuucugugau

SEQ ID NO: 1868892 - RNA, 19 nt, Homo sapiens
  misc_RNA (1)...(19): siRNA sense strand
aggaggacuugauauaauu

SEQ ID NO: 1868893 - RNA, 19 nt, Homo sapiens
  misc_RNA (1)...(19): siRNA sense strand
ugaagaaguucggcaagga

SEQ ID NO: 1868894 - RNA, 19 nt, Homo sapiens
  misc_RNA (1)...(19): siRNA sense strand
uggaaauucuucacaaaca

SEQ ID NO: 1868895 - RNA, 19 nt, Homo sapiens
  misc_RNA (1)...(19): siRNA sense strand
gugaaggaacugaaagaaa

SEQ ID NO: 1868896 - RNA, 19 nt, Homo sapiens
  misc_RNA (1)...(19): siRNA sense strand
gaaguuggaagcugaaggu

SEQ ID NO: 1868897 - RNA, 19 nt, Homo sapiens
  misc_RNA (1)...(19): siRNA sense strand
gugggaggauuggauauug

SEQ ID NO: 1868898 - RNA, 19 nt, Homo sapiens
  misc_RNA (1)...(19): siRNA sense strand
gcucauaggaggacuugau

SEQ ID NO: 1868899 - RNA, 19 nt, Homo sapiens
  misc_RNA (1)...(19): siRNA sense strand
gugaauugcugccuauacu

SEQ ID NO: 1868900 - RNA, 19 nt, Homo sapiens
  misc_RNA (1)...(19): siRNA sense strand
gaagaaguucggcaaggau

SEQ ID NO: 1868901 - RNA, 19 nt, Homo sapiens
  misc_RNA (1)...(19): siRNA sense strand
ccgauuagauggugcacau

SEQ ID NO: 1868902 - RNA, 19 nt, Homo sapiens
  misc_RNA (1)...(19): siRNA sense strand
gcagaugguggaaauucuu

SEQ ID NO: 1868903 - RNA, 19 nt, Homo sapiens
  misc_RNA (1)...(19): siRNA sense strand
gcgcuaaugaacaucuuaa

SEQ ID NO: 1868904 - RNA, 19 nt, Homo sapiens
  misc_RNA (1)...(19): siRNA sense strand
ggagcuagaagcaucugaa

SEQ ID NO: 1868905 - RNA, 19 nt, Homo sapiens
  misc_RNA (1)...(19): siRNA sense strand
gcuaaugaacaucuuaaag

SEQ ID NO: 1868906 - RNA, 19 nt, Homo sapiens
  misc_RNA (1)...(19): siRNA sense strand
uauauuggaggaugaagaa

SEQ ID NO: 1868907 - RNA, 19 nt, Homo sapiens
  misc_RNA (1)...(19): siRNA sense strand
uuagcucuguucccacuuu

SEQ ID NO: 1868908 - RNA, 19 nt, Homo sapiens
  misc_RNA (1)...(19): siRNA sense strand
gaagguguuccugaaguau

SEQ ID NO: 1868909 - RNA, 19 nt, Homo sapiens
  misc_RNA (1)...(19): siRNA sense strand
cgaaguuauggcagaguua

SEQ ID NO: 1868910 - RNA, 19 nt, Homo sapiens
  misc_RNA (1)...(19): siRNA sense strand
ugacaaauaaagcuucugu

SEQ ID NO: 1868911 - RNA, 19 nt, Homo sapiens
  misc_RNA (1)...(19): siRNA sense strand
cucaaagugcugacaaaua

SEQ ID NO: 1868912 - RNA, 19 nt, Homo sapiens
  misc_RNA (1)...(19): siRNA sense strand
cuaccuauccucagcucua

SEQ ID NO: 1868913 - RNA, 19 nt, Homo sapiens
  misc_RNA (1)...(19): siRNA sense strand
uaguacugguguugaauau

SEQ ID NO: 1868914 - RNA, 19 nt, Homo sapiens
  misc_RNA (1)...(19): siRNA sense strand
uaaauaguacugguguuga

SEQ ID NO: 1868915 - RNA, 19 nt, Homo sapiens
  misc_RNA (1)...(19): siRNA sense strand
cuaaauaguacugguguug

SEQ ID NO: 1868916 - RNA, 19 nt, Homo sapiens
  misc_RNA (1)...(19): siRNA sense strand
ucugugaugcucuuuauga

SEQ ID NO: 1868917 - RNA, 19 nt, Homo sapiens
  misc_RNA (1)...(19): siRNA sense strand
ggacuugauauaauuaagg

SEQ ID NO: 1868918 - RNA, 19 nt, Homo sapiens
  misc_RNA (1)...(19): siRNA sense strand
cagcaaacaaauucuggaa

SEQ ID NO: 1868919 - RNA, 19 nt, Homo sapiens
  misc_RNA (1)...(19): siRNA sense strand
ggaaacaaacaggaagcaa

SEQ ID NO: 1868920 - RNA, 19 nt, Homo sapiens
  misc_RNA (1)...(19): siRNA sense strand
caaagugcugacaaauaaa

SEQ ID NO: 1868921 - RNA, 19 nt, Homo sapiens
  misc_RNA (1)...(19): siRNA sense strand
gcucccaaauuagaggaaa

SEQ ID NO: 1868922 - RNA, 19 nt, Homo sapiens
  misc_RNA (1)...(19): siRNA sense strand
gaaguuauggcagaguuag

SEQ ID NO: 1868923 - RNA, 19 nt, Homo sapiens
  misc_RNA (1)...(19): siRNA sense strand
ggcucaaagugcugacaaa

SEQ ID NO: 1868924 - RNA, 19 nt, Homo sapiens
  misc_RNA (1)...(19): siRNA sense strand
gcuaaagaacucccucaag

SEQ ID NO: 1868925 - RNA, 19 nt, Homo sapiens
  misc_RNA (1)...(19): siRNA sense strand
cuucugugaugcucuuuau

SEQ ID NO: 1868926 - RNA, 19 nt, Homo sapiens
  misc_RNA (1)...(19): siRNA sense strand
ccugcaugcuguuuaugaa

SEQ ID NO: 1868927 - RNA, 19 nt, Homo sapiens
  misc_RNA (1)...(19): siRNA sense strand
agaaguucggcaaggauua

SEQ ID NO: 1868928 - RNA, 19 nt, Homo sapiens
  misc_RNA (1)...(19): siRNA sense strand
aaauguggauucagcaaac

SEQ ID NO: 1868929 - RNA, 19 nt, Homo sapiens
  misc_RNA (1)...(19): siRNA sense strand
gaagcaaaauguggauuca

SEQ ID NO: 1868930 - RNA, 19 nt, Homo sapiens
  misc_RNA (1)...(19): siRNA sense strand
ucaaagccuauuccaguug

SEQ ID NO: 1868931 - RNA, 19 nt, Homo sapiens
  misc_RNA (1)...(19): siRNA sense strand
gaggauuggauauugugaa

SEQ ID NO: 1868932 - RNA, 19 nt, Homo sapiens
  misc_RNA (1)...(19): siRNA sense strand
acucaaauuggccaacaua

SEQ ID NO: 1868933 - RNA, 19 nt, Homo sapiens
  misc_RNA (1)...(19): siRNA sense strand
gaaacauucgauauauugg

SEQ ID NO: 1868934 - RNA, 19 nt, Homo sapiens
  misc_RNA (1)...(19): siRNA sense strand
gcugacaaauaaagcuucu

SEQ ID NO: 1868935 - RNA, 19 nt, Homo sapiens
  misc_RNA (1)...(19): siRNA sense strand
acagaugaacgaaguuaug

SEQ ID NO: 1868936 - RNA, 19 nt, Homo sapiens
  misc_RNA (1)...(19): siRNA sense strand
acccucagcuguaugugaa

SEQ ID NO: 1868937 - RNA, 19 nt, Homo sapiens
  misc_RNA (1)...(19): siRNA sense strand
gcucaaagugcugacaaau

SEQ ID NO: 1868938 - RNA, 19 nt, Homo sapiens
  misc_RNA (1)...(19): siRNA sense strand
auaggaggacuugauauaa

SEQ ID NO: 1868939 - RNA, 19 nt, Homo sapiens
  misc_RNA (1)...(19): siRNA sense strand
uauccucagcucuauguuu

SEQ ID NO: 1868940 - RNA, 19 nt, Homo sapiens
  misc_RNA (1)...(19): siRNA sense strand
cucaaagccuauuccaguu

SEQ ID NO: 1868941 - RNA, 19 nt, Homo sapiens
  misc_RNA (1)...(19): siRNA sense strand
aaacaaacaggaagcaaaa

SEQ ID NO: 1868942 - RNA, 19 nt, Homo sapiens
  misc_RNA (1)...(19): siRNA sense strand
auuggaggaugaagaaguu

SEQ ID NO: 1868943 - RNA, 19 nt, Homo sapiens
  misc_RNA (1)...(19): siRNA sense strand
ggugggaggauuggauauu

SEQ ID NO: 1868944 - RNA, 19 nt, Homo sapiens
  misc_RNA (1)...(19): siRNA sense strand
caguuuagcaguuuugaua

SEQ ID NO: 1868945 - RNA, 19 nt, Homo sapiens
  misc_RNA (1)...(19): siRNA sense strand
accaugggcuccacagugu

SEQ ID NO: 1868946 - RNA, 19 nt, Homo sapiens
  misc_RNA (1)...(19): siRNA sense strand
ggcaaggauuaaaagcuua

SEQ ID NO: 1868947 - RNA, 19 nt, Homo sapiens
  misc_RNA (1)...(19): siRNA sense strand
gucccaaagcucccaaauu

SEQ ID NO: 1868948 - RNA, 19 nt, Homo sapiens
  misc_RNA (1)...(19): siRNA sense strand
ggaggauuggauauuguga

SEQ ID NO: 1868949 - RNA, 19 nt, Homo sapiens
  misc_RNA (1)...(19): siRNA sense strand
cugaagguguuccugaagu

SEQ ID NO: 1868950 - RNA, 19 nt, Homo sapiens
  misc_RNA (1)...(19): siRNA sense strand
ccaguuggccuaccuaucc

SEQ ID NO: 1868951 - RNA, 19 nt, Homo sapiens
  misc_RNA (1)...(19): siRNA sense strand
ggagcuggugggaggauug

SEQ ID NO: 1868952 - RNA, 19 nt, Homo sapiens
  misc_RNA (1)...(19): siRNA sense strand
acgaaguuauggcagaguu

SEQ ID NO: 1868953 - RNA, 19 nt, Homo sapiens
  misc_RNA (1)...(19): siRNA sense strand
ucgauauauuggaggauga

SEQ ID NO: 1868954 - RNA, 19 nt, Homo sapiens
  misc_RNA (1)...(19): siRNA sense strand
gagcuagaagcaucugaag

SEQ ID NO: 1868955 - RNA, 19 nt, Homo sapiens
  misc_RNA (1)...(19): siRNA sense strand
gagcucauaggaggacuug

SEQ ID NO: 1868956 - RNA, 19 nt, Homo sapiens
  misc_RNA (1)...(19): siRNA sense strand
gggaagagcuggccagaga

SEQ ID NO: 1868957 - RNA, 19 nt, Homo sapiens
  misc_RNA (1)...(19): siRNA sense strand
gcaagcauccggugcaaug

SEQ ID NO: 1868958 - RNA, 19 nt, Homo sapiens
  misc_RNA (1)...(19): siRNA sense strand
gagagaucaugccaguuga

SEQ ID NO: 1868959 - RNA, 19 nt, Homo sapiens
  misc_RNA (1)...(19): siRNA sense strand
cagauuugguuucagaaug

SEQ ID NO: 1868960 - RNA, 19 nt, Homo sapiens
  misc_RNA (1)...(19): siRNA sense strand
ggauucagaucugguuuca

SEQ ID NO: 1868961 - RNA, 19 nt, Homo sapiens
  misc_RNA (1)...(19): siRNA sense strand
ugagagaucaugccaguug

SEQ ID NO: 1868962 - RNA, 19 nt, Homo sapiens
  misc_RNA (1)...(19): siRNA sense strand
agauuugguuucagaauga

SEQ ID NO: 1868963 - RNA, 19 nt, Homo sapiens
  misc_RNA (1)...(19): siRNA sense strand
ggaccgggaaggcgaauga

SEQ ID NO: 1868964 - RNA, 19 nt, Homo sapiens
  misc_RNA (1)...(19): siRNA sense strand
gaagagcuggccagagaga

SEQ ID NO: 1868965 - RNA, 19 nt, Homo sapiens
  misc_RNA (1)...(19): siRNA sense strand
guccagauuugguuucaga

SEQ ID NO: 1868966 - RNA, 19 nt, Homo sapiens
  misc_RNA (1)...(19): siRNA sense strand
gagcccaggguccagauuu

SEQ ID NO: 1868967 - RNA, 19 nt, Homo sapiens
  misc_RNA (1)...(19): siRNA sense strand
gcuuugagcggaaccugua

SEQ ID NO: 1868968 - RNA, 19 nt, Homo sapiens
  misc_RNA (1)...(19): siRNA sense strand
ugagaaggaucgcuuucca

SEQ ID NO: 1868969 - RNA, 19 nt, Homo sapiens
  misc_RNA (1)...(19): siRNA sense strand
gcauugccaccaaagaaga

SEQ ID NO: 1868970 - RNA, 19 nt, Homo sapiens
  misc_RNA (1)...(19): siRNA sense strand
ggaucgcuuuccaggcauu

SEQ ID NO: 1868971 - RNA, 19 nt, Homo sapiens
  misc_RNA (1)...(19): siRNA sense strand
cgaaagcggacugccauca

SEQ ID NO: 1868972 - RNA, 19 nt, Homo sapiens
  misc_RNA (1)...(19): siRNA sense strand
ggcgaaugauacuccuuuc

SEQ ID NO: 1868973 - RNA, 19 nt, Homo sapiens
  misc_RNA (1)...(19): siRNA sense strand
ccuccgagccuuugagaag

SEQ ID NO: 1868974 - RNA, 19 nt, Homo sapiens
  misc_RNA (1)...(19): siRNA sense strand
gaaagcggacugccaucac

SEQ ID NO: 1868975 - RNA, 19 nt, Homo sapiens
  misc_RNA (1)...(19): siRNA sense strand
gccaucaccggaucccaaa

SEQ ID NO: 1868976 - RNA, 19 nt, Homo sapiens
  misc_RNA (1)...(19): siRNA sense strand
gaggagaucaucaacuuua

SEQ ID NO: 1868977 - RNA, 19 nt, Homo sapiens
  misc_RNA (1)...(19): siRNA sense strand
ggacaccgcuaucaaagug

SEQ ID NO: 1868978 - RNA, 19 nt, Homo sapiens
  misc_RNA (1)...(19): siRNA sense strand
gggaggagaucaucaacuu

SEQ ID NO: 1868979 - RNA, 19 nt, Homo sapiens
  misc_RNA (1)...(19): siRNA sense strand
gacuacaucuuccucauug

SEQ ID NO: 1868980 - RNA, 19 nt, Homo sapiens
  misc_RNA (1)...(19): siRNA sense strand
acaagcagguggagcagua

SEQ ID NO: 1868981 - RNA, 19 nt, Homo sapiens
  misc_RNA (1)...(19): siRNA sense strand
aaacugccauccaaucuau

SEQ ID NO: 1868982 - RNA, 19 nt, Homo sapiens
  misc_RNA (1)...(19): siRNA sense strand
gaacaccacacccuggauu

SEQ ID NO: 1868983 - RNA, 19 nt, Homo sapiens
  misc_RNA (1)...(19): siRNA sense strand
gaucaucaacuuuaacugu

SEQ ID NO: 1868984 - RNA, 19 nt, Homo sapiens
  misc_RNA (1)...(19): siRNA sense strand
ucaacaacauggugaacaa

SEQ ID NO: 1868985 - RNA, 19 nt, Homo sapiens
  misc_RNA (1)...(19): siRNA sense strand
gcuccaaacugccauccaa

SEQ ID NO: 1868986 - RNA, 19 nt, Homo sapiens
  misc_RNA (1)...(19): siRNA sense strand
gucaacaaauucucccuaa

SEQ ID NO: 1868987 - RNA, 19 nt, Homo sapiens
  misc_RNA (1)...(19): siRNA sense strand
guacauguccuuucacaag

SEQ ID NO: 1868988 - RNA, 19 nt, Homo sapiens
  misc_RNA (1)...(19): siRNA sense strand
cggaagacauccucagguu

SEQ ID NO: 1868989 - RNA, 19 nt, Homo sapiens
  misc_RNA (1)...(19): siRNA sense strand
ggacuacaucuuccucauu

SEQ ID NO: 1868990 - RNA, 19 nt, Homo sapiens
  misc_RNA (1)...(19): siRNA sense strand
gaagacauccucagguucu

SEQ ID NO: 1868991 - RNA, 19 nt, Homo sapiens
  misc_RNA (1)...(19): siRNA sense strand
cuacagugacuucagauuu

SEQ ID NO: 1868992 - RNA, 19 nt, Homo sapiens
  misc_RNA (1)...(19): siRNA sense strand
ccacugagcacgccagaga

SEQ ID NO: 1868993 - RNA, 19 nt, Homo sapiens
  misc_RNA (1)...(19): siRNA sense strand
gagaucauccagcagauug

SEQ ID NO: 1868994 - RNA, 19 nt, Homo sapiens
  misc_RNA (1)...(19): siRNA sense strand
gcugguucaugguagauuu

SEQ ID NO: 1868995 - RNA, 19 nt, Homo sapiens
  misc_RNA (1)...(19): siRNA sense strand
ucaacuaccaggagaauga

SEQ ID NO: 1868996 - RNA, 19 nt, Homo sapiens
  misc_RNA (1)...(19): siRNA sense strand
caacaaauucucccuaagg

SEQ ID NO: 1868997 - RNA, 19 nt, Homo sapiens
  misc_RNA (1)...(19): siRNA sense strand
gaaaagcugguucauggua

SEQ ID NO: 1868998 - RNA, 19 nt, Homo sapiens
  misc_RNA (1)...(19): siRNA sense strand
caaacugccauccaaucua

SEQ ID NO: 1868999 - RNA, 19 nt, Homo sapiens
  misc_RNA (1)...(19): siRNA sense strand
ggacaacacagagaucauc

SEQ ID NO: 1869000 - RNA, 19 nt, Homo sapiens
  misc_RNA (1)...(19): siRNA sense strand
ggaggagaucaucaacuuu

SEQ ID NO: 1869001 - RNA, 19 nt, Homo sapiens
  misc_RNA (1)...(19): siRNA sense strand
gggcaucaccuucuucaag

SEQ ID NO: 1869002 - RNA, 19 nt, Homo sapiens
  misc_RNA (1)...(19): siRNA sense strand
ugacguccaugcugaccaa

SEQ ID NO: 1869003 - RNA, 19 nt, Homo sapiens
  misc_RNA (1)...(19): siRNA sense strand
ugaccaagcugcguuucga

SEQ ID NO: 1869004 - RNA, 19 nt, Homo sapiens
  misc_RNA (1)...(19): siRNA sense strand
gaaggcaccauuggcaaga

SEQ ID NO: 1869005 - RNA, 19 nt, Homo sapiens
  misc_RNA (1)...(19): siRNA sense strand
aacaaauucucccuaagga

SEQ ID NO: 1869006 - RNA, 19 nt, Homo sapiens
  misc_RNA (1)...(19): siRNA sense strand
gagcguggacaacuucaau

SEQ ID NO: 1869007 - RNA, 19 nt, Homo sapiens
  misc_RNA (1)...(19): siRNA sense strand
caugguagauuucauuucc

SEQ ID NO: 1869008 - RNA, 19 nt, Homo sapiens
  misc_RNA (1)...(19): siRNA sense strand
gauguucggcagccagaaa

SEQ ID NO: 1869009 - RNA, 19 nt, Homo sapiens
  misc_RNA (1)...(19): siRNA sense strand
guucaugguagauuucauu

SEQ ID NO: 1869010 - RNA, 19 nt, Homo sapiens
  misc_RNA (1)...(19): siRNA sense strand
cgacggcuccuacuuugga

SEQ ID NO: 1869011 - RNA, 19 nt, Homo sapiens
  misc_RNA (1)...(19): siRNA sense strand
ggaccgcauuggcaagaag

SEQ ID NO: 1869012 - RNA, 19 nt, Homo sapiens
  misc_RNA (1)...(19): siRNA sense strand
aggagaucaucaacuuuaa

SEQ ID NO: 1869013 - RNA, 19 nt, Homo sapiens
  misc_RNA (1)...(19): siRNA sense strand
cgacuugguccucaacuuc

SEQ ID NO: 1869014 - RNA, 19 nt, Homo sapiens
  misc_RNA (1)...(19): siRNA sense strand
gagcaguacauguccuuuc

SEQ ID NO: 1869015 - RNA, 19 nt, Homo sapiens
  misc_RNA (1)...(19): siRNA sense strand
gaucauggacgaggaagag

SEQ ID NO: 1869016 - RNA, 19 nt, Homo sapiens
  misc_RNA (1)...(19): siRNA sense strand
gaucugggcugggcaaccu

SEQ ID NO: 1869017 - RNA, 19 nt, Homo sapiens
  misc_RNA (1)...(19): siRNA sense strand
ggaagcugguggccuccau

SEQ ID NO: 1869018 - RNA, 19 nt, Homo sapiens
  misc_RNA (1)...(19): siRNA sense strand
gaacaggagagggucaagu

SEQ ID NO: 1869019 - RNA, 19 nt, Homo sapiens
  misc_RNA (1)...(19): siRNA sense strand
uacagugacuucagauuuu

SEQ ID NO: 1869020 - RNA, 19 nt, Homo sapiens
  misc_RNA (1)...(19): siRNA sense strand
gcguggacaacuucaauga

SEQ ID NO: 1869021 - RNA, 19 nt, Homo sapiens
  misc_RNA (1)...(19): siRNA sense strand
caguacauguccuuucaca

SEQ ID NO: 1869022 - RNA, 19 nt, Homo sapiens
  misc_RNA (1)...(19): siRNA sense strand
gauggugggaaaccugauu

SEQ ID NO: 1869023 - RNA, 19 nt, Homo sapiens
  misc_RNA (1)...(19): siRNA sense strand
augaggugcuggaggagua

SEQ ID NO: 1869024 - RNA, 19 nt, Homo sapiens
  misc_RNA (1)...(19): siRNA sense strand
gcaacaaggagaccaagcu

SEQ ID NO: 1869025 - RNA, 19 nt, Homo sapiens
  misc_RNA (1)...(19): siRNA sense strand
gagaucaucaacuuuaacu

SEQ ID NO: 1869026 - RNA, 19 nt, Homo sapiens
  misc_RNA (1)...(19): siRNA sense strand
gcuacgccauguucauugg

SEQ ID NO: 1869027 - RNA, 19 nt, Homo sapiens
  misc_RNA (1)...(19): siRNA sense strand
ucucccgccucauucgaua

SEQ ID NO: 1869028 - RNA, 19 nt, Homo sapiens
  misc_RNA (1)...(19): siRNA sense strand
aaagcugguucaugguaga

SEQ ID NO: 1869029 - RNA, 19 nt, Homo sapiens
  misc_RNA (1)...(19): siRNA sense strand
gaggacaacacagagauca

SEQ ID NO: 1869030 - RNA, 19 nt, Homo sapiens
  misc_RNA (1)...(19): siRNA sense strand
ucaacaaauucucccuaag

SEQ ID NO: 1869031 - RNA, 19 nt, Homo sapiens
  misc_RNA (1)...(19): siRNA sense strand
ccucaacuccggcgucuuc

SEQ ID NO: 1869032 - RNA, 19 nt, Homo sapiens
  misc_RNA (1)...(19): siRNA sense strand
gcaagaagaacuccauccu

SEQ ID NO: 1869033 - RNA, 19 nt, Homo sapiens
  misc_RNA (1)...(19): siRNA sense strand
ucaccaagggcaacaagga

SEQ ID NO: 1869034 - RNA, 19 nt, Homo sapiens
  misc_RNA (1)...(19): siRNA sense strand
cacccuggauugucuucaa

SEQ ID NO: 1869035 - RNA, 19 nt, Homo sapiens
  misc_RNA (1)...(19): siRNA sense strand
gagcauccugggcgagcua

SEQ ID NO: 1869036 - RNA, 19 nt, Homo sapiens
  misc_RNA (1)...(19): siRNA sense strand
ggcagcgcauccacgacua

SEQ ID NO: 1869037 - RNA, 19 nt, Homo sapiens
  misc_RNA (1)...(19): siRNA sense strand
ggaucgugguggaggacaa

SEQ ID NO: 1869038 - RNA, 19 nt, Homo sapiens
  misc_RNA (1)...(19): siRNA sense strand
ugaccaugcugcugcugau

SEQ ID NO: 1869039 - RNA, 19 nt, Homo sapiens
  misc_RNA (1)...(19): siRNA sense strand
ccaaacugccauccaaucu

SEQ ID NO: 1869040 - RNA, 19 nt, Homo sapiens
  misc_RNA (1)...(19): siRNA sense strand
ccgccucauucgauauauu

SEQ ID NO: 1869041 - RNA, 19 nt, Homo sapiens
  misc_RNA (1)...(19): siRNA sense strand
agcaguacauguccuuuca

SEQ ID NO: 1869042 - RNA, 19 nt, Homo sapiens
  misc_RNA (1)...(19): siRNA sense strand
gcgcauccacgacuacuac

SEQ ID NO: 1869043 - RNA, 19 nt, Homo sapiens
  misc_RNA (1)...(19): siRNA sense strand
gcagguggagcaguacaug

SEQ ID NO: 1869044 - RNA, 19 nt, Homo sapiens
  misc_RNA (1)...(19): siRNA sense strand
ggaggacaacacagagauc

SEQ ID NO: 1869045 - RNA, 19 nt, Homo sapiens
  misc_RNA (1)...(19): siRNA sense strand
gacauccucagguucuuug

SEQ ID NO: 1869046 - RNA, 19 nt, Homo sapiens
  misc_RNA (1)...(19): siRNA sense strand
ggguguccaucaacaacau

SEQ ID NO: 1869047 - RNA, 19 nt, Homo sapiens
  misc_RNA (1)...(19): siRNA sense strand
acagugacuucagauuuua

SEQ ID NO: 1869048 - RNA, 19 nt, Homo sapiens
  misc_RNA (1)...(19): siRNA sense strand
gcauuguccgcuucacgaa

SEQ ID NO: 1869049 - RNA, 19 nt, Homo sapiens
  misc_RNA (1)...(19): siRNA sense strand
ccauuggcaagaagaugua

SEQ ID NO: 1869050 - RNA, 19 nt, Homo sapiens
  misc_RNA (1)...(19): siRNA sense strand
gccaguaccaggaaaagua

SEQ ID NO: 1869051 - RNA, 19 nt, Homo sapiens
  misc_RNA (1)...(19): siRNA sense strand
acuccggcgucuucaacua

SEQ ID NO: 1869052 - RNA, 19 nt, Homo sapiens
  misc_RNA (1)...(19): siRNA sense strand
cuacaucuuccucauugug

SEQ ID NO: 1869053 - RNA, 19 nt, Homo sapiens
  misc_RNA (1)...(19): siRNA sense strand
cguagccgccaccaccaua

SEQ ID NO: 1869054 - RNA, 19 nt, Homo sapiens
  misc_RNA (1)...(19): siRNA sense strand
gaucauccagcagauugug

SEQ ID NO: 1869055 - RNA, 19 nt, Homo sapiens
  misc_RNA (1)...(19): siRNA sense strand
caacuccggcgucuucaac

SEQ ID NO: 1869056 - RNA, 19 nt, Homo sapiens
  misc_RNA (1)...(19): siRNA sense strand
ggagaucaucaacuuuaac

SEQ ID NO: 1869057 - RNA, 19 nt, Homo sapiens
  misc_RNA (1)...(19): siRNA sense strand
gcuaccagggcaagauguu

SEQ ID NO: 1869058 - RNA, 19 nt, Homo sapiens
  misc_RNA (1)...(19): siRNA sense strand
ggccaaggcguggaucaug

SEQ ID NO: 1869059 - RNA, 19 nt, Homo sapiens
  misc_RNA (1)...(19): siRNA sense strand
acacauucuuccucaucga

SEQ ID NO: 1869060 - RNA, 19 nt, Homo sapiens
  misc_RNA (1)...(19): siRNA sense strand
gcugagcguggacaacuuc

SEQ ID NO: 1869061 - RNA, 19 nt, Homo sapiens
  misc_RNA (1)...(19): siRNA sense strand
cagccucuuacgccuguua

SEQ ID NO: 1869062 - RNA, 19 nt, Homo sapiens
  misc_RNA (1)...(19): siRNA sense strand
gaagagcggugccaacaua

SEQ ID NO: 1869063 - RNA, 19 nt, Homo sapiens
  misc_RNA (1)...(19): siRNA sense strand
gaaaggaggcgcaaacauu

SEQ ID NO: 1869064 - RNA, 19 nt, Homo sapiens
  misc_RNA (1)...(19): siRNA sense strand
ggagauugcugaagaguau

SEQ ID NO: 1869065 - RNA, 19 nt, Homo sapiens
  misc_RNA (1)...(19): siRNA sense strand
ccaaggaucuaaucauuga

SEQ ID NO: 1869066 - RNA, 19 nt, Homo sapiens
  misc_RNA (1)...(19): siRNA sense strand
gagagaaacugcaagacuu

SEQ ID NO: 1869067 - RNA, 19 nt, Homo sapiens
  misc_RNA (1)...(19): siRNA sense strand
ggagagaggcuaaagauug

SEQ ID NO: 1869068 - RNA, 19 nt, Homo sapiens
  misc_RNA (1)...(19): siRNA sense strand
caagaucacuggcaccaaa

SEQ ID NO: 1869069 - RNA, 19 nt, Homo sapiens
  misc_RNA (1)...(19): siRNA sense strand
caaauaccaucccaagauu

SEQ ID NO: 1869070 - RNA, 19 nt, Homo sapiens
  misc_RNA (1)...(19): siRNA sense strand
gaagaaaucccaacacaag

SEQ ID NO: 1869071 - RNA, 19 nt, Homo sapiens
  misc_RNA (1)...(19): siRNA sense strand
gcaagaugauggaugaguu

SEQ ID NO: 1869072 - RNA, 19 nt, Homo sapiens
  misc_RNA (1)...(19): siRNA sense strand
gagagaggcuaaagauugu

SEQ ID NO: 1869073 - RNA, 19 nt, Homo sapiens
  misc_RNA (1)...(19): siRNA sense strand
gacauucgcuucccacaga

SEQ ID NO: 1869074 - RNA, 19 nt, Homo sapiens
  misc_RNA (1)...(19): siRNA sense strand
caccugagcugcagucuga

SEQ ID NO: 1869075 - RNA, 19 nt, Homo sapiens
  misc_RNA (1)...(19): siRNA sense strand
caucaaggcuucugucauc

SEQ ID NO: 1869076 - RNA, 19 nt, Homo sapiens
  misc_RNA (1)...(19): siRNA sense strand
caccaucgcuuuguuauug

SEQ ID NO: 1869077 - RNA, 19 nt, Homo sapiens
  misc_RNA (1)...(19): siRNA sense strand
ugagaaggcuccugacaug

SEQ ID NO: 1869078 - RNA, 19 nt, Homo sapiens
  misc_RNA (1)...(19): siRNA sense strand
gugaggcgcugcagguaua

SEQ ID NO: 1869079 - RNA, 19 nt, Homo sapiens
  misc_RNA (1)...(19): siRNA sense strand
ggagcaggauucugucuau

SEQ ID NO: 1869080 - RNA, 19 nt, Homo sapiens
  misc_RNA (1)...(19): siRNA sense strand
ucccagaggucaucauuaa

SEQ ID NO: 1869081 - RNA, 19 nt, Homo sapiens
  misc_RNA (1)...(19): siRNA sense strand
aaaggaggcgcaaacauua

SEQ ID NO: 1869082 - RNA, 19 nt, Homo sapiens
  misc_RNA (1)...(19): siRNA sense strand
gggccucgcugcaaauuug

SEQ ID NO: 1869083 - RNA, 19 nt, Homo sapiens
  misc_RNA (1)...(19): siRNA sense strand
caucaucucuggccggaaa

SEQ ID NO: 1869084 - RNA, 19 nt, Homo sapiens
  misc_RNA (1)...(19): siRNA sense strand
gcaggauucugucuauuca

SEQ ID NO: 1869085 - RNA, 19 nt, Homo sapiens
  misc_RNA (1)...(19): siRNA sense strand
caacaucgaccacaaguuc

SEQ ID NO: 1869086 - RNA, 19 nt, Homo sapiens
  misc_RNA (1)...(19): siRNA sense strand
aaagaagacuacaaccauu

SEQ ID NO: 1869087 - RNA, 19 nt, Homo sapiens
  misc_RNA (1)...(19): siRNA sense strand
gaccuucaccguuacguua

SEQ ID NO: 1869088 - RNA, 19 nt, Homo sapiens
  misc_RNA (1)...(19): siRNA sense strand
agaaagaccuggccaacau

SEQ ID NO: 1869089 - RNA, 19 nt, Homo sapiens
  misc_RNA (1)...(19): siRNA sense strand
uaccaaggaucuaaucauu

SEQ ID NO: 1869090 - RNA, 19 nt, Homo sapiens
  misc_RNA (1)...(19): siRNA sense strand
caacacaaguaugucauug

SEQ ID NO: 1869091 - RNA, 19 nt, Homo sapiens
  misc_RNA (1)...(19): siRNA sense strand
gagaacuggugcucacuug

SEQ ID NO: 1869092 - RNA, 19 nt, Homo sapiens
  misc_RNA (1)...(19): siRNA sense strand
gaacuugagcagaugguuu

SEQ ID NO: 1869093 - RNA, 19 nt, Homo sapiens
  misc_RNA (1)...(19): siRNA sense strand
gaaagaccuggccaacaua

SEQ ID NO: 1869094 - RNA, 19 nt, Homo sapiens
  misc_RNA (1)...(19): siRNA sense strand
gcuggaugcugucaugaaa

SEQ ID NO: 1869095 - RNA, 19 nt, Homo sapiens
  misc_RNA (1)...(19): siRNA sense strand
acaaggauaugaaccaguu

SEQ ID NO: 1869096 - RNA, 19 nt, Homo sapiens
  misc_RNA (1)...(19): siRNA sense strand
gaagugggauccgcaagau

SEQ ID NO: 1869097 - RNA, 19 nt, Homo sapiens
  misc_RNA (1)...(19): siRNA sense strand
ccuuugaccuucaccguua

SEQ ID NO: 1869098 - RNA, 19 nt, Homo sapiens
  misc_RNA (1)...(19): siRNA sense strand
gaaggacauuguugcuaga

SEQ ID NO: 1869099 - RNA, 19 nt, Homo sapiens
  misc_RNA (1)...(19): siRNA sense strand
ucagaggaccuaagaauga

SEQ ID NO: 1869100 - RNA, 19 nt, Homo sapiens
  misc_RNA (1)...(19): siRNA sense strand
gcaucaagaagauuuauga

SEQ ID NO: 1869101 - RNA, 19 nt, Homo sapiens
  misc_RNA (1)...(19): siRNA sense strand
caaaauacaugcagaagau

SEQ ID NO: 1869102 - RNA, 19 nt, Homo sapiens
  misc_RNA (1)...(19): siRNA sense strand
uagaaggcauggucaaaga

SEQ ID NO: 1869103 - RNA, 19 nt, Homo sapiens
  misc_RNA (1)...(19): siRNA sense strand
caacauagccgagguagag

SEQ ID NO: 1869104 - RNA, 19 nt, Homo sapiens
  misc_RNA (1)...(19): siRNA sense strand
ccaaauaccaucccaagau

SEQ ID NO: 1869105 - RNA, 19 nt, Homo sapiens
  misc_RNA (1)...(19): siRNA sense strand
ucacucagguguuccaugu

SEQ ID NO: 1869106 - RNA, 19 nt, Homo sapiens
  misc_RNA (1)...(19): siRNA sense strand
gcagauuacucgggauuuc

SEQ ID NO: 1869107 - RNA, 19 nt, Homo sapiens
  misc_RNA (1)...(19): siRNA sense strand
gugaagaaaucccaacaca

SEQ ID NO: 1869108 - RNA, 19 nt, Homo sapiens
  misc_RNA (1)...(19): siRNA sense strand
aaucaaaguugccacucua

SEQ ID NO: 1869109 - RNA, 19 nt, Homo sapiens
  misc_RNA (1)...(19): siRNA sense strand
gcacacagagcgacaaagu

SEQ ID NO: 1869110 - RNA, 19 nt, Homo sapiens
  misc_RNA (1)...(19): siRNA sense strand
gaagaaagcaacaccaaaa

SEQ ID NO: 1869111 - RNA, 19 nt, Homo sapiens
  misc_RNA (1)...(19): siRNA sense strand
ccaaagagggcaucgagaa

SEQ ID NO: 1869112 - RNA, 19 nt, Homo sapiens
  misc_RNA (1)...(19): siRNA sense strand
gaccaaggccucuccauca

SEQ ID NO: 1869113 - RNA, 19 nt, Homo sapiens
  misc_RNA (1)...(19): siRNA sense strand
gaugcuauacugagaauug

SEQ ID NO: 1869114 - RNA, 19 nt, Homo sapiens
  misc_RNA (1)...(19): siRNA sense strand
gaauaucauugggaaagga

SEQ ID NO: 1869115 - RNA, 19 nt, Homo sapiens
  misc_RNA (1)...(19): siRNA sense strand
gcgcaucccuccugacagu

SEQ ID NO: 1869116 - RNA, 19 nt, Homo sapiens
  misc_RNA (1)...(19): siRNA sense strand
gaaggcauggucaaagauu

SEQ ID NO: 1869117 - RNA, 19 nt, Homo sapiens
  misc_RNA (1)...(19): siRNA sense strand
ucacgggccucgcugcaaa

SEQ ID NO: 1869118 - RNA, 19 nt, Homo sapiens
  misc_RNA (1)...(19): siRNA sense strand
gagagaaaauacaaggaua

SEQ ID NO: 1869119 - RNA, 19 nt, Homo sapiens
  misc_RNA (1)...(19): siRNA sense strand
ccaagaguuucacuguuga

SEQ ID NO: 1869120 - RNA, 19 nt, Homo sapiens
  misc_RNA (1)...(19): siRNA sense strand
ggaagcgacaccguuguua

SEQ ID NO: 1869121 - RNA, 19 nt, Homo sapiens
  misc_RNA (1)...(19): siRNA sense strand
gcaauucagagaccauuau

SEQ ID NO: 1869122 - RNA, 19 nt, Homo sapiens
  misc_RNA (1)...(19): siRNA sense strand
caaagagggcaucgagaaa

SEQ ID NO: 1869123 - RNA, 19 nt, Homo sapiens
  misc_RNA (1)...(19): siRNA sense strand
caaaguugccacucuaaau

SEQ ID NO: 1869124 - RNA, 19 nt, Homo sapiens
  misc_RNA (1)...(19): siRNA sense strand
gaacuggugcucacuugga

SEQ ID NO: 1869125 - RNA, 19 nt, Homo sapiens
  misc_RNA (1)...(19): siRNA sense strand
gaaccaguuuggagaaggu

SEQ ID NO: 1869126 - RNA, 19 nt, Homo sapiens
  misc_RNA (1)...(19): siRNA sense strand
gaguuucacuguugacauc

SEQ ID NO: 1869127 - RNA, 19 nt, Homo sapiens
  misc_RNA (1)...(19): siRNA sense strand
cugcacaacucccucauug

SEQ ID NO: 1869128 - RNA, 19 nt, Homo sapiens
  misc_RNA (1)...(19): siRNA sense strand
gaucuaaucauugagcaaa

SEQ ID NO: 1869129 - RNA, 19 nt, Homo sapiens
  misc_RNA (1)...(19): siRNA sense strand
cuacagaggaugucaaugu

SEQ ID NO: 1869130 - RNA, 19 nt, Homo sapiens
  misc_RNA (1)...(19): siRNA sense strand
gaaaucccaacacaaguau

SEQ ID NO: 1869131 - RNA, 19 nt, Homo sapiens
  misc_RNA (1)...(19): siRNA sense strand
gaagauuuaugaggagaag

SEQ ID NO: 1869132 - RNA, 19 nt, Homo sapiens
  misc_RNA (1)...(19): siRNA sense strand
gcaaaaucauggacgaauu

SEQ ID NO: 1869133 - RNA, 19 nt, Homo sapiens
  misc_RNA (1)...(19): siRNA sense strand
aaguagaggugcccuuuga

SEQ ID NO: 1869134 - RNA, 19 nt, Homo sapiens
  misc_RNA (1)...(19): siRNA sense strand
gcucagaggaccuaagaau

SEQ ID NO: 1869135 - RNA, 19 nt, Homo sapiens
  misc_RNA (1)...(19): siRNA sense strand
gggcaguaauuacccaaau

SEQ ID NO: 1869136 - RNA, 19 nt, Homo sapiens
  misc_RNA (1)...(19): siRNA sense strand
gaagcgacaccguuguuau

SEQ ID NO: 1869137 - RNA, 19 nt, Homo sapiens
  misc_RNA (1)...(19): siRNA sense strand
gagcaggauucugucuauu

SEQ ID NO: 1869138 - RNA, 19 nt, Homo sapiens
  misc_RNA (1)...(19): siRNA sense strand
aaaguugccacucuaaauu

SEQ ID NO: 1869139 - RNA, 19 nt, Homo sapiens
  misc_RNA (1)...(19): siRNA sense strand
ggaccaaauuaccaucaca

SEQ ID NO: 1869140 - RNA, 19 nt, Homo sapiens
  misc_RNA (1)...(19): siRNA sense strand
gcaggaggaccgggcuuua

SEQ ID NO: 1869141 - RNA, 19 nt, Homo sapiens
  misc_RNA (1)...(19): siRNA sense strand
caagaugauggaugaguuu

SEQ ID NO: 1869142 - RNA, 19 nt, Homo sapiens
  misc_RNA (1)...(19): siRNA sense strand
ggaagugggauccgcaaga

SEQ ID NO: 1869143 - RNA, 19 nt, Homo sapiens
  misc_RNA (1)...(19): siRNA sense strand
ucagagaccauuaucauca

SEQ ID NO: 1869144 - RNA, 19 nt, Homo sapiens
  misc_RNA (1)...(19): siRNA sense strand
gauagaaggcauggucaaa

SEQ ID NO: 1869145 - RNA, 19 nt, Homo sapiens
  misc_RNA (1)...(19): siRNA sense strand
agaaaucccaacacaagua

SEQ ID NO: 1869146 - RNA, 19 nt, Homo sapiens
  misc_RNA (1)...(19): siRNA sense strand
guuccgaucuucaaacagu

SEQ ID NO: 1869147 - RNA, 19 nt, Homo sapiens
  misc_RNA (1)...(19): siRNA sense strand
gaacauccaguuuccugau

SEQ ID NO: 1869148 - RNA, 19 nt, Homo sapiens
  misc_RNA (1)...(19): siRNA sense strand
ggagggcccuacagaggau

SEQ ID NO: 1869149 - RNA, 19 nt, Homo sapiens
  misc_RNA (1)...(19): siRNA sense strand
cggcaaagccauucgcaaa

SEQ ID NO: 1869150 - RNA, 19 nt, Homo sapiens
  misc_RNA (1)...(19): siRNA sense strand
aagcucaggugacauuaga

SEQ ID NO: 1869151 - RNA, 19 nt, Homo sapiens
  misc_RNA (1)...(19): siRNA sense strand
uggauaaugugguggaaga

SEQ ID NO: 1869152 - RNA, 19 nt, Homo sapiens
  misc_RNA (1)...(19): siRNA sense strand
gcuugcaucucgcauggaa

SEQ ID NO: 1869153 - RNA, 19 nt, Homo sapiens
  misc_RNA (1)...(19): siRNA sense strand
gcauucaggagaucauuga

SEQ ID NO: 1869154 - RNA, 19 nt, Homo sapiens
  misc_RNA (1)...(19): siRNA sense strand
gagaagcaaaccaagaguu

SEQ ID NO: 1869155 - RNA, 19 nt, Homo sapiens
  misc_RNA (1)...(19): siRNA sense strand
caauuucuguuccgaucuu

SEQ ID NO: 1869156 - RNA, 19 nt, Homo sapiens
  misc_RNA (1)...(19): siRNA sense strand
gagcguaccaaggaucuaa

SEQ ID NO: 1869157 - RNA, 19 nt, Homo sapiens
  misc_RNA (1)...(19): siRNA sense strand
ucaaagaccaguacaaggu

SEQ ID NO: 1869158 - RNA, 19 nt, Homo sapiens
  misc_RNA (1)...(19): siRNA sense strand
gagcugcagucugacauca

SEQ ID NO: 1869159 - RNA, 19 nt, Homo sapiens
  misc_RNA (1)...(19): siRNA sense strand
acacagagcgacaaaguca

SEQ ID NO: 1869160 - RNA, 19 nt, Homo sapiens
  misc_RNA (1)...(19): siRNA sense strand
accaagaguuucacuguug

SEQ ID NO: 1869161 - RNA, 19 nt, Homo sapiens
  misc_RNA (1)...(19): siRNA sense strand
gaggagaagcaaaccaaga

SEQ ID NO: 1869162 - RNA, 19 nt, Homo sapiens
  misc_RNA (1)...(19): siRNA sense strand
gauggaaccuguaccguaa

SEQ ID NO: 1869163 - RNA, 19 nt, Homo sapiens
  misc_RNA (1)...(19): siRNA sense strand
gaagagcgcauauggcuuu

SEQ ID NO: 1869164 - RNA, 19 nt, Homo sapiens
  misc_RNA (1)...(19): siRNA sense strand
gaacuguauugucaacguu

SEQ ID NO: 1869165 - RNA, 19 nt, Homo sapiens
  misc_RNA (1)...(19): siRNA sense strand
ccauugcuauuguucuuua

SEQ ID NO: 1869166 - RNA, 19 nt, Homo sapiens
  misc_RNA (1)...(19): siRNA sense strand
ugaggaagcccacaauauu

SEQ ID NO: 1869167 - RNA, 19 nt, Homo sapiens
  misc_RNA (1)...(19): siRNA sense strand
gaggaagcccacaauauug

SEQ ID NO: 1869168 - RNA, 19 nt, Homo sapiens
  misc_RNA (1)...(19): siRNA sense strand
cauaguggaacaauccuua

SEQ ID NO: 1869169 - RNA, 19 nt, Homo sapiens
  misc_RNA (1)...(19): siRNA sense strand
gaaccuguaccguaagaug

SEQ ID NO: 1869170 - RNA, 19 nt, Homo sapiens
  misc_RNA (1)...(19): siRNA sense strand
cgacgagguuggcuucaau

SEQ ID NO: 1869171 - RNA, 19 nt, Homo sapiens
  misc_RNA (1)...(19): siRNA sense strand
gggagaaccggaccaugaa

SEQ ID NO: 1869172 - RNA, 19 nt, Homo sapiens
  misc_RNA (1)...(19): siRNA sense strand
accaugaacuguauuguca

SEQ ID NO: 1869173 - RNA, 19 nt, Homo sapiens
  misc_RNA (1)...(19): siRNA sense strand
gcugaggaagcccacaaua

SEQ ID NO: 1869174 - RNA, 19 nt, Homo sapiens
  misc_RNA (1)...(19): siRNA sense strand
gcgacgagguuggcuucaa

SEQ ID NO: 1869175 - RNA, 19 nt, Homo sapiens
  misc_RNA (1)...(19): siRNA sense strand
ugggagaaccggaccauga

SEQ ID NO: 1869176 - RNA, 19 nt, Homo sapiens
  misc_RNA (1)...(19): siRNA sense strand
ugucaaagaguguguagau

SEQ ID NO: 1869177 - RNA, 19 nt, Homo sapiens
  misc_RNA (1)...(19): siRNA sense strand
uggcuucaaugcugaggaa

SEQ ID NO: 1869178 - RNA, 19 nt, Homo sapiens
  misc_RNA (1)...(19): siRNA sense strand
gugcagugguccagaagag

SEQ ID NO: 1869179 - RNA, 19 nt, Homo sapiens
  misc_RNA (1)...(19): siRNA sense strand
gaaccggaccaugaacugu

SEQ ID NO: 1869180 - RNA, 19 nt, Homo sapiens
  misc_RNA (1)...(19): siRNA sense strand
caagcauaguggaacaauc

SEQ ID NO: 1869181 - RNA, 19 nt, Homo sapiens
  misc_RNA (1)...(19): siRNA sense strand
gcaagcauaguggaacaau

SEQ ID NO: 1869182 - RNA, 19 nt, Homo sapiens
  misc_RNA (1)...(19): siRNA sense strand
gaccaugaacuguauuguc

SEQ ID NO: 1869183 - RNA, 19 nt, Homo sapiens
  misc_RNA (1)...(19): siRNA sense strand
gucaaagaguguguagaug

SEQ ID NO: 1869184 - RNA, 19 nt, Homo sapiens
  misc_RNA (1)...(19): siRNA sense strand
uuuagguggugaagauuau

SEQ ID NO: 1869185 - RNA, 19 nt, Homo sapiens
  misc_RNA (1)...(19): siRNA sense strand
ugaacuguauugucaacgu

SEQ ID NO: 1869186 - RNA, 19 nt, Homo sapiens
  misc_RNA (1)...(19): siRNA sense strand
gagcgcauauggcuuucac

SEQ ID NO: 1869187 - RNA, 19 nt, Homo sapiens
  misc_RNA (1)...(19): siRNA sense strand
cugaggaagcccacaauau

SEQ ID NO: 1869188 - RNA, 19 nt, Homo sapiens
  misc_RNA (1)...(19): siRNA sense strand
uggaaccuguaccguaaga

SEQ ID NO: 1869189 - RNA, 19 nt, Homo sapiens
  misc_RNA (1)...(19): siRNA sense strand
ccugugcagugguccagaa

SEQ ID NO: 1869190 - RNA, 19 nt, Homo sapiens
  misc_RNA (1)...(19): siRNA sense strand
ugccauugcuauuguucuu

SEQ ID NO: 1869191 - RNA, 19 nt, Homo sapiens
  misc_RNA (1)...(19): siRNA sense strand
guguguagaugggguuuua

SEQ ID NO: 1869192 - RNA, 19 nt, Homo sapiens
  misc_RNA (1)...(19): siRNA sense strand
caugaacuguauugucaac

SEQ ID NO: 1869193 - RNA, 19 nt, Homo sapiens
  misc_RNA (1)...(19): siRNA sense strand
gguuuuagguggugaagau

SEQ ID NO: 1869194 - RNA, 19 nt, Homo sapiens
  misc_RNA (1)...(19): siRNA sense strand
uagguggugaagauuauaa

SEQ ID NO: 1869195 - RNA, 19 nt, Homo sapiens
  misc_RNA (1)...(19): siRNA sense strand
guggaacaauccuuaacac

SEQ ID NO: 1869196 - RNA, 19 nt, Homo sapiens
  misc_RNA (1)...(19): siRNA sense strand
aaccggaccaugaacugua

SEQ ID NO: 1869197 - RNA, 19 nt, Homo sapiens
  misc_RNA (1)...(19): siRNA sense strand
gaacaagugccguuaauua

SEQ ID NO: 1869198 - RNA, 19 nt, Homo sapiens
  misc_RNA (1)...(19): siRNA sense strand
gcaaaucgcugggaacaag

SEQ ID NO: 1869199 - RNA, 19 nt, Homo sapiens
  misc_RNA (1)...(19): siRNA sense strand
ccggaaagaucaacugaaa

SEQ ID NO: 1869200 - RNA, 19 nt, Homo sapiens
  misc_RNA (1)...(19): siRNA sense strand
ggaaagaucaacugaaauc

SEQ ID NO: 1869201 - RNA, 19 nt, Homo sapiens
  misc_RNA (1)...(19): siRNA sense strand
gaaaucggcaaacuucuga

SEQ ID NO: 1869202 - RNA, 19 nt, Homo sapiens
  misc_RNA (1)...(19): siRNA sense strand
gggaacaagugccguuaau

SEQ ID NO: 1869203 - RNA, 19 nt, Homo sapiens
  misc_RNA (1)...(19): siRNA sense strand
aaagugacguggaggauca

SEQ ID NO: 1869204 - RNA, 19 nt, Homo sapiens
  misc_RNA (1)...(19): siRNA sense strand
caacugaaaucggcaaacu

SEQ ID NO: 1869205 - RNA, 19 nt, Homo sapiens
  misc_RNA (1)...(19): siRNA sense strand
caagugccguuaauuaagg

SEQ ID NO: 1869206 - RNA, 19 nt, Homo sapiens
  misc_RNA (1)...(19): siRNA sense strand
ggaacaagugccguuaauu

SEQ ID NO: 1869207 - RNA, 19 nt, Homo sapiens
  misc_RNA (1)...(19): siRNA sense strand
gccaugagcgcuaugagaa

SEQ ID NO: 1869208 - RNA, 19 nt, Homo sapiens
  misc_RNA (1)...(19): siRNA sense strand
aacaagugccguuaauuaa

SEQ ID NO: 1869209 - RNA, 19 nt, Homo sapiens
  misc_RNA (1)...(19): siRNA sense strand
uccaccagcucaugaaaga

SEQ ID NO: 1869210 - RNA, 19 nt, Homo sapiens
  misc_RNA (1)...(19): siRNA sense strand
acacgacuuugaacuggaa

SEQ ID NO: 1869211 - RNA, 19 nt, Homo sapiens
  misc_RNA (1)...(19): siRNA sense strand
gguccuguuccuccaguua

SEQ ID NO: 1869212 - RNA, 19 nt, Homo sapiens
  misc_RNA (1)...(19): siRNA sense strand
acucgaagcuguccaugag

SEQ ID NO: 1869213 - RNA, 19 nt, Homo sapiens
  misc_RNA (1)...(19): siRNA sense strand
ggacagauacgcauuuucu

SEQ ID NO: 1869214 - RNA, 19 nt, Homo sapiens
  misc_RNA (1)...(19): siRNA sense strand
ggccaugagcgcuaugaga

SEQ ID NO: 1869215 - RNA, 19 nt, Homo sapiens
  misc_RNA (1)...(19): siRNA sense strand
ugaaaucggcaaacuucug

SEQ ID NO: 1869216 - RNA, 19 nt, Homo sapiens
  misc_RNA (1)...(19): siRNA sense strand
acugaaaucggcaaacuuc

SEQ ID NO: 1869217 - RNA, 19 nt, Homo sapiens
  misc_RNA (1)...(19): siRNA sense strand
acaagugccguuaauuaag

SEQ ID NO: 1869218 - RNA, 19 nt, Homo sapiens
  misc_RNA (1)...(19): siRNA sense strand
cugaguuccuacuugcaaa

SEQ ID NO: 1869219 - RNA, 19 nt, Homo sapiens
  misc_RNA (1)...(19): siRNA sense strand
ggaaagagaaauccaaauu

SEQ ID NO: 1869220 - RNA, 19 nt, Homo sapiens
  misc_RNA (1)...(19): siRNA sense strand
ggugagauguggaauaauu

SEQ ID NO: 1869221 - RNA, 19 nt, Homo sapiens
  misc_RNA (1)...(19): siRNA sense strand
gagaagaacauaagaagaa

SEQ ID NO: 1869222 - RNA, 19 nt, Homo sapiens
  misc_RNA (1)...(19): siRNA sense strand
cggcaaagcugaaggagaa

SEQ ID NO: 1869223 - RNA, 19 nt, Homo sapiens
  misc_RNA (1)...(19): siRNA sense strand
gaagaaggauccuaaugcu

SEQ ID NO: 1869224 - RNA, 19 nt, Homo sapiens
  misc_RNA (1)...(19): siRNA sense strand
ggaggaggaggaugaauaa

SEQ ID NO: 1869225 - RNA, 19 nt, Homo sapiens
  misc_RNA (1)...(19): siRNA sense strand
gaaggauguugcugacuau

SEQ ID NO: 1869226 - RNA, 19 nt, Homo sapiens
  misc_RNA (1)...(19): siRNA sense strand
ggaagaggaagaugaagaa

SEQ ID NO: 1869227 - RNA, 19 nt, Homo sapiens
  misc_RNA (1)...(19): siRNA sense strand
agaaggauguugcugacua

SEQ ID NO: 1869228 - RNA, 19 nt, Homo sapiens
  misc_RNA (1)...(19): siRNA sense strand
cagauaaagugcgcuauga

SEQ ID NO: 1869229 - RNA, 19 nt, Homo sapiens
  misc_RNA (1)...(19): siRNA sense strand
gcagagaagaacauaagaa

SEQ ID NO: 1869230 - RNA, 19 nt, Homo sapiens
  misc_RNA (1)...(19): siRNA sense strand
ggauguugcugacuauaag

SEQ ID NO: 1869231 - RNA, 19 nt, Homo sapiens
  misc_RNA (1)...(19): siRNA sense strand
ggaaaugaaggauuaugga

SEQ ID NO: 1869232 - RNA, 19 nt, Homo sapiens
  misc_RNA (1)...(19): siRNA sense strand
caaaggguccugcuaaagu

SEQ ID NO: 1869233 - RNA, 19 nt, Homo sapiens
  misc_RNA (1)...(19): siRNA sense strand
ugggugagauguggaauaa

SEQ ID NO: 1869234 - RNA, 19 nt, Homo sapiens
  misc_RNA (1)...(19): siRNA sense strand
aaaggguccugcuaaaguu

SEQ ID NO: 1869235 - RNA, 19 nt, Homo sapiens
  misc_RNA (1)...(19): siRNA sense strand
gaaaggaaaguuugauggu

SEQ ID NO: 1869236 - RNA, 19 nt, Homo sapiens
  misc_RNA (1)...(19): siRNA sense strand
gcuaugaucgggaaaugaa

SEQ ID NO: 1869237 - RNA, 19 nt, Homo sapiens
  misc_RNA (1)...(19): siRNA sense strand
ggagaaguaugagaaggau

SEQ ID NO: 1869238 - RNA, 19 nt, Homo sapiens
  misc_RNA (1)...(19): siRNA sense strand
gcagacaugcagagaagaa

SEQ ID NO: 1869239 - RNA, 19 nt, Homo sapiens
  misc_RNA (1)...(19): siRNA sense strand
agaagaagaaggauccuaa

SEQ ID NO: 1869240 - RNA, 19 nt, Homo sapiens
  misc_RNA (1)...(19): siRNA sense strand
gaaauggcaaaggcagaua

SEQ ID NO: 1869241 - RNA, 19 nt, Homo sapiens
  misc_RNA (1)...(19): siRNA sense strand
gugcaaaggguccugcuaa

SEQ ID NO: 1869242 - RNA, 19 nt, Homo sapiens
  misc_RNA (1)...(19): siRNA sense strand
ugaaggagaaguaugagaa

SEQ ID NO: 1869243 - RNA, 19 nt, Homo sapiens
  misc_RNA (1)...(19): siRNA sense strand
gaagaagaaggauccuaau

SEQ ID NO: 1869244 - RNA, 19 nt, Homo sapiens
  misc_RNA (1)...(19): siRNA sense strand
gcagauaaagugcgcuaug

SEQ ID NO: 1869245 - RNA, 19 nt, Homo sapiens
  misc_RNA (1)...(19): siRNA sense strand
gauaaagugcgcuaugauc

SEQ ID NO: 1869246 - RNA, 19 nt, Homo sapiens
  misc_RNA (1)...(19): siRNA sense strand
cagaggucccugucaauuu

SEQ ID NO: 1869247 - RNA, 19 nt, Homo sapiens
  misc_RNA (1)...(19): siRNA sense strand
ggcaaaggcagauaaagug

SEQ ID NO: 1869248 - RNA, 19 nt, Homo sapiens
  misc_RNA (1)...(19): siRNA sense strand
caaagcugaaggagaagua

SEQ ID NO: 1869249 - RNA, 19 nt, Homo sapiens
  misc_RNA (1)...(19): siRNA sense strand
gcuaagggaggcaagaaga

SEQ ID NO: 1869250 - RNA, 19 nt, Homo sapiens
  misc_RNA (1)...(19): siRNA sense strand
uccaagaagugcucugaga

SEQ ID NO: 1869251 - RNA, 19 nt, Homo sapiens
  misc_RNA (1)...(19): siRNA sense strand
agaggaagaugaagaacag

SEQ ID NO: 1869252 - RNA, 19 nt, Homo sapiens
  misc_RNA (1)...(19): siRNA sense strand
ggcaagacguccgcuuaug

SEQ ID NO: 1869253 - RNA, 19 nt, Homo sapiens
  misc_RNA (1)...(19): siRNA sense strand
gaaaagcagccuuacauca

SEQ ID NO: 1869254 - RNA, 19 nt, Homo sapiens
  misc_RNA (1)...(19): siRNA sense strand
gcgcuaugaucgggaaaug

SEQ ID NO: 1869255 - RNA, 19 nt, Homo sapiens
  misc_RNA (1)...(19): siRNA sense strand
gcaaaggguccugcuaaag

SEQ ID NO: 1869256 - RNA, 19 nt, Homo sapiens
  misc_RNA (1)...(19): siRNA sense strand
ugcaaaggguccugcuaaa

SEQ ID NO: 1869257 - RNA, 19 nt, Homo sapiens
  misc_RNA (1)...(19): siRNA sense strand
ccagaggucccugucaauu

SEQ ID NO: 1869258 - RNA, 19 nt, Homo sapiens
  misc_RNA (1)...(19): siRNA sense strand
gguggaagaggaagaugaa

SEQ ID NO: 1869259 - RNA, 19 nt, Homo sapiens
  misc_RNA (1)...(19): siRNA sense strand
gaaggagaaguaugagaag

SEQ ID NO: 1869260 - RNA, 19 nt, Homo sapiens
  misc_RNA (1)...(19): siRNA sense strand
gaagacgguguccgggaaa

SEQ ID NO: 1869261 - RNA, 19 nt, Homo sapiens
  misc_RNA (1)...(19): siRNA sense strand
gaucgggaaaugaaggauu

SEQ ID NO: 1869262 - RNA, 19 nt, Homo sapiens
  misc_RNA (1)...(19): siRNA sense strand
gcaagacguccgcuuaugc

SEQ ID NO: 1869263 - RNA, 19 nt, Homo sapiens
  misc_RNA (1)...(19): siRNA sense strand
aucgggaaaugaaggauua

SEQ ID NO: 1869264 - RNA, 19 nt, Homo sapiens
  misc_RNA (1)...(19): siRNA sense strand
gggcaagacguccgcuuau

SEQ ID NO: 1869265 - RNA, 19 nt, Homo sapiens
  misc_RNA (1)...(19): siRNA sense strand
gauucuuccuguucuguuc

SEQ ID NO: 1869266 - RNA, 19 nt, Homo sapiens
  misc_RNA (1)...(19): siRNA sense strand
gaggcaagaagaagaagga

SEQ ID NO: 1869267 - RNA, 19 nt, Homo sapiens
  misc_RNA (1)...(19): siRNA sense strand
cagagaagaacauaagaag

SEQ ID NO: 1869268 - RNA, 19 nt, Homo sapiens
  misc_RNA (1)...(19): siRNA sense strand
aggaggaggaggaugaaua

SEQ ID NO: 1869269 - RNA, 19 nt, Homo sapiens
  misc_RNA (1)...(19): siRNA sense strand
uaagucgaaaggaaaguuu

SEQ ID NO: 1869270 - RNA, 19 nt, Homo sapiens
  misc_RNA (1)...(19): siRNA sense strand
gugagauguggaauaauuu

SEQ ID NO: 1869271 - RNA, 19 nt, Homo sapiens
  misc_RNA (1)...(19): siRNA sense strand
agaggucccugucaauuuu

SEQ ID NO: 1869272 - RNA, 19 nt, Homo sapiens
  misc_RNA (1)...(19): siRNA sense strand
gggaaaugaaggauuaugg

SEQ ID NO: 1869273 - RNA, 19 nt, Homo sapiens
  misc_RNA (1)...(19): siRNA sense strand
aagcagccuuacaucacua

SEQ ID NO: 1869274 - RNA, 19 nt, Homo sapiens
  misc_RNA (1)...(19): siRNA sense strand
uggcaaaggcagauaaagu

SEQ ID NO: 1869275 - RNA, 19 nt, Homo sapiens
  misc_RNA (1)...(19): siRNA sense strand
agaaguaugagaaggaugu

SEQ ID NO: 1869276 - RNA, 19 nt, Homo sapiens
  misc_RNA (1)...(19): siRNA sense strand
aaagcagccuuacaucacu

SEQ ID NO: 1869277 - RNA, 19 nt, Homo sapiens
  misc_RNA (1)...(19): siRNA sense strand
gccaccgucuggauucuuc

SEQ ID NO: 1869278 - RNA, 19 nt, Homo sapiens
  misc_RNA (1)...(19): siRNA sense strand
agaagaaggauccuaaugc

SEQ ID NO: 1869279 - RNA, 19 nt, Homo sapiens
  misc_RNA (1)...(19): siRNA sense strand
ucacuaaggcggcaaagcu

SEQ ID NO: 1869280 - RNA, 19 nt, Homo sapiens
  misc_RNA (1)...(19): siRNA sense strand
aagaagaaggauccuaaug

SEQ ID NO: 1869281 - RNA, 19 nt, Homo sapiens
  misc_RNA (1)...(19): siRNA sense strand
acuauaagucgaaaggaaa

SEQ ID NO: 1869282 - RNA, 19 nt, Homo sapiens
  misc_RNA (1)...(19): siRNA sense strand
cuaagggaggcaagaagaa

SEQ ID NO: 1869283 - RNA, 19 nt, Homo sapiens
  misc_RNA (1)...(19): siRNA sense strand
ggaggaggaggaggaugaa

SEQ ID NO: 1869284 - RNA, 19 nt, Homo sapiens
  misc_RNA (1)...(19): siRNA sense strand
gggaaagagaaauccaaau

SEQ ID NO: 1869285 - RNA, 19 nt, Homo sapiens
  misc_RNA (1)...(19): siRNA sense strand
caagaucaaauccacaaac

SEQ ID NO: 1869286 - RNA, 19 nt, Homo sapiens
  misc_RNA (1)...(19): siRNA sense strand
aaauggcaaaggcagauaa

SEQ ID NO: 1869287 - RNA, 19 nt, Homo sapiens
  misc_RNA (1)...(19): siRNA sense strand
ccgcuuaugccuucuuugu

SEQ ID NO: 1869288 - RNA, 19 nt, Homo sapiens
  misc_RNA (1)...(19): siRNA sense strand
cgggaaagagaaauccaaa

SEQ ID NO: 1869289 - RNA, 19 nt, Homo sapiens
  misc_RNA (1)...(19): siRNA sense strand
uggaagaggaagaugaaga

SEQ ID NO: 1869290 - RNA, 19 nt, Homo sapiens
  misc_RNA (1)...(19): siRNA sense strand
agagaagaacauaagaaga

SEQ ID NO: 1869291 - RNA, 19 nt, Homo sapiens
  misc_RNA (1)...(19): siRNA sense strand
guccgcuuaugccuucuuu

SEQ ID NO: 1869292 - RNA, 19 nt, Homo sapiens
  misc_RNA (1)...(19): siRNA sense strand
gaacaggaggaggaagaag

SEQ ID NO: 1869293 - RNA, 19 nt, Homo sapiens
  misc_RNA (1)...(19): siRNA sense strand
aagaacaggaggaggaaga

SEQ ID NO: 1869294 - RNA, 19 nt, Homo sapiens
  misc_RNA (1)...(19): siRNA sense strand
acccagaggucccugucaa

SEQ ID NO: 1869295 - RNA, 19 nt, Homo sapiens
  misc_RNA (1)...(19): siRNA sense strand
ggauccuaaugcucccaaa

SEQ ID NO: 1869296 - RNA, 19 nt, Homo sapiens
  misc_RNA (1)...(19): siRNA sense strand
ugcuaaaguugcccggaaa

SEQ ID NO: 1869297 - RNA, 19 nt, Homo sapiens
  misc_RNA (1)...(19): siRNA sense strand
gaaguaugagaaggauguu

SEQ ID NO: 1869298 - RNA, 19 nt, Homo sapiens
  misc_RNA (1)...(19): siRNA sense strand
cgucuggauucuuccuguu

SEQ ID NO: 1869299 - RNA, 19 nt, Homo sapiens
  misc_RNA (1)...(19): siRNA sense strand
aaaggccaccgucuggauu

SEQ ID NO: 1869300 - RNA, 19 nt, Homo sapiens
  misc_RNA (1)...(19): siRNA sense strand
aggauguugcugacuauaa

SEQ ID NO: 1869301 - RNA, 19 nt, Homo sapiens
  misc_RNA (1)...(19): siRNA sense strand
ggaagcagguggucauuga

SEQ ID NO: 1869302 - RNA, 19 nt, Homo sapiens
  misc_RNA (1)...(19): siRNA sense strand
ucaacaacaccaagucuuu

SEQ ID NO: 1869303 - RNA, 19 nt, Homo sapiens
  misc_RNA (1)...(19): siRNA sense strand
ccauccagcugauccagaa

SEQ ID NO: 1869304 - RNA, 19 nt, Homo sapiens
  misc_RNA (1)...(19): siRNA sense strand
gaacccuccugaugagagu

SEQ ID NO: 1869305 - RNA, 19 nt, Homo sapiens
  misc_RNA (1)...(19): siRNA sense strand
guacagggagcagaucaaa

SEQ ID NO: 1869306 - RNA, 19 nt, Homo sapiens
  misc_RNA (1)...(19): siRNA sense strand
uugaggacauccaccagua

SEQ ID NO: 1869307 - RNA, 19 nt, Homo sapiens
  misc_RNA (1)...(19): siRNA sense strand
gcugaacccuccugaugag

SEQ ID NO: 1869308 - RNA, 19 nt, Homo sapiens
  misc_RNA (1)...(19): siRNA sense strand
agacgugccuguuggacau

SEQ ID NO: 1869309 - RNA, 19 nt, Homo sapiens
  misc_RNA (1)...(19): siRNA sense strand
gaguggaggaugccuucua

SEQ ID NO: 1869310 - RNA, 19 nt, Homo sapiens
  misc_RNA (1)...(19): siRNA sense strand
gggagggcuuccugugugu

SEQ ID NO: 1869311 - RNA, 19 nt, Homo sapiens
  misc_RNA (1)...(19): siRNA sense strand
aagcugaacccuccugaug

SEQ ID NO: 1869312 - RNA, 19 nt, Homo sapiens
  misc_RNA (1)...(19): siRNA sense strand
gcaagagugcgcugaccau

SEQ ID NO: 1869313 - RNA, 19 nt, Homo sapiens
  misc_RNA (1)...(19): siRNA sense strand
gggugaaggacucggauga

SEQ ID NO: 1869314 - RNA, 19 nt, Homo sapiens
  misc_RNA (1)...(19): siRNA sense strand
gggcuuccuguguguguuu

SEQ ID NO: 1869315 - RNA, 19 nt, Homo sapiens
  misc_RNA (1)...(19): siRNA sense strand
agagugcgcugaccaucca

SEQ ID NO: 1869316 - RNA, 19 nt, Homo sapiens
  misc_RNA (1)...(19): siRNA sense strand
cgaauacgaccccacuaua

SEQ ID NO: 1869317 - RNA, 19 nt, Homo sapiens
  misc_RNA (1)...(19): siRNA sense strand
gaggacauccaccaguaca

SEQ ID NO: 1869318 - RNA, 19 nt, Homo sapiens
  misc_RNA (1)...(19): siRNA sense strand
gaauacgaccccacuauag

SEQ ID NO: 1869319 - RNA, 19 nt, Homo sapiens
  misc_RNA (1)...(19): siRNA sense strand
gaagcagguggucauugau

SEQ ID NO: 1869320 - RNA, 19 nt, Homo sapiens
  misc_RNA (1)...(19): siRNA sense strand
caacaacaccaagucuuuu

SEQ ID NO: 1869321 - RNA, 19 nt, Homo sapiens
  misc_RNA (1)...(19): siRNA sense strand
gaagcugaacccuccugau

SEQ ID NO: 1869322 - RNA, 19 nt, Homo sapiens
  misc_RNA (1)...(19): siRNA sense strand
cggaugacgugcccauggu

SEQ ID NO: 1869323 - RNA, 19 nt, Homo sapiens
  misc_RNA (1)...(19): siRNA sense strand
ggaagcagguggucauuga

SEQ ID NO: 1869324 - RNA, 19 nt, Homo sapiens
  misc_RNA (1)...(19): siRNA sense strand
ucaacaacaccaagucuuu

SEQ ID NO: 1869325 - RNA, 19 nt, Homo sapiens
  misc_RNA (1)...(19): siRNA sense strand
ccauccagcugauccagaa

SEQ ID NO: 1869326 - RNA, 19 nt, Homo sapiens
  misc_RNA (1)...(19): siRNA sense strand
guacagggagcagaucaaa

SEQ ID NO: 1869327 - RNA, 19 nt, Homo sapiens
  misc_RNA (1)...(19): siRNA sense strand
uugaggacauccaccagua

SEQ ID NO: 1869328 - RNA, 19 nt, Homo sapiens
  misc_RNA (1)...(19): siRNA sense strand
agacgugccuguuggacau

SEQ ID NO: 1869329 - RNA, 19 nt, Homo sapiens
  misc_RNA (1)...(19): siRNA sense strand
gggagggcuuccugugugu

SEQ ID NO: 1869330 - RNA, 19 nt, Homo sapiens
  misc_RNA (1)...(19): siRNA sense strand
gcaagagugcgcugaccau

SEQ ID NO: 1869331 - RNA, 19 nt, Homo sapiens
  misc_RNA (1)...(19): siRNA sense strand
gggugaaggacucggauga

SEQ ID NO: 1869332 - RNA, 19 nt, Homo sapiens
  misc_RNA (1)...(19): siRNA sense strand
gggcuuccuguguguguuu

SEQ ID NO: 1869333 - RNA, 19 nt, Homo sapiens
  misc_RNA (1)...(19): siRNA sense strand
agagugcgcugaccaucca

SEQ ID NO: 1869334 - RNA, 19 nt, Homo sapiens
  misc_RNA (1)...(19): siRNA sense strand
cgaauacgaccccacuaua

SEQ ID NO: 1869335 - RNA, 19 nt, Homo sapiens
  misc_RNA (1)...(19): siRNA sense strand
gaggacauccaccaguaca

SEQ ID NO: 1869336 - RNA, 19 nt, Homo sapiens
  misc_RNA (1)...(19): siRNA sense strand
gaauacgaccccacuauag

SEQ ID NO: 1869337 - RNA, 19 nt, Homo sapiens
  misc_RNA (1)...(19): siRNA sense strand
gaagcagguggucauugau

SEQ ID NO: 1869338 - RNA, 19 nt, Homo sapiens
  misc_RNA (1)...(19): siRNA sense strand
caacaacaccaagucuuuu

SEQ ID NO: 1869339 - RNA, 19 nt, Homo sapiens
  misc_RNA (1)...(19): siRNA sense strand
cggaugacgugcccauggu

SEQ ID NO: 1869340 - RNA, 19 nt, Homo sapiens
  misc_RNA (1)...(19): siRNA sense strand
ggacaccgaugaacucuuc

SEQ ID NO: 1869341 - RNA, 19 nt, Homo sapiens
  misc_RNA (1)...(19): siRNA sense strand
ggacggcgcugcuaucagu

SEQ ID NO: 1869342 - RNA, 19 nt, Homo sapiens
  misc_RNA (1)...(19): siRNA sense strand
gaagauguuccacaccuua

SEQ ID NO: 1869343 - RNA, 19 nt, Homo sapiens
  misc_RNA (1)...(19): siRNA sense strand
gcucaaggcugggcugaaa

SEQ ID NO: 1869344 - RNA, 19 nt, Homo sapiens
  misc_RNA (1)...(19): siRNA sense strand
gagacaagcuagcuaaugg

SEQ ID NO: 1869345 - RNA, 19 nt, Homo sapiens
  misc_RNA (1)...(19): siRNA sense strand
gcgaggaaguaaagaguga

SEQ ID NO: 1869346 - RNA, 19 nt, Homo sapiens
  misc_RNA (1)...(19): siRNA sense strand
ggaaggaguaccuggagua

SEQ ID NO: 1869347 - RNA, 19 nt, Homo sapiens
  misc_RNA (1)...(19): siRNA sense strand
gaagaacaaugacuuuagc

SEQ ID NO: 1869348 - RNA, 19 nt, Homo sapiens
  misc_RNA (1)...(19): siRNA sense strand
gcagaagaacaaugacuuu

SEQ ID NO: 1869349 - RNA, 19 nt, Homo sapiens
  misc_RNA (1)...(19): siRNA sense strand
caccacagcucaggcauuu

SEQ ID NO: 1869350 - RNA, 19 nt, Homo sapiens
  misc_RNA (1)...(19): siRNA sense strand
gaaccgcaaucagcuguga

SEQ ID NO: 1869351 - RNA, 19 nt, Homo sapiens
  misc_RNA (1)...(19): siRNA sense strand
ggacagaacauugggaaga

SEQ ID NO: 1869352 - RNA, 19 nt, Homo sapiens
  misc_RNA (1)...(19): siRNA sense strand
ugugggagcuggaaaguga

SEQ ID NO: 1869353 - RNA, 19 nt, Homo sapiens
  misc_RNA (1)...(19): siRNA sense strand
ggagagugcccaagggaaa

SEQ ID NO: 1869354 - RNA, 19 nt, Homo sapiens
  misc_RNA (1)...(19): siRNA sense strand
ggaaagugagccagauuug

SEQ ID NO: 1869355 - RNA, 19 nt, Homo sapiens
  misc_RNA (1)...(19): siRNA sense strand
gaggagagcauguucuuca

SEQ ID NO: 1869356 - RNA, 19 nt, Homo sapiens
  misc_RNA (1)...(19): siRNA sense strand
gcaaucaugcugcuuaaca

SEQ ID NO: 1869357 - RNA, 19 nt, Homo sapiens
  misc_RNA (1)...(19): siRNA sense strand
gagcugccaggaauucaua

SEQ ID NO: 1869358 - RNA, 19 nt, Homo sapiens
  misc_RNA (1)...(19): siRNA sense strand
cagaagaacaaugacuuua

SEQ ID NO: 1869359 - RNA, 19 nt, Homo sapiens
  misc_RNA (1)...(19): siRNA sense strand
gagggaugguucucuacuu

SEQ ID NO: 1869360 - RNA, 19 nt, Homo sapiens
  misc_RNA (1)...(19): siRNA sense strand
uggaaauucucaaccugua

SEQ ID NO: 1869361 - RNA, 19 nt, Homo sapiens
  misc_RNA (1)...(19): siRNA sense strand
gugcaaucaugcugcuuaa

SEQ ID NO: 1869362 - RNA, 19 nt, Homo sapiens
  misc_RNA (1)...(19): siRNA sense strand
ggaaguaaagagugaagga

SEQ ID NO: 1869363 - RNA, 19 nt, Homo sapiens
  misc_RNA (1)...(19): siRNA sense strand
ccacagugcccaccuacaa

SEQ ID NO: 1869364 - RNA, 19 nt, Homo sapiens
  misc_RNA (1)...(19): siRNA sense strand
aagcguggcuggaagaugu

SEQ ID NO: 1869365 - RNA, 19 nt, Homo sapiens
  misc_RNA (1)...(19): siRNA sense strand
gagcacguccacacaggua

SEQ ID NO: 1869366 - RNA, 19 nt, Homo sapiens
  misc_RNA (1)...(19): siRNA sense strand
gaaguaaagagugaaggaa

SEQ ID NO: 1869367 - RNA, 19 nt, Homo sapiens
  misc_RNA (1)...(19): siRNA sense strand
ccacugacccuccugaauc

SEQ ID NO: 1869368 - RNA, 19 nt, Homo sapiens
  misc_RNA (1)...(19): siRNA sense strand
gaaccuaccggaagaucau

SEQ ID NO: 1869369 - RNA, 19 nt, Homo sapiens
  misc_RNA (1)...(19): siRNA sense strand
gcagggagaagaccacugu

SEQ ID NO: 1869370 - RNA, 19 nt, Homo sapiens
  misc_RNA (1)...(19): siRNA sense strand
gagcaugagcugccaggaa

SEQ ID NO: 1869371 - RNA, 19 nt, Homo sapiens
  misc_RNA (1)...(19): siRNA sense strand
ggagacaagcuagcuaaug

SEQ ID NO: 1869372 - RNA, 19 nt, Homo sapiens
  misc_RNA (1)...(19): siRNA sense strand
gagccuagcagcccagaau

SEQ ID NO: 1869373 - RNA, 19 nt, Homo sapiens
  misc_RNA (1)...(19): siRNA sense strand
acaacaagguagccuggaa

SEQ ID NO: 1869374 - RNA, 19 nt, Homo sapiens
  misc_RNA (1)...(19): siRNA sense strand
gcuaauggcgucaggaaca

SEQ ID NO: 1869375 - RNA, 19 nt, Homo sapiens
  misc_RNA (1)...(19): siRNA sense strand
gaaccuaccagacaaaaug

SEQ ID NO: 1869376 - RNA, 19 nt, Homo sapiens
  misc_RNA (1)...(19): siRNA sense strand
gccaggaauucauaaccaa

SEQ ID NO: 1869377 - RNA, 19 nt, Homo sapiens
  misc_RNA (1)...(19): siRNA sense strand
gcgaguccuugcucagaga

SEQ ID NO: 1869378 - RNA, 19 nt, Homo sapiens
  misc_RNA (1)...(19): siRNA sense strand
uccagacgcuuccaccauu

SEQ ID NO: 1869379 - RNA, 19 nt, Homo sapiens
  misc_RNA (1)...(19): siRNA sense strand
ggaccugcauggacagaac

SEQ ID NO: 1869380 - RNA, 19 nt, Homo sapiens
  misc_RNA (1)...(19): siRNA sense strand
ccagacgcuuccaccauug

SEQ ID NO: 1869381 - RNA, 19 nt, Homo sapiens
  misc_RNA (1)...(19): siRNA sense strand
caggaugugucggaucuga

SEQ ID NO: 1869382 - RNA, 19 nt, Homo sapiens
  misc_RNA (1)...(19): siRNA sense strand
gacagaacauugggaagag

SEQ ID NO: 1869383 - RNA, 19 nt, Homo sapiens
  misc_RNA (1)...(19): siRNA sense strand
ccagauguguguccuagac

SEQ ID NO: 1869384 - RNA, 19 nt, Homo sapiens
  misc_RNA (1)...(19): siRNA sense strand
ggaggagcccagcuucuuc

SEQ ID NO: 1869385 - RNA, 19 nt, Homo sapiens
  misc_RNA (1)...(19): siRNA sense strand
gcuaucagugggcauugua

SEQ ID NO: 1869386 - RNA, 19 nt, Homo sapiens
  misc_RNA (1)...(19): siRNA sense strand
gaaagugagccagauuugg

SEQ ID NO: 1869387 - RNA, 19 nt, Homo sapiens
  misc_RNA (1)...(19): siRNA sense strand
cgcagaaccuaccggaaga

SEQ ID NO: 1869388 - RNA, 19 nt, Homo sapiens
  misc_RNA (1)...(19): siRNA sense strand
accggaagaucaucccuaa

SEQ ID NO: 1869389 - RNA, 19 nt, Homo sapiens
  misc_RNA (1)...(19): siRNA sense strand
gcauugaccugggaaucag

SEQ ID NO: 1869390 - RNA, 19 nt, Homo sapiens
  misc_RNA (1)...(19): siRNA sense strand
gggcuguggcugaggagua

SEQ ID NO: 1869391 - RNA, 19 nt, Homo sapiens
  misc_RNA (1)...(19): siRNA sense strand
aggaggagcuggagaagac

SEQ ID NO: 1869392 - RNA, 19 nt, Homo sapiens
  misc_RNA (1)...(19): siRNA sense strand
agcaugagcugccaggaau

SEQ ID NO: 1869393 - RNA, 19 nt, Homo sapiens
  misc_RNA (1)...(19): siRNA sense strand
gaaauucucaaccuguacu

SEQ ID NO: 1869394 - RNA, 19 nt, Homo sapiens
  misc_RNA (1)...(19): siRNA sense strand
aaucugaggacaccgauga

SEQ ID NO: 1869395 - RNA, 19 nt, Homo sapiens
  misc_RNA (1)...(19): siRNA sense strand
aguaaagagugaaggaaca

SEQ ID NO: 1869396 - RNA, 19 nt, Homo sapiens
  misc_RNA (1)...(19): siRNA sense strand
gagcaagcccuuccuucag

SEQ ID NO: 1869397 - RNA, 19 nt, Homo sapiens
  misc_RNA (1)...(19): siRNA sense strand
ugagcaagcccuuccuuca

SEQ ID NO: 1869398 - RNA, 19 nt, Homo sapiens
  misc_RNA (1)...(19): siRNA sense strand
cuaauggcgucaggaacaa

SEQ ID NO: 1869399 - RNA, 19 nt, Homo sapiens
  misc_RNA (1)...(19): siRNA sense strand
gaugggugacuacagauuc

SEQ ID NO: 1869400 - RNA, 19 nt, Homo sapiens
  misc_RNA (1)...(19): siRNA sense strand
cagcccaccugagaaugaa

SEQ ID NO: 1869401 - RNA, 19 nt, Homo sapiens
  misc_RNA (1)...(19): siRNA sense strand
gcgaauccucuaccaguuc

SEQ ID NO: 1869402 - RNA, 19 nt, Homo sapiens
  misc_RNA (1)...(19): siRNA sense strand
agaagaacaaugacuuuag

SEQ ID NO: 1869403 - RNA, 19 nt, Homo sapiens
  misc_RNA (1)...(19): siRNA sense strand
ucccugugcccaucuauaa

SEQ ID NO: 1869404 - RNA, 19 nt, Homo sapiens
  misc_RNA (1)...(19): siRNA sense strand
gagcugaggaggagagcau

SEQ ID NO: 1869405 - RNA, 19 nt, Homo sapiens
  misc_RNA (1)...(19): siRNA sense strand
ucucagagcgcagaaccua

SEQ ID NO: 1869406 - RNA, 19 nt, Homo sapiens
  misc_RNA (1)...(19): siRNA sense strand
ggccguggaugaagaagac

SEQ ID NO: 1869407 - RNA, 19 nt, Homo sapiens
  misc_RNA (1)...(19): siRNA sense strand
gacauucaccugacuucug

SEQ ID NO: 1869408 - RNA, 19 nt, Homo sapiens
  misc_RNA (1)...(19): siRNA sense strand
ccagugaacagccaucuac

SEQ ID NO: 1869409 - RNA, 19 nt, Homo sapiens
  misc_RNA (1)...(19): siRNA sense strand
cggacgaccugcuggaucu

SEQ ID NO: 1869410 - RNA, 19 nt, Homo sapiens
  misc_RNA (1)...(19): siRNA sense strand
uagauucuguacacaccuu

SEQ ID NO: 1869411 - RNA, 19 nt, Homo sapiens
  misc_RNA (1)...(19): siRNA sense strand
cgaauccucuaccaguucu

SEQ ID NO: 1869412 - RNA, 19 nt, Homo sapiens
  misc_RNA (1)...(19): siRNA sense strand
cgucaggaacaacaaggua

SEQ ID NO: 1869413 - RNA, 19 nt, Homo sapiens
  misc_RNA (1)...(19): siRNA sense strand
ccagcccaccugagaauga

SEQ ID NO: 1869414 - RNA, 19 nt, Homo sapiens
  misc_RNA (1)...(19): siRNA sense strand
uggaaagugagccagauuu

SEQ ID NO: 1869415 - RNA, 19 nt, Homo sapiens
  misc_RNA (1)...(19): siRNA sense strand
ugugcaaucaugcugcuua

SEQ ID NO: 1869416 - RNA, 19 nt, Homo sapiens
  misc_RNA (1)...(19): siRNA sense strand
ggagacguccagccugaca

SEQ ID NO: 1869417 - RNA, 19 nt, Homo sapiens
  misc_RNA (1)...(19): siRNA sense strand
ccacgcauuacaccaagaa

SEQ ID NO: 1869418 - RNA, 19 nt, Homo sapiens
  misc_RNA (1)...(19): siRNA sense strand
cgagugggccguggaugaa

SEQ ID NO: 1869419 - RNA, 19 nt, Homo sapiens
  misc_RNA (1)...(19): siRNA sense strand
ucaaggcugggcugaaaug

SEQ ID NO: 1869420 - RNA, 19 nt, Homo sapiens
  misc_RNA (1)...(19): siRNA sense strand
agggaugguucucuacuuc

SEQ ID NO: 1869421 - RNA, 19 nt, Homo sapiens
  misc_RNA (1)...(19): siRNA sense strand
gaugcagacggcaagaaga

SEQ ID NO: 1869422 - RNA, 19 nt, Homo sapiens
  misc_RNA (1)...(19): siRNA sense strand
cugcagaacaugagaaucu

SEQ ID NO: 1869423 - RNA, 19 nt, Homo sapiens
  misc_RNA (1)...(19): siRNA sense strand
cuagaugcuucacagucuu

SEQ ID NO: 1869424 - RNA, 19 nt, Homo sapiens
  misc_RNA (1)...(19): siRNA sense strand
ccauggaaauucucaaccu

SEQ ID NO: 1869425 - RNA, 19 nt, Homo sapiens
  misc_RNA (1)...(19): siRNA sense strand
acuagaugcuucacagucu

SEQ ID NO: 1869426 - RNA, 19 nt, Homo sapiens
  misc_RNA (1)...(19): siRNA sense strand
ugcgagggaugguucucua

SEQ ID NO: 1869427 - RNA, 19 nt, Homo sapiens
  misc_RNA (1)...(19): siRNA sense strand
gaugagcaagcccuuccuu

SEQ ID NO: 1869428 - RNA, 19 nt, Homo sapiens
  misc_RNA (1)...(19): siRNA sense strand
ggaguaccuguccuucuuc

SEQ ID NO: 1869429 - RNA, 19 nt, Homo sapiens
  misc_RNA (1)...(19): siRNA sense strand
aaaccaggcgaggaaguaa

SEQ ID NO: 1869430 - RNA, 19 nt, Homo sapiens
  misc_RNA (1)...(19): siRNA sense strand
gaggaggagcuggagaaga

SEQ ID NO: 1869431 - RNA, 19 nt, Homo sapiens
  misc_RNA (1)...(19): siRNA sense strand
caaucaugcugcuuaacac

SEQ ID NO: 1869432 - RNA, 19 nt, Homo sapiens
  misc_RNA (1)...(19): siRNA sense strand
uagcuaauggcgucaggaa

SEQ ID NO: 1869433 - RNA, 19 nt, Homo sapiens
  misc_RNA (1)...(19): siRNA sense strand
ggaaauucucaaccuguac

SEQ ID NO: 1869434 - RNA, 19 nt, Homo sapiens
  misc_RNA (1)...(19): siRNA sense strand
gcaucgaucccacgagaac

SEQ ID NO: 1869435 - RNA, 19 nt, Homo sapiens
  misc_RNA (1)...(19): siRNA sense strand
gggaaacgugcagccauga

SEQ ID NO: 1869436 - RNA, 19 nt, Homo sapiens
  misc_RNA (1)...(19): siRNA sense strand
cugcauggacagaacauug

SEQ ID NO: 1869437 - RNA, 19 nt, Homo sapiens
  misc_RNA (1)...(19): siRNA sense strand
uaacacggaccugcaugga

SEQ ID NO: 1869438 - RNA, 19 nt, Homo sapiens
  misc_RNA (1)...(19): siRNA sense strand
gggagcgaauccucuacca

SEQ ID NO: 1869439 - RNA, 19 nt, Homo sapiens
  misc_RNA (1)...(19): siRNA sense strand
gaacucuucuuggcuuccu

SEQ ID NO: 1869440 - RNA, 19 nt, Homo sapiens
  misc_RNA (1)...(19): siRNA sense strand
ggaaagagcugcauauuaa

SEQ ID NO: 1869441 - RNA, 19 nt, Homo sapiens
  misc_RNA (1)...(19): siRNA sense strand
gcagauaucucuaugauug

SEQ ID NO: 1869442 - RNA, 19 nt, Homo sapiens
  misc_RNA (1)...(19): siRNA sense strand
gaagugaucuauaugauug

SEQ ID NO: 1869443 - RNA, 19 nt, Homo sapiens
  misc_RNA (1)...(19): siRNA sense strand
gaaggaacgugauaaagaa

SEQ ID NO: 1869444 - RNA, 19 nt, Homo sapiens
  misc_RNA (1)...(19): siRNA sense strand
uaaaggagauugugaagaa

SEQ ID NO: 1869445 - RNA, 19 nt, Homo sapiens
  misc_RNA (1)...(19): siRNA sense strand
uauaagagcuugaccaaug

SEQ ID NO: 1869446 - RNA, 19 nt, Homo sapiens
  misc_RNA (1)...(19): siRNA sense strand
agacaaaccugaaauugaa

SEQ ID NO: 1869447 - RNA, 19 nt, Homo sapiens
  misc_RNA (1)...(19): siRNA sense strand
aaacauggcuuagaaguga

SEQ ID NO: 1869448 - RNA, 19 nt, Homo sapiens
  misc_RNA (1)...(19): siRNA sense strand
gcuuagaacucuuuacuga

SEQ ID NO: 1869449 - RNA, 19 nt, Homo sapiens
  misc_RNA (1)...(19): siRNA sense strand
gggaaagagcugcauauua

SEQ ID NO: 1869450 - RNA, 19 nt, Homo sapiens
  misc_RNA (1)...(19): siRNA sense strand
uuucagagcuguuaaggua

SEQ ID NO: 1869451 - RNA, 19 nt, Homo sapiens
  misc_RNA (1)...(19): siRNA sense strand
ggaucucccucuaaacaua

SEQ ID NO: 1869452 - RNA, 19 nt, Homo sapiens
  misc_RNA (1)...(19): siRNA sense strand
agaaacaccuggagauaaa

SEQ ID NO: 1869453 - RNA, 19 nt, Homo sapiens
  misc_RNA (1)...(19): siRNA sense strand
gaaagagucggaagacaaa

SEQ ID NO: 1869454 - RNA, 19 nt, Homo sapiens
  misc_RNA (1)...(19): siRNA sense strand
ggaacgugauaaagaagua

SEQ ID NO: 1869455 - RNA, 19 nt, Homo sapiens
  misc_RNA (1)...(19): siRNA sense strand
gaaauucuaugagcaguuc

SEQ ID NO: 1869456 - RNA, 19 nt, Homo sapiens
  misc_RNA (1)...(19): siRNA sense strand
guacaucgaucaagaagag

SEQ ID NO: 1869457 - RNA, 19 nt, Homo sapiens
  misc_RNA (1)...(19): siRNA sense strand
ucaauaaccuugguacuau

SEQ ID NO: 1869458 - RNA, 19 nt, Homo sapiens
  misc_RNA (1)...(19): siRNA sense strand
aaacugcgcuccugucuuc

SEQ ID NO: 1869459 - RNA, 19 nt, Homo sapiens
  misc_RNA (1)...(19): siRNA sense strand
uaaauuagacucugggaaa

SEQ ID NO: 1869460 - RNA, 19 nt, Homo sapiens
  misc_RNA (1)...(19): siRNA sense strand
ugaaagacauauuggagaa

SEQ ID NO: 1869461 - RNA, 19 nt, Homo sapiens
  misc_RNA (1)...(19): siRNA sense strand
gaagacaaaccugaaauug

SEQ ID NO: 1869462 - RNA, 19 nt, Homo sapiens
  misc_RNA (1)...(19): siRNA sense strand
ugaaggaucuggucaucuu

SEQ ID NO: 1869463 - RNA, 19 nt, Homo sapiens
  misc_RNA (1)...(19): siRNA sense strand
aaacauaucccgugagaug

SEQ ID NO: 1869464 - RNA, 19 nt, Homo sapiens
  misc_RNA (1)...(19): siRNA sense strand
ugacagaucccaguaaauu

SEQ ID NO: 1869465 - RNA, 19 nt, Homo sapiens
  misc_RNA (1)...(19): siRNA sense strand
cagcaaacauggagagaau

SEQ ID NO: 1869466 - RNA, 19 nt, Homo sapiens
  misc_RNA (1)...(19): siRNA sense strand
ggauaucccauuacucuuu

SEQ ID NO: 1869467 - RNA, 19 nt, Homo sapiens
  misc_RNA (1)...(19): siRNA sense strand
gaauaaaggagauugugaa

SEQ ID NO: 1869468 - RNA, 19 nt, Homo sapiens
  misc_RNA (1)...(19): siRNA sense strand
gaccaaagcguucauggaa

SEQ ID NO: 1869469 - RNA, 19 nt, Homo sapiens
  misc_RNA (1)...(19): siRNA sense strand
gcaccagaaugaaggagaa

SEQ ID NO: 1869470 - RNA, 19 nt, Homo sapiens
  misc_RNA (1)...(19): siRNA sense strand
uaacucagccuuuguggaa

SEQ ID NO: 1869471 - RNA, 19 nt, Homo sapiens
  misc_RNA (1)...(19): siRNA sense strand
gaacaaaaguuauccuaca

SEQ ID NO: 1869472 - RNA, 19 nt, Homo sapiens
  misc_RNA (1)...(19): siRNA sense strand
gcuaaucccugaauaucug

SEQ ID NO: 1869473 - RNA, 19 nt, Homo sapiens
  misc_RNA (1)...(19): siRNA sense strand
ccagaaaucccgacgauau

SEQ ID NO: 1869474 - RNA, 19 nt, Homo sapiens
  misc_RNA (1)...(19): siRNA sense strand
gaaauugcccaguugaugu

SEQ ID NO: 1869475 - RNA, 19 nt, Homo sapiens
  misc_RNA (1)...(19): siRNA sense strand
ggaagacaaaccugaaauu

SEQ ID NO: 1869476 - RNA, 19 nt, Homo sapiens
  misc_RNA (1)...(19): siRNA sense strand
ggagaaggaacgugauaaa

SEQ ID NO: 1869477 - RNA, 19 nt, Homo sapiens
  misc_RNA (1)...(19): siRNA sense strand
uuacugaacuggcggaaga

SEQ ID NO: 1869478 - RNA, 19 nt, Homo sapiens
  misc_RNA (1)...(19): siRNA sense strand
ugaaggagaugacgacaca

SEQ ID NO: 1869479 - RNA, 19 nt, Homo sapiens
  misc_RNA (1)...(19): siRNA sense strand
gaucgaacucucacuauug

SEQ ID NO: 1869480 - RNA, 19 nt, Homo sapiens
  misc_RNA (1)...(19): siRNA sense strand
ucagagcccuucuauuugu

SEQ ID NO: 1869481 - RNA, 19 nt, Homo sapiens
  misc_RNA (1)...(19): siRNA sense strand
uaacugugaucaccaaaca

SEQ ID NO: 1869482 - RNA, 19 nt, Homo sapiens
  misc_RNA (1)...(19): siRNA sense strand
uccaacagcugaaggaauu

SEQ ID NO: 1869483 - RNA, 19 nt, Homo sapiens
  misc_RNA (1)...(19): siRNA sense strand
auucagagcccuucuauuu

SEQ ID NO: 1869484 - RNA, 19 nt, Homo sapiens
  misc_RNA (1)...(19): siRNA sense strand
gaaggacaguuggaauuca

SEQ ID NO: 1869485 - RNA, 19 nt, Homo sapiens
  misc_RNA (1)...(19): siRNA sense strand
gaaggauggugacaagaag

SEQ ID NO: 1869486 - RNA, 19 nt, Homo sapiens
  misc_RNA (1)...(19): siRNA sense strand
gaucaucaauacuuucuac

SEQ ID NO: 1869487 - RNA, 19 nt, Homo sapiens
  misc_RNA (1)...(19): siRNA sense strand
gacagaucccaguaaauua

SEQ ID NO: 1869488 - RNA, 19 nt, Homo sapiens
  misc_RNA (1)...(19): siRNA sense strand
cuaaacauaucccgugaga

SEQ ID NO: 1869489 - RNA, 19 nt, Homo sapiens
  misc_RNA (1)...(19): siRNA sense strand
gaacaaacaagaucgaacu

SEQ ID NO: 1869490 - RNA, 19 nt, Homo sapiens
  misc_RNA (1)...(19): siRNA sense strand
gaaugaaggagaaccagaa

SEQ ID NO: 1869491 - RNA, 19 nt, Homo sapiens
  misc_RNA (1)...(19): siRNA sense strand
gaccagaaaucccgacgau

SEQ ID NO: 1869492 - RNA, 19 nt, Homo sapiens
  misc_RNA (1)...(19): siRNA sense strand
ggaagacaaagaagaagaa

SEQ ID NO: 1869493 - RNA, 19 nt, Homo sapiens
  misc_RNA (1)...(19): siRNA sense strand
gugcagauaucucuaugau

SEQ ID NO: 1869494 - RNA, 19 nt, Homo sapiens
  misc_RNA (1)...(19): siRNA sense strand
ucaagaagagcucaacaaa

SEQ ID NO: 1869495 - RNA, 19 nt, Homo sapiens
  misc_RNA (1)...(19): siRNA sense strand
gaucuggucaucuugcuuu

SEQ ID NO: 1869496 - RNA, 19 nt, Homo sapiens
  misc_RNA (1)...(19): siRNA sense strand
gauaaacccugaccauucc

SEQ ID NO: 1869497 - RNA, 19 nt, Homo sapiens
  misc_RNA (1)...(19): siRNA sense strand
agagacaacucaacaaugg

SEQ ID NO: 1869498 - RNA, 19 nt, Homo sapiens
  misc_RNA (1)...(19): siRNA sense strand
ccaaggaccagguagcuaa

SEQ ID NO: 1869499 - RNA, 19 nt, Homo sapiens
  misc_RNA (1)...(19): siRNA sense strand
ugaaagaagaccaaacuga

SEQ ID NO: 1869500 - RNA, 19 nt, Homo sapiens
  misc_RNA (1)...(19): siRNA sense strand
ugauugagcccauugauga

SEQ ID NO: 1869501 - RNA, 19 nt, Homo sapiens
  misc_RNA (1)...(19): siRNA sense strand
gaaccagaaacauaucuau

SEQ ID NO: 1869502 - RNA, 19 nt, Homo sapiens
  misc_RNA (1)...(19): siRNA sense strand
ucuaugagcaguucucuaa

SEQ ID NO: 1869503 - RNA, 19 nt, Homo sapiens
  misc_RNA (1)...(19): siRNA sense strand
aaagaaggauggugacaag

SEQ ID NO: 1869504 - RNA, 19 nt, Homo sapiens
  misc_RNA (1)...(19): siRNA sense strand
caagaucgaacucucacua

SEQ ID NO: 1869505 - RNA, 19 nt, Homo sapiens
  misc_RNA (1)...(19): siRNA sense strand
gagauaaacccugaccauu

SEQ ID NO: 1869506 - RNA, 19 nt, Homo sapiens
  misc_RNA (1)...(19): siRNA sense strand
gaagaagaagauuaaggaa

SEQ ID NO: 1869507 - RNA, 19 nt, Homo sapiens
  misc_RNA (1)...(19): siRNA sense strand
aggcugacuugaucaauaa

SEQ ID NO: 1869508 - RNA, 19 nt, Homo sapiens
  misc_RNA (1)...(19): siRNA sense strand
ggauaacugugaggagcua

SEQ ID NO: 1869509 - RNA, 19 nt, Homo sapiens
  misc_RNA (1)...(19): siRNA sense strand
gguaugaaacuuugacaga

SEQ ID NO: 1869510 - RNA, 19 nt, Homo sapiens
  misc_RNA (1)...(19): siRNA sense strand
cgacaagucugugaaggau

SEQ ID NO: 1869511 - RNA, 19 nt, Homo sapiens
  misc_RNA (1)...(19): siRNA sense strand
aaagaaacaccuggagaua

SEQ ID NO: 1869512 - RNA, 19 nt, Homo sapiens
  misc_RNA (1)...(19): siRNA sense strand
uuacauggcagcaaagaaa

SEQ ID NO: 1869513 - RNA, 19 nt, Homo sapiens
  misc_RNA (1)...(19): siRNA sense strand
ucggaaacauggcuuagaa

SEQ ID NO: 1869514 - RNA, 19 nt, Homo sapiens
  misc_RNA (1)...(19): siRNA sense strand
gaacgucuucggaaacaug

SEQ ID NO: 1869515 - RNA, 19 nt, Homo sapiens
  misc_RNA (1)...(19): siRNA sense strand
ucaauacuuucuacucgaa

SEQ ID NO: 1869516 - RNA, 19 nt, Homo sapiens
  misc_RNA (1)...(19): siRNA sense strand
caaagaaacaccuggagau

SEQ ID NO: 1869517 - RNA, 19 nt, Homo sapiens
  misc_RNA (1)...(19): siRNA sense strand
gcaaacauggagagaauca

SEQ ID NO: 1869518 - RNA, 19 nt, Homo sapiens
  misc_RNA (1)...(19): siRNA sense strand
gaaacauggcuuagaagug

SEQ ID NO: 1869519 - RNA, 19 nt, Homo sapiens
  misc_RNA (1)...(19): siRNA sense strand
ggaguacggagaauucuau

SEQ ID NO: 1869520 - RNA, 19 nt, Homo sapiens
  misc_RNA (1)...(19): siRNA sense strand
acaagaagaagaagaagaa

SEQ ID NO: 1869521 - RNA, 19 nt, Homo sapiens
  misc_RNA (1)...(19): siRNA sense strand
agaaggaacgugauaaaga

SEQ ID NO: 1869522 - RNA, 19 nt, Homo sapiens
  misc_RNA (1)...(19): siRNA sense strand
agaccaaacugaguacuug

SEQ ID NO: 1869523 - RNA, 19 nt, Homo sapiens
  misc_RNA (1)...(19): siRNA sense strand
gaaccuaugggucguggaa

SEQ ID NO: 1869524 - RNA, 19 nt, Homo sapiens
  misc_RNA (1)...(19): siRNA sense strand
ccaaacauaacgaugauga

SEQ ID NO: 1869525 - RNA, 19 nt, Homo sapiens
  misc_RNA (1)...(19): siRNA sense strand
aaggcugacuugaucaaua

SEQ ID NO: 1869526 - RNA, 19 nt, Homo sapiens
  misc_RNA (1)...(19): siRNA sense strand
cauggaagaaguagacuaa

SEQ ID NO: 1869527 - RNA, 19 nt, Homo sapiens
  misc_RNA (1)...(19): siRNA sense strand
caaagaaggccuggaacuu

SEQ ID NO: 1869528 - RNA, 19 nt, Homo sapiens
  misc_RNA (1)...(19): siRNA sense strand
guagcuaacucagccuuug

SEQ ID NO: 1869529 - RNA, 19 nt, Homo sapiens
  misc_RNA (1)...(19): siRNA sense strand
acauaaagcuuggaauaca

SEQ ID NO: 1869530 - RNA, 19 nt, Homo sapiens
  misc_RNA (1)...(19): siRNA sense strand
gaauucagagcccuucuau

SEQ ID NO: 1869531 - RNA, 19 nt, Homo sapiens
  misc_RNA (1)...(19): siRNA sense strand
aaaggaagacaaagaagaa

SEQ ID NO: 1869532 - RNA, 19 nt, Homo sapiens
  misc_RNA (1)...(19): siRNA sense strand
gagcugcauauuaaccuua

SEQ ID NO: 1869533 - RNA, 19 nt, Homo sapiens
  misc_RNA (1)...(19): siRNA sense strand
guaugaaacuuugacagau

SEQ ID NO: 1869534 - RNA, 19 nt, Homo sapiens
  misc_RNA (1)...(19): siRNA sense strand
gagaaccucugcaaaauca

SEQ ID NO: 1869535 - RNA, 19 nt, Homo sapiens
  misc_RNA (1)...(19): siRNA sense strand
aaggagaaccagaaacaua

SEQ ID NO: 1869536 - RNA, 19 nt, Homo sapiens
  misc_RNA (1)...(19): siRNA sense strand
gagaaagagucggaagaca

SEQ ID NO: 1869537 - RNA, 19 nt, Homo sapiens
  misc_RNA (1)...(19): siRNA sense strand
ugaaaguuaucaggaagaa

SEQ ID NO: 1869538 - RNA, 19 nt, Homo sapiens
  misc_RNA (1)...(19): siRNA sense strand
ggagcuaaucccugaauau

SEQ ID NO: 1869539 - RNA, 19 nt, Homo sapiens
  misc_RNA (1)...(19): siRNA sense strand
agaaaucccgacgauauua

SEQ ID NO: 1869540 - RNA, 19 nt, Homo sapiens
  misc_RNA (1)...(19): siRNA sense strand
gcuguuccaugacugauuu

SEQ ID NO: 1869541 - RNA, 19 nt, Homo sapiens
  misc_RNA (1)...(19): siRNA sense strand
gaagagcuuuggaagucaa

SEQ ID NO: 1869542 - RNA, 19 nt, Homo sapiens
  misc_RNA (1)...(19): siRNA sense strand
aaagaagcauucagugaug

SEQ ID NO: 1869543 - RNA, 19 nt, Homo sapiens
  misc_RNA (1)...(19): siRNA sense strand
ggacagucaucuauaucug

SEQ ID NO: 1869544 - RNA, 19 nt, Homo sapiens
  misc_RNA (1)...(19): siRNA sense strand
caaagaagcauucagugau

SEQ ID NO: 1869545 - RNA, 19 nt, Homo sapiens
  misc_RNA (1)...(19): siRNA sense strand
ggacagaugcccacugaag

SEQ ID NO: 1869546 - RNA, 19 nt, Homo sapiens
  misc_RNA (1)...(19): siRNA sense strand
gaauacauacggacaguca

SEQ ID NO: 1869547 - RNA, 19 nt, Homo sapiens
  misc_RNA (1)...(19): siRNA sense strand
ucaaagaagcauucaguga

SEQ ID NO: 1869548 - RNA, 19 nt, Homo sapiens
  misc_RNA (1)...(19): siRNA sense strand
gagcaaggagucugugaga

SEQ ID NO: 1869549 - RNA, 19 nt, Homo sapiens
  misc_RNA (1)...(19): siRNA sense strand
ggaagucaaagaagcauuc

SEQ ID NO: 1869550 - RNA, 19 nt, Homo sapiens
  misc_RNA (1)...(19): siRNA sense strand
cugaagagcuuuggaaguc

SEQ ID NO: 1869551 - RNA, 19 nt, Homo sapiens
  misc_RNA (1)...(19): siRNA sense strand
uuugagugcucuuugcuaa

SEQ ID NO: 1869552 - RNA, 19 nt, Homo sapiens
  misc_RNA (1)...(19): siRNA sense strand
gagacucugugggcuagaa

SEQ ID NO: 1869553 - RNA, 19 nt, Homo sapiens
  misc_RNA (1)...(19): siRNA sense strand
ccuuccagcucccacauaa

SEQ ID NO: 1869554 - RNA, 19 nt, Homo sapiens
  misc_RNA (1)...(19): siRNA sense strand
ccacugaagagcuuuggaa

SEQ ID NO: 1869555 - RNA, 19 nt, Homo sapiens
  misc_RNA (1)...(19): siRNA sense strand
gacagaugcccacugaaga

SEQ ID NO: 1869556 - RNA, 19 nt, Homo sapiens
  misc_RNA (1)...(19): siRNA sense strand
uacggacagucaucuauau

SEQ ID NO: 1869557 - RNA, 19 nt, Homo sapiens
  misc_RNA (1)...(19): siRNA sense strand
gaugcccacugaagagcuu

SEQ ID NO: 1869558 - RNA, 19 nt, Homo sapiens
  misc_RNA (1)...(19): siRNA sense strand
auacggacagucaucuaua

SEQ ID NO: 1869559 - RNA, 19 nt, Homo sapiens
  misc_RNA (1)...(19): siRNA sense strand
gucaagacaagauuuacaa

SEQ ID NO: 1869560 - RNA, 19 nt, Homo sapiens
  misc_RNA (1)...(19): siRNA sense strand
uagaauacauacggacagu

SEQ ID NO: 1869561 - RNA, 19 nt, Homo sapiens
  misc_RNA (1)...(19): siRNA sense strand
ugaagagcuuuggaaguca

SEQ ID NO: 1869562 - RNA, 19 nt, Homo sapiens
  misc_RNA (1)...(19): siRNA sense strand
caagacaagauuuacaaac

SEQ ID NO: 1869563 - RNA, 19 nt, Homo sapiens
  misc_RNA (1)...(19): siRNA sense strand
ucucagaagugcggagcaa

SEQ ID NO: 1869564 - RNA, 19 nt, Homo sapiens
  misc_RNA (1)...(19): siRNA sense strand
ucugugggcuagaauacau

SEQ ID NO: 1869565 - RNA, 19 nt, Homo sapiens
  misc_RNA (1)...(19): siRNA sense strand
uuccaugacugauuugagu

SEQ ID NO: 1869566 - RNA, 19 nt, Homo sapiens
  misc_RNA (1)...(19): siRNA sense strand
cauacggacagucaucuau

SEQ ID NO: 1869567 - RNA, 19 nt, Homo sapiens
  misc_RNA (1)...(19): siRNA sense strand
uguccuauuugccaucuca

SEQ ID NO: 1869568 - RNA, 19 nt, Homo sapiens
  misc_RNA (1)...(19): siRNA sense strand
gaagucaaagaagcauuca

SEQ ID NO: 1869569 - RNA, 19 nt, Homo sapiens
  misc_RNA (1)...(19): siRNA sense strand
ccuauuugccaucucagaa

SEQ ID NO: 1869570 - RNA, 19 nt, Homo sapiens
  misc_RNA (1)...(19): siRNA sense strand
aagaagcauucagugaugu

SEQ ID NO: 1869571 - RNA, 19 nt, Homo sapiens
  misc_RNA (1)...(19): siRNA sense strand
agucaaagaagcauucagu

SEQ ID NO: 1869572 - RNA, 19 nt, Homo sapiens
  misc_RNA (1)...(19): siRNA sense strand
gaagcauucagugauguca

SEQ ID NO: 1869573 - RNA, 19 nt, Homo sapiens
  misc_RNA (1)...(19): siRNA sense strand
gagaagagauacauugugu

SEQ ID NO: 1869574 - RNA, 19 nt, Homo sapiens
  misc_RNA (1)...(19): siRNA sense strand
ggugcuggcuuguuuauuu

SEQ ID NO: 1869575 - RNA, 19 nt, Homo sapiens
  misc_RNA (1)...(19): siRNA sense strand
ggaauuggcugugcuuguu

SEQ ID NO: 1869576 - RNA, 19 nt, Homo sapiens
  misc_RNA (1)...(19): siRNA sense strand
ggaguggccuugcucauug

SEQ ID NO: 1869577 - RNA, 19 nt, Homo sapiens
  misc_RNA (1)...(19): siRNA sense strand
aaacguggcucaagaggaa

SEQ ID NO: 1869578 - RNA, 19 nt, Homo sapiens
  misc_RNA (1)...(19): siRNA sense strand
cuauguggcuggaauauuu

SEQ ID NO: 1869579 - RNA, 19 nt, Homo sapiens
  misc_RNA (1)...(19): siRNA sense strand
ggccuuacgucuucuauau

SEQ ID NO: 1869580 - RNA, 19 nt, Homo sapiens
  misc_RNA (1)...(19): siRNA sense strand
gaagagauacauugugugu

SEQ ID NO: 1869581 - RNA, 19 nt, Homo sapiens
  misc_RNA (1)...(19): siRNA sense strand
gaacggcccuccacugacu

SEQ ID NO: 1869582 - RNA, 19 nt, Homo sapiens
  misc_RNA (1)...(19): siRNA sense strand
cuuguuaacuucuuggaua

SEQ ID NO: 1869583 - RNA, 19 nt, Homo sapiens
  misc_RNA (1)...(19): siRNA sense strand
agagauacauuguguguuc

SEQ ID NO: 1869584 - RNA, 19 nt, Homo sapiens
  misc_RNA (1)...(19): siRNA sense strand
uaacauaucgggccugguu

SEQ ID NO: 1869585 - RNA, 19 nt, Homo sapiens
  misc_RNA (1)...(19): siRNA sense strand
gaaucaggagcccuuguua

SEQ ID NO: 1869586 - RNA, 19 nt, Homo sapiens
  misc_RNA (1)...(19): siRNA sense strand
gaggaaugcuccaggaaag

SEQ ID NO: 1869587 - RNA, 19 nt, Homo sapiens
  misc_RNA (1)...(19): siRNA sense strand
caggagcccuuguuaacuu

SEQ ID NO: 1869588 - RNA, 19 nt, Homo sapiens
  misc_RNA (1)...(19): siRNA sense strand
caagccaaccucagagaua

SEQ ID NO: 1869589 - RNA, 19 nt, Homo sapiens
  misc_RNA (1)...(19): siRNA sense strand
ucaaaggacuauugcaagu

SEQ ID NO: 1869590 - RNA, 19 nt, Homo sapiens
  misc_RNA (1)...(19): siRNA sense strand
gaacuugagcauugccauu

SEQ ID NO: 1869591 - RNA, 19 nt, Homo sapiens
  misc_RNA (1)...(19): siRNA sense strand
gguuggugcuggcuuguuu

SEQ ID NO: 1869592 - RNA, 19 nt, Homo sapiens
  misc_RNA (1)...(19): siRNA sense strand
caacuauggcucauucuug

SEQ ID NO: 1869593 - RNA, 19 nt, Homo sapiens
  misc_RNA (1)...(19): siRNA sense strand
gaguuugguuggagaaaug

SEQ ID NO: 1869594 - RNA, 19 nt, Homo sapiens
  misc_RNA (1)...(19): siRNA sense strand
gcauugccauuccagcuau

SEQ ID NO: 1869595 - RNA, 19 nt, Homo sapiens
  misc_RNA (1)...(19): siRNA sense strand
gcuggucucuucccauuag

SEQ ID NO: 1869596 - RNA, 19 nt, Homo sapiens
  misc_RNA (1)...(19): siRNA sense strand
cuacuggaaugaaacucua

SEQ ID NO: 1869597 - RNA, 19 nt, Homo sapiens
  misc_RNA (1)...(19): siRNA sense strand
gacauucacccaccucuga

SEQ ID NO: 1869598 - RNA, 19 nt, Homo sapiens
  misc_RNA (1)...(19): siRNA sense strand
ggaaugaaacucuaaaaga

SEQ ID NO: 1869599 - RNA, 19 nt, Homo sapiens
  misc_RNA (1)...(19): siRNA sense strand
guuaacuucuuggauauug

SEQ ID NO: 1869600 - RNA, 19 nt, Homo sapiens
  misc_RNA (1)...(19): siRNA sense strand
gggcuaaggagcagacauu

SEQ ID NO: 1869601 - RNA, 19 nt, Homo sapiens
  misc_RNA (1)...(19): siRNA sense strand
ccucaacuauggcucauuc

SEQ ID NO: 1869602 - RNA, 19 nt, Homo sapiens
  misc_RNA (1)...(19): siRNA sense strand
guacacuggcuuucucaaa

SEQ ID NO: 1869603 - RNA, 19 nt, Homo sapiens
  misc_RNA (1)...(19): siRNA sense strand
gggcuaugaucaaauccuu

SEQ ID NO: 1869604 - RNA, 19 nt, Homo sapiens
  misc_RNA (1)...(19): siRNA sense strand
uaucagugcuggugagaag

SEQ ID NO: 1869605 - RNA, 19 nt, Homo sapiens
  misc_RNA (1)...(19): siRNA sense strand
cauuagggcuaugaucaaa

SEQ ID NO: 1869606 - RNA, 19 nt, Homo sapiens
  misc_RNA (1)...(19): siRNA sense strand
ggugagaagagauacauug

SEQ ID NO: 1869607 - RNA, 19 nt, Homo sapiens
  misc_RNA (1)...(19): siRNA sense strand
ucuugcagcucuguaauuu

SEQ ID NO: 1869608 - RNA, 19 nt, Homo sapiens
  misc_RNA (1)...(19): siRNA sense strand
uuccagugauggcaauuua

SEQ ID NO: 1869609 - RNA, 19 nt, Homo sapiens
  misc_RNA (1)...(19): siRNA sense strand
caaggcauagcccagguua

SEQ ID NO: 1869610 - RNA, 19 nt, Homo sapiens
  misc_RNA (1)...(19): siRNA sense strand
cagaacggcccuccacuga

SEQ ID NO: 1869611 - RNA, 19 nt, Homo sapiens
  misc_RNA (1)...(19): siRNA sense strand
ccagugauggcaauuuaaa

SEQ ID NO: 1869612 - RNA, 19 nt, Homo sapiens
  misc_RNA (1)...(19): siRNA sense strand
cagucaggauucagaguuu

SEQ ID NO: 1869613 - RNA, 19 nt, Homo sapiens
  misc_RNA (1)...(19): siRNA sense strand
cuauaucuuuggaggaauu

SEQ ID NO: 1869614 - RNA, 19 nt, Homo sapiens
  misc_RNA (1)...(19): siRNA sense strand
ucauuccacuggcagcuaa

SEQ ID NO: 1869615 - RNA, 19 nt, Homo sapiens
  misc_RNA (1)...(19): siRNA sense strand
gauacauuguguguucauu

SEQ ID NO: 1869616 - RNA, 19 nt, Homo sapiens
  misc_RNA (1)...(19): siRNA sense strand
uagcccagguuaugguauu

SEQ ID NO: 1869617 - RNA, 19 nt, Homo sapiens
  misc_RNA (1)...(19): siRNA sense strand
gggaguggccuugcucauu

SEQ ID NO: 1869618 - RNA, 19 nt, Homo sapiens
  misc_RNA (1)...(19): siRNA sense strand
ccaccuagccagcccaaug

SEQ ID NO: 1869619 - RNA, 19 nt, Homo sapiens
  misc_RNA (1)...(19): siRNA sense strand
uuaccacucugggccauuu

SEQ ID NO: 1869620 - RNA, 19 nt, Homo sapiens
  misc_RNA (1)...(19): siRNA sense strand
gcuuguuuauuuccucauu

SEQ ID NO: 1869621 - RNA, 19 nt, Homo sapiens
  misc_RNA (1)...(19): siRNA sense strand
ccucagcucccucaacuau

SEQ ID NO: 1869622 - RNA, 19 nt, Homo sapiens
  misc_RNA (1)...(19): siRNA sense strand
ucagcucccucaacuaugg

SEQ ID NO: 1869623 - RNA, 19 nt, Homo sapiens
  misc_RNA (1)...(19): siRNA sense strand
ucaauuuacacccaacaaa

SEQ ID NO: 1869624 - RNA, 19 nt, Homo sapiens
  misc_RNA (1)...(19): siRNA sense strand
gagauacauuguguguuca

SEQ ID NO: 1869625 - RNA, 19 nt, Homo sapiens
  misc_RNA (1)...(19): siRNA sense strand
gcccaaugccuccacagaa

SEQ ID NO: 1869626 - RNA, 19 nt, Homo sapiens
  misc_RNA (1)...(19): siRNA sense strand
uacaucagcucgguacuuc

SEQ ID NO: 1869627 - RNA, 19 nt, Homo sapiens
  misc_RNA (1)...(19): siRNA sense strand
uuagggcuaugaucaaauc

SEQ ID NO: 1869628 - RNA, 19 nt, Homo sapiens
  misc_RNA (1)...(19): siRNA sense strand
gugcuggcuuguuuauuuc

SEQ ID NO: 1869629 - RNA, 19 nt, Homo sapiens
  misc_RNA (1)...(19): siRNA sense strand
cagggcuacuggaaugaaa

SEQ ID NO: 1869630 - RNA, 19 nt, Homo sapiens
  misc_RNA (1)...(19): siRNA sense strand
gaaacucuucacugccauu

SEQ ID NO: 1869631 - RNA, 19 nt, Homo sapiens
  misc_RNA (1)...(19): siRNA sense strand
aggauggccuuacgucuuc

SEQ ID NO: 1869632 - RNA, 19 nt, Homo sapiens
  misc_RNA (1)...(19): siRNA sense strand
aggcuggucucuucccauu

SEQ ID NO: 1869633 - RNA, 19 nt, Homo sapiens
  misc_RNA (1)...(19): siRNA sense strand
gugaaucaucccuuuauca

SEQ ID NO: 1869634 - RNA, 19 nt, Homo sapiens
  misc_RNA (1)...(19): siRNA sense strand
gaauuggcugugcuuguug

SEQ ID NO: 1869635 - RNA, 19 nt, Homo sapiens
  misc_RNA (1)...(19): siRNA sense strand
aaucaggagcccuuguuaa

SEQ ID NO: 1869636 - RNA, 19 nt, Homo sapiens
  misc_RNA (1)...(19): siRNA sense strand
ucugguuuccucucauuua

SEQ ID NO: 1869637 - RNA, 19 nt, Homo sapiens
  misc_RNA (1)...(19): siRNA sense strand
ucucugguuuccucucauu

SEQ ID NO: 1869638 - RNA, 19 nt, Homo sapiens
  misc_RNA (1)...(19): siRNA sense strand
cagcagcuucugugaauca

SEQ ID NO: 1869639 - RNA, 19 nt, Homo sapiens
  misc_RNA (1)...(19): siRNA sense strand
caucagcucgguacuucaa

SEQ ID NO: 1869640 - RNA, 19 nt, Homo sapiens
  misc_RNA (1)...(19): siRNA sense strand
gugcuggugagaagagaua

SEQ ID NO: 1869641 - RNA, 19 nt, Homo sapiens
  misc_RNA (1)...(19): siRNA sense strand
ucucaaaggacuauugcaa

SEQ ID NO: 1869642 - RNA, 19 nt, Homo sapiens
  misc_RNA (1)...(19): siRNA sense strand
gcuaaggagcagacauuca

SEQ ID NO: 1869643 - RNA, 19 nt, Homo sapiens
  misc_RNA (1)...(19): siRNA sense strand
ccuuacgucuucuauaucu

SEQ ID NO: 1869644 - RNA, 19 nt, Homo sapiens
  misc_RNA (1)...(19): siRNA sense strand
ugaaucaggagcccuuguu

SEQ ID NO: 1869645 - RNA, 19 nt, Homo sapiens
  misc_RNA (1)...(19): siRNA sense strand
caucagcagcuucugugaa

SEQ ID NO: 1869646 - RNA, 19 nt, Homo sapiens
  misc_RNA (1)...(19): siRNA sense strand
ccucauuccugacccucuu

SEQ ID NO: 1869647 - RNA, 19 nt, Homo sapiens
  misc_RNA (1)...(19): siRNA sense strand
gugcaggacugggcuaagg

SEQ ID NO: 1869648 - RNA, 19 nt, Homo sapiens
  misc_RNA (1)...(19): siRNA sense strand
cgucuucuauaucuuugga

SEQ ID NO: 1869649 - RNA, 19 nt, Homo sapiens
  misc_RNA (1)...(19): siRNA sense strand
guccuucauuguucuacuu

SEQ ID NO: 1869650 - RNA, 19 nt, Homo sapiens
  misc_RNA (1)...(19): siRNA sense strand
gaguggccuugcucauugu

SEQ ID NO: 1869651 - RNA, 19 nt, Homo sapiens
  misc_RNA (1)...(19): siRNA sense strand
agaggaaugcuccaggaaa

SEQ ID NO: 1869652 - RNA, 19 nt, Homo sapiens
  misc_RNA (1)...(19): siRNA sense strand
cauuauccuuggaggucua

SEQ ID NO: 1869653 - RNA, 19 nt, Homo sapiens
  misc_RNA (1)...(19): siRNA sense strand
aagccaaccucagagauag

SEQ ID NO: 1869654 - RNA, 19 nt, Homo sapiens
  misc_RNA (1)...(19): siRNA sense strand
gaaucaucccuuuaucagu

SEQ ID NO: 1869655 - RNA, 19 nt, Homo sapiens
  misc_RNA (1)...(19): siRNA sense strand
ggaggaauuggcugugcuu

SEQ ID NO: 1869656 - RNA, 19 nt, Homo sapiens
  misc_RNA (1)...(19): siRNA sense strand
gcucauuguccuccggauu

SEQ ID NO: 1869657 - RNA, 19 nt, Homo sapiens
  misc_RNA (1)...(19): siRNA sense strand
ugaaauccagggaaucauc

SEQ ID NO: 1869658 - RNA, 19 nt, Homo sapiens
  misc_RNA (1)...(19): siRNA sense strand
gugagaagagauacauugu

SEQ ID NO: 1869659 - RNA, 19 nt, Homo sapiens
  misc_RNA (1)...(19): siRNA sense strand
cugguuuccucucauuuau

SEQ ID NO: 1869660 - RNA, 19 nt, Homo sapiens
  misc_RNA (1)...(19): siRNA sense strand
uaggauggccuuacgucuu

SEQ ID NO: 1869661 - RNA, 19 nt, Homo sapiens
  misc_RNA (1)...(19): siRNA sense strand
ggaaugcuccaggaaaggu

SEQ ID NO: 1869662 - RNA, 19 nt, Homo sapiens
  misc_RNA (1)...(19): siRNA sense strand
gcuauguggcuggaauauu

SEQ ID NO: 1869663 - RNA, 19 nt, Homo sapiens
  misc_RNA (1)...(19): siRNA sense strand
ucagucaggauucagaguu

SEQ ID NO: 1869664 - RNA, 19 nt, Homo sapiens
  misc_RNA (1)...(19): siRNA sense strand
gcuaugaucaaauccuuac

SEQ ID NO: 1869665 - RNA, 19 nt, Homo sapiens
  misc_RNA (1)...(19): siRNA sense strand
uacauuguguguucauugg

SEQ ID NO: 1869666 - RNA, 19 nt, Homo sapiens
  misc_RNA (1)...(19): siRNA sense strand
cccaaugccuccacagaac

SEQ ID NO: 1869667 - RNA, 19 nt, Homo sapiens
  misc_RNA (1)...(19): siRNA sense strand
gagcccuuguuaacuucuu

SEQ ID NO: 1869668 - RNA, 19 nt, Homo sapiens
  misc_RNA (1)...(19): siRNA sense strand
guuggauguaucugcauua

SEQ ID NO: 1869669 - RNA, 19 nt, Homo sapiens
  misc_RNA (1)...(19): siRNA sense strand
ccauuagggcuaugaucaa

SEQ ID NO: 1869670 - RNA, 19 nt, Homo sapiens
  misc_RNA (1)...(19): siRNA sense strand
ugaaucaucccuuuaucag

SEQ ID NO: 1869671 - RNA, 19 nt, Homo sapiens
  misc_RNA (1)...(19): siRNA sense strand
uaucgggccugguuuucua

SEQ ID NO: 1869672 - RNA, 19 nt, Homo sapiens
  misc_RNA (1)...(19): siRNA sense strand
aucagcagcuucugugaau

SEQ ID NO: 1869673 - RNA, 19 nt, Homo sapiens
  misc_RNA (1)...(19): siRNA sense strand
ggacagacaucaucuuuga

SEQ ID NO: 1869674 - RNA, 19 nt, Homo sapiens
  misc_RNA (1)...(19): siRNA sense strand
gggaauacgugcucacuuu

SEQ ID NO: 1869675 - RNA, 19 nt, Homo sapiens
  misc_RNA (1)...(19): siRNA sense strand
ugacaaccuuuacaccuuu

SEQ ID NO: 1869676 - RNA, 19 nt, Homo sapiens
  misc_RNA (1)...(19): siRNA sense strand
ggacucggacuacgaaaug

SEQ ID NO: 1869677 - RNA, 19 nt, Homo sapiens
  misc_RNA (1)...(19): siRNA sense strand
ugagaugccugacaaccuu

SEQ ID NO: 1869678 - RNA, 19 nt, Homo sapiens
  misc_RNA (1)...(19): siRNA sense strand
gccagaagacggaccauuu

SEQ ID NO: 1869679 - RNA, 19 nt, Homo sapiens
  misc_RNA (1)...(19): siRNA sense strand
gcaguucaccgaccucuuc

SEQ ID NO: 1869680 - RNA, 19 nt, Homo sapiens
  misc_RNA (1)...(19): siRNA sense strand
gagcacagaagcagagaug

SEQ ID NO: 1869681 - RNA, 19 nt, Homo sapiens
  misc_RNA (1)...(19): siRNA sense strand
cgugcucacuuucaacuuu

SEQ ID NO: 1869682 - RNA, 19 nt, Homo sapiens
  misc_RNA (1)...(19): siRNA sense strand
gcacagauucccuuaacca

SEQ ID NO: 1869683 - RNA, 19 nt, Homo sapiens
  misc_RNA (1)...(19): siRNA sense strand
ggagcgaguucugugaguu

SEQ ID NO: 1869684 - RNA, 19 nt, Homo sapiens
  misc_RNA (1)...(19): siRNA sense strand
acacgguccucuucccuuu

SEQ ID NO: 1869685 - RNA, 19 nt, Homo sapiens
  misc_RNA (1)...(19): siRNA sense strand
cagcacagauucccuuaac

SEQ ID NO: 1869686 - RNA, 19 nt, Homo sapiens
  misc_RNA (1)...(19): siRNA sense strand
ggacaugcuccaccacuuc

SEQ ID NO: 1869687 - RNA, 19 nt, Homo sapiens
  misc_RNA (1)...(19): siRNA sense strand
ccgaagaacuggccaacag

SEQ ID NO: 1869688 - RNA, 19 nt, Homo sapiens
  misc_RNA (1)...(19): siRNA sense strand
gcacagaagcagagaugca

SEQ ID NO: 1869689 - RNA, 19 nt, Homo sapiens
  misc_RNA (1)...(19): siRNA sense strand
gaagcagagaugcauauuc

SEQ ID NO: 1869690 - RNA, 19 nt, Homo sapiens
  misc_RNA (1)...(19): siRNA sense strand
gaauacgugcucacuuuca

SEQ ID NO: 1869691 - RNA, 19 nt, Homo sapiens
  misc_RNA (1)...(19): siRNA sense strand
aagcagagaugcauauucc

SEQ ID NO: 1869692 - RNA, 19 nt, Homo sapiens
  misc_RNA (1)...(19): siRNA sense strand
ggaauacgugcucacuuuc

SEQ ID NO: 1869693 - RNA, 19 nt, Homo sapiens
  misc_RNA (1)...(19): siRNA sense strand
gagcgaguucugugaguug

SEQ ID NO: 1869694 - RNA, 19 nt, Homo sapiens
  misc_RNA (1)...(19): siRNA sense strand
ccagaagacggaccauuuc

SEQ ID NO: 1869695 - RNA, 19 nt, Homo sapiens
  misc_RNA (1)...(19): siRNA sense strand
ggcuugagaugccugacaa

SEQ ID NO: 1869696 - RNA, 19 nt, Homo sapiens
  misc_RNA (1)...(19): siRNA sense strand
cugacaaccuuuacaccuu

SEQ ID NO: 1869697 - RNA, 19 nt, Homo sapiens
  misc_RNA (1)...(19): siRNA sense strand
gcaugagccugugaaucga

SEQ ID NO: 1869698 - RNA, 19 nt, Homo sapiens
  misc_RNA (1)...(19): siRNA sense strand
ugcagcaccuggagcauga

SEQ ID NO: 1869699 - RNA, 19 nt, Homo sapiens
  misc_RNA (1)...(19): siRNA sense strand
guucaaggcccaagcuaca

SEQ ID NO: 1869700 - RNA, 19 nt, Homo sapiens
  misc_RNA (1)...(19): siRNA sense strand
gacaaccuuuacaccuuug

SEQ ID NO: 1869701 - RNA, 19 nt, Homo sapiens
  misc_RNA (1)...(19): siRNA sense strand
cagaagcagagaugcauau

SEQ ID NO: 1869702 - RNA, 19 nt, Homo sapiens
  misc_RNA (1)...(19): siRNA sense strand
ucacugggguucagaguug

SEQ ID NO: 1869703 - RNA, 19 nt, Homo sapiens
  misc_RNA (1)...(19): siRNA sense strand
gcagcacagauucccuuaa

SEQ ID NO: 1869704 - RNA, 19 nt, Homo sapiens
  misc_RNA (1)...(19): siRNA sense strand
ggaccggacagacaucauc

SEQ ID NO: 1869705 - RNA, 19 nt, Homo sapiens
  misc_RNA (1)...(19): siRNA sense strand
ggccauagacaaucaguac

SEQ ID NO: 1869706 - RNA, 19 nt, Homo sapiens
  misc_RNA (1)...(19): siRNA sense strand
ccggacagacaucaucuuu

SEQ ID NO: 1869707 - RNA, 19 nt, Homo sapiens
  misc_RNA (1)...(19): siRNA sense strand
aauacgugcucacuuucaa

SEQ ID NO: 1869708 - RNA, 19 nt, Homo sapiens
  misc_RNA (1)...(19): siRNA sense strand
cauagacaaucaguacaca

SEQ ID NO: 1869709 - RNA, 19 nt, Homo sapiens
  misc_RNA (1)...(19): siRNA sense strand
gugcucacuuucaacuuuc

SEQ ID NO: 1869710 - RNA, 19 nt, Homo sapiens
  misc_RNA (1)...(19): siRNA sense strand
gcucuccagcuacguggua

SEQ ID NO: 1869711 - RNA, 19 nt, Homo sapiens
  misc_RNA (1)...(19): siRNA sense strand
gugaaggaccggacagaca

SEQ ID NO: 1869712 - RNA, 19 nt, Homo sapiens
  misc_RNA (1)...(19): siRNA sense strand
ggacuacgaaauggacuca

SEQ ID NO: 1869713 - RNA, 19 nt, Homo sapiens
  misc_RNA (1)...(19): siRNA sense strand
gagcaugagccugugaauc

SEQ ID NO: 1869714 - RNA, 19 nt, Homo sapiens
  misc_RNA (1)...(19): siRNA sense strand
ugaaggaccggacagacau

SEQ ID NO: 1869715 - RNA, 19 nt, Homo sapiens
  misc_RNA (1)...(19): siRNA sense strand
gagaugccugacaaccuuu

SEQ ID NO: 1869716 - RNA, 19 nt, Homo sapiens
  misc_RNA (1)...(19): siRNA sense strand
gaaggaccggacagacauc

SEQ ID NO: 1869717 - RNA, 19 nt, Homo sapiens
  misc_RNA (1)...(19): siRNA sense strand
acuacgaaauggacucauc

SEQ ID NO: 1869718 - RNA, 19 nt, Homo sapiens
  misc_RNA (1)...(19): siRNA sense strand
ggcagcacagauucccuua

SEQ ID NO: 1869719 - RNA, 19 nt, Homo sapiens
  misc_RNA (1)...(19): siRNA sense strand
acagaagcagagaugcaua

SEQ ID NO: 1869720 - RNA, 19 nt, Homo sapiens
  misc_RNA (1)...(19): siRNA sense strand
gacagaacauguaauaaug

SEQ ID NO: 1869721 - RNA, 19 nt, Homo sapiens
  misc_RNA (1)...(19): siRNA sense strand
gagacaaucugcugggaau

SEQ ID NO: 1869722 - RNA, 19 nt, Homo sapiens
  misc_RNA (1)...(19): siRNA sense strand
ggaaucgaguacauccuuu

SEQ ID NO: 1869723 - RNA, 19 nt, Homo sapiens
  misc_RNA (1)...(19): siRNA sense strand
uuagaacacuugaaucaga

SEQ ID NO: 1869724 - RNA, 19 nt, Homo sapiens
  misc_RNA (1)...(19): siRNA sense strand
gugguaguguccuggauua

SEQ ID NO: 1869725 - RNA, 19 nt, Homo sapiens
  misc_RNA (1)...(19): siRNA sense strand
ugaaucagaugguuggaau

SEQ ID NO: 1869726 - RNA, 19 nt, Homo sapiens
  misc_RNA (1)...(19): siRNA sense strand
gacuugggaucaguuauaa

SEQ ID NO: 1869727 - RNA, 19 nt, Homo sapiens
  misc_RNA (1)...(19): siRNA sense strand
cccacuagcugauuacuau

SEQ ID NO: 1869728 - RNA, 19 nt, Homo sapiens
  misc_RNA (1)...(19): siRNA sense strand
guaguguccuggauuacuu

SEQ ID NO: 1869729 - RNA, 19 nt, Homo sapiens
  misc_RNA (1)...(19): siRNA sense strand
caaagaucaugaagagcaa

SEQ ID NO: 1869730 - RNA, 19 nt, Homo sapiens
  misc_RNA (1)...(19): siRNA sense strand
gacaaucugcugggaauuu

SEQ ID NO: 1869731 - RNA, 19 nt, Homo sapiens
  misc_RNA (1)...(19): siRNA sense strand
gcucuuggaucccuauuuu

SEQ ID NO: 1869732 - RNA, 19 nt, Homo sapiens
  misc_RNA (1)...(19): siRNA sense strand
agacuugggaucaguuaua

SEQ ID NO: 1869733 - RNA, 19 nt, Homo sapiens
  misc_RNA (1)...(19): siRNA sense strand
gaucaugaagagcaaggua

SEQ ID NO: 1869734 - RNA, 19 nt, Homo sapiens
  misc_RNA (1)...(19): siRNA sense strand
cauuagaacacuugaauca

SEQ ID NO: 1869735 - RNA, 19 nt, Homo sapiens
  misc_RNA (1)...(19): siRNA sense strand
ucagaaagaaguaauccuu

SEQ ID NO: 1869736 - RNA, 19 nt, Homo sapiens
  misc_RNA (1)...(19): siRNA sense strand
uagaacacuugaaucagau

SEQ ID NO: 1869737 - RNA, 19 nt, Homo sapiens
  misc_RNA (1)...(19): siRNA sense strand
ucagucagcuuuugaugaa

SEQ ID NO: 1869738 - RNA, 19 nt, Homo sapiens
  misc_RNA (1)...(19): siRNA sense strand
acacuugaaucagaugguu

SEQ ID NO: 1869739 - RNA, 19 nt, Homo sapiens
  misc_RNA (1)...(19): siRNA sense strand
gguggcacuucaaagauca

SEQ ID NO: 1869740 - RNA, 19 nt, Homo sapiens
  misc_RNA (1)...(19): siRNA sense strand
ggaauuucuuggguugaca

SEQ ID NO: 1869741 - RNA, 19 nt, Homo sapiens
  misc_RNA (1)...(19): siRNA sense strand
ccagacuugggaucaguua

SEQ ID NO: 1869742 - RNA, 19 nt, Homo sapiens
  misc_RNA (1)...(19): siRNA sense strand
uuaucccacuagcugauua

SEQ ID NO: 1869743 - RNA, 19 nt, Homo sapiens
  misc_RNA (1)...(19): siRNA sense strand
ggguauugguggcacuuca

SEQ ID NO: 1869744 - RNA, 19 nt, Homo sapiens
  misc_RNA (1)...(19): siRNA sense strand
acaaucugcugggaauuuc

SEQ ID NO: 1869745 - RNA, 19 nt, Homo sapiens
  misc_RNA (1)...(19): siRNA sense strand
guaauaaugaaguggucaa

SEQ ID NO: 1869746 - RNA, 19 nt, Homo sapiens
  misc_RNA (1)...(19): siRNA sense strand
gcaccagacuugggaucag

SEQ ID NO: 1869747 - RNA, 19 nt, Homo sapiens
  misc_RNA (1)...(19): siRNA sense strand
ccacuagcugauuacuaua

SEQ ID NO: 1869748 - RNA, 19 nt, Homo sapiens
  misc_RNA (1)...(19): siRNA sense strand
ucgauaucauccuuccaaa

SEQ ID NO: 1869749 - RNA, 19 nt, Homo sapiens
  misc_RNA (1)...(19): siRNA sense strand
guauugguggcacuucaaa

SEQ ID NO: 1869750 - RNA, 19 nt, Homo sapiens
  misc_RNA (1)...(19): siRNA sense strand
guggauauccgagacaauc

SEQ ID NO: 1869751 - RNA, 19 nt, Homo sapiens
  misc_RNA (1)...(19): siRNA sense strand
augaagagcaagguaagua

SEQ ID NO: 1869752 - RNA, 19 nt, Homo sapiens
  misc_RNA (1)...(19): siRNA sense strand
gggaauuucuuggguugac

SEQ ID NO: 1869753 - RNA, 19 nt, Homo sapiens
  misc_RNA (1)...(19): siRNA sense strand
gucgauaucauccuuccaa

SEQ ID NO: 1869754 - RNA, 19 nt, Homo sapiens
  misc_RNA (1)...(19): siRNA sense strand
ugaagagcaagguaaguag

SEQ ID NO: 1869755 - RNA, 19 nt, Homo sapiens
  misc_RNA (1)...(19): siRNA sense strand
gucauacugucgauaucau

SEQ ID NO: 1869756 - RNA, 19 nt, Homo sapiens
  misc_RNA (1)...(19): siRNA sense strand
gaaagugucucaaguacuc

SEQ ID NO: 1869757 - RNA, 19 nt, Homo sapiens
  misc_RNA (1)...(19): siRNA sense strand
gcugggagcuggaggguuu

SEQ ID NO: 1869758 - RNA, 19 nt, Homo sapiens
  misc_RNA (1)...(19): siRNA sense strand
caacgucacuuuacaccaa

SEQ ID NO: 1869759 - RNA, 19 nt, Homo sapiens
  misc_RNA (1)...(19): siRNA sense strand
caggaugucuguaaaauua

SEQ ID NO: 1869760 - RNA, 19 nt, Homo sapiens
  misc_RNA (1)...(19): siRNA sense strand
uaaagcaagugaacaagug

SEQ ID NO: 1869761 - RNA, 19 nt, Homo sapiens
  misc_RNA (1)...(19): siRNA sense strand
gcaaagcauugugcacuug

SEQ ID NO: 1869762 - RNA, 19 nt, Homo sapiens
  misc_RNA (1)...(19): siRNA sense strand
gcaaggcugcgccacgaua

SEQ ID NO: 1869763 - RNA, 19 nt, Homo sapiens
  misc_RNA (1)...(19): siRNA sense strand
ggaggacaguuaaguuugg

SEQ ID NO: 1869764 - RNA, 19 nt, Homo sapiens
  misc_RNA (1)...(19): siRNA sense strand
uggaagaucugcugugcuu

SEQ ID NO: 1869765 - RNA, 19 nt, Homo sapiens
  misc_RNA (1)...(19): siRNA sense strand
gugaacaagugcaccaaga

SEQ ID NO: 1869766 - RNA, 19 nt, Homo sapiens
  misc_RNA (1)...(19): siRNA sense strand
gggaaagugucucaaguac

SEQ ID NO: 1869767 - RNA, 19 nt, Homo sapiens
  misc_RNA (1)...(19): siRNA sense strand
gcucugagaaguuggaaga

SEQ ID NO: 1869768 - RNA, 19 nt, Homo sapiens
  misc_RNA (1)...(19): siRNA sense strand
ggaucucaccucuuugaaa

SEQ ID NO: 1869769 - RNA, 19 nt, Homo sapiens
  misc_RNA (1)...(19): siRNA sense strand
ccauaaagcaagugaacaa

SEQ ID NO: 1869770 - RNA, 19 nt, Homo sapiens
  misc_RNA (1)...(19): siRNA sense strand
caaguacucacuagauguu

SEQ ID NO: 1869771 - RNA, 19 nt, Homo sapiens
  misc_RNA (1)...(19): siRNA sense strand
ugagcaggaugucuguaaa

SEQ ID NO: 1869772 - RNA, 19 nt, Homo sapiens
  misc_RNA (1)...(19): siRNA sense strand
gaacaagugcaccaagaac

SEQ ID NO: 1869773 - RNA, 19 nt, Homo sapiens
  misc_RNA (1)...(19): siRNA sense strand
gugagcaggaugucuguaa

SEQ ID NO: 1869774 - RNA, 19 nt, Homo sapiens
  misc_RNA (1)...(19): siRNA sense strand
cgaacaucuugaucaguga

SEQ ID NO: 1869775 - RNA, 19 nt, Homo sapiens
  misc_RNA (1)...(19): siRNA sense strand
gacacccucuuacccucua

SEQ ID NO: 1869776 - RNA, 19 nt, Homo sapiens
  misc_RNA (1)...(19): siRNA sense strand
caaggcugcgccacgauaa

SEQ ID NO: 1869777 - RNA, 19 nt, Homo sapiens
  misc_RNA (1)...(19): siRNA sense strand
ugggaaagugucucaagua

SEQ ID NO: 1869778 - RNA, 19 nt, Homo sapiens
  misc_RNA (1)...(19): siRNA sense strand
cagcagucccucagagcua

SEQ ID NO: 1869779 - RNA, 19 nt, Homo sapiens
  misc_RNA (1)...(19): siRNA sense strand
guggaucucaccucuuuga

SEQ ID NO: 1869780 - RNA, 19 nt, Homo sapiens
  misc_RNA (1)...(19): siRNA sense strand
aagccgacauuuauuccuu

SEQ ID NO: 1869781 - RNA, 19 nt, Homo sapiens
  misc_RNA (1)...(19): siRNA sense strand
ugaacaagugcaccaagaa

SEQ ID NO: 1869782 - RNA, 19 nt, Homo sapiens
  misc_RNA (1)...(19): siRNA sense strand
cgcaaagcauugugcacuu

SEQ ID NO: 1869783 - RNA, 19 nt, Homo sapiens
  misc_RNA (1)...(19): siRNA sense strand
cugagaaguuggaagaucu

SEQ ID NO: 1869784 - RNA, 19 nt, Homo sapiens
  misc_RNA (1)...(19): siRNA sense strand
uagcaucucggcggaguuu

SEQ ID NO: 1869785 - RNA, 19 nt, Homo sapiens
  misc_RNA (1)...(19): siRNA sense strand
gccgacauuuauuccuuug

SEQ ID NO: 1869786 - RNA, 19 nt, Homo sapiens
  misc_RNA (1)...(19): siRNA sense strand
cucaaguacucacuagaug

SEQ ID NO: 1869787 - RNA, 19 nt, Homo sapiens
  misc_RNA (1)...(19): siRNA sense strand
acaguuaaguuugggaaag

SEQ ID NO: 1869788 - RNA, 19 nt, Homo sapiens
  misc_RNA (1)...(19): siRNA sense strand
cuggaggacaguuaaguuu

SEQ ID NO: 1869789 - RNA, 19 nt, Homo sapiens
  misc_RNA (1)...(19): siRNA sense strand
gcuuccagacacccucuua

SEQ ID NO: 1869790 - RNA, 19 nt, Homo sapiens
  misc_RNA (1)...(19): siRNA sense strand
caguuaaguuugggaaagu

SEQ ID NO: 1869791 - RNA, 19 nt, Homo sapiens
  misc_RNA (1)...(19): siRNA sense strand
guggcaacgucacuuuaca

SEQ ID NO: 1869792 - RNA, 19 nt, Homo sapiens
  misc_RNA (1)...(19): siRNA sense strand
ggaaagugucucaaguacu

SEQ ID NO: 1869793 - RNA, 19 nt, Homo sapiens
  misc_RNA (1)...(19): siRNA sense strand
caagaaccgacuagcaucu

SEQ ID NO: 1869794 - RNA, 19 nt, Homo sapiens
  misc_RNA (1)...(19): siRNA sense strand
ucaaguacucacuagaugu

SEQ ID NO: 1869795 - RNA, 19 nt, Homo sapiens
  misc_RNA (1)...(19): siRNA sense strand
ccaauagccuagggaccau

SEQ ID NO: 1869796 - RNA, 19 nt, Homo sapiens
  misc_RNA (1)...(19): siRNA sense strand
gagcggcagcacauacugu

SEQ ID NO: 1869797 - RNA, 19 nt, Homo sapiens
  misc_RNA (1)...(19): siRNA sense strand
ucugagaaguuggaagauc

SEQ ID NO: 1869798 - RNA, 19 nt, Homo sapiens
  misc_RNA (1)...(19): siRNA sense strand
cgguguacaaggcgacuua

SEQ ID NO: 1869799 - RNA, 19 nt, Homo sapiens
  misc_RNA (1)...(19): siRNA sense strand
ucucaaguacucacuagau

SEQ ID NO: 1869800 - RNA, 19 nt, Homo sapiens
  misc_RNA (1)...(19): siRNA sense strand
aucacucucuggcaaauga

SEQ ID NO: 1869801 - RNA, 19 nt, Homo sapiens
  misc_RNA (1)...(19): siRNA sense strand
ugucucaaguacucacuag

SEQ ID NO: 1869802 - RNA, 19 nt, Homo sapiens
  misc_RNA (1)...(19): siRNA sense strand
ggcaaaugacuaccaagca

SEQ ID NO: 1869803 - RNA, 19 nt, Homo sapiens
  misc_RNA (1)...(19): siRNA sense strand
ccaucacucucuggcaaau

SEQ ID NO: 1869804 - RNA, 19 nt, Homo sapiens
  misc_RNA (1)...(19): siRNA sense strand
cgguugcucugagaaguug

SEQ ID NO: 1869805 - RNA, 19 nt, Homo sapiens
  misc_RNA (1)...(19): siRNA sense strand
gacuucgguugcucugaga

SEQ ID NO: 1869806 - RNA, 19 nt, Homo sapiens
  misc_RNA (1)...(19): siRNA sense strand
ccgcgaacaucuugaucag

SEQ ID NO: 1869807 - RNA, 19 nt, Homo sapiens
  misc_RNA (1)...(19): siRNA sense strand
guguuccuguggccauaaa

SEQ ID NO: 1869808 - RNA, 19 nt, Homo sapiens
  misc_RNA (1)...(19): siRNA sense strand
ucuggcaaaugacuaccaa

SEQ ID NO: 1869809 - RNA, 19 nt, Homo sapiens
  misc_RNA (1)...(19): siRNA sense strand
gcaggaugucuguaaaauu

SEQ ID NO: 1869810 - RNA, 19 nt, Homo sapiens
  misc_RNA (1)...(19): siRNA sense strand
ggguuuggcucgguguaca

SEQ ID NO: 1869811 - RNA, 19 nt, Homo sapiens
  misc_RNA (1)...(19): siRNA sense strand
gaagugagcaacauuguaa

SEQ ID NO: 1869812 - RNA, 19 nt, Homo sapiens
  misc_RNA (1)...(19): siRNA sense strand
gaagaauggagcuggauua

SEQ ID NO: 1869813 - RNA, 19 nt, Homo sapiens
  misc_RNA (1)...(19): siRNA sense strand
gaccacaaauguaguagaa

SEQ ID NO: 1869814 - RNA, 19 nt, Homo sapiens
  misc_RNA (1)...(19): siRNA sense strand
gaauggagcuggauuacac

SEQ ID NO: 1869815 - RNA, 19 nt, Homo sapiens
  misc_RNA (1)...(19): siRNA sense strand
ccacaaauguaguagaaca

SEQ ID NO: 1869816 - RNA, 19 nt, Homo sapiens
  misc_RNA (1)...(19): siRNA sense strand
guaauuaugcagaagaaug

SEQ ID NO: 1869817 - RNA, 19 nt, Homo sapiens
  misc_RNA (1)...(19): siRNA sense strand
gggagaauaagaccaugua

SEQ ID NO: 1869818 - RNA, 19 nt, Homo sapiens
  misc_RNA (1)...(19): siRNA sense strand
uaucaacacagcaaaguga

SEQ ID NO: 1869819 - RNA, 19 nt, Homo sapiens
  misc_RNA (1)...(19): siRNA sense strand
gaugaagugagcaacauug

SEQ ID NO: 1869820 - RNA, 19 nt, Homo sapiens
  misc_RNA (1)...(19): siRNA sense strand
ggaggagacugcuuuuguu

SEQ ID NO: 1869821 - RNA, 19 nt, Homo sapiens
  misc_RNA (1)...(19): siRNA sense strand
agaauaagaccauguacug

SEQ ID NO: 1869822 - RNA, 19 nt, Homo sapiens
  misc_RNA (1)...(19): siRNA sense strand
ggagacugcuuuuguuguu

SEQ ID NO: 1869823 - RNA, 19 nt, Homo sapiens
  misc_RNA (1)...(19): siRNA sense strand
caauuggugguaacgcuua

SEQ ID NO: 1869824 - RNA, 19 nt, Homo sapiens
  misc_RNA (1)...(19): siRNA sense strand
gaaagcgcaauugguggua

SEQ ID NO: 1869825 - RNA, 19 nt, Homo sapiens
  misc_RNA (1)...(19): siRNA sense strand
ugaagugagcaacauugua

SEQ ID NO: 1869826 - RNA, 19 nt, Homo sapiens
  misc_RNA (1)...(19): siRNA sense strand
guguaauuaugcagaagaa

SEQ ID NO: 1869827 - RNA, 19 nt, Homo sapiens
  misc_RNA (1)...(19): siRNA sense strand
uaaaagaggcuauagaaag

SEQ ID NO: 1869828 - RNA, 19 nt, Homo sapiens
  misc_RNA (1)...(19): siRNA sense strand
caaauguaguagaacaaac

SEQ ID NO: 1869829 - RNA, 19 nt, Homo sapiens
  misc_RNA (1)...(19): siRNA sense strand
uaagccaacucaccaagcu

SEQ ID NO: 1869830 - RNA, 19 nt, Homo sapiens
  misc_RNA (1)...(19): siRNA sense strand
gagaauaagaccauguacu

SEQ ID NO: 1869831 - RNA, 19 nt, Homo sapiens
  misc_RNA (1)...(19): siRNA sense strand
ggauuacacacagcaaguu

SEQ ID NO: 1869832 - RNA, 19 nt, Homo sapiens
  misc_RNA (1)...(19): siRNA sense strand
aaagcgcaauuggugguaa

SEQ ID NO: 1869833 - RNA, 19 nt, Homo sapiens
  misc_RNA (1)...(19): siRNA sense strand
ggaccacaaauguaguaga

SEQ ID NO: 1869834 - RNA, 19 nt, Homo sapiens
  misc_RNA (1)...(19): siRNA sense strand
gggaaaaccauuuaaauac

SEQ ID NO: 1869835 - RNA, 19 nt, Homo sapiens
  misc_RNA (1)...(19): siRNA sense strand
acugugcgaugggagaaua

SEQ ID NO: 1869836 - RNA, 19 nt, Homo sapiens
  misc_RNA (1)...(19): siRNA sense strand
ugagcaacauuguaaaaga

SEQ ID NO: 1869837 - RNA, 19 nt, Homo sapiens
  misc_RNA (1)...(19): siRNA sense strand
ccuucggacugucuauuug

SEQ ID NO: 1869838 - RNA, 19 nt, Homo sapiens
  misc_RNA (1)...(19): siRNA sense strand
gguaacgcuuaucaacaca

SEQ ID NO: 1869839 - RNA, 19 nt, Homo sapiens
  misc_RNA (1)...(19): siRNA sense strand
gcuauagaaagcgcaauug

SEQ ID NO: 1869840 - RNA, 19 nt, Homo sapiens
  misc_RNA (1)...(19): siRNA sense strand
guaaaagaggcuauagaaa

SEQ ID NO: 1869841 - RNA, 19 nt, Homo sapiens
  misc_RNA (1)...(19): siRNA sense strand
gagcaacauuguaaaagag

SEQ ID NO: 1869842 - RNA, 19 nt, Homo sapiens
  misc_RNA (1)...(19): siRNA sense strand
ccuguguaauuaugcagaa

SEQ ID NO: 1869843 - RNA, 19 nt, Homo sapiens
  misc_RNA (1)...(19): siRNA sense strand
gauuacacacagcaaguuc

SEQ ID NO: 1869844 - RNA, 19 nt, Homo sapiens
  misc_RNA (1)...(19): siRNA sense strand
uaauuaugcagaagaaugg

SEQ ID NO: 1869845 - RNA, 19 nt, Homo sapiens
  misc_RNA (1)...(19): siRNA sense strand
gccuucggacugucuauuu

SEQ ID NO: 1869846 - RNA, 19 nt, Homo sapiens
  misc_RNA (1)...(19): siRNA sense strand
ggcuauagaaagcgcaauu

SEQ ID NO: 1869847 - RNA, 19 nt, Homo sapiens
  misc_RNA (1)...(19): siRNA sense strand
ggugguaacgcuuaucaac

SEQ ID NO: 1869848 - RNA, 19 nt, Homo sapiens
  misc_RNA (1)...(19): siRNA sense strand
auaagaccauguacugcau

SEQ ID NO: 1869849 - RNA, 19 nt, Homo sapiens
  misc_RNA (1)...(19): siRNA sense strand
gugguaacgcuuaucaaca

SEQ ID NO: 1869850 - RNA, 19 nt, Homo sapiens
  misc_RNA (1)...(19): siRNA sense strand
ugaccuguguaauuaugca

SEQ ID NO: 1869851 - RNA, 19 nt, Homo sapiens
  misc_RNA (1)...(19): siRNA sense strand
aaaagaggcuauagaaagc

SEQ ID NO: 1869852 - RNA, 19 nt, Homo sapiens
  misc_RNA (1)...(19): siRNA sense strand
ugguaacgcuuaucaacac

SEQ ID NO: 1869853 - RNA, 19 nt, Homo sapiens
  misc_RNA (1)...(19): siRNA sense strand
gcagaaacacuccaauuua

SEQ ID NO: 1869854 - RNA, 19 nt, Homo sapiens
  misc_RNA (1)...(19): siRNA sense strand
guaaauacgugaaugcauu

SEQ ID NO: 1869855 - RNA, 19 nt, Homo sapiens
  misc_RNA (1)...(19): siRNA sense strand
gaagaacagucauuugaug

SEQ ID NO: 1869856 - RNA, 19 nt, Homo sapiens
  misc_RNA (1)...(19): siRNA sense strand
acagaugacuggaaaguua

SEQ ID NO: 1869857 - RNA, 19 nt, Homo sapiens
  misc_RNA (1)...(19): siRNA sense strand
ggaaaugccuucuuuaacu

SEQ ID NO: 1869858 - RNA, 19 nt, Homo sapiens
  misc_RNA (1)...(19): siRNA sense strand
uuagaaagcucuccaagaa

SEQ ID NO: 1869859 - RNA, 19 nt, Homo sapiens
  misc_RNA (1)...(19): siRNA sense strand
gaagaggaagacagaauua

SEQ ID NO: 1869860 - RNA, 19 nt, Homo sapiens
  misc_RNA (1)...(19): siRNA sense strand
gaaaugccuucuuuaacuu

SEQ ID NO: 1869861 - RNA, 19 nt, Homo sapiens
  misc_RNA (1)...(19): siRNA sense strand
ugauagagcuuguacagaa

SEQ ID NO: 1869862 - RNA, 19 nt, Homo sapiens
  misc_RNA (1)...(19): siRNA sense strand
cagaaacacuccaauuuau

SEQ ID NO: 1869863 - RNA, 19 nt, Homo sapiens
  misc_RNA (1)...(19): siRNA sense strand
gaggaagacagaauuauuu

SEQ ID NO: 1869864 - RNA, 19 nt, Homo sapiens
  misc_RNA (1)...(19): siRNA sense strand
ugaagaagcugguggaaca

SEQ ID NO: 1869865 - RNA, 19 nt, Homo sapiens
  misc_RNA (1)...(19): siRNA sense strand
ccgaaacguuggucuguua

SEQ ID NO: 1869866 - RNA, 19 nt, Homo sapiens
  misc_RNA (1)...(19): siRNA sense strand
ggaccacccuuacugaaga

SEQ ID NO: 1869867 - RNA, 19 nt, Homo sapiens
  misc_RNA (1)...(19): siRNA sense strand
gaacagaugggcagaaauc

SEQ ID NO: 1869868 - RNA, 19 nt, Homo sapiens
  misc_RNA (1)...(19): siRNA sense strand
gaacaccacuccacuccau

SEQ ID NO: 1869869 - RNA, 19 nt, Homo sapiens
  misc_RNA (1)...(19): siRNA sense strand
uagaagaucugcaggaugu

SEQ ID NO: 1869870 - RNA, 19 nt, Homo sapiens
  misc_RNA (1)...(19): siRNA sense strand
gaaccugcauccuguggaa

SEQ ID NO: 1869871 - RNA, 19 nt, Homo sapiens
  misc_RNA (1)...(19): siRNA sense strand
ccaauuaucucccgaaucg

SEQ ID NO: 1869872 - RNA, 19 nt, Homo sapiens
  misc_RNA (1)...(19): siRNA sense strand
ugaagacaauguucucaaa

SEQ ID NO: 1869873 - RNA, 19 nt, Homo sapiens
  misc_RNA (1)...(19): siRNA sense strand
gaaagcgccucgccagcaa

SEQ ID NO: 1869874 - RNA, 19 nt, Homo sapiens
  misc_RNA (1)...(19): siRNA sense strand
gauagagcuuguacagaaa

SEQ ID NO: 1869875 - RNA, 19 nt, Homo sapiens
  misc_RNA (1)...(19): siRNA sense strand
gaacagaauggaacagaug

SEQ ID NO: 1869876 - RNA, 19 nt, Homo sapiens
  misc_RNA (1)...(19): siRNA sense strand
gaaacacuccaauuuauag

SEQ ID NO: 1869877 - RNA, 19 nt, Homo sapiens
  misc_RNA (1)...(19): siRNA sense strand
caaagaagaagaucagaga

SEQ ID NO: 1869878 - RNA, 19 nt, Homo sapiens
  misc_RNA (1)...(19): siRNA sense strand
uaacaacgacuauuccuau

SEQ ID NO: 1869879 - RNA, 19 nt, Homo sapiens
  misc_RNA (1)...(19): siRNA sense strand
ucucaaagcauuuacagua

SEQ ID NO: 1869880 - RNA, 19 nt, Homo sapiens
  misc_RNA (1)...(19): siRNA sense strand
gggaacagaugggcagaaa

SEQ ID NO: 1869881 - RNA, 19 nt, Homo sapiens
  misc_RNA (1)...(19): siRNA sense strand
caacaccauuucauagaga

SEQ ID NO: 1869882 - RNA, 19 nt, Homo sapiens
  misc_RNA (1)...(19): siRNA sense strand
gcgaauaaaggaauuagaa

SEQ ID NO: 1869883 - RNA, 19 nt, Homo sapiens
  misc_RNA (1)...(19): siRNA sense strand
ccacauuucugaagcacaa

SEQ ID NO: 1869884 - RNA, 19 nt, Homo sapiens
  misc_RNA (1)...(19): siRNA sense strand
cagaagaacagucauuuga

SEQ ID NO: 1869885 - RNA, 19 nt, Homo sapiens
  misc_RNA (1)...(19): siRNA sense strand
ccacuggaauucuacaaug

SEQ ID NO: 1869886 - RNA, 19 nt, Homo sapiens
  misc_RNA (1)...(19): siRNA sense strand
gacacccucucaucuagua

SEQ ID NO: 1869887 - RNA, 19 nt, Homo sapiens
  misc_RNA (1)...(19): siRNA sense strand
caagaacuccuacaccauu

SEQ ID NO: 1869888 - RNA, 19 nt, Homo sapiens
  misc_RNA (1)...(19): siRNA sense strand
ccucauuggucacaaauug

SEQ ID NO: 1869889 - RNA, 19 nt, Homo sapiens
  misc_RNA (1)...(19): siRNA sense strand
caacgacuauuccuauuac

SEQ ID NO: 1869890 - RNA, 19 nt, Homo sapiens
  misc_RNA (1)...(19): siRNA sense strand
gaugaggacuuugagaugu

SEQ ID NO: 1869891 - RNA, 19 nt, Homo sapiens
  misc_RNA (1)...(19): siRNA sense strand
gaaauacgguccgaaacgu

SEQ ID NO: 1869892 - RNA, 19 nt, Homo sapiens
  misc_RNA (1)...(19): siRNA sense strand
caaaaugucuccagucaug

SEQ ID NO: 1869893 - RNA, 19 nt, Homo sapiens
  misc_RNA (1)...(19): siRNA sense strand
acaggaaucugaugaaucu

SEQ ID NO: 1869894 - RNA, 19 nt, Homo sapiens
  misc_RNA (1)...(19): siRNA sense strand
ggaacagaauggaacagau

SEQ ID NO: 1869895 - RNA, 19 nt, Homo sapiens
  misc_RNA (1)...(19): siRNA sense strand
gaacagaugacuggaaagu

SEQ ID NO: 1869896 - RNA, 19 nt, Homo sapiens
  misc_RNA (1)...(19): siRNA sense strand
aaacguuggucuguuauug

SEQ ID NO: 1869897 - RNA, 19 nt, Homo sapiens
  misc_RNA (1)...(19): siRNA sense strand
gugcaccuguuuccuguuu

SEQ ID NO: 1869898 - RNA, 19 nt, Homo sapiens
  misc_RNA (1)...(19): siRNA sense strand
caacacagaaccacacaug

SEQ ID NO: 1869899 - RNA, 19 nt, Homo sapiens
  misc_RNA (1)...(19): siRNA sense strand
cagagacacuauaaugaug

SEQ ID NO: 1869900 - RNA, 19 nt, Homo sapiens
  misc_RNA (1)...(19): siRNA sense strand
uggaacagaugacuggaaa

SEQ ID NO: 1869901 - RNA, 19 nt, Homo sapiens
  misc_RNA (1)...(19): siRNA sense strand
gaagaagaucagagaguga

SEQ ID NO: 1869902 - RNA, 19 nt, Homo sapiens
  misc_RNA (1)...(19): siRNA sense strand
uccauacccuguagcguua

SEQ ID NO: 1869903 - RNA, 19 nt, Homo sapiens
  misc_RNA (1)...(19): siRNA sense strand
aaacaggaaucugaugaau

SEQ ID NO: 1869904 - RNA, 19 nt, Homo sapiens
  misc_RNA (1)...(19): siRNA sense strand
gcagugacgaggaugauga

SEQ ID NO: 1869905 - RNA, 19 nt, Homo sapiens
  misc_RNA (1)...(19): siRNA sense strand
gagacacuauaaugaugaa

SEQ ID NO: 1869906 - RNA, 19 nt, Homo sapiens
  misc_RNA (1)...(19): siRNA sense strand
gggcagaaaucgcaaagcu

SEQ ID NO: 1869907 - RNA, 19 nt, Homo sapiens
  misc_RNA (1)...(19): siRNA sense strand
guuacaacaccauuucaua

SEQ ID NO: 1869908 - RNA, 19 nt, Homo sapiens
  misc_RNA (1)...(19): siRNA sense strand
gaauccagaaguuaagaaa

SEQ ID NO: 1869909 - RNA, 19 nt, Homo sapiens
  misc_RNA (1)...(19): siRNA sense strand
gaagaugaagacaauguuc

SEQ ID NO: 1869910 - RNA, 19 nt, Homo sapiens
  misc_RNA (1)...(19): siRNA sense strand
caaccgagaaugagcuaaa

SEQ ID NO: 1869911 - RNA, 19 nt, Homo sapiens
  misc_RNA (1)...(19): siRNA sense strand
ugaagacccugagaaggaa

SEQ ID NO: 1869912 - RNA, 19 nt, Homo sapiens
  misc_RNA (1)...(19): siRNA sense strand
cagucaagcucguaaauac

SEQ ID NO: 1869913 - RNA, 19 nt, Homo sapiens
  misc_RNA (1)...(19): siRNA sense strand
uagaauugcuccuaauguc

SEQ ID NO: 1869914 - RNA, 19 nt, Homo sapiens
  misc_RNA (1)...(19): siRNA sense strand
gaauugcuccuaaugucaa

SEQ ID NO: 1869915 - RNA, 19 nt, Homo sapiens
  misc_RNA (1)...(19): siRNA sense strand
agaaagcucuccaagaacu

SEQ ID NO: 1869916 - RNA, 19 nt, Homo sapiens
  misc_RNA (1)...(19): siRNA sense strand
acaacgacuauuccuauua

SEQ ID NO: 1869917 - RNA, 19 nt, Homo sapiens
  misc_RNA (1)...(19): siRNA sense strand
ccuauuaccacauuucuga

SEQ ID NO: 1869918 - RNA, 19 nt, Homo sapiens
  misc_RNA (1)...(19): siRNA sense strand
gcaccgauggcagaaagua

SEQ ID NO: 1869919 - RNA, 19 nt, Homo sapiens
  misc_RNA (1)...(19): siRNA sense strand
cgaggaugaugaggacuuu

SEQ ID NO: 1869920 - RNA, 19 nt, Homo sapiens
  misc_RNA (1)...(19): siRNA sense strand
gaagaucugcaggauguga

SEQ ID NO: 1869921 - RNA, 19 nt, Homo sapiens
  misc_RNA (1)...(19): siRNA sense strand
ucagacacccucucaucua

SEQ ID NO: 1869922 - RNA, 19 nt, Homo sapiens
  misc_RNA (1)...(19): siRNA sense strand
gacagaagaggaagacaga

SEQ ID NO: 1869923 - RNA, 19 nt, Homo sapiens
  misc_RNA (1)...(19): siRNA sense strand
cgagaugcaccgaauauuc

SEQ ID NO: 1869924 - RNA, 19 nt, Homo sapiens
  misc_RNA (1)...(19): siRNA sense strand
gagaugcaccgaauauucu

SEQ ID NO: 1869925 - RNA, 19 nt, Homo sapiens
  misc_RNA (1)...(19): siRNA sense strand
ggacgaacugauaaugcua

SEQ ID NO: 1869926 - RNA, 19 nt, Homo sapiens
  misc_RNA (1)...(19): siRNA sense strand
caccgaauauucuuacaag

SEQ ID NO: 1869927 - RNA, 19 nt, Homo sapiens
  misc_RNA (1)...(19): siRNA sense strand
ucaaacaggaaucugauga

SEQ ID NO: 1869928 - RNA, 19 nt, Homo sapiens
  misc_RNA (1)...(19): siRNA sense strand
aaaggucaaucuuagaaag

SEQ ID NO: 1869929 - RNA, 19 nt, Homo sapiens
  misc_RNA (1)...(19): siRNA sense strand
gaaacguuggucuguuauu

SEQ ID NO: 1869930 - RNA, 19 nt, Homo sapiens
  misc_RNA (1)...(19): siRNA sense strand
ccagucaagcucguaaaua

SEQ ID NO: 1869931 - RNA, 19 nt, Homo sapiens
  misc_RNA (1)...(19): siRNA sense strand
gaaggggacagucugaaua

SEQ ID NO: 1869932 - RNA, 19 nt, Homo sapiens
  misc_RNA (1)...(19): siRNA sense strand
caaacaggaaucugaugaa

SEQ ID NO: 1869933 - RNA, 19 nt, Homo sapiens
  misc_RNA (1)...(19): siRNA sense strand
cagacacccucucaucuag

SEQ ID NO: 1869934 - RNA, 19 nt, Homo sapiens
  misc_RNA (1)...(19): siRNA sense strand
guagggagagguggcauaa

SEQ ID NO: 1869935 - RNA, 19 nt, Homo sapiens
  misc_RNA (1)...(19): siRNA sense strand
uaaugucaaccgagaauga

SEQ ID NO: 1869936 - RNA, 19 nt, Homo sapiens
  misc_RNA (1)...(19): siRNA sense strand
gcaccgaauauucuuacaa

SEQ ID NO: 1869937 - RNA, 19 nt, Homo sapiens
  misc_RNA (1)...(19): siRNA sense strand
uagagcuuguacagaaaua

SEQ ID NO: 1869938 - RNA, 19 nt, Homo sapiens
  misc_RNA (1)...(19): siRNA sense strand
gaagacaauguucucaaag

SEQ ID NO: 1869939 - RNA, 19 nt, Homo sapiens
  misc_RNA (1)...(19): siRNA sense strand
aaacucagacuuggaaaug

SEQ ID NO: 1869940 - RNA, 19 nt, Homo sapiens
  misc_RNA (1)...(19): siRNA sense strand
ugcagaaacacuccaauuu

SEQ ID NO: 1869941 - RNA, 19 nt, Homo sapiens
  misc_RNA (1)...(19): siRNA sense strand
gcaccuguuuccuguuugg

SEQ ID NO: 1869942 - RNA, 19 nt, Homo sapiens
  misc_RNA (1)...(19): siRNA sense strand
acagucauuugauggguuu

SEQ ID NO: 1869943 - RNA, 19 nt, Homo sapiens
  misc_RNA (1)...(19): siRNA sense strand
agaggaagacagaauuauu

SEQ ID NO: 1869944 - RNA, 19 nt, Homo sapiens
  misc_RNA (1)...(19): siRNA sense strand
acagaaauacgguccgaaa

SEQ ID NO: 1869945 - RNA, 19 nt, Homo sapiens
  misc_RNA (1)...(19): siRNA sense strand
gaaagauggaggagcagau

SEQ ID NO: 1869946 - RNA, 19 nt, Homo sapiens
  misc_RNA (1)...(19): siRNA sense strand
uggauuuguugcugaguuu

SEQ ID NO: 1869947 - RNA, 19 nt, Homo sapiens
  misc_RNA (1)...(19): siRNA sense strand
ucagagacacuauaaugau

SEQ ID NO: 1869948 - RNA, 19 nt, Homo sapiens
  misc_RNA (1)...(19): siRNA sense strand
gaaaagcgaauaaaggaau

SEQ ID NO: 1869949 - RNA, 19 nt, Homo sapiens
  misc_RNA (1)...(19): siRNA sense strand
agacaauguucucaaagca

SEQ ID NO: 1869950 - RNA, 19 nt, Homo sapiens
  misc_RNA (1)...(19): siRNA sense strand
uaaaucaggaaacuucuuc

SEQ ID NO: 1869951 - RNA, 19 nt, Homo sapiens
  misc_RNA (1)...(19): siRNA sense strand
gaccacccuuacugaagaa

SEQ ID NO: 1869952 - RNA, 19 nt, Homo sapiens
  misc_RNA (1)...(19): siRNA sense strand
gaugugugaccaugacuau

SEQ ID NO: 1869953 - RNA, 19 nt, Homo sapiens
  misc_RNA (1)...(19): siRNA sense strand
uaaggaagaugaagagauu

SEQ ID NO: 1869954 - RNA, 19 nt, Homo sapiens
  misc_RNA (1)...(19): siRNA sense strand
gggaaaggaugauaaggaa

SEQ ID NO: 1869955 - RNA, 19 nt, Homo sapiens
  misc_RNA (1)...(19): siRNA sense strand
gaggacaucuggaagaaau

SEQ ID NO: 1869956 - RNA, 19 nt, Homo sapiens
  misc_RNA (1)...(19): siRNA sense strand
ccaaacccauccauuauga

SEQ ID NO: 1869957 - RNA, 19 nt, Homo sapiens
  misc_RNA (1)...(19): siRNA sense strand
gaacccagcccucagcuuu

SEQ ID NO: 1869958 - RNA, 19 nt, Homo sapiens
  misc_RNA (1)...(19): siRNA sense strand
gaaaucgacgugacaguaa

SEQ ID NO: 1869959 - RNA, 19 nt, Homo sapiens
  misc_RNA (1)...(19): siRNA sense strand
gaaaggaugauaaggaaga

SEQ ID NO: 1869960 - RNA, 19 nt, Homo sapiens
  misc_RNA (1)...(19): siRNA sense strand
gaacuacgccucccucauc

SEQ ID NO: 1869961 - RNA, 19 nt, Homo sapiens
  misc_RNA (1)...(19): siRNA sense strand
gaggauggcuacggagaaa

SEQ ID NO: 1869962 - RNA, 19 nt, Homo sapiens
  misc_RNA (1)...(19): siRNA sense strand
gcaugaaucucuuccacau

SEQ ID NO: 1869963 - RNA, 19 nt, Homo sapiens
  misc_RNA (1)...(19): siRNA sense strand
gcucgaagccggcaaccua

SEQ ID NO: 1869964 - RNA, 19 nt, Homo sapiens
  misc_RNA (1)...(19): siRNA sense strand
ggaagaaauucgaguuggu

SEQ ID NO: 1869965 - RNA, 19 nt, Homo sapiens
  misc_RNA (1)...(19): siRNA sense strand
gcucuaggguuuccaaagu

SEQ ID NO: 1869966 - RNA, 19 nt, Homo sapiens
  misc_RNA (1)...(19): siRNA sense strand
gaagaugaagagauuguga

SEQ ID NO: 1869967 - RNA, 19 nt, Homo sapiens
  misc_RNA (1)...(19): siRNA sense strand
gcaagagacggaaugauca

SEQ ID NO: 1869968 - RNA, 19 nt, Homo sapiens
  misc_RNA (1)...(19): siRNA sense strand
caaggccacggaauacuua

SEQ ID NO: 1869969 - RNA, 19 nt, Homo sapiens
  misc_RNA (1)...(19): siRNA sense strand
gcgaggacaucuggaagaa

SEQ ID NO: 1869970 - RNA, 19 nt, Homo sapiens
  misc_RNA (1)...(19): siRNA sense strand
caaccuagcgcccaucuuc

SEQ ID NO: 1869971 - RNA, 19 nt, Homo sapiens
  misc_RNA (1)...(19): siRNA sense strand
aaacccauccauuaugaua

SEQ ID NO: 1869972 - RNA, 19 nt, Homo sapiens
  misc_RNA (1)...(19): siRNA sense strand
caacuaugcugccccuuuu

SEQ ID NO: 1869973 - RNA, 19 nt, Homo sapiens
  misc_RNA (1)...(19): siRNA sense strand
gaucaacguucgcgguucu

SEQ ID NO: 1869974 - RNA, 19 nt, Homo sapiens
  misc_RNA (1)...(19): siRNA sense strand
gcccaaacccauccauuau

SEQ ID NO: 1869975 - RNA, 19 nt, Homo sapiens
  misc_RNA (1)...(19): siRNA sense strand
acucguaccaucacuauuu

SEQ ID NO: 1869976 - RNA, 19 nt, Homo sapiens
  misc_RNA (1)...(19): siRNA sense strand
gccagcugcucuaggguuu

SEQ ID NO: 1869977 - RNA, 19 nt, Homo sapiens
  misc_RNA (1)...(19): siRNA sense strand
ucuaggguuuccaaaguaa

SEQ ID NO: 1869978 - RNA, 19 nt, Homo sapiens
  misc_RNA (1)...(19): siRNA sense strand
cagcuuuggucuccuggaa

SEQ ID NO: 1869979 - RNA, 19 nt, Homo sapiens
  misc_RNA (1)...(19): siRNA sense strand
ccaaaguaaugauccuagu

SEQ ID NO: 1869980 - RNA, 19 nt, Homo sapiens
  misc_RNA (1)...(19): siRNA sense strand
agaaaucgacgugacagua

SEQ ID NO: 1869981 - RNA, 19 nt, Homo sapiens
  misc_RNA (1)...(19): siRNA sense strand
aaaucgacgugacaguaaa

SEQ ID NO: 1869982 - RNA, 19 nt, Homo sapiens
  misc_RNA (1)...(19): siRNA sense strand
ggaccaagaagaaguacca

SEQ ID NO: 1869983 - RNA, 19 nt, Homo sapiens
  misc_RNA (1)...(19): siRNA sense strand
ggacaucuggaagaaauuc

SEQ ID NO: 1869984 - RNA, 19 nt, Homo sapiens
  misc_RNA (1)...(19): siRNA sense strand
gagccucccaccuguagaa

SEQ ID NO: 1869985 - RNA, 19 nt, Homo sapiens
  misc_RNA (1)...(19): siRNA sense strand
gagacggaaugaucaacgu

SEQ ID NO: 1869986 - RNA, 19 nt, Homo sapiens
  misc_RNA (1)...(19): siRNA sense strand
caagagacggaaugaucaa

SEQ ID NO: 1869987 - RNA, 19 nt, Homo sapiens
  misc_RNA (1)...(19): siRNA sense strand
cgacggcaauugcagaaaa

SEQ ID NO: 1869988 - RNA, 19 nt, Homo sapiens
  misc_RNA (1)...(19): siRNA sense strand
aaaguaaugauccuaguca

SEQ ID NO: 1869989 - RNA, 19 nt, Homo sapiens
  misc_RNA (1)...(19): siRNA sense strand
ccucccaccuguagaaagu

SEQ ID NO: 1869990 - RNA, 19 nt, Homo sapiens
  misc_RNA (1)...(19): siRNA sense strand
agaagaaguaccacagcua

SEQ ID NO: 1869991 - RNA, 19 nt, Homo sapiens
  misc_RNA (1)...(19): siRNA sense strand
agcccaaacccauccauua

SEQ ID NO: 1869992 - RNA, 19 nt, Homo sapiens
  misc_RNA (1)...(19): siRNA sense strand
cgacucguaccaucacuau

SEQ ID NO: 1869993 - RNA, 19 nt, Homo sapiens
  misc_RNA (1)...(19): siRNA sense strand
ccauuaugauacugagaau

SEQ ID NO: 1869994 - RNA, 19 nt, Homo sapiens
  misc_RNA (1)...(19): siRNA sense strand
gacgugacaguaaagaaga

SEQ ID NO: 1869995 - RNA, 19 nt, Homo sapiens
  misc_RNA (1)...(19): siRNA sense strand
cgacuccgagggugaagaa

SEQ ID NO: 1869996 - RNA, 19 nt, Homo sapiens
  misc_RNA (1)...(19): siRNA sense strand
ucaaggccacggaauacuu

SEQ ID NO: 1869997 - RNA, 19 nt, Homo sapiens
  misc_RNA (1)...(19): siRNA sense strand
cgacgugacaguaaagaag

SEQ ID NO: 1869998 - RNA, 19 nt, Homo sapiens
  misc_RNA (1)...(19): siRNA sense strand
caggacuacuggaaagcuu

SEQ ID NO: 1869999 - RNA, 19 nt, Homo sapiens
  misc_RNA (1)...(19): siRNA sense strand
uagucaaggccacggaaua

SEQ ID NO: 1870000 - RNA, 19 nt, Homo sapiens
  misc_RNA (1)...(19): siRNA sense strand
augaaucucuuccacaucu

SEQ ID NO: 1870001 - RNA, 19 nt, Homo sapiens
  misc_RNA (1)...(19): siRNA sense strand
caaaguaaugauccuaguc

SEQ ID NO: 1870002 - RNA, 19 nt, Homo sapiens
  misc_RNA (1)...(19): siRNA sense strand
cucuaggguuuccaaagua

SEQ ID NO: 1870003 - RNA, 19 nt, Homo sapiens
  misc_RNA (1)...(19): siRNA sense strand
gagcgcaagagacggaaug

SEQ ID NO: 1870004 - RNA, 19 nt, Homo sapiens
  misc_RNA (1)...(19): siRNA sense strand
ugaagaaaucgacgugaca

SEQ ID NO: 1870005 - RNA, 19 nt, Homo sapiens
  misc_RNA (1)...(19): siRNA sense strand
cgcaagagacggaaugauc

SEQ ID NO: 1870006 - RNA, 19 nt, Homo sapiens
  misc_RNA (1)...(19): siRNA sense strand
agacggaaucccaggacua

SEQ ID NO: 1870007 - RNA, 19 nt, Homo sapiens
  misc_RNA (1)...(19): siRNA sense strand
gauaaggaagaugaagaga

SEQ ID NO: 1870008 - RNA, 19 nt, Homo sapiens
  misc_RNA (1)...(19): siRNA sense strand
ccagcaacagcacaacuau

SEQ ID NO: 1870009 - RNA, 19 nt, Homo sapiens
  misc_RNA (1)...(19): siRNA sense strand
gcggaagccagucaucauc

SEQ ID NO: 1870010 - RNA, 19 nt, Homo sapiens
  misc_RNA (1)...(19): siRNA sense strand
cuccgagggugaagaaauc

SEQ ID NO: 1870011 - RNA, 19 nt, Homo sapiens
  misc_RNA (1)...(19): siRNA sense strand
ggaagaugaagagauugug

SEQ ID NO: 1870012 - RNA, 19 nt, Homo sapiens
  misc_RNA (1)...(19): siRNA sense strand
aagcuugggacgcgaacua

SEQ ID NO: 1870013 - RNA, 19 nt, Homo sapiens
  misc_RNA (1)...(19): siRNA sense strand
ucacuauuucuacgacuau

SEQ ID NO: 1870014 - RNA, 19 nt, Homo sapiens
  misc_RNA (1)...(19): siRNA sense strand
aggaugauaaggaagauga

SEQ ID NO: 1870015 - RNA, 19 nt, Homo sapiens
  misc_RNA (1)...(19): siRNA sense strand
aaaggaugauaaggaagau

SEQ ID NO: 1870016 - RNA, 19 nt, Homo sapiens
  misc_RNA (1)...(19): siRNA sense strand
caagaaggggcuccaaaga

SEQ ID NO: 1870017 - RNA, 19 nt, Homo sapiens
  misc_RNA (1)...(19): siRNA sense strand
cguaccaucacuauuucua

SEQ ID NO: 1870018 - RNA, 19 nt, Homo sapiens
  misc_RNA (1)...(19): siRNA sense strand
ggaugauaaggaagaugaa

SEQ ID NO: 1870019 - RNA, 19 nt, Homo sapiens
  misc_RNA (1)...(19): siRNA sense strand
ggaggaaggucucaacgua

SEQ ID NO: 1870020 - RNA, 19 nt, Homo sapiens
  misc_RNA (1)...(19): siRNA sense strand
ccacagcauuccugaaaua

SEQ ID NO: 1870021 - RNA, 19 nt, Homo sapiens
  misc_RNA (1)...(19): siRNA sense strand
ggaaagacauggagauucu

SEQ ID NO: 1870022 - RNA, 19 nt, Homo sapiens
  misc_RNA (1)...(19): siRNA sense strand
aaacagacguuagguagua

SEQ ID NO: 1870023 - RNA, 19 nt, Homo sapiens
  misc_RNA (1)...(19): siRNA sense strand
gaaauugaauccacuaaac

SEQ ID NO: 1870024 - RNA, 19 nt, Homo sapiens
  misc_RNA (1)...(19): siRNA sense strand
caucugaacuaaugaaugu

SEQ ID NO: 1870025 - RNA, 19 nt, Homo sapiens
  misc_RNA (1)...(19): siRNA sense strand
cgacauccaucugaacuaa

SEQ ID NO: 1870026 - RNA, 19 nt, Homo sapiens
  misc_RNA (1)...(19): siRNA sense strand
gcaccaggauauuggauug

SEQ ID NO: 1870027 - RNA, 19 nt, Homo sapiens
  misc_RNA (1)...(19): siRNA sense strand
uaacucauguucuguacuu

SEQ ID NO: 1870028 - RNA, 19 nt, Homo sapiens
  misc_RNA (1)...(19): siRNA sense strand
gauauuggauugccuagag

SEQ ID NO: 1870029 - RNA, 19 nt, Homo sapiens
  misc_RNA (1)...(19): siRNA sense strand
ugaaauacauccaggaaag

SEQ ID NO: 1870030 - RNA, 19 nt, Homo sapiens
  misc_RNA (1)...(19): siRNA sense strand
gaagagcccuuggagagau

SEQ ID NO: 1870031 - RNA, 19 nt, Homo sapiens
  misc_RNA (1)...(19): siRNA sense strand
gagcaaguuuggauuaaag

SEQ ID NO: 1870032 - RNA, 19 nt, Homo sapiens
  misc_RNA (1)...(19): siRNA sense strand
gaagaggaaucggaguaga

SEQ ID NO: 1870033 - RNA, 19 nt, Homo sapiens
  misc_RNA (1)...(19): siRNA sense strand
acaaaugcuugcucuacua

SEQ ID NO: 1870034 - RNA, 19 nt, Homo sapiens
  misc_RNA (1)...(19): siRNA sense strand
gaccacagcauuccugaaa

SEQ ID NO: 1870035 - RNA, 19 nt, Homo sapiens
  misc_RNA (1)...(19): siRNA sense strand
ggagaggcauaaccgaaug

SEQ ID NO: 1870036 - RNA, 19 nt, Homo sapiens
  misc_RNA (1)...(19): siRNA sense strand
gaauguuccucuucagcaa

SEQ ID NO: 1870037 - RNA, 19 nt, Homo sapiens
  misc_RNA (1)...(19): siRNA sense strand
caacuacugcuuugcaauu

SEQ ID NO: 1870038 - RNA, 19 nt, Homo sapiens
  misc_RNA (1)...(19): siRNA sense strand
ggaauuugagagcguauuu

SEQ ID NO: 1870039 - RNA, 19 nt, Homo sapiens
  misc_RNA (1)...(19): siRNA sense strand
caacguagggagaggcaua

SEQ ID NO: 1870040 - RNA, 19 nt, Homo sapiens
  misc_RNA (1)...(19): siRNA sense strand
agacacagaguucuaguaa

SEQ ID NO: 1870041 - RNA, 19 nt, Homo sapiens
  misc_RNA (1)...(19): siRNA sense strand
gaaauacauccaggaaaga

SEQ ID NO: 1870042 - RNA, 19 nt, Homo sapiens
  misc_RNA (1)...(19): siRNA sense strand
caauuuacauacccacugu

SEQ ID NO: 1870043 - RNA, 19 nt, Homo sapiens
  misc_RNA (1)...(19): siRNA sense strand
ggaguagaaugcgucaguu

SEQ ID NO: 1870044 - RNA, 19 nt, Homo sapiens
  misc_RNA (1)...(19): siRNA sense strand
uggauugccuagagcauuu

SEQ ID NO: 1870045 - RNA, 19 nt, Homo sapiens
  misc_RNA (1)...(19): siRNA sense strand
cagcauuccugaaauacau

SEQ ID NO: 1870046 - RNA, 19 nt, Homo sapiens
  misc_RNA (1)...(19): siRNA sense strand
ugaguugaaucucuuagug

SEQ ID NO: 1870047 - RNA, 19 nt, Homo sapiens
  misc_RNA (1)...(19): siRNA sense strand
aacaagcacugaagaggaa

SEQ ID NO: 1870048 - RNA, 19 nt, Homo sapiens
  misc_RNA (1)...(19): siRNA sense strand
ucacagacacagaguucua

SEQ ID NO: 1870049 - RNA, 19 nt, Homo sapiens
  misc_RNA (1)...(19): siRNA sense strand
gugaugaguugaaucucuu

SEQ ID NO: 1870050 - RNA, 19 nt, Homo sapiens
  misc_RNA (1)...(19): siRNA sense strand
ucuaguaacucauguucug

SEQ ID NO: 1870051 - RNA, 19 nt, Homo sapiens
  misc_RNA (1)...(19): siRNA sense strand
ugagcaaguuuggauuaaa

SEQ ID NO: 1870052 - RNA, 19 nt, Homo sapiens
  misc_RNA (1)...(19): siRNA sense strand
caagaaauugaauccacua

SEQ ID NO: 1870053 - RNA, 19 nt, Homo sapiens
  misc_RNA (1)...(19): siRNA sense strand
gagaagcagcgcuaugcaa

SEQ ID NO: 1870054 - RNA, 19 nt, Homo sapiens
  misc_RNA (1)...(19): siRNA sense strand
acacgcagcugcagcacau

SEQ ID NO: 1870055 - RNA, 19 nt, Homo sapiens
  misc_RNA (1)...(19): siRNA sense strand
gcaaacaagcacugaagag

SEQ ID NO: 1870056 - RNA, 19 nt, Homo sapiens
  misc_RNA (1)...(19): siRNA sense strand
gcagcgcuaugcaaacaag

SEQ ID NO: 1870057 - RNA, 19 nt, Homo sapiens
  misc_RNA (1)...(19): siRNA sense strand
gcucaacaauuugguaacu

SEQ ID NO: 1870058 - RNA, 19 nt, Homo sapiens
  misc_RNA (1)...(19): siRNA sense strand
guuaucagcaagaaauuga

SEQ ID NO: 1870059 - RNA, 19 nt, Homo sapiens
  misc_RNA (1)...(19): siRNA sense strand
aggcauaaccgaauggaaa

SEQ ID NO: 1870060 - RNA, 19 nt, Homo sapiens
  misc_RNA (1)...(19): siRNA sense strand
gauagaaggcgcagaaucc

SEQ ID NO: 1870061 - RNA, 19 nt, Homo sapiens
  misc_RNA (1)...(19): siRNA sense strand
ugacggagguggaguacac

SEQ ID NO: 1870062 - RNA, 19 nt, Homo sapiens
  misc_RNA (1)...(19): siRNA sense strand
cauuugcugugaugaguug

SEQ ID NO: 1870063 - RNA, 19 nt, Homo sapiens
  misc_RNA (1)...(19): siRNA sense strand
ccugagcaaguuuggauua

SEQ ID NO: 1870064 - RNA, 19 nt, Homo sapiens
  misc_RNA (1)...(19): siRNA sense strand
gacguuagguaguagaaac

SEQ ID NO: 1870065 - RNA, 19 nt, Homo sapiens
  misc_RNA (1)...(19): siRNA sense strand
acuacugcuuugcaauuua

SEQ ID NO: 1870066 - RNA, 19 nt, Homo sapiens
  misc_RNA (1)...(19): siRNA sense strand
acauccaucugaacuaaug

SEQ ID NO: 1870067 - RNA, 19 nt, Homo sapiens
  misc_RNA (1)...(19): siRNA sense strand
gcgcucaacaauuugguaa

SEQ ID NO: 1870068 - RNA, 19 nt, Homo sapiens
  misc_RNA (1)...(19): siRNA sense strand
ucaguuggacacaaaugua

SEQ ID NO: 1870069 - RNA, 19 nt, Homo sapiens
  misc_RNA (1)...(19): siRNA sense strand
agaagcagcgcuaugcaaa

SEQ ID NO: 1870070 - RNA, 19 nt, Homo sapiens
  misc_RNA (1)...(19): siRNA sense strand
ucaacaauuugguaacucu

SEQ ID NO: 1870071 - RNA, 19 nt, Homo sapiens
  misc_RNA (1)...(19): siRNA sense strand
guuagguaguagaaacaaa

SEQ ID NO: 1870072 - RNA, 19 nt, Homo sapiens
  misc_RNA (1)...(19): siRNA sense strand
aagcagcgcuaugcaaaca

SEQ ID NO: 1870073 - RNA, 19 nt, Homo sapiens
  misc_RNA (1)...(19): siRNA sense strand
gagcguauuuugcgguaaa

SEQ ID NO: 1870074 - RNA, 19 nt, Homo sapiens
  misc_RNA (1)...(19): siRNA sense strand
gaauccgcauuugcuguga

SEQ ID NO: 1870075 - RNA, 19 nt, Homo sapiens
  misc_RNA (1)...(19): siRNA sense strand
agagauagaaggcgcagaa

SEQ ID NO: 1870076 - RNA, 19 nt, Homo sapiens
  misc_RNA (1)...(19): siRNA sense strand
guagaaugcgucaguugga

SEQ ID NO: 1870077 - RNA, 19 nt, Homo sapiens
  misc_RNA (1)...(19): siRNA sense strand
caaaacaaauguacagcau

SEQ ID NO: 1870078 - RNA, 19 nt, Homo sapiens
  misc_RNA (1)...(19): siRNA sense strand
gcaaugccgagacugacaa

SEQ ID NO: 1870079 - RNA, 19 nt, Homo sapiens
  misc_RNA (1)...(19): siRNA sense strand
ggcuacaacuacugcuuug

SEQ ID NO: 1870080 - RNA, 19 nt, Homo sapiens
  misc_RNA (1)...(19): siRNA sense strand
uuacauacccacuguuuac

SEQ ID NO: 1870081 - RNA, 19 nt, Homo sapiens
  misc_RNA (1)...(19): siRNA sense strand
gagcauuuucuuucuguua

SEQ ID NO: 1870082 - RNA, 19 nt, Homo sapiens
  misc_RNA (1)...(19): siRNA sense strand
gggagaggcauaaccgaau

SEQ ID NO: 1870083 - RNA, 19 nt, Homo sapiens
  misc_RNA (1)...(19): siRNA sense strand
gaguagaaugcgucaguug

SEQ ID NO: 1870084 - RNA, 19 nt, Homo sapiens
  misc_RNA (1)...(19): siRNA sense strand
cugagcaaguuuggauuaa

SEQ ID NO: 1870085 - RNA, 19 nt, Homo sapiens
  misc_RNA (1)...(19): siRNA sense strand
aaacugcggcuacaacuac

SEQ ID NO: 1870086 - RNA, 19 nt, Homo sapiens
  misc_RNA (1)...(19): siRNA sense strand
caggaaagacauggagauu

SEQ ID NO: 1870087 - RNA, 19 nt, Homo sapiens
  misc_RNA (1)...(19): siRNA sense strand
cuacuaguggaaauucuaa

SEQ ID NO: 1870088 - RNA, 19 nt, Homo sapiens
  misc_RNA (1)...(19): siRNA sense strand
cuacugcuuugcaauuuac

SEQ ID NO: 1870089 - RNA, 19 nt, Homo sapiens
  misc_RNA (1)...(19): siRNA sense strand
cauacccacuguuuacuac

SEQ ID NO: 1870090 - RNA, 19 nt, Homo sapiens
  misc_RNA (1)...(19): siRNA sense strand
uuagugccguucugcaaug

SEQ ID NO: 1870091 - RNA, 19 nt, Homo sapiens
  misc_RNA (1)...(19): siRNA sense strand
gaauggaaagagauagaag

SEQ ID NO: 1870092 - RNA, 19 nt, Homo sapiens
  misc_RNA (1)...(19): siRNA sense strand
gccaagcaccaggauauug

SEQ ID NO: 1870093 - RNA, 19 nt, Homo sapiens
  misc_RNA (1)...(19): siRNA sense strand
guaacucucauucgacauc

SEQ ID NO: 1870094 - RNA, 19 nt, Homo sapiens
  misc_RNA (1)...(19): siRNA sense strand
cgaagagcccuuggagaga

SEQ ID NO: 1870095 - RNA, 19 nt, Homo sapiens
  misc_RNA (1)...(19): siRNA sense strand
gauuaaagugggagaagca

SEQ ID NO: 1870096 - RNA, 19 nt, Homo sapiens
  misc_RNA (1)...(19): siRNA sense strand
caaaugcuugcucuacuag

SEQ ID NO: 1870097 - RNA, 19 nt, Homo sapiens
  misc_RNA (1)...(19): siRNA sense strand
gcacaggggaguuuacaga

SEQ ID NO: 1870098 - RNA, 19 nt, Homo sapiens
  misc_RNA (1)...(19): siRNA sense strand
gcaaguuuggauuaaagug

SEQ ID NO: 1870099 - RNA, 19 nt, Homo sapiens
  misc_RNA (1)...(19): siRNA sense strand
acuaaugaauguuccucuu

SEQ ID NO: 1870100 - RNA, 19 nt, Homo sapiens
  misc_RNA (1)...(19): siRNA sense strand
cagacacagaguucuagua

SEQ ID NO: 1870101 - RNA, 19 nt, Homo sapiens
  misc_RNA (1)...(19): siRNA sense strand
cugaagaggaaucggagua

SEQ ID NO: 1870102 - RNA, 19 nt, Homo sapiens
  misc_RNA (1)...(19): siRNA sense strand
cgaauggaaagagauagaa

SEQ ID NO: 1870103 - RNA, 19 nt, Homo sapiens
  misc_RNA (1)...(19): siRNA sense strand
cggcuacaacuacugcuuu

SEQ ID NO: 1870104 - RNA, 19 nt, Homo sapiens
  misc_RNA (1)...(19): siRNA sense strand
uuugguaacucucauucga

SEQ ID NO: 1870105 - RNA, 19 nt, Homo sapiens
  misc_RNA (1)...(19): siRNA sense strand
aaugcuugcucuacuagug

SEQ ID NO: 1870106 - RNA, 19 nt, Homo sapiens
  misc_RNA (1)...(19): siRNA sense strand
uacaacuacugcuuugcaa

SEQ ID NO: 1870107 - RNA, 19 nt, Homo sapiens
  misc_RNA (1)...(19): siRNA sense strand
aacuacugcuuugcaauuu

SEQ ID NO: 1870108 - RNA, 19 nt, Homo sapiens
  misc_RNA (1)...(19): siRNA sense strand
ugugaugaguugaaucucu

SEQ ID NO: 1870109 - RNA, 19 nt, Homo sapiens
  misc_RNA (1)...(19): siRNA sense strand
cauucgacauccaucugaa

SEQ ID NO: 1870110 - RNA, 19 nt, Homo sapiens
  misc_RNA (1)...(19): siRNA sense strand
aagaggaaucggaguagaa

SEQ ID NO: 1870111 - RNA, 19 nt, Homo sapiens
  misc_RNA (1)...(19): siRNA sense strand
uaguaacucauguucugua

SEQ ID NO: 1870112 - RNA, 19 nt, Homo sapiens
  misc_RNA (1)...(19): siRNA sense strand
uacaaaugcuugcucuacu

SEQ ID NO: 1870113 - RNA, 19 nt, Homo sapiens
  misc_RNA (1)...(19): siRNA sense strand
uacccacuguuuacuacaa

SEQ ID NO: 1870114 - RNA, 19 nt, Homo sapiens
  misc_RNA (1)...(19): siRNA sense strand
cuaaugaauguuccucuuc

SEQ ID NO: 1870115 - RNA, 19 nt, Homo sapiens
  misc_RNA (1)...(19): siRNA sense strand
gcugugaugaguugaaucu

SEQ ID NO: 1870116 - RNA, 19 nt, Homo sapiens
  misc_RNA (1)...(19): siRNA sense strand
caauuugguaacucucauu

SEQ ID NO: 1870117 - RNA, 19 nt, Homo sapiens
  misc_RNA (1)...(19): siRNA sense strand
ggaccacagcauuccugaa

SEQ ID NO: 1870118 - RNA, 19 nt, Homo sapiens
  misc_RNA (1)...(19): siRNA sense strand
ggagaagcagcgcuaugca

SEQ ID NO: 1870119 - RNA, 19 nt, Homo sapiens
  misc_RNA (1)...(19): siRNA sense strand
gcacauggaugcauucuau

SEQ ID NO: 1870120 - RNA, 19 nt, Homo sapiens
  misc_RNA (1)...(19): siRNA sense strand
gcaagaagaagcccaaaua

SEQ ID NO: 1870121 - RNA, 19 nt, Homo sapiens
  misc_RNA (1)...(19): siRNA sense strand
ggaagucgauguucucaga

SEQ ID NO: 1870122 - RNA, 19 nt, Homo sapiens
  misc_RNA (1)...(19): siRNA sense strand
ggaagauucugaugacgaa

SEQ ID NO: 1870123 - RNA, 19 nt, Homo sapiens
  misc_RNA (1)...(19): siRNA sense strand
gcacaacguucccgaugau

SEQ ID NO: 1870124 - RNA, 19 nt, Homo sapiens
  misc_RNA (1)...(19): siRNA sense strand
gggaagggaugaucucugu

SEQ ID NO: 1870125 - RNA, 19 nt, Homo sapiens
  misc_RNA (1)...(19): siRNA sense strand
gaucaucucuaaguggaaa

SEQ ID NO: 1870126 - RNA, 19 nt, Homo sapiens
  misc_RNA (1)...(19): siRNA sense strand
gcgcagggcucaagaaagg

SEQ ID NO: 1870127 - RNA, 19 nt, Homo sapiens
  misc_RNA (1)...(19): siRNA sense strand
ggaaaagccuccuagagaa

SEQ ID NO: 1870128 - RNA, 19 nt, Homo sapiens
  misc_RNA (1)...(19): siRNA sense strand
ucaguaacagcccaaauua

SEQ ID NO: 1870129 - RNA, 19 nt, Homo sapiens
  misc_RNA (1)...(19): siRNA sense strand
gauaguugggugcacauua

SEQ ID NO: 1870130 - RNA, 19 nt, Homo sapiens
  misc_RNA (1)...(19): siRNA sense strand
caacguuggugccuacaug

SEQ ID NO: 1870131 - RNA, 19 nt, Homo sapiens
  misc_RNA (1)...(19): siRNA sense strand
gggaugaucucugucucua

SEQ ID NO: 1870132 - RNA, 19 nt, Homo sapiens
  misc_RNA (1)...(19): siRNA sense strand
gggagaacauugccuaucu

SEQ ID NO: 1870133 - RNA, 19 nt, Homo sapiens
  misc_RNA (1)...(19): siRNA sense strand
gaugagaggcccagcuuug

SEQ ID NO: 1870134 - RNA, 19 nt, Homo sapiens
  misc_RNA (1)...(19): siRNA sense strand
ccaaaucuuucauggacuu

SEQ ID NO: 1870135 - RNA, 19 nt, Homo sapiens
  misc_RNA (1)...(19): siRNA sense strand
ggaagaaugcacaagguau

SEQ ID NO: 1870136 - RNA, 19 nt, Homo sapiens
  misc_RNA (1)...(19): siRNA sense strand
gaacuuuaaggaccucauu

SEQ ID NO: 1870137 - RNA, 19 nt, Homo sapiens
  misc_RNA (1)...(19): siRNA sense strand
guaacagcccaaauuauga

SEQ ID NO: 1870138 - RNA, 19 nt, Homo sapiens
  misc_RNA (1)...(19): siRNA sense strand
gaagaagcccaaauacucu

SEQ ID NO: 1870139 - RNA, 19 nt, Homo sapiens
  misc_RNA (1)...(19): siRNA sense strand
gaaccaaaucuuucaugga

SEQ ID NO: 1870140 - RNA, 19 nt, Homo sapiens
  misc_RNA (1)...(19): siRNA sense strand
uuggugagcuagucauuaa

SEQ ID NO: 1870141 - RNA, 19 nt, Homo sapiens
  misc_RNA (1)...(19): siRNA sense strand
gcauugaugaugaugauga

SEQ ID NO: 1870142 - RNA, 19 nt, Homo sapiens
  misc_RNA (1)...(19): siRNA sense strand
gaagaaugcacaagguauc

SEQ ID NO: 1870143 - RNA, 19 nt, Homo sapiens
  misc_RNA (1)...(19): siRNA sense strand
gggaaggccgcauugauga

SEQ ID NO: 1870144 - RNA, 19 nt, Homo sapiens
  misc_RNA (1)...(19): siRNA sense strand
gcaagguccuggagauggu

SEQ ID NO: 1870145 - RNA, 19 nt, Homo sapiens
  misc_RNA (1)...(19): siRNA sense strand
aagaggaguuucagaagga

SEQ ID NO: 1870146 - RNA, 19 nt, Homo sapiens
  misc_RNA (1)...(19): siRNA sense strand
ggaggaaccaaaucuuuca

SEQ ID NO: 1870147 - RNA, 19 nt, Homo sapiens
  misc_RNA (1)...(19): siRNA sense strand
gggaagaaugcacaaggua

SEQ ID NO: 1870148 - RNA, 19 nt, Homo sapiens
  misc_RNA (1)...(19): siRNA sense strand
caucgucuauccacucaug

SEQ ID NO: 1870149 - RNA, 19 nt, Homo sapiens
  misc_RNA (1)...(19): siRNA sense strand
ccucaaagacugcacuuau

SEQ ID NO: 1870150 - RNA, 19 nt, Homo sapiens
  misc_RNA (1)...(19): siRNA sense strand
cgggagaacuuugagauca

SEQ ID NO: 1870151 - RNA, 19 nt, Homo sapiens
  misc_RNA (1)...(19): siRNA sense strand
gauccgagcgcaccacuca

SEQ ID NO: 1870152 - RNA, 19 nt, Homo sapiens
  misc_RNA (1)...(19): siRNA sense strand
aggcagaguuggaagauuc

SEQ ID NO: 1870153 - RNA, 19 nt, Homo sapiens
  misc_RNA (1)...(19): siRNA sense strand
ggagugggauccccucaaa

SEQ ID NO: 1870154 - RNA, 19 nt, Homo sapiens
  misc_RNA (1)...(19): siRNA sense strand
acaagaccguggaagaguu

SEQ ID NO: 1870155 - RNA, 19 nt, Homo sapiens
  misc_RNA (1)...(19): siRNA sense strand
agaagaagcccaaauacuc

SEQ ID NO: 1870156 - RNA, 19 nt, Homo sapiens
  misc_RNA (1)...(19): siRNA sense strand
caggaggaaccaaaucuuu

SEQ ID NO: 1870157 - RNA, 19 nt, Homo sapiens
  misc_RNA (1)...(19): siRNA sense strand
gaagagaaaccuguuaagc

SEQ ID NO: 1870158 - RNA, 19 nt, Homo sapiens
  misc_RNA (1)...(19): siRNA sense strand
gcgggaggcugagaacaug

SEQ ID NO: 1870159 - RNA, 19 nt, Homo sapiens
  misc_RNA (1)...(19): siRNA sense strand
gggagcagaaggucuacua

SEQ ID NO: 1870160 - RNA, 19 nt, Homo sapiens
  misc_RNA (1)...(19): siRNA sense strand
gaagggaugaucucugucu

SEQ ID NO: 1870161 - RNA, 19 nt, Homo sapiens
  misc_RNA (1)...(19): siRNA sense strand
auaguugggugcacauuau

SEQ ID NO: 1870162 - RNA, 19 nt, Homo sapiens
  misc_RNA (1)...(19): siRNA sense strand
gagaaugaccagcucuugu

SEQ ID NO: 1870163 - RNA, 19 nt, Homo sapiens
  misc_RNA (1)...(19): siRNA sense strand
gcacuuauggcaccgagau

SEQ ID NO: 1870164 - RNA, 19 nt, Homo sapiens
  misc_RNA (1)...(19): siRNA sense strand
ucgaaacccugcaggacaa

SEQ ID NO: 1870165 - RNA, 19 nt, Homo sapiens
  misc_RNA (1)...(19): siRNA sense strand
gacgaagagaaaccuguua

SEQ ID NO: 1870166 - RNA, 19 nt, Homo sapiens
  misc_RNA (1)...(19): siRNA sense strand
gcauugugaucuacaucga

SEQ ID NO: 1870167 - RNA, 19 nt, Homo sapiens
  misc_RNA (1)...(19): siRNA sense strand
uuaaugaggcacuugauau

SEQ ID NO: 1870168 - RNA, 19 nt, Homo sapiens
  misc_RNA (1)...(19): siRNA sense strand
caaauuuaaugaggcacuu

SEQ ID NO: 1870169 - RNA, 19 nt, Homo sapiens
  misc_RNA (1)...(19): siRNA sense strand
gcaagacuucccugugguu

SEQ ID NO: 1870170 - RNA, 19 nt, Homo sapiens
  misc_RNA (1)...(19): siRNA sense strand
gaaagacacacaaaaggaa

SEQ ID NO: 1870171 - RNA, 19 nt, Homo sapiens
  misc_RNA (1)...(19): siRNA sense strand
aguaacagcccaaauuaug

SEQ ID NO: 1870172 - RNA, 19 nt, Homo sapiens
  misc_RNA (1)...(19): siRNA sense strand
gcucuuggcucaguaacag

SEQ ID NO: 1870173 - RNA, 19 nt, Homo sapiens
  misc_RNA (1)...(19): siRNA sense strand
gggaagcauucauggucaa

SEQ ID NO: 1870174 - RNA, 19 nt, Homo sapiens
  misc_RNA (1)...(19): siRNA sense strand
caggagaucauccagaaug

SEQ ID NO: 1870175 - RNA, 19 nt, Homo sapiens
  misc_RNA (1)...(19): siRNA sense strand
caaguggaagcaagaagaa

SEQ ID NO: 1870176 - RNA, 19 nt, Homo sapiens
  misc_RNA (1)...(19): siRNA sense strand
ccaaguggaagcaagaaga

SEQ ID NO: 1870177 - RNA, 19 nt, Homo sapiens
  misc_RNA (1)...(19): siRNA sense strand
gcucugugcccaugaacuu

SEQ ID NO: 1870178 - RNA, 19 nt, Homo sapiens
  misc_RNA (1)...(19): siRNA sense strand
cucaaagacugcacuuaug

SEQ ID NO: 1870179 - RNA, 19 nt, Homo sapiens
  misc_RNA (1)...(19): siRNA sense strand
gagcagaaggucuacuaca

SEQ ID NO: 1870180 - RNA, 19 nt, Homo sapiens
  misc_RNA (1)...(19): siRNA sense strand
cagaugccuuucacagguu

SEQ ID NO: 1870181 - RNA, 19 nt, Homo sapiens
  misc_RNA (1)...(19): siRNA sense strand
ucagcaagguccuggagau

SEQ ID NO: 1870182 - RNA, 19 nt, Homo sapiens
  misc_RNA (1)...(19): siRNA sense strand
ggaggaggcagaguuggaa

SEQ ID NO: 1870183 - RNA, 19 nt, Homo sapiens
  misc_RNA (1)...(19): siRNA sense strand
gauguucucagaccaagug

SEQ ID NO: 1870184 - RNA, 19 nt, Homo sapiens
  misc_RNA (1)...(19): siRNA sense strand
gaaggccgcauugaugaug

SEQ ID NO: 1870185 - RNA, 19 nt, Homo sapiens
  misc_RNA (1)...(19): siRNA sense strand
gaugugucuuggugagcua

SEQ ID NO: 1870186 - RNA, 19 nt, Homo sapiens
  misc_RNA (1)...(19): siRNA sense strand
aaaaggagguggaaaacug

SEQ ID NO: 1870187 - RNA, 19 nt, Homo sapiens
  misc_RNA (1)...(19): siRNA sense strand
ucuauccacucaugaagga

SEQ ID NO: 1870188 - RNA, 19 nt, Homo sapiens
  misc_RNA (1)...(19): siRNA sense strand
caagaagaagcccaaauac

SEQ ID NO: 1870189 - RNA, 19 nt, Homo sapiens
  misc_RNA (1)...(19): siRNA sense strand
gcaggaggaaccaaaucuu

SEQ ID NO: 1870190 - RNA, 19 nt, Homo sapiens
  misc_RNA (1)...(19): siRNA sense strand
caaaaggaauuggacagaa

SEQ ID NO: 1870191 - RNA, 19 nt, Homo sapiens
  misc_RNA (1)...(19): siRNA sense strand
ugaggcacuugauaucaug

SEQ ID NO: 1870192 - RNA, 19 nt, Homo sapiens
  misc_RNA (1)...(19): siRNA sense strand
ccgcauugaugaugaugau

SEQ ID NO: 1870193 - RNA, 19 nt, Homo sapiens
  misc_RNA (1)...(19): siRNA sense strand
agcaggagaucauccagaa

SEQ ID NO: 1870194 - RNA, 19 nt, Homo sapiens
  misc_RNA (1)...(19): siRNA sense strand
gcccaaauacucuuacaag

SEQ ID NO: 1870195 - RNA, 19 nt, Homo sapiens
  misc_RNA (1)...(19): siRNA sense strand
gaggcagaguuggaagauu

SEQ ID NO: 1870196 - RNA, 19 nt, Homo sapiens
  misc_RNA (1)...(19): siRNA sense strand
ccacucaguccaugcaaga

SEQ ID NO: 1870197 - RNA, 19 nt, Homo sapiens
  misc_RNA (1)...(19): siRNA sense strand
ggaaagacacacaaaagga

SEQ ID NO: 1870198 - RNA, 19 nt, Homo sapiens
  misc_RNA (1)...(19): siRNA sense strand
ccucucagcagaugccuuu

SEQ ID NO: 1870199 - RNA, 19 nt, Homo sapiens
  misc_RNA (1)...(19): siRNA sense strand
aagagaaaccuguuaagca

SEQ ID NO: 1870200 - RNA, 19 nt, Homo sapiens
  misc_RNA (1)...(19): siRNA sense strand
augaggagaucaccaagug

SEQ ID NO: 1870201 - RNA, 19 nt, Homo sapiens
  misc_RNA (1)...(19): siRNA sense strand
uacuacagcuacagucaga

SEQ ID NO: 1870202 - RNA, 19 nt, Homo sapiens
  misc_RNA (1)...(19): siRNA sense strand
ggagaacuuugagaucacu

SEQ ID NO: 1870203 - RNA, 19 nt, Homo sapiens
  misc_RNA (1)...(19): siRNA sense strand
guuggaagauucugaugac

SEQ ID NO: 1870204 - RNA, 19 nt, Homo sapiens
  misc_RNA (1)...(19): siRNA sense strand
caagaccguggaagaguug

SEQ ID NO: 1870205 - RNA, 19 nt, Homo sapiens
  misc_RNA (1)...(19): siRNA sense strand
cuacaccuuuggccgcauu

SEQ ID NO: 1870206 - RNA, 19 nt, Homo sapiens
  misc_RNA (1)...(19): siRNA sense strand
ucaaagacugcacuuaugg

SEQ ID NO: 1870207 - RNA, 19 nt, Homo sapiens
  misc_RNA (1)...(19): siRNA sense strand
ucacggagcaggagaucau

SEQ ID NO: 1870208 - RNA, 19 nt, Homo sapiens
  misc_RNA (1)...(19): siRNA sense strand
gaucgacauggccaaguga

SEQ ID NO: 1870209 - RNA, 19 nt, Homo sapiens
  misc_RNA (1)...(19): siRNA sense strand
gccaucgucuauccacuca

SEQ ID NO: 1870210 - RNA, 19 nt, Homo sapiens
  misc_RNA (1)...(19): siRNA sense strand
ccaagcagagaaagggaaa

SEQ ID NO: 1870211 - RNA, 19 nt, Homo sapiens
  misc_RNA (1)...(19): siRNA sense strand
uaaugaggcacuugauauc

SEQ ID NO: 1870212 - RNA, 19 nt, Homo sapiens
  misc_RNA (1)...(19): siRNA sense strand
cagcgcagggcucaagaaa

SEQ ID NO: 1870213 - RNA, 19 nt, Homo sapiens
  misc_RNA (1)...(19): siRNA sense strand
ggaagcauucauggucaaa

SEQ ID NO: 1870214 - RNA, 19 nt, Homo sapiens
  misc_RNA (1)...(19): siRNA sense strand
aaagccuccuagagaauga

SEQ ID NO: 1870215 - RNA, 19 nt, Homo sapiens
  misc_RNA (1)...(19): siRNA sense strand
uaugaggaguacaggaugu

SEQ ID NO: 1870216 - RNA, 19 nt, Homo sapiens
  misc_RNA (1)...(19): siRNA sense strand
ccaaggaagaagccaccua

SEQ ID NO: 1870217 - RNA, 19 nt, Homo sapiens
  misc_RNA (1)...(19): siRNA sense strand
gggcaggauuagcaagaag

SEQ ID NO: 1870218 - RNA, 19 nt, Homo sapiens
  misc_RNA (1)...(19): siRNA sense strand
gccaagggcaggauuagca

SEQ ID NO: 1870219 - RNA, 19 nt, Homo sapiens
  misc_RNA (1)...(19): siRNA sense strand
ggacacagcuucuggaucu

SEQ ID NO: 1870220 - RNA, 19 nt, Homo sapiens
  misc_RNA (1)...(19): siRNA sense strand
ggacauugccuauaccuau

SEQ ID NO: 1870221 - RNA, 19 nt, Homo sapiens
  misc_RNA (1)...(19): siRNA sense strand
gcacugggcugccacuaca

SEQ ID NO: 1870222 - RNA, 19 nt, Homo sapiens
  misc_RNA (1)...(19): siRNA sense strand
uuaaggagcuacagacuca

SEQ ID NO: 1870223 - RNA, 19 nt, Homo sapiens
  misc_RNA (1)...(19): siRNA sense strand
ccacggaauucacagaaga

SEQ ID NO: 1870224 - RNA, 19 nt, Homo sapiens
  misc_RNA (1)...(19): siRNA sense strand
ccauugcccugacucgaua

SEQ ID NO: 1870225 - RNA, 19 nt, Homo sapiens
  misc_RNA (1)...(19): siRNA sense strand
ggaauucacagaagaguuc

SEQ ID NO: 1870226 - RNA, 19 nt, Homo sapiens
  misc_RNA (1)...(19): siRNA sense strand
ugacugcaguggagaaguu

SEQ ID NO: 1870227 - RNA, 19 nt, Homo sapiens
  misc_RNA (1)...(19): siRNA sense strand
gggcugagguccagagaca

SEQ ID NO: 1870228 - RNA, 19 nt, Homo sapiens
  misc_RNA (1)...(19): siRNA sense strand
gcagaucaaucguguuugc

SEQ ID NO: 1870229 - RNA, 19 nt, Homo sapiens
  misc_RNA (1)...(19): siRNA sense strand
gcguggaccuugccaaugu

SEQ ID NO: 1870230 - RNA, 19 nt, Homo sapiens
  misc_RNA (1)...(19): siRNA sense strand
gaucauccucggccacuuu

SEQ ID NO: 1870231 - RNA, 19 nt, Homo sapiens
  misc_RNA (1)...(19): siRNA sense strand
cgucuucucugcaaccaaa

SEQ ID NO: 1870232 - RNA, 19 nt, Homo sapiens
  misc_RNA (1)...(19): siRNA sense strand
gaugcucaaugaccaguug

SEQ ID NO: 1870233 - RNA, 19 nt, Homo sapiens
  misc_RNA (1)...(19): siRNA sense strand
ggagaaguuugaggcagaa

SEQ ID NO: 1870234 - RNA, 19 nt, Homo sapiens
  misc_RNA (1)...(19): siRNA sense strand
gacauugccuauaccuaug

SEQ ID NO: 1870235 - RNA, 19 nt, Homo sapiens
  misc_RNA (1)...(19): siRNA sense strand
agagacagcucagcauugu

SEQ ID NO: 1870236 - RNA, 19 nt, Homo sapiens
  misc_RNA (1)...(19): siRNA sense strand
gccaaugucuccggauuuc

SEQ ID NO: 1870237 - RNA, 19 nt, Homo sapiens
  misc_RNA (1)...(19): siRNA sense strand
gccuguggcugaccucuga

SEQ ID NO: 1870238 - RNA, 19 nt, Homo sapiens
  misc_RNA (1)...(19): siRNA sense strand
ccauggacauugccuauac

SEQ ID NO: 1870239 - RNA, 19 nt, Homo sapiens
  misc_RNA (1)...(19): siRNA sense strand
gcagacagccaggugaaug

SEQ ID NO: 1870240 - RNA, 19 nt, Homo sapiens
  misc_RNA (1)...(19): siRNA sense strand
gcgcggaagaagacuuuaa

SEQ ID NO: 1870241 - RNA, 19 nt, Homo sapiens
  misc_RNA (1)...(19): siRNA sense strand
ucgcagaucaaucguguuu

SEQ ID NO: 1870242 - RNA, 19 nt, Homo sapiens
  misc_RNA (1)...(19): siRNA sense strand
gggagaaccucagagaacu

SEQ ID NO: 1870243 - RNA, 19 nt, Homo sapiens
  misc_RNA (1)...(19): siRNA sense strand
gcaggcagcccagcaagau

SEQ ID NO: 1870244 - RNA, 19 nt, Homo sapiens
  misc_RNA (1)...(19): siRNA sense strand
gcacgguggccuacaucaa

SEQ ID NO: 1870245 - RNA, 19 nt, Homo sapiens
  misc_RNA (1)...(19): siRNA sense strand
ccagagacagcucagcauu

SEQ ID NO: 1870246 - RNA, 19 nt, Homo sapiens
  misc_RNA (1)...(19): siRNA sense strand
gcauaucaacacugcagaa

SEQ ID NO: 1870247 - RNA, 19 nt, Homo sapiens
  misc_RNA (1)...(19): siRNA sense strand
guggacaucucgguguuug

SEQ ID NO: 1870248 - RNA, 19 nt, Homo sapiens
  misc_RNA (1)...(19): siRNA sense strand
cacagggccuccucgucua

SEQ ID NO: 1870249 - RNA, 19 nt, Homo sapiens
  misc_RNA (1)...(19): siRNA sense strand
acacagccuuugacaccuu

SEQ ID NO: 1870250 - RNA, 19 nt, Homo sapiens
  misc_RNA (1)...(19): siRNA sense strand
aaacuugaaggcaccauug

SEQ ID NO: 1870251 - RNA, 19 nt, Homo sapiens
  misc_RNA (1)...(19): siRNA sense strand
ugacaccuuugacuaugug

SEQ ID NO: 1870252 - RNA, 19 nt, Homo sapiens
  misc_RNA (1)...(19): siRNA sense strand
cgacuaugcacccuucguu

SEQ ID NO: 1870253 - RNA, 19 nt, Homo sapiens
  misc_RNA (1)...(19): siRNA sense strand
ggaacggaccuuucugaac

SEQ ID NO: 1870254 - RNA, 19 nt, Homo sapiens
  misc_RNA (1)...(19): siRNA sense strand
cggaagaagacuuuaagga

SEQ ID NO: 1870255 - RNA, 19 nt, Homo sapiens
  misc_RNA (1)...(19): siRNA sense strand
uugacuauguggacaaguu

SEQ ID NO: 1870256 - RNA, 19 nt, Homo sapiens
  misc_RNA (1)...(19): siRNA sense strand
acucagggcaucaaacuug

SEQ ID NO: 1870257 - RNA, 19 nt, Homo sapiens
  misc_RNA (1)...(19): siRNA sense strand
cacagacccugccgacauc

SEQ ID NO: 1870258 - RNA, 19 nt, Homo sapiens
  misc_RNA (1)...(19): siRNA sense strand
cagagacagcucagcauug

SEQ ID NO: 1870259 - RNA, 19 nt, Homo sapiens
  misc_RNA (1)...(19): siRNA sense strand
acgaagugcugcuguccuu

SEQ ID NO: 1870260 - RNA, 19 nt, Homo sapiens
  misc_RNA (1)...(19): siRNA sense strand
uaaccucaacggaacuuug

SEQ ID NO: 1870261 - RNA, 19 nt, Homo sapiens
  misc_RNA (1)...(19): siRNA sense strand
acacagacccugccgacau

SEQ ID NO: 1870262 - RNA, 19 nt, Homo sapiens
  misc_RNA (1)...(19): siRNA sense strand
ugacuauguggacaaguuu

SEQ ID NO: 1870263 - RNA, 19 nt, Homo sapiens
  misc_RNA (1)...(19): siRNA sense strand
gcugagcucacccgacgaa

SEQ ID NO: 1870264 - RNA, 19 nt, Homo sapiens
  misc_RNA (1)...(19): siRNA sense strand
acaacuggauccgguacuu

SEQ ID NO: 1870265 - RNA, 19 nt, Homo sapiens
  misc_RNA (1)...(19): siRNA sense strand
gcucagcauuguggugaca

SEQ ID NO: 1870266 - RNA, 19 nt, Homo sapiens
  misc_RNA (1)...(19): siRNA sense strand
caaacuugaaggcaccauu

SEQ ID NO: 1870267 - RNA, 19 nt, Homo sapiens
  misc_RNA (1)...(19): siRNA sense strand
gugagacacuccgcagcuu

SEQ ID NO: 1870268 - RNA, 19 nt, Homo sapiens
  misc_RNA (1)...(19): siRNA sense strand
gcucagugacagcuucuuc

SEQ ID NO: 1870269 - RNA, 19 nt, Homo sapiens
  misc_RNA (1)...(19): siRNA sense strand
cagcagacagccaggugaa

SEQ ID NO: 1870270 - RNA, 19 nt, Homo sapiens
  misc_RNA (1)...(19): siRNA sense strand
gaaugugagcgucuacaac

SEQ ID NO: 1870271 - RNA, 19 nt, Homo sapiens
  misc_RNA (1)...(19): siRNA sense strand
cucauuggcuccacggaau

SEQ ID NO: 1870272 - RNA, 19 nt, Homo sapiens
  misc_RNA (1)...(19): siRNA sense strand
gcaguggacgaagguguug

SEQ ID NO: 1870273 - RNA, 19 nt, Homo sapiens
  misc_RNA (1)...(19): siRNA sense strand
gcucuuggaacggaccuuu

SEQ ID NO: 1870274 - RNA, 19 nt, Homo sapiens
  misc_RNA (1)...(19): siRNA sense strand
cacagccuuugacaccuuu

SEQ ID NO: 1870275 - RNA, 19 nt, Homo sapiens
  misc_RNA (1)...(19): siRNA sense strand
ugaaugugagcgucuacaa

SEQ ID NO: 1870276 - RNA, 19 nt, Homo sapiens
  misc_RNA (1)...(19): siRNA sense strand
gaaguuugaggcagaagcu

SEQ ID NO: 1870277 - RNA, 19 nt, Homo sapiens
  misc_RNA (1)...(19): siRNA sense strand
ggaccuggaccuggagauc

SEQ ID NO: 1870278 - RNA, 19 nt, Homo sapiens
  misc_RNA (1)...(19): siRNA sense strand
uugccaaugucuccggauu

SEQ ID NO: 1870279 - RNA, 19 nt, Homo sapiens
  misc_RNA (1)...(19): siRNA sense strand
cagaggaacgcuacuacag

SEQ ID NO: 1870280 - RNA, 19 nt, Homo sapiens
  misc_RNA (1)...(19): siRNA sense strand
acaacccuaugcugccuau

SEQ ID NO: 1870281 - RNA, 19 nt, Homo sapiens
  misc_RNA (1)...(19): siRNA sense strand
gcaagacuucagccaggau

SEQ ID NO: 1870282 - RNA, 19 nt, Homo sapiens
  misc_RNA (1)...(19): siRNA sense strand
agaagacuuuaaggagcua

SEQ ID NO: 1870283 - RNA, 19 nt, Homo sapiens
  misc_RNA (1)...(19): siRNA sense strand
gaaagaagcagcagaagaa

SEQ ID NO: 1870284 - RNA, 19 nt, Homo sapiens
  misc_RNA (1)...(19): siRNA sense strand
caagauggcucuggauaua

SEQ ID NO: 1870285 - RNA, 19 nt, Homo sapiens
  misc_RNA (1)...(19): siRNA sense strand
gaaagcaacugcaccugaa

SEQ ID NO: 1870286 - RNA, 19 nt, Homo sapiens
  misc_RNA (1)...(19): siRNA sense strand
caaggaagcucccaaggaa

SEQ ID NO: 1870287 - RNA, 19 nt, Homo sapiens
  misc_RNA (1)...(19): siRNA sense strand
ccaaauacaucacuaaauc

SEQ ID NO: 1870288 - RNA, 19 nt, Homo sapiens
  misc_RNA (1)...(19): siRNA sense strand
caaaggaugugccagagaa

SEQ ID NO: 1870289 - RNA, 19 nt, Homo sapiens
  misc_RNA (1)...(19): siRNA sense strand
gaagaaagaagcagcagaa

SEQ ID NO: 1870290 - RNA, 19 nt, Homo sapiens
  misc_RNA (1)...(19): siRNA sense strand
gcaagucuccugugucaaa

SEQ ID NO: 1870291 - RNA, 19 nt, Homo sapiens
  misc_RNA (1)...(19): siRNA sense strand
gaaaggcguugucaccaau

SEQ ID NO: 1870292 - RNA, 19 nt, Homo sapiens
  misc_RNA (1)...(19): siRNA sense strand
gaucauagaggaaaccaaa

SEQ ID NO: 1870293 - RNA, 19 nt, Homo sapiens
  misc_RNA (1)...(19): siRNA sense strand
cgacggcgcugaaggaaau

SEQ ID NO: 1870294 - RNA, 19 nt, Homo sapiens
  misc_RNA (1)...(19): siRNA sense strand
ggaagaaggagaaacagaa

SEQ ID NO: 1870295 - RNA, 19 nt, Homo sapiens
  misc_RNA (1)...(19): siRNA sense strand
gaaggaaggcucuagugaa

SEQ ID NO: 1870296 - RNA, 19 nt, Homo sapiens
  misc_RNA (1)...(19): siRNA sense strand
aaggaaggcucuagugaaa

SEQ ID NO: 1870297 - RNA, 19 nt, Homo sapiens
  misc_RNA (1)...(19): siRNA sense strand
ggagaaagagaccaaagaa

SEQ ID NO: 1870298 - RNA, 19 nt, Homo sapiens
  misc_RNA (1)...(19): siRNA sense strand
aaaccaaaguggaggauga

SEQ ID NO: 1870299 - RNA, 19 nt, Homo sapiens
  misc_RNA (1)...(19): siRNA sense strand
ggaagggagugauaaaggu

SEQ ID NO: 1870300 - RNA, 19 nt, Homo sapiens
  misc_RNA (1)...(19): siRNA sense strand
aggaagagaucgccgagua

SEQ ID NO: 1870301 - RNA, 19 nt, Homo sapiens
  misc_RNA (1)...(19): siRNA sense strand
ggaagaagaaggccaggaa

SEQ ID NO: 1870302 - RNA, 19 nt, Homo sapiens
  misc_RNA (1)...(19): siRNA sense strand
gagacuagauuuagcacau

SEQ ID NO: 1870303 - RNA, 19 nt, Homo sapiens
  misc_RNA (1)...(19): siRNA sense strand
agaaaucgcugcguacaga

SEQ ID NO: 1870304 - RNA, 19 nt, Homo sapiens
  misc_RNA (1)...(19): siRNA sense strand
agaaagagaccaaagaaga

SEQ ID NO: 1870305 - RNA, 19 nt, Homo sapiens
  misc_RNA (1)...(19): siRNA sense strand
gaugagaagucagaaaugg

SEQ ID NO: 1870306 - RNA, 19 nt, Homo sapiens
  misc_RNA (1)...(19): siRNA sense strand
ccaaaucuccugugccaaa

SEQ ID NO: 1870307 - RNA, 19 nt, Homo sapiens
  misc_RNA (1)...(19): siRNA sense strand
gagaggaagccgaagcuaa

SEQ ID NO: 1870308 - RNA, 19 nt, Homo sapiens
  misc_RNA (1)...(19): siRNA sense strand
ggaagaagaggaggaagaa

SEQ ID NO: 1870309 - RNA, 19 nt, Homo sapiens
  misc_RNA (1)...(19): siRNA sense strand
ggugaagagacuagauuua

SEQ ID NO: 1870310 - RNA, 19 nt, Homo sapiens
  misc_RNA (1)...(19): siRNA sense strand
gaaagagaccaaagaagag

SEQ ID NO: 1870311 - RNA, 19 nt, Homo sapiens
  misc_RNA (1)...(19): siRNA sense strand
ggaagagaagguagagaaa

SEQ ID NO: 1870312 - RNA, 19 nt, Homo sapiens
  misc_RNA (1)...(19): siRNA sense strand
gacuagauuuagcacauuu

SEQ ID NO: 1870313 - RNA, 19 nt, Homo sapiens
  misc_RNA (1)...(19): siRNA sense strand
caccugaaguuaaagaaga

SEQ ID NO: 1870314 - RNA, 19 nt, Homo sapiens
  misc_RNA (1)...(19): siRNA sense strand
gaaggaagagaagaaagaa

SEQ ID NO: 1870315 - RNA, 19 nt, Homo sapiens
  misc_RNA (1)...(19): siRNA sense strand
gcaggaagaaggagaaaca

SEQ ID NO: 1870316 - RNA, 19 nt, Homo sapiens
  misc_RNA (1)...(19): siRNA sense strand
acccgaagcugaagaagaa

SEQ ID NO: 1870317 - RNA, 19 nt, Homo sapiens
  misc_RNA (1)...(19): siRNA sense strand
cacaauauccaguaagauu

SEQ ID NO: 1870318 - RNA, 19 nt, Homo sapiens
  misc_RNA (1)...(19): siRNA sense strand
ggaggaagggagugauaaa

SEQ ID NO: 1870319 - RNA, 19 nt, Homo sapiens
  misc_RNA (1)...(19): siRNA sense strand
ggaaaggugaacagaaaga

SEQ ID NO: 1870320 - RNA, 19 nt, Homo sapiens
  misc_RNA (1)...(19): siRNA sense strand
gaagagacuagauuuagca

SEQ ID NO: 1870321 - RNA, 19 nt, Homo sapiens
  misc_RNA (1)...(19): siRNA sense strand
caaucacaauauccaguaa

SEQ ID NO: 1870322 - RNA, 19 nt, Homo sapiens
  misc_RNA (1)...(19): siRNA sense strand
ggagaaagagaaggagaaa

SEQ ID NO: 1870323 - RNA, 19 nt, Homo sapiens
  misc_RNA (1)...(19): siRNA sense strand
ggggaaaggugaacagaaa

SEQ ID NO: 1870324 - RNA, 19 nt, Homo sapiens
  misc_RNA (1)...(19): siRNA sense strand
uaagguccaacacaaauuu

SEQ ID NO: 1870325 - RNA, 19 nt, Homo sapiens
  misc_RNA (1)...(19): siRNA sense strand
gcgcaaagacuaccugaag

SEQ ID NO: 1870326 - RNA, 19 nt, Homo sapiens
  misc_RNA (1)...(19): siRNA sense strand
gaggaggaagggagugaua

SEQ ID NO: 1870327 - RNA, 19 nt, Homo sapiens
  misc_RNA (1)...(19): siRNA sense strand
acagaaagaggaagaagaa

SEQ ID NO: 1870328 - RNA, 19 nt, Homo sapiens
  misc_RNA (1)...(19): siRNA sense strand
aagacuaccugaagacaga

SEQ ID NO: 1870329 - RNA, 19 nt, Homo sapiens
  misc_RNA (1)...(19): siRNA sense strand
ccaagagcaucgagcuaga

SEQ ID NO: 1870330 - RNA, 19 nt, Homo sapiens
  misc_RNA (1)...(19): siRNA sense strand
cgaaaucaccaguggaaga

SEQ ID NO: 1870331 - RNA, 19 nt, Homo sapiens
  misc_RNA (1)...(19): siRNA sense strand
aaaagaaaguggaggaaaa

SEQ ID NO: 1870332 - RNA, 19 nt, Homo sapiens
  misc_RNA (1)...(19): siRNA sense strand
agaggaagccgaagcuaaa

SEQ ID NO: 1870333 - RNA, 19 nt, Homo sapiens
  misc_RNA (1)...(19): siRNA sense strand
ccaagucuccugugccaaa

SEQ ID NO: 1870334 - RNA, 19 nt, Homo sapiens
  misc_RNA (1)...(19): siRNA sense strand
ccaaucacaauauccagua

SEQ ID NO: 1870335 - RNA, 19 nt, Homo sapiens
  misc_RNA (1)...(19): siRNA sense strand
agaaaggcguugucaccaa

SEQ ID NO: 1870336 - RNA, 19 nt, Homo sapiens
  misc_RNA (1)...(19): siRNA sense strand
gaggagaucauagaggaaa

SEQ ID NO: 1870337 - RNA, 19 nt, Homo sapiens
  misc_RNA (1)...(19): siRNA sense strand
gggaggaagugaggaggaa

SEQ ID NO: 1870338 - RNA, 19 nt, Homo sapiens
  misc_RNA (1)...(19): siRNA sense strand
gaagaaggagaaacagaag

SEQ ID NO: 1870339 - RNA, 19 nt, Homo sapiens
  misc_RNA (1)...(19): siRNA sense strand
gagacccgcucgagcuuca

SEQ ID NO: 1870340 - RNA, 19 nt, Homo sapiens
  misc_RNA (1)...(19): siRNA sense strand
ugaaggaagagaagaaaga

SEQ ID NO: 1870341 - RNA, 19 nt, Homo sapiens
  misc_RNA (1)...(19): siRNA sense strand
gaagaaggccaggaagaag

SEQ ID NO: 1870342 - RNA, 19 nt, Homo sapiens
  misc_RNA (1)...(19): siRNA sense strand
gcuaccaaauacaucacua

SEQ ID NO: 1870343 - RNA, 19 nt, Homo sapiens
  misc_RNA (1)...(19): siRNA sense strand
gugaggaaguggcuaccaa

SEQ ID NO: 1870344 - RNA, 19 nt, Homo sapiens
  misc_RNA (1)...(19): siRNA sense strand
agguggagcuggacaagaa

SEQ ID NO: 1870345 - RNA, 19 nt, Homo sapiens
  misc_RNA (1)...(19): siRNA sense strand
uaaaggugcacuuggagaa

SEQ ID NO: 1870346 - RNA, 19 nt, Homo sapiens
  misc_RNA (1)...(19): siRNA sense strand
ggaaaaggaggaagaagaa

SEQ ID NO: 1870347 - RNA, 19 nt, Homo sapiens
  misc_RNA (1)...(19): siRNA sense strand
aaaggcaagucuccugugu

SEQ ID NO: 1870348 - RNA, 19 nt, Homo sapiens
  misc_RNA (1)...(19): siRNA sense strand
ggaagagaaagccaaaucu

SEQ ID NO: 1870349 - RNA, 19 nt, Homo sapiens
  misc_RNA (1)...(19): siRNA sense strand
aggcaagucuccuguguca

SEQ ID NO: 1870350 - RNA, 19 nt, Homo sapiens
  misc_RNA (1)...(19): siRNA sense strand
gccgaagagugguucaaau

SEQ ID NO: 1870351 - RNA, 19 nt, Homo sapiens
  misc_RNA (1)...(19): siRNA sense strand
gagcaggagaccaaggaaa

SEQ ID NO: 1870352 - RNA, 19 nt, Homo sapiens
  misc_RNA (1)...(19): siRNA sense strand
gaacagaaagaggaagaag

SEQ ID NO: 1870353 - RNA, 19 nt, Homo sapiens
  misc_RNA (1)...(19): siRNA sense strand
uggaagaggcaaagucaaa

SEQ ID NO: 1870354 - RNA, 19 nt, Homo sapiens
  misc_RNA (1)...(19): siRNA sense strand
gagaaggaaggcucuagug

SEQ ID NO: 1870355 - RNA, 19 nt, Homo sapiens
  misc_RNA (1)...(19): siRNA sense strand
ugagaagucagaaauggaa

SEQ ID NO: 1870356 - RNA, 19 nt, Homo sapiens
  misc_RNA (1)...(19): siRNA sense strand
agauggcucuggauauaga

SEQ ID NO: 1870357 - RNA, 19 nt, Homo sapiens
  misc_RNA (1)...(19): siRNA sense strand
cgcaaagacuaccugaaga

SEQ ID NO: 1870358 - RNA, 19 nt, Homo sapiens
  misc_RNA (1)...(19): siRNA sense strand
gaggagaaacuagugucua

SEQ ID NO: 1870359 - RNA, 19 nt, Homo sapiens
  misc_RNA (1)...(19): siRNA sense strand
cgguaaaggugcacuugga

SEQ ID NO: 1870360 - RNA, 19 nt, Homo sapiens
  misc_RNA (1)...(19): siRNA sense strand
ucaaggaagcucccaagga

SEQ ID NO: 1870361 - RNA, 19 nt, Homo sapiens
  misc_RNA (1)...(19): siRNA sense strand
gaaaucaccaguggaagag

SEQ ID NO: 1870362 - RNA, 19 nt, Homo sapiens
  misc_RNA (1)...(19): siRNA sense strand
gcagcagaauaaggagauu

SEQ ID NO: 1870363 - RNA, 19 nt, Homo sapiens
  misc_RNA (1)...(19): siRNA sense strand
agaggaaggugagcaggaa

SEQ ID NO: 1870364 - RNA, 19 nt, Homo sapiens
  misc_RNA (1)...(19): siRNA sense strand
gugaagagacuagauuuag

SEQ ID NO: 1870365 - RNA, 19 nt, Homo sapiens
  misc_RNA (1)...(19): siRNA sense strand
ccgcuuugccggcuacaua

SEQ ID NO: 1870366 - RNA, 19 nt, Homo sapiens
  misc_RNA (1)...(19): siRNA sense strand
gagagcagccuugacuuca

SEQ ID NO: 1870367 - RNA, 19 nt, Homo sapiens
  misc_RNA (1)...(19): siRNA sense strand
ccaauggccuagacuugag

SEQ ID NO: 1870368 - RNA, 19 nt, Homo sapiens
  misc_RNA (1)...(19): siRNA sense strand
caaaguggaggaugagaag

SEQ ID NO: 1870369 - RNA, 19 nt, Homo sapiens
  misc_RNA (1)...(19): siRNA sense strand
ggaagagaaaccaaaggau

SEQ ID NO: 1870370 - RNA, 19 nt, Homo sapiens
  misc_RNA (1)...(19): siRNA sense strand
ccaagucaccaguggaaga

SEQ ID NO: 1870371 - RNA, 19 nt, Homo sapiens
  misc_RNA (1)...(19): siRNA sense strand
ccaagucaccaguggaaga

SEQ ID NO: 1870372 - RNA, 19 nt, Homo sapiens
  misc_RNA (1)...(19): siRNA sense strand
agccgaagcuaaagaggaa

SEQ ID NO: 1870373 - RNA, 19 nt, Homo sapiens
  misc_RNA (1)...(19): siRNA sense strand
gggaggauccgagaaggaa

SEQ ID NO: 1870374 - RNA, 19 nt, Homo sapiens
  misc_RNA (1)...(19): siRNA sense strand
aagaagaggaggaagaaga

SEQ ID NO: 1870375 - RNA, 19 nt, Homo sapiens
  misc_RNA (1)...(19): siRNA sense strand
agaagaaggccaggaagaa

SEQ ID NO: 1870376 - RNA, 19 nt, Homo sapiens
  misc_RNA (1)...(19): siRNA sense strand
ggaacccgaagcugaagaa

SEQ ID NO: 1870377 - RNA, 19 nt, Homo sapiens
  misc_RNA (1)...(19): siRNA sense strand
agaaagaagcagcagaaga

SEQ ID NO: 1870378 - RNA, 19 nt, Homo sapiens
  misc_RNA (1)...(19): siRNA sense strand
gcaaagacuaccugaagac

SEQ ID NO: 1870379 - RNA, 19 nt, Homo sapiens
  misc_RNA (1)...(19): siRNA sense strand
aaucaccaguggaagagaa

SEQ ID NO: 1870380 - RNA, 19 nt, Homo sapiens
  misc_RNA (1)...(19): siRNA sense strand
aaucaccaguggaagagaa

SEQ ID NO: 1870381 - RNA, 19 nt, Homo sapiens
  misc_RNA (1)...(19): siRNA sense strand
aaucaccaguggaagagaa

SEQ ID NO: 1870382 - RNA, 19 nt, Homo sapiens
  misc_RNA (1)...(19): siRNA sense strand
ggaaaagagugaggaagug

SEQ ID NO: 1870383 - RNA, 19 nt, Homo sapiens
  misc_RNA (1)...(19): siRNA sense strand
gaaagaagcuugucucaga

SEQ ID NO: 1870384 - RNA, 19 nt, Homo sapiens
  misc_RNA (1)...(19): siRNA sense strand
ccaaagcacuuacaguuua

SEQ ID NO: 1870385 - RNA, 19 nt, Homo sapiens
  misc_RNA (1)...(19): siRNA sense strand
gggaagaaguuauguuaua

SEQ ID NO: 1870386 - RNA, 19 nt, Homo sapiens
  misc_RNA (1)...(19): siRNA sense strand
ccaaguagaucucgaagua

SEQ ID NO: 1870387 - RNA, 19 nt, Homo sapiens
  misc_RNA (1)...(19): siRNA sense strand
gaaaccaacucauucagaa

SEQ ID NO: 1870388 - RNA, 19 nt, Homo sapiens
  misc_RNA (1)...(19): siRNA sense strand
gaaauccucuugugauaga

SEQ ID NO: 1870389 - RNA, 19 nt, Homo sapiens
  misc_RNA (1)...(19): siRNA sense strand
gaaaggaguucucguucuu

SEQ ID NO: 1870390 - RNA, 19 nt, Homo sapiens
  misc_RNA (1)...(19): siRNA sense strand
gaagagauaugccuguugu

SEQ ID NO: 1870391 - RNA, 19 nt, Homo sapiens
  misc_RNA (1)...(19): siRNA sense strand
ucaagaagcuacucuagaa

SEQ ID NO: 1870392 - RNA, 19 nt, Homo sapiens
  misc_RNA (1)...(19): siRNA sense strand
gcaaaucgagggaaacaua

SEQ ID NO: 1870393 - RNA, 19 nt, Homo sapiens
  misc_RNA (1)...(19): siRNA sense strand
gaauuaugcugguaguaaa

SEQ ID NO: 1870394 - RNA, 19 nt, Homo sapiens
  misc_RNA (1)...(19): siRNA sense strand
gaaguaaucgaacaaauug

SEQ ID NO: 1870395 - RNA, 19 nt, Homo sapiens
  misc_RNA (1)...(19): siRNA sense strand
ggaaaugcacggcuugaua

SEQ ID NO: 1870396 - RNA, 19 nt, Homo sapiens
  misc_RNA (1)...(19): siRNA sense strand
gaaaccaucuguaucaaag

SEQ ID NO: 1870397 - RNA, 19 nt, Homo sapiens
  misc_RNA (1)...(19): siRNA sense strand
gaguaaaggagauaaguua

SEQ ID NO: 1870398 - RNA, 19 nt, Homo sapiens
  misc_RNA (1)...(19): siRNA sense strand
aaacaugggucaaaggaaa

SEQ ID NO: 1870399 - RNA, 19 nt, Homo sapiens
  misc_RNA (1)...(19): siRNA sense strand
ggaauaaacaugcaaugaa

SEQ ID NO: 1870400 - RNA, 19 nt, Homo sapiens
  misc_RNA (1)...(19): siRNA sense strand
ucaaacagaugacaacaug

SEQ ID NO: 1870401 - RNA, 19 nt, Homo sapiens
  misc_RNA (1)...(19): siRNA sense strand
gaaguuccacaucaucuua

SEQ ID NO: 1870402 - RNA, 19 nt, Homo sapiens
  misc_RNA (1)...(19): siRNA sense strand
gaacaaggucugucuccua

SEQ ID NO: 1870403 - RNA, 19 nt, Homo sapiens
  misc_RNA (1)...(19): siRNA sense strand
gaaagcagcauguccgaaa

SEQ ID NO: 1870404 - RNA, 19 nt, Homo sapiens
  misc_RNA (1)...(19): siRNA sense strand
gaauaaacaugcaaugaac

SEQ ID NO: 1870405 - RNA, 19 nt, Homo sapiens
  misc_RNA (1)...(19): siRNA sense strand
gcagaaggaggaaacauaa

SEQ ID NO: 1870406 - RNA, 19 nt, Homo sapiens
  misc_RNA (1)...(19): siRNA sense strand
gaaauucacaucaaaguca

SEQ ID NO: 1870407 - RNA, 19 nt, Homo sapiens
  misc_RNA (1)...(19): siRNA sense strand
gaucagagcacuuauucaa

SEQ ID NO: 1870408 - RNA, 19 nt, Homo sapiens
  misc_RNA (1)...(19): siRNA sense strand
ucagaaagcucaccaaggu

SEQ ID NO: 1870409 - RNA, 19 nt, Homo sapiens
  misc_RNA (1)...(19): siRNA sense strand
ucaaaguccucaucacauu

SEQ ID NO: 1870410 - RNA, 19 nt, Homo sapiens
  misc_RNA (1)...(19): siRNA sense strand
ucacacaccuccaagauca

SEQ ID NO: 1870411 - RNA, 19 nt, Homo sapiens
  misc_RNA (1)...(19): siRNA sense strand
gaaaccaaaucaagacaca

SEQ ID NO: 1870412 - RNA, 19 nt, Homo sapiens
  misc_RNA (1)...(19): siRNA sense strand
ggaagaaaccaacucauuc

SEQ ID NO: 1870413 - RNA, 19 nt, Homo sapiens
  misc_RNA (1)...(19): siRNA sense strand
cgaaauaaauacagugauc

SEQ ID NO: 1870414 - RNA, 19 nt, Homo sapiens
  misc_RNA (1)...(19): siRNA sense strand
gaucaaggacugcgucaaa

SEQ ID NO: 1870415 - RNA, 19 nt, Homo sapiens
  misc_RNA (1)...(19): siRNA sense strand
gaagauuccugauguugca

SEQ ID NO: 1870416 - RNA, 19 nt, Homo sapiens
  misc_RNA (1)...(19): siRNA sense strand
gaagaaaccaacucauuca

SEQ ID NO: 1870417 - RNA, 19 nt, Homo sapiens
  misc_RNA (1)...(19): siRNA sense strand
gaaaagacacuucacagua

SEQ ID NO: 1870418 - RNA, 19 nt, Homo sapiens
  misc_RNA (1)...(19): siRNA sense strand
gaagaaaguguucccaaug

SEQ ID NO: 1870419 - RNA, 19 nt, Homo sapiens
  misc_RNA (1)...(19): siRNA sense strand
ggagauugaugacaagcaa

SEQ ID NO: 1870420 - RNA, 19 nt, Homo sapiens
  misc_RNA (1)...(19): siRNA sense strand
gcacaaacaugggucaaag

SEQ ID NO: 1870421 - RNA, 19 nt, Homo sapiens
  misc_RNA (1)...(19): siRNA sense strand
cagaagagccaaggaauaa

SEQ ID NO: 1870422 - RNA, 19 nt, Homo sapiens
  misc_RNA (1)...(19): siRNA sense strand
gcaaguuacucaggaauca

SEQ ID NO: 1870423 - RNA, 19 nt, Homo sapiens
  misc_RNA (1)...(19): siRNA sense strand
gaacaugagagaagcagaa

SEQ ID NO: 1870424 - RNA, 19 nt, Homo sapiens
  misc_RNA (1)...(19): siRNA sense strand
ucucaucacucaucaaaga

SEQ ID NO: 1870425 - RNA, 19 nt, Homo sapiens
  misc_RNA (1)...(19): siRNA sense strand
caaauggaaagaacacaua

SEQ ID NO: 1870426 - RNA, 19 nt, Homo sapiens
  misc_RNA (1)...(19): siRNA sense strand
gaggaaaugcagagauuaa

SEQ ID NO: 1870427 - RNA, 19 nt, Homo sapiens
  misc_RNA (1)...(19): siRNA sense strand
agaagucgaucgagaaguu

SEQ ID NO: 1870428 - RNA, 19 nt, Homo sapiens
  misc_RNA (1)...(19): siRNA sense strand
caaccucauugauaagaaa

SEQ ID NO: 1870429 - RNA, 19 nt, Homo sapiens
  misc_RNA (1)...(19): siRNA sense strand
gcacuuacaguuuagcaaa

SEQ ID NO: 1870430 - RNA, 19 nt, Homo sapiens
  misc_RNA (1)...(19): siRNA sense strand
agaggaagcucaagaucaa

SEQ ID NO: 1870431 - RNA, 19 nt, Homo sapiens
  misc_RNA (1)...(19): siRNA sense strand
gcauauagaccaccuagug

SEQ ID NO: 1870432 - RNA, 19 nt, Homo sapiens
  misc_RNA (1)...(19): siRNA sense strand
gagaagagauaugccuguu

SEQ ID NO: 1870433 - RNA, 19 nt, Homo sapiens
  misc_RNA (1)...(19): siRNA sense strand
caagaaaucaggagaguuc

SEQ ID NO: 1870434 - RNA, 19 nt, Homo sapiens
  misc_RNA (1)...(19): siRNA sense strand
agaaggagguggcugagaa

SEQ ID NO: 1870435 - RNA, 19 nt, Homo sapiens
  misc_RNA (1)...(19): siRNA sense strand
agaaucaucuucagaaagu

SEQ ID NO: 1870436 - RNA, 19 nt, Homo sapiens
  misc_RNA (1)...(19): siRNA sense strand
caaggucugucuccuauag

SEQ ID NO: 1870437 - RNA, 19 nt, Homo sapiens
  misc_RNA (1)...(19): siRNA sense strand
ccacagcuuuaaauacuga

SEQ ID NO: 1870438 - RNA, 19 nt, Homo sapiens
  misc_RNA (1)...(19): siRNA sense strand
agaacgagaugucacuaaa

SEQ ID NO: 1870439 - RNA, 19 nt, Homo sapiens
  misc_RNA (1)...(19): siRNA sense strand
ggacggaagauuaaaggaa

SEQ ID NO: 1870440 - RNA, 19 nt, Homo sapiens
  misc_RNA (1)...(19): siRNA sense strand
ucaaggagcagaucuucua

SEQ ID NO: 1870441 - RNA, 19 nt, Homo sapiens
  misc_RNA (1)...(19): siRNA sense strand
gaaugaaauccucuuguga

SEQ ID NO: 1870442 - RNA, 19 nt, Homo sapiens
  misc_RNA (1)...(19): siRNA sense strand
gaagacacaaacaaacaaa

SEQ ID NO: 1870443 - RNA, 19 nt, Homo sapiens
  misc_RNA (1)...(19): siRNA sense strand
ugacagagcguuccuuuua

SEQ ID NO: 1870444 - RNA, 19 nt, Homo sapiens
  misc_RNA (1)...(19): siRNA sense strand
gaaguaaaucugaaaccaa

SEQ ID NO: 1870445 - RNA, 19 nt, Homo sapiens
  misc_RNA (1)...(19): siRNA sense strand
caggagaguucaagugaug

SEQ ID NO: 1870446 - RNA, 19 nt, Homo sapiens
  misc_RNA (1)...(19): siRNA sense strand
gaagaauuaugcugguagu

SEQ ID NO: 1870447 - RNA, 19 nt, Homo sapiens
  misc_RNA (1)...(19): siRNA sense strand
aagaggaaaugcagagauu

SEQ ID NO: 1870448 - RNA, 19 nt, Homo sapiens
  misc_RNA (1)...(19): siRNA sense strand
ccagugcuguggaaguuaa

SEQ ID NO: 1870449 - RNA, 19 nt, Homo sapiens
  misc_RNA (1)...(19): siRNA sense strand
ugaagaaaguguucccaau

SEQ ID NO: 1870450 - RNA, 19 nt, Homo sapiens
  misc_RNA (1)...(19): siRNA sense strand
aaaagacacuucacaguaa

SEQ ID NO: 1870451 - RNA, 19 nt, Homo sapiens
  misc_RNA (1)...(19): siRNA sense strand
cagcagagacucauacaga

SEQ ID NO: 1870452 - RNA, 19 nt, Homo sapiens
  misc_RNA (1)...(19): siRNA sense strand
ggaaaugcagagauuaaga

SEQ ID NO: 1870453 - RNA, 19 nt, Homo sapiens
  misc_RNA (1)...(19): siRNA sense strand
cauuguaagugaucagaaa

SEQ ID NO: 1870454 - RNA, 19 nt, Homo sapiens
  misc_RNA (1)...(19): siRNA sense strand
gaaagugaccgaaguuacu

SEQ ID NO: 1870455 - RNA, 19 nt, Homo sapiens
  misc_RNA (1)...(19): siRNA sense strand
auacuucacugccugauga

SEQ ID NO: 1870456 - RNA, 19 nt, Homo sapiens
  misc_RNA (1)...(19): siRNA sense strand
gaugaugacagcagugaaa

SEQ ID NO: 1870457 - RNA, 19 nt, Homo sapiens
  misc_RNA (1)...(19): siRNA sense strand
ucagaaucaucuucagaaa

SEQ ID NO: 1870458 - RNA, 19 nt, Homo sapiens
  misc_RNA (1)...(19): siRNA sense strand
gagagcagcagauacaguu

SEQ ID NO: 1870459 - RNA, 19 nt, Homo sapiens
  misc_RNA (1)...(19): siRNA sense strand
aaguagaucucgaaguaaa

SEQ ID NO: 1870460 - RNA, 19 nt, Homo sapiens
  misc_RNA (1)...(19): siRNA sense strand
gaaaugcacggcuugauac

SEQ ID NO: 1870461 - RNA, 19 nt, Homo sapiens
  misc_RNA (1)...(19): siRNA sense strand
ccaauggaguggaagaugu

SEQ ID NO: 1870462 - RNA, 19 nt, Homo sapiens
  misc_RNA (1)...(19): siRNA sense strand
gaugauaguaaacucagua

SEQ ID NO: 1870463 - RNA, 19 nt, Homo sapiens
  misc_RNA (1)...(19): siRNA sense strand
aaacagcgcacaucaacuu

SEQ ID NO: 1870464 - RNA, 19 nt, Homo sapiens
  misc_RNA (1)...(19): siRNA sense strand
ggauauuauucagaccuua

SEQ ID NO: 1870465 - RNA, 19 nt, Homo sapiens
  misc_RNA (1)...(19): siRNA sense strand
gaagcaagcaguucagaag

SEQ ID NO: 1870466 - RNA, 19 nt, Homo sapiens
  misc_RNA (1)...(19): siRNA sense strand
gagauuaagagcauauaga

SEQ ID NO: 1870467 - RNA, 19 nt, Homo sapiens
  misc_RNA (1)...(19): siRNA sense strand
cacaucaucuuaucgauca

SEQ ID NO: 1870468 - RNA, 19 nt, Homo sapiens
  misc_RNA (1)...(19): siRNA sense strand
gaucugcacuccugauagg

SEQ ID NO: 1870469 - RNA, 19 nt, Homo sapiens
  misc_RNA (1)...(19): siRNA sense strand
gcaaacagcgcacaucaac

SEQ ID NO: 1870470 - RNA, 19 nt, Homo sapiens
  misc_RNA (1)...(19): siRNA sense strand
caaccaagucguccacaaa

SEQ ID NO: 1870471 - RNA, 19 nt, Homo sapiens
  misc_RNA (1)...(19): siRNA sense strand
agaaugaaauccucuugug

SEQ ID NO: 1870472 - RNA, 19 nt, Homo sapiens
  misc_RNA (1)...(19): siRNA sense strand
gcagaugugcgaguuauug

SEQ ID NO: 1870473 - RNA, 19 nt, Homo sapiens
  misc_RNA (1)...(19): siRNA sense strand
aaucagagguuagugaaau

SEQ ID NO: 1870474 - RNA, 19 nt, Homo sapiens
  misc_RNA (1)...(19): siRNA sense strand
aaagacacuucacaguaaa

SEQ ID NO: 1870475 - RNA, 19 nt, Homo sapiens
  misc_RNA (1)...(19): siRNA sense strand
gaucauucacaguguagua

SEQ ID NO: 1870476 - RNA, 19 nt, Homo sapiens
  misc_RNA (1)...(19): siRNA sense strand
gauguugcacccauuguaa

SEQ ID NO: 1870477 - RNA, 19 nt, Homo sapiens
  misc_RNA (1)...(19): siRNA sense strand
gaaccgaagauuccugaug

SEQ ID NO: 1870478 - RNA, 19 nt, Homo sapiens
  misc_RNA (1)...(19): siRNA sense strand
gaggagugauaccaaugaa

SEQ ID NO: 1870479 - RNA, 19 nt, Homo sapiens
  misc_RNA (1)...(19): siRNA sense strand
gaucaugguccuauaaugg

SEQ ID NO: 1870480 - RNA, 19 nt, Homo sapiens
  misc_RNA (1)...(19): siRNA sense strand
gguggagaaucaauuuaug

SEQ ID NO: 1870481 - RNA, 19 nt, Homo sapiens
  misc_RNA (1)...(19): siRNA sense strand
caagcaaguuacucaggaa

SEQ ID NO: 1870482 - RNA, 19 nt, Homo sapiens
  misc_RNA (1)...(19): siRNA sense strand
gcucaucauccuaccauaa

SEQ ID NO: 1870483 - RNA, 19 nt, Homo sapiens
  misc_RNA (1)...(19): siRNA sense strand
gcaaggaaguggagcaaca

SEQ ID NO: 1870484 - RNA, 19 nt, Homo sapiens
  misc_RNA (1)...(19): siRNA sense strand
ccagaaggcugaagcucuu

SEQ ID NO: 1870485 - RNA, 19 nt, Homo sapiens
  misc_RNA (1)...(19): siRNA sense strand
gcacguggcacccaugguu

SEQ ID NO: 1870486 - RNA, 19 nt, Homo sapiens
  misc_RNA (1)...(19): siRNA sense strand
ccacagcccucuuucaacu

SEQ ID NO: 1870487 - RNA, 19 nt, Homo sapiens
  misc_RNA (1)...(19): siRNA sense strand
ggaaguggagcaacaguca

SEQ ID NO: 1870488 - RNA, 19 nt, Homo sapiens
  misc_RNA (1)...(19): siRNA sense strand
gcugaacgcuuugagaagu

SEQ ID NO: 1870489 - RNA, 19 nt, Homo sapiens
  misc_RNA (1)...(19): siRNA sense strand
acagucagccugcagauuu

SEQ ID NO: 1870490 - RNA, 19 nt, Homo sapiens
  misc_RNA (1)...(19): siRNA sense strand
ucagcaagauggcgacuuc

SEQ ID NO: 1870491 - RNA, 19 nt, Homo sapiens
  misc_RNA (1)...(19): siRNA sense strand
gcucagcccuccauuuuga

SEQ ID NO: 1870492 - RNA, 19 nt, Homo sapiens
  misc_RNA (1)...(19): siRNA sense strand
ggaagagaauagauguuuu

SEQ ID NO: 1870493 - RNA, 19 nt, Homo sapiens
  misc_RNA (1)...(19): siRNA sense strand
cggcucugguucacaguua

SEQ ID NO: 1870494 - RNA, 19 nt, Homo sapiens
  misc_RNA (1)...(19): siRNA sense strand
ggaggaagagaauagaugu

SEQ ID NO: 1870495 - RNA, 19 nt, Homo sapiens
  misc_RNA (1)...(19): siRNA sense strand
gcgcugaacgcuuugagaa

SEQ ID NO: 1870496 - RNA, 19 nt, Homo sapiens
  misc_RNA (1)...(19): siRNA sense strand
cagcauaccggcucugguu

SEQ ID NO: 1870497 - RNA, 19 nt, Homo sapiens
  misc_RNA (1)...(19): siRNA sense strand
cugcagauuuggcacauau

SEQ ID NO: 1870498 - RNA, 19 nt, Homo sapiens
  misc_RNA (1)...(19): siRNA sense strand
caacaugggagucucaucu

SEQ ID NO: 1870499 - RNA, 19 nt, Homo sapiens
  misc_RNA (1)...(19): siRNA sense strand
ggauggcccagcucggaua

SEQ ID NO: 1870500 - RNA, 19 nt, Homo sapiens
  misc_RNA (1)...(19): siRNA sense strand
cgaggaggaugaggaggaa

SEQ ID NO: 1870501 - RNA, 19 nt, Homo sapiens
  misc_RNA (1)...(19): siRNA sense strand
ucuuucaacuggaggauga

SEQ ID NO: 1870502 - RNA, 19 nt, Homo sapiens
  misc_RNA (1)...(19): siRNA sense strand
gcucugguucacaguuaua

SEQ ID NO: 1870503 - RNA, 19 nt, Homo sapiens
  misc_RNA (1)...(19): siRNA sense strand
cagucagccugcagauuug

SEQ ID NO: 1870504 - RNA, 19 nt, Homo sapiens
  misc_RNA (1)...(19): siRNA sense strand
aggaagagaauagauguuu

SEQ ID NO: 1870505 - RNA, 19 nt, Homo sapiens
  misc_RNA (1)...(19): siRNA sense strand
gagcagugacccgguguug

SEQ ID NO: 1870506 - RNA, 19 nt, Homo sapiens
  misc_RNA (1)...(19): siRNA sense strand
ggaugaggaggaagagaau

SEQ ID NO: 1870507 - RNA, 19 nt, Homo sapiens
  misc_RNA (1)...(19): siRNA sense strand
gcagugacccgguguugcu

SEQ ID NO: 1870508 - RNA, 19 nt, Homo sapiens
  misc_RNA (1)...(19): siRNA sense strand
aggcugagaucucuuucug

SEQ ID NO: 1870509 - RNA, 19 nt, Homo sapiens
  misc_RNA (1)...(19): siRNA sense strand
gaugaggaggaagagaaua

SEQ ID NO: 1870510 - RNA, 19 nt, Homo sapiens
  misc_RNA (1)...(19): siRNA sense strand
gcgaggacacccugaugga

SEQ ID NO: 1870511 - RNA, 19 nt, Homo sapiens
  misc_RNA (1)...(19): siRNA sense strand
gcagauuuggcacauaugg

SEQ ID NO: 1870512 - RNA, 19 nt, Homo sapiens
  misc_RNA (1)...(19): siRNA sense strand
gaggaagagaauagauguu

SEQ ID NO: 1870513 - RNA, 19 nt, Homo sapiens
  misc_RNA (1)...(19): siRNA sense strand
gcauaccggcucugguuca

SEQ ID NO: 1870514 - RNA, 19 nt, Homo sapiens
  misc_RNA (1)...(19): siRNA sense strand
cugaacgcuuugagaaguu

SEQ ID NO: 1870515 - RNA, 19 nt, Homo sapiens
  misc_RNA (1)...(19): siRNA sense strand
gguucacaguuauaugaca

SEQ ID NO: 1870516 - RNA, 19 nt, Homo sapiens
  misc_RNA (1)...(19): siRNA sense strand
gaugcgggcucuggaugag

SEQ ID NO: 1870517 - RNA, 19 nt, Homo sapiens
  misc_RNA (1)...(19): siRNA sense strand
gaggaggaagagaauagau

SEQ ID NO: 1870518 - RNA, 19 nt, Homo sapiens
  misc_RNA (1)...(19): siRNA sense strand
ucuccaggccugugacuug

SEQ ID NO: 1870519 - RNA, 19 nt, Homo sapiens
  misc_RNA (1)...(19): siRNA sense strand
cugguucacaguuauauga

SEQ ID NO: 1870520 - RNA, 19 nt, Homo sapiens
  misc_RNA (1)...(19): siRNA sense strand
gaccacaggcugagaucuc

SEQ ID NO: 1870521 - RNA, 19 nt, Homo sapiens
  misc_RNA (1)...(19): siRNA sense strand
ccggacacccuccuucgaa

SEQ ID NO: 1870522 - RNA, 19 nt, Homo sapiens
  misc_RNA (1)...(19): siRNA sense strand
cacaggcugagaucucuuu

SEQ ID NO: 1870523 - RNA, 19 nt, Homo sapiens
  misc_RNA (1)...(19): siRNA sense strand
caacagucagccugcagau

SEQ ID NO: 1870524 - RNA, 19 nt, Homo sapiens
  misc_RNA (1)...(19): siRNA sense strand
ggaaauugcugcccucgua

SEQ ID NO: 1870525 - RNA, 19 nt, Homo sapiens
  misc_RNA (1)...(19): siRNA sense strand
gcccaaaccugucuuguaa

SEQ ID NO: 1870526 - RNA, 19 nt, Homo sapiens
  misc_RNA (1)...(19): siRNA sense strand
ucagaaaccuccucacuuu

SEQ ID NO: 1870527 - RNA, 19 nt, Homo sapiens
  misc_RNA (1)...(19): siRNA sense strand
gaacaggucuccagcagau

SEQ ID NO: 1870528 - RNA, 19 nt, Homo sapiens
  misc_RNA (1)...(19): siRNA sense strand
ccacuuggcuugugagaaa

SEQ ID NO: 1870529 - RNA, 19 nt, Homo sapiens
  misc_RNA (1)...(19): siRNA sense strand
ggaagaggaugaugaggaa

SEQ ID NO: 1870530 - RNA, 19 nt, Homo sapiens
  misc_RNA (1)...(19): siRNA sense strand
gaacggauuuuccaacuua

SEQ ID NO: 1870531 - RNA, 19 nt, Homo sapiens
  misc_RNA (1)...(19): siRNA sense strand
ugaagaaggugcugaagaa

SEQ ID NO: 1870532 - RNA, 19 nt, Homo sapiens
  misc_RNA (1)...(19): siRNA sense strand
gggcuagacuggcugguua

SEQ ID NO: 1870533 - RNA, 19 nt, Homo sapiens
  misc_RNA (1)...(19): siRNA sense strand
uauauaggcuuaucaguga

SEQ ID NO: 1870534 - RNA, 19 nt, Homo sapiens
  misc_RNA (1)...(19): siRNA sense strand
uaaugaaggucuagucaaa

SEQ ID NO: 1870535 - RNA, 19 nt, Homo sapiens
  misc_RNA (1)...(19): siRNA sense strand
ccaccgggcuguacuguuu

SEQ ID NO: 1870536 - RNA, 19 nt, Homo sapiens
  misc_RNA (1)...(19): siRNA sense strand
aaaccacacuccugucaua

SEQ ID NO: 1870537 - RNA, 19 nt, Homo sapiens
  misc_RNA (1)...(19): siRNA sense strand
ggaggaagaugaugauuuu

SEQ ID NO: 1870538 - RNA, 19 nt, Homo sapiens
  misc_RNA (1)...(19): siRNA sense strand
ugaagaugaugaagaguuu

SEQ ID NO: 1870539 - RNA, 19 nt, Homo sapiens
  misc_RNA (1)...(19): siRNA sense strand
gcaacaagcugacuuugac

SEQ ID NO: 1870540 - RNA, 19 nt, Homo sapiens
  misc_RNA (1)...(19): siRNA sense strand
uggcugagcuugcagaauu

SEQ ID NO: 1870541 - RNA, 19 nt, Homo sapiens
  misc_RNA (1)...(19): siRNA sense strand
ggaaacgauugaaguugaa

SEQ ID NO: 1870542 - RNA, 19 nt, Homo sapiens
  misc_RNA (1)...(19): siRNA sense strand
ccaguucccugacuuaaga

SEQ ID NO: 1870543 - RNA, 19 nt, Homo sapiens
  misc_RNA (1)...(19): siRNA sense strand
gaguuaagguggauguuga

SEQ ID NO: 1870544 - RNA, 19 nt, Homo sapiens
  misc_RNA (1)...(19): siRNA sense strand
gaacuggcgcuaucucauu

SEQ ID NO: 1870545 - RNA, 19 nt, Homo sapiens
  misc_RNA (1)...(19): siRNA sense strand
aagaugagguugaugcuaa

SEQ ID NO: 1870546 - RNA, 19 nt, Homo sapiens
  misc_RNA (1)...(19): siRNA sense strand
ccacagcgccucauucuau

SEQ ID NO: 1870547 - RNA, 19 nt, Homo sapiens
  misc_RNA (1)...(19): siRNA sense strand
gaccuggacuuagcagaua

SEQ ID NO: 1870548 - RNA, 19 nt, Homo sapiens
  misc_RNA (1)...(19): siRNA sense strand
gagauggaguugaaacguu

SEQ ID NO: 1870549 - RNA, 19 nt, Homo sapiens
  misc_RNA (1)...(19): siRNA sense strand
ggacaguggugguggugaa

SEQ ID NO: 1870550 - RNA, 19 nt, Homo sapiens
  misc_RNA (1)...(19): siRNA sense strand
gauugaaguugaagaacaa

SEQ ID NO: 1870551 - RNA, 19 nt, Homo sapiens
  misc_RNA (1)...(19): siRNA sense strand
ggaugaagaggauacuaua

SEQ ID NO: 1870552 - RNA, 19 nt, Homo sapiens
  misc_RNA (1)...(19): siRNA sense strand
aaagaucuguugccaguug

SEQ ID NO: 1870553 - RNA, 19 nt, Homo sapiens
  misc_RNA (1)...(19): siRNA sense strand
ggaccgcugucaccgaauu

SEQ ID NO: 1870554 - RNA, 19 nt, Homo sapiens
  misc_RNA (1)...(19): siRNA sense strand
gaacagagacaggccuuga

SEQ ID NO: 1870555 - RNA, 19 nt, Homo sapiens
  misc_RNA (1)...(19): siRNA sense strand
ggaacucccuugcagaaca

SEQ ID NO: 1870556 - RNA, 19 nt, Homo sapiens
  misc_RNA (1)...(19): siRNA sense strand
ggucgugucucucgauaug

SEQ ID NO: 1870557 - RNA, 19 nt, Homo sapiens
  misc_RNA (1)...(19): siRNA sense strand
gcggaaaguugcagacguu

SEQ ID NO: 1870558 - RNA, 19 nt, Homo sapiens
  misc_RNA (1)...(19): siRNA sense strand
gauaugaggcagacacauu

SEQ ID NO: 1870559 - RNA, 19 nt, Homo sapiens
  misc_RNA (1)...(19): siRNA sense strand
gaagaaacaaguggaaguu

SEQ ID NO: 1870560 - RNA, 19 nt, Homo sapiens
  misc_RNA (1)...(19): siRNA sense strand
gcacagaccacaacuaagg

SEQ ID NO: 1870561 - RNA, 19 nt, Homo sapiens
  misc_RNA (1)...(19): siRNA sense strand
uaauagcucugacugugaa

SEQ ID NO: 1870562 - RNA, 19 nt, Homo sapiens
  misc_RNA (1)...(19): siRNA sense strand
ggauagacaugggucgauu

SEQ ID NO: 1870563 - RNA, 19 nt, Homo sapiens
  misc_RNA (1)...(19): siRNA sense strand
uccgagagcuguuugauau

SEQ ID NO: 1870564 - RNA, 19 nt, Homo sapiens
  misc_RNA (1)...(19): siRNA sense strand
uggagaagguggugcaauu

SEQ ID NO: 1870565 - RNA, 19 nt, Homo sapiens
  misc_RNA (1)...(19): siRNA sense strand
gaagcaaaccucucaccuu

SEQ ID NO: 1870566 - RNA, 19 nt, Homo sapiens
  misc_RNA (1)...(19): siRNA sense strand
cgucaacgcugucucuaug

SEQ ID NO: 1870567 - RNA, 19 nt, Homo sapiens
  misc_RNA (1)...(19): siRNA sense strand
gcaaaccucucaccuucca

SEQ ID NO: 1870568 - RNA, 19 nt, Homo sapiens
  misc_RNA (1)...(19): siRNA sense strand
caccacagccuauuucaaa

SEQ ID NO: 1870569 - RNA, 19 nt, Homo sapiens
  misc_RNA (1)...(19): siRNA sense strand
gucauuaacuccagcauca

SEQ ID NO: 1870570 - RNA, 19 nt, Homo sapiens
  misc_RNA (1)...(19): siRNA sense strand
guccacauauauaggcuua

SEQ ID NO: 1870571 - RNA, 19 nt, Homo sapiens
  misc_RNA (1)...(19): siRNA sense strand
gcagugaagaugaggauga

SEQ ID NO: 1870572 - RNA, 19 nt, Homo sapiens
  misc_RNA (1)...(19): siRNA sense strand
caaccauggugaauaauac

SEQ ID NO: 1870573 - RNA, 19 nt, Homo sapiens
  misc_RNA (1)...(19): siRNA sense strand
ggagugaggaugaggaaga

SEQ ID NO: 1870574 - RNA, 19 nt, Homo sapiens
  misc_RNA (1)...(19): siRNA sense strand
ggcagaagaugaagaggau

SEQ ID NO: 1870575 - RNA, 19 nt, Homo sapiens
  misc_RNA (1)...(19): siRNA sense strand
gcaaucauccaaaucuguu

SEQ ID NO: 1870576 - RNA, 19 nt, Homo sapiens
  misc_RNA (1)...(19): siRNA sense strand
ggaagaccauccagaccau

SEQ ID NO: 1870577 - RNA, 19 nt, Homo sapiens
  misc_RNA (1)...(19): siRNA sense strand
gggccgaccucccaagaau

SEQ ID NO: 1870578 - RNA, 19 nt, Homo sapiens
  misc_RNA (1)...(19): siRNA sense strand
gugcugauguggaaauuag

SEQ ID NO: 1870579 - RNA, 19 nt, Homo sapiens
  misc_RNA (1)...(19): siRNA sense strand
gcaagcagacucauauucu

SEQ ID NO: 1870580 - RNA, 19 nt, Homo sapiens
  misc_RNA (1)...(19): siRNA sense strand
uaagguggauguugagaag

SEQ ID NO: 1870581 - RNA, 19 nt, Homo sapiens
  misc_RNA (1)...(19): siRNA sense strand
ggaugaagaugagguugau

SEQ ID NO: 1870582 - RNA, 19 nt, Homo sapiens
  misc_RNA (1)...(19): siRNA sense strand
caccagugcugauguggaa

SEQ ID NO: 1870583 - RNA, 19 nt, Homo sapiens
  misc_RNA (1)...(19): siRNA sense strand
gcaaaucagaagagaaugu

SEQ ID NO: 1870584 - RNA, 19 nt, Homo sapiens
  misc_RNA (1)...(19): siRNA sense strand
gaccagcugucagaaauca

SEQ ID NO: 1870585 - RNA, 19 nt, Homo sapiens
  misc_RNA (1)...(19): siRNA sense strand
ggagcaauguggagaaggu

SEQ ID NO: 1870586 - RNA, 19 nt, Homo sapiens
  misc_RNA (1)...(19): siRNA sense strand
caucuucccuugugguuuc

SEQ ID NO: 1870587 - RNA, 19 nt, Homo sapiens
  misc_RNA (1)...(19): siRNA sense strand
ggcagucacuccucaacuu

SEQ ID NO: 1870588 - RNA, 19 nt, Homo sapiens
  misc_RNA (1)...(19): siRNA sense strand
ccauuaaccuccagcaaag

SEQ ID NO: 1870589 - RNA, 19 nt, Homo sapiens
  misc_RNA (1)...(19): siRNA sense strand
ccaaggaugucaggcaguu

SEQ ID NO: 1870590 - RNA, 19 nt, Homo sapiens
  misc_RNA (1)...(19): siRNA sense strand
aaacgcauauucugcuuca

SEQ ID NO: 1870591 - RNA, 19 nt, Homo sapiens
  misc_RNA (1)...(19): siRNA sense strand
ucaaggagugguucucuaa

SEQ ID NO: 1870592 - RNA, 19 nt, Homo sapiens
  misc_RNA (1)...(19): siRNA sense strand
agaaacaaguggaaguuca

SEQ ID NO: 1870593 - RNA, 19 nt, Homo sapiens
  misc_RNA (1)...(19): siRNA sense strand
aaggugagcuuuccaugga

SEQ ID NO: 1870594 - RNA, 19 nt, Homo sapiens
  misc_RNA (1)...(19): siRNA sense strand
gagaauugccacuggaaga

SEQ ID NO: 1870595 - RNA, 19 nt, Homo sapiens
  misc_RNA (1)...(19): siRNA sense strand
aggaaacgauugaaguuga

SEQ ID NO: 1870596 - RNA, 19 nt, Homo sapiens
  misc_RNA (1)...(19): siRNA sense strand
ucacacagcgcaacaaaca

SEQ ID NO: 1870597 - RNA, 19 nt, Homo sapiens
  misc_RNA (1)...(19): siRNA sense strand
ggaaugcgaggacggaaga

SEQ ID NO: 1870598 - RNA, 19 nt, Homo sapiens
  misc_RNA (1)...(19): siRNA sense strand
gcaaaccacacuccuguca

SEQ ID NO: 1870599 - RNA, 19 nt, Homo sapiens
  misc_RNA (1)...(19): siRNA sense strand
ccacauauauaggcuuauc

SEQ ID NO: 1870600 - RNA, 19 nt, Homo sapiens
  misc_RNA (1)...(19): siRNA sense strand
gcacccaguucccugacuu

SEQ ID NO: 1870601 - RNA, 19 nt, Homo sapiens
  misc_RNA (1)...(19): siRNA sense strand
cagaaaucauugagagguu

SEQ ID NO: 1870602 - RNA, 19 nt, Homo sapiens
  misc_RNA (1)...(19): siRNA sense strand
uagaccagcugucagaaau

SEQ ID NO: 1870603 - RNA, 19 nt, Homo sapiens
  misc_RNA (1)...(19): siRNA sense strand
gcucccaccucuucacaug

SEQ ID NO: 1870604 - RNA, 19 nt, Homo sapiens
  misc_RNA (1)...(19): siRNA sense strand
gcaucagccuugacucuag

SEQ ID NO: 1870605 - RNA, 19 nt, Homo sapiens
  misc_RNA (1)...(19): siRNA sense strand
ggugaagauuguagugaga

SEQ ID NO: 1870606 - RNA, 19 nt, Homo sapiens
  misc_RNA (1)...(19): siRNA sense strand
ccaaccauggugaauaaua

SEQ ID NO: 1870607 - RNA, 19 nt, Homo sapiens
  misc_RNA (1)...(19): siRNA sense strand
gcuuuaaaauccucacuua

SEQ ID NO: 1870608 - RNA, 19 nt, Homo sapiens
  misc_RNA (1)...(19): siRNA sense strand
ccauggagcugagcgaguu

SEQ ID NO: 1870609 - RNA, 19 nt, Homo sapiens
  misc_RNA (1)...(19): siRNA sense strand
ggaagaaacaaguggaagu

SEQ ID NO: 1870610 - RNA, 19 nt, Homo sapiens
  misc_RNA (1)...(19): siRNA sense strand
ccugagacccuaauuguug

SEQ ID NO: 1870611 - RNA, 19 nt, Homo sapiens
  misc_RNA (1)...(19): siRNA sense strand
caggacggcugguaacugu

SEQ ID NO: 1870612 - RNA, 19 nt, Homo sapiens
  misc_RNA (1)...(19): siRNA sense strand
caucaucaacucaaacuau

SEQ ID NO: 1870613 - RNA, 19 nt, Homo sapiens
  misc_RNA (1)...(19): siRNA sense strand
gccaguaccuaagcaagaa

SEQ ID NO: 1870614 - RNA, 19 nt, Homo sapiens
  misc_RNA (1)...(19): siRNA sense strand
cgauugaaguugaagaaca

SEQ ID NO: 1870615 - RNA, 19 nt, Homo sapiens
  misc_RNA (1)...(19): siRNA sense strand
gccauuaaccuccagcaaa

SEQ ID NO: 1870616 - RNA, 19 nt, Homo sapiens
  misc_RNA (1)...(19): siRNA sense strand
ccaggcaucuucccuugug

SEQ ID NO: 1870617 - RNA, 19 nt, Homo sapiens
  misc_RNA (1)...(19): siRNA sense strand
ccaagccagucaagaugaa

SEQ ID NO: 1870618 - RNA, 19 nt, Homo sapiens
  misc_RNA (1)...(19): siRNA sense strand
gaacaucaagaacuucaag

SEQ ID NO: 1870619 - RNA, 19 nt, Homo sapiens
  misc_RNA (1)...(19): siRNA sense strand
ugaagaggauacuauagca

SEQ ID NO: 1870620 - RNA, 19 nt, Homo sapiens
  misc_RNA (1)...(19): siRNA sense strand
ccucagguguuggagauaa

SEQ ID NO: 1870621 - RNA, 19 nt, Homo sapiens
  misc_RNA (1)...(19): siRNA sense strand
gaagaugagguugaugcua

SEQ ID NO: 1870622 - RNA, 19 nt, Homo sapiens
  misc_RNA (1)...(19): siRNA sense strand
ucaaacgccuccacaaggu

SEQ ID NO: 1870623 - RNA, 19 nt, Homo sapiens
  misc_RNA (1)...(19): siRNA sense strand
gaccaagcccaaugccuuu

SEQ ID NO: 1870624 - RNA, 19 nt, Homo sapiens
  misc_RNA (1)...(19): siRNA sense strand
gagagaaacuggaaggaaa

SEQ ID NO: 1870625 - RNA, 19 nt, Homo sapiens
  misc_RNA (1)...(19): siRNA sense strand
gaacaaagaugggcaacug

SEQ ID NO: 1870626 - RNA, 19 nt, Homo sapiens
  misc_RNA (1)...(19): siRNA sense strand
gagcauaauuuggcaauaa

SEQ ID NO: 1870627 - RNA, 19 nt, Homo sapiens
  misc_RNA (1)...(19): siRNA sense strand
ccauugagcuccauaaaga

SEQ ID NO: 1870628 - RNA, 19 nt, Homo sapiens
  misc_RNA (1)...(19): siRNA sense strand
ccacucagcuucauuaaca

SEQ ID NO: 1870629 - RNA, 19 nt, Homo sapiens
  misc_RNA (1)...(19): siRNA sense strand
gaaagacaaucagaaacuu

SEQ ID NO: 1870630 - RNA, 19 nt, Homo sapiens
  misc_RNA (1)...(19): siRNA sense strand
gacagaaacuggcaagaug

SEQ ID NO: 1870631 - RNA, 19 nt, Homo sapiens
  misc_RNA (1)...(19): siRNA sense strand
ugacaggucuagagaauuc

SEQ ID NO: 1870632 - RNA, 19 nt, Homo sapiens
  misc_RNA (1)...(19): siRNA sense strand
caggagagguguauguuug

SEQ ID NO: 1870633 - RNA, 19 nt, Homo sapiens
  misc_RNA (1)...(19): siRNA sense strand
uaaggaagaugugcuguug

SEQ ID NO: 1870634 - RNA, 19 nt, Homo sapiens
  misc_RNA (1)...(19): siRNA sense strand
aagagaagguuguuuguau

SEQ ID NO: 1870635 - RNA, 19 nt, Homo sapiens
  misc_RNA (1)...(19): siRNA sense strand
gcaacugaaugacuucugu

SEQ ID NO: 1870636 - RNA, 19 nt, Homo sapiens
  misc_RNA (1)...(19): siRNA sense strand
agaaagccauggacaaaga

SEQ ID NO: 1870637 - RNA, 19 nt, Homo sapiens
  misc_RNA (1)...(19): siRNA sense strand
gaaggaaagacaaucagaa

SEQ ID NO: 1870638 - RNA, 19 nt, Homo sapiens
  misc_RNA (1)...(19): siRNA sense strand
ggacugguuuggcaucaug

SEQ ID NO: 1870639 - RNA, 19 nt, Homo sapiens
  misc_RNA (1)...(19): siRNA sense strand
uaugaaggcuggaaacuag

SEQ ID NO: 1870640 - RNA, 19 nt, Homo sapiens
  misc_RNA (1)...(19): siRNA sense strand
ucagaaacuucaacccaaa

SEQ ID NO: 1870641 - RNA, 19 nt, Homo sapiens
  misc_RNA (1)...(19): siRNA sense strand
acacagaggauaucccaua

SEQ ID NO: 1870642 - RNA, 19 nt, Homo sapiens
  misc_RNA (1)...(19): siRNA sense strand
gcagacucuuccauuguuu

SEQ ID NO: 1870643 - RNA, 19 nt, Homo sapiens
  misc_RNA (1)...(19): siRNA sense strand
uaaugaggcugcuuuccuu

SEQ ID NO: 1870644 - RNA, 19 nt, Homo sapiens
  misc_RNA (1)...(19): siRNA sense strand
ggaaagacaaucagaaacu

SEQ ID NO: 1870645 - RNA, 19 nt, Homo sapiens
  misc_RNA (1)...(19): siRNA sense strand
ggcagacucuuccauuguu

SEQ ID NO: 1870646 - RNA, 19 nt, Homo sapiens
  misc_RNA (1)...(19): siRNA sense strand
gaaaauagaagcacauugu

SEQ ID NO: 1870647 - RNA, 19 nt, Homo sapiens
  misc_RNA (1)...(19): siRNA sense strand
caaguucuaucauguggau

SEQ ID NO: 1870648 - RNA, 19 nt, Homo sapiens
  misc_RNA (1)...(19): siRNA sense strand
gagaagguuguuuguauug

SEQ ID NO: 1870649 - RNA, 19 nt, Homo sapiens
  misc_RNA (1)...(19): siRNA sense strand
ggagaccucuuuguuugug

SEQ ID NO: 1870650 - RNA, 19 nt, Homo sapiens
  misc_RNA (1)...(19): siRNA sense strand
agagaagguuguuuguauu

SEQ ID NO: 1870651 - RNA, 19 nt, Homo sapiens
  misc_RNA (1)...(19): siRNA sense strand
ucauggaccucgaagaugu

SEQ ID NO: 1870652 - RNA, 19 nt, Homo sapiens
  misc_RNA (1)...(19): siRNA sense strand
gcaggagagguguauguuu

SEQ ID NO: 1870653 - RNA, 19 nt, Homo sapiens
  misc_RNA (1)...(19): siRNA sense strand
caacaagcaugggcaacug

SEQ ID NO: 1870654 - RNA, 19 nt, Homo sapiens
  misc_RNA (1)...(19): siRNA sense strand
ggaaggaaagacaaucaga

SEQ ID NO: 1870655 - RNA, 19 nt, Homo sapiens
  misc_RNA (1)...(19): siRNA sense strand
ucagaaagccauggacaaa

SEQ ID NO: 1870656 - RNA, 19 nt, Homo sapiens
  misc_RNA (1)...(19): siRNA sense strand
gagcaacugaggucucuug

SEQ ID NO: 1870657 - RNA, 19 nt, Homo sapiens
  misc_RNA (1)...(19): siRNA sense strand
gaaacuggaaggaaagaca

SEQ ID NO: 1870658 - RNA, 19 nt, Homo sapiens
  misc_RNA (1)...(19): siRNA sense strand
agaccacucagcuucauua

SEQ ID NO: 1870659 - RNA, 19 nt, Homo sapiens
  misc_RNA (1)...(19): siRNA sense strand
aaagcaauguguguucuug

SEQ ID NO: 1870660 - RNA, 19 nt, Homo sapiens
  misc_RNA (1)...(19): siRNA sense strand
agagaauucuaaagcaaug

SEQ ID NO: 1870661 - RNA, 19 nt, Homo sapiens
  misc_RNA (1)...(19): siRNA sense strand
cugaaugacuucuguaaac

SEQ ID NO: 1870662 - RNA, 19 nt, Homo sapiens
  misc_RNA (1)...(19): siRNA sense strand
aauaauugguggagugugu

SEQ ID NO: 1870663 - RNA, 19 nt, Homo sapiens
  misc_RNA (1)...(19): siRNA sense strand
auaaagagaagguuguuug

SEQ ID NO: 1870664 - RNA, 19 nt, Homo sapiens
  misc_RNA (1)...(19): siRNA sense strand
acaaagagagaaacuggaa

SEQ ID NO: 1870665 - RNA, 19 nt, Homo sapiens
  misc_RNA (1)...(19): siRNA sense strand
aaagcaagauucauuucuc

SEQ ID NO: 1870666 - RNA, 19 nt, Homo sapiens
  misc_RNA (1)...(19): siRNA sense strand
aaagagaagguuguuugua

SEQ ID NO: 1870667 - RNA, 19 nt, Homo sapiens
  misc_RNA (1)...(19): siRNA sense strand
aaggaaagacaaucagaaa

SEQ ID NO: 1870668 - RNA, 19 nt, Homo sapiens
  misc_RNA (1)...(19): siRNA sense strand
gaagguuguuuguauugcu

SEQ ID NO: 1870669 - RNA, 19 nt, Homo sapiens
  misc_RNA (1)...(19): siRNA sense strand
caacugaaugacuucugua

SEQ ID NO: 1870670 - RNA, 19 nt, Homo sapiens
  misc_RNA (1)...(19): siRNA sense strand
aauagaagcacauuguuuc

SEQ ID NO: 1870671 - RNA, 19 nt, Homo sapiens
  misc_RNA (1)...(19): siRNA sense strand
gggcagacucuuccauugu

SEQ ID NO: 1870672 - RNA, 19 nt, Homo sapiens
  misc_RNA (1)...(19): siRNA sense strand
uaaagagaagguuguuugu

SEQ ID NO: 1870673 - RNA, 19 nt, Homo sapiens
  misc_RNA (1)...(19): siRNA sense strand
caacccaaagccaaucuga

SEQ ID NO: 1870674 - RNA, 19 nt, Homo sapiens
  misc_RNA (1)...(19): siRNA sense strand
uuacgauuaugcucacaga

SEQ ID NO: 1870675 - RNA, 19 nt, Homo sapiens
  misc_RNA (1)...(19): siRNA sense strand
agugacaggucuagagaau

SEQ ID NO: 1870676 - RNA, 19 nt, Homo sapiens
  misc_RNA (1)...(19): siRNA sense strand
cccagcaacugaaugacuu

SEQ ID NO: 1870677 - RNA, 19 nt, Homo sapiens
  misc_RNA (1)...(19): siRNA sense strand
uaauugguggaguguguua

SEQ ID NO: 1870678 - RNA, 19 nt, Homo sapiens
  misc_RNA (1)...(19): siRNA sense strand
caaaggaaccaagcagagu

SEQ ID NO: 1870679 - RNA, 19 nt, Homo sapiens
  misc_RNA (1)...(19): siRNA sense strand
aaauagcuaugggcaacuu

SEQ ID NO: 1870680 - RNA, 19 nt, Homo sapiens
  misc_RNA (1)...(19): siRNA sense strand
gggccacucugcaguuguc

SEQ ID NO: 1870681 - RNA, 19 nt, Homo sapiens
  misc_RNA (1)...(19): siRNA sense strand
augggcaacuggcuaauga

SEQ ID NO: 1870682 - RNA, 19 nt, Homo sapiens
  misc_RNA (1)...(19): siRNA sense strand
gaaggcuggaaacuagaaa

SEQ ID NO: 1870683 - RNA, 19 nt, Homo sapiens
  misc_RNA (1)...(19): siRNA sense strand
acgauuaugcucacagaaa

SEQ ID NO: 1870684 - RNA, 19 nt, Homo sapiens
  misc_RNA (1)...(19): siRNA sense strand
cagaaacuggcaagauguu

SEQ ID NO: 1870685 - RNA, 19 nt, Homo sapiens
  misc_RNA (1)...(19): siRNA sense strand
ccucauggaccucgaagau

SEQ ID NO: 1870686 - RNA, 19 nt, Homo sapiens
  misc_RNA (1)...(19): siRNA sense strand
ggucaaguucuaucaugug

SEQ ID NO: 1870687 - RNA, 19 nt, Homo sapiens
  misc_RNA (1)...(19): siRNA sense strand
cgauuaugcucacagaaaa

SEQ ID NO: 1870688 - RNA, 19 nt, Homo sapiens
  misc_RNA (1)...(19): siRNA sense strand
cacagaaaauggucaaguu

SEQ ID NO: 1870689 - RNA, 19 nt, Homo sapiens
  misc_RNA (1)...(19): siRNA sense strand
gagaaacuggaaggaaaga

SEQ ID NO: 1870690 - RNA, 19 nt, Homo sapiens
  misc_RNA (1)...(19): siRNA sense strand
ugggcagacucuuccauug

SEQ ID NO: 1870691 - RNA, 19 nt, Homo sapiens
  misc_RNA (1)...(19): siRNA sense strand
ggccauugagcuccauaaa

SEQ ID NO: 1870692 - RNA, 19 nt, Homo sapiens
  misc_RNA (1)...(19): siRNA sense strand
agacagaaacuggcaagau

SEQ ID NO: 1870693 - RNA, 19 nt, Homo sapiens
  misc_RNA (1)...(19): siRNA sense strand
gcaacaagcaugggcaacu

SEQ ID NO: 1870694 - RNA, 19 nt, Homo sapiens
  misc_RNA (1)...(19): siRNA sense strand
gaaaauggucaaguucuau

SEQ ID NO: 1870695 - RNA, 19 nt, Homo sapiens
  misc_RNA (1)...(19): siRNA sense strand
caagaccaccgaacagcau

SEQ ID NO: 1870696 - RNA, 19 nt, Homo sapiens
  misc_RNA (1)...(19): siRNA sense strand
gaccacucagcuucauuaa

SEQ ID NO: 1870697 - RNA, 19 nt, Homo sapiens
  misc_RNA (1)...(19): siRNA sense strand
cuaaagcaauguguguucu

SEQ ID NO: 1870698 - RNA, 19 nt, Homo sapiens
  misc_RNA (1)...(19): siRNA sense strand
ucagcuucauuaacagaug

SEQ ID NO: 1870699 - RNA, 19 nt, Homo sapiens
  misc_RNA (1)...(19): siRNA sense strand
agagcauaauuuggcaaua

SEQ ID NO: 1870700 - RNA, 19 nt, Homo sapiens
  misc_RNA (1)...(19): siRNA sense strand
cauaaagagaagguuguuu

SEQ ID NO: 1870701 - RNA, 19 nt, Homo sapiens
  misc_RNA (1)...(19): siRNA sense strand
aaacuggaaggaaagacaa

SEQ ID NO: 1870702 - RNA, 19 nt, Homo sapiens
  misc_RNA (1)...(19): siRNA sense strand
agagagaaacuggaaggaa

SEQ ID NO: 1870703 - RNA, 19 nt, Homo sapiens
  misc_RNA (1)...(19): siRNA sense strand
gcugggauuuuacgauuau

SEQ ID NO: 1870704 - RNA, 19 nt, Homo sapiens
  misc_RNA (1)...(19): siRNA sense strand
gcaacugaggucucuugug

SEQ ID NO: 1870705 - RNA, 19 nt, Homo sapiens
  misc_RNA (1)...(19): siRNA sense strand
gaaagccauggacaaagag

SEQ ID NO: 1870706 - RNA, 19 nt, Homo sapiens
  misc_RNA (1)...(19): siRNA sense strand
uaaagcaauguguguucuu

SEQ ID NO: 1870707 - RNA, 19 nt, Homo sapiens
  misc_RNA (1)...(19): siRNA sense strand
aaagacaaucagaaacuuc

SEQ ID NO: 1870708 - RNA, 19 nt, Homo sapiens
  misc_RNA (1)...(19): siRNA sense strand
ugaaggcuggaaacuagaa

SEQ ID NO: 1870709 - RNA, 19 nt, Homo sapiens
  misc_RNA (1)...(19): siRNA sense strand
uuaugaaggcuggaaacua

SEQ ID NO: 1870710 - RNA, 19 nt, Homo sapiens
  misc_RNA (1)...(19): siRNA sense strand
ccugguugcucagacagaa

SEQ ID NO: 1870711 - RNA, 19 nt, Homo sapiens
  misc_RNA (1)...(19): siRNA sense strand
acaccugguugcucagaca

SEQ ID NO: 1870712 - RNA, 19 nt, Homo sapiens
  misc_RNA (1)...(19): siRNA sense strand
ggaaccaagcagagugaca

SEQ ID NO: 1870713 - RNA, 19 nt, Homo sapiens
  misc_RNA (1)...(19): siRNA sense strand
ucgaggacacugaaucuca

SEQ ID NO: 1870714 - RNA, 19 nt, Homo sapiens
  misc_RNA (1)...(19): siRNA sense strand
gcuggaaacuagaaaagca

SEQ ID NO: 1870715 - RNA, 19 nt, Homo sapiens
  misc_RNA (1)...(19): siRNA sense strand
gccuguggcugggauuuua

SEQ ID NO: 1870716 - RNA, 19 nt, Homo sapiens
  misc_RNA (1)...(19): siRNA sense strand
uguaaacccaggaguguca

SEQ ID NO: 1870717 - RNA, 19 nt, Homo sapiens
  misc_RNA (1)...(19): siRNA sense strand
gccauugagcuccauaaag

SEQ ID NO: 1870718 - RNA, 19 nt, Homo sapiens
  misc_RNA (1)...(19): siRNA sense strand
ccauggacaaagagagaaa

SEQ ID NO: 1870719 - RNA, 19 nt, Homo sapiens
  misc_RNA (1)...(19): siRNA sense strand
caucgaggacacugaaucu

SEQ ID NO: 1870720 - RNA, 19 nt, Homo sapiens
  misc_RNA (1)...(19): siRNA sense strand
uggcuaaugaggcugcuuu

SEQ ID NO: 1870721 - RNA, 19 nt, Homo sapiens
  misc_RNA (1)...(19): siRNA sense strand
cgaguggcaucguguucca

SEQ ID NO: 1870722 - RNA, 19 nt, Homo sapiens
  misc_RNA (1)...(19): siRNA sense strand
agaagaagcucaagccuuu

SEQ ID NO: 1870723 - RNA, 19 nt, Homo sapiens
  misc_RNA (1)...(19): siRNA sense strand
ggacauggcucagauuucu

SEQ ID NO: 1870724 - RNA, 19 nt, Homo sapiens
  misc_RNA (1)...(19): siRNA sense strand
cagagaaacuccacaagga

SEQ ID NO: 1870725 - RNA, 19 nt, Homo sapiens
  misc_RNA (1)...(19): siRNA sense strand
uaaaggaacugucagaaaa

SEQ ID NO: 1870726 - RNA, 19 nt, Homo sapiens
  misc_RNA (1)...(19): siRNA sense strand
ggacucaucgccagagaaa

SEQ ID NO: 1870727 - RNA, 19 nt, Homo sapiens
  misc_RNA (1)...(19): siRNA sense strand
gcagaguggugccaucauc

SEQ ID NO: 1870728 - RNA, 19 nt, Homo sapiens
  misc_RNA (1)...(19): siRNA sense strand
gaccugcacucacccaugu

SEQ ID NO: 1870729 - RNA, 19 nt, Homo sapiens
  misc_RNA (1)...(19): siRNA sense strand
ucaacaaggugguggugaa

SEQ ID NO: 1870730 - RNA, 19 nt, Homo sapiens
  misc_RNA (1)...(19): siRNA sense strand
ggcgagagcuacacacaca

SEQ ID NO: 1870731 - RNA, 19 nt, Homo sapiens
  misc_RNA (1)...(19): siRNA sense strand
ucacugcccugucccacaa

SEQ ID NO: 1870732 - RNA, 19 nt, Homo sapiens
  misc_RNA (1)...(19): siRNA sense strand
cuaaaggaacugucagaaa

SEQ ID NO: 1870733 - RNA, 19 nt, Homo sapiens
  misc_RNA (1)...(19): siRNA sense strand
gaaagguuccacaccaugu

SEQ ID NO: 1870734 - RNA, 19 nt, Homo sapiens
  misc_RNA (1)...(19): siRNA sense strand
gcuaggauacugggcguua

SEQ ID NO: 1870735 - RNA, 19 nt, Homo sapiens
  misc_RNA (1)...(19): siRNA sense strand
gagaaacuccacaaggaau

SEQ ID NO: 1870736 - RNA, 19 nt, Homo sapiens
  misc_RNA (1)...(19): siRNA sense strand
ccacaccaaugcugaaguc

SEQ ID NO: 1870737 - RNA, 19 nt, Homo sapiens
  misc_RNA (1)...(19): siRNA sense strand
gaaacuccacaaggaauug

SEQ ID NO: 1870738 - RNA, 19 nt, Homo sapiens
  misc_RNA (1)...(19): siRNA sense strand
caccaaugcugaagucaag

SEQ ID NO: 1870739 - RNA, 19 nt, Homo sapiens
  misc_RNA (1)...(19): siRNA sense strand
caccaucacucagcagcua

SEQ ID NO: 1870740 - RNA, 19 nt, Homo sapiens
  misc_RNA (1)...(19): siRNA sense strand
caacggcgacuuccucauc

SEQ ID NO: 1870741 - RNA, 19 nt, Homo sapiens
  misc_RNA (1)...(19): siRNA sense strand
gcuaugagaaguucgacaa

SEQ ID NO: 1870742 - RNA, 19 nt, Homo sapiens
  misc_RNA (1)...(19): siRNA sense strand
gggagaggcuaaaggaacu

SEQ ID NO: 1870743 - RNA, 19 nt, Homo sapiens
  misc_RNA (1)...(19): siRNA sense strand
acacauccaguaccuguuu

SEQ ID NO: 1870744 - RNA, 19 nt, Homo sapiens
  misc_RNA (1)...(19): siRNA sense strand
ggacuaugggcaacauguu

SEQ ID NO: 1870745 - RNA, 19 nt, Homo sapiens
  misc_RNA (1)...(19): siRNA sense strand
caagguggacugccugguu

SEQ ID NO: 1870746 - RNA, 19 nt, Homo sapiens
  misc_RNA (1)...(19): siRNA sense strand
gaggaggagcucaaacuca

SEQ ID NO: 1870747 - RNA, 19 nt, Homo sapiens
  misc_RNA (1)...(19): siRNA sense strand
gccuagaccugcuggaaag

SEQ ID NO: 1870748 - RNA, 19 nt, Homo sapiens
  misc_RNA (1)...(19): siRNA sense strand
gcuacacacacauccagua

SEQ ID NO: 1870749 - RNA, 19 nt, Homo sapiens
  misc_RNA (1)...(19): siRNA sense strand
ggagaugcagacccuaaug

SEQ ID NO: 1870750 - RNA, 19 nt, Homo sapiens
  misc_RNA (1)...(19): siRNA sense strand
caaccaggccuugcacuuc

SEQ ID NO: 1870751 - RNA, 19 nt, Homo sapiens
  misc_RNA (1)...(19): siRNA sense strand
gcgacuaugugaaguucuc

SEQ ID NO: 1870752 - RNA, 19 nt, Homo sapiens
  misc_RNA (1)...(19): siRNA sense strand
gcucaagccuuuucucaag

SEQ ID NO: 1870753 - RNA, 19 nt, Homo sapiens
  misc_RNA (1)...(19): siRNA sense strand
gcagcgacuaugugaaguu

SEQ ID NO: 1870754 - RNA, 19 nt, Homo sapiens
  misc_RNA (1)...(19): siRNA sense strand
gcuaaaggaacugucagaa

SEQ ID NO: 1870755 - RNA, 19 nt, Homo sapiens
  misc_RNA (1)...(19): siRNA sense strand
cagcgacuaugugaaguuc

SEQ ID NO: 1870756 - RNA, 19 nt, Homo sapiens
  misc_RNA (1)...(19): siRNA sense strand
aaccaggccuugcacuuca

SEQ ID NO: 1870757 - RNA, 19 nt, Homo sapiens
  misc_RNA (1)...(19): siRNA sense strand
gagcagaguggugccauca

SEQ ID NO: 1870758 - RNA, 19 nt, Homo sapiens
  misc_RNA (1)...(19): siRNA sense strand
gaaggggacuggggcaaga

SEQ ID NO: 1870759 - RNA, 19 nt, Homo sapiens
  misc_RNA (1)...(19): siRNA sense strand
acaccacguuuccucaugu

SEQ ID NO: 1870760 - RNA, 19 nt, Homo sapiens
  misc_RNA (1)...(19): siRNA sense strand
agagaaacuccacaaggaa

SEQ ID NO: 1870761 - RNA, 19 nt, Homo sapiens
  misc_RNA (1)...(19): siRNA sense strand
gugccauccuguacgagaa

SEQ ID NO: 1870762 - RNA, 19 nt, Homo sapiens
  misc_RNA (1)...(19): siRNA sense strand
gaaguacauccuggacuca

SEQ ID NO: 1870763 - RNA, 19 nt, Homo sapiens
  misc_RNA (1)...(19): siRNA sense strand
gcugagcaacaccacguuu

SEQ ID NO: 1870764 - RNA, 19 nt, Homo sapiens
  misc_RNA (1)...(19): siRNA sense strand
gcacuucaagaucaacaag

SEQ ID NO: 1870765 - RNA, 19 nt, Homo sapiens
  misc_RNA (1)...(19): siRNA sense strand
gagaugcagacccuaaugg

SEQ ID NO: 1870766 - RNA, 19 nt, Homo sapiens
  misc_RNA (1)...(19): siRNA sense strand
cccaagggcagccacauga

SEQ ID NO: 1870767 - RNA, 19 nt, Homo sapiens
  misc_RNA (1)...(19): siRNA sense strand
guaccacaccaaugcugaa

SEQ ID NO: 1870768 - RNA, 19 nt, Homo sapiens
  misc_RNA (1)...(19): siRNA sense strand
acacacacauccaguaccu

SEQ ID NO: 1870769 - RNA, 19 nt, Homo sapiens
  misc_RNA (1)...(19): siRNA sense strand
cagagggugccauccugua

SEQ ID NO: 1870770 - RNA, 19 nt, Homo sapiens
  misc_RNA (1)...(19): siRNA sense strand
cugccugguugcuaggaua

SEQ ID NO: 1870771 - RNA, 19 nt, Homo sapiens
  misc_RNA (1)...(19): siRNA sense strand
ggaggaggagcucaaacuc

SEQ ID NO: 1870772 - RNA, 19 nt, Homo sapiens
  misc_RNA (1)...(19): siRNA sense strand
gaggcuaaaggaacuguca

SEQ ID NO: 1870773 - RNA, 19 nt, Homo sapiens
  misc_RNA (1)...(19): siRNA sense strand
agaaacuccacaaggaauu

SEQ ID NO: 1870774 - RNA, 19 nt, Homo sapiens
  misc_RNA (1)...(19): siRNA sense strand
guggugccaucaucuacug

SEQ ID NO: 1870775 - RNA, 19 nt, Homo sapiens
  misc_RNA (1)...(19): siRNA sense strand
ccaagggcagccacaugaa

SEQ ID NO: 1870776 - RNA, 19 nt, Homo sapiens
  misc_RNA (1)...(19): siRNA sense strand
aaggagaugcagacccuaa

SEQ ID NO: 1870777 - RNA, 19 nt, Homo sapiens
  misc_RNA (1)...(19): siRNA sense strand
caacaccacguuuccucau

SEQ ID NO: 1870778 - RNA, 19 nt, Homo sapiens
  misc_RNA (1)...(19): siRNA sense strand
caagggcagccacaugaag

SEQ ID NO: 1870779 - RNA, 19 nt, Homo sapiens
  misc_RNA (1)...(19): siRNA sense strand
gacuaugggcaacauguuc

SEQ ID NO: 1870780 - RNA, 19 nt, Homo sapiens
  misc_RNA (1)...(19): siRNA sense strand
cagcaggccaggagcuaug

SEQ ID NO: 1870781 - RNA, 19 nt, Homo sapiens
  misc_RNA (1)...(19): siRNA sense strand
ucacccaugucgcccaucu

SEQ ID NO: 1870782 - RNA, 19 nt, Homo sapiens
  misc_RNA (1)...(19): siRNA sense strand
gaucccagaccugcacuca

SEQ ID NO: 1870783 - RNA, 19 nt, Homo sapiens
  misc_RNA (1)...(19): siRNA sense strand
cagcacggaguuccagaug

SEQ ID NO: 1870784 - RNA, 19 nt, Homo sapiens
  misc_RNA (1)...(19): siRNA sense strand
ugaaggcaggcgagagcua

SEQ ID NO: 1870785 - RNA, 19 nt, Homo sapiens
  misc_RNA (1)...(19): siRNA sense strand
gggacuaugggcaacaugu

SEQ ID NO: 1870786 - RNA, 19 nt, Homo sapiens
  misc_RNA (1)...(19): siRNA sense strand
uuaaagagcuaguagauga

SEQ ID NO: 1870787 - RNA, 19 nt, Homo sapiens
  misc_RNA (1)...(19): siRNA sense strand
gaaggacgauccaacacuu

SEQ ID NO: 1870788 - RNA, 19 nt, Homo sapiens
  misc_RNA (1)...(19): siRNA sense strand
gcuaauagaucaguuaaag

SEQ ID NO: 1870789 - RNA, 19 nt, Homo sapiens
  misc_RNA (1)...(19): siRNA sense strand
ggaggaagauugauauugc

SEQ ID NO: 1870790 - RNA, 19 nt, Homo sapiens
  misc_RNA (1)...(19): siRNA sense strand
ggaaucaucaagacagaua

SEQ ID NO: 1870791 - RNA, 19 nt, Homo sapiens
  misc_RNA (1)...(19): siRNA sense strand
gaacuucuauuugaucagu

SEQ ID NO: 1870792 - RNA, 19 nt, Homo sapiens
  misc_RNA (1)...(19): siRNA sense strand
caucaagacagauaaagua

SEQ ID NO: 1870793 - RNA, 19 nt, Homo sapiens
  misc_RNA (1)...(19): siRNA sense strand
uaaauaaugucaggaagga

SEQ ID NO: 1870794 - RNA, 19 nt, Homo sapiens
  misc_RNA (1)...(19): siRNA sense strand
cauaggaauugaucacauu

SEQ ID NO: 1870795 - RNA, 19 nt, Homo sapiens
  misc_RNA (1)...(19): siRNA sense strand
ggagcaguaugacaagcua

SEQ ID NO: 1870796 - RNA, 19 nt, Homo sapiens
  misc_RNA (1)...(19): siRNA sense strand
gcacguaugguuggaugua

SEQ ID NO: 1870797 - RNA, 19 nt, Homo sapiens
  misc_RNA (1)...(19): siRNA sense strand
ggugauauacgugccuuua

SEQ ID NO: 1870798 - RNA, 19 nt, Homo sapiens
  misc_RNA (1)...(19): siRNA sense strand
ucaauagguuuccaagcaa

SEQ ID NO: 1870799 - RNA, 19 nt, Homo sapiens
  misc_RNA (1)...(19): siRNA sense strand
aaucagugcuccacacaug

SEQ ID NO: 1870800 - RNA, 19 nt, Homo sapiens
  misc_RNA (1)...(19): siRNA sense strand
gauguaggaucuggaagug

SEQ ID NO: 1870801 - RNA, 19 nt, Homo sapiens
  misc_RNA (1)...(19): siRNA sense strand
agauugauauugccuguug

SEQ ID NO: 1870802 - RNA, 19 nt, Homo sapiens
  misc_RNA (1)...(19): siRNA sense strand
aaugggauaugcugaagaa

SEQ ID NO: 1870803 - RNA, 19 nt, Homo sapiens
  misc_RNA (1)...(19): siRNA sense strand
cuacagaccgcucccacua

SEQ ID NO: 1870804 - RNA, 19 nt, Homo sapiens
  misc_RNA (1)...(19): siRNA sense strand
ggaaguggaauccuuacug

SEQ ID NO: 1870805 - RNA, 19 nt, Homo sapiens
  misc_RNA (1)...(19): siRNA sense strand
gaagaagccccuuaugaug

SEQ ID NO: 1870806 - RNA, 19 nt, Homo sapiens
  misc_RNA (1)...(19): siRNA sense strand
acagaccgcucccacuaug

SEQ ID NO: 1870807 - RNA, 19 nt, Homo sapiens
  misc_RNA (1)...(19): siRNA sense strand
guuaaagcccggaggaaga

SEQ ID NO: 1870808 - RNA, 19 nt, Homo sapiens
  misc_RNA (1)...(19): siRNA sense strand
acucggagcuaauccacaa

SEQ ID NO: 1870809 - RNA, 19 nt, Homo sapiens
  misc_RNA (1)...(19): siRNA sense strand
auacgugccuuuaacagau

SEQ ID NO: 1870810 - RNA, 19 nt, Homo sapiens
  misc_RNA (1)...(19): siRNA sense strand
gcgcuaauagaucaguuaa

SEQ ID NO: 1870811 - RNA, 19 nt, Homo sapiens
  misc_RNA (1)...(19): siRNA sense strand
ggaauugaucacauuaaag

SEQ ID NO: 1870812 - RNA, 19 nt, Homo sapiens
  misc_RNA (1)...(19): siRNA sense strand
gauauacgugccuuuaaca

SEQ ID NO: 1870813 - RNA, 19 nt, Homo sapiens
  misc_RNA (1)...(19): siRNA sense strand
gcccggaggaagauugaua

SEQ ID NO: 1870814 - RNA, 19 nt, Homo sapiens
  misc_RNA (1)...(19): siRNA sense strand
ggaaaagucauaggaauug

SEQ ID NO: 1870815 - RNA, 19 nt, Homo sapiens
  misc_RNA (1)...(19): siRNA sense strand
ugauauacgugccuuuaac

SEQ ID NO: 1870816 - RNA, 19 nt, Homo sapiens
  misc_RNA (1)...(19): siRNA sense strand
gagaguacagcuuguugug

SEQ ID NO: 1870817 - RNA, 19 nt, Homo sapiens
  misc_RNA (1)...(19): siRNA sense strand
gaaaagucauaggaauuga

SEQ ID NO: 1870818 - RNA, 19 nt, Homo sapiens
  misc_RNA (1)...(19): siRNA sense strand
uacgugccuuuaacagaua

SEQ ID NO: 1870819 - RNA, 19 nt, Homo sapiens
  misc_RNA (1)...(19): siRNA sense strand
gaaucaucaagacagauaa

SEQ ID NO: 1870820 - RNA, 19 nt, Homo sapiens
  misc_RNA (1)...(19): siRNA sense strand
cccaggcgcuaauagauca

SEQ ID NO: 1870821 - RNA, 19 nt, Homo sapiens
  misc_RNA (1)...(19): siRNA sense strand
uaaagcucuugauguagga

SEQ ID NO: 1870822 - RNA, 19 nt, Homo sapiens
  misc_RNA (1)...(19): siRNA sense strand
gugauauacgugccuuuaa

SEQ ID NO: 1870823 - RNA, 19 nt, Homo sapiens
  misc_RNA (1)...(19): siRNA sense strand
cauuaaagagcuaguagau

SEQ ID NO: 1870824 - RNA, 19 nt, Homo sapiens
  misc_RNA (1)...(19): siRNA sense strand
ggagaguacagcuuguugu

SEQ ID NO: 1870825 - RNA, 19 nt, Homo sapiens
  misc_RNA (1)...(19): siRNA sense strand
gauggaagaaugggauaug

SEQ ID NO: 1870826 - RNA, 19 nt, Homo sapiens
  misc_RNA (1)...(19): siRNA sense strand
uauuugaucaguugcauga

SEQ ID NO: 1870827 - RNA, 19 nt, Homo sapiens
  misc_RNA (1)...(19): siRNA sense strand
gauccaacacuucugucuu

SEQ ID NO: 1870828 - RNA, 19 nt, Homo sapiens
  misc_RNA (1)...(19): siRNA sense strand
ggaaggacgauccaacacu

SEQ ID NO: 1870829 - RNA, 19 nt, Homo sapiens
  misc_RNA (1)...(19): siRNA sense strand
ucauaggaauugaucacau

SEQ ID NO: 1870830 - RNA, 19 nt, Homo sapiens
  misc_RNA (1)...(19): siRNA sense strand
aucaauagguuuccaagca

SEQ ID NO: 1870831 - RNA, 19 nt, Homo sapiens
  misc_RNA (1)...(19): siRNA sense strand
gccagccacucggagcuaa

SEQ ID NO: 1870832 - RNA, 19 nt, Homo sapiens
  misc_RNA (1)...(19): siRNA sense strand
ucacauuaaagagcuagua

SEQ ID NO: 1870833 - RNA, 19 nt, Homo sapiens
  misc_RNA (1)...(19): siRNA sense strand
gaauccuuacugcauguuu

SEQ ID NO: 1870834 - RNA, 19 nt, Homo sapiens
  misc_RNA (1)...(19): siRNA sense strand
gcauaugcgcuagaacuuc

SEQ ID NO: 1870835 - RNA, 19 nt, Homo sapiens
  misc_RNA (1)...(19): siRNA sense strand
gaagugaugcuggcuacag

SEQ ID NO: 1870836 - RNA, 19 nt, Homo sapiens
  misc_RNA (1)...(19): siRNA sense strand
gaaugggauaugcugaaga

SEQ ID NO: 1870837 - RNA, 19 nt, Homo sapiens
  misc_RNA (1)...(19): siRNA sense strand
gggagaguacagcuuguug

SEQ ID NO: 1870838 - RNA, 19 nt, Homo sapiens
  misc_RNA (1)...(19): siRNA sense strand
ucuggaaguggaauccuua

SEQ ID NO: 1870839 - RNA, 19 nt, Homo sapiens
  misc_RNA (1)...(19): siRNA sense strand
aauccacaaucuccgcaaa

SEQ ID NO: 1870840 - RNA, 19 nt, Homo sapiens
  misc_RNA (1)...(19): siRNA sense strand
gggauggaagaaugggaua

SEQ ID NO: 1870841 - RNA, 19 nt, Homo sapiens
  misc_RNA (1)...(19): siRNA sense strand
ucuccacaaucaauagguu

SEQ ID NO: 1870842 - RNA, 19 nt, Homo sapiens
  misc_RNA (1)...(19): siRNA sense strand
auccaacacuucugucuuc

SEQ ID NO: 1870843 - RNA, 19 nt, Homo sapiens
  misc_RNA (1)...(19): siRNA sense strand
uaugacaagcuacaagaug

SEQ ID NO: 1870844 - RNA, 19 nt, Homo sapiens
  misc_RNA (1)...(19): siRNA sense strand
caggaaggacgauccaaca

SEQ ID NO: 1870845 - RNA, 19 nt, Homo sapiens
  misc_RNA (1)...(19): siRNA sense strand
uauacgugccuuuaacaga

SEQ ID NO: 1870846 - RNA, 19 nt, Homo sapiens
  misc_RNA (1)...(19): siRNA sense strand
ggcgcuaauagaucaguua

SEQ ID NO: 1870847 - RNA, 19 nt, Homo sapiens
  misc_RNA (1)...(19): siRNA sense strand
aagugaugcuggcuacaga

SEQ ID NO: 1870848 - RNA, 19 nt, Homo sapiens
  misc_RNA (1)...(19): siRNA sense strand
gcaggcggaaaccaaaugu

SEQ ID NO: 1870849 - RNA, 19 nt, Homo sapiens
  misc_RNA (1)...(19): siRNA sense strand
aggcggaaaccaaauguug

SEQ ID NO: 1870850 - RNA, 19 nt, Homo sapiens
  misc_RNA (1)...(19): siRNA sense strand
aagaaugggauaugcugaa

SEQ ID NO: 1870851 - RNA, 19 nt, Homo sapiens
  misc_RNA (1)...(19): siRNA sense strand
aaauguuggagcaguauga

SEQ ID NO: 1870852 - RNA, 19 nt, Homo sapiens
  misc_RNA (1)...(19): siRNA sense strand
cggaggaagauugauauug

SEQ ID NO: 1870853 - RNA, 19 nt, Homo sapiens
  misc_RNA (1)...(19): siRNA sense strand
ugaagaagccccuuaugau

SEQ ID NO: 1870854 - RNA, 19 nt, Homo sapiens
  misc_RNA (1)...(19): siRNA sense strand
agaaugggauaugcugaag

SEQ ID NO: 1870855 - RNA, 19 nt, Homo sapiens
  misc_RNA (1)...(19): siRNA sense strand
uggaauccuuacugcaugu

SEQ ID NO: 1870856 - RNA, 19 nt, Homo sapiens
  misc_RNA (1)...(19): siRNA sense strand
gcaguaugacaagcuacaa

SEQ ID NO: 1870857 - RNA, 19 nt, Homo sapiens
  misc_RNA (1)...(19): siRNA sense strand
gacgauccaacacuucugu

SEQ ID NO: 1870858 - RNA, 19 nt, Homo sapiens
  misc_RNA (1)...(19): siRNA sense strand
gauaauggaaggugaauuu

SEQ ID NO: 1870859 - RNA, 19 nt, Homo sapiens
  misc_RNA (1)...(19): siRNA sense strand
ggaagucaguccaucagau

SEQ ID NO: 1870860 - RNA, 19 nt, Homo sapiens
  misc_RNA (1)...(19): siRNA sense strand
gaagucaguccaucagauu

SEQ ID NO: 1870861 - RNA, 19 nt, Homo sapiens
  misc_RNA (1)...(19): siRNA sense strand
ggagaggagccguggauaa

SEQ ID NO: 1870862 - RNA, 19 nt, Homo sapiens
  misc_RNA (1)...(19): siRNA sense strand
gaaggugaauuuccauguc

SEQ ID NO: 1870863 - RNA, 19 nt, Homo sapiens
  misc_RNA (1)...(19): siRNA sense strand
gaggagccguggauaaugg

SEQ ID NO: 1870864 - RNA, 19 nt, Homo sapiens
  misc_RNA (1)...(19): siRNA sense strand
ggacccugaugagaagaua

SEQ ID NO: 1870865 - RNA, 19 nt, Homo sapiens
  misc_RNA (1)...(19): siRNA sense strand
gggaugugauguuggagaa

SEQ ID NO: 1870866 - RNA, 19 nt, Homo sapiens
  misc_RNA (1)...(19): siRNA sense strand
gagaggagccguggauaau

SEQ ID NO: 1870867 - RNA, 19 nt, Homo sapiens
  misc_RNA (1)...(19): siRNA sense strand
gaguggaggugaaggaagu

SEQ ID NO: 1870868 - RNA, 19 nt, Homo sapiens
  misc_RNA (1)...(19): siRNA sense strand
gcuaaggccaucaaaccua

SEQ ID NO: 1870869 - RNA, 19 nt, Homo sapiens
  misc_RNA (1)...(19): siRNA sense strand
ggagaacuacagccaucua

SEQ ID NO: 1870870 - RNA, 19 nt, Homo sapiens
  misc_RNA (1)...(19): siRNA sense strand
cuaaggccaucaaaccuau

SEQ ID NO: 1870871 - RNA, 19 nt, Homo sapiens
  misc_RNA (1)...(19): siRNA sense strand
gaaggacacccgccuggau

SEQ ID NO: 1870872 - RNA, 19 nt, Homo sapiens
  misc_RNA (1)...(19): siRNA sense strand
cuacagccaucuaguuucu

SEQ ID NO: 1870873 - RNA, 19 nt, Homo sapiens
  misc_RNA (1)...(19): siRNA sense strand
agacuaggccgucgcugua

SEQ ID NO: 1870874 - RNA, 19 nt, Homo sapiens
  misc_RNA (1)...(19): siRNA sense strand
cacagucucugcauguuuc

SEQ ID NO: 1870875 - RNA, 19 nt, Homo sapiens
  misc_RNA (1)...(19): siRNA sense strand
caacuggacccugaugaga

SEQ ID NO: 1870876 - RNA, 19 nt, Homo sapiens
  misc_RNA (1)...(19): siRNA sense strand
ccagugucauucaaagaug

SEQ ID NO: 1870877 - RNA, 19 nt, Homo sapiens
  misc_RNA (1)...(19): siRNA sense strand
agaaaacuuugaaggcuua

SEQ ID NO: 1870878 - RNA, 19 nt, Homo sapiens
  misc_RNA (1)...(19): siRNA sense strand
caagagcaacaggaaauga

SEQ ID NO: 1870879 - RNA, 19 nt, Homo sapiens
  misc_RNA (1)...(19): siRNA sense strand
ccacagucucugcauguuu

SEQ ID NO: 1870880 - RNA, 19 nt, Homo sapiens
  misc_RNA (1)...(19): siRNA sense strand
gguagaagaagaaaacuuu

SEQ ID NO: 1870881 - RNA, 19 nt, Homo sapiens
  misc_RNA (1)...(19): siRNA sense strand
cugaugagaagauagcaua

SEQ ID NO: 1870882 - RNA, 19 nt, Homo sapiens
  misc_RNA (1)...(19): siRNA sense strand
uuugaaggcuuaaucucuu

SEQ ID NO: 1870883 - RNA, 19 nt, Homo sapiens
  misc_RNA (1)...(19): siRNA sense strand
caacaggaaaugaacacau

SEQ ID NO: 1870884 - RNA, 19 nt, Homo sapiens
  misc_RNA (1)...(19): siRNA sense strand
ggacacccgccuggauuug

SEQ ID NO: 1870885 - RNA, 19 nt, Homo sapiens
  misc_RNA (1)...(19): siRNA sense strand
gaugugauguuggagaacu

SEQ ID NO: 1870886 - RNA, 19 nt, Homo sapiens
  misc_RNA (1)...(19): siRNA sense strand
aaggugaauuuccauguca

SEQ ID NO: 1870887 - RNA, 19 nt, Homo sapiens
  misc_RNA (1)...(19): siRNA sense strand
uugaaggcuuaaucucuuu

SEQ ID NO: 1870888 - RNA, 19 nt, Homo sapiens
  misc_RNA (1)...(19): siRNA sense strand
gggccagugucauucaaag

SEQ ID NO: 1870889 - RNA, 19 nt, Homo sapiens
  misc_RNA (1)...(19): siRNA sense strand
agccaaacaucaucaugga

SEQ ID NO: 1870890 - RNA, 19 nt, Homo sapiens
  misc_RNA (1)...(19): siRNA sense strand
agauguggcuguggauuuc

SEQ ID NO: 1870891 - RNA, 19 nt, Homo sapiens
  misc_RNA (1)...(19): siRNA sense strand
gcaacuggacccugaugag

SEQ ID NO: 1870892 - RNA, 19 nt, Homo sapiens
  misc_RNA (1)...(19): siRNA sense strand
aaacuuugaaggcuuaauc

SEQ ID NO: 1870893 - RNA, 19 nt, Homo sapiens
  misc_RNA (1)...(19): siRNA sense strand
aagauguggcuguggauuu

SEQ ID NO: 1870894 - RNA, 19 nt, Homo sapiens
  misc_RNA (1)...(19): siRNA sense strand
gagcaacaggaaaugaaca

SEQ ID NO: 1870895 - RNA, 19 nt, Homo sapiens
  misc_RNA (1)...(19): siRNA sense strand
gagaacuacagccaucuag

SEQ ID NO: 1870896 - RNA, 19 nt, Homo sapiens
  misc_RNA (1)...(19): siRNA sense strand
gccacagucucugcauguu

SEQ ID NO: 1870897 - RNA, 19 nt, Homo sapiens
  misc_RNA (1)...(19): siRNA sense strand
ggaugcuggugccacuaau

SEQ ID NO: 1870898 - RNA, 19 nt, Homo sapiens
  misc_RNA (1)...(19): siRNA sense strand
gccagugucauucaaagau

SEQ ID NO: 1870899 - RNA, 19 nt, Homo sapiens
  misc_RNA (1)...(19): siRNA sense strand
gaaggcuuaaucucuuuca

SEQ ID NO: 1870900 - RNA, 19 nt, Homo sapiens
  misc_RNA (1)...(19): siRNA sense strand
ucaccaagccaaacaucau

SEQ ID NO: 1870901 - RNA, 19 nt, Homo sapiens
  misc_RNA (1)...(19): siRNA sense strand
gggagaggagccguggaua

SEQ ID NO: 1870902 - RNA, 19 nt, Homo sapiens
  misc_RNA (1)...(19): siRNA sense strand
gaugugggguagaagaaga

SEQ ID NO: 1870903 - RNA, 19 nt, Homo sapiens
  misc_RNA (1)...(19): siRNA sense strand
cagugucauucaaagaugu

SEQ ID NO: 1870904 - RNA, 19 nt, Homo sapiens
  misc_RNA (1)...(19): siRNA sense strand
aagagcaacaggaaaugaa

SEQ ID NO: 1870905 - RNA, 19 nt, Homo sapiens
  misc_RNA (1)...(19): siRNA sense strand
caagccaaacaucaucaug

SEQ ID NO: 1870906 - RNA, 19 nt, Homo sapiens
  misc_RNA (1)...(19): siRNA sense strand
gcucugaaacaucacacau

SEQ ID NO: 1870907 - RNA, 19 nt, Homo sapiens
  misc_RNA (1)...(19): siRNA sense strand
uccaagagcaacaggaaau

SEQ ID NO: 1870908 - RNA, 19 nt, Homo sapiens
  misc_RNA (1)...(19): siRNA sense strand
ccaagagcaacaggaaaug

SEQ ID NO: 1870909 - RNA, 19 nt, Homo sapiens
  misc_RNA (1)...(19): siRNA sense strand
guucgaugcuuuaaaguua

SEQ ID NO: 1870910 - RNA, 19 nt, Homo sapiens
  misc_RNA (1)...(19): siRNA sense strand
uaagagccauaaugacuuu

SEQ ID NO: 1870911 - RNA, 19 nt, Homo sapiens
  misc_RNA (1)...(19): siRNA sense strand
gcaaggaggucuucaucuc

SEQ ID NO: 1870912 - RNA, 19 nt, Homo sapiens
  misc_RNA (1)...(19): siRNA sense strand
gcaccaagauuccacugau

SEQ ID NO: 1870913 - RNA, 19 nt, Homo sapiens
  misc_RNA (1)...(19): siRNA sense strand
uuacuacucugcuauacaa

SEQ ID NO: 1870914 - RNA, 19 nt, Homo sapiens
  misc_RNA (1)...(19): siRNA sense strand
ugaaccaucucuaugcauu

SEQ ID NO: 1870915 - RNA, 19 nt, Homo sapiens
  misc_RNA (1)...(19): siRNA sense strand
uaucauggcagcaggauuu

SEQ ID NO: 1870916 - RNA, 19 nt, Homo sapiens
  misc_RNA (1)...(19): siRNA sense strand
ggaaggagcacaagaucau

SEQ ID NO: 1870917 - RNA, 19 nt, Homo sapiens
  misc_RNA (1)...(19): siRNA sense strand
ggaaaguucugagacaucu

SEQ ID NO: 1870918 - RNA, 19 nt, Homo sapiens
  misc_RNA (1)...(19): siRNA sense strand
gguguucgaugcuuuaaag

SEQ ID NO: 1870919 - RNA, 19 nt, Homo sapiens
  misc_RNA (1)...(19): siRNA sense strand
gcaccaauacaaguucuuu

SEQ ID NO: 1870920 - RNA, 19 nt, Homo sapiens
  misc_RNA (1)...(19): siRNA sense strand
ccagucagcuuggcacaau

SEQ ID NO: 1870921 - RNA, 19 nt, Homo sapiens
  misc_RNA (1)...(19): siRNA sense strand
ccaagauuccacugauuaa

SEQ ID NO: 1870922 - RNA, 19 nt, Homo sapiens
  misc_RNA (1)...(19): siRNA sense strand
caacccaucgcuacaagaa

SEQ ID NO: 1870923 - RNA, 19 nt, Homo sapiens
  misc_RNA (1)...(19): siRNA sense strand
caucagagccugugguuac

SEQ ID NO: 1870924 - RNA, 19 nt, Homo sapiens
  misc_RNA (1)...(19): siRNA sense strand
caccaagauuccacugauu

SEQ ID NO: 1870925 - RNA, 19 nt, Homo sapiens
  misc_RNA (1)...(19): siRNA sense strand
ucuaugcauuguccauuaa

SEQ ID NO: 1870926 - RNA, 19 nt, Homo sapiens
  misc_RNA (1)...(19): siRNA sense strand
gagccauaaugacuuuguu

SEQ ID NO: 1870927 - RNA, 19 nt, Homo sapiens
  misc_RNA (1)...(19): siRNA sense strand
ggagagcaccaauacaagu

SEQ ID NO: 1870928 - RNA, 19 nt, Homo sapiens
  misc_RNA (1)...(19): siRNA sense strand
gcuacaagaagaaguaugu

SEQ ID NO: 1870929 - RNA, 19 nt, Homo sapiens
  misc_RNA (1)...(19): siRNA sense strand
ccaaccauguuaugcugaa

SEQ ID NO: 1870930 - RNA, 19 nt, Homo sapiens
  misc_RNA (1)...(19): siRNA sense strand
gagagcaccaauacaaguu

SEQ ID NO: 1870931 - RNA, 19 nt, Homo sapiens
  misc_RNA (1)...(19): siRNA sense strand
guauguuacuacucugcua

SEQ ID NO: 1870932 - RNA, 19 nt, Homo sapiens
  misc_RNA (1)...(19): siRNA sense strand
ggacaguggguucaugauc

SEQ ID NO: 1870933 - RNA, 19 nt, Homo sapiens
  misc_RNA (1)...(19): siRNA sense strand
guuauccgcuggucugaag

SEQ ID NO: 1870934 - RNA, 19 nt, Homo sapiens
  misc_RNA (1)...(19): siRNA sense strand
gaaccaucucuaugcauug

SEQ ID NO: 1870935 - RNA, 19 nt, Homo sapiens
  misc_RNA (1)...(19): siRNA sense strand
ucaagaaauguaugcguuu

SEQ ID NO: 1870936 - RNA, 19 nt, Homo sapiens
  misc_RNA (1)...(19): siRNA sense strand
uauggaaaguucugagaca

SEQ ID NO: 1870937 - RNA, 19 nt, Homo sapiens
  misc_RNA (1)...(19): siRNA sense strand
cagcuuggcacaauuaaca

SEQ ID NO: 1870938 - RNA, 19 nt, Homo sapiens
  misc_RNA (1)...(19): siRNA sense strand
cauccuuccuccucaucua

SEQ ID NO: 1870939 - RNA, 19 nt, Homo sapiens
  misc_RNA (1)...(19): siRNA sense strand
gcugaaccaucucuaugca

SEQ ID NO: 1870940 - RNA, 19 nt, Homo sapiens
  misc_RNA (1)...(19): siRNA sense strand
cucuaugcauuguccauua

SEQ ID NO: 1870941 - RNA, 19 nt, Homo sapiens
  misc_RNA (1)...(19): siRNA sense strand
gauggacaguggguucaug

SEQ ID NO: 1870942 - RNA, 19 nt, Homo sapiens
  misc_RNA (1)...(19): siRNA sense strand
gcuauacaagcccauuuga

SEQ ID NO: 1870943 - RNA, 19 nt, Homo sapiens
  misc_RNA (1)...(19): siRNA sense strand
accaagauuccacugauua

SEQ ID NO: 1870944 - RNA, 19 nt, Homo sapiens
  misc_RNA (1)...(19): siRNA sense strand
ucugagacaucuuguagag

SEQ ID NO: 1870945 - RNA, 19 nt, Homo sapiens
  misc_RNA (1)...(19): siRNA sense strand
acccaucgcuacaagaaga

SEQ ID NO: 1870946 - RNA, 19 nt, Homo sapiens
  misc_RNA (1)...(19): siRNA sense strand
ccacugauuaagagccaua

SEQ ID NO: 1870947 - RNA, 19 nt, Homo sapiens
  misc_RNA (1)...(19): siRNA sense strand
ugagguguucgaugcuuua

SEQ ID NO: 1870948 - RNA, 19 nt, Homo sapiens
  misc_RNA (1)...(19): siRNA sense strand
gagcaccaauacaaguucu

SEQ ID NO: 1870949 - RNA, 19 nt, Homo sapiens
  misc_RNA (1)...(19): siRNA sense strand
guucugagacaucuuguag

SEQ ID NO: 1870950 - RNA, 19 nt, Homo sapiens
  misc_RNA (1)...(19): siRNA sense strand
ccugagcccaaccauguua

SEQ ID NO: 1870951 - RNA, 19 nt, Homo sapiens
  misc_RNA (1)...(19): siRNA sense strand
gccuuauggucaagaaaug

SEQ ID NO: 1870952 - RNA, 19 nt, Homo sapiens
  misc_RNA (1)...(19): siRNA sense strand
ucuggguccuucaacaauu

SEQ ID NO: 1870953 - RNA, 19 nt, Homo sapiens
  misc_RNA (1)...(19): siRNA sense strand
aagauuccacugauuaaga

SEQ ID NO: 1870954 - RNA, 19 nt, Homo sapiens
  misc_RNA (1)...(19): siRNA sense strand
agucagcuuggcacaauua

SEQ ID NO: 1870955 - RNA, 19 nt, Homo sapiens
  misc_RNA (1)...(19): siRNA sense strand
caaguucuuuguggaugga

SEQ ID NO: 1870956 - RNA, 19 nt, Homo sapiens
  misc_RNA (1)...(19): siRNA sense strand
gggaaggagcacaagauca

SEQ ID NO: 1870957 - RNA, 19 nt, Homo sapiens
  misc_RNA (1)...(19): siRNA sense strand
gaaggagcacaagaucaug

SEQ ID NO: 1870958 - RNA, 19 nt, Homo sapiens
  misc_RNA (1)...(19): siRNA sense strand
uguaugcguuucgaucuga

SEQ ID NO: 1870959 - RNA, 19 nt, Homo sapiens
  misc_RNA (1)...(19): siRNA sense strand
aaaguucugagacaucuug

SEQ ID NO: 1870960 - RNA, 19 nt, Homo sapiens
  misc_RNA (1)...(19): siRNA sense strand
agggagagcaccaauacaa

SEQ ID NO: 1870961 - RNA, 19 nt, Homo sapiens
  misc_RNA (1)...(19): siRNA sense strand
gacagugugaugguccuua

SEQ ID NO: 1870962 - RNA, 19 nt, Homo sapiens
  misc_RNA (1)...(19): siRNA sense strand
ugagggagagcaccaauac

SEQ ID NO: 1870963 - RNA, 19 nt, Homo sapiens
  misc_RNA (1)...(19): siRNA sense strand
acaagaagaaguauguuac

SEQ ID NO: 1870964 - RNA, 19 nt, Homo sapiens
  misc_RNA (1)...(19): siRNA sense strand
ugauccaugucaagaaauc

SEQ ID NO: 1870965 - RNA, 19 nt, Homo sapiens
  misc_RNA (1)...(19): siRNA sense strand
ggccuuauggucaagaaau

SEQ ID NO: 1870966 - RNA, 19 nt, Homo sapiens
  misc_RNA (1)...(19): siRNA sense strand
caaggaggucuucaucucu

SEQ ID NO: 1870967 - RNA, 19 nt, Homo sapiens
  misc_RNA (1)...(19): siRNA sense strand
gcgcaacccaucgcuacaa

SEQ ID NO: 1870968 - RNA, 19 nt, Homo sapiens
  misc_RNA (1)...(19): siRNA sense strand
uuaagagccauaaugacuu

SEQ ID NO: 1870969 - RNA, 19 nt, Homo sapiens
  misc_RNA (1)...(19): siRNA sense strand
ucccugagcccaaccaugu

SEQ ID NO: 1870970 - RNA, 19 nt, Homo sapiens
  misc_RNA (1)...(19): siRNA sense strand
cuggguccuucaacaauug

SEQ ID NO: 1870971 - RNA, 19 nt, Homo sapiens
  misc_RNA (1)...(19): siRNA sense strand
agauuccacugauuaagag

SEQ ID NO: 1870972 - RNA, 19 nt, Homo sapiens
  misc_RNA (1)...(19): siRNA sense strand
acagugugaugguccuuag

SEQ ID NO: 1870973 - RNA, 19 nt, Homo sapiens
  misc_RNA (1)...(19): siRNA sense strand
gggagagcaccaauacaag

SEQ ID NO: 1870974 - RNA, 19 nt, Homo sapiens
  misc_RNA (1)...(19): siRNA sense strand
cauggcagcaggauuugga

SEQ ID NO: 1870975 - RNA, 19 nt, Homo sapiens
  misc_RNA (1)...(19): siRNA sense strand
gcaacccaucgcuacaaga

SEQ ID NO: 1870976 - RNA, 19 nt, Homo sapiens
  misc_RNA (1)...(19): siRNA sense strand
ucgaugcuuuaaaguuaga

SEQ ID NO: 1870977 - RNA, 19 nt, Homo sapiens
  misc_RNA (1)...(19): siRNA sense strand
cccagggccuuauggucaa

SEQ ID NO: 1870978 - RNA, 19 nt, Homo sapiens
  misc_RNA (1)...(19): siRNA sense strand
aaccaucucuaugcauugu

SEQ ID NO: 1870979 - RNA, 19 nt, Homo sapiens
  misc_RNA (1)...(19): siRNA sense strand
gggcaaagaugaaguauau

SEQ ID NO: 1870980 - RNA, 19 nt, Homo sapiens
  misc_RNA (1)...(19): siRNA sense strand
ggaaagccuugucauuuga

SEQ ID NO: 1870981 - RNA, 19 nt, Homo sapiens
  misc_RNA (1)...(19): siRNA sense strand
cuacauagcuccugagauc

SEQ ID NO: 1870982 - RNA, 19 nt, Homo sapiens
  misc_RNA (1)...(19): siRNA sense strand
caacguggcucccaacugu

SEQ ID NO: 1870983 - RNA, 19 nt, Homo sapiens
  misc_RNA (1)...(19): siRNA sense strand
gaaggaagaguguauguga

SEQ ID NO: 1870984 - RNA, 19 nt, Homo sapiens
  misc_RNA (1)...(19): siRNA sense strand
gacguggacugcacaauga

SEQ ID NO: 1870985 - RNA, 19 nt, Homo sapiens
  misc_RNA (1)...(19): siRNA sense strand
ggagucaucuacagggauu

SEQ ID NO: 1870986 - RNA, 19 nt, Homo sapiens
  misc_RNA (1)...(19): siRNA sense strand
cggaaagccuugucauuug

SEQ ID NO: 1870987 - RNA, 19 nt, Homo sapiens
  misc_RNA (1)...(19): siRNA sense strand
ucaauggccuucuuaagau

SEQ ID NO: 1870988 - RNA, 19 nt, Homo sapiens
  misc_RNA (1)...(19): siRNA sense strand
ggacgaagcaauuguaaag

SEQ ID NO: 1870989 - RNA, 19 nt, Homo sapiens
  misc_RNA (1)...(19): siRNA sense strand
guggagaccucauguuuca

SEQ ID NO: 1870990 - RNA, 19 nt, Homo sapiens
  misc_RNA (1)...(19): siRNA sense strand
gaucaagccacccuucaaa

SEQ ID NO: 1870991 - RNA, 19 nt, Homo sapiens
  misc_RNA (1)...(19): siRNA sense strand
caaugaggacgaccuauuu

SEQ ID NO: 1870992 - RNA, 19 nt, Homo sapiens
  misc_RNA (1)...(19): siRNA sense strand
gaccaaggaccgccucuuu

SEQ ID NO: 1870993 - RNA, 19 nt, Homo sapiens
  misc_RNA (1)...(19): siRNA sense strand
ugaaguauaugcugugaag

SEQ ID NO: 1870994 - RNA, 19 nt, Homo sapiens
  misc_RNA (1)...(19): siRNA sense strand
gaccucauguuucagauuc

SEQ ID NO: 1870995 - RNA, 19 nt, Homo sapiens
  misc_RNA (1)...(19): siRNA sense strand
cggaaacacccguaccuua

SEQ ID NO: 1870996 - RNA, 19 nt, Homo sapiens
  misc_RNA (1)...(19): siRNA sense strand
ucaaagguuucuccuacuu

SEQ ID NO: 1870997 - RNA, 19 nt, Homo sapiens
  misc_RNA (1)...(19): siRNA sense strand
gaacucaagggcaaagaug

SEQ ID NO: 1870998 - RNA, 19 nt, Homo sapiens
  misc_RNA (1)...(19): siRNA sense strand
gaugaaguauaugcuguga

SEQ ID NO: 1870999 - RNA, 19 nt, Homo sapiens
  misc_RNA (1)...(19): siRNA sense strand
ggaaacacccguaccuuac

SEQ ID NO: 1871000 - RNA, 19 nt, Homo sapiens
  misc_RNA (1)...(19): siRNA sense strand
ggaagaguguaugugauca

SEQ ID NO: 1871001 - RNA, 19 nt, Homo sapiens
  misc_RNA (1)...(19): siRNA sense strand
caggaggaauucaaagguu

SEQ ID NO: 1871002 - RNA, 19 nt, Homo sapiens
  misc_RNA (1)...(19): siRNA sense strand
ccagaggaaucgccaaagu

SEQ ID NO: 1871003 - RNA, 19 nt, Homo sapiens
  misc_RNA (1)...(19): siRNA sense strand
caagggcaaagaugaagua

SEQ ID NO: 1871004 - RNA, 19 nt, Homo sapiens
  misc_RNA (1)...(19): siRNA sense strand
gcaaggaagggauucugaa

SEQ ID NO: 1871005 - RNA, 19 nt, Homo sapiens
  misc_RNA (1)...(19): siRNA sense strand
gaacuugagaacaacauuc

SEQ ID NO: 1871006 - RNA, 19 nt, Homo sapiens
  misc_RNA (1)...(19): siRNA sense strand
gcaaagaugaaguauaugc

SEQ ID NO: 1871007 - RNA, 19 nt, Homo sapiens
  misc_RNA (1)...(19): siRNA sense strand
caaaagagacgucaauaau

SEQ ID NO: 1871008 - RNA, 19 nt, Homo sapiens
  misc_RNA (1)...(19): siRNA sense strand
caaccaggaggaauucaaa

SEQ ID NO: 1871009 - RNA, 19 nt, Homo sapiens
  misc_RNA (1)...(19): siRNA sense strand
ggucaacggccacaaguuc

SEQ ID NO: 1871010 - RNA, 19 nt, Homo sapiens
  misc_RNA (1)...(19): siRNA sense strand
gaaacuggacaacauccuu

SEQ ID NO: 1871011 - RNA, 19 nt, Homo sapiens
  misc_RNA (1)...(19): siRNA sense strand
ggagaccucauguuucaga

SEQ ID NO: 1871012 - RNA, 19 nt, Homo sapiens
  misc_RNA (1)...(19): siRNA sense strand
gagaacaacauucggaaag

SEQ ID NO: 1871013 - RNA, 19 nt, Homo sapiens
  misc_RNA (1)...(19): siRNA sense strand
cagaggaaucgccaaagua

SEQ ID NO: 1871014 - RNA, 19 nt, Homo sapiens
  misc_RNA (1)...(19): siRNA sense strand
ggcaggguuugcaguguaa

SEQ ID NO: 1871015 - RNA, 19 nt, Homo sapiens
  misc_RNA (1)...(19): siRNA sense strand
cggcaggguuugcagugua

SEQ ID NO: 1871016 - RNA, 19 nt, Homo sapiens
  misc_RNA (1)...(19): siRNA sense strand
cuacagggauuugaaacug

SEQ ID NO: 1871017 - RNA, 19 nt, Homo sapiens
  misc_RNA (1)...(19): siRNA sense strand
ucggaaagccuugucauuu

SEQ ID NO: 1871018 - RNA, 19 nt, Homo sapiens
  misc_RNA (1)...(19): siRNA sense strand
gaguguaugugaucaucga

SEQ ID NO: 1871019 - RNA, 19 nt, Homo sapiens
  misc_RNA (1)...(19): siRNA sense strand
gcagcacccauucuucaaa

SEQ ID NO: 1871020 - RNA, 19 nt, Homo sapiens
  misc_RNA (1)...(19): siRNA sense strand
uguaaagucugcaaaauga

SEQ ID NO: 1871021 - RNA, 19 nt, Homo sapiens
  misc_RNA (1)...(19): siRNA sense strand
caaagugugcuggguuaaa

SEQ ID NO: 1871022 - RNA, 19 nt, Homo sapiens
  misc_RNA (1)...(19): siRNA sense strand
cuucaaaccacgcauuaaa

SEQ ID NO: 1871023 - RNA, 19 nt, Homo sapiens
  misc_RNA (1)...(19): siRNA sense strand
cauggaauauguaaauggu

SEQ ID NO: 1871024 - RNA, 19 nt, Homo sapiens
  misc_RNA (1)...(19): siRNA sense strand
ggauaccagugucaagucu

SEQ ID NO: 1871025 - RNA, 19 nt, Homo sapiens
  misc_RNA (1)...(19): siRNA sense strand
aggaggaauucaaagguuu

SEQ ID NO: 1871026 - RNA, 19 nt, Homo sapiens
  misc_RNA (1)...(19): siRNA sense strand
gucagcaucuugaaagcuu

SEQ ID NO: 1871027 - RNA, 19 nt, Homo sapiens
  misc_RNA (1)...(19): siRNA sense strand
ccaccaagcagaagaccaa

SEQ ID NO: 1871028 - RNA, 19 nt, Homo sapiens
  misc_RNA (1)...(19): siRNA sense strand
caaugaagagcguguguuc

SEQ ID NO: 1871029 - RNA, 19 nt, Homo sapiens
  misc_RNA (1)...(19): siRNA sense strand
gcaauuguaaagcagauca

SEQ ID NO: 1871030 - RNA, 19 nt, Homo sapiens
  misc_RNA (1)...(19): siRNA sense strand
cgucauggaauauguaaau

SEQ ID NO: 1871031 - RNA, 19 nt, Homo sapiens
  misc_RNA (1)...(19): siRNA sense strand
caaguucgguauccacaac

SEQ ID NO: 1871032 - RNA, 19 nt, Homo sapiens
  misc_RNA (1)...(19): siRNA sense strand
gcacaaugacagagaagag

SEQ ID NO: 1871033 - RNA, 19 nt, Homo sapiens
  misc_RNA (1)...(19): siRNA sense strand
ugggacuccugacuacaua

SEQ ID NO: 1871034 - RNA, 19 nt, Homo sapiens
  misc_RNA (1)...(19): siRNA sense strand
gcucauaaucacaaagugu

SEQ ID NO: 1871035 - RNA, 19 nt, Homo sapiens
  misc_RNA (1)...(19): siRNA sense strand
gcagaucaaccaggaggaa

SEQ ID NO: 1871036 - RNA, 19 nt, Homo sapiens
  misc_RNA (1)...(19): siRNA sense strand
acaaugaggacgaccuauu

SEQ ID NO: 1871037 - RNA, 19 nt, Homo sapiens
  misc_RNA (1)...(19): siRNA sense strand
gugcugauguacgagauga

SEQ ID NO: 1871038 - RNA, 19 nt, Homo sapiens
  misc_RNA (1)...(19): siRNA sense strand
ggucacaucggcccucaug

SEQ ID NO: 1871039 - RNA, 19 nt, Homo sapiens
  misc_RNA (1)...(19): siRNA sense strand
ugacguggacugcacaaug

SEQ ID NO: 1871040 - RNA, 19 nt, Homo sapiens
  misc_RNA (1)...(19): siRNA sense strand
ucuggaagcucaccaucug

SEQ ID NO: 1871041 - RNA, 19 nt, Homo sapiens
  misc_RNA (1)...(19): siRNA sense strand
aaagugugcuggguuaaag

SEQ ID NO: 1871042 - RNA, 19 nt, Homo sapiens
  misc_RNA (1)...(19): siRNA sense strand
acaaguucauggccaccua

SEQ ID NO: 1871043 - RNA, 19 nt, Homo sapiens
  misc_RNA (1)...(19): siRNA sense strand
gaucgagcuggcugucuuu

SEQ ID NO: 1871044 - RNA, 19 nt, Homo sapiens
  misc_RNA (1)...(19): siRNA sense strand
cgacaaugaggacgaccua

SEQ ID NO: 1871045 - RNA, 19 nt, Homo sapiens
  misc_RNA (1)...(19): siRNA sense strand
ccacuucgaggacuggauu

SEQ ID NO: 1871046 - RNA, 19 nt, Homo sapiens
  misc_RNA (1)...(19): siRNA sense strand
gagcucauaaucacaaagu

SEQ ID NO: 1871047 - RNA, 19 nt, Homo sapiens
  misc_RNA (1)...(19): siRNA sense strand
aagcuuucaugacgaagaa

SEQ ID NO: 1871048 - RNA, 19 nt, Homo sapiens
  misc_RNA (1)...(19): siRNA sense strand
gaucaaccaggaggaauuc

SEQ ID NO: 1871049 - RNA, 19 nt, Homo sapiens
  misc_RNA (1)...(19): siRNA sense strand
cagcacccauucuucaaag

SEQ ID NO: 1871050 - RNA, 19 nt, Homo sapiens
  misc_RNA (1)...(19): siRNA sense strand
guucauggccaccuaucuu

SEQ ID NO: 1871051 - RNA, 19 nt, Homo sapiens
  misc_RNA (1)...(19): siRNA sense strand
ucaagcagcacccauucuu

SEQ ID NO: 1871052 - RNA, 19 nt, Homo sapiens
  misc_RNA (1)...(19): siRNA sense strand
gaggacgaccuauuugagu

SEQ ID NO: 1871053 - RNA, 19 nt, Homo sapiens
  misc_RNA (1)...(19): siRNA sense strand
caauggccuucuuaagauc

SEQ ID NO: 1871054 - RNA, 19 nt, Homo sapiens
  misc_RNA (1)...(19): siRNA sense strand
uucaauggccuucuuaaga

SEQ ID NO: 1871055 - RNA, 19 nt, Homo sapiens
  misc_RNA (1)...(19): siRNA sense strand
ccaaaagagacgucaauaa

SEQ ID NO: 1871056 - RNA, 19 nt, Homo sapiens
  misc_RNA (1)...(19): siRNA sense strand
caucuacagggauuugaaa

SEQ ID NO: 1871057 - RNA, 19 nt, Homo sapiens
  misc_RNA (1)...(19): siRNA sense strand
caacaugccccacaaguuc

SEQ ID NO: 1871058 - RNA, 19 nt, Homo sapiens
  misc_RNA (1)...(19): siRNA sense strand
ggaggaauucaaagguuuc

SEQ ID NO: 1871059 - RNA, 19 nt, Homo sapiens
  misc_RNA (1)...(19): siRNA sense strand
acgaagcaauuguaaagca

SEQ ID NO: 1871060 - RNA, 19 nt, Homo sapiens
  misc_RNA (1)...(19): siRNA sense strand
ccuuugaggccgacaauga

SEQ ID NO: 1871061 - RNA, 19 nt, Homo sapiens
  misc_RNA (1)...(19): siRNA sense strand
uauaugcugugaaggucuu

SEQ ID NO: 1871062 - RNA, 19 nt, Homo sapiens
  misc_RNA (1)...(19): siRNA sense strand
ccugauggccagcugauga

SEQ ID NO: 1871063 - RNA, 19 nt, Homo sapiens
  misc_RNA (1)...(19): siRNA sense strand
ggaagaucgauccaaguca

SEQ ID NO: 1871064 - RNA, 19 nt, Homo sapiens
  misc_RNA (1)...(19): siRNA sense strand
gcgaggccgugagcuugaa

SEQ ID NO: 1871065 - RNA, 19 nt, Homo sapiens
  misc_RNA (1)...(19): siRNA sense strand
aaacggccaccaagcagaa

SEQ ID NO: 1871066 - RNA, 19 nt, Homo sapiens
  misc_RNA (1)...(19): siRNA sense strand
gccacgagcucauaaucac

SEQ ID NO: 1871067 - RNA, 19 nt, Homo sapiens
  misc_RNA (1)...(19): siRNA sense strand
cuggacagccucccuuuga

SEQ ID NO: 1871068 - RNA, 19 nt, Homo sapiens
  misc_RNA (1)...(19): siRNA sense strand
agaucgagcuggcugucuu

SEQ ID NO: 1871069 - RNA, 19 nt, Homo sapiens
  misc_RNA (1)...(19): siRNA sense strand
uugaguccauccuccauga

SEQ ID NO: 1871070 - RNA, 19 nt, Homo sapiens
  misc_RNA (1)...(19): siRNA sense strand
gaauguucaccgucgaugu

SEQ ID NO: 1871071 - RNA, 19 nt, Homo sapiens
  misc_RNA (1)...(19): siRNA sense strand
ccaucaagcagcacccauu

SEQ ID NO: 1871072 - RNA, 19 nt, Homo sapiens
  misc_RNA (1)...(19): siRNA sense strand
gcgaggacgccaucaagca

SEQ ID NO: 1871073 - RNA, 19 nt, Homo sapiens
  misc_RNA (1)...(19): siRNA sense strand
gaagaguguaugugaucau

SEQ ID NO: 1871074 - RNA, 19 nt, Homo sapiens
  misc_RNA (1)...(19): siRNA sense strand
gccagaaggaagaguguau

SEQ ID NO: 1871075 - RNA, 19 nt, Homo sapiens
  misc_RNA (1)...(19): siRNA sense strand
acugcaagcuggcugacuu

SEQ ID NO: 1871076 - RNA, 19 nt, Homo sapiens
  misc_RNA (1)...(19): siRNA sense strand
gguggagaccucauguuuc

SEQ ID NO: 1871077 - RNA, 19 nt, Homo sapiens
  misc_RNA (1)...(19): siRNA sense strand
gccugggccuggaugaguu

SEQ ID NO: 1871078 - RNA, 19 nt, Homo sapiens
  misc_RNA (1)...(19): siRNA sense strand
ugagaacaacauucggaaa

SEQ ID NO: 1871079 - RNA, 19 nt, Homo sapiens
  misc_RNA (1)...(19): siRNA sense strand
caacagaaauuaucccuuu

SEQ ID NO: 1871080 - RNA, 19 nt, Homo sapiens
  misc_RNA (1)...(19): siRNA sense strand
gaaaacagaugaacaagaa

SEQ ID NO: 1871081 - RNA, 19 nt, Homo sapiens
  misc_RNA (1)...(19): siRNA sense strand
gagcguuucucccauguug

SEQ ID NO: 1871082 - RNA, 19 nt, Homo sapiens
  misc_RNA (1)...(19): siRNA sense strand
gauguuaccuucgacuuuc

SEQ ID NO: 1871083 - RNA, 19 nt, Homo sapiens
  misc_RNA (1)...(19): siRNA sense strand
uaacagaguuugcaaugcu

SEQ ID NO: 1871084 - RNA, 19 nt, Homo sapiens
  misc_RNA (1)...(19): siRNA sense strand
aaacacgucccuuugagua

SEQ ID NO: 1871085 - RNA, 19 nt, Homo sapiens
  misc_RNA (1)...(19): siRNA sense strand
ugacagcacaccagucuaa

SEQ ID NO: 1871086 - RNA, 19 nt, Homo sapiens
  misc_RNA (1)...(19): siRNA sense strand
gcugaagcauguagugaga

SEQ ID NO: 1871087 - RNA, 19 nt, Homo sapiens
  misc_RNA (1)...(19): siRNA sense strand
guaagaagcgagaaucugu

SEQ ID NO: 1871088 - RNA, 19 nt, Homo sapiens
  misc_RNA (1)...(19): siRNA sense strand
ccacauucauccuccagaa

SEQ ID NO: 1871089 - RNA, 19 nt, Homo sapiens
  misc_RNA (1)...(19): siRNA sense strand
gcacaaguggauagagaaa

SEQ ID NO: 1871090 - RNA, 19 nt, Homo sapiens
  misc_RNA (1)...(19): siRNA sense strand
uauggaaucuggaagugaa

SEQ ID NO: 1871091 - RNA, 19 nt, Homo sapiens
  misc_RNA (1)...(19): siRNA sense strand
gcauucauuugguacuauu

SEQ ID NO: 1871092 - RNA, 19 nt, Homo sapiens
  misc_RNA (1)...(19): siRNA sense strand
gaacaagaaguaaucaacu

SEQ ID NO: 1871093 - RNA, 19 nt, Homo sapiens
  misc_RNA (1)...(19): siRNA sense strand
cagaaauuaucccuuuaug

SEQ ID NO: 1871094 - RNA, 19 nt, Homo sapiens
  misc_RNA (1)...(19): siRNA sense strand
acacugguuuggcuuauau

SEQ ID NO: 1871095 - RNA, 19 nt, Homo sapiens
  misc_RNA (1)...(19): siRNA sense strand
uugcacaacuggugaagaa

SEQ ID NO: 1871096 - RNA, 19 nt, Homo sapiens
  misc_RNA (1)...(19): siRNA sense strand
ccuuuauguuugcgaauua

SEQ ID NO: 1871097 - RNA, 19 nt, Homo sapiens
  misc_RNA (1)...(19): siRNA sense strand
cuacuacacuggcacaagu

SEQ ID NO: 1871098 - RNA, 19 nt, Homo sapiens
  misc_RNA (1)...(19): siRNA sense strand
gacacugguuuggcuuaua

SEQ ID NO: 1871099 - RNA, 19 nt, Homo sapiens
  misc_RNA (1)...(19): siRNA sense strand
uccagaagaucuuguuaga

SEQ ID NO: 1871100 - RNA, 19 nt, Homo sapiens
  misc_RNA (1)...(19): siRNA sense strand
gcagcacacaucccacuuu

SEQ ID NO: 1871101 - RNA, 19 nt, Homo sapiens
  misc_RNA (1)...(19): siRNA sense strand
ugguuuggcuuauauaugu

SEQ ID NO: 1871102 - RNA, 19 nt, Homo sapiens
  misc_RNA (1)...(19): siRNA sense strand
gcucuggcauuacugcaau

SEQ ID NO: 1871103 - RNA, 19 nt, Homo sapiens
  misc_RNA (1)...(19): siRNA sense strand
ugaagcauguagugagaug

SEQ ID NO: 1871104 - RNA, 19 nt, Homo sapiens
  misc_RNA (1)...(19): siRNA sense strand
uaccuucgacuuucagaua

SEQ ID NO: 1871105 - RNA, 19 nt, Homo sapiens
  misc_RNA (1)...(19): siRNA sense strand
uaaaacaguugccacauuc

SEQ ID NO: 1871106 - RNA, 19 nt, Homo sapiens
  misc_RNA (1)...(19): siRNA sense strand
caccagccuuggaguuauu

SEQ ID NO: 1871107 - RNA, 19 nt, Homo sapiens
  misc_RNA (1)...(19): siRNA sense strand
uggcacaaguggauagaga

SEQ ID NO: 1871108 - RNA, 19 nt, Homo sapiens
  misc_RNA (1)...(19): siRNA sense strand
acaccagucuaacagaguu

SEQ ID NO: 1871109 - RNA, 19 nt, Homo sapiens
  misc_RNA (1)...(19): siRNA sense strand
cgaauuauggaaucuggaa

SEQ ID NO: 1871110 - RNA, 19 nt, Homo sapiens
  misc_RNA (1)...(19): siRNA sense strand
cuaaaacaguugccacauu

SEQ ID NO: 1871111 - RNA, 19 nt, Homo sapiens
  misc_RNA (1)...(19): siRNA sense strand
gaaacgcuggcuugcacaa

SEQ ID NO: 1871112 - RNA, 19 nt, Homo sapiens
  misc_RNA (1)...(19): siRNA sense strand
ucaccagccuuggaguuau

SEQ ID NO: 1871113 - RNA, 19 nt, Homo sapiens
  misc_RNA (1)...(19): siRNA sense strand
cagcacacaucccacuuuu

SEQ ID NO: 1871114 - RNA, 19 nt, Homo sapiens
  misc_RNA (1)...(19): siRNA sense strand
aaacagaugaacaagaagu

SEQ ID NO: 1871115 - RNA, 19 nt, Homo sapiens
  misc_RNA (1)...(19): siRNA sense strand
uggcauucauuugguacua

SEQ ID NO: 1871116 - RNA, 19 nt, Homo sapiens
  misc_RNA (1)...(19): siRNA sense strand
ugacacugguuuggcuuau

SEQ ID NO: 1871117 - RNA, 19 nt, Homo sapiens
  misc_RNA (1)...(19): siRNA sense strand
ggcauucauuugguacuau

SEQ ID NO: 1871118 - RNA, 19 nt, Homo sapiens
  misc_RNA (1)...(19): siRNA sense strand
uaagaagcgagaaucuguu

SEQ ID NO: 1871119 - RNA, 19 nt, Homo sapiens
  misc_RNA (1)...(19): siRNA sense strand
uaagaugguccugcagcua

SEQ ID NO: 1871120 - RNA, 19 nt, Homo sapiens
  misc_RNA (1)...(19): siRNA sense strand
auauaugucagacguauga

SEQ ID NO: 1871121 - RNA, 19 nt, Homo sapiens
  misc_RNA (1)...(19): siRNA sense strand
gcuguggcauucauuuggu

SEQ ID NO: 1871122 - RNA, 19 nt, Homo sapiens
  misc_RNA (1)...(19): siRNA sense strand
ucuaacagaguuugcaaug

SEQ ID NO: 1871123 - RNA, 19 nt, Homo sapiens
  misc_RNA (1)...(19): siRNA sense strand
gagcuguccaguccugaga

SEQ ID NO: 1871124 - RNA, 19 nt, Homo sapiens
  misc_RNA (1)...(19): siRNA sense strand
cagaugaacaagaaguaau

SEQ ID NO: 1871125 - RNA, 19 nt, Homo sapiens
  misc_RNA (1)...(19): siRNA sense strand
acacgucccuuugaguauc

SEQ ID NO: 1871126 - RNA, 19 nt, Homo sapiens
  misc_RNA (1)...(19): siRNA sense strand
gagauguuaccuucgacuu

SEQ ID NO: 1871127 - RNA, 19 nt, Homo sapiens
  misc_RNA (1)...(19): siRNA sense strand
gcucaccagccuuggaguu

SEQ ID NO: 1871128 - RNA, 19 nt, Homo sapiens
  misc_RNA (1)...(19): siRNA sense strand
uaaguaagaagcgagaauc

SEQ ID NO: 1871129 - RNA, 19 nt, Homo sapiens
  misc_RNA (1)...(19): siRNA sense strand
aagaugacaccaccacgaa

SEQ ID NO: 1871130 - RNA, 19 nt, Homo sapiens
  misc_RNA (1)...(19): siRNA sense strand
agugagauguuaccuucga

SEQ ID NO: 1871131 - RNA, 19 nt, Homo sapiens
  misc_RNA (1)...(19): siRNA sense strand
cagcaaaacacgucccuuu

SEQ ID NO: 1871132 - RNA, 19 nt, Homo sapiens
  misc_RNA (1)...(19): siRNA sense strand
gaugacaccaccacgaaac

SEQ ID NO: 1871133 - RNA, 19 nt, Homo sapiens
  misc_RNA (1)...(19): siRNA sense strand
agauguuaccuucgacuuu

SEQ ID NO: 1871134 - RNA, 19 nt, Homo sapiens
  misc_RNA (1)...(19): siRNA sense strand
ucuaucaguggaucaauga

SEQ ID NO: 1871135 - RNA, 19 nt, Homo sapiens
  misc_RNA (1)...(19): siRNA sense strand
gaugaacaagaaguaauca

SEQ ID NO: 1871136 - RNA, 19 nt, Homo sapiens
  misc_RNA (1)...(19): siRNA sense strand
acagaugaacaagaaguaa

SEQ ID NO: 1871137 - RNA, 19 nt, Homo sapiens
  misc_RNA (1)...(19): siRNA sense strand
caacccacccaccuugaca

SEQ ID NO: 1871138 - RNA, 19 nt, Homo sapiens
  misc_RNA (1)...(19): siRNA sense strand
aagaugguccugcagcuau

SEQ ID NO: 1871139 - RNA, 19 nt, Homo sapiens
  misc_RNA (1)...(19): siRNA sense strand
ugaacaagaaguaaucaac

SEQ ID NO: 1871140 - RNA, 19 nt, Homo sapiens
  misc_RNA (1)...(19): siRNA sense strand
ggugaaaacagaugaacaa

SEQ ID NO: 1871141 - RNA, 19 nt, Homo sapiens
  misc_RNA (1)...(19): siRNA sense strand
acauucauccuccagaaga

SEQ ID NO: 1871142 - RNA, 19 nt, Homo sapiens
  misc_RNA (1)...(19): siRNA sense strand
uccugcagcuauccaaaga

SEQ ID NO: 1871143 - RNA, 19 nt, Homo sapiens
  misc_RNA (1)...(19): siRNA sense strand
ggaagaaacugcagaagga

SEQ ID NO: 1871144 - RNA, 19 nt, Homo sapiens
  misc_RNA (1)...(19): siRNA sense strand
gaagaaacagcaagaagua

SEQ ID NO: 1871145 - RNA, 19 nt, Homo sapiens
  misc_RNA (1)...(19): siRNA sense strand
ggagaagaaugaagaagaa

SEQ ID NO: 1871146 - RNA, 19 nt, Homo sapiens
  misc_RNA (1)...(19): siRNA sense strand
gaauguuccuggagagaaa

SEQ ID NO: 1871147 - RNA, 19 nt, Homo sapiens
  misc_RNA (1)...(19): siRNA sense strand
cgaaaugguuaucaaagug

SEQ ID NO: 1871148 - RNA, 19 nt, Homo sapiens
  misc_RNA (1)...(19): siRNA sense strand
ugaagaagguggagaaacu

SEQ ID NO: 1871149 - RNA, 19 nt, Homo sapiens
  misc_RNA (1)...(19): siRNA sense strand
ggaagaaacagcaagaagu

SEQ ID NO: 1871150 - RNA, 19 nt, Homo sapiens
  misc_RNA (1)...(19): siRNA sense strand
ggagguggaugagagagaa

SEQ ID NO: 1871151 - RNA, 19 nt, Homo sapiens
  misc_RNA (1)...(19): siRNA sense strand
agaagagacggaagaaaua

SEQ ID NO: 1871152 - RNA, 19 nt, Homo sapiens
  misc_RNA (1)...(19): siRNA sense strand
gaagaaugaagaagaagga

SEQ ID NO: 1871153 - RNA, 19 nt, Homo sapiens
  misc_RNA (1)...(19): siRNA sense strand
ggaguccucuuuccaacug

SEQ ID NO: 1871154 - RNA, 19 nt, Homo sapiens
  misc_RNA (1)...(19): siRNA sense strand
agagaaggcugaagaaggu

SEQ ID NO: 1871155 - RNA, 19 nt, Homo sapiens
  misc_RNA (1)...(19): siRNA sense strand
cagaagagacggaagaaau

SEQ ID NO: 1871156 - RNA, 19 nt, Homo sapiens
  misc_RNA (1)...(19): siRNA sense strand
ccauagcgauuaggaagaa

SEQ ID NO: 1871157 - RNA, 19 nt, Homo sapiens
  misc_RNA (1)...(19): siRNA sense strand
gaaaugguuaucaaagugu

SEQ ID NO: 1871158 - RNA, 19 nt, Homo sapiens
  misc_RNA (1)...(19): siRNA sense strand
gagaagacgaagauuccua

SEQ ID NO: 1871159 - RNA, 19 nt, Homo sapiens
  misc_RNA (1)...(19): siRNA sense strand
agauauugcuggagaugaa

SEQ ID NO: 1871160 - RNA, 19 nt, Homo sapiens
  misc_RNA (1)...(19): siRNA sense strand
gacaacaggagguggauga

SEQ ID NO: 1871161 - RNA, 19 nt, Homo sapiens
  misc_RNA (1)...(19): siRNA sense strand
ggaggaagaaacugcagaa

SEQ ID NO: 1871162 - RNA, 19 nt, Homo sapiens
  misc_RNA (1)...(19): siRNA sense strand
gaaacagcaagaaguagug

SEQ ID NO: 1871163 - RNA, 19 nt, Homo sapiens
  misc_RNA (1)...(19): siRNA sense strand
gaagagacggaagaaauag

SEQ ID NO: 1871164 - RNA, 19 nt, Homo sapiens
  misc_RNA (1)...(19): siRNA sense strand
ccacagaagagacggaaga

SEQ ID NO: 1871165 - RNA, 19 nt, Homo sapiens
  misc_RNA (1)...(19): siRNA sense strand
ucgaaaugguuaucaaagu

SEQ ID NO: 1871166 - RNA, 19 nt, Homo sapiens
  misc_RNA (1)...(19): siRNA sense strand
ccaacugucgaaaugguua

SEQ ID NO: 1871167 - RNA, 19 nt, Homo sapiens
  misc_RNA (1)...(19): siRNA sense strand
gagagacagccacagaaga

SEQ ID NO: 1871168 - RNA, 19 nt, Homo sapiens
  misc_RNA (1)...(19): siRNA sense strand
cggaagaaauagccaugga

SEQ ID NO: 1871169 - RNA, 19 nt, Homo sapiens
  misc_RNA (1)...(19): siRNA sense strand
ggagagacagccacagaag

SEQ ID NO: 1871170 - RNA, 19 nt, Homo sapiens
  misc_RNA (1)...(19): siRNA sense strand
ugaagaagaaggagagaca

SEQ ID NO: 1871171 - RNA, 19 nt, Homo sapiens
  misc_RNA (1)...(19): siRNA sense strand
agcaagaaguaguggguuu

SEQ ID NO: 1871172 - RNA, 19 nt, Homo sapiens
  misc_RNA (1)...(19): siRNA sense strand
ucaaugaggagcaguacug

SEQ ID NO: 1871173 - RNA, 19 nt, Homo sapiens
  misc_RNA (1)...(19): siRNA sense strand
uggagaaacugaggcacaa

SEQ ID NO: 1871174 - RNA, 19 nt, Homo sapiens
  misc_RNA (1)...(19): siRNA sense strand
gcaguacuguggggauuuu

SEQ ID NO: 1871175 - RNA, 19 nt, Homo sapiens
  misc_RNA (1)...(19): siRNA sense strand
gaagaagguggagaaacug

SEQ ID NO: 1871176 - RNA, 19 nt, Homo sapiens
  misc_RNA (1)...(19): siRNA sense strand
caacaggagguggaugaga

SEQ ID NO: 1871177 - RNA, 19 nt, Homo sapiens
  misc_RNA (1)...(19): siRNA sense strand
aaagagggcagugaagaug

SEQ ID NO: 1871178 - RNA, 19 nt, Homo sapiens
  misc_RNA (1)...(19): siRNA sense strand
gagaauguuccuggagaga

SEQ ID NO: 1871179 - RNA, 19 nt, Homo sapiens
  misc_RNA (1)...(19): siRNA sense strand
ggagaaacugaggcacaaa

SEQ ID NO: 1871180 - RNA, 19 nt, Homo sapiens
  misc_RNA (1)...(19): siRNA sense strand
uuuauuccuuccuugguuu

SEQ ID NO: 1871181 - RNA, 19 nt, Homo sapiens
  misc_RNA (1)...(19): siRNA sense strand
agagggcagugaagaugug

SEQ ID NO: 1871182 - RNA, 19 nt, Homo sapiens
  misc_RNA (1)...(19): siRNA sense strand
agaaacugcagaaggagaa

SEQ ID NO: 1871183 - RNA, 19 nt, Homo sapiens
  misc_RNA (1)...(19): siRNA sense strand
aggagaagaaugaagaaga

SEQ ID NO: 1871184 - RNA, 19 nt, Homo sapiens
  misc_RNA (1)...(19): siRNA sense strand
agaaacagcaagaaguagu

SEQ ID NO: 1871185 - RNA, 19 nt, Homo sapiens
  misc_RNA (1)...(19): siRNA sense strand
cugaagcccaggagaagaa

SEQ ID NO: 1871186 - RNA, 19 nt, Homo sapiens
  misc_RNA (1)...(19): siRNA sense strand
cgacuuuaaggaauuagau

SEQ ID NO: 1871187 - RNA, 19 nt, Homo sapiens
  misc_RNA (1)...(19): siRNA sense strand
gagcaguacuguggggauu

SEQ ID NO: 1871188 - RNA, 19 nt, Homo sapiens
  misc_RNA (1)...(19): siRNA sense strand
ggaagccgaggaggaggaa

SEQ ID NO: 1871189 - RNA, 19 nt, Homo sapiens
  misc_RNA (1)...(19): siRNA sense strand
agagacagccacagaagag

SEQ ID NO: 1871190 - RNA, 19 nt, Homo sapiens
  misc_RNA (1)...(19): siRNA sense strand
ugucgaaaugguuaucaaa

SEQ ID NO: 1871191 - RNA, 19 nt, Homo sapiens
  misc_RNA (1)...(19): siRNA sense strand
aaggagagacagccacaga

SEQ ID NO: 1871192 - RNA, 19 nt, Homo sapiens
  misc_RNA (1)...(19): siRNA sense strand
ccaggagaagaaugaagaa

SEQ ID NO: 1871193 - RNA, 19 nt, Homo sapiens
  misc_RNA (1)...(19): siRNA sense strand
gagaaacugaggcacaaaa

SEQ ID NO: 1871194 - RNA, 19 nt, Homo sapiens
  misc_RNA (1)...(19): siRNA sense strand
guggggauuuugacucuuu

SEQ ID NO: 1871195 - RNA, 19 nt, Homo sapiens
  misc_RNA (1)...(19): siRNA sense strand
cugugucacugucaggauu

SEQ ID NO: 1871196 - RNA, 19 nt, Homo sapiens
  misc_RNA (1)...(19): siRNA sense strand
cccaggagaagaaugaaga

SEQ ID NO: 1871197 - RNA, 19 nt, Homo sapiens
  misc_RNA (1)...(19): siRNA sense strand
guaggcaacugguuuaaga

SEQ ID NO: 1871198 - RNA, 19 nt, Homo sapiens
  misc_RNA (1)...(19): siRNA sense strand
caaguaggcaacugguuua

SEQ ID NO: 1871199 - RNA, 19 nt, Homo sapiens
  misc_RNA (1)...(19): siRNA sense strand
cggaagaguuguccauguu

SEQ ID NO: 1871200 - RNA, 19 nt, Homo sapiens
  misc_RNA (1)...(19): siRNA sense strand
caccaccgcuccauacuuc

SEQ ID NO: 1871201 - RNA, 19 nt, Homo sapiens
  misc_RNA (1)...(19): siRNA sense strand
gcgaggccaucaacaaaca

SEQ ID NO: 1871202 - RNA, 19 nt, Homo sapiens
  misc_RNA (1)...(19): siRNA sense strand
acaaguaggcaacugguuu

SEQ ID NO: 1871203 - RNA, 19 nt, Homo sapiens
  misc_RNA (1)...(19): siRNA sense strand
gugcgaggccaucaacaaa

SEQ ID NO: 1871204 - RNA, 19 nt, Homo sapiens
  misc_RNA (1)...(19): siRNA sense strand
cgacucggaaugugaugua

SEQ ID NO: 1871205 - RNA, 19 nt, Homo sapiens
  misc_RNA (1)...(19): siRNA sense strand
cucggaaugugauguauga

SEQ ID NO: 1871206 - RNA, 19 nt, Homo sapiens
  misc_RNA (1)...(19): siRNA sense strand
ggaagaguuguccauguuc

SEQ ID NO: 1871207 - RNA, 19 nt, Homo sapiens
  misc_RNA (1)...(19): siRNA sense strand
gcgagcagaagacgcauug

SEQ ID NO: 1871208 - RNA, 19 nt, Homo sapiens
  misc_RNA (1)...(19): siRNA sense strand
ccggaagaguuguccaugu

SEQ ID NO: 1871209 - RNA, 19 nt, Homo sapiens
  misc_RNA (1)...(19): siRNA sense strand
ccacacaaguaggcaacug

SEQ ID NO: 1871210 - RNA, 19 nt, Homo sapiens
  misc_RNA (1)...(19): siRNA sense strand
caacuuccgcgaccucuac

SEQ ID NO: 1871211 - RNA, 19 nt, Homo sapiens
  misc_RNA (1)...(19): siRNA sense strand
ugccaaacuucgccgauuc

SEQ ID NO: 1871212 - RNA, 19 nt, Homo sapiens
  misc_RNA (1)...(19): siRNA sense strand
ucaacaaacacgagucgau

SEQ ID NO: 1871213 - RNA, 19 nt, Homo sapiens
  misc_RNA (1)...(19): siRNA sense strand
gcaagcugcaggccaugug

SEQ ID NO: 1871214 - RNA, 19 nt, Homo sapiens
  misc_RNA (1)...(19): siRNA sense strand
ucuaccacauccuugagaa

SEQ ID NO: 1871215 - RNA, 19 nt, Homo sapiens
  misc_RNA (1)...(19): siRNA sense strand
gcaacuuccgcgaccucua

SEQ ID NO: 1871216 - RNA, 19 nt, Homo sapiens
  misc_RNA (1)...(19): siRNA sense strand
cggccucacucccacacaa

SEQ ID NO: 1871217 - RNA, 19 nt, Homo sapiens
  misc_RNA (1)...(19): siRNA sense strand
caaacuucgccgauucuca

SEQ ID NO: 1871218 - RNA, 19 nt, Homo sapiens
  misc_RNA (1)...(19): siRNA sense strand
ccagcgacucggaauguga

SEQ ID NO: 1871219 - RNA, 19 nt, Homo sapiens
  misc_RNA (1)...(19): siRNA sense strand
ccucacucccacacaagua

SEQ ID NO: 1871220 - RNA, 19 nt, Homo sapiens
  misc_RNA (1)...(19): siRNA sense strand
gugaugaacuguacauaua

SEQ ID NO: 1871221 - RNA, 19 nt, Homo sapiens
  misc_RNA (1)...(19): siRNA sense strand
gcaaauaaauacagugugu

SEQ ID NO: 1871222 - RNA, 19 nt, Homo sapiens
  misc_RNA (1)...(19): siRNA sense strand
ugaaagaugucauuuguga

SEQ ID NO: 1871223 - RNA, 19 nt, Homo sapiens
  misc_RNA (1)...(19): siRNA sense strand
gaaugaacaugcucaaaga

SEQ ID NO: 1871224 - RNA, 19 nt, Homo sapiens
  misc_RNA (1)...(19): siRNA sense strand
gggaaucuauuucuuguuu

SEQ ID NO: 1871225 - RNA, 19 nt, Homo sapiens
  misc_RNA (1)...(19): siRNA sense strand
gcaaguaaguccauaucaa

SEQ ID NO: 1871226 - RNA, 19 nt, Homo sapiens
  misc_RNA (1)...(19): siRNA sense strand
ggcaagaacuccaagauga

SEQ ID NO: 1871227 - RNA, 19 nt, Homo sapiens
  misc_RNA (1)...(19): siRNA sense strand
gaaaugaaggagaaguuua

SEQ ID NO: 1871228 - RNA, 19 nt, Homo sapiens
  misc_RNA (1)...(19): siRNA sense strand
gcaggaaggugaccauguu

SEQ ID NO: 1871229 - RNA, 19 nt, Homo sapiens
  misc_RNA (1)...(19): siRNA sense strand
gcacaauuccauuuaagua

SEQ ID NO: 1871230 - RNA, 19 nt, Homo sapiens
  misc_RNA (1)...(19): siRNA sense strand
ugaaggaacucacugaaga

SEQ ID NO: 1871231 - RNA, 19 nt, Homo sapiens
  misc_RNA (1)...(19): siRNA sense strand
caaagaggcugaauaugca

SEQ ID NO: 1871232 - RNA, 19 nt, Homo sapiens
  misc_RNA (1)...(19): siRNA sense strand
caaagacugcuaaagaaua

SEQ ID NO: 1871233 - RNA, 19 nt, Homo sapiens
  misc_RNA (1)...(19): siRNA sense strand
gcauuuaaaucccaguuug

SEQ ID NO: 1871234 - RNA, 19 nt, Homo sapiens
  misc_RNA (1)...(19): siRNA sense strand
agaauuauguagccguuua

SEQ ID NO: 1871235 - RNA, 19 nt, Homo sapiens
  misc_RNA (1)...(19): siRNA sense strand
cuaaagagcucacaaagac

SEQ ID NO: 1871236 - RNA, 19 nt, Homo sapiens
  misc_RNA (1)...(19): siRNA sense strand
ccaaaugugucacuuacuu

SEQ ID NO: 1871237 - RNA, 19 nt, Homo sapiens
  misc_RNA (1)...(19): siRNA sense strand
gaaagcaugucgccuacug

SEQ ID NO: 1871238 - RNA, 19 nt, Homo sapiens
  misc_RNA (1)...(19): siRNA sense strand
caacuuagucagagacaua

SEQ ID NO: 1871239 - RNA, 19 nt, Homo sapiens
  misc_RNA (1)...(19): siRNA sense strand
ggaguguuguggaauguuu

SEQ ID NO: 1871240 - RNA, 19 nt, Homo sapiens
  misc_RNA (1)...(19): siRNA sense strand
caucaaagacugcuaaaga

SEQ ID NO: 1871241 - RNA, 19 nt, Homo sapiens
  misc_RNA (1)...(19): siRNA sense strand
gaacagaaagacuuagaga

SEQ ID NO: 1871242 - RNA, 19 nt, Homo sapiens
  misc_RNA (1)...(19): siRNA sense strand
uagaagaaaugaaggagaa

SEQ ID NO: 1871243 - RNA, 19 nt, Homo sapiens
  misc_RNA (1)...(19): siRNA sense strand
gaaguuagagaugaugaua

SEQ ID NO: 1871244 - RNA, 19 nt, Homo sapiens
  misc_RNA (1)...(19): siRNA sense strand
ucagauagcuccacagaac

SEQ ID NO: 1871245 - RNA, 19 nt, Homo sapiens
  misc_RNA (1)...(19): siRNA sense strand
ccugaaacuuugcauuuaa

SEQ ID NO: 1871246 - RNA, 19 nt, Homo sapiens
  misc_RNA (1)...(19): siRNA sense strand
agacagaaguuagagauga

SEQ ID NO: 1871247 - RNA, 19 nt, Homo sapiens
  misc_RNA (1)...(19): siRNA sense strand
gggcauacuuccauucaau

SEQ ID NO: 1871248 - RNA, 19 nt, Homo sapiens
  misc_RNA (1)...(19): siRNA sense strand
uaaauacagugugugauga

SEQ ID NO: 1871249 - RNA, 19 nt, Homo sapiens
  misc_RNA (1)...(19): siRNA sense strand
caugagaaguggaaagaga

SEQ ID NO: 1871250 - RNA, 19 nt, Homo sapiens
  misc_RNA (1)...(19): siRNA sense strand
ucacagaucaccugacaaa

SEQ ID NO: 1871251 - RNA, 19 nt, Homo sapiens
  misc_RNA (1)...(19): siRNA sense strand
gaauuuacacuccagcaaa

SEQ ID NO: 1871252 - RNA, 19 nt, Homo sapiens
  misc_RNA (1)...(19): siRNA sense strand
uaaacaaggugccaacagu

SEQ ID NO: 1871253 - RNA, 19 nt, Homo sapiens
  misc_RNA (1)...(19): siRNA sense strand
acagaaagacuuagagaaa

SEQ ID NO: 1871254 - RNA, 19 nt, Homo sapiens
  misc_RNA (1)...(19): siRNA sense strand
gcaaaugucaggguuuauu

SEQ ID NO: 1871255 - RNA, 19 nt, Homo sapiens
  misc_RNA (1)...(19): siRNA sense strand
gaaaucaauccaagacaga

SEQ ID NO: 1871256 - RNA, 19 nt, Homo sapiens
  misc_RNA (1)...(19): siRNA sense strand
agacaaagaggcugaauau

SEQ ID NO: 1871257 - RNA, 19 nt, Homo sapiens
  misc_RNA (1)...(19): siRNA sense strand
gagcagauaaugaagcaaa

SEQ ID NO: 1871258 - RNA, 19 nt, Homo sapiens
  misc_RNA (1)...(19): siRNA sense strand
gaauggaauuacagucaug

SEQ ID NO: 1871259 - RNA, 19 nt, Homo sapiens
  misc_RNA (1)...(19): siRNA sense strand
aaggagaaguuuagcauga

SEQ ID NO: 1871260 - RNA, 19 nt, Homo sapiens
  misc_RNA (1)...(19): siRNA sense strand
ggaauuacagucaugguau

SEQ ID NO: 1871261 - RNA, 19 nt, Homo sapiens
  misc_RNA (1)...(19): siRNA sense strand
guucagggcucaacuaaaa

SEQ ID NO: 1871262 - RNA, 19 nt, Homo sapiens
  misc_RNA (1)...(19): siRNA sense strand
ggaagcaagacagaaguua

SEQ ID NO: 1871263 - RNA, 19 nt, Homo sapiens
  misc_RNA (1)...(19): siRNA sense strand
gcaagaacuccaagaugaa

SEQ ID NO: 1871264 - RNA, 19 nt, Homo sapiens
  misc_RNA (1)...(19): siRNA sense strand
gaacugaggcagagauugg

SEQ ID NO: 1871265 - RNA, 19 nt, Homo sapiens
  misc_RNA (1)...(19): siRNA sense strand
gaacagcagaauuuacaga

SEQ ID NO: 1871266 - RNA, 19 nt, Homo sapiens
  misc_RNA (1)...(19): siRNA sense strand
ggagaaguuuagcaugaga

SEQ ID NO: 1871267 - RNA, 19 nt, Homo sapiens
  misc_RNA (1)...(19): siRNA sense strand
ccugugggcugauuacauu

SEQ ID NO: 1871268 - RNA, 19 nt, Homo sapiens
  misc_RNA (1)...(19): siRNA sense strand
gcagugccuuugaaguuga

SEQ ID NO: 1871269 - RNA, 19 nt, Homo sapiens
  misc_RNA (1)...(19): siRNA sense strand
ggaacucacugaagaacag

SEQ ID NO: 1871270 - RNA, 19 nt, Homo sapiens
  misc_RNA (1)...(19): siRNA sense strand
ugugaaagaugucauuugu

SEQ ID NO: 1871271 - RNA, 19 nt, Homo sapiens
  misc_RNA (1)...(19): siRNA sense strand
caugguauccuguuauaaa

SEQ ID NO: 1871272 - RNA, 19 nt, Homo sapiens
  misc_RNA (1)...(19): siRNA sense strand
agaccagcuucauaucuua

SEQ ID NO: 1871273 - RNA, 19 nt, Homo sapiens
  misc_RNA (1)...(19): siRNA sense strand
ucagagacauaaacaaagu

SEQ ID NO: 1871274 - RNA, 19 nt, Homo sapiens
  misc_RNA (1)...(19): siRNA sense strand
gucaugguauccuguuaua

SEQ ID NO: 1871275 - RNA, 19 nt, Homo sapiens
  misc_RNA (1)...(19): siRNA sense strand
gaaagagaaaucaauccaa

SEQ ID NO: 1871276 - RNA, 19 nt, Homo sapiens
  misc_RNA (1)...(19): siRNA sense strand
gcaugucgccuacuguauu

SEQ ID NO: 1871277 - RNA, 19 nt, Homo sapiens
  misc_RNA (1)...(19): siRNA sense strand
ugaacaugcucaaagaaug

SEQ ID NO: 1871278 - RNA, 19 nt, Homo sapiens
  misc_RNA (1)...(19): siRNA sense strand
cugaagaacagcagaauuu

SEQ ID NO: 1871279 - RNA, 19 nt, Homo sapiens
  misc_RNA (1)...(19): siRNA sense strand
gaaggaacucacugaagaa

SEQ ID NO: 1871280 - RNA, 19 nt, Homo sapiens
  misc_RNA (1)...(19): siRNA sense strand
caaagacagaggcaaguaa

SEQ ID NO: 1871281 - RNA, 19 nt, Homo sapiens
  misc_RNA (1)...(19): siRNA sense strand
gaauuacagucaugguauc

SEQ ID NO: 1871282 - RNA, 19 nt, Homo sapiens
  misc_RNA (1)...(19): siRNA sense strand
ggaauggaauuacagucau

SEQ ID NO: 1871283 - RNA, 19 nt, Homo sapiens
  misc_RNA (1)...(19): siRNA sense strand
uaacugaugcacaaagauu

SEQ ID NO: 1871284 - RNA, 19 nt, Homo sapiens
  misc_RNA (1)...(19): siRNA sense strand
uacauuaacugaugcacaa

SEQ ID NO: 1871285 - RNA, 19 nt, Homo sapiens
  misc_RNA (1)...(19): siRNA sense strand
gcaacaacuucagauggaa

SEQ ID NO: 1871286 - RNA, 19 nt, Homo sapiens
  misc_RNA (1)...(19): siRNA sense strand
ugaaugggaugggagauga

SEQ ID NO: 1871287 - RNA, 19 nt, Homo sapiens
  misc_RNA (1)...(19): siRNA sense strand
caugucgccuacuguauuu

SEQ ID NO: 1871288 - RNA, 19 nt, Homo sapiens
  misc_RNA (1)...(19): siRNA sense strand
aaagacugcuaaagaauag

SEQ ID NO: 1871289 - RNA, 19 nt, Homo sapiens
  misc_RNA (1)...(19): siRNA sense strand
cagcagaauuuacagaaag

SEQ ID NO: 1871290 - RNA, 19 nt, Homo sapiens
  misc_RNA (1)...(19): siRNA sense strand
caucaggaauggaauuaca

SEQ ID NO: 1871291 - RNA, 19 nt, Homo sapiens
  misc_RNA (1)...(19): siRNA sense strand
cagaccagcuucauaucuu

SEQ ID NO: 1871292 - RNA, 19 nt, Homo sapiens
  misc_RNA (1)...(19): siRNA sense strand
ucacaguagugguaaacuu

SEQ ID NO: 1871293 - RNA, 19 nt, Homo sapiens
  misc_RNA (1)...(19): siRNA sense strand
gaacgggaagcaagacaga

SEQ ID NO: 1871294 - RNA, 19 nt, Homo sapiens
  misc_RNA (1)...(19): siRNA sense strand
ugaagaacagcagaauuua

SEQ ID NO: 1871295 - RNA, 19 nt, Homo sapiens
  misc_RNA (1)...(19): siRNA sense strand
caucuccgcuucuugugaa

SEQ ID NO: 1871296 - RNA, 19 nt, Homo sapiens
  misc_RNA (1)...(19): siRNA sense strand
aggcaaaugucaggguuua

SEQ ID NO: 1871297 - RNA, 19 nt, Homo sapiens
  misc_RNA (1)...(19): siRNA sense strand
gaacaugcucaaagaaugg

SEQ ID NO: 1871298 - RNA, 19 nt, Homo sapiens
  misc_RNA (1)...(19): siRNA sense strand
ggaaacugauggagagcau

SEQ ID NO: 1871299 - RNA, 19 nt, Homo sapiens
  misc_RNA (1)...(19): siRNA sense strand
acacuuggaugacuaugga

SEQ ID NO: 1871300 - RNA, 19 nt, Homo sapiens
  misc_RNA (1)...(19): siRNA sense strand
auacaugugugauaaagug

SEQ ID NO: 1871301 - RNA, 19 nt, Homo sapiens
  misc_RNA (1)...(19): siRNA sense strand
gcauugcuaucuucaugug

SEQ ID NO: 1871302 - RNA, 19 nt, Homo sapiens
  misc_RNA (1)...(19): siRNA sense strand
gcucggcauucccaagaaa

SEQ ID NO: 1871303 - RNA, 19 nt, Homo sapiens
  misc_RNA (1)...(19): siRNA sense strand
guaaguccauaucaagaca

SEQ ID NO: 1871304 - RNA, 19 nt, Homo sapiens
  misc_RNA (1)...(19): siRNA sense strand
gaaaaccuccagacaaauu

SEQ ID NO: 1871305 - RNA, 19 nt, Homo sapiens
  misc_RNA (1)...(19): siRNA sense strand
agaaggaacacuuggauga

SEQ ID NO: 1871306 - RNA, 19 nt, Homo sapiens
  misc_RNA (1)...(19): siRNA sense strand
guaccugugacucaaauuu

SEQ ID NO: 1871307 - RNA, 19 nt, Homo sapiens
  misc_RNA (1)...(19): siRNA sense strand
cugauuacauuaacugaug

SEQ ID NO: 1871308 - RNA, 19 nt, Homo sapiens
  misc_RNA (1)...(19): siRNA sense strand
gacagaaguuagagaugau

SEQ ID NO: 1871309 - RNA, 19 nt, Homo sapiens
  misc_RNA (1)...(19): siRNA sense strand
guacuucuguuccugaaac

SEQ ID NO: 1871310 - RNA, 19 nt, Homo sapiens
  misc_RNA (1)...(19): siRNA sense strand
agagaaggcucacaguagu

SEQ ID NO: 1871311 - RNA, 19 nt, Homo sapiens
  misc_RNA (1)...(19): siRNA sense strand
gcucaucccuucagauagc

SEQ ID NO: 1871312 - RNA, 19 nt, Homo sapiens
  misc_RNA (1)...(19): siRNA sense strand
gaagaacagcagaauuuac

SEQ ID NO: 1871313 - RNA, 19 nt, Homo sapiens
  misc_RNA (1)...(19): siRNA sense strand
ggaugacuauggagaagca

SEQ ID NO: 1871314 - RNA, 19 nt, Homo sapiens
  misc_RNA (1)...(19): siRNA sense strand
ucacuuacuucugcuguau

SEQ ID NO: 1871315 - RNA, 19 nt, Homo sapiens
  misc_RNA (1)...(19): siRNA sense strand
gcucauuggcccaguuaaa

SEQ ID NO: 1871316 - RNA, 19 nt, Homo sapiens
  misc_RNA (1)...(19): siRNA sense strand
ggaaagagaaaucaaucca

SEQ ID NO: 1871317 - RNA, 19 nt, Homo sapiens
  misc_RNA (1)...(19): siRNA sense strand
gaagcaagacagaaguuag

SEQ ID NO: 1871318 - RNA, 19 nt, Homo sapiens
  misc_RNA (1)...(19): siRNA sense strand
acaaagaggcugaauaugc

SEQ ID NO: 1871319 - RNA, 19 nt, Homo sapiens
  misc_RNA (1)...(19): siRNA sense strand
gcuugaaucuuugcagaau

SEQ ID NO: 1871320 - RNA, 19 nt, Homo sapiens
  misc_RNA (1)...(19): siRNA sense strand
gaccaaggcuucaucaagu

SEQ ID NO: 1871321 - RNA, 19 nt, Homo sapiens
  misc_RNA (1)...(19): siRNA sense strand
caucaaaguuccugagcaa

SEQ ID NO: 1871322 - RNA, 19 nt, Homo sapiens
  misc_RNA (1)...(19): siRNA sense strand
gcaaggauacaccaaaguu

SEQ ID NO: 1871323 - RNA, 19 nt, Homo sapiens
  misc_RNA (1)...(19): siRNA sense strand
gagcaaggauacaccaaag

SEQ ID NO: 1871324 - RNA, 19 nt, Homo sapiens
  misc_RNA (1)...(19): siRNA sense strand
cagcagaagcagaccuuua

SEQ ID NO: 1871325 - RNA, 19 nt, Homo sapiens
  misc_RNA (1)...(19): siRNA sense strand
ccagagccauguccuucaa

SEQ ID NO: 1871326 - RNA, 19 nt, Homo sapiens
  misc_RNA (1)...(19): siRNA sense strand
gaagaccaagcagaaguaa

SEQ ID NO: 1871327 - RNA, 19 nt, Homo sapiens
  misc_RNA (1)...(19): siRNA sense strand
ugagccaggugccaucaaa

SEQ ID NO: 1871328 - RNA, 19 nt, Homo sapiens
  misc_RNA (1)...(19): siRNA sense strand
caaccuggaaacacaaaga

SEQ ID NO: 1871329 - RNA, 19 nt, Homo sapiens
  misc_RNA (1)...(19): siRNA sense strand
agaagaccaagcagaagua

SEQ ID NO: 1871330 - RNA, 19 nt, Homo sapiens
  misc_RNA (1)...(19): siRNA sense strand
ccaaggcuucaucaaguuu

SEQ ID NO: 1871331 - RNA, 19 nt, Homo sapiens
  misc_RNA (1)...(19): siRNA sense strand
gccuccaccucaggaaaua

SEQ ID NO: 1871332 - RNA, 19 nt, Homo sapiens
  misc_RNA (1)...(19): siRNA sense strand
caaggagccaugccacuca

SEQ ID NO: 1871333 - RNA, 19 nt, Homo sapiens
  misc_RNA (1)...(19): siRNA sense strand
caaggauacaccaaaguuc

SEQ ID NO: 1871334 - RNA, 19 nt, Homo sapiens
  misc_RNA (1)...(19): siRNA sense strand
ugaccaaggcuucaucaag

SEQ ID NO: 1871335 - RNA, 19 nt, Homo sapiens
  misc_RNA (1)...(19): siRNA sense strand
cagcucagcagaagaccaa

SEQ ID NO: 1871336 - RNA, 19 nt, Homo sapiens
  misc_RNA (1)...(19): siRNA sense strand
ccaggugccaucaaaguuc

SEQ ID NO: 1871337 - RNA, 19 nt, Homo sapiens
  misc_RNA (1)...(19): siRNA sense strand
cagaagaccaagcagaagu

SEQ ID NO: 1871338 - RNA, 19 nt, Homo sapiens
  misc_RNA (1)...(19): siRNA sense strand
ccuggaaacacaaagauuc

SEQ ID NO: 1871339 - RNA, 19 nt, Homo sapiens
  misc_RNA (1)...(19): siRNA sense strand
gcagaagaccaagcagaag

SEQ ID NO: 1871340 - RNA, 19 nt, Homo sapiens
  misc_RNA (1)...(19): siRNA sense strand
ugagcaaggauacaccaaa

SEQ ID NO: 1871341 - RNA, 19 nt, Homo sapiens
  misc_RNA (1)...(19): siRNA sense strand
gccaggugccaucaaaguu

SEQ ID NO: 1871342 - RNA, 19 nt, Homo sapiens
  misc_RNA (1)...(19): siRNA sense strand
ccucaggaaauauuuguuc

SEQ ID NO: 1871343 - RNA, 19 nt, Homo sapiens
  misc_RNA (1)...(19): siRNA sense strand
ccacucaaagguuccacaa

SEQ ID NO: 1871344 - RNA, 19 nt, Homo sapiens
  misc_RNA (1)...(19): siRNA sense strand
accaaggcuucaucaaguu

SEQ ID NO: 1871345 - RNA, 19 nt, Homo sapiens
  misc_RNA (1)...(19): siRNA sense strand
ccacaaccuggaaacacaa

SEQ ID NO: 1871346 - RNA, 19 nt, Homo sapiens
  misc_RNA (1)...(19): siRNA sense strand
gccaugccacucaaagguu

SEQ ID NO: 1871347 - RNA, 19 nt, Homo sapiens
  misc_RNA (1)...(19): siRNA sense strand
gaaauauccucuggugaca

SEQ ID NO: 1871348 - RNA, 19 nt, Homo sapiens
  misc_RNA (1)...(19): siRNA sense strand
uaucaacaguagcaaugua

SEQ ID NO: 1871349 - RNA, 19 nt, Homo sapiens
  misc_RNA (1)...(19): siRNA sense strand
caaaguguccacccaagag

SEQ ID NO: 1871350 - RNA, 19 nt, Homo sapiens
  misc_RNA (1)...(19): siRNA sense strand
gcagugccagcagaaauau

SEQ ID NO: 1871351 - RNA, 19 nt, Homo sapiens
  misc_RNA (1)...(19): siRNA sense strand
ccaaaguguccacccaaga

SEQ ID NO: 1871352 - RNA, 19 nt, Homo sapiens
  misc_RNA (1)...(19): siRNA sense strand
cagcagugccagcagaaau

SEQ ID NO: 1871353 - RNA, 19 nt, Homo sapiens
  misc_RNA (1)...(19): siRNA sense strand
agcagugccagcagaaaua

SEQ ID NO: 1871354 - RNA, 19 nt, Homo sapiens
  misc_RNA (1)...(19): siRNA sense strand
gagaggagcugcgccaaga

SEQ ID NO: 1871355 - RNA, 19 nt, Homo sapiens
  misc_RNA (1)...(19): siRNA sense strand
gcaacacggugcagcaguu

SEQ ID NO: 1871356 - RNA, 19 nt, Homo sapiens
  misc_RNA (1)...(19): siRNA sense strand
gagaagaagugggacaagu

SEQ ID NO: 1871357 - RNA, 19 nt, Homo sapiens
  misc_RNA (1)...(19): siRNA sense strand
ccaugcaccuccucaagaa

SEQ ID NO: 1871358 - RNA, 19 nt, Homo sapiens
  misc_RNA (1)...(19): siRNA sense strand
gugcagcaguuccugaaga

SEQ ID NO: 1871359 - RNA, 19 nt, Homo sapiens
  misc_RNA (1)...(19): siRNA sense strand
ccggaaaccugggcaagaa

SEQ ID NO: 1871360 - RNA, 19 nt, Homo sapiens
  misc_RNA (1)...(19): siRNA sense strand
caaguacaccauccgcuaa

SEQ ID NO: 1871361 - RNA, 19 nt, Homo sapiens
  misc_RNA (1)...(19): siRNA sense strand
agaagaagugggacaagua

SEQ ID NO: 1871362 - RNA, 19 nt, Homo sapiens
  misc_RNA (1)...(19): siRNA sense strand
gagaagaacaagcacaucu

SEQ ID NO: 1871363 - RNA, 19 nt, Homo sapiens
  misc_RNA (1)...(19): siRNA sense strand
gaagaagugggacaaguac

SEQ ID NO: 1871364 - RNA, 19 nt, Homo sapiens
  misc_RNA (1)...(19): siRNA sense strand
gcuucgaugugcacgauga

SEQ ID NO: 1871365 - RNA, 19 nt, Homo sapiens
  misc_RNA (1)...(19): siRNA sense strand
ucaagucgcagguggacaa

SEQ ID NO: 1871366 - RNA, 19 nt, Homo sapiens
  misc_RNA (1)...(19): siRNA sense strand
gccaugcaccuccucaaga

SEQ ID NO: 1871367 - RNA, 19 nt, Homo sapiens
  misc_RNA (1)...(19): siRNA sense strand
gcacuaccacaccuucuac

SEQ ID NO: 1871368 - RNA, 19 nt, Homo sapiens
  misc_RNA (1)...(19): siRNA sense strand
gcagcugguacgagaagaa

SEQ ID NO: 1871369 - RNA, 19 nt, Homo sapiens
  misc_RNA (1)...(19): siRNA sense strand
ugcagcaguuccugaagaa

SEQ ID NO: 1871370 - RNA, 19 nt, Homo sapiens
  misc_RNA (1)...(19): siRNA sense strand
cagcuucgaugugcacgau

SEQ ID NO: 1871371 - RNA, 19 nt, Homo sapiens
  misc_RNA (1)...(19): siRNA sense strand
gagcgcaagcguaagaucu

SEQ ID NO: 1871372 - RNA, 19 nt, Homo sapiens
  misc_RNA (1)...(19): siRNA sense strand
gcugguacgagaagaacaa

SEQ ID NO: 1871373 - RNA, 19 nt, Homo sapiens
  misc_RNA (1)...(19): siRNA sense strand
gguacgagaagaacaagca

SEQ ID NO: 1871374 - RNA, 19 nt, Homo sapiens
  misc_RNA (1)...(19): siRNA sense strand
gcucuucagcuucgaugug

SEQ ID NO: 1871375 - RNA, 19 nt, Homo sapiens
  misc_RNA (1)...(19): siRNA sense strand
gaggagcugcgccaagagu

SEQ ID NO: 1871376 - RNA, 19 nt, Homo sapiens
  misc_RNA (1)...(19): siRNA sense strand
gcagauggaggugcugaag

SEQ ID NO: 1871377 - RNA, 19 nt, Homo sapiens
  misc_RNA (1)...(19): siRNA sense strand
ccacaccuucuacgacuuc

SEQ ID NO: 1871378 - RNA, 19 nt, Homo sapiens
  misc_RNA (1)...(19): siRNA sense strand
gaucuccugccuguccuuu

SEQ ID NO: 1871379 - RNA, 19 nt, Homo sapiens
  misc_RNA (1)...(19): siRNA sense strand
ugaaggacgaggagaugga

SEQ ID NO: 1871380 - RNA, 19 nt, Homo sapiens
  misc_RNA (1)...(19): siRNA sense strand
aaaggcagcgggagcagau

SEQ ID NO: 1871381 - RNA, 19 nt, Homo sapiens
  misc_RNA (1)...(19): siRNA sense strand
gaacaaauccucuuacuca

SEQ ID NO: 1871382 - RNA, 19 nt, Homo sapiens
  misc_RNA (1)...(19): siRNA sense strand
ugagaaaguuguugcaaua

SEQ ID NO: 1871383 - RNA, 19 nt, Homo sapiens
  misc_RNA (1)...(19): siRNA sense strand
cgacacaacucuacuacuu

SEQ ID NO: 1871384 - RNA, 19 nt, Homo sapiens
  misc_RNA (1)...(19): siRNA sense strand
gaagagagauugguauuuu

SEQ ID NO: 1871385 - RNA, 19 nt, Homo sapiens
  misc_RNA (1)...(19): siRNA sense strand
gcagauaucucgacacaac

SEQ ID NO: 1871386 - RNA, 19 nt, Homo sapiens
  misc_RNA (1)...(19): siRNA sense strand
caaauccucuuacucagaa

SEQ ID NO: 1871387 - RNA, 19 nt, Homo sapiens
  misc_RNA (1)...(19): siRNA sense strand
ucaguugacuccacagaua

SEQ ID NO: 1871388 - RNA, 19 nt, Homo sapiens
  misc_RNA (1)...(19): siRNA sense strand
gaugauggcugguaugaag

SEQ ID NO: 1871389 - RNA, 19 nt, Homo sapiens
  misc_RNA (1)...(19): siRNA sense strand
ggaaauaaccagccugcaa

SEQ ID NO: 1871390 - RNA, 19 nt, Homo sapiens
  misc_RNA (1)...(19): siRNA sense strand
gcacgaagagagauuggua

SEQ ID NO: 1871391 - RNA, 19 nt, Homo sapiens
  misc_RNA (1)...(19): siRNA sense strand
ugaggaggcugcaguaguu

SEQ ID NO: 1871392 - RNA, 19 nt, Homo sapiens
  misc_RNA (1)...(19): siRNA sense strand
ggacggaauacuccuuaua

SEQ ID NO: 1871393 - RNA, 19 nt, Homo sapiens
  misc_RNA (1)...(19): siRNA sense strand
gaaucaaucaugcacuaua

SEQ ID NO: 1871394 - RNA, 19 nt, Homo sapiens
  misc_RNA (1)...(19): siRNA sense strand
caacaguuccuaaugacua

SEQ ID NO: 1871395 - RNA, 19 nt, Homo sapiens
  misc_RNA (1)...(19): siRNA sense strand
ggacagcaucuuuaaauca

SEQ ID NO: 1871396 - RNA, 19 nt, Homo sapiens
  misc_RNA (1)...(19): siRNA sense strand
ggugcaaucauuuauguua

SEQ ID NO: 1871397 - RNA, 19 nt, Homo sapiens
  misc_RNA (1)...(19): siRNA sense strand
gacggaauacuccuuauaa

SEQ ID NO: 1871398 - RNA, 19 nt, Homo sapiens
  misc_RNA (1)...(19): siRNA sense strand
ggaaguggaagucgagaaa

SEQ ID NO: 1871399 - RNA, 19 nt, Homo sapiens
  misc_RNA (1)...(19): siRNA sense strand
gggcgcugaucgagaguua

SEQ ID NO: 1871400 - RNA, 19 nt, Homo sapiens
  misc_RNA (1)...(19): siRNA sense strand
gaaugaugauggcugguau

SEQ ID NO: 1871401 - RNA, 19 nt, Homo sapiens
  misc_RNA (1)...(19): siRNA sense strand
gagguccacuuuauucuca

SEQ ID NO: 1871402 - RNA, 19 nt, Homo sapiens
  misc_RNA (1)...(19): siRNA sense strand
ggagcgcccuguaagguau

SEQ ID NO: 1871403 - RNA, 19 nt, Homo sapiens
  misc_RNA (1)...(19): siRNA sense strand
gagaacaaauccucuuacu

SEQ ID NO: 1871404 - RNA, 19 nt, Homo sapiens
  misc_RNA (1)...(19): siRNA sense strand
uaaaugcauuggccaacaa

SEQ ID NO: 1871405 - RNA, 19 nt, Homo sapiens
  misc_RNA (1)...(19): siRNA sense strand
uaauagcaccugcgaauau

SEQ ID NO: 1871406 - RNA, 19 nt, Homo sapiens
  misc_RNA (1)...(19): siRNA sense strand
ggagaaaguggcacgaaga

SEQ ID NO: 1871407 - RNA, 19 nt, Homo sapiens
  misc_RNA (1)...(19): siRNA sense strand
gaauauggagcgcccugua

SEQ ID NO: 1871408 - RNA, 19 nt, Homo sapiens
  misc_RNA (1)...(19): siRNA sense strand
uagcuaguguugcuuauca

SEQ ID NO: 1871409 - RNA, 19 nt, Homo sapiens
  misc_RNA (1)...(19): siRNA sense strand
acacaguucuggaugaugu

SEQ ID NO: 1871410 - RNA, 19 nt, Homo sapiens
  misc_RNA (1)...(19): siRNA sense strand
ccaacaauguacuccaguu

SEQ ID NO: 1871411 - RNA, 19 nt, Homo sapiens
  misc_RNA (1)...(19): siRNA sense strand
uauggagggugcaaucauu

SEQ ID NO: 1871412 - RNA, 19 nt, Homo sapiens
  misc_RNA (1)...(19): siRNA sense strand
cugcaguaguucaguauaa

SEQ ID NO: 1871413 - RNA, 19 nt, Homo sapiens
  misc_RNA (1)...(19): siRNA sense strand
ggaaaccuaucgauuacac

SEQ ID NO: 1871414 - RNA, 19 nt, Homo sapiens
  misc_RNA (1)...(19): siRNA sense strand
ggaacacugggacggaaua

SEQ ID NO: 1871415 - RNA, 19 nt, Homo sapiens
  misc_RNA (1)...(19): siRNA sense strand
aagaauacaucaagaacuc

SEQ ID NO: 1871416 - RNA, 19 nt, Homo sapiens
  misc_RNA (1)...(19): siRNA sense strand
caggacagcaucuuuaaau

SEQ ID NO: 1871417 - RNA, 19 nt, Homo sapiens
  misc_RNA (1)...(19): siRNA sense strand
ugacucggguggcagacua

SEQ ID NO: 1871418 - RNA, 19 nt, Homo sapiens
  misc_RNA (1)...(19): siRNA sense strand
gaucgagaguuaccagaac

SEQ ID NO: 1871419 - RNA, 19 nt, Homo sapiens
  misc_RNA (1)...(19): siRNA sense strand
guaguucaguauaaugauc

SEQ ID NO: 1871420 - RNA, 19 nt, Homo sapiens
  misc_RNA (1)...(19): siRNA sense strand
gaaaacagugguagcagua

SEQ ID NO: 1871421 - RNA, 19 nt, Homo sapiens
  misc_RNA (1)...(19): siRNA sense strand
gacagcaucuuuaaaucag

SEQ ID NO: 1871422 - RNA, 19 nt, Homo sapiens
  misc_RNA (1)...(19): siRNA sense strand
gccaaguccucccauguca

SEQ ID NO: 1871423 - RNA, 19 nt, Homo sapiens
  misc_RNA (1)...(19): siRNA sense strand
gcaggacagcaucuuuaaa

SEQ ID NO: 1871424 - RNA, 19 nt, Homo sapiens
  misc_RNA (1)...(19): siRNA sense strand
acaaugaccaggcagauau

SEQ ID NO: 1871425 - RNA, 19 nt, Homo sapiens
  misc_RNA (1)...(19): siRNA sense strand
ugggaacuauguugaauca

SEQ ID NO: 1871426 - RNA, 19 nt, Homo sapiens
  misc_RNA (1)...(19): siRNA sense strand
ggauauucauaaggagaaa

SEQ ID NO: 1871427 - RNA, 19 nt, Homo sapiens
  misc_RNA (1)...(19): siRNA sense strand
guauaaugauccauaugca

SEQ ID NO: 1871428 - RNA, 19 nt, Homo sapiens
  misc_RNA (1)...(19): siRNA sense strand
gaggagaccaaagccuaua

SEQ ID NO: 1871429 - RNA, 19 nt, Homo sapiens
  misc_RNA (1)...(19): siRNA sense strand
caugcacuauacugauuaa

SEQ ID NO: 1871430 - RNA, 19 nt, Homo sapiens
  misc_RNA (1)...(19): siRNA sense strand
cgaagagagauugguauuu

SEQ ID NO: 1871431 - RNA, 19 nt, Homo sapiens
  misc_RNA (1)...(19): siRNA sense strand
gcaagagggcgcugaucga

SEQ ID NO: 1871432 - RNA, 19 nt, Homo sapiens
  misc_RNA (1)...(19): siRNA sense strand
ucgagugacuggucuguuc

SEQ ID NO: 1871433 - RNA, 19 nt, Homo sapiens
  misc_RNA (1)...(19): siRNA sense strand
ucccauguuugaugacuuu

SEQ ID NO: 1871434 - RNA, 19 nt, Homo sapiens
  misc_RNA (1)...(19): siRNA sense strand
acacaacucuacuacuucu

SEQ ID NO: 1871435 - RNA, 19 nt, Homo sapiens
  misc_RNA (1)...(19): siRNA sense strand
ggcaggacagcaucuuuaa

SEQ ID NO: 1871436 - RNA, 19 nt, Homo sapiens
  misc_RNA (1)...(19): siRNA sense strand
uauaugaccaguccugcua

SEQ ID NO: 1871437 - RNA, 19 nt, Homo sapiens
  misc_RNA (1)...(19): siRNA sense strand
acggaauacuccuuauaaa

SEQ ID NO: 1871438 - RNA, 19 nt, Homo sapiens
  misc_RNA (1)...(19): siRNA sense strand
gcaagaacuggcacacugu

SEQ ID NO: 1871439 - RNA, 19 nt, Homo sapiens
  misc_RNA (1)...(19): siRNA sense strand
uaaccagccugcaagaacu

SEQ ID NO: 1871440 - RNA, 19 nt, Homo sapiens
  misc_RNA (1)...(19): siRNA sense strand
uguaagguauauucggaaa

SEQ ID NO: 1871441 - RNA, 19 nt, Homo sapiens
  misc_RNA (1)...(19): siRNA sense strand
aauaauagcaccugcgaau

SEQ ID NO: 1871442 - RNA, 19 nt, Homo sapiens
  misc_RNA (1)...(19): siRNA sense strand
caaaagacaaggaugauga

SEQ ID NO: 1871443 - RNA, 19 nt, Homo sapiens
  misc_RNA (1)...(19): siRNA sense strand
ggagggugcaaucauuuau

SEQ ID NO: 1871444 - RNA, 19 nt, Homo sapiens
  misc_RNA (1)...(19): siRNA sense strand
caaggaugaugagcuguca

SEQ ID NO: 1871445 - RNA, 19 nt, Homo sapiens
  misc_RNA (1)...(19): siRNA sense strand
agucuuccaucaaucauau

SEQ ID NO: 1871446 - RNA, 19 nt, Homo sapiens
  misc_RNA (1)...(19): siRNA sense strand
gagaaaguuguugcaauau

SEQ ID NO: 1871447 - RNA, 19 nt, Homo sapiens
  misc_RNA (1)...(19): siRNA sense strand
cccaagaauuauauugaga

SEQ ID NO: 1871448 - RNA, 19 nt, Homo sapiens
  misc_RNA (1)...(19): siRNA sense strand
gcaguaguucaguauaaug

SEQ ID NO: 1871449 - RNA, 19 nt, Homo sapiens
  misc_RNA (1)...(19): siRNA sense strand
gguccacuuuauucucaaa

SEQ ID NO: 1871450 - RNA, 19 nt, Homo sapiens
  misc_RNA (1)...(19): siRNA sense strand
ggaaguaguggaggaagug

SEQ ID NO: 1871451 - RNA, 19 nt, Homo sapiens
  misc_RNA (1)...(19): siRNA sense strand
aagccaagcauggaaauaa

SEQ ID NO: 1871452 - RNA, 19 nt, Homo sapiens
  misc_RNA (1)...(19): siRNA sense strand
cauacaggcuacagacaag

SEQ ID NO: 1871453 - RNA, 19 nt, Homo sapiens
  misc_RNA (1)...(19): siRNA sense strand
agacuguggauauucauaa

SEQ ID NO: 1871454 - RNA, 19 nt, Homo sapiens
  misc_RNA (1)...(19): siRNA sense strand
ggaaaacauugcugauagu

SEQ ID NO: 1871455 - RNA, 19 nt, Homo sapiens
  misc_RNA (1)...(19): siRNA sense strand
cugcucagccucauguuaa

SEQ ID NO: 1871456 - RNA, 19 nt, Homo sapiens
  misc_RNA (1)...(19): siRNA sense strand
aggcagauaucucgacaca

SEQ ID NO: 1871457 - RNA, 19 nt, Homo sapiens
  misc_RNA (1)...(19): siRNA sense strand
agugguagcaguaguauug

SEQ ID NO: 1871458 - RNA, 19 nt, Homo sapiens
  misc_RNA (1)...(19): siRNA sense strand
ccaaggacacacaguggaa

SEQ ID NO: 1871459 - RNA, 19 nt, Homo sapiens
  misc_RNA (1)...(19): siRNA sense strand
cccaaucucuagcuagugu

SEQ ID NO: 1871460 - RNA, 19 nt, Homo sapiens
  misc_RNA (1)...(19): siRNA sense strand
aaucaaucaugcacuauac

SEQ ID NO: 1871461 - RNA, 19 nt, Homo sapiens
  misc_RNA (1)...(19): siRNA sense strand
ucggaaaccuaucgauuac

SEQ ID NO: 1871462 - RNA, 19 nt, Homo sapiens
  misc_RNA (1)...(19): siRNA sense strand
uucggaaaccuaucgauua

SEQ ID NO: 1871463 - RNA, 19 nt, Homo sapiens
  misc_RNA (1)...(19): siRNA sense strand
ucgagaacaaauccucuua

SEQ ID NO: 1871464 - RNA, 19 nt, Homo sapiens
  misc_RNA (1)...(19): siRNA sense strand
cgacaucuucugguggaua

SEQ ID NO: 1871465 - RNA, 19 nt, Homo sapiens
  misc_RNA (1)...(19): siRNA sense strand
aggcaggacagcaucuuua

SEQ ID NO: 1871466 - RNA, 19 nt, Homo sapiens
  misc_RNA (1)...(19): siRNA sense strand
aauagcaccugcgaauaug

SEQ ID NO: 1871467 - RNA, 19 nt, Homo sapiens
  misc_RNA (1)...(19): siRNA sense strand
gagaucccgucuggcaaga

SEQ ID NO: 1871468 - RNA, 19 nt, Homo sapiens
  misc_RNA (1)...(19): siRNA sense strand
guggcagacuacugugaaa

SEQ ID NO: 1871469 - RNA, 19 nt, Homo sapiens
  misc_RNA (1)...(19): siRNA sense strand
cucugugacugcucaauuu

SEQ ID NO: 1871470 - RNA, 19 nt, Homo sapiens
  misc_RNA (1)...(19): siRNA sense strand
aaacagugguagcaguagu

SEQ ID NO: 1871471 - RNA, 19 nt, Homo sapiens
  misc_RNA (1)...(19): siRNA sense strand
ggacacacaguggaaguag

SEQ ID NO: 1871472 - RNA, 19 nt, Homo sapiens
  misc_RNA (1)...(19): siRNA sense strand
gcacacugucgagaacaaa

SEQ ID NO: 1871473 - RNA, 19 nt, Homo sapiens
  misc_RNA (1)...(19): siRNA sense strand
uagcaguaguauuggcauu

SEQ ID NO: 1871474 - RNA, 19 nt, Homo sapiens
  misc_RNA (1)...(19): siRNA sense strand
ggaauacuccuuauaaaac

SEQ ID NO: 1871475 - RNA, 19 nt, Homo sapiens
  misc_RNA (1)...(19): siRNA sense strand
acaacccaaucucuagcua

SEQ ID NO: 1871476 - RNA, 19 nt, Homo sapiens
  misc_RNA (1)...(19): siRNA sense strand
caaucaugcacuauacuga

SEQ ID NO: 1871477 - RNA, 19 nt, Homo sapiens
  misc_RNA (1)...(19): siRNA sense strand
caguaguucaguauaauga

SEQ ID NO: 1871478 - RNA, 19 nt, Homo sapiens
  misc_RNA (1)...(19): siRNA sense strand
gcuaguguugcuuaucaaa

SEQ ID NO: 1871479 - RNA, 19 nt, Homo sapiens
  misc_RNA (1)...(19): siRNA sense strand
agacgaacucccucuguga

SEQ ID NO: 1871480 - RNA, 19 nt, Homo sapiens
  misc_RNA (1)...(19): siRNA sense strand
gacaucuucugguggauac

SEQ ID NO: 1871481 - RNA, 19 nt, Homo sapiens
  misc_RNA (1)...(19): siRNA sense strand
gaacucugcuugagaacua

SEQ ID NO: 1871482 - RNA, 19 nt, Homo sapiens
  misc_RNA (1)...(19): siRNA sense strand
gagcaaagccugcaacaaa

SEQ ID NO: 1871483 - RNA, 19 nt, Homo sapiens
  misc_RNA (1)...(19): siRNA sense strand
gcaaugagguauaucaacu

SEQ ID NO: 1871484 - RNA, 19 nt, Homo sapiens
  misc_RNA (1)...(19): siRNA sense strand
ugagguauaucaacuucuu

SEQ ID NO: 1871485 - RNA, 19 nt, Homo sapiens
  misc_RNA (1)...(19): siRNA sense strand
caagccaccacauuccuua

SEQ ID NO: 1871486 - RNA, 19 nt, Homo sapiens
  misc_RNA (1)...(19): siRNA sense strand
ggaggcagcagaaugucaa

SEQ ID NO: 1871487 - RNA, 19 nt, Homo sapiens
  misc_RNA (1)...(19): siRNA sense strand
gaaugucaacagcgccuuu

SEQ ID NO: 1871488 - RNA, 19 nt, Homo sapiens
  misc_RNA (1)...(19): siRNA sense strand
gguccaagccaccacauuc

SEQ ID NO: 1871489 - RNA, 19 nt, Homo sapiens
  misc_RNA (1)...(19): siRNA sense strand
ccacucacccuccagacaa

SEQ ID NO: 1871490 - RNA, 19 nt, Homo sapiens
  misc_RNA (1)...(19): siRNA sense strand
gguggaggcagcagaaugu

SEQ ID NO: 1871491 - RNA, 19 nt, Homo sapiens
  misc_RNA (1)...(19): siRNA sense strand
aaugagguauaucaacuuc

SEQ ID NO: 1871492 - RNA, 19 nt, Homo sapiens
  misc_RNA (1)...(19): siRNA sense strand
ggagcaaagccugcaacaa

SEQ ID NO: 1871493 - RNA, 19 nt, Homo sapiens
  misc_RNA (1)...(19): siRNA sense strand
caaugagguauaucaacuu

SEQ ID NO: 1871494 - RNA, 19 nt, Homo sapiens
  misc_RNA (1)...(19): siRNA sense strand
cacucacccuccagacaaa

SEQ ID NO: 1871495 - RNA, 19 nt, Homo sapiens
  misc_RNA (1)...(19): siRNA sense strand
gcaaagccugcaacaaacg

SEQ ID NO: 1871496 - RNA, 19 nt, Homo sapiens
  misc_RNA (1)...(19): siRNA sense strand
acgcuucgccuggcaauga

SEQ ID NO: 1871497 - RNA, 19 nt, Homo sapiens
  misc_RNA (1)...(19): siRNA sense strand
gccuggcaaugagguauau

SEQ ID NO: 1871498 - RNA, 19 nt, Homo sapiens
  misc_RNA (1)...(19): siRNA sense strand
gcagagacaucacaaagau

SEQ ID NO: 1871499 - RNA, 19 nt, Homo sapiens
  misc_RNA (1)...(19): siRNA sense strand
gagcauaacucugggacuu

SEQ ID NO: 1871500 - RNA, 19 nt, Homo sapiens
  misc_RNA (1)...(19): siRNA sense strand
ccaccuuccuggacuguua

SEQ ID NO: 1871501 - RNA, 19 nt, Homo sapiens
  misc_RNA (1)...(19): siRNA sense strand
gaaaccaccgcucaauauu

SEQ ID NO: 1871502 - RNA, 19 nt, Homo sapiens
  misc_RNA (1)...(19): siRNA sense strand
gaccucauauucaguguug

SEQ ID NO: 1871503 - RNA, 19 nt, Homo sapiens
  misc_RNA (1)...(19): siRNA sense strand
cgaguaccauuaagagaaa

SEQ ID NO: 1871504 - RNA, 19 nt, Homo sapiens
  misc_RNA (1)...(19): siRNA sense strand
ugacugagauuucuagaac

SEQ ID NO: 1871505 - RNA, 19 nt, Homo sapiens
  misc_RNA (1)...(19): siRNA sense strand
gaccaggagaguuguauaa

SEQ ID NO: 1871506 - RNA, 19 nt, Homo sapiens
  misc_RNA (1)...(19): siRNA sense strand
cuccaacucugaccucaua

SEQ ID NO: 1871507 - RNA, 19 nt, Homo sapiens
  misc_RNA (1)...(19): siRNA sense strand
cagaaaccaccgcucaaua

SEQ ID NO: 1871508 - RNA, 19 nt, Homo sapiens
  misc_RNA (1)...(19): siRNA sense strand
gagccaggccucaggauug

SEQ ID NO: 1871509 - RNA, 19 nt, Homo sapiens
  misc_RNA (1)...(19): siRNA sense strand
gcgaguaccauuaagagaa

SEQ ID NO: 1871510 - RNA, 19 nt, Homo sapiens
  misc_RNA (1)...(19): siRNA sense strand
caggagaguuguauaaggu

SEQ ID NO: 1871511 - RNA, 19 nt, Homo sapiens
  misc_RNA (1)...(19): siRNA sense strand
ggagaugggugcagaaacc

SEQ ID NO: 1871512 - RNA, 19 nt, Homo sapiens
  misc_RNA (1)...(19): siRNA sense strand
gaucuucucuucccaacac

SEQ ID NO: 1871513 - RNA, 19 nt, Homo sapiens
  misc_RNA (1)...(19): siRNA sense strand
ccaggaacagcuugaagua

SEQ ID NO: 1871514 - RNA, 19 nt, Homo sapiens
  misc_RNA (1)...(19): siRNA sense strand
uaaaggagaacgcgagguu

SEQ ID NO: 1871515 - RNA, 19 nt, Homo sapiens
  misc_RNA (1)...(19): siRNA sense strand
gcuacaggcucugauuuca

SEQ ID NO: 1871516 - RNA, 19 nt, Homo sapiens
  misc_RNA (1)...(19): siRNA sense strand
gcucuucucuggauauggu

SEQ ID NO: 1871517 - RNA, 19 nt, Homo sapiens
  misc_RNA (1)...(19): siRNA sense strand
gccagugugucccucuuaa

SEQ ID NO: 1871518 - RNA, 19 nt, Homo sapiens
  misc_RNA (1)...(19): siRNA sense strand
gcccuacccuccagcagaa

SEQ ID NO: 1871519 - RNA, 19 nt, Homo sapiens
  misc_RNA (1)...(19): siRNA sense strand
agaaaccaccgcucaauau

SEQ ID NO: 1871520 - RNA, 19 nt, Homo sapiens
  misc_RNA (1)...(19): siRNA sense strand
ggacgaugagugugccuuu

SEQ ID NO: 1871521 - RNA, 19 nt, Homo sapiens
  misc_RNA (1)...(19): siRNA sense strand
cgccucaaaucguguuuaa

SEQ ID NO: 1871522 - RNA, 19 nt, Homo sapiens
  misc_RNA (1)...(19): siRNA sense strand
gcagaaaccaccgcucaau

SEQ ID NO: 1871523 - RNA, 19 nt, Homo sapiens
  misc_RNA (1)...(19): siRNA sense strand
gcccagcgaguaccauuaa

SEQ ID NO: 1871524 - RNA, 19 nt, Homo sapiens
  misc_RNA (1)...(19): siRNA sense strand
aaccaccgcucaauauuca

SEQ ID NO: 1871525 - RNA, 19 nt, Homo sapiens
  misc_RNA (1)...(19): siRNA sense strand
guucgggccucugcauauu

SEQ ID NO: 1871526 - RNA, 19 nt, Homo sapiens
  misc_RNA (1)...(19): siRNA sense strand
caacucugaccucauauuc

SEQ ID NO: 1871527 - RNA, 19 nt, Homo sapiens
  misc_RNA (1)...(19): siRNA sense strand
ggaggcucuucucuggaua

SEQ ID NO: 1871528 - RNA, 19 nt, Homo sapiens
  misc_RNA (1)...(19): siRNA sense strand
agagacaucacaaagauug

SEQ ID NO: 1871529 - RNA, 19 nt, Homo sapiens
  misc_RNA (1)...(19): siRNA sense strand
ccaacccuguggcuacauu

SEQ ID NO: 1871530 - RNA, 19 nt, Homo sapiens
  misc_RNA (1)...(19): siRNA sense strand
ccaggaacagcuugaggua

SEQ ID NO: 1871531 - RNA, 19 nt, Homo sapiens
  misc_RNA (1)...(19): siRNA sense strand
ccaggaacagcuugaggua

SEQ ID NO: 1871532 - RNA, 19 nt, Homo sapiens
  misc_RNA (1)...(19): siRNA sense strand
ccaggagaguuguauaagg

SEQ ID NO: 1871533 - RNA, 19 nt, Homo sapiens
  misc_RNA (1)...(19): siRNA sense strand
ggaacagcuugaaguacca

SEQ ID NO: 1871534 - RNA, 19 nt, Homo sapiens
  misc_RNA (1)...(19): siRNA sense strand
uaaccgccauccacugcuu

SEQ ID NO: 1871535 - RNA, 19 nt, Homo sapiens
  misc_RNA (1)...(19): siRNA sense strand
ucugcucacuccagucuuu

SEQ ID NO: 1871536 - RNA, 19 nt, Homo sapiens
  misc_RNA (1)...(19): siRNA sense strand
gguugucacucacucagau

SEQ ID NO: 1871537 - RNA, 19 nt, Homo sapiens
  misc_RNA (1)...(19): siRNA sense strand
ggagugagccugagauacc

SEQ ID NO: 1871538 - RNA, 19 nt, Homo sapiens
  misc_RNA (1)...(19): siRNA sense strand
ggagugagccugagauacc

SEQ ID NO: 1871539 - RNA, 19 nt, Homo sapiens
  misc_RNA (1)...(19): siRNA sense strand
ggcagagacaucacaaaga

SEQ ID NO: 1871540 - RNA, 19 nt, Homo sapiens
  misc_RNA (1)...(19): siRNA sense strand
gaugcccuguguuucauuc

SEQ ID NO: 1871541 - RNA, 19 nt, Homo sapiens
  misc_RNA (1)...(19): siRNA sense strand
ggagaacgcgagguuguca

SEQ ID NO: 1871542 - RNA, 19 nt, Homo sapiens
  misc_RNA (1)...(19): siRNA sense strand
ucucaccguucaaccuaaa

SEQ ID NO: 1871543 - RNA, 19 nt, Homo sapiens
  misc_RNA (1)...(19): siRNA sense strand
gcaccaggcagagacauca

SEQ ID NO: 1871544 - RNA, 19 nt, Homo sapiens
  misc_RNA (1)...(19): siRNA sense strand
gcaucgguauccugcaaca

SEQ ID NO: 1871545 - RNA, 19 nt, Homo sapiens
  misc_RNA (1)...(19): siRNA sense strand
aaaccaccgcucaauauuc

SEQ ID NO: 1871546 - RNA, 19 nt, Homo sapiens
  misc_RNA (1)...(19): siRNA sense strand
ggaccccacucuaacagaa

SEQ ID NO: 1871547 - RNA, 19 nt, Homo sapiens
  misc_RNA (1)...(19): siRNA sense strand
ccaccagccugaucuucuc

SEQ ID NO: 1871548 - RNA, 19 nt, Homo sapiens
  misc_RNA (1)...(19): siRNA sense strand
ggccagugugucccucuua

SEQ ID NO: 1871549 - RNA, 19 nt, Homo sapiens
  misc_RNA (1)...(19): siRNA sense strand
gaggcuacaggcucugauu

SEQ ID NO: 1871550 - RNA, 19 nt, Homo sapiens
  misc_RNA (1)...(19): siRNA sense strand
caacccuguggcuacauua

SEQ ID NO: 1871551 - RNA, 19 nt, Homo sapiens
  misc_RNA (1)...(19): siRNA sense strand
uaggauugagccugagaua

SEQ ID NO: 1871552 - RNA, 19 nt, Homo sapiens
  misc_RNA (1)...(19): siRNA sense strand
uggaggcucuucucuggau

SEQ ID NO: 1871553 - RNA, 19 nt, Homo sapiens
  misc_RNA (1)...(19): siRNA sense strand
gugugucccucuuaaugga

SEQ ID NO: 1871554 - RNA, 19 nt, Homo sapiens
  misc_RNA (1)...(19): siRNA sense strand
ggauugagccugagauacc

SEQ ID NO: 1871555 - RNA, 19 nt, Homo sapiens
  misc_RNA (1)...(19): siRNA sense strand
ucgggccucugcauauuug

SEQ ID NO: 1871556 - RNA, 19 nt, Homo sapiens
  misc_RNA (1)...(19): siRNA sense strand
guggcuacauuacucgaau

SEQ ID NO: 1871557 - RNA, 19 nt, Homo sapiens
  misc_RNA (1)...(19): siRNA sense strand
ccgguacgcucucagaaac

SEQ ID NO: 1871558 - RNA, 19 nt, Homo sapiens
  misc_RNA (1)...(19): siRNA sense strand
ccagcgaguaccauuaaga

SEQ ID NO: 1871559 - RNA, 19 nt, Homo sapiens
  misc_RNA (1)...(19): siRNA sense strand
ccucgaggccggacauugu

SEQ ID NO: 1871560 - RNA, 19 nt, Homo sapiens
  misc_RNA (1)...(19): siRNA sense strand
ggaccaggagaaccaagau

SEQ ID NO: 1871561 - RNA, 19 nt, Homo sapiens
  misc_RNA (1)...(19): siRNA sense strand
gcaaccaccagccugaucu

SEQ ID NO: 1871562 - RNA, 19 nt, Homo sapiens
  misc_RNA (1)...(19): siRNA sense strand
uaggagugagccugagaua

SEQ ID NO: 1871563 - RNA, 19 nt, Homo sapiens
  misc_RNA (1)...(19): siRNA sense strand
uaggagugagccugagaua

SEQ ID NO: 1871564 - RNA, 19 nt, Homo sapiens
  misc_RNA (1)...(19): siRNA sense strand
gagauuucuagaacucuga

SEQ ID NO: 1871565 - RNA, 19 nt, Homo sapiens
  misc_RNA (1)...(19): siRNA sense strand
cagugugucccucuuaaug

SEQ ID NO: 1871566 - RNA, 19 nt, Homo sapiens
  misc_RNA (1)...(19): siRNA sense strand
ccaacucugaccucauauu

SEQ ID NO: 1871567 - RNA, 19 nt, Homo sapiens
  misc_RNA (1)...(19): siRNA sense strand
cagccugcuuucucucuuc

SEQ ID NO: 1871568 - RNA, 19 nt, Homo sapiens
  misc_RNA (1)...(19): siRNA sense strand
ggaaguagaggggcuggua

SEQ ID NO: 1871569 - RNA, 19 nt, Homo sapiens
  misc_RNA (1)...(19): siRNA sense strand
acuggaggguucugggaaa

SEQ ID NO: 1871570 - RNA, 19 nt, Homo sapiens
  misc_RNA (1)...(19): siRNA sense strand
ugaccaggagaguuguaua

SEQ ID NO: 1871571 - RNA, 19 nt, Homo sapiens
  misc_RNA (1)...(19): siRNA sense strand
ccaugacucccaccugaug

SEQ ID NO: 1871572 - RNA, 19 nt, Homo sapiens
  misc_RNA (1)...(19): siRNA sense strand
ccagggaccauagaguuug

SEQ ID NO: 1871573 - RNA, 19 nt, Homo sapiens
  misc_RNA (1)...(19): siRNA sense strand
cagggaccauagaguuugu

SEQ ID NO: 1871574 - RNA, 19 nt, Homo sapiens
  misc_RNA (1)...(19): siRNA sense strand
ccugcuuucucucuuccua

SEQ ID NO: 1871575 - RNA, 19 nt, Homo sapiens
  misc_RNA (1)...(19): siRNA sense strand
acgcaucgguauccugcaa

SEQ ID NO: 1871576 - RNA, 19 nt, Homo sapiens
  misc_RNA (1)...(19): siRNA sense strand
cgucucaccguucaaccua

SEQ ID NO: 1871577 - RNA, 19 nt, Homo sapiens
  misc_RNA (1)...(19): siRNA sense strand
ggcccagcgaguaccauua

SEQ ID NO: 1871578 - RNA, 19 nt, Homo sapiens
  misc_RNA (1)...(19): siRNA sense strand
uggacgggcucagcgugua

SEQ ID NO: 1871579 - RNA, 19 nt, Homo sapiens
  misc_RNA (1)...(19): siRNA sense strand
ccagccugaucuucucuuc

SEQ ID NO: 1871580 - RNA, 19 nt, Homo sapiens
  misc_RNA (1)...(19): siRNA sense strand
ccugcacccuggaacauag

SEQ ID NO: 1871581 - RNA, 19 nt, Homo sapiens
  misc_RNA (1)...(19): siRNA sense strand
gagugagccugagauacca

SEQ ID NO: 1871582 - RNA, 19 nt, Homo sapiens
  misc_RNA (1)...(19): siRNA sense strand
ugcuuucucucuuccuaaa

SEQ ID NO: 1871583 - RNA, 19 nt, Homo sapiens
  misc_RNA (1)...(19): siRNA sense strand
caccaacccuguggcuaca

SEQ ID NO: 1871584 - RNA, 19 nt, Homo sapiens
  misc_RNA (1)...(19): siRNA sense strand
cagagacaucacaaagauu

SEQ ID NO: 1871585 - RNA, 19 nt, Homo sapiens
  misc_RNA (1)...(19): siRNA sense strand
gggccagugugucccucuu

SEQ ID NO: 1871586 - RNA, 19 nt, Homo sapiens
  misc_RNA (1)...(19): siRNA sense strand
aacgcgagguugucacuca

SEQ ID NO: 1871587 - RNA, 19 nt, Homo sapiens
  misc_RNA (1)...(19): siRNA sense strand
ggaagacugccauuacuaa

SEQ ID NO: 1871588 - RNA, 19 nt, Homo sapiens
  misc_RNA (1)...(19): siRNA sense strand
gacaauggaugcuguuucg

SEQ ID NO: 1871589 - RNA, 19 nt, Homo sapiens
  misc_RNA (1)...(19): siRNA sense strand
gaaugcgccucucggaagu

SEQ ID NO: 1871590 - RNA, 19 nt, Homo sapiens
  misc_RNA (1)...(19): siRNA sense strand
caaagcaagagucggauca

SEQ ID NO: 1871591 - RNA, 19 nt, Homo sapiens
  misc_RNA (1)...(19): siRNA sense strand
ucuccaacuucaucuuuga

SEQ ID NO: 1871592 - RNA, 19 nt, Homo sapiens
  misc_RNA (1)...(19): siRNA sense strand
guggaagacugccauuacu

SEQ ID NO: 1871593 - RNA, 19 nt, Homo sapiens
  misc_RNA (1)...(19): siRNA sense strand
uggaagacugccauuacua

SEQ ID NO: 1871594 - RNA, 19 nt, Homo sapiens
  misc_RNA (1)...(19): siRNA sense strand
ugacaauggaugcuguuuc

SEQ ID NO: 1871595 - RNA, 19 nt, Homo sapiens
  misc_RNA (1)...(19): siRNA sense strand
caacuuaccuugucacuua

SEQ ID NO: 1871596 - RNA, 19 nt, Homo sapiens
  misc_RNA (1)...(19): siRNA sense strand
ccaaagaacucgacuguua

SEQ ID NO: 1871597 - RNA, 19 nt, Homo sapiens
  misc_RNA (1)...(19): siRNA sense strand
gaacgaagauguaacuguu

SEQ ID NO: 1871598 - RNA, 19 nt, Homo sapiens
  misc_RNA (1)...(19): siRNA sense strand
gaacucgacuguuacauug

SEQ ID NO: 1871599 - RNA, 19 nt, Homo sapiens
  misc_RNA (1)...(19): siRNA sense strand
gcucaaaucucaucaaauc

SEQ ID NO: 1871600 - RNA, 19 nt, Homo sapiens
  misc_RNA (1)...(19): siRNA sense strand
gaacucaacaccaugaaua

SEQ ID NO: 1871601 - RNA, 19 nt, Homo sapiens
  misc_RNA (1)...(19): siRNA sense strand
uaagaaaggcguucaguuu

SEQ ID NO: 1871602 - RNA, 19 nt, Homo sapiens
  misc_RNA (1)...(19): siRNA sense strand
uaugagagguuuacuagaa

SEQ ID NO: 1871603 - RNA, 19 nt, Homo sapiens
  misc_RNA (1)...(19): siRNA sense strand
gaaggaauuuguuaaagag

SEQ ID NO: 1871604 - RNA, 19 nt, Homo sapiens
  misc_RNA (1)...(19): siRNA sense strand
gaauaaugcuauccuugga

SEQ ID NO: 1871605 - RNA, 19 nt, Homo sapiens
  misc_RNA (1)...(19): siRNA sense strand
cuacagaagcuauuuauga

SEQ ID NO: 1871606 - RNA, 19 nt, Homo sapiens
  misc_RNA (1)...(19): siRNA sense strand
cagaagcuauuuaugaaga

SEQ ID NO: 1871607 - RNA, 19 nt, Homo sapiens
  misc_RNA (1)...(19): siRNA sense strand
caacuugccauuagacauu

SEQ ID NO: 1871608 - RNA, 19 nt, Homo sapiens
  misc_RNA (1)...(19): siRNA sense strand
caaaggagcucaaaaugau

SEQ ID NO: 1871609 - RNA, 19 nt, Homo sapiens
  misc_RNA (1)...(19): siRNA sense strand
gcagaacugugguccaagu

SEQ ID NO: 1871610 - RNA, 19 nt, Homo sapiens
  misc_RNA (1)...(19): siRNA sense strand
caaauucaguguuucuaca

SEQ ID NO: 1871611 - RNA, 19 nt, Homo sapiens
  misc_RNA (1)...(19): siRNA sense strand
gacaagagacugcucaaau

SEQ ID NO: 1871612 - RNA, 19 nt, Homo sapiens
  misc_RNA (1)...(19): siRNA sense strand
gauacaacuugccauuaga

SEQ ID NO: 1871613 - RNA, 19 nt, Homo sapiens
  misc_RNA (1)...(19): siRNA sense strand
agugaaagcuuugaagaaa

SEQ ID NO: 1871614 - RNA, 19 nt, Homo sapiens
  misc_RNA (1)...(19): siRNA sense strand
uaaucaacuuucaggcuua

SEQ ID NO: 1871615 - RNA, 19 nt, Homo sapiens
  misc_RNA (1)...(19): siRNA sense strand
gugaagaaggaauuuguua

SEQ ID NO: 1871616 - RNA, 19 nt, Homo sapiens
  misc_RNA (1)...(19): siRNA sense strand
gauaugagagguuuacuag

SEQ ID NO: 1871617 - RNA, 19 nt, Homo sapiens
  misc_RNA (1)...(19): siRNA sense strand
agauguaacuguugagcua

SEQ ID NO: 1871618 - RNA, 19 nt, Homo sapiens
  misc_RNA (1)...(19): siRNA sense strand
acaagagacugcucaaauc

SEQ ID NO: 1871619 - RNA, 19 nt, Homo sapiens
  misc_RNA (1)...(19): siRNA sense strand
ggauguaagcgaagucaaa

SEQ ID NO: 1871620 - RNA, 19 nt, Homo sapiens
  misc_RNA (1)...(19): siRNA sense strand
ugaaaaccaugaagacaua

SEQ ID NO: 1871621 - RNA, 19 nt, Homo sapiens
  misc_RNA (1)...(19): siRNA sense strand
ucaacaccaugaauaauca

SEQ ID NO: 1871622 - RNA, 19 nt, Homo sapiens
  misc_RNA (1)...(19): siRNA sense strand
caucaaauccuccaacauc

SEQ ID NO: 1871623 - RNA, 19 nt, Homo sapiens
  misc_RNA (1)...(19): siRNA sense strand
ggagaacucaacaccauga

SEQ ID NO: 1871624 - RNA, 19 nt, Homo sapiens
  misc_RNA (1)...(19): siRNA sense strand
gaaggaagccaccaauacu

SEQ ID NO: 1871625 - RNA, 19 nt, Homo sapiens
  misc_RNA (1)...(19): siRNA sense strand
caccagcucuuucuucugu

SEQ ID NO: 1871626 - RNA, 19 nt, Homo sapiens
  misc_RNA (1)...(19): siRNA sense strand
guucugauguaacaaacaa

SEQ ID NO: 1871627 - RNA, 19 nt, Homo sapiens
  misc_RNA (1)...(19): siRNA sense strand
gccaaaagaugcagugaaa

SEQ ID NO: 1871628 - RNA, 19 nt, Homo sapiens
  misc_RNA (1)...(19): siRNA sense strand
caagaucuccucgaccuaa

SEQ ID NO: 1871629 - RNA, 19 nt, Homo sapiens
  misc_RNA (1)...(19): siRNA sense strand
ugaauuggauauggugaaa

SEQ ID NO: 1871630 - RNA, 19 nt, Homo sapiens
  misc_RNA (1)...(19): siRNA sense strand
gcagugaaagcuuugaaga

SEQ ID NO: 1871631 - RNA, 19 nt, Homo sapiens
  misc_RNA (1)...(19): siRNA sense strand
gaauuuaguuaagcuacug

SEQ ID NO: 1871632 - RNA, 19 nt, Homo sapiens
  misc_RNA (1)...(19): siRNA sense strand
ggauaugagagguuuacua

SEQ ID NO: 1871633 - RNA, 19 nt, Homo sapiens
  misc_RNA (1)...(19): siRNA sense strand
gugcagaacugugguccaa

SEQ ID NO: 1871634 - RNA, 19 nt, Homo sapiens
  misc_RNA (1)...(19): siRNA sense strand
ccacgcauaugauaauuuu

SEQ ID NO: 1871635 - RNA, 19 nt, Homo sapiens
  misc_RNA (1)...(19): siRNA sense strand
aagaugcagugaaagcuuu

SEQ ID NO: 1871636 - RNA, 19 nt, Homo sapiens
  misc_RNA (1)...(19): siRNA sense strand
caacuuucaggcuuaaauu

SEQ ID NO: 1871637 - RNA, 19 nt, Homo sapiens
  misc_RNA (1)...(19): siRNA sense strand
ccagcucuuucuucuguaa

SEQ ID NO: 1871638 - RNA, 19 nt, Homo sapiens
  misc_RNA (1)...(19): siRNA sense strand
agauacaacuugccauuag

SEQ ID NO: 1871639 - RNA, 19 nt, Homo sapiens
  misc_RNA (1)...(19): siRNA sense strand
gaaauccaacuuaccuugu

SEQ ID NO: 1871640 - RNA, 19 nt, Homo sapiens
  misc_RNA (1)...(19): siRNA sense strand
uaagcgaagucaaagaagu

SEQ ID NO: 1871641 - RNA, 19 nt, Homo sapiens
  misc_RNA (1)...(19): siRNA sense strand
gcacaaaggagcucaaaau

SEQ ID NO: 1871642 - RNA, 19 nt, Homo sapiens
  misc_RNA (1)...(19): siRNA sense strand
ccaccaauacuaccaguga

SEQ ID NO: 1871643 - RNA, 19 nt, Homo sapiens
  misc_RNA (1)...(19): siRNA sense strand
gaaacagcaagacaagaga

SEQ ID NO: 1871644 - RNA, 19 nt, Homo sapiens
  misc_RNA (1)...(19): siRNA sense strand
cgagugauguccgccauau

SEQ ID NO: 1871645 - RNA, 19 nt, Homo sapiens
  misc_RNA (1)...(19): siRNA sense strand
gaucuccagccaccuaauu

SEQ ID NO: 1871646 - RNA, 19 nt, Homo sapiens
  misc_RNA (1)...(19): siRNA sense strand
caaguucugauguaacaaa

SEQ ID NO: 1871647 - RNA, 19 nt, Homo sapiens
  misc_RNA (1)...(19): siRNA sense strand
cagaaggaagccaccaaua

SEQ ID NO: 1871648 - RNA, 19 nt, Homo sapiens
  misc_RNA (1)...(19): siRNA sense strand
cagauacaacuugccauua

SEQ ID NO: 1871649 - RNA, 19 nt, Homo sapiens
  misc_RNA (1)...(19): siRNA sense strand
ucacuacagaagcuauuua

SEQ ID NO: 1871650 - RNA, 19 nt, Homo sapiens
  misc_RNA (1)...(19): siRNA sense strand
gaacauucaaauucagugu

SEQ ID NO: 1871651 - RNA, 19 nt, Homo sapiens
  misc_RNA (1)...(19): siRNA sense strand
ucaagccacgcauaugaua

SEQ ID NO: 1871652 - RNA, 19 nt, Homo sapiens
  misc_RNA (1)...(19): siRNA sense strand
ggagaacgaagauguaacu

SEQ ID NO: 1871653 - RNA, 19 nt, Homo sapiens
  misc_RNA (1)...(19): siRNA sense strand
caccaugaauaaucaacuu

SEQ ID NO: 1871654 - RNA, 19 nt, Homo sapiens
  misc_RNA (1)...(19): siRNA sense strand
ccagauacaacuugccauu

SEQ ID NO: 1871655 - RNA, 19 nt, Homo sapiens
  misc_RNA (1)...(19): siRNA sense strand
ggaguuugaucccuuagcu

SEQ ID NO: 1871656 - RNA, 19 nt, Homo sapiens
  misc_RNA (1)...(19): siRNA sense strand
ucaguuuccucccucagaa

SEQ ID NO: 1871657 - RNA, 19 nt, Homo sapiens
  misc_RNA (1)...(19): siRNA sense strand
cugcucaaaucucaucaaa

SEQ ID NO: 1871658 - RNA, 19 nt, Homo sapiens
  misc_RNA (1)...(19): siRNA sense strand
aauggaguuugaucccuua

SEQ ID NO: 1871659 - RNA, 19 nt, Homo sapiens
  misc_RNA (1)...(19): siRNA sense strand
ucuggaacauucaaauuca

SEQ ID NO: 1871660 - RNA, 19 nt, Homo sapiens
  misc_RNA (1)...(19): siRNA sense strand
ccucaagccacgcauauga

SEQ ID NO: 1871661 - RNA, 19 nt, Homo sapiens
  misc_RNA (1)...(19): siRNA sense strand
acgaagauguaacuguuga

SEQ ID NO: 1871662 - RNA, 19 nt, Homo sapiens
  misc_RNA (1)...(19): siRNA sense strand
gugaaugaggauuugaaua

SEQ ID NO: 1871663 - RNA, 19 nt, Homo sapiens
  misc_RNA (1)...(19): siRNA sense strand
uuacauuggucccagaaca

SEQ ID NO: 1871664 - RNA, 19 nt, Homo sapiens
  misc_RNA (1)...(19): siRNA sense strand
ucaaaaugauggugacuga

SEQ ID NO: 1871665 - RNA, 19 nt, Homo sapiens
  misc_RNA (1)...(19): siRNA sense strand
ggauuugaauaaugcuauc

SEQ ID NO: 1871666 - RNA, 19 nt, Homo sapiens
  misc_RNA (1)...(19): siRNA sense strand
gaauacuccugggucugaa

SEQ ID NO: 1871667 - RNA, 19 nt, Homo sapiens
  misc_RNA (1)...(19): siRNA sense strand
cccaggagguguggaugua

SEQ ID NO: 1871668 - RNA, 19 nt, Homo sapiens
  misc_RNA (1)...(19): siRNA sense strand
gcccaaaggaccagccaaa

SEQ ID NO: 1871669 - RNA, 19 nt, Homo sapiens
  misc_RNA (1)...(19): siRNA sense strand
uugcuagccuuggagaaua

SEQ ID NO: 1871670 - RNA, 19 nt, Homo sapiens
  misc_RNA (1)...(19): siRNA sense strand
gcucuuucuucuguaauug

SEQ ID NO: 1871671 - RNA, 19 nt, Homo sapiens
  misc_RNA (1)...(19): siRNA sense strand
aagcgaagucaaagaagua

SEQ ID NO: 1871672 - RNA, 19 nt, Homo sapiens
  misc_RNA (1)...(19): siRNA sense strand
caaauccuccaacaucugu

SEQ ID NO: 1871673 - RNA, 19 nt, Homo sapiens
  misc_RNA (1)...(19): siRNA sense strand
ucaggugaaugaggauuug

SEQ ID NO: 1871674 - RNA, 19 nt, Homo sapiens
  misc_RNA (1)...(19): siRNA sense strand
gguggagaacgaagaugua

SEQ ID NO: 1871675 - RNA, 19 nt, Homo sapiens
  misc_RNA (1)...(19): siRNA sense strand
gcacagugaauuggauaug

SEQ ID NO: 1871676 - RNA, 19 nt, Homo sapiens
  misc_RNA (1)...(19): siRNA sense strand
uguaauugcuccaaagaac

SEQ ID NO: 1871677 - RNA, 19 nt, Homo sapiens
  misc_RNA (1)...(19): siRNA sense strand
caagagacugcucaaaucu

SEQ ID NO: 1871678 - RNA, 19 nt, Homo sapiens
  misc_RNA (1)...(19): siRNA sense strand
ugggagaacucaacaccau

SEQ ID NO: 1871679 - RNA, 19 nt, Homo sapiens
  misc_RNA (1)...(19): siRNA sense strand
gaucauggaccugcuugug

SEQ ID NO: 1871680 - RNA, 19 nt, Homo sapiens
  misc_RNA (1)...(19): siRNA sense strand
agaacucgacuguuacauu

SEQ ID NO: 1871681 - RNA, 19 nt, Homo sapiens
  misc_RNA (1)...(19): siRNA sense strand
ccaaguuuccagucucuga

SEQ ID NO: 1871682 - RNA, 19 nt, Homo sapiens
  misc_RNA (1)...(19): siRNA sense strand
caagccacgcauaugauaa

SEQ ID NO: 1871683 - RNA, 19 nt, Homo sapiens
  misc_RNA (1)...(19): siRNA sense strand
aaucaacuuucaggcuuaa

SEQ ID NO: 1871684 - RNA, 19 nt, Homo sapiens
  misc_RNA (1)...(19): siRNA sense strand
agaaaccaacaaaggauuu

SEQ ID NO: 1871685 - RNA, 19 nt, Homo sapiens
  misc_RNA (1)...(19): siRNA sense strand
gauguccgccauauugaug

SEQ ID NO: 1871686 - RNA, 19 nt, Homo sapiens
  misc_RNA (1)...(19): siRNA sense strand
gcuacugaaucccagauac

SEQ ID NO: 1871687 - RNA, 19 nt, Homo sapiens
  misc_RNA (1)...(19): siRNA sense strand
cuuccaaguucugauguaa

SEQ ID NO: 1871688 - RNA, 19 nt, Homo sapiens
  misc_RNA (1)...(19): siRNA sense strand
uguaagcgaagucaaagaa

SEQ ID NO: 1871689 - RNA, 19 nt, Homo sapiens
  misc_RNA (1)...(19): siRNA sense strand
guauaccucgaccugguua

SEQ ID NO: 1871690 - RNA, 19 nt, Homo sapiens
  misc_RNA (1)...(19): siRNA sense strand
cuuggagaauacagagaua

SEQ ID NO: 1871691 - RNA, 19 nt, Homo sapiens
  misc_RNA (1)...(19): siRNA sense strand
uccaaguucugauguaaca

SEQ ID NO: 1871692 - RNA, 19 nt, Homo sapiens
  misc_RNA (1)...(19): siRNA sense strand
cagugaaagcuuugaagaa

SEQ ID NO: 1871693 - RNA, 19 nt, Homo sapiens
  misc_RNA (1)...(19): siRNA sense strand
caaagaacucgacuguuac

SEQ ID NO: 1871694 - RNA, 19 nt, Homo sapiens
  misc_RNA (1)...(19): siRNA sense strand
ugaaacagcaagacaagag

SEQ ID NO: 1871695 - RNA, 19 nt, Homo sapiens
  misc_RNA (1)...(19): siRNA sense strand
gcccaaaucuccagaauaa

SEQ ID NO: 1871696 - RNA, 19 nt, Homo sapiens
  misc_RNA (1)...(19): siRNA sense strand
gaacagcgcuuaaaguuuu

SEQ ID NO: 1871697 - RNA, 19 nt, Homo sapiens
  misc_RNA (1)...(19): siRNA sense strand
ggacuguacccaagaauua

SEQ ID NO: 1871698 - RNA, 19 nt, Homo sapiens
  misc_RNA (1)...(19): siRNA sense strand
gaaggcagcucuacagcaa

SEQ ID NO: 1871699 - RNA, 19 nt, Homo sapiens
  misc_RNA (1)...(19): siRNA sense strand
gcagcaaguucaauauauu

SEQ ID NO: 1871700 - RNA, 19 nt, Homo sapiens
  misc_RNA (1)...(19): siRNA sense strand
acacagaaaucguuaaguu

SEQ ID NO: 1871701 - RNA, 19 nt, Homo sapiens
  misc_RNA (1)...(19): siRNA sense strand
gaaggagacugcaugacaa

SEQ ID NO: 1871702 - RNA, 19 nt, Homo sapiens
  misc_RNA (1)...(19): siRNA sense strand
ggaaugcucuggaucaagu

SEQ ID NO: 1871703 - RNA, 19 nt, Homo sapiens
  misc_RNA (1)...(19): siRNA sense strand
caacuaaauuacugccuuu

SEQ ID NO: 1871704 - RNA, 19 nt, Homo sapiens
  misc_RNA (1)...(19): siRNA sense strand
gagaagaugggcauaauga

SEQ ID NO: 1871705 - RNA, 19 nt, Homo sapiens
  misc_RNA (1)...(19): siRNA sense strand
agacgaagaugaaaucgaa

SEQ ID NO: 1871706 - RNA, 19 nt, Homo sapiens
  misc_RNA (1)...(19): siRNA sense strand
ccaaggcucugcuucugua

SEQ ID NO: 1871707 - RNA, 19 nt, Homo sapiens
  misc_RNA (1)...(19): siRNA sense strand
gcagauaagugcgaggaaa

SEQ ID NO: 1871708 - RNA, 19 nt, Homo sapiens
  misc_RNA (1)...(19): siRNA sense strand
ggaggaaauugaacagaug

SEQ ID NO: 1871709 - RNA, 19 nt, Homo sapiens
  misc_RNA (1)...(19): siRNA sense strand
gggagaauuugaccuugua

SEQ ID NO: 1871710 - RNA, 19 nt, Homo sapiens
  misc_RNA (1)...(19): siRNA sense strand
cagagggaguguuugaaua

SEQ ID NO: 1871711 - RNA, 19 nt, Homo sapiens
  misc_RNA (1)...(19): siRNA sense strand
gaccaucucugucccauca

SEQ ID NO: 1871712 - RNA, 19 nt, Homo sapiens
  misc_RNA (1)...(19): siRNA sense strand
cuagaagccuuacgaaaga

SEQ ID NO: 1871713 - RNA, 19 nt, Homo sapiens
  misc_RNA (1)...(19): siRNA sense strand
gcaccaaggccucuaaaga

SEQ ID NO: 1871714 - RNA, 19 nt, Homo sapiens
  misc_RNA (1)...(19): siRNA sense strand
gaacagaagagacuaagca

SEQ ID NO: 1871715 - RNA, 19 nt, Homo sapiens
  misc_RNA (1)...(19): siRNA sense strand
gaaagugcguccguucuca

SEQ ID NO: 1871716 - RNA, 19 nt, Homo sapiens
  misc_RNA (1)...(19): siRNA sense strand
gaagaugggcauaaugaau

SEQ ID NO: 1871717 - RNA, 19 nt, Homo sapiens
  misc_RNA (1)...(19): siRNA sense strand
gcguaucgcucauggaaug

SEQ ID NO: 1871718 - RNA, 19 nt, Homo sapiens
  misc_RNA (1)...(19): siRNA sense strand
caucacggcucuucacaau

SEQ ID NO: 1871719 - RNA, 19 nt, Homo sapiens
  misc_RNA (1)...(19): siRNA sense strand
cagagaacauuuauuccaa

SEQ ID NO: 1871720 - RNA, 19 nt, Homo sapiens
  misc_RNA (1)...(19): siRNA sense strand
ccacucagcccaacuaaau

SEQ ID NO: 1871721 - RNA, 19 nt, Homo sapiens
  misc_RNA (1)...(19): siRNA sense strand
ggcagcaaguucaauauau

SEQ ID NO: 1871722 - RNA, 19 nt, Homo sapiens
  misc_RNA (1)...(19): siRNA sense strand
gaggaaggcuacacucagu

SEQ ID NO: 1871723 - RNA, 19 nt, Homo sapiens
  misc_RNA (1)...(19): siRNA sense strand
ggaacagcgcuuaaaguuu

SEQ ID NO: 1871724 - RNA, 19 nt, Homo sapiens
  misc_RNA (1)...(19): siRNA sense strand
gaccuuguacagagaauua

SEQ ID NO: 1871725 - RNA, 19 nt, Homo sapiens
  misc_RNA (1)...(19): siRNA sense strand
gagugaugcugaccuagaa

SEQ ID NO: 1871726 - RNA, 19 nt, Homo sapiens
  misc_RNA (1)...(19): siRNA sense strand
cagaagagacuaagcaaug

SEQ ID NO: 1871727 - RNA, 19 nt, Homo sapiens
  misc_RNA (1)...(19): siRNA sense strand
gaaacguaguucuauuaca

SEQ ID NO: 1871728 - RNA, 19 nt, Homo sapiens
  misc_RNA (1)...(19): siRNA sense strand
ggaaacuuguggaggaaau

SEQ ID NO: 1871729 - RNA, 19 nt, Homo sapiens
  misc_RNA (1)...(19): siRNA sense strand
uuuaugcgcuuugggauua

SEQ ID NO: 1871730 - RNA, 19 nt, Homo sapiens
  misc_RNA (1)...(19): siRNA sense strand
ucagaaagcccaguagaaa

SEQ ID NO: 1871731 - RNA, 19 nt, Homo sapiens
  misc_RNA (1)...(19): siRNA sense strand
gaaguggcagucauggaua

SEQ ID NO: 1871732 - RNA, 19 nt, Homo sapiens
  misc_RNA (1)...(19): siRNA sense strand
ggaagaaccagagcaguga

SEQ ID NO: 1871733 - RNA, 19 nt, Homo sapiens
  misc_RNA (1)...(19): siRNA sense strand
uggauaagcguguuaauga

SEQ ID NO: 1871734 - RNA, 19 nt, Homo sapiens
  misc_RNA (1)...(19): siRNA sense strand
ggaagacgaagaugaaauc

SEQ ID NO: 1871735 - RNA, 19 nt, Homo sapiens
  misc_RNA (1)...(19): siRNA sense strand
ccagagugaugcugaccua

SEQ ID NO: 1871736 - RNA, 19 nt, Homo sapiens
  misc_RNA (1)...(19): siRNA sense strand
cuaaauuacugccuuucuu

SEQ ID NO: 1871737 - RNA, 19 nt, Homo sapiens
  misc_RNA (1)...(19): siRNA sense strand
gaauccauauuuacaugug

SEQ ID NO: 1871738 - RNA, 19 nt, Homo sapiens
  misc_RNA (1)...(19): siRNA sense strand
cagaauccauauuuacaug

SEQ ID NO: 1871739 - RNA, 19 nt, Homo sapiens
  misc_RNA (1)...(19): siRNA sense strand
aaacguaguucuauuacag

SEQ ID NO: 1871740 - RNA, 19 nt, Homo sapiens
  misc_RNA (1)...(19): siRNA sense strand
caccaaggccucuaaagaa

SEQ ID NO: 1871741 - RNA, 19 nt, Homo sapiens
  misc_RNA (1)...(19): siRNA sense strand
uaaaugcugcugauaguga

SEQ ID NO: 1871742 - RNA, 19 nt, Homo sapiens
  misc_RNA (1)...(19): siRNA sense strand
ccaaauauucagaagcuuu

SEQ ID NO: 1871743 - RNA, 19 nt, Homo sapiens
  misc_RNA (1)...(19): siRNA sense strand
gaagaaggcagcucuacag

SEQ ID NO: 1871744 - RNA, 19 nt, Homo sapiens
  misc_RNA (1)...(19): siRNA sense strand
aagaugggcauaaugaaua

SEQ ID NO: 1871745 - RNA, 19 nt, Homo sapiens
  misc_RNA (1)...(19): siRNA sense strand
acaguuugguguaaaugua

SEQ ID NO: 1871746 - RNA, 19 nt, Homo sapiens
  misc_RNA (1)...(19): siRNA sense strand
uaucuaauccuuaccgaaa

SEQ ID NO: 1871747 - RNA, 19 nt, Homo sapiens
  misc_RNA (1)...(19): siRNA sense strand
cuccaggccuugauuauga

SEQ ID NO: 1871748 - RNA, 19 nt, Homo sapiens
  misc_RNA (1)...(19): siRNA sense strand
gucaggagccgcuguguuu

SEQ ID NO: 1871749 - RNA, 19 nt, Homo sapiens
  misc_RNA (1)...(19): siRNA sense strand
gaagaagaaggcagcucua

SEQ ID NO: 1871750 - RNA, 19 nt, Homo sapiens
  misc_RNA (1)...(19): siRNA sense strand
augcucagguugcaaauaa

SEQ ID NO: 1871751 - RNA, 19 nt, Homo sapiens
  misc_RNA (1)...(19): siRNA sense strand
uauauccagucaucuacua

SEQ ID NO: 1871752 - RNA, 19 nt, Homo sapiens
  misc_RNA (1)...(19): siRNA sense strand
guaacuugcugggacugua

SEQ ID NO: 1871753 - RNA, 19 nt, Homo sapiens
  misc_RNA (1)...(19): siRNA sense strand
ggaucugacucuugcugaa

SEQ ID NO: 1871754 - RNA, 19 nt, Homo sapiens
  misc_RNA (1)...(19): siRNA sense strand
ucagccaccuucagacauu

SEQ ID NO: 1871755 - RNA, 19 nt, Homo sapiens
  misc_RNA (1)...(19): siRNA sense strand
ccagagcagugaagauauc

SEQ ID NO: 1871756 - RNA, 19 nt, Homo sapiens
  misc_RNA (1)...(19): siRNA sense strand
ggauaagcguguuaaugag

SEQ ID NO: 1871757 - RNA, 19 nt, Homo sapiens
  misc_RNA (1)...(19): siRNA sense strand
gaugaugagcugcccauga

SEQ ID NO: 1871758 - RNA, 19 nt, Homo sapiens
  misc_RNA (1)...(19): siRNA sense strand
ucacggcucuucacaaugc

SEQ ID NO: 1871759 - RNA, 19 nt, Homo sapiens
  misc_RNA (1)...(19): siRNA sense strand
ggagggagaauuugaccuu

SEQ ID NO: 1871760 - RNA, 19 nt, Homo sapiens
  misc_RNA (1)...(19): siRNA sense strand
gaccggcuguggaagaaga

SEQ ID NO: 1871761 - RNA, 19 nt, Homo sapiens
  misc_RNA (1)...(19): siRNA sense strand
agggauauguuccacguaa

SEQ ID NO: 1871762 - RNA, 19 nt, Homo sapiens
  misc_RNA (1)...(19): siRNA sense strand
ggagacugcaugacaauca

SEQ ID NO: 1871763 - RNA, 19 nt, Homo sapiens
  misc_RNA (1)...(19): siRNA sense strand
uaacaacguccaagugugu

SEQ ID NO: 1871764 - RNA, 19 nt, Homo sapiens
  misc_RNA (1)...(19): siRNA sense strand
gaauuugaccuuguacaga

SEQ ID NO: 1871765 - RNA, 19 nt, Homo sapiens
  misc_RNA (1)...(19): siRNA sense strand
uaaaguaccaccuccuguu

SEQ ID NO: 1871766 - RNA, 19 nt, Homo sapiens
  misc_RNA (1)...(19): siRNA sense strand
ggagaaccaugaaaacgaa

SEQ ID NO: 1871767 - RNA, 19 nt, Homo sapiens
  misc_RNA (1)...(19): siRNA sense strand
gauaaggagggauauguuc

SEQ ID NO: 1871768 - RNA, 19 nt, Homo sapiens
  misc_RNA (1)...(19): siRNA sense strand
ggaaugccaguacagagaa

SEQ ID NO: 1871769 - RNA, 19 nt, Homo sapiens
  misc_RNA (1)...(19): siRNA sense strand
gaaauccagaauccauauu

SEQ ID NO: 1871770 - RNA, 19 nt, Homo sapiens
  misc_RNA (1)...(19): siRNA sense strand
ccaucucugucccaucaua

SEQ ID NO: 1871771 - RNA, 19 nt, Homo sapiens
  misc_RNA (1)...(19): siRNA sense strand
ggccaaauauucagaagcu

SEQ ID NO: 1871772 - RNA, 19 nt, Homo sapiens
  misc_RNA (1)...(19): siRNA sense strand
ccuaaugggccaaauauuc

SEQ ID NO: 1871773 - RNA, 19 nt, Homo sapiens
  misc_RNA (1)...(19): siRNA sense strand
gcagcuaagaaacaaauug

SEQ ID NO: 1871774 - RNA, 19 nt, Homo sapiens
  misc_RNA (1)...(19): siRNA sense strand
augaugagcugcccaugaa

SEQ ID NO: 1871775 - RNA, 19 nt, Homo sapiens
  misc_RNA (1)...(19): siRNA sense strand
agaugggcauaaugaauaa

SEQ ID NO: 1871776 - RNA, 19 nt, Homo sapiens
  misc_RNA (1)...(19): siRNA sense strand
ccaauuucuuuauggaguu

SEQ ID NO: 1871777 - RNA, 19 nt, Homo sapiens
  misc_RNA (1)...(19): siRNA sense strand
accaaggccucuaaagaaa

SEQ ID NO: 1871778 - RNA, 19 nt, Homo sapiens
  misc_RNA (1)...(19): siRNA sense strand
agagggaguguuugaauaa

SEQ ID NO: 1871779 - RNA, 19 nt, Homo sapiens
  misc_RNA (1)...(19): siRNA sense strand
gagcuugaucgccucuaua

SEQ ID NO: 1871780 - RNA, 19 nt, Homo sapiens
  misc_RNA (1)...(19): siRNA sense strand
gccaugaccuacagugaca

SEQ ID NO: 1871781 - RNA, 19 nt, Homo sapiens
  misc_RNA (1)...(19): siRNA sense strand
uuaaguuccugguacaguu

SEQ ID NO: 1871782 - RNA, 19 nt, Homo sapiens
  misc_RNA (1)...(19): siRNA sense strand
gacccaagccugcccaaug

SEQ ID NO: 1871783 - RNA, 19 nt, Homo sapiens
  misc_RNA (1)...(19): siRNA sense strand
guccagaaccugaaacaga

SEQ ID NO: 1871784 - RNA, 19 nt, Homo sapiens
  misc_RNA (1)...(19): siRNA sense strand
gauuggaguccuucaaaug

SEQ ID NO: 1871785 - RNA, 19 nt, Homo sapiens
  misc_RNA (1)...(19): siRNA sense strand
cagcuaagaaacaaauuga

SEQ ID NO: 1871786 - RNA, 19 nt, Homo sapiens
  misc_RNA (1)...(19): siRNA sense strand
ggagaaagagaagaaagug

SEQ ID NO: 1871787 - RNA, 19 nt, Homo sapiens
  misc_RNA (1)...(19): siRNA sense strand
uguaaaugcugcugauagu

SEQ ID NO: 1871788 - RNA, 19 nt, Homo sapiens
  misc_RNA (1)...(19): siRNA sense strand
acccaagccugcccaauga

SEQ ID NO: 1871789 - RNA, 19 nt, Homo sapiens
  misc_RNA (1)...(19): siRNA sense strand
gggaaugccaguacagaga

SEQ ID NO: 1871790 - RNA, 19 nt, Homo sapiens
  misc_RNA (1)...(19): siRNA sense strand
acucagcccaacuaaauua

SEQ ID NO: 1871791 - RNA, 19 nt, Homo sapiens
  misc_RNA (1)...(19): siRNA sense strand
gagccuguuucuucaguuc

SEQ ID NO: 1871792 - RNA, 19 nt, Homo sapiens
  misc_RNA (1)...(19): siRNA sense strand
gcaguagaccaguccaaug

SEQ ID NO: 1871793 - RNA, 19 nt, Homo sapiens
  misc_RNA (1)...(19): siRNA sense strand
gugcguccguucucaaugu

SEQ ID NO: 1871794 - RNA, 19 nt, Homo sapiens
  misc_RNA (1)...(19): siRNA sense strand
ggagaagaugggcauaaug

SEQ ID NO: 1871795 - RNA, 19 nt, Homo sapiens
  misc_RNA (1)...(19): siRNA sense strand
gagcagcgcuggaucaaga

SEQ ID NO: 1871796 - RNA, 19 nt, Homo sapiens
  misc_RNA (1)...(19): siRNA sense strand
ggacuuggccuacgucugu

SEQ ID NO: 1871797 - RNA, 19 nt, Homo sapiens
  misc_RNA (1)...(19): siRNA sense strand
cgacaaacagcccacaauu

SEQ ID NO: 1871798 - RNA, 19 nt, Homo sapiens
  misc_RNA (1)...(19): siRNA sense strand
ucaccgacgucgacauuga

SEQ ID NO: 1871799 - RNA, 19 nt, Homo sapiens
  misc_RNA (1)...(19): siRNA sense strand
gaucaccgacgucgacauu

SEQ ID NO: 1871800 - RNA, 19 nt, Homo sapiens
  misc_RNA (1)...(19): siRNA sense strand
gaaguucucccgagucaag

SEQ ID NO: 1871801 - RNA, 19 nt, Homo sapiens
  misc_RNA (1)...(19): siRNA sense strand
gacaaacagcccacaauuc

SEQ ID NO: 1871802 - RNA, 19 nt, Homo sapiens
  misc_RNA (1)...(19): siRNA sense strand
uaaaggcuaugcagcuauc

SEQ ID NO: 1871803 - RNA, 19 nt, Homo sapiens
  misc_RNA (1)...(19): siRNA sense strand
gggcaugcuucgggaauug

SEQ ID NO: 1871804 - RNA, 19 nt, Homo sapiens
  misc_RNA (1)...(19): siRNA sense strand
aaacagcccacaauucuca

SEQ ID NO: 1871805 - RNA, 19 nt, Homo sapiens
  misc_RNA (1)...(19): siRNA sense strand
acgaggcgcugguggauga

SEQ ID NO: 1871806 - RNA, 19 nt, Homo sapiens
  misc_RNA (1)...(19): siRNA sense strand
gaccauggccgucuucuac

SEQ ID NO: 1871807 - RNA, 19 nt, Homo sapiens
  misc_RNA (1)...(19): siRNA sense strand
ugggagaaaugguccaaga

SEQ ID NO: 1871808 - RNA, 19 nt, Homo sapiens
  misc_RNA (1)...(19): siRNA sense strand
agaacugccuggcuguuga

SEQ ID NO: 1871809 - RNA, 19 nt, Homo sapiens
  misc_RNA (1)...(19): siRNA sense strand
gaaccacggcggugaagca

SEQ ID NO: 1871810 - RNA, 19 nt, Homo sapiens
  misc_RNA (1)...(19): siRNA sense strand
acaaacagcccacaauucu

SEQ ID NO: 1871811 - RNA, 19 nt, Homo sapiens
  misc_RNA (1)...(19): siRNA sense strand
caccgucgcucacgcuguu

SEQ ID NO: 1871812 - RNA, 19 nt, Homo sapiens
  misc_RNA (1)...(19): siRNA sense strand
gaacugccuggcuguugaa

SEQ ID NO: 1871813 - RNA, 19 nt, Homo sapiens
  misc_RNA (1)...(19): siRNA sense strand
gcucaagucgcccaacaga

SEQ ID NO: 1871814 - RNA, 19 nt, Homo sapiens
  misc_RNA (1)...(19): siRNA sense strand
caaccgcaaggacaaguuu

SEQ ID NO: 1871815 - RNA, 19 nt, Homo sapiens
  misc_RNA (1)...(19): siRNA sense strand
gcccacaauucucaaaugg

SEQ ID NO: 1871816 - RNA, 19 nt, Homo sapiens
  misc_RNA (1)...(19): siRNA sense strand
gaauuugugcuggacauga

SEQ ID NO: 1871817 - RNA, 19 nt, Homo sapiens
  misc_RNA (1)...(19): siRNA sense strand
acaccaagcucuuccucau

SEQ ID NO: 1871818 - RNA, 19 nt, Homo sapiens
  misc_RNA (1)...(19): siRNA sense strand
gcggaccaccuggcuaaua

SEQ ID NO: 1871819 - RNA, 19 nt, Homo sapiens
  misc_RNA (1)...(19): siRNA sense strand
gaucugcugucgcgaugag

SEQ ID NO: 1871820 - RNA, 19 nt, Homo sapiens
  misc_RNA (1)...(19): siRNA sense strand
ucaccaagcucuggaucug

SEQ ID NO: 1871821 - RNA, 19 nt, Homo sapiens
  misc_RNA (1)...(19): siRNA sense strand
uacagagccugguggagaa

SEQ ID NO: 1871822 - RNA, 19 nt, Homo sapiens
  misc_RNA (1)...(19): siRNA sense strand
cuuaaaggcuaugcagcua

SEQ ID NO: 1871823 - RNA, 19 nt, Homo sapiens
  misc_RNA (1)...(19): siRNA sense strand
ggaccugacccgcaugauc

SEQ ID NO: 1871824 - RNA, 19 nt, Homo sapiens
  misc_RNA (1)...(19): siRNA sense strand
caggugggaugauggacuu

SEQ ID NO: 1871825 - RNA, 19 nt, Homo sapiens
  misc_RNA (1)...(19): siRNA sense strand
cggaccaccuggcuaauag

SEQ ID NO: 1871826 - RNA, 19 nt, Homo sapiens
  misc_RNA (1)...(19): siRNA sense strand
ucaaauggcggauccuauc

SEQ ID NO: 1871827 - RNA, 19 nt, Homo sapiens
  misc_RNA (1)...(19): siRNA sense strand
ugaccgagaucugcaccaa

SEQ ID NO: 1871828 - RNA, 19 nt, Homo sapiens
  misc_RNA (1)...(19): siRNA sense strand
gauccugcccucccuguuc

SEQ ID NO: 1871829 - RNA, 19 nt, Homo sapiens
  misc_RNA (1)...(19): siRNA sense strand
gggaauugaugguggucau

SEQ ID NO: 1871830 - RNA, 19 nt, Homo sapiens
  misc_RNA (1)...(19): siRNA sense strand
accgagaucugcaccaaga

SEQ ID NO: 1871831 - RNA, 19 nt, Homo sapiens
  misc_RNA (1)...(19): siRNA sense strand
ccugggaccugcacucgau

SEQ ID NO: 1871832 - RNA, 19 nt, Homo sapiens
  misc_RNA (1)...(19): siRNA sense strand
uguccuggcugcacaaugg

SEQ ID NO: 1871833 - RNA, 19 nt, Homo sapiens
  misc_RNA (1)...(19): siRNA sense strand
caagguggccagcgacaca

SEQ ID NO: 1871834 - RNA, 19 nt, Homo sapiens
  misc_RNA (1)...(19): siRNA sense strand
ucaagucgcccaacagaac

SEQ ID NO: 1871835 - RNA, 19 nt, Homo sapiens
  misc_RNA (1)...(19): siRNA sense strand
gcgacaaacagcccacaau

SEQ ID NO: 1871836 - RNA, 19 nt, Homo sapiens
  misc_RNA (1)...(19): siRNA sense strand
aauuugugcuggacaugaa

SEQ ID NO: 1871837 - RNA, 19 nt, Homo sapiens
  misc_RNA (1)...(19): siRNA sense strand
caagacggaggaauuugug

SEQ ID NO: 1871838 - RNA, 19 nt, Homo sapiens
  misc_RNA (1)...(19): siRNA sense strand
ucaagacggaggaauuugu

SEQ ID NO: 1871839 - RNA, 19 nt, Homo sapiens
  misc_RNA (1)...(19): siRNA sense strand
gcacgugcagcccaguaug

SEQ ID NO: 1871840 - RNA, 19 nt, Homo sapiens
  misc_RNA (1)...(19): siRNA sense strand
ucaacacgccugacaagag

SEQ ID NO: 1871841 - RNA, 19 nt, Homo sapiens
  misc_RNA (1)...(19): siRNA sense strand
gaaaucucaucgccuucac

SEQ ID NO: 1871842 - RNA, 19 nt, Homo sapiens
  misc_RNA (1)...(19): siRNA sense strand
cgaaaucucaucgccuuca

SEQ ID NO: 1871843 - RNA, 19 nt, Homo sapiens
  misc_RNA (1)...(19): siRNA sense strand
uggcggaccaccuggcuaa

SEQ ID NO: 1871844 - RNA, 19 nt, Homo sapiens
  misc_RNA (1)...(19): siRNA sense strand
ugaggaagccccugccuuu

SEQ ID NO: 1871845 - RNA, 19 nt, Homo sapiens
  misc_RNA (1)...(19): siRNA sense strand
cgacgucgacauugacaag

SEQ ID NO: 1871846 - RNA, 19 nt, Homo sapiens
  misc_RNA (1)...(19): siRNA sense strand
cgucgcccgugcaguucua

SEQ ID NO: 1871847 - RNA, 19 nt, Homo sapiens
  misc_RNA (1)...(19): siRNA sense strand
ggccagcgacacacaguuc

SEQ ID NO: 1871848 - RNA, 19 nt, Homo sapiens
  misc_RNA (1)...(19): siRNA sense strand
caucacccaccucaaguuc

SEQ ID NO: 1871849 - RNA, 19 nt, Homo sapiens
  misc_RNA (1)...(19): siRNA sense strand
agaagcugcacgaggagua

SEQ ID NO: 1871850 - RNA, 19 nt, Homo sapiens
  misc_RNA (1)...(19): siRNA sense strand
caagaacugccuggcuguu

SEQ ID NO: 1871851 - RNA, 19 nt, Homo sapiens
  misc_RNA (1)...(19): siRNA sense strand
caccaacaccgaccucaag

SEQ ID NO: 1871852 - RNA, 19 nt, Homo sapiens
  misc_RNA (1)...(19): siRNA sense strand
uauacggccaccucggaua

SEQ ID NO: 1871853 - RNA, 19 nt, Homo sapiens
  misc_RNA (1)...(19): siRNA sense strand
gaacugagcuuuauaagag

SEQ ID NO: 1871854 - RNA, 19 nt, Homo sapiens
  misc_RNA (1)...(19): siRNA sense strand
gcaaaucuuucaucaacua

SEQ ID NO: 1871855 - RNA, 19 nt, Homo sapiens
  misc_RNA (1)...(19): siRNA sense strand
gcagagaucuuugcagaaa

SEQ ID NO: 1871856 - RNA, 19 nt, Homo sapiens
  misc_RNA (1)...(19): siRNA sense strand
ccaaugaccugggaagaua

SEQ ID NO: 1871857 - RNA, 19 nt, Homo sapiens
  misc_RNA (1)...(19): siRNA sense strand
gagaagguauuuccucuug

SEQ ID NO: 1871858 - RNA, 19 nt, Homo sapiens
  misc_RNA (1)...(19): siRNA sense strand
acucaaagcuuuaucguuu

SEQ ID NO: 1871859 - RNA, 19 nt, Homo sapiens
  misc_RNA (1)...(19): siRNA sense strand
ggacucuucugugauguua

SEQ ID NO: 1871860 - RNA, 19 nt, Homo sapiens
  misc_RNA (1)...(19): siRNA sense strand
gucagaagaucauuacuuu

SEQ ID NO: 1871861 - RNA, 19 nt, Homo sapiens
  misc_RNA (1)...(19): siRNA sense strand
gaaacaaggccaaugaaga

SEQ ID NO: 1871862 - RNA, 19 nt, Homo sapiens
  misc_RNA (1)...(19): siRNA sense strand
caucagcucuucucuguug

SEQ ID NO: 1871863 - RNA, 19 nt, Homo sapiens
  misc_RNA (1)...(19): siRNA sense strand
ggaagggucuauuauaucu

SEQ ID NO: 1871864 - RNA, 19 nt, Homo sapiens
  misc_RNA (1)...(19): siRNA sense strand
ggaggaggaggaaauaaua

SEQ ID NO: 1871865 - RNA, 19 nt, Homo sapiens
  misc_RNA (1)...(19): siRNA sense strand
gcugauaccucccaaaaua

SEQ ID NO: 1871866 - RNA, 19 nt, Homo sapiens
  misc_RNA (1)...(19): siRNA sense strand
gcagcgagauggcaaacaa

SEQ ID NO: 1871867 - RNA, 19 nt, Homo sapiens
  misc_RNA (1)...(19): siRNA sense strand
caaaucauaugcccucuuc

SEQ ID NO: 1871868 - RNA, 19 nt, Homo sapiens
  misc_RNA (1)...(19): siRNA sense strand
gauggaagggucuauuaua

SEQ ID NO: 1871869 - RNA, 19 nt, Homo sapiens
  misc_RNA (1)...(19): siRNA sense strand
guacagcgcaggaugguaa

SEQ ID NO: 1871870 - RNA, 19 nt, Homo sapiens
  misc_RNA (1)...(19): siRNA sense strand
uaaagucaguucauaguca

SEQ ID NO: 1871871 - RNA, 19 nt, Homo sapiens
  misc_RNA (1)...(19): siRNA sense strand
cauaugcccucuucaauca

SEQ ID NO: 1871872 - RNA, 19 nt, Homo sapiens
  misc_RNA (1)...(19): siRNA sense strand
uaaaucagggcaguuauua

SEQ ID NO: 1871873 - RNA, 19 nt, Homo sapiens
  misc_RNA (1)...(19): siRNA sense strand
gaugaucacuaugaguuaa

SEQ ID NO: 1871874 - RNA, 19 nt, Homo sapiens
  misc_RNA (1)...(19): siRNA sense strand
agauacagcuacugaaauu

SEQ ID NO: 1871875 - RNA, 19 nt, Homo sapiens
  misc_RNA (1)...(19): siRNA sense strand
guucuucacuuccaaauca

SEQ ID NO: 1871876 - RNA, 19 nt, Homo sapiens
  misc_RNA (1)...(19): siRNA sense strand
caucugacucccaauauua

SEQ ID NO: 1871877 - RNA, 19 nt, Homo sapiens
  misc_RNA (1)...(19): siRNA sense strand
gagcgaagguaucaguguu

SEQ ID NO: 1871878 - RNA, 19 nt, Homo sapiens
  misc_RNA (1)...(19): siRNA sense strand
uggcacagguccaaucuaa

SEQ ID NO: 1871879 - RNA, 19 nt, Homo sapiens
  misc_RNA (1)...(19): siRNA sense strand
uaucacaccuacucagaaa

SEQ ID NO: 1871880 - RNA, 19 nt, Homo sapiens
  misc_RNA (1)...(19): siRNA sense strand
cagauuugcuugaugaguu

SEQ ID NO: 1871881 - RNA, 19 nt, Homo sapiens
  misc_RNA (1)...(19): siRNA sense strand
gaagguauuuccucuugca

SEQ ID NO: 1871882 - RNA, 19 nt, Homo sapiens
  misc_RNA (1)...(19): siRNA sense strand
gccauggacucuucuguga

SEQ ID NO: 1871883 - RNA, 19 nt, Homo sapiens
  misc_RNA (1)...(19): siRNA sense strand
ucaauuuacuugugcagaa

SEQ ID NO: 1871884 - RNA, 19 nt, Homo sapiens
  misc_RNA (1)...(19): siRNA sense strand
gcaggaaaaugauucaauu

SEQ ID NO: 1871885 - RNA, 19 nt, Homo sapiens
  misc_RNA (1)...(19): siRNA sense strand
caagaaccacuuuccaauu

SEQ ID NO: 1871886 - RNA, 19 nt, Homo sapiens
  misc_RNA (1)...(19): siRNA sense strand
ccaugcaggucuuuacaaa

SEQ ID NO: 1871887 - RNA, 19 nt, Homo sapiens
  misc_RNA (1)...(19): siRNA sense strand
gcaaacaaacguaugaaag

SEQ ID NO: 1871888 - RNA, 19 nt, Homo sapiens
  misc_RNA (1)...(19): siRNA sense strand
gguauuuccucuugcagaa

SEQ ID NO: 1871889 - RNA, 19 nt, Homo sapiens
  misc_RNA (1)...(19): siRNA sense strand
agagaucuuugcagaaauu

SEQ ID NO: 1871890 - RNA, 19 nt, Homo sapiens
  misc_RNA (1)...(19): siRNA sense strand
gcagauuccuacacuucuu

SEQ ID NO: 1871891 - RNA, 19 nt, Homo sapiens
  misc_RNA (1)...(19): siRNA sense strand
gaugaugaugacacuauua

SEQ ID NO: 1871892 - RNA, 19 nt, Homo sapiens
  misc_RNA (1)...(19): siRNA sense strand
gcacuauuccugcaaugaa

SEQ ID NO: 1871893 - RNA, 19 nt, Homo sapiens
  misc_RNA (1)...(19): siRNA sense strand
aagaaccacuuuccaauuc

SEQ ID NO: 1871894 - RNA, 19 nt, Homo sapiens
  misc_RNA (1)...(19): siRNA sense strand
caaacaaacguaugaaagu

SEQ ID NO: 1871895 - RNA, 19 nt, Homo sapiens
  misc_RNA (1)...(19): siRNA sense strand
ugccgaagauuaugaaaug

SEQ ID NO: 1871896 - RNA, 19 nt, Homo sapiens
  misc_RNA (1)...(19): siRNA sense strand
cagaagaucauuacuuuag

SEQ ID NO: 1871897 - RNA, 19 nt, Homo sapiens
  misc_RNA (1)...(19): siRNA sense strand
cuacagacauucaguacuc

SEQ ID NO: 1871898 - RNA, 19 nt, Homo sapiens
  misc_RNA (1)...(19): siRNA sense strand
gauggaucauuaauacaga

SEQ ID NO: 1871899 - RNA, 19 nt, Homo sapiens
  misc_RNA (1)...(19): siRNA sense strand
ucaaagaugacccugauga

SEQ ID NO: 1871900 - RNA, 19 nt, Homo sapiens
  misc_RNA (1)...(19): siRNA sense strand
aaugaaggaugaugguauu

SEQ ID NO: 1871901 - RNA, 19 nt, Homo sapiens
  misc_RNA (1)...(19): siRNA sense strand
agauuugcuugaugaguua

SEQ ID NO: 1871902 - RNA, 19 nt, Homo sapiens
  misc_RNA (1)...(19): siRNA sense strand
uggcaaaucuuucaucaac

SEQ ID NO: 1871903 - RNA, 19 nt, Homo sapiens
  misc_RNA (1)...(19): siRNA sense strand
cauggacucuucugugaug

SEQ ID NO: 1871904 - RNA, 19 nt, Homo sapiens
  misc_RNA (1)...(19): siRNA sense strand
agaaguauccgugccguua

SEQ ID NO: 1871905 - RNA, 19 nt, Homo sapiens
  misc_RNA (1)...(19): siRNA sense strand
gaaggcuuaucgacugguu

SEQ ID NO: 1871906 - RNA, 19 nt, Homo sapiens
  misc_RNA (1)...(19): siRNA sense strand
gcaguuauuaggagugaaa

SEQ ID NO: 1871907 - RNA, 19 nt, Homo sapiens
  misc_RNA (1)...(19): siRNA sense strand
ggucagaagaucauuacuu

SEQ ID NO: 1871908 - RNA, 19 nt, Homo sapiens
  misc_RNA (1)...(19): siRNA sense strand
cugcugaacuccuugaaug

SEQ ID NO: 1871909 - RNA, 19 nt, Homo sapiens
  misc_RNA (1)...(19): siRNA sense strand
aaagaugaagcccaagaua

SEQ ID NO: 1871910 - RNA, 19 nt, Homo sapiens
  misc_RNA (1)...(19): siRNA sense strand
gcaguacugaguuugaauu

SEQ ID NO: 1871911 - RNA, 19 nt, Homo sapiens
  misc_RNA (1)...(19): siRNA sense strand
uccgauagaucaagcacua

SEQ ID NO: 1871912 - RNA, 19 nt, Homo sapiens
  misc_RNA (1)...(19): siRNA sense strand
gcgaagguaucaguguuug

SEQ ID NO: 1871913 - RNA, 19 nt, Homo sapiens
  misc_RNA (1)...(19): siRNA sense strand
gauaauggggcuacuauaa

SEQ ID NO: 1871914 - RNA, 19 nt, Homo sapiens
  misc_RNA (1)...(19): siRNA sense strand
gagacuuugccgaguaaua

SEQ ID NO: 1871915 - RNA, 19 nt, Homo sapiens
  misc_RNA (1)...(19): siRNA sense strand
aaggagacuuugccgagua

SEQ ID NO: 1871916 - RNA, 19 nt, Homo sapiens
  misc_RNA (1)...(19): siRNA sense strand
uaacagauggcaguacuga

SEQ ID NO: 1871917 - RNA, 19 nt, Homo sapiens
  misc_RNA (1)...(19): siRNA sense strand
gcggagacauuuuaacauu

SEQ ID NO: 1871918 - RNA, 19 nt, Homo sapiens
  misc_RNA (1)...(19): siRNA sense strand
caaagaugacccugaugaa

SEQ ID NO: 1871919 - RNA, 19 nt, Homo sapiens
  misc_RNA (1)...(19): siRNA sense strand
caagguuuaugcaaauauc

SEQ ID NO: 1871920 - RNA, 19 nt, Homo sapiens
  misc_RNA (1)...(19): siRNA sense strand
gaaauugaaggcuuaucga

SEQ ID NO: 1871921 - RNA, 19 nt, Homo sapiens
  misc_RNA (1)...(19): siRNA sense strand
aagaugaagcccaagauaa

SEQ ID NO: 1871922 - RNA, 19 nt, Homo sapiens
  misc_RNA (1)...(19): siRNA sense strand
gcaaugaaggaugauggua

SEQ ID NO: 1871923 - RNA, 19 nt, Homo sapiens
  misc_RNA (1)...(19): siRNA sense strand
agacuuugccgaguaauaa

SEQ ID NO: 1871924 - RNA, 19 nt, Homo sapiens
  misc_RNA (1)...(19): siRNA sense strand
guugaacugagcuuuauaa

SEQ ID NO: 1871925 - RNA, 19 nt, Homo sapiens
  misc_RNA (1)...(19): siRNA sense strand
cagaauaucgcacaaagca

SEQ ID NO: 1871926 - RNA, 19 nt, Homo sapiens
  misc_RNA (1)...(19): siRNA sense strand
aaacaaggccaaugaagag

SEQ ID NO: 1871927 - RNA, 19 nt, Homo sapiens
  misc_RNA (1)...(19): siRNA sense strand
caccaaaugucaguucuuc

SEQ ID NO: 1871928 - RNA, 19 nt, Homo sapiens
  misc_RNA (1)...(19): siRNA sense strand
acacaucugacucccaaua

SEQ ID NO: 1871929 - RNA, 19 nt, Homo sapiens
  misc_RNA (1)...(19): siRNA sense strand
gggcuacuauaaugccuau

SEQ ID NO: 1871930 - RNA, 19 nt, Homo sapiens
  misc_RNA (1)...(19): siRNA sense strand
gggcaguuauuaggaguga

SEQ ID NO: 1871931 - RNA, 19 nt, Homo sapiens
  misc_RNA (1)...(19): siRNA sense strand
caggaaacaaggccaauga

SEQ ID NO: 1871932 - RNA, 19 nt, Homo sapiens
  misc_RNA (1)...(19): siRNA sense strand
cucaaagcuuuaucguuua

SEQ ID NO: 1871933 - RNA, 19 nt, Homo sapiens
  misc_RNA (1)...(19): siRNA sense strand
ggugaagauacuuaugaua

SEQ ID NO: 1871934 - RNA, 19 nt, Homo sapiens
  misc_RNA (1)...(19): siRNA sense strand
gagggucagaagaucauua

SEQ ID NO: 1871935 - RNA, 19 nt, Homo sapiens
  misc_RNA (1)...(19): siRNA sense strand
cagaagaugcagauuccua

SEQ ID NO: 1871936 - RNA, 19 nt, Homo sapiens
  misc_RNA (1)...(19): siRNA sense strand
aggaggaaauaauagauga

SEQ ID NO: 1871937 - RNA, 19 nt, Homo sapiens
  misc_RNA (1)...(19): siRNA sense strand
ggaaacaaggccaaugaag

SEQ ID NO: 1871938 - RNA, 19 nt, Homo sapiens
  misc_RNA (1)...(19): siRNA sense strand
ccgagauucugcccacaaa

SEQ ID NO: 1871939 - RNA, 19 nt, Homo sapiens
  misc_RNA (1)...(19): siRNA sense strand
auggaagggucuauuauau

SEQ ID NO: 1871940 - RNA, 19 nt, Homo sapiens
  misc_RNA (1)...(19): siRNA sense strand
aaucagacaccacuuucua

SEQ ID NO: 1871941 - RNA, 19 nt, Homo sapiens
  misc_RNA (1)...(19): siRNA sense strand
gaucauuguuaccgauucu

SEQ ID NO: 1871942 - RNA, 19 nt, Homo sapiens
  misc_RNA (1)...(19): siRNA sense strand
cuacaucuacucagaacaa

SEQ ID NO: 1871943 - RNA, 19 nt, Homo sapiens
  misc_RNA (1)...(19): siRNA sense strand
ggaugaugguauuggguau

SEQ ID NO: 1871944 - RNA, 19 nt, Homo sapiens
  misc_RNA (1)...(19): siRNA sense strand
caaugaaggaugaugguau

SEQ ID NO: 1871945 - RNA, 19 nt, Homo sapiens
  misc_RNA (1)...(19): siRNA sense strand
aggccagacuugagaauga

SEQ ID NO: 1871946 - RNA, 19 nt, Homo sapiens
  misc_RNA (1)...(19): siRNA sense strand
gcaagguuuaugcaaauau

SEQ ID NO: 1871947 - RNA, 19 nt, Homo sapiens
  misc_RNA (1)...(19): siRNA sense strand
uuaaaucagacaccacuuu

SEQ ID NO: 1871948 - RNA, 19 nt, Homo sapiens
  misc_RNA (1)...(19): siRNA sense strand
caaacacaaggaagugaaa

SEQ ID NO: 1871949 - RNA, 19 nt, Homo sapiens
  misc_RNA (1)...(19): siRNA sense strand
uacugaaauugaaggcuua

SEQ ID NO: 1871950 - RNA, 19 nt, Homo sapiens
  misc_RNA (1)...(19): siRNA sense strand
caagcacuauuccugcaau

SEQ ID NO: 1871951 - RNA, 19 nt, Homo sapiens
  misc_RNA (1)...(19): siRNA sense strand
aaagucaguucauagucaa

SEQ ID NO: 1871952 - RNA, 19 nt, Homo sapiens
  misc_RNA (1)...(19): siRNA sense strand
ggagacauuuuaacauuca

SEQ ID NO: 1871953 - RNA, 19 nt, Homo sapiens
  misc_RNA (1)...(19): siRNA sense strand
ugaaugagauugagaagga

SEQ ID NO: 1871954 - RNA, 19 nt, Homo sapiens
  misc_RNA (1)...(19): siRNA sense strand
gcaaggcacugcagaaacu

SEQ ID NO: 1871955 - RNA, 19 nt, Homo sapiens
  misc_RNA (1)...(19): siRNA sense strand
uuaugaagcuguccuuuga

SEQ ID NO: 1871956 - RNA, 19 nt, Homo sapiens
  misc_RNA (1)...(19): siRNA sense strand
gguguuuccugcugaauga

SEQ ID NO: 1871957 - RNA, 19 nt, Homo sapiens
  misc_RNA (1)...(19): siRNA sense strand
gcaacucgcuggccaucau

SEQ ID NO: 1871958 - RNA, 19 nt, Homo sapiens
  misc_RNA (1)...(19): siRNA sense strand
gcaaggaggcagagaagga

SEQ ID NO: 1871959 - RNA, 19 nt, Homo sapiens
  misc_RNA (1)...(19): siRNA sense strand
gagaagcucugguacuacu

SEQ ID NO: 1871960 - RNA, 19 nt, Homo sapiens
  misc_RNA (1)...(19): siRNA sense strand
caacaaggccacccugugu

SEQ ID NO: 1871961 - RNA, 19 nt, Homo sapiens
  misc_RNA (1)...(19): siRNA sense strand
gagcaagguucccgagaag

SEQ ID NO: 1871962 - RNA, 19 nt, Homo sapiens
  misc_RNA (1)...(19): siRNA sense strand
ugaagcaccuacagggaaa

SEQ ID NO: 1871963 - RNA, 19 nt, Homo sapiens
  misc_RNA (1)...(19): siRNA sense strand
aggagaagcucugguacua

SEQ ID NO: 1871964 - RNA, 19 nt, Homo sapiens
  misc_RNA (1)...(19): siRNA sense strand
gcugaaggcccuacagaug

SEQ ID NO: 1871965 - RNA, 19 nt, Homo sapiens
  misc_RNA (1)...(19): siRNA sense strand
ugagcaagguucccgagaa

SEQ ID NO: 1871966 - RNA, 19 nt, Homo sapiens
  misc_RNA (1)...(19): siRNA sense strand
ccgccacccuccuggaaua

SEQ ID NO: 1871967 - RNA, 19 nt, Homo sapiens
  misc_RNA (1)...(19): siRNA sense strand
acuaugagaugcacaagau

SEQ ID NO: 1871968 - RNA, 19 nt, Homo sapiens
  misc_RNA (1)...(19): siRNA sense strand
gcacacagcacagagaaca

SEQ ID NO: 1871969 - RNA, 19 nt, Homo sapiens
  misc_RNA (1)...(19): siRNA sense strand
ggacaucaccagccuguac

SEQ ID NO: 1871970 - RNA, 19 nt, Homo sapiens
  misc_RNA (1)...(19): siRNA sense strand
agaaggagaagcucuggua

SEQ ID NO: 1871971 - RNA, 19 nt, Homo sapiens
  misc_RNA (1)...(19): siRNA sense strand
ggcagcagcuugaguucga

SEQ ID NO: 1871972 - RNA, 19 nt, Homo sapiens
  misc_RNA (1)...(19): siRNA sense strand
gcuccgggaucacaacugu

SEQ ID NO: 1871973 - RNA, 19 nt, Homo sapiens
  misc_RNA (1)...(19): siRNA sense strand
ccacguggcacacagaaga

SEQ ID NO: 1871974 - RNA, 19 nt, Homo sapiens
  misc_RNA (1)...(19): siRNA sense strand
ccacugaggaggccgugua

SEQ ID NO: 1871975 - RNA, 19 nt, Homo sapiens
  misc_RNA (1)...(19): siRNA sense strand
uggagcagauugacaagga

SEQ ID NO: 1871976 - RNA, 19 nt, Homo sapiens
  misc_RNA (1)...(19): siRNA sense strand
acagagacgucgggcauga

SEQ ID NO: 1871977 - RNA, 19 nt, Homo sapiens
  misc_RNA (1)...(19): siRNA sense strand
guaaucuggugcacuccaa

SEQ ID NO: 1871978 - RNA, 19 nt, Homo sapiens
  misc_RNA (1)...(19): siRNA sense strand
ugaaggcccuacagaugga

SEQ ID NO: 1871979 - RNA, 19 nt, Homo sapiens
  misc_RNA (1)...(19): siRNA sense strand
gggccgacaucaacagcaa

SEQ ID NO: 1871980 - RNA, 19 nt, Homo sapiens
  misc_RNA (1)...(19): siRNA sense strand
gcagguugacuaugagaug

SEQ ID NO: 1871981 - RNA, 19 nt, Homo sapiens
  misc_RNA (1)...(19): siRNA sense strand
ccagccggcuugaccuuga

SEQ ID NO: 1871982 - RNA, 19 nt, Homo sapiens
  misc_RNA (1)...(19): siRNA sense strand
gcacgccggucaacuucuc

SEQ ID NO: 1871983 - RNA, 19 nt, Homo sapiens
  misc_RNA (1)...(19): siRNA sense strand
ugagcacccugaccuacaa

SEQ ID NO: 1871984 - RNA, 19 nt, Homo sapiens
  misc_RNA (1)...(19): siRNA sense strand
ggcaggagcuaagggacaa

SEQ ID NO: 1871985 - RNA, 19 nt, Homo sapiens
  misc_RNA (1)...(19): siRNA sense strand
guuaugaagcuguccuuug

SEQ ID NO: 1871986 - RNA, 19 nt, Homo sapiens
  misc_RNA (1)...(19): siRNA sense strand
cagcaaggcacugcagaaa

SEQ ID NO: 1871987 - RNA, 19 nt, Homo sapiens
  misc_RNA (1)...(19): siRNA sense strand
gaagcuguccuuugaugag

SEQ ID NO: 1871988 - RNA, 19 nt, Homo sapiens
  misc_RNA (1)...(19): siRNA sense strand
agaaggaggagaaggagaa

SEQ ID NO: 1871989 - RNA, 19 nt, Homo sapiens
  misc_RNA (1)...(19): siRNA sense strand
cgacagcuaaccuucauca

SEQ ID NO: 1871990 - RNA, 19 nt, Homo sapiens
  misc_RNA (1)...(19): siRNA sense strand
ccaaggaguccacccugaa

SEQ ID NO: 1871991 - RNA, 19 nt, Homo sapiens
  misc_RNA (1)...(19): siRNA sense strand
cagcauccuucggaacuug

SEQ ID NO: 1871992 - RNA, 19 nt, Homo sapiens
  misc_RNA (1)...(19): siRNA sense strand
ggccaccugugcuguuaug

SEQ ID NO: 1871993 - RNA, 19 nt, Homo sapiens
  misc_RNA (1)...(19): siRNA sense strand
gacgaacagugaucuacgu

SEQ ID NO: 1871994 - RNA, 19 nt, Homo sapiens
  misc_RNA (1)...(19): siRNA sense strand
uaugagaugcacaagauga

SEQ ID NO: 1871995 - RNA, 19 nt, Homo sapiens
  misc_RNA (1)...(19): siRNA sense strand
caccugugcuguuaugaag

SEQ ID NO: 1871996 - RNA, 19 nt, Homo sapiens
  misc_RNA (1)...(19): siRNA sense strand
gcaugacccucaccaaccu

SEQ ID NO: 1871997 - RNA, 19 nt, Homo sapiens
  misc_RNA (1)...(19): siRNA sense strand
ggcgacagcuaaccuucau

SEQ ID NO: 1871998 - RNA, 19 nt, Homo sapiens
  misc_RNA (1)...(19): siRNA sense strand
agacuaugcuuccgauucg

SEQ ID NO: 1871999 - RNA, 19 nt, Homo sapiens
  misc_RNA (1)...(19): siRNA sense strand
gcacuccaagcacaagaug

SEQ ID NO: 1872000 - RNA, 19 nt, Homo sapiens
  misc_RNA (1)...(19): siRNA sense strand
ggagaagccagacgagaac

SEQ ID NO: 1872001 - RNA, 19 nt, Homo sapiens
  misc_RNA (1)...(19): siRNA sense strand
uggagaagccagacgagaa

SEQ ID NO: 1872002 - RNA, 19 nt, Homo sapiens
  misc_RNA (1)...(19): siRNA sense strand
ggccaucccucgcgcuuuu

SEQ ID NO: 1872003 - RNA, 19 nt, Homo sapiens
  misc_RNA (1)...(19): siRNA sense strand
uggagcaccuggagaagca

SEQ ID NO: 1872004 - RNA, 19 nt, Homo sapiens
  misc_RNA (1)...(19): siRNA sense strand
agacaaggacggcucaaag

SEQ ID NO: 1872005 - RNA, 19 nt, Homo sapiens
  misc_RNA (1)...(19): siRNA sense strand
cgaugcagauggaccugau

SEQ ID NO: 1872006 - RNA, 19 nt, Homo sapiens
  misc_RNA (1)...(19): siRNA sense strand
gaacuacgugcaggagaca

SEQ ID NO: 1872007 - RNA, 19 nt, Homo sapiens
  misc_RNA (1)...(19): siRNA sense strand
gaguaccgccgugccauga

SEQ ID NO: 1872008 - RNA, 19 nt, Homo sapiens
  misc_RNA (1)...(19): siRNA sense strand
ccaccugugcuguuaugaa

SEQ ID NO: 1872009 - RNA, 19 nt, Homo sapiens
  misc_RNA (1)...(19): siRNA sense strand
agacagagguccccacaca

SEQ ID NO: 1872010 - RNA, 19 nt, Homo sapiens
  misc_RNA (1)...(19): siRNA sense strand
cgaggguggugaccuggau

SEQ ID NO: 1872011 - RNA, 19 nt, Homo sapiens
  misc_RNA (1)...(19): siRNA sense strand
gcagguggaggccuugaag

SEQ ID NO: 1872012 - RNA, 19 nt, Homo sapiens
  misc_RNA (1)...(19): siRNA sense strand
gcaagguucccgagaagcu

SEQ ID NO: 1872013 - RNA, 19 nt, Homo sapiens
  misc_RNA (1)...(19): siRNA sense strand
guacugcccacgcgaacau

SEQ ID NO: 1872014 - RNA, 19 nt, Homo sapiens
  misc_RNA (1)...(19): siRNA sense strand
ugcugcagguugacuauga

SEQ ID NO: 1872015 - RNA, 19 nt, Homo sapiens
  misc_RNA (1)...(19): siRNA sense strand
agacgcaguucucgaugca

SEQ ID NO: 1872016 - RNA, 19 nt, Homo sapiens
  misc_RNA (1)...(19): siRNA sense strand
cgacaucaacagcaagaag

SEQ ID NO: 1872017 - RNA, 19 nt, Homo sapiens
  misc_RNA (1)...(19): siRNA sense strand
augaagcuguccuuugaug

SEQ ID NO: 1872018 - RNA, 19 nt, Homo sapiens
  misc_RNA (1)...(19): siRNA sense strand
guaccgccgugccaugaac

SEQ ID NO: 1872019 - RNA, 19 nt, Homo sapiens
  misc_RNA (1)...(19): siRNA sense strand
cggcagaccaccugagcaa

SEQ ID NO: 1872020 - RNA, 19 nt, Homo sapiens
  misc_RNA (1)...(19): siRNA sense strand
caagcugucgccuaccuau

SEQ ID NO: 1872021 - RNA, 19 nt, Homo sapiens
  misc_RNA (1)...(19): siRNA sense strand
cagcugaaggcccuacaga

SEQ ID NO: 1872022 - RNA, 19 nt, Homo sapiens
  misc_RNA (1)...(19): siRNA sense strand
uguacaaccucaaguucca

SEQ ID NO: 1872023 - RNA, 19 nt, Homo sapiens
  misc_RNA (1)...(19): siRNA sense strand
ccagcucgucggagaacua

SEQ ID NO: 1872024 - RNA, 19 nt, Homo sapiens
  misc_RNA (1)...(19): siRNA sense strand
ccagcaaggcacugcagaa

SEQ ID NO: 1872025 - RNA, 19 nt, Homo sapiens
  misc_RNA (1)...(19): siRNA sense strand
gcacccugaccuacaagug

SEQ ID NO: 1872026 - RNA, 19 nt, Homo sapiens
  misc_RNA (1)...(19): siRNA sense strand
caaggaguccacccugaag

SEQ ID NO: 1872027 - RNA, 19 nt, Homo sapiens
  misc_RNA (1)...(19): siRNA sense strand
gaagcucugguacuacucu

SEQ ID NO: 1872028 - RNA, 19 nt, Homo sapiens
  misc_RNA (1)...(19): siRNA sense strand
ccucaccaaccucaccuuu

SEQ ID NO: 1872029 - RNA, 19 nt, Homo sapiens
  misc_RNA (1)...(19): siRNA sense strand
ccagccaccuguccaagcu

SEQ ID NO: 1872030 - RNA, 19 nt, Homo sapiens
  misc_RNA (1)...(19): siRNA sense strand
ucaccagccuguacaaccu

SEQ ID NO: 1872031 - RNA, 19 nt, Homo sapiens
  misc_RNA (1)...(19): siRNA sense strand
gcugagcgcccuguggaau

SEQ ID NO: 1872032 - RNA, 19 nt, Homo sapiens
  misc_RNA (1)...(19): siRNA sense strand
gcaagguggagguggucuu

SEQ ID NO: 1872033 - RNA, 19 nt, Homo sapiens
  misc_RNA (1)...(19): siRNA sense strand
acagcuaaccuucaucaag

SEQ ID NO: 1872034 - RNA, 19 nt, Homo sapiens
  misc_RNA (1)...(19): siRNA sense strand
gacccagcccagccucauu

SEQ ID NO: 1872035 - RNA, 19 nt, Homo sapiens
  misc_RNA (1)...(19): siRNA sense strand
gacaaggacggcucaaagc

SEQ ID NO: 1872036 - RNA, 19 nt, Homo sapiens
  misc_RNA (1)...(19): siRNA sense strand
agauugagaaggaggagaa

SEQ ID NO: 1872037 - RNA, 19 nt, Homo sapiens
  misc_RNA (1)...(19): siRNA sense strand
agacgucgggcaugaagga

SEQ ID NO: 1872038 - RNA, 19 nt, Homo sapiens
  misc_RNA (1)...(19): siRNA sense strand
gcaguucucgaugcagaug

SEQ ID NO: 1872039 - RNA, 19 nt, Homo sapiens
  misc_RNA (1)...(19): siRNA sense strand
gcacguggagacgcaguuc

SEQ ID NO: 1872040 - RNA, 19 nt, Homo sapiens
  misc_RNA (1)...(19): siRNA sense strand
ggaaguaucugccaacaug

SEQ ID NO: 1872041 - RNA, 19 nt, Homo sapiens
  misc_RNA (1)...(19): siRNA sense strand
caaagaagauggcucgaaa

SEQ ID NO: 1872042 - RNA, 19 nt, Homo sapiens
  misc_RNA (1)...(19): siRNA sense strand
gcaaagcaguggaacauau

SEQ ID NO: 1872043 - RNA, 19 nt, Homo sapiens
  misc_RNA (1)...(19): siRNA sense strand
gcaaacaaguggaauaugc

SEQ ID NO: 1872044 - RNA, 19 nt, Homo sapiens
  misc_RNA (1)...(19): siRNA sense strand
gaagauggcucgaaaagga

SEQ ID NO: 1872045 - RNA, 19 nt, Homo sapiens
  misc_RNA (1)...(19): siRNA sense strand
gaagaggacaucccacaaa

SEQ ID NO: 1872046 - RNA, 19 nt, Homo sapiens
  misc_RNA (1)...(19): siRNA sense strand
ggacuggcauggucauuca

SEQ ID NO: 1872047 - RNA, 19 nt, Homo sapiens
  misc_RNA (1)...(19): siRNA sense strand
gaggaugguucuaaagaug

SEQ ID NO: 1872048 - RNA, 19 nt, Homo sapiens
  misc_RNA (1)...(19): siRNA sense strand
gacagaggaugguucuaaa

SEQ ID NO: 1872049 - RNA, 19 nt, Homo sapiens
  misc_RNA (1)...(19): siRNA sense strand
ggucauucaucaaguagaa

SEQ ID NO: 1872050 - RNA, 19 nt, Homo sapiens
  misc_RNA (1)...(19): siRNA sense strand
caaguuugaugaugauuuc

SEQ ID NO: 1872051 - RNA, 19 nt, Homo sapiens
  misc_RNA (1)...(19): siRNA sense strand
ggacuagaacuuaauaaag

SEQ ID NO: 1872052 - RNA, 19 nt, Homo sapiens
  misc_RNA (1)...(19): siRNA sense strand
aaucagcgaugcacacuug

SEQ ID NO: 1872053 - RNA, 19 nt, Homo sapiens
  misc_RNA (1)...(19): siRNA sense strand
ggauuugacuguguuuaug

SEQ ID NO: 1872054 - RNA, 19 nt, Homo sapiens
  misc_RNA (1)...(19): siRNA sense strand
guaaauccuucuuuguauc

SEQ ID NO: 1872055 - RNA, 19 nt, Homo sapiens
  misc_RNA (1)...(19): siRNA sense strand
ggaauaugccaaagaagau

SEQ ID NO: 1872056 - RNA, 19 nt, Homo sapiens
  misc_RNA (1)...(19): siRNA sense strand
cauggucauucaucaagua

SEQ ID NO: 1872057 - RNA, 19 nt, Homo sapiens
  misc_RNA (1)...(19): siRNA sense strand
gacccugucuuguacaugu

SEQ ID NO: 1872058 - RNA, 19 nt, Homo sapiens
  misc_RNA (1)...(19): siRNA sense strand
uaccaacucuuagaugauu

SEQ ID NO: 1872059 - RNA, 19 nt, Homo sapiens
  misc_RNA (1)...(19): siRNA sense strand
ugacuguguuuauggacua

SEQ ID NO: 1872060 - RNA, 19 nt, Homo sapiens
  misc_RNA (1)...(19): siRNA sense strand
uguaccaacucuuagauga

SEQ ID NO: 1872061 - RNA, 19 nt, Homo sapiens
  misc_RNA (1)...(19): siRNA sense strand
agacagaggaugguucuaa

SEQ ID NO: 1872062 - RNA, 19 nt, Homo sapiens
  misc_RNA (1)...(19): siRNA sense strand
gaacacaugguuuuacauu

SEQ ID NO: 1872063 - RNA, 19 nt, Homo sapiens
  misc_RNA (1)...(19): siRNA sense strand
caucguaggcugcaggauu

SEQ ID NO: 1872064 - RNA, 19 nt, Homo sapiens
  misc_RNA (1)...(19): siRNA sense strand
cauuaugccugauuccaau

SEQ ID NO: 1872065 - RNA, 19 nt, Homo sapiens
  misc_RNA (1)...(19): siRNA sense strand
guuuauggacuagaacuua

SEQ ID NO: 1872066 - RNA, 19 nt, Homo sapiens
  misc_RNA (1)...(19): siRNA sense strand
gccaagcccuccgucuauu

SEQ ID NO: 1872067 - RNA, 19 nt, Homo sapiens
  misc_RNA (1)...(19): siRNA sense strand
gcacgugcaccugucauga

SEQ ID NO: 1872068 - RNA, 19 nt, Homo sapiens
  misc_RNA (1)...(19): siRNA sense strand
aguggaauaugccaaagaa

SEQ ID NO: 1872069 - RNA, 19 nt, Homo sapiens
  misc_RNA (1)...(19): siRNA sense strand
guugcgacaucucgaauca

SEQ ID NO: 1872070 - RNA, 19 nt, Homo sapiens
  misc_RNA (1)...(19): siRNA sense strand
ugucuacgauuuggugaaa

SEQ ID NO: 1872071 - RNA, 19 nt, Homo sapiens
  misc_RNA (1)...(19): siRNA sense strand
cagaggaugguucuaaaga

SEQ ID NO: 1872072 - RNA, 19 nt, Homo sapiens
  misc_RNA (1)...(19): siRNA sense strand
caaagcaguggaacauaug

SEQ ID NO: 1872073 - RNA, 19 nt, Homo sapiens
  misc_RNA (1)...(19): siRNA sense strand
gccuguaaauccuucuuug

SEQ ID NO: 1872074 - RNA, 19 nt, Homo sapiens
  misc_RNA (1)...(19): siRNA sense strand
gguuuuacauuaccuauga

SEQ ID NO: 1872075 - RNA, 19 nt, Homo sapiens
  misc_RNA (1)...(19): siRNA sense strand
cuguaaauccuucuuugua

SEQ ID NO: 1872076 - RNA, 19 nt, Homo sapiens
  misc_RNA (1)...(19): siRNA sense strand
uggaauaugccaaagaaga

SEQ ID NO: 1872077 - RNA, 19 nt, Homo sapiens
  misc_RNA (1)...(19): siRNA sense strand
cugccaacaugaugaagaa

SEQ ID NO: 1872078 - RNA, 19 nt, Homo sapiens
  misc_RNA (1)...(19): siRNA sense strand
cuugaaguccucccugaua

SEQ ID NO: 1872079 - RNA, 19 nt, Homo sapiens
  misc_RNA (1)...(19): siRNA sense strand
ccaacaugaugaagaagag

SEQ ID NO: 1872080 - RNA, 19 nt, Homo sapiens
  misc_RNA (1)...(19): siRNA sense strand
cgauggauuugacuguguu

SEQ ID NO: 1872081 - RNA, 19 nt, Homo sapiens
  misc_RNA (1)...(19): siRNA sense strand
acacuuggcagacacaaug

SEQ ID NO: 1872082 - RNA, 19 nt, Homo sapiens
  misc_RNA (1)...(19): siRNA sense strand
gaaguaucugccaacauga

SEQ ID NO: 1872083 - RNA, 19 nt, Homo sapiens
  misc_RNA (1)...(19): siRNA sense strand
ccaagcccuccgucuauuu

SEQ ID NO: 1872084 - RNA, 19 nt, Homo sapiens
  misc_RNA (1)...(19): siRNA sense strand
gcauggucauucaucaagu

SEQ ID NO: 1872085 - RNA, 19 nt, Homo sapiens
  misc_RNA (1)...(19): siRNA sense strand
gaauaugccaaagaagaug

SEQ ID NO: 1872086 - RNA, 19 nt, Homo sapiens
  misc_RNA (1)...(19): siRNA sense strand
agaggaugguucuaaagau

SEQ ID NO: 1872087 - RNA, 19 nt, Homo sapiens
  misc_RNA (1)...(19): siRNA sense strand
agaaagggaaccaggagaa

SEQ ID NO: 1872088 - RNA, 19 nt, Homo sapiens
  misc_RNA (1)...(19): siRNA sense strand
ccaaagaagauggcucgaa

SEQ ID NO: 1872089 - RNA, 19 nt, Homo sapiens
  misc_RNA (1)...(19): siRNA sense strand
gaaagggaaccaggagaag

SEQ ID NO: 1872090 - RNA, 19 nt, Homo sapiens
  misc_RNA (1)...(19): siRNA sense strand
ggaaccaggagaaguugug

SEQ ID NO: 1872091 - RNA, 19 nt, Homo sapiens
  misc_RNA (1)...(19): siRNA sense strand
acaaguggaauaugccaaa

SEQ ID NO: 1872092 - RNA, 19 nt, Homo sapiens
  misc_RNA (1)...(19): siRNA sense strand
ggauucagcauggguggaa

SEQ ID NO: 1872093 - RNA, 19 nt, Homo sapiens
  misc_RNA (1)...(19): siRNA sense strand
gaugcacacuuggcagaca

SEQ ID NO: 1872094 - RNA, 19 nt, Homo sapiens
  misc_RNA (1)...(19): siRNA sense strand
ggaugguucuaaagaugag

SEQ ID NO: 1872095 - RNA, 19 nt, Homo sapiens
  misc_RNA (1)...(19): siRNA sense strand
ggcaaagcaguggaacaua

SEQ ID NO: 1872096 - RNA, 19 nt, Homo sapiens
  misc_RNA (1)...(19): siRNA sense strand
uaggcaaacaaguggaaua

SEQ ID NO: 1872097 - RNA, 19 nt, Homo sapiens
  misc_RNA (1)...(19): siRNA sense strand
gccaacaugaugaagaaga

SEQ ID NO: 1872098 - RNA, 19 nt, Homo sapiens
  misc_RNA (1)...(19): siRNA sense strand
guaccaacucuuagaugau

SEQ ID NO: 1872099 - RNA, 19 nt, Homo sapiens
  misc_RNA (1)...(19): siRNA sense strand
gcaccugucaugaacacau

SEQ ID NO: 1872100 - RNA, 19 nt, Homo sapiens
  misc_RNA (1)...(19): siRNA sense strand
gaaguccucccugauagag

SEQ ID NO: 1872101 - RNA, 19 nt, Homo sapiens
  misc_RNA (1)...(19): siRNA sense strand
gguaggcaaacaaguggaa

SEQ ID NO: 1872102 - RNA, 19 nt, Homo sapiens
  misc_RNA (1)...(19): siRNA sense strand
ugauagaguugcgacaucu

SEQ ID NO: 1872103 - RNA, 19 nt, Homo sapiens
  misc_RNA (1)...(19): siRNA sense strand
aguccucccugauagaguu

SEQ ID NO: 1872104 - RNA, 19 nt, Homo sapiens
  misc_RNA (1)...(19): siRNA sense strand
uacauuaccuaugagaaag

SEQ ID NO: 1872105 - RNA, 19 nt, Homo sapiens
  misc_RNA (1)...(19): siRNA sense strand
aagccaagcccuccgucua

SEQ ID NO: 1872106 - RNA, 19 nt, Homo sapiens
  misc_RNA (1)...(19): siRNA sense strand
caaguggaauaugccaaag

SEQ ID NO: 1872107 - RNA, 19 nt, Homo sapiens
  misc_RNA (1)...(19): siRNA sense strand
uugaaguccucccugauag

SEQ ID NO: 1872108 - RNA, 19 nt, Homo sapiens
  misc_RNA (1)...(19): siRNA sense strand
caagcccuccgucuauuuc

SEQ ID NO: 1872109 - RNA, 19 nt, Homo sapiens
  misc_RNA (1)...(19): siRNA sense strand
aagggaaccaggagaaguu

SEQ ID NO: 1872110 - RNA, 19 nt, Homo sapiens
  misc_RNA (1)...(19): siRNA sense strand
aagaggacaucccacaaaa

SEQ ID NO: 1872111 - RNA, 19 nt, Homo sapiens
  misc_RNA (1)...(19): siRNA sense strand
ccgucuauuucaucaaguu

SEQ ID NO: 1872112 - RNA, 19 nt, Homo sapiens
  misc_RNA (1)...(19): siRNA sense strand
aagaguuucugcgcuugaa

SEQ ID NO: 1872113 - RNA, 19 nt, Homo sapiens
  misc_RNA (1)...(19): siRNA sense strand
ugaaguccucccugauaga

SEQ ID NO: 1872114 - RNA, 19 nt, Homo sapiens
  misc_RNA (1)...(19): siRNA sense strand
gauuugacuguguuuaugg

SEQ ID NO: 1872115 - RNA, 19 nt, Homo sapiens
  misc_RNA (1)...(19): siRNA sense strand
gauucagcauggguggaaa

SEQ ID NO: 1872116 - RNA, 19 nt, Homo sapiens
  misc_RNA (1)...(19): siRNA sense strand
uggauuugacuguguuuau

SEQ ID NO: 1872117 - RNA, 19 nt, Homo sapiens
  misc_RNA (1)...(19): siRNA sense strand
cugauagaguugcgacauc

SEQ ID NO: 1872118 - RNA, 19 nt, Homo sapiens
  misc_RNA (1)...(19): siRNA sense strand
gaacuacccuaacucguau

SEQ ID NO: 1872119 - RNA, 19 nt, Homo sapiens
  misc_RNA (1)...(19): siRNA sense strand
caaaugccaugucacaauu

SEQ ID NO: 1872120 - RNA, 19 nt, Homo sapiens
  misc_RNA (1)...(19): siRNA sense strand
gcaaucgacuguuaaagug

SEQ ID NO: 1872121 - RNA, 19 nt, Homo sapiens
  misc_RNA (1)...(19): siRNA sense strand
gugcuggagugaauauuua

SEQ ID NO: 1872122 - RNA, 19 nt, Homo sapiens
  misc_RNA (1)...(19): siRNA sense strand
ccacacucauguacacuua

SEQ ID NO: 1872123 - RNA, 19 nt, Homo sapiens
  misc_RNA (1)...(19): siRNA sense strand
cgagauauuucccaagauu

SEQ ID NO: 1872124 - RNA, 19 nt, Homo sapiens
  misc_RNA (1)...(19): siRNA sense strand
acacuuaugucuucgcuuu

SEQ ID NO: 1872125 - RNA, 19 nt, Homo sapiens
  misc_RNA (1)...(19): siRNA sense strand
aagaauaaccaguccauua

SEQ ID NO: 1872126 - RNA, 19 nt, Homo sapiens
  misc_RNA (1)...(19): siRNA sense strand
ggauaugccuugucagauc

SEQ ID NO: 1872127 - RNA, 19 nt, Homo sapiens
  misc_RNA (1)...(19): siRNA sense strand
guaagugguuaaagaaaug

SEQ ID NO: 1872128 - RNA, 19 nt, Homo sapiens
  misc_RNA (1)...(19): siRNA sense strand
ugucagaucugcuacuuga

SEQ ID NO: 1872129 - RNA, 19 nt, Homo sapiens
  misc_RNA (1)...(19): siRNA sense strand
ccaagcagaucuagagaau

SEQ ID NO: 1872130 - RNA, 19 nt, Homo sapiens
  misc_RNA (1)...(19): siRNA sense strand
gaucacagauucaaaaguu

SEQ ID NO: 1872131 - RNA, 19 nt, Homo sapiens
  misc_RNA (1)...(19): siRNA sense strand
agagugcaaucgacuguua

SEQ ID NO: 1872132 - RNA, 19 nt, Homo sapiens
  misc_RNA (1)...(19): siRNA sense strand
ccaauauccugaugcuaaa

SEQ ID NO: 1872133 - RNA, 19 nt, Homo sapiens
  misc_RNA (1)...(19): siRNA sense strand
gaaggauggugguuguaau

SEQ ID NO: 1872134 - RNA, 19 nt, Homo sapiens
  misc_RNA (1)...(19): siRNA sense strand
ucaacgaggucauccagaa

SEQ ID NO: 1872135 - RNA, 19 nt, Homo sapiens
  misc_RNA (1)...(19): siRNA sense strand
gaagaaggcaguugauguc

SEQ ID NO: 1872136 - RNA, 19 nt, Homo sapiens
  misc_RNA (1)...(19): siRNA sense strand
cagcaacuaucacaagaau

SEQ ID NO: 1872137 - RNA, 19 nt, Homo sapiens
  misc_RNA (1)...(19): siRNA sense strand
ggauauaaagcagaaagua

SEQ ID NO: 1872138 - RNA, 19 nt, Homo sapiens
  misc_RNA (1)...(19): siRNA sense strand
gaacacgccagaugaauac

SEQ ID NO: 1872139 - RNA, 19 nt, Homo sapiens
  misc_RNA (1)...(19): siRNA sense strand
gagaagcucuuugcugagu

SEQ ID NO: 1872140 - RNA, 19 nt, Homo sapiens
  misc_RNA (1)...(19): siRNA sense strand
gcaacuaucacaagaauac

SEQ ID NO: 1872141 - RNA, 19 nt, Homo sapiens
  misc_RNA (1)...(19): siRNA sense strand
ugaacuacccuaacucgua

SEQ ID NO: 1872142 - RNA, 19 nt, Homo sapiens
  misc_RNA (1)...(19): siRNA sense strand
gagagucgacgaaggguuu

SEQ ID NO: 1872143 - RNA, 19 nt, Homo sapiens
  misc_RNA (1)...(19): siRNA sense strand
cauguacacuuaugucuuc

SEQ ID NO: 1872144 - RNA, 19 nt, Homo sapiens
  misc_RNA (1)...(19): siRNA sense strand
ccacuucaauugggauaaa

SEQ ID NO: 1872145 - RNA, 19 nt, Homo sapiens
  misc_RNA (1)...(19): siRNA sense strand
cgaacacgccagaugaaua

SEQ ID NO: 1872146 - RNA, 19 nt, Homo sapiens
  misc_RNA (1)...(19): siRNA sense strand
acaaaggaaugucccaaau

SEQ ID NO: 1872147 - RNA, 19 nt, Homo sapiens
  misc_RNA (1)...(19): siRNA sense strand
aagauucucugcaggauau

SEQ ID NO: 1872148 - RNA, 19 nt, Homo sapiens
  misc_RNA (1)...(19): siRNA sense strand
aaagagaagcuaauggaaa

SEQ ID NO: 1872149 - RNA, 19 nt, Homo sapiens
  misc_RNA (1)...(19): siRNA sense strand
cacaacauguccuggauug

SEQ ID NO: 1872150 - RNA, 19 nt, Homo sapiens
  misc_RNA (1)...(19): siRNA sense strand
uaaccaguccauuaucuuu

SEQ ID NO: 1872151 - RNA, 19 nt, Homo sapiens
  misc_RNA (1)...(19): siRNA sense strand
gaggugcaguuccugaaga

SEQ ID NO: 1872152 - RNA, 19 nt, Homo sapiens
  misc_RNA (1)...(19): siRNA sense strand
gaauaaccaagcagaucua

SEQ ID NO: 1872153 - RNA, 19 nt, Homo sapiens
  misc_RNA (1)...(19): siRNA sense strand
aagagaagcuaauggaaag

SEQ ID NO: 1872154 - RNA, 19 nt, Homo sapiens
  misc_RNA (1)...(19): siRNA sense strand
agagguaccuguucuacug

SEQ ID NO: 1872155 - RNA, 19 nt, Homo sapiens
  misc_RNA (1)...(19): siRNA sense strand
gcaaaggcagcaagagaug

SEQ ID NO: 1872156 - RNA, 19 nt, Homo sapiens
  misc_RNA (1)...(19): siRNA sense strand
gaagcucuuugcugagugu

SEQ ID NO: 1872157 - RNA, 19 nt, Homo sapiens
  misc_RNA (1)...(19): siRNA sense strand
ugagaaggauggugguugu

SEQ ID NO: 1872158 - RNA, 19 nt, Homo sapiens
  misc_RNA (1)...(19): siRNA sense strand
ggaguacauugaggacuga

SEQ ID NO: 1872159 - RNA, 19 nt, Homo sapiens
  misc_RNA (1)...(19): siRNA sense strand
uaaccagaauuguaaagca

SEQ ID NO: 1872160 - RNA, 19 nt, Homo sapiens
  misc_RNA (1)...(19): siRNA sense strand
gauggugguuguaaucaca

SEQ ID NO: 1872161 - RNA, 19 nt, Homo sapiens
  misc_RNA (1)...(19): siRNA sense strand
caaaggaaugucccaaaug

SEQ ID NO: 1872162 - RNA, 19 nt, Homo sapiens
  misc_RNA (1)...(19): siRNA sense strand
aaaggaaugucccaaaugc

SEQ ID NO: 1872163 - RNA, 19 nt, Homo sapiens
  misc_RNA (1)...(19): siRNA sense strand
gcagaaaguacaagacaag

SEQ ID NO: 1872164 - RNA, 19 nt, Homo sapiens
  misc_RNA (1)...(19): siRNA sense strand
gagcagauucuacaacaca

SEQ ID NO: 1872165 - RNA, 19 nt, Homo sapiens
  misc_RNA (1)...(19): siRNA sense strand
ccaaaugccaugucacaau

SEQ ID NO: 1872166 - RNA, 19 nt, Homo sapiens
  misc_RNA (1)...(19): siRNA sense strand
cacaggauaugccuuguca

SEQ ID NO: 1872167 - RNA, 19 nt, Homo sapiens
  misc_RNA (1)...(19): siRNA sense strand
uacaagacaaguacagaua

SEQ ID NO: 1872168 - RNA, 19 nt, Homo sapiens
  misc_RNA (1)...(19): siRNA sense strand
aagcagaucuagagaaugc

SEQ ID NO: 1872169 - RNA, 19 nt, Homo sapiens
  misc_RNA (1)...(19): siRNA sense strand
uccaauauccugaugcuaa

SEQ ID NO: 1872170 - RNA, 19 nt, Homo sapiens
  misc_RNA (1)...(19): siRNA sense strand
ggacgagggcuacaacuac

SEQ ID NO: 1872171 - RNA, 19 nt, Homo sapiens
  misc_RNA (1)...(19): siRNA sense strand
ggacgaugauacccuggau

SEQ ID NO: 1872172 - RNA, 19 nt, Homo sapiens
  misc_RNA (1)...(19): siRNA sense strand
uacccuaacucguauuuca

SEQ ID NO: 1872173 - RNA, 19 nt, Homo sapiens
  misc_RNA (1)...(19): siRNA sense strand
uaaugaggaugaugcaaag

SEQ ID NO: 1872174 - RNA, 19 nt, Homo sapiens
  misc_RNA (1)...(19): siRNA sense strand
ucacaagaauacuccuuag

SEQ ID NO: 1872175 - RNA, 19 nt, Homo sapiens
  misc_RNA (1)...(19): siRNA sense strand
gagaauaaccaagcagauc

SEQ ID NO: 1872176 - RNA, 19 nt, Homo sapiens
  misc_RNA (1)...(19): siRNA sense strand
gcacaacauguccuggauu

SEQ ID NO: 1872177 - RNA, 19 nt, Homo sapiens
  misc_RNA (1)...(19): siRNA sense strand
gaauuguaaagcagaguuu

SEQ ID NO: 1872178 - RNA, 19 nt, Homo sapiens
  misc_RNA (1)...(19): siRNA sense strand
gauaugccuugucagaucu

SEQ ID NO: 1872179 - RNA, 19 nt, Homo sapiens
  misc_RNA (1)...(19): siRNA sense strand
guggaugacaacacaguua

SEQ ID NO: 1872180 - RNA, 19 nt, Homo sapiens
  misc_RNA (1)...(19): siRNA sense strand
uaaccaagcagaucuagag

SEQ ID NO: 1872181 - RNA, 19 nt, Homo sapiens
  misc_RNA (1)...(19): siRNA sense strand
acagugaaaccuccaauug

SEQ ID NO: 1872182 - RNA, 19 nt, Homo sapiens
  misc_RNA (1)...(19): siRNA sense strand
caauugggauaaagagaag

SEQ ID NO: 1872183 - RNA, 19 nt, Homo sapiens
  misc_RNA (1)...(19): siRNA sense strand
gauauaaagcagaaaguac

SEQ ID NO: 1872184 - RNA, 19 nt, Homo sapiens
  misc_RNA (1)...(19): siRNA sense strand
ggauugcagccaacacaaa

SEQ ID NO: 1872185 - RNA, 19 nt, Homo sapiens
  misc_RNA (1)...(19): siRNA sense strand
ggauaaagagaagcuaaug

SEQ ID NO: 1872186 - RNA, 19 nt, Homo sapiens
  misc_RNA (1)...(19): siRNA sense strand
ucaauugggauaaagagaa

SEQ ID NO: 1872187 - RNA, 19 nt, Homo sapiens
  misc_RNA (1)...(19): siRNA sense strand
aacgagauauuucccaaga

SEQ ID NO: 1872188 - RNA, 19 nt, Homo sapiens
  misc_RNA (1)...(19): siRNA sense strand
ccuguucgcugcaaaugug

SEQ ID NO: 1872189 - RNA, 19 nt, Homo sapiens
  misc_RNA (1)...(19): siRNA sense strand
uacaacacaugguggaaug

SEQ ID NO: 1872190 - RNA, 19 nt, Homo sapiens
  misc_RNA (1)...(19): siRNA sense strand
gaauacuccuuagccacuu

SEQ ID NO: 1872191 - RNA, 19 nt, Homo sapiens
  misc_RNA (1)...(19): siRNA sense strand
uaaagagaagcuaauggaa

SEQ ID NO: 1872192 - RNA, 19 nt, Homo sapiens
  misc_RNA (1)...(19): siRNA sense strand
ccagauugccaccauguug

SEQ ID NO: 1872193 - RNA, 19 nt, Homo sapiens
  misc_RNA (1)...(19): siRNA sense strand
ugaagaaggcaguugaugu

SEQ ID NO: 1872194 - RNA, 19 nt, Homo sapiens
  misc_RNA (1)...(19): siRNA sense strand
ugucguaaccagaauugua

SEQ ID NO: 1872195 - RNA, 19 nt, Homo sapiens
  misc_RNA (1)...(19): siRNA sense strand
ccgagcagauucuacaaca

SEQ ID NO: 1872196 - RNA, 19 nt, Homo sapiens
  misc_RNA (1)...(19): siRNA sense strand
agaagcuaauggaaaggua

SEQ ID NO: 1872197 - RNA, 19 nt, Homo sapiens
  misc_RNA (1)...(19): siRNA sense strand
agaaaguacaagacaagua

SEQ ID NO: 1872198 - RNA, 19 nt, Homo sapiens
  misc_RNA (1)...(19): siRNA sense strand
uaaagcagaaaguacaaga

SEQ ID NO: 1872199 - RNA, 19 nt, Homo sapiens
  misc_RNA (1)...(19): siRNA sense strand
caagauucucugcaggaua

SEQ ID NO: 1872200 - RNA, 19 nt, Homo sapiens
  misc_RNA (1)...(19): siRNA sense strand
acacucauguacacuuaug

SEQ ID NO: 1872201 - RNA, 19 nt, Homo sapiens
  misc_RNA (1)...(19): siRNA sense strand
cuacuguaaucgcuauaug

SEQ ID NO: 1872202 - RNA, 19 nt, Homo sapiens
  misc_RNA (1)...(19): siRNA sense strand
gguaccuguucuacuguaa

SEQ ID NO: 1872203 - RNA, 19 nt, Homo sapiens
  misc_RNA (1)...(19): siRNA sense strand
ggagaaaauuggcaugauc

SEQ ID NO: 1872204 - RNA, 19 nt, Homo sapiens
  misc_RNA (1)...(19): siRNA sense strand
caggauaugccuugucaga

SEQ ID NO: 1872205 - RNA, 19 nt, Homo sapiens
  misc_RNA (1)...(19): siRNA sense strand
gucguaaccagaauuguaa

SEQ ID NO: 1872206 - RNA, 19 nt, Homo sapiens
  misc_RNA (1)...(19): siRNA sense strand
aaagugugaugaugacagu

SEQ ID NO: 1872207 - RNA, 19 nt, Homo sapiens
  misc_RNA (1)...(19): siRNA sense strand
ggauugaggugcaguuccu

SEQ ID NO: 1872208 - RNA, 19 nt, Homo sapiens
  misc_RNA (1)...(19): siRNA sense strand
ggucaucagcacaggauau

SEQ ID NO: 1872209 - RNA, 19 nt, Homo sapiens
  misc_RNA (1)...(19): siRNA sense strand
guucuacuguaaucgcuau

SEQ ID NO: 1872210 - RNA, 19 nt, Homo sapiens
  misc_RNA (1)...(19): siRNA sense strand
cagaauccagcaacuauca

SEQ ID NO: 1872211 - RNA, 19 nt, Homo sapiens
  misc_RNA (1)...(19): siRNA sense strand
ggagugaauauuuaacuac

SEQ ID NO: 1872212 - RNA, 19 nt, Homo sapiens
  misc_RNA (1)...(19): siRNA sense strand
gcagugcuggagugaauau

SEQ ID NO: 1872213 - RNA, 19 nt, Homo sapiens
  misc_RNA (1)...(19): siRNA sense strand
gcugagugucauguaauua

SEQ ID NO: 1872214 - RNA, 19 nt, Homo sapiens
  misc_RNA (1)...(19): siRNA sense strand
caacuguaaccgcuauaau

SEQ ID NO: 1872215 - RNA, 19 nt, Homo sapiens
  misc_RNA (1)...(19): siRNA sense strand
gauaaagagaagcuaaugg

SEQ ID NO: 1872216 - RNA, 19 nt, Homo sapiens
  misc_RNA (1)...(19): siRNA sense strand
auaaagagaagcuaaugga

SEQ ID NO: 1872217 - RNA, 19 nt, Homo sapiens
  misc_RNA (1)...(19): siRNA sense strand
gugcaugaaggcuaugaaa

SEQ ID NO: 1872218 - RNA, 19 nt, Homo sapiens
  misc_RNA (1)...(19): siRNA sense strand
ggaagcacauagaggauga

SEQ ID NO: 1872219 - RNA, 19 nt, Homo sapiens
  misc_RNA (1)...(19): siRNA sense strand
gcacgugcaugagcuauau

SEQ ID NO: 1872220 - RNA, 19 nt, Homo sapiens
  misc_RNA (1)...(19): siRNA sense strand
gcagagggccuacgugaga

SEQ ID NO: 1872221 - RNA, 19 nt, Homo sapiens
  misc_RNA (1)...(19): siRNA sense strand
guacucgucucucaccaaa

SEQ ID NO: 1872222 - RNA, 19 nt, Homo sapiens
  misc_RNA (1)...(19): siRNA sense strand
gaacuuccagugaggauug

SEQ ID NO: 1872223 - RNA, 19 nt, Homo sapiens
  misc_RNA (1)...(19): siRNA sense strand
caacaaugaugucgaucug

SEQ ID NO: 1872224 - RNA, 19 nt, Homo sapiens
  misc_RNA (1)...(19): siRNA sense strand
ccaaagaagauuauugaga

SEQ ID NO: 1872225 - RNA, 19 nt, Homo sapiens
  misc_RNA (1)...(19): siRNA sense strand
aggaaucgcucacaaagau

SEQ ID NO: 1872226 - RNA, 19 nt, Homo sapiens
  misc_RNA (1)...(19): siRNA sense strand
caccaaagaagauuauuga

SEQ ID NO: 1872227 - RNA, 19 nt, Homo sapiens
  misc_RNA (1)...(19): siRNA sense strand
ggucauggacuaccacuuc

SEQ ID NO: 1872228 - RNA, 19 nt, Homo sapiens
  misc_RNA (1)...(19): siRNA sense strand
gagccacaauggagaguca

SEQ ID NO: 1872229 - RNA, 19 nt, Homo sapiens
  misc_RNA (1)...(19): siRNA sense strand
gagcacaaguauggcaaug

SEQ ID NO: 1872230 - RNA, 19 nt, Homo sapiens
  misc_RNA (1)...(19): siRNA sense strand
ccuagacacucccuacaau

SEQ ID NO: 1872231 - RNA, 19 nt, Homo sapiens
  misc_RNA (1)...(19): siRNA sense strand
uccagaagcugacagacuu

SEQ ID NO: 1872232 - RNA, 19 nt, Homo sapiens
  misc_RNA (1)...(19): siRNA sense strand
ggaggaaucgcucacaaag

SEQ ID NO: 1872233 - RNA, 19 nt, Homo sapiens
  misc_RNA (1)...(19): siRNA sense strand
caucuguacucgucucuca

SEQ ID NO: 1872234 - RNA, 19 nt, Homo sapiens
  misc_RNA (1)...(19): siRNA sense strand
cagcaagaacuuccaguga

SEQ ID NO: 1872235 - RNA, 19 nt, Homo sapiens
  misc_RNA (1)...(19): siRNA sense strand
acucgucucucaccaaaga

SEQ ID NO: 1872236 - RNA, 19 nt, Homo sapiens
  misc_RNA (1)...(19): siRNA sense strand
ccaagaccgucaccuccuu

SEQ ID NO: 1872237 - RNA, 19 nt, Homo sapiens
  misc_RNA (1)...(19): siRNA sense strand
acaaugaugucgaucugau

SEQ ID NO: 1872238 - RNA, 19 nt, Homo sapiens
  misc_RNA (1)...(19): siRNA sense strand
gcacauagaggaugaaaag

SEQ ID NO: 1872239 - RNA, 19 nt, Homo sapiens
  misc_RNA (1)...(19): siRNA sense strand
agaagauuauugagaagug

SEQ ID NO: 1872240 - RNA, 19 nt, Homo sapiens
  misc_RNA (1)...(19): siRNA sense strand
gaggaaucgcucacaaaga

SEQ ID NO: 1872241 - RNA, 19 nt, Homo sapiens
  misc_RNA (1)...(19): siRNA sense strand
gcucguccgcuacuucuug

SEQ ID NO: 1872242 - RNA, 19 nt, Homo sapiens
  misc_RNA (1)...(19): siRNA sense strand
gacuaccacuucacuacug

SEQ ID NO: 1872243 - RNA, 19 nt, Homo sapiens
  misc_RNA (1)...(19): siRNA sense strand
ccuacaaugucccagaugu

SEQ ID NO: 1872244 - RNA, 19 nt, Homo sapiens
  misc_RNA (1)...(19): siRNA sense strand
gacaagacgcugacuucga

SEQ ID NO: 1872245 - RNA, 19 nt, Homo sapiens
  misc_RNA (1)...(19): siRNA sense strand
gacggcagccaccuucuga

SEQ ID NO: 1872246 - RNA, 19 nt, Homo sapiens
  misc_RNA (1)...(19): siRNA sense strand
guggaggaaucgcucacaa

SEQ ID NO: 1872247 - RNA, 19 nt, Homo sapiens
  misc_RNA (1)...(19): siRNA sense strand
ccgcaucaauggccaugug

SEQ ID NO: 1872248 - RNA, 19 nt, Homo sapiens
  misc_RNA (1)...(19): siRNA sense strand
ucaccaaagaagauuauug

SEQ ID NO: 1872249 - RNA, 19 nt, Homo sapiens
  misc_RNA (1)...(19): siRNA sense strand
caauggagagucaccuaga

SEQ ID NO: 1872250 - RNA, 19 nt, Homo sapiens
  misc_RNA (1)...(19): siRNA sense strand
caagaccgucaccuccuuu

SEQ ID NO: 1872251 - RNA, 19 nt, Homo sapiens
  misc_RNA (1)...(19): siRNA sense strand
caucuggacaugcauagug

SEQ ID NO: 1872252 - RNA, 19 nt, Homo sapiens
  misc_RNA (1)...(19): siRNA sense strand
gcugcuggaugaccacaag

SEQ ID NO: 1872253 - RNA, 19 nt, Homo sapiens
  misc_RNA (1)...(19): siRNA sense strand
cggcagccaccuucugaaa

SEQ ID NO: 1872254 - RNA, 19 nt, Homo sapiens
  misc_RNA (1)...(19): siRNA sense strand
agacuucccuccgaucaag

SEQ ID NO: 1872255 - RNA, 19 nt, Homo sapiens
  misc_RNA (1)...(19): siRNA sense strand
uagacacucccuacaaugu

SEQ ID NO: 1872256 - RNA, 19 nt, Homo sapiens
  misc_RNA (1)...(19): siRNA sense strand
gcagccaccuucugaaaag

SEQ ID NO: 1872257 - RNA, 19 nt, Homo sapiens
  misc_RNA (1)...(19): siRNA sense strand
ugaggacaagccugacuuu

SEQ ID NO: 1872258 - RNA, 19 nt, Homo sapiens
  misc_RNA (1)...(19): siRNA sense strand
cgccaacaaugaugucgau

SEQ ID NO: 1872259 - RNA, 19 nt, Homo sapiens
  misc_RNA (1)...(19): siRNA sense strand
ggacuaccacuucacuacu

SEQ ID NO: 1872260 - RNA, 19 nt, Homo sapiens
  misc_RNA (1)...(19): siRNA sense strand
cugccuuccuuucaucauu

SEQ ID NO: 1872261 - RNA, 19 nt, Homo sapiens
  misc_RNA (1)...(19): siRNA sense strand
gcauuggcacggacgucua

SEQ ID NO: 1872262 - RNA, 19 nt, Homo sapiens
  misc_RNA (1)...(19): siRNA sense strand
gucauggacuaccacuuca

SEQ ID NO: 1872263 - RNA, 19 nt, Homo sapiens
  misc_RNA (1)...(19): siRNA sense strand
gaaucgcucacaaagaucu

SEQ ID NO: 1872264 - RNA, 19 nt, Homo sapiens
  misc_RNA (1)...(19): siRNA sense strand
cucgguaccugcagcaaga

SEQ ID NO: 1872265 - RNA, 19 nt, Homo sapiens
  misc_RNA (1)...(19): siRNA sense strand
caccaucgccaacaaugau

SEQ ID NO: 1872266 - RNA, 19 nt, Homo sapiens
  misc_RNA (1)...(19): siRNA sense strand
ugccuuccuuucaucauug

SEQ ID NO: 1872267 - RNA, 19 nt, Homo sapiens
  misc_RNA (1)...(19): siRNA sense strand
ggccaucuggacaugcaua

SEQ ID NO: 1872268 - RNA, 19 nt, Homo sapiens
  misc_RNA (1)...(19): siRNA sense strand
ucaccaucgccaacaauga

SEQ ID NO: 1872269 - RNA, 19 nt, Homo sapiens
  misc_RNA (1)...(19): siRNA sense strand
guaccugcagcaagaacuu

SEQ ID NO: 1872270 - RNA, 19 nt, Homo sapiens
  misc_RNA (1)...(19): siRNA sense strand
uggaugaccacaaggaugu

SEQ ID NO: 1872271 - RNA, 19 nt, Homo sapiens
  misc_RNA (1)...(19): siRNA sense strand
ucaucaccaucgccaacaa

SEQ ID NO: 1872272 - RNA, 19 nt, Homo sapiens
  misc_RNA (1)...(19): siRNA sense strand
gcuuggaauccgcauguug

SEQ ID NO: 1872273 - RNA, 19 nt, Homo sapiens
  misc_RNA (1)...(19): siRNA sense strand
ugacuucgaggcuuggaau

SEQ ID NO: 1872274 - RNA, 19 nt, Homo sapiens
  misc_RNA (1)...(19): siRNA sense strand
acacacaccacguggagau

SEQ ID NO: 1872275 - RNA, 19 nt, Homo sapiens
  misc_RNA (1)...(19): siRNA sense strand
cacaauggagagucaccua

SEQ ID NO: 1872276 - RNA, 19 nt, Homo sapiens
  misc_RNA (1)...(19): siRNA sense strand
uggaggaaucgcucacaaa

SEQ ID NO: 1872277 - RNA, 19 nt, Homo sapiens
  misc_RNA (1)...(19): siRNA sense strand
gagagaaacuguauaauug

SEQ ID NO: 1872278 - RNA, 19 nt, Homo sapiens
  misc_RNA (1)...(19): siRNA sense strand
gauaagagcuuucgucaga

SEQ ID NO: 1872279 - RNA, 19 nt, Homo sapiens
  misc_RNA (1)...(19): siRNA sense strand
gguaagagcuucuguggua

SEQ ID NO: 1872280 - RNA, 19 nt, Homo sapiens
  misc_RNA (1)...(19): siRNA sense strand
gggaagagauuuacucaaa

SEQ ID NO: 1872281 - RNA, 19 nt, Homo sapiens
  misc_RNA (1)...(19): siRNA sense strand
gggaaaggcuucagucgua

SEQ ID NO: 1872282 - RNA, 19 nt, Homo sapiens
  misc_RNA (1)...(19): siRNA sense strand
ggaagaacauuguacagaa

SEQ ID NO: 1872283 - RNA, 19 nt, Homo sapiens
  misc_RNA (1)...(19): siRNA sense strand
ggaaagggccacaauagua

SEQ ID NO: 1872284 - RNA, 19 nt, Homo sapiens
  misc_RNA (1)...(19): siRNA sense strand
gagagaaaccuuauaauug

SEQ ID NO: 1872285 - RNA, 19 nt, Homo sapiens
  misc_RNA (1)...(19): siRNA sense strand
gaucagcacuuaauaguca

SEQ ID NO: 1872286 - RNA, 19 nt, Homo sapiens
  misc_RNA (1)...(19): siRNA sense strand
ggagagaaaugcuauaagu

SEQ ID NO: 1872287 - RNA, 19 nt, Homo sapiens
  misc_RNA (1)...(19): siRNA sense strand
ggagagaaacuguauaauu

SEQ ID NO: 1872288 - RNA, 19 nt, Homo sapiens
  misc_RNA (1)...(19): siRNA sense strand
ggagagaaaccuuauaauu

SEQ ID NO: 1872289 - RNA, 19 nt, Homo sapiens
  misc_RNA (1)...(19): siRNA sense strand
ggagagagaccauacaauu

SEQ ID NO: 1872290 - RNA, 19 nt, Homo sapiens
  misc_RNA (1)...(19): siRNA sense strand
gaaagggccacaauaguaa

SEQ ID NO: 1872291 - RNA, 19 nt, Homo sapiens
  misc_RNA (1)...(19): siRNA sense strand
gaucagcacuuaauguuca

SEQ ID NO: 1872292 - RNA, 19 nt, Homo sapiens
  misc_RNA (1)...(19): siRNA sense strand
gagguuggaucuugacuuu

SEQ ID NO: 1872293 - RNA, 19 nt, Homo sapiens
  misc_RNA (1)...(19): siRNA sense strand
gaacaucagagaauccaua

SEQ ID NO: 1872294 - RNA, 19 nt, Homo sapiens
  misc_RNA (1)...(19): siRNA sense strand
cgucagagaucagcacuua

SEQ ID NO: 1872295 - RNA, 19 nt, Homo sapiens
  misc_RNA (1)...(19): siRNA sense strand
gaagaacauuguacagaau

SEQ ID NO: 1872296 - RNA, 19 nt, Homo sapiens
  misc_RNA (1)...(19): siRNA sense strand
aaacaccucucaaauguga

SEQ ID NO: 1872297 - RNA, 19 nt, Homo sapiens
  misc_RNA (1)...(19): siRNA sense strand
gagagaaaccguucaaaug

SEQ ID NO: 1872298 - RNA, 19 nt, Homo sapiens
  misc_RNA (1)...(19): siRNA sense strand
ugugguagaucaagacuua

SEQ ID NO: 1872299 - RNA, 19 nt, Homo sapiens
  misc_RNA (1)...(19): siRNA sense strand
agaaacaccucucaaaugu

SEQ ID NO: 1872300 - RNA, 19 nt, Homo sapiens
  misc_RNA (1)...(19): siRNA sense strand
caagggcaauuggauauaa

SEQ ID NO: 1872301 - RNA, 19 nt, Homo sapiens
  misc_RNA (1)...(19): siRNA sense strand
gguaaggaauucagucaga

SEQ ID NO: 1872302 - RNA, 19 nt, Homo sapiens
  misc_RNA (1)...(19): siRNA sense strand
gagagaaaccauacaaaug

SEQ ID NO: 1872303 - RNA, 19 nt, Homo sapiens
  misc_RNA (1)...(19): siRNA sense strand
gagaaaccguucaaaugug

SEQ ID NO: 1872304 - RNA, 19 nt, Homo sapiens
  misc_RNA (1)...(19): siRNA sense strand
ggagagaaaccauacaaau

SEQ ID NO: 1872305 - RNA, 19 nt, Homo sapiens
  misc_RNA (1)...(19): siRNA sense strand
guucacaucugcaaacuca

SEQ ID NO: 1872306 - RNA, 19 nt, Homo sapiens
  misc_RNA (1)...(19): siRNA sense strand
gcaaggacuaucuguaauu

SEQ ID NO: 1872307 - RNA, 19 nt, Homo sapiens
  misc_RNA (1)...(19): siRNA sense strand
gagaaaccauuccgaugug

SEQ ID NO: 1872308 - RNA, 19 nt, Homo sapiens
  misc_RNA (1)...(19): siRNA sense strand
gcaauuggauauaaaccau

SEQ ID NO: 1872309 - RNA, 19 nt, Homo sapiens
  misc_RNA (1)...(19): siRNA sense strand
ggagagaaaccguucaaau

SEQ ID NO: 1872310 - RNA, 19 nt, Homo sapiens
  misc_RNA (1)...(19): siRNA sense strand
caacucgucugacccauca

SEQ ID NO: 1872311 - RNA, 19 nt, Homo sapiens
  misc_RNA (1)...(19): siRNA sense strand
gcucucaguucuccaaaga

SEQ ID NO: 1872312 - RNA, 19 nt, Homo sapiens
  misc_RNA (1)...(19): siRNA sense strand
caccagagaucccauagug

SEQ ID NO: 1872313 - RNA, 19 nt, Homo sapiens
  misc_RNA (1)...(19): siRNA sense strand
gagcuucugugguagauca

SEQ ID NO: 1872314 - RNA, 19 nt, Homo sapiens
  misc_RNA (1)...(19): siRNA sense strand
auaaauagcucucaguucu

SEQ ID NO: 1872315 - RNA, 19 nt, Homo sapiens
  misc_RNA (1)...(19): siRNA sense strand
gagagagaccauacaauug

SEQ ID NO: 1872316 - RNA, 19 nt, Homo sapiens
  misc_RNA (1)...(19): siRNA sense strand
gagaaaacauggaagugua

SEQ ID NO: 1872317 - RNA, 19 nt, Homo sapiens
  misc_RNA (1)...(19): siRNA sense strand
gagaaaccauacaaaugug

SEQ ID NO: 1872318 - RNA, 19 nt, Homo sapiens
  misc_RNA (1)...(19): siRNA sense strand
agucguagaucagcacuua

SEQ ID NO: 1872319 - RNA, 19 nt, Homo sapiens
  misc_RNA (1)...(19): siRNA sense strand
gggaaaagauuuacucaga

SEQ ID NO: 1872320 - RNA, 19 nt, Homo sapiens
  misc_RNA (1)...(19): siRNA sense strand
gguuggaucuugacuuuca

SEQ ID NO: 1872321 - RNA, 19 nt, Homo sapiens
  misc_RNA (1)...(19): siRNA sense strand
auacaaaugugaugagugu

SEQ ID NO: 1872322 - RNA, 19 nt, Homo sapiens
  misc_RNA (1)...(19): siRNA sense strand
gaauguucauguuggagaa

SEQ ID NO: 1872323 - RNA, 19 nt, Homo sapiens
  misc_RNA (1)...(19): siRNA sense strand
guucaaauguguggaaugu

SEQ ID NO: 1872324 - RNA, 19 nt, Homo sapiens
  misc_RNA (1)...(19): siRNA sense strand
gcgcuugaaucuugauaug

SEQ ID NO: 1872325 - RNA, 19 nt, Homo sapiens
  misc_RNA (1)...(19): siRNA sense strand
caaggacuaucuguaauuc

SEQ ID NO: 1872326 - RNA, 19 nt, Homo sapiens
  misc_RNA (1)...(19): siRNA sense strand
caggagagaaaccuuauaa

SEQ ID NO: 1872327 - RNA, 19 nt, Homo sapiens
  misc_RNA (1)...(19): siRNA sense strand
caggagagaaacuguauaa

SEQ ID NO: 1872328 - RNA, 19 nt, Homo sapiens
  misc_RNA (1)...(19): siRNA sense strand
uaauaggcauuccaugguu

SEQ ID NO: 1872329 - RNA, 19 nt, Homo sapiens
  misc_RNA (1)...(19): siRNA sense strand
ggaauucagucagaguuca

SEQ ID NO: 1872330 - RNA, 19 nt, Homo sapiens
  misc_RNA (1)...(19): siRNA sense strand
gagaaaagccauacaaaug

SEQ ID NO: 1872331 - RNA, 19 nt, Homo sapiens
  misc_RNA (1)...(19): siRNA sense strand
gagaaaagccauacaaaug

SEQ ID NO: 1872332 - RNA, 19 nt, Homo sapiens
  misc_RNA (1)...(19): siRNA sense strand
gaaugugggaagagcuuua

SEQ ID NO: 1872333 - RNA, 19 nt, Homo sapiens
  misc_RNA (1)...(19): siRNA sense strand
uaagagcuuucgucagaga

SEQ ID NO: 1872334 - RNA, 19 nt, Homo sapiens
  misc_RNA (1)...(19): siRNA sense strand
gagaaaccuuauaauugug

SEQ ID NO: 1872335 - RNA, 19 nt, Homo sapiens
  misc_RNA (1)...(19): siRNA sense strand
guaauucacacaagacaga

SEQ ID NO: 1872336 - RNA, 19 nt, Homo sapiens
  misc_RNA (1)...(19): siRNA sense strand
aacaggcgcuugaaucuug

SEQ ID NO: 1872337 - RNA, 19 nt, Homo sapiens
  misc_RNA (1)...(19): siRNA sense strand
cagcuucauucucaucaaa

SEQ ID NO: 1872338 - RNA, 19 nt, Homo sapiens
  misc_RNA (1)...(19): siRNA sense strand
ggaaaagauuuacucagaa

SEQ ID NO: 1872339 - RNA, 19 nt, Homo sapiens
  misc_RNA (1)...(19): siRNA sense strand
gaugugauacgugugauaa

SEQ ID NO: 1872340 - RNA, 19 nt, Homo sapiens
  misc_RNA (1)...(19): siRNA sense strand
ugacgugugugguaaggaa

SEQ ID NO: 1872341 - RNA, 19 nt, Homo sapiens
  misc_RNA (1)...(19): siRNA sense strand
ugaagaaugugggaaagga

SEQ ID NO: 1872342 - RNA, 19 nt, Homo sapiens
  misc_RNA (1)...(19): siRNA sense strand
ggaaguguagggaguguga

SEQ ID NO: 1872343 - RNA, 19 nt, Homo sapiens
  misc_RNA (1)...(19): siRNA sense strand
gggccacaauaguaaguuu

SEQ ID NO: 1872344 - RNA, 19 nt, Homo sapiens
  misc_RNA (1)...(19): siRNA sense strand
agaaaucucauacguguga

SEQ ID NO: 1872345 - RNA, 19 nt, Homo sapiens
  misc_RNA (1)...(19): siRNA sense strand
ggaagagauuuacucaaaa

SEQ ID NO: 1872346 - RNA, 19 nt, Homo sapiens
  misc_RNA (1)...(19): siRNA sense strand
agagaaaccauacaaaugu

SEQ ID NO: 1872347 - RNA, 19 nt, Homo sapiens
  misc_RNA (1)...(19): siRNA sense strand
gagaucagcacuuaauagu

SEQ ID NO: 1872348 - RNA, 19 nt, Homo sapiens
  misc_RNA (1)...(19): siRNA sense strand
caauuacacucaggagaga

SEQ ID NO: 1872349 - RNA, 19 nt, Homo sapiens
  misc_RNA (1)...(19): siRNA sense strand
gcuugaaucuugauaugca

SEQ ID NO: 1872350 - RNA, 19 nt, Homo sapiens
  misc_RNA (1)...(19): siRNA sense strand
auucacagcuucauucuca

SEQ ID NO: 1872351 - RNA, 19 nt, Homo sapiens
  misc_RNA (1)...(19): siRNA sense strand
aaaggagguuggaucuuga

SEQ ID NO: 1872352 - RNA, 19 nt, Homo sapiens
  misc_RNA (1)...(19): siRNA sense strand
caucucagcccuucguauu

SEQ ID NO: 1872353 - RNA, 19 nt, Homo sapiens
  misc_RNA (1)...(19): siRNA sense strand
ggagugugauaugugcuuu

SEQ ID NO: 1872354 - RNA, 19 nt, Homo sapiens
  misc_RNA (1)...(19): siRNA sense strand
gaaaagccauacaaaugug

SEQ ID NO: 1872355 - RNA, 19 nt, Homo sapiens
  misc_RNA (1)...(19): siRNA sense strand
gaaaagccauacaaaugug

SEQ ID NO: 1872356 - RNA, 19 nt, Homo sapiens
  misc_RNA (1)...(19): siRNA sense strand
gaaaagccauacaaaugug

SEQ ID NO: 1872357 - RNA, 19 nt, Homo sapiens
  misc_RNA (1)...(19): siRNA sense strand
agaugggccucgugucuuu

SEQ ID NO: 1872358 - RNA, 19 nt, Homo sapiens
  misc_RNA (1)...(19): siRNA sense strand
agagaaaccguucaaaugu

SEQ ID NO: 1872359 - RNA, 19 nt, Homo sapiens
  misc_RNA (1)...(19): siRNA sense strand
gaacuuuuguuacaucuca

SEQ ID NO: 1872360 - RNA, 19 nt, Homo sapiens
  misc_RNA (1)...(19): siRNA sense strand
ggaaaggauuuuacacaau

SEQ ID NO: 1872361 - RNA, 19 nt, Homo sapiens
  misc_RNA (1)...(19): siRNA sense strand
gguagaucaagacuuaaua

SEQ ID NO: 1872362 - RNA, 19 nt, Homo sapiens
  misc_RNA (1)...(19): siRNA sense strand
agaaaccguucaaaugugu

SEQ ID NO: 1872363 - RNA, 19 nt, Homo sapiens
  misc_RNA (1)...(19): siRNA sense strand
gggaagaacauuguacaga

SEQ ID NO: 1872364 - RNA, 19 nt, Homo sapiens
  misc_RNA (1)...(19): siRNA sense strand
gauaaauagcucucaguuc

SEQ ID NO: 1872365 - RNA, 19 nt, Homo sapiens
  misc_RNA (1)...(19): siRNA sense strand
ggcaaggacuaucuguaau

SEQ ID NO: 1872366 - RNA, 19 nt, Homo sapiens
  misc_RNA (1)...(19): siRNA sense strand
aaaccauuccgaugugaua

SEQ ID NO: 1872367 - RNA, 19 nt, Homo sapiens
  misc_RNA (1)...(19): siRNA sense strand
ucaagaacaucagagaauc

SEQ ID NO: 1872368 - RNA, 19 nt, Homo sapiens
  misc_RNA (1)...(19): siRNA sense strand
acacaggagagaaaccuua

SEQ ID NO: 1872369 - RNA, 19 nt, Homo sapiens
  misc_RNA (1)...(19): siRNA sense strand
ugugauauaugugguaaga

SEQ ID NO: 1872370 - RNA, 19 nt, Homo sapiens
  misc_RNA (1)...(19): siRNA sense strand
ucagagaucagcacuuaau

SEQ ID NO: 1872371 - RNA, 19 nt, Homo sapiens
  misc_RNA (1)...(19): siRNA sense strand
gagaucccauaguggagaa

SEQ ID NO: 1872372 - RNA, 19 nt, Homo sapiens
  misc_RNA (1)...(19): siRNA sense strand
auacaaaugugagaagugu

SEQ ID NO: 1872373 - RNA, 19 nt, Homo sapiens
  misc_RNA (1)...(19): siRNA sense strand
gauccacacaggagagaaa

SEQ ID NO: 1872374 - RNA, 19 nt, Homo sapiens
  misc_RNA (1)...(19): siRNA sense strand
caucagaauguucauguug

SEQ ID NO: 1872375 - RNA, 19 nt, Homo sapiens
  misc_RNA (1)...(19): siRNA sense strand
caucuucauucccaucaga

SEQ ID NO: 1872376 - RNA, 19 nt, Homo sapiens
  misc_RNA (1)...(19): siRNA sense strand
ggagacuguuucagaagca

SEQ ID NO: 1872377 - RNA, 19 nt, Homo sapiens
  misc_RNA (1)...(19): siRNA sense strand
caaaggacaucaguuaaua

SEQ ID NO: 1872378 - RNA, 19 nt, Homo sapiens
  misc_RNA (1)...(19): siRNA sense strand
caacagaugccaccauuua

SEQ ID NO: 1872379 - RNA, 19 nt, Homo sapiens
  misc_RNA (1)...(19): siRNA sense strand
agacagacuuuguuacuua

SEQ ID NO: 1872380 - RNA, 19 nt, Homo sapiens
  misc_RNA (1)...(19): siRNA sense strand
gaaaggaugauauggauuu

SEQ ID NO: 1872381 - RNA, 19 nt, Homo sapiens
  misc_RNA (1)...(19): siRNA sense strand
gaagacugauauuauggua

SEQ ID NO: 1872382 - RNA, 19 nt, Homo sapiens
  misc_RNA (1)...(19): siRNA sense strand
ggacaucaguuaauaaggu

SEQ ID NO: 1872383 - RNA, 19 nt, Homo sapiens
  misc_RNA (1)...(19): siRNA sense strand
ugacuuugcuggcucauuu

SEQ ID NO: 1872384 - RNA, 19 nt, Homo sapiens
  misc_RNA (1)...(19): siRNA sense strand
uaacaagccugaggaagaa

SEQ ID NO: 1872385 - RNA, 19 nt, Homo sapiens
  misc_RNA (1)...(19): siRNA sense strand
gaacagaauugccacaaaa

SEQ ID NO: 1872386 - RNA, 19 nt, Homo sapiens
  misc_RNA (1)...(19): siRNA sense strand
gaaguccacuccaaaguca

SEQ ID NO: 1872387 - RNA, 19 nt, Homo sapiens
  misc_RNA (1)...(19): siRNA sense strand
ggauuucacucuaaugaga

SEQ ID NO: 1872388 - RNA, 19 nt, Homo sapiens
  misc_RNA (1)...(19): siRNA sense strand
caagcaagauuaccuuaug

SEQ ID NO: 1872389 - RNA, 19 nt, Homo sapiens
  misc_RNA (1)...(19): siRNA sense strand
caaagucaguacuaagaaa

SEQ ID NO: 1872390 - RNA, 19 nt, Homo sapiens
  misc_RNA (1)...(19): siRNA sense strand
gcuccaaagcucaauauua

SEQ ID NO: 1872391 - RNA, 19 nt, Homo sapiens
  misc_RNA (1)...(19): siRNA sense strand
guaaacaucccaauaugaa

SEQ ID NO: 1872392 - RNA, 19 nt, Homo sapiens
  misc_RNA (1)...(19): siRNA sense strand
gaaagugaauuggcuaaca

SEQ ID NO: 1872393 - RNA, 19 nt, Homo sapiens
  misc_RNA (1)...(19): siRNA sense strand
uagaagacguggaugauga

SEQ ID NO: 1872394 - RNA, 19 nt, Homo sapiens
  misc_RNA (1)...(19): siRNA sense strand
cuccaaagcucaauauuau

SEQ ID NO: 1872395 - RNA, 19 nt, Homo sapiens
  misc_RNA (1)...(19): siRNA sense strand
gaaaggugggaaacaguua

SEQ ID NO: 1872396 - RNA, 19 nt, Homo sapiens
  misc_RNA (1)...(19): siRNA sense strand
aacaaggacucaagagaua

SEQ ID NO: 1872397 - RNA, 19 nt, Homo sapiens
  misc_RNA (1)...(19): siRNA sense strand
ugaagaauuugcugaaguu

SEQ ID NO: 1872398 - RNA, 19 nt, Homo sapiens
  misc_RNA (1)...(19): siRNA sense strand
uaaauacgauccauucagu

SEQ ID NO: 1872399 - RNA, 19 nt, Homo sapiens
  misc_RNA (1)...(19): siRNA sense strand
guacagcaaugaauauucu

SEQ ID NO: 1872400 - RNA, 19 nt, Homo sapiens
  misc_RNA (1)...(19): siRNA sense strand
gagcuaaggauaacacauu

SEQ ID NO: 1872401 - RNA, 19 nt, Homo sapiens
  misc_RNA (1)...(19): siRNA sense strand
cucaugagcugcuuuguaa

SEQ ID NO: 1872402 - RNA, 19 nt, Homo sapiens
  misc_RNA (1)...(19): siRNA sense strand
gggaaacuauauucaguau

SEQ ID NO: 1872403 - RNA, 19 nt, Homo sapiens
  misc_RNA (1)...(19): siRNA sense strand
guaacaagccugaggaaga

SEQ ID NO: 1872404 - RNA, 19 nt, Homo sapiens
  misc_RNA (1)...(19): siRNA sense strand
gaagauggaggaacauuca

SEQ ID NO: 1872405 - RNA, 19 nt, Homo sapiens
  misc_RNA (1)...(19): siRNA sense strand
gaaguuucuuuaggaagua

SEQ ID NO: 1872406 - RNA, 19 nt, Homo sapiens
  misc_RNA (1)...(19): siRNA sense strand
gaugaaguuucuuuaggaa

SEQ ID NO: 1872407 - RNA, 19 nt, Homo sapiens
  misc_RNA (1)...(19): siRNA sense strand
agacguggaugaugaagaa

SEQ ID NO: 1872408 - RNA, 19 nt, Homo sapiens
  misc_RNA (1)...(19): siRNA sense strand
ggaugcagaugaagaaagu

SEQ ID NO: 1872409 - RNA, 19 nt, Homo sapiens
  misc_RNA (1)...(19): siRNA sense strand
uaaccuggaugacgaugaa

SEQ ID NO: 1872410 - RNA, 19 nt, Homo sapiens
  misc_RNA (1)...(19): siRNA sense strand
gauccaaguuugauaacau

SEQ ID NO: 1872411 - RNA, 19 nt, Homo sapiens
  misc_RNA (1)...(19): siRNA sense strand
agacaaagaaacagagaua

SEQ ID NO: 1872412 - RNA, 19 nt, Homo sapiens
  misc_RNA (1)...(19): siRNA sense strand
gguaugaucuggaguacag

SEQ ID NO: 1872413 - RNA, 19 nt, Homo sapiens
  misc_RNA (1)...(19): siRNA sense strand
ucugaaagcugacauugug

SEQ ID NO: 1872414 - RNA, 19 nt, Homo sapiens
  misc_RNA (1)...(19): siRNA sense strand
gaagaugaaccagcugaaa

SEQ ID NO: 1872415 - RNA, 19 nt, Homo sapiens
  misc_RNA (1)...(19): siRNA sense strand
gugggaaacaguuaaauaa

SEQ ID NO: 1872416 - RNA, 19 nt, Homo sapiens
  misc_RNA (1)...(19): siRNA sense strand
aaacagcagugccuuaugg

SEQ ID NO: 1872417 - RNA, 19 nt, Homo sapiens
  misc_RNA (1)...(19): siRNA sense strand
ggaggcaaaugguaugauc

SEQ ID NO: 1872418 - RNA, 19 nt, Homo sapiens
  misc_RNA (1)...(19): siRNA sense strand
caacaaggacucaagagau

SEQ ID NO: 1872419 - RNA, 19 nt, Homo sapiens
  misc_RNA (1)...(19): siRNA sense strand
cgaugaaguuucuuuagga

SEQ ID NO: 1872420 - RNA, 19 nt, Homo sapiens
  misc_RNA (1)...(19): siRNA sense strand
ggugggaaacaguuaaaua

SEQ ID NO: 1872421 - RNA, 19 nt, Homo sapiens
  misc_RNA (1)...(19): siRNA sense strand
cuuuauaucuugugucuga

SEQ ID NO: 1872422 - RNA, 19 nt, Homo sapiens
  misc_RNA (1)...(19): siRNA sense strand
gcagauugacacacuguuu

SEQ ID NO: 1872423 - RNA, 19 nt, Homo sapiens
  misc_RNA (1)...(19): siRNA sense strand
ucagcaaggugaauuggaa

SEQ ID NO: 1872424 - RNA, 19 nt, Homo sapiens
  misc_RNA (1)...(19): siRNA sense strand
gauaacacauuagaugaag

SEQ ID NO: 1872425 - RNA, 19 nt, Homo sapiens
  misc_RNA (1)...(19): siRNA sense strand
aaacugauguagaaaccaa

SEQ ID NO: 1872426 - RNA, 19 nt, Homo sapiens
  misc_RNA (1)...(19): siRNA sense strand
gcucaaauaucagcuccaa

SEQ ID NO: 1872427 - RNA, 19 nt, Homo sapiens
  misc_RNA (1)...(19): siRNA sense strand
agucaaaggacaucaguua

SEQ ID NO: 1872428 - RNA, 19 nt, Homo sapiens
  misc_RNA (1)...(19): siRNA sense strand
gagacagacuuuguuacuu

SEQ ID NO: 1872429 - RNA, 19 nt, Homo sapiens
  misc_RNA (1)...(19): siRNA sense strand
uaggaaguauggaugauga

SEQ ID NO: 1872430 - RNA, 19 nt, Homo sapiens
  misc_RNA (1)...(19): siRNA sense strand
ggauaacacauuagaugaa

SEQ ID NO: 1872431 - RNA, 19 nt, Homo sapiens
  misc_RNA (1)...(19): siRNA sense strand
aaagugaauuggcuaacaa

SEQ ID NO: 1872432 - RNA, 19 nt, Homo sapiens
  misc_RNA (1)...(19): siRNA sense strand
gcaacaaggacucaagaga

SEQ ID NO: 1872433 - RNA, 19 nt, Homo sapiens
  misc_RNA (1)...(19): siRNA sense strand
gcaaacagcagugccuuau

SEQ ID NO: 1872434 - RNA, 19 nt, Homo sapiens
  misc_RNA (1)...(19): siRNA sense strand
ugagagacagacuuuguua

SEQ ID NO: 1872435 - RNA, 19 nt, Homo sapiens
  misc_RNA (1)...(19): siRNA sense strand
ggaugacgaugaaguuucu

SEQ ID NO: 1872436 - RNA, 19 nt, Homo sapiens
  misc_RNA (1)...(19): siRNA sense strand
cguggaugaugaagaauuu

SEQ ID NO: 1872437 - RNA, 19 nt, Homo sapiens
  misc_RNA (1)...(19): siRNA sense strand
cagauugacacacuguuua

SEQ ID NO: 1872438 - RNA, 19 nt, Homo sapiens
  misc_RNA (1)...(19): siRNA sense strand
ggccuuggauacuuucaaa

SEQ ID NO: 1872439 - RNA, 19 nt, Homo sapiens
  misc_RNA (1)...(19): siRNA sense strand
gcagccaugauucuucuua

SEQ ID NO: 1872440 - RNA, 19 nt, Homo sapiens
  misc_RNA (1)...(19): siRNA sense strand
gaucuggaguacagcaaug

SEQ ID NO: 1872441 - RNA, 19 nt, Homo sapiens
  misc_RNA (1)...(19): siRNA sense strand
gggacccacugcaggauuu

SEQ ID NO: 1872442 - RNA, 19 nt, Homo sapiens
  misc_RNA (1)...(19): siRNA sense strand
gggugcacuuugauaauuu

SEQ ID NO: 1872443 - RNA, 19 nt, Homo sapiens
  misc_RNA (1)...(19): siRNA sense strand
uguccaggcuuuaauguug

SEQ ID NO: 1872444 - RNA, 19 nt, Homo sapiens
  misc_RNA (1)...(19): siRNA sense strand
aaaguaagacgaauaguca

SEQ ID NO: 1872445 - RNA, 19 nt, Homo sapiens
  misc_RNA (1)...(19): siRNA sense strand
gaaccacauucugaugaga

SEQ ID NO: 1872446 - RNA, 19 nt, Homo sapiens
  misc_RNA (1)...(19): siRNA sense strand
gaaaagguacagaugauuu

SEQ ID NO: 1872447 - RNA, 19 nt, Homo sapiens
  misc_RNA (1)...(19): siRNA sense strand
caagcaagcuauguuucuu

SEQ ID NO: 1872448 - RNA, 19 nt, Homo sapiens
  misc_RNA (1)...(19): siRNA sense strand
gacuggugaugacaaagua

SEQ ID NO: 1872449 - RNA, 19 nt, Homo sapiens
  misc_RNA (1)...(19): siRNA sense strand
ucacacacuucaguuugua

SEQ ID NO: 1872450 - RNA, 19 nt, Homo sapiens
  misc_RNA (1)...(19): siRNA sense strand
caccgaaaguaaagaaaga

SEQ ID NO: 1872451 - RNA, 19 nt, Homo sapiens
  misc_RNA (1)...(19): siRNA sense strand
agaauuugcugaaguugau

SEQ ID NO: 1872452 - RNA, 19 nt, Homo sapiens
  misc_RNA (1)...(19): siRNA sense strand
caaagaaacagagauagug

SEQ ID NO: 1872453 - RNA, 19 nt, Homo sapiens
  misc_RNA (1)...(19): siRNA sense strand
gucaacagaugccaccauu

SEQ ID NO: 1872454 - RNA, 19 nt, Homo sapiens
  misc_RNA (1)...(19): siRNA sense strand
gcaggucuuagaaacuuua

SEQ ID NO: 1872455 - RNA, 19 nt, Homo sapiens
  misc_RNA (1)...(19): siRNA sense strand
gugcaggucuuagaaacuu

SEQ ID NO: 1872456 - RNA, 19 nt, Homo sapiens
  misc_RNA (1)...(19): siRNA sense strand
ggaguacagcaaugaauau

SEQ ID NO: 1872457 - RNA, 19 nt, Homo sapiens
  misc_RNA (1)...(19): siRNA sense strand
agugauagauggaggcaaa

SEQ ID NO: 1872458 - RNA, 19 nt, Homo sapiens
  misc_RNA (1)...(19): siRNA sense strand
aauaugggauccaaguuug

SEQ ID NO: 1872459 - RNA, 19 nt, Homo sapiens
  misc_RNA (1)...(19): siRNA sense strand
uguaucugcugaagaguuu

SEQ ID NO: 1872460 - RNA, 19 nt, Homo sapiens
  misc_RNA (1)...(19): siRNA sense strand
aaguauggaugaugaagaa

SEQ ID NO: 1872461 - RNA, 19 nt, Homo sapiens
  misc_RNA (1)...(19): siRNA sense strand
acagaugccaccauuuaua

SEQ ID NO: 1872462 - RNA, 19 nt, Homo sapiens
  misc_RNA (1)...(19): siRNA sense strand
aagaguugcuuaucacaga

SEQ ID NO: 1872463 - RNA, 19 nt, Homo sapiens
  misc_RNA (1)...(19): siRNA sense strand
cucaggauguuguaucuaa

SEQ ID NO: 1872464 - RNA, 19 nt, Homo sapiens
  misc_RNA (1)...(19): siRNA sense strand
uguguuagaugaugaaagu

SEQ ID NO: 1872465 - RNA, 19 nt, Homo sapiens
  misc_RNA (1)...(19): siRNA sense strand
gaaguauggaugaugaaga

SEQ ID NO: 1872466 - RNA, 19 nt, Homo sapiens
  misc_RNA (1)...(19): siRNA sense strand
ugaaguuucuuuaggaagu

SEQ ID NO: 1872467 - RNA, 19 nt, Homo sapiens
  misc_RNA (1)...(19): siRNA sense strand
gaaagcugacauuguguug

SEQ ID NO: 1872468 - RNA, 19 nt, Homo sapiens
  misc_RNA (1)...(19): siRNA sense strand
cuacaaaucucugaaagcu

SEQ ID NO: 1872469 - RNA, 19 nt, Homo sapiens
  misc_RNA (1)...(19): siRNA sense strand
ggacucaagagauagaaga

SEQ ID NO: 1872470 - RNA, 19 nt, Homo sapiens
  misc_RNA (1)...(19): siRNA sense strand
agagauagaagacugauau

SEQ ID NO: 1872471 - RNA, 19 nt, Homo sapiens
  misc_RNA (1)...(19): siRNA sense strand
ugaagaguuuggccaucua

SEQ ID NO: 1872472 - RNA, 19 nt, Homo sapiens
  misc_RNA (1)...(19): siRNA sense strand
ugaaguugaugaagaugga

SEQ ID NO: 1872473 - RNA, 19 nt, Homo sapiens
  misc_RNA (1)...(19): siRNA sense strand
ugacacauuugaagaugau

SEQ ID NO: 1872474 - RNA, 19 nt, Homo sapiens
  misc_RNA (1)...(19): siRNA sense strand
ccaaauaccaguggaugaa

SEQ ID NO: 1872475 - RNA, 19 nt, Homo sapiens
  misc_RNA (1)...(19): siRNA sense strand
ucaaauaucagcuccaaag

SEQ ID NO: 1872476 - RNA, 19 nt, Homo sapiens
  misc_RNA (1)...(19): siRNA sense strand
agaacagaauugccacaaa

SEQ ID NO: 1872477 - RNA, 19 nt, Homo sapiens
  misc_RNA (1)...(19): siRNA sense strand
gcacuaaaguucacaagaa

SEQ ID NO: 1872478 - RNA, 19 nt, Homo sapiens
  misc_RNA (1)...(19): siRNA sense strand
gcaaagaauggacuuguaa

SEQ ID NO: 1872479 - RNA, 19 nt, Homo sapiens
  misc_RNA (1)...(19): siRNA sense strand
agaauggacuuguaauuug

SEQ ID NO: 1872480 - RNA, 19 nt, Homo sapiens
  misc_RNA (1)...(19): siRNA sense strand
ggcaaagaauggacuugua

SEQ ID NO: 1872481 - RNA, 19 nt, Homo sapiens
  misc_RNA (1)...(19): siRNA sense strand
cagaagguuugaagcauuu

SEQ ID NO: 1872482 - RNA, 19 nt, Homo sapiens
  misc_RNA (1)...(19): siRNA sense strand
cagcaaacgucgagugaga

SEQ ID NO: 1872483 - RNA, 19 nt, Homo sapiens
  misc_RNA (1)...(19): siRNA sense strand
gaucugaagacucaaauug

SEQ ID NO: 1872484 - RNA, 19 nt, Homo sapiens
  misc_RNA (1)...(19): siRNA sense strand
gaaaugcuaccuugcuuca

SEQ ID NO: 1872485 - RNA, 19 nt, Homo sapiens
  misc_RNA (1)...(19): siRNA sense strand
ucagaagguuugaagcauu

SEQ ID NO: 1872486 - RNA, 19 nt, Homo sapiens
  misc_RNA (1)...(19): siRNA sense strand
cacuaaaguucacaagaaa

SEQ ID NO: 1872487 - RNA, 19 nt, Homo sapiens
  misc_RNA (1)...(19): siRNA sense strand
gaauggacuuguaauuugc

SEQ ID NO: 1872488 - RNA, 19 nt, Homo sapiens
  misc_RNA (1)...(19): siRNA sense strand
ucaacgcccuccaagacua

SEQ ID NO: 1872489 - RNA, 19 nt, Homo sapiens
  misc_RNA (1)...(19): siRNA sense strand
agacaaggauggagaucug

SEQ ID NO: 1872490 - RNA, 19 nt, Homo sapiens
  misc_RNA (1)...(19): siRNA sense strand
cagccacacauccagauua

SEQ ID NO: 1872491 - RNA, 19 nt, Homo sapiens
  misc_RNA (1)...(19): siRNA sense strand
ggagaucugaagacucaaa

SEQ ID NO: 1872492 - RNA, 19 nt, Homo sapiens
  misc_RNA (1)...(19): siRNA sense strand
gaagacugcauuuccaaag

SEQ ID NO: 1872493 - RNA, 19 nt, Homo sapiens
  misc_RNA (1)...(19): siRNA sense strand
ggucacggaaggcaaguuu

SEQ ID NO: 1872494 - RNA, 19 nt, Homo sapiens
  misc_RNA (1)...(19): siRNA sense strand
gaacuccgacgaaaucaac

SEQ ID NO: 1872495 - RNA, 19 nt, Homo sapiens
  misc_RNA (1)...(19): siRNA sense strand
gcaaacgucgagugagaga

SEQ ID NO: 1872496 - RNA, 19 nt, Homo sapiens
  misc_RNA (1)...(19): siRNA sense strand
aaugcuaccuugcuucaga

SEQ ID NO: 1872497 - RNA, 19 nt, Homo sapiens
  misc_RNA (1)...(19): siRNA sense strand
guuugaagcauuuccauga

SEQ ID NO: 1872498 - RNA, 19 nt, Homo sapiens
  misc_RNA (1)...(19): siRNA sense strand
ggauggagaucugaagacu

SEQ ID NO: 1872499 - RNA, 19 nt, Homo sapiens
  misc_RNA (1)...(19): siRNA sense strand
agccacacauccagauuaa

SEQ ID NO: 1872500 - RNA, 19 nt, Homo sapiens
  misc_RNA (1)...(19): siRNA sense strand
cuaaaguucacaagaaaug

SEQ ID NO: 1872501 - RNA, 19 nt, Homo sapiens
  misc_RNA (1)...(19): siRNA sense strand
aagaaaugcuaccuugcuu

SEQ ID NO: 1872502 - RNA, 19 nt, Homo sapiens
  misc_RNA (1)...(19): siRNA sense strand
agacugcauuuccaaagga

SEQ ID NO: 1872503 - RNA, 19 nt, Homo sapiens
  misc_RNA (1)...(19): siRNA sense strand
auggagaucugaagacuca

SEQ ID NO: 1872504 - RNA, 19 nt, Homo sapiens
  misc_RNA (1)...(19): siRNA sense strand
gcagcaagagauacauaug

SEQ ID NO: 1872505 - RNA, 19 nt, Homo sapiens
  misc_RNA (1)...(19): siRNA sense strand
cagcagcaagagauacaua

SEQ ID NO: 1872506 - RNA, 19 nt, Homo sapiens
  misc_RNA (1)...(19): siRNA sense strand
cgaaaucaacgcccuccaa

SEQ ID NO: 1872507 - RNA, 19 nt, Homo sapiens
  misc_RNA (1)...(19): siRNA sense strand
caaagaauggacuuguaau

SEQ ID NO: 1872508 - RNA, 19 nt, Homo sapiens
  misc_RNA (1)...(19): siRNA sense strand
agagauacauaugcgaguu

SEQ ID NO: 1872509 - RNA, 19 nt, Homo sapiens
  misc_RNA (1)...(19): siRNA sense strand
ccacacauccagauuaaaa

SEQ ID NO: 1872510 - RNA, 19 nt, Homo sapiens
  misc_RNA (1)...(19): siRNA sense strand
caggaacuccgacgaaauc

SEQ ID NO: 1872511 - RNA, 19 nt, Homo sapiens
  misc_RNA (1)...(19): siRNA sense strand
cagggcaaguggagugaug

SEQ ID NO: 1872512 - RNA, 19 nt, Homo sapiens
  misc_RNA (1)...(19): siRNA sense strand
ccuccaagacuaugguaaa

SEQ ID NO: 1872513 - RNA, 19 nt, Homo sapiens
  misc_RNA (1)...(19): siRNA sense strand
cccaggaacuccgacgaaa

SEQ ID NO: 1872514 - RNA, 19 nt, Homo sapiens
  misc_RNA (1)...(19): siRNA sense strand
gcauuuccaugaggccaau

SEQ ID NO: 1872515 - RNA, 19 nt, Homo sapiens
  misc_RNA (1)...(19): siRNA sense strand
ucacaagaaaugcuaccuu

SEQ ID NO: 1872516 - RNA, 19 nt, Homo sapiens
  misc_RNA (1)...(19): siRNA sense strand
ucacggaaggcaaguuugu

SEQ ID NO: 1872517 - RNA, 19 nt, Homo sapiens
  misc_RNA (1)...(19): siRNA sense strand
uaauuugcauccuggugau

SEQ ID NO: 1872518 - RNA, 19 nt, Homo sapiens
  misc_RNA (1)...(19): siRNA sense strand
ugaagacugcauuuccaaa

SEQ ID NO: 1872519 - RNA, 19 nt, Homo sapiens
  misc_RNA (1)...(19): siRNA sense strand
gagauacauaugcgaguuc

SEQ ID NO: 1872520 - RNA, 19 nt, Homo sapiens
  misc_RNA (1)...(19): siRNA sense strand
ggaacuccgacgaaaucaa

SEQ ID NO: 1872521 - RNA, 19 nt, Homo sapiens
  misc_RNA (1)...(19): siRNA sense strand
caacgcccuccaagacuau

SEQ ID NO: 1872522 - RNA, 19 nt, Homo sapiens
  misc_RNA (1)...(19): siRNA sense strand
aaacgucgagugagagaca

SEQ ID NO: 1872523 - RNA, 19 nt, Homo sapiens
  misc_RNA (1)...(19): siRNA sense strand
gagagacaaggauggagau

SEQ ID NO: 1872524 - RNA, 19 nt, Homo sapiens
  misc_RNA (1)...(19): siRNA sense strand
agaaaacuguguccuguuc

SEQ ID NO: 1872525 - RNA, 19 nt, Homo sapiens
  misc_RNA (1)...(19): siRNA sense strand
ccaggaacuccgacgaaau

SEQ ID NO: 1872526 - RNA, 19 nt, Homo sapiens
  misc_RNA (1)...(19): siRNA sense strand
gcuaucuccuuccucaacu

SEQ ID NO: 1872527 - RNA, 19 nt, Homo sapiens
  misc_RNA (1)...(19): siRNA sense strand
gagaucugaagacucaaau

SEQ ID NO: 1872528 - RNA, 19 nt, Homo sapiens
  misc_RNA (1)...(19): siRNA sense strand
gaguucaccaucccucaau

SEQ ID NO: 1872529 - RNA, 19 nt, Homo sapiens
  misc_RNA (1)...(19): siRNA sense strand
aaucaacgcccuccaagac

SEQ ID NO: 1872530 - RNA, 19 nt, Homo sapiens
  misc_RNA (1)...(19): siRNA sense strand
uccaugaggccaaugaaga

SEQ ID NO: 1872531 - RNA, 19 nt, Homo sapiens
  misc_RNA (1)...(19): siRNA sense strand
cacagcaaacgucgaguga

SEQ ID NO: 1872532 - RNA, 19 nt, Homo sapiens
  misc_RNA (1)...(19): siRNA sense strand
gcgaggcacuaaaguucac

SEQ ID NO: 1872533 - RNA, 19 nt, Homo sapiens
  misc_RNA (1)...(19): siRNA sense strand
ggaaggcaaguuuguugac

SEQ ID NO: 1872534 - RNA, 19 nt, Homo sapiens
  misc_RNA (1)...(19): siRNA sense strand
ggcacuaaaguucacaaga

SEQ ID NO: 1872535 - RNA, 19 nt, Homo sapiens
  misc_RNA (1)...(19): siRNA sense strand
agaccucacuguaagaaua

SEQ ID NO: 1872536 - RNA, 19 nt, Homo sapiens
  misc_RNA (1)...(19): siRNA sense strand
agacugaacuacuucuuag

SEQ ID NO: 1872537 - RNA, 19 nt, Homo sapiens
  misc_RNA (1)...(19): siRNA sense strand
cagacugaacuacuucuua

SEQ ID NO: 1872538 - RNA, 19 nt, Homo sapiens
  misc_RNA (1)...(19): siRNA sense strand
ugaagcaaauucucagacu

SEQ ID NO: 1872539 - RNA, 19 nt, Homo sapiens
  misc_RNA (1)...(19): siRNA sense strand
cuucuuagaccucacugua

SEQ ID NO: 1872540 - RNA, 19 nt, Homo sapiens
  misc_RNA (1)...(19): siRNA sense strand
uaugauagauuugcaagcu

SEQ ID NO: 1872541 - RNA, 19 nt, Homo sapiens
  misc_RNA (1)...(19): siRNA sense strand
gaccucacuguaagaauau

SEQ ID NO: 1872542 - RNA, 19 nt, Homo sapiens
  misc_RNA (1)...(19): siRNA sense strand
uaucugaagcaaauucuca

SEQ ID NO: 1872543 - RNA, 19 nt, Homo sapiens
  misc_RNA (1)...(19): siRNA sense strand
uuugcaagcugcucauuuu

SEQ ID NO: 1872544 - RNA, 19 nt, Homo sapiens
  misc_RNA (1)...(19): siRNA sense strand
ccaagaagauguuugcaua

SEQ ID NO: 1872545 - RNA, 19 nt, Homo sapiens
  misc_RNA (1)...(19): siRNA sense strand
gaaccagggugaacacuuu

SEQ ID NO: 1872546 - RNA, 19 nt, Homo sapiens
  misc_RNA (1)...(19): siRNA sense strand
ggauaaaguuuccagugua

SEQ ID NO: 1872547 - RNA, 19 nt, Homo sapiens
  misc_RNA (1)...(19): siRNA sense strand
ccaagaagcugcaucaagu

SEQ ID NO: 1872548 - RNA, 19 nt, Homo sapiens
  misc_RNA (1)...(19): siRNA sense strand
gauaagcuaugaugugguu

SEQ ID NO: 1872549 - RNA, 19 nt, Homo sapiens
  misc_RNA (1)...(19): siRNA sense strand
caaugaaacuccaaucaau

SEQ ID NO: 1872550 - RNA, 19 nt, Homo sapiens
  misc_RNA (1)...(19): siRNA sense strand
gauaaaguuuccaguguau

SEQ ID NO: 1872551 - RNA, 19 nt, Homo sapiens
  misc_RNA (1)...(19): siRNA sense strand
cuaaagacaugacuggaaa

SEQ ID NO: 1872552 - RNA, 19 nt, Homo sapiens
  misc_RNA (1)...(19): siRNA sense strand
guuaagcgcuggaucaaug

SEQ ID NO: 1872553 - RNA, 19 nt, Homo sapiens
  misc_RNA (1)...(19): siRNA sense strand
gaagauaagcuaugaugug

SEQ ID NO: 1872554 - RNA, 19 nt, Homo sapiens
  misc_RNA (1)...(19): siRNA sense strand
uaucuuagcuucuguugga

SEQ ID NO: 1872555 - RNA, 19 nt, Homo sapiens
  misc_RNA (1)...(19): siRNA sense strand
gaucaccgauggaacaaug

SEQ ID NO: 1872556 - RNA, 19 nt, Homo sapiens
  misc_RNA (1)...(19): siRNA sense strand
ugaagaggcugucaacaau

SEQ ID NO: 1872557 - RNA, 19 nt, Homo sapiens
  misc_RNA (1)...(19): siRNA sense strand
ggagaagagugcuguuuua

SEQ ID NO: 1872558 - RNA, 19 nt, Homo sapiens
  misc_RNA (1)...(19): siRNA sense strand
gaagauguuugcauauucu

SEQ ID NO: 1872559 - RNA, 19 nt, Homo sapiens
  misc_RNA (1)...(19): siRNA sense strand
agaaaguacugaagccuaa

SEQ ID NO: 1872560 - RNA, 19 nt, Homo sapiens
  misc_RNA (1)...(19): siRNA sense strand
gaagaggcugucaacaaua

SEQ ID NO: 1872561 - RNA, 19 nt, Homo sapiens
  misc_RNA (1)...(19): siRNA sense strand
gguaguggcuccaauccuu

SEQ ID NO: 1872562 - RNA, 19 nt, Homo sapiens
  misc_RNA (1)...(19): siRNA sense strand
acaggaggcucguauauuc

SEQ ID NO: 1872563 - RNA, 19 nt, Homo sapiens
  misc_RNA (1)...(19): siRNA sense strand
ugagagguccgauaaagua

SEQ ID NO: 1872564 - RNA, 19 nt, Homo sapiens
  misc_RNA (1)...(19): siRNA sense strand
gcuggaagaucucgaagug

SEQ ID NO: 1872565 - RNA, 19 nt, Homo sapiens
  misc_RNA (1)...(19): siRNA sense strand
ggaguccuguaucaccuua

SEQ ID NO: 1872566 - RNA, 19 nt, Homo sapiens
  misc_RNA (1)...(19): siRNA sense strand
guucagcacugguaucuuc

SEQ ID NO: 1872567 - RNA, 19 nt, Homo sapiens
  misc_RNA (1)...(19): siRNA sense strand
uaaaguaccugagaacaag

SEQ ID NO: 1872568 - RNA, 19 nt, Homo sapiens
  misc_RNA (1)...(19): siRNA sense strand
gaacaacggaagcuacaga

SEQ ID NO: 1872569 - RNA, 19 nt, Homo sapiens
  misc_RNA (1)...(19): siRNA sense strand
ccaagauguugaauaaguu

SEQ ID NO: 1872570 - RNA, 19 nt, Homo sapiens
  misc_RNA (1)...(19): siRNA sense strand
aggagaaugugcuaccuua

SEQ ID NO: 1872571 - RNA, 19 nt, Homo sapiens
  misc_RNA (1)...(19): siRNA sense strand
ucaagucacaguuugcuua

SEQ ID NO: 1872572 - RNA, 19 nt, Homo sapiens
  misc_RNA (1)...(19): siRNA sense strand
guacugaagccuaacuuug

SEQ ID NO: 1872573 - RNA, 19 nt, Homo sapiens
  misc_RNA (1)...(19): siRNA sense strand
ggugaacacuuuggaacaa

SEQ ID NO: 1872574 - RNA, 19 nt, Homo sapiens
  misc_RNA (1)...(19): siRNA sense strand
ggucucaagucacaguuug

SEQ ID NO: 1872575 - RNA, 19 nt, Homo sapiens
  misc_RNA (1)...(19): siRNA sense strand
ugcaagccauugaaagaua

SEQ ID NO: 1872576 - RNA, 19 nt, Homo sapiens
  misc_RNA (1)...(19): siRNA sense strand
gauguuaucuuagcuucug

SEQ ID NO: 1872577 - RNA, 19 nt, Homo sapiens
  misc_RNA (1)...(19): siRNA sense strand
gacugugucugaccauauu

SEQ ID NO: 1872578 - RNA, 19 nt, Homo sapiens
  misc_RNA (1)...(19): siRNA sense strand
gggaagaggugggagauac

SEQ ID NO: 1872579 - RNA, 19 nt, Homo sapiens
  misc_RNA (1)...(19): siRNA sense strand
cagagguggcuaugauuua

SEQ ID NO: 1872580 - RNA, 19 nt, Homo sapiens
  misc_RNA (1)...(19): siRNA sense strand
ugaugaagauaagcuauga

SEQ ID NO: 1872581 - RNA, 19 nt, Homo sapiens
  misc_RNA (1)...(19): siRNA sense strand
uaaaucuggucucaaguca

SEQ ID NO: 1872582 - RNA, 19 nt, Homo sapiens
  misc_RNA (1)...(19): siRNA sense strand
uagaaagaaugaucgacuu

SEQ ID NO: 1872583 - RNA, 19 nt, Homo sapiens
  misc_RNA (1)...(19): siRNA sense strand
gaucaaugaagcccaagaa

SEQ ID NO: 1872584 - RNA, 19 nt, Homo sapiens
  misc_RNA (1)...(19): siRNA sense strand
aagaggcugucaacaauau

SEQ ID NO: 1872585 - RNA, 19 nt, Homo sapiens
  misc_RNA (1)...(19): siRNA sense strand
ggaaaccuuugcccucagu

SEQ ID NO: 1872586 - RNA, 19 nt, Homo sapiens
  misc_RNA (1)...(19): siRNA sense strand
agaagauguuugcauauuc

SEQ ID NO: 1872587 - RNA, 19 nt, Homo sapiens
  misc_RNA (1)...(19): siRNA sense strand
ugucagaaguaaagagaga

SEQ ID NO: 1872588 - RNA, 19 nt, Homo sapiens
  misc_RNA (1)...(19): siRNA sense strand
gaggauggguaugaugaug

SEQ ID NO: 1872589 - RNA, 19 nt, Homo sapiens
  misc_RNA (1)...(19): siRNA sense strand
agacaugacuggaaaagaa

SEQ ID NO: 1872590 - RNA, 19 nt, Homo sapiens
  misc_RNA (1)...(19): siRNA sense strand
gcaagccauugaaagauac

SEQ ID NO: 1872591 - RNA, 19 nt, Homo sapiens
  misc_RNA (1)...(19): siRNA sense strand
uguaucaccuuagaaagaa

SEQ ID NO: 1872592 - RNA, 19 nt, Homo sapiens
  misc_RNA (1)...(19): siRNA sense strand
caugugagagguccgauaa

SEQ ID NO: 1872593 - RNA, 19 nt, Homo sapiens
  misc_RNA (1)...(19): siRNA sense strand
gguaugaugaugaguaugu

SEQ ID NO: 1872594 - RNA, 19 nt, Homo sapiens
  misc_RNA (1)...(19): siRNA sense strand
uccaagauguugaauaagu

SEQ ID NO: 1872595 - RNA, 19 nt, Homo sapiens
  misc_RNA (1)...(19): siRNA sense strand
gggagauaccuuugagaaa

SEQ ID NO: 1872596 - RNA, 19 nt, Homo sapiens
  misc_RNA (1)...(19): siRNA sense strand
uaucuucccugcacaugau

SEQ ID NO: 1872597 - RNA, 19 nt, Homo sapiens
  misc_RNA (1)...(19): siRNA sense strand
aaagagagaacaccuguag

SEQ ID NO: 1872598 - RNA, 19 nt, Homo sapiens
  misc_RNA (1)...(19): siRNA sense strand
ucaaugaaacuccaaucaa

SEQ ID NO: 1872599 - RNA, 19 nt, Homo sapiens
  misc_RNA (1)...(19): siRNA sense strand
ccgauaaaguaccugagaa

SEQ ID NO: 1872600 - RNA, 19 nt, Homo sapiens
  misc_RNA (1)...(19): siRNA sense strand
uccuuuagcugcaccauga

SEQ ID NO: 1872601 - RNA, 19 nt, Homo sapiens
  misc_RNA (1)...(19): siRNA sense strand
gaaacuccaaucaauccaa

SEQ ID NO: 1872602 - RNA, 19 nt, Homo sapiens
  misc_RNA (1)...(19): siRNA sense strand
ccgaauugccagucgcuua

SEQ ID NO: 1872603 - RNA, 19 nt, Homo sapiens
  misc_RNA (1)...(19): siRNA sense strand
caagaagauguuugcauau

SEQ ID NO: 1872604 - RNA, 19 nt, Homo sapiens
  misc_RNA (1)...(19): siRNA sense strand
cugaggaugugauaauugu

SEQ ID NO: 1872605 - RNA, 19 nt, Homo sapiens
  misc_RNA (1)...(19): siRNA sense strand
agagguggcuaugauuuau

SEQ ID NO: 1872606 - RNA, 19 nt, Homo sapiens
  misc_RNA (1)...(19): siRNA sense strand
aaucuggucucaagucaca

SEQ ID NO: 1872607 - RNA, 19 nt, Homo sapiens
  misc_RNA (1)...(19): siRNA sense strand
gaagcaggccauuguggau

SEQ ID NO: 1872608 - RNA, 19 nt, Homo sapiens
  misc_RNA (1)...(19): siRNA sense strand
uaccuuaccaucaaagaaa

SEQ ID NO: 1872609 - RNA, 19 nt, Homo sapiens
  misc_RNA (1)...(19): siRNA sense strand
gagagaacaccuguagaug

SEQ ID NO: 1872610 - RNA, 19 nt, Homo sapiens
  misc_RNA (1)...(19): siRNA sense strand
ucagagguggcuaugauuu

SEQ ID NO: 1872611 - RNA, 19 nt, Homo sapiens
  misc_RNA (1)...(19): siRNA sense strand
caaugaagcccaagaagcu

SEQ ID NO: 1872612 - RNA, 19 nt, Homo sapiens
  misc_RNA (1)...(19): siRNA sense strand
gaggaugugauaauuguca

SEQ ID NO: 1872613 - RNA, 19 nt, Homo sapiens
  misc_RNA (1)...(19): siRNA sense strand
uaagcuaugaugugguuaa

SEQ ID NO: 1872614 - RNA, 19 nt, Homo sapiens
  misc_RNA (1)...(19): siRNA sense strand
gagaacaagaauucccauu

SEQ ID NO: 1872615 - RNA, 19 nt, Homo sapiens
  misc_RNA (1)...(19): siRNA sense strand
cagaugaggauggguauga

SEQ ID NO: 1872616 - RNA, 19 nt, Homo sapiens
  misc_RNA (1)...(19): siRNA sense strand
gcaggccauuguggauaaa

SEQ ID NO: 1872617 - RNA, 19 nt, Homo sapiens
  misc_RNA (1)...(19): siRNA sense strand
cuuagcuucuguuggauaa

SEQ ID NO: 1872618 - RNA, 19 nt, Homo sapiens
  misc_RNA (1)...(19): siRNA sense strand
ggauggguaugaugaugag

SEQ ID NO: 1872619 - RNA, 19 nt, Homo sapiens
  misc_RNA (1)...(19): siRNA sense strand
uccaaucaauccaagaaga

SEQ ID NO: 1872620 - RNA, 19 nt, Homo sapiens
  misc_RNA (1)...(19): siRNA sense strand
uacuaaaucuggucucaag

SEQ ID NO: 1872621 - RNA, 19 nt, Homo sapiens
  misc_RNA (1)...(19): siRNA sense strand
guugcaagccauugaaaga

SEQ ID NO: 1872622 - RNA, 19 nt, Homo sapiens
  misc_RNA (1)...(19): siRNA sense strand
agagaacaccuguagaugu

SEQ ID NO: 1872623 - RNA, 19 nt, Homo sapiens
  misc_RNA (1)...(19): siRNA sense strand
agagagaacaccuguagau

SEQ ID NO: 1872624 - RNA, 19 nt, Homo sapiens
  misc_RNA (1)...(19): siRNA sense strand
ggugggagauaccuuugag

SEQ ID NO: 1872625 - RNA, 19 nt, Homo sapiens
  misc_RNA (1)...(19): siRNA sense strand
gauaaaguaccugagaaca

SEQ ID NO: 1872626 - RNA, 19 nt, Homo sapiens
  misc_RNA (1)...(19): siRNA sense strand
gugcuaccuuaccaucaaa

SEQ ID NO: 1872627 - RNA, 19 nt, Homo sapiens
  misc_RNA (1)...(19): siRNA sense strand
auucagagguggcuaugau

SEQ ID NO: 1872628 - RNA, 19 nt, Homo sapiens
  misc_RNA (1)...(19): siRNA sense strand
cauugggaguccuguauca

SEQ ID NO: 1872629 - RNA, 19 nt, Homo sapiens
  misc_RNA (1)...(19): siRNA sense strand
ugugagagguccgauaaag

SEQ ID NO: 1872630 - RNA, 19 nt, Homo sapiens
  misc_RNA (1)...(19): siRNA sense strand
uaccugagaacaagaauuc

SEQ ID NO: 1872631 - RNA, 19 nt, Homo sapiens
  misc_RNA (1)...(19): siRNA sense strand
guaguggcuccaauccuuu

SEQ ID NO: 1872632 - RNA, 19 nt, Homo sapiens
  misc_RNA (1)...(19): siRNA sense strand
uuacaggaggcucguauau

SEQ ID NO: 1872633 - RNA, 19 nt, Homo sapiens
  misc_RNA (1)...(19): siRNA sense strand
gacgaggagucugguagug

SEQ ID NO: 1872634 - RNA, 19 nt, Homo sapiens
  misc_RNA (1)...(19): siRNA sense strand
ggacgaggagucugguagu

SEQ ID NO: 1872635 - RNA, 19 nt, Homo sapiens
  misc_RNA (1)...(19): siRNA sense strand
ggaggcucguauauucaau

SEQ ID NO: 1872636 - RNA, 19 nt, Homo sapiens
  misc_RNA (1)...(19): siRNA sense strand
ugucaacaauaucaucaca

SEQ ID NO: 1872637 - RNA, 19 nt, Homo sapiens
  misc_RNA (1)...(19): siRNA sense strand
ugaccauauucagaaagua

SEQ ID NO: 1872638 - RNA, 19 nt, Homo sapiens
  misc_RNA (1)...(19): siRNA sense strand
ugugcuaccuuaccaucaa

SEQ ID NO: 1872639 - RNA, 19 nt, Homo sapiens
  misc_RNA (1)...(19): siRNA sense strand
ccaaucaauccaagaagau

SEQ ID NO: 1872640 - RNA, 19 nt, Homo sapiens
  misc_RNA (1)...(19): siRNA sense strand
uggguaugaugaugaguau

SEQ ID NO: 1872641 - RNA, 19 nt, Homo sapiens
  misc_RNA (1)...(19): siRNA sense strand
uaaagagagaacaccugua

SEQ ID NO: 1872642 - RNA, 19 nt, Homo sapiens
  misc_RNA (1)...(19): siRNA sense strand
auaaaguaccugagaacaa

SEQ ID NO: 1872643 - RNA, 19 nt, Homo sapiens
  misc_RNA (1)...(19): siRNA sense strand
gugacugugucugaccaua

SEQ ID NO: 1872644 - RNA, 19 nt, Homo sapiens
  misc_RNA (1)...(19): siRNA sense strand
ccaagaagauguuugcaua

SEQ ID NO: 1872645 - RNA, 19 nt, Homo sapiens
  misc_RNA (1)...(19): siRNA sense strand
gaaccagggugaacacuuu

SEQ ID NO: 1872646 - RNA, 19 nt, Homo sapiens
  misc_RNA (1)...(19): siRNA sense strand
ggauaaaguuuccagugua

SEQ ID NO: 1872647 - RNA, 19 nt, Homo sapiens
  misc_RNA (1)...(19): siRNA sense strand
ccaagaagcugcaucaagu

SEQ ID NO: 1872648 - RNA, 19 nt, Homo sapiens
  misc_RNA (1)...(19): siRNA sense strand
gauaagcuaugaugugguu

SEQ ID NO: 1872649 - RNA, 19 nt, Homo sapiens
  misc_RNA (1)...(19): siRNA sense strand
caaugaaacuccaaucaau

SEQ ID NO: 1872650 - RNA, 19 nt, Homo sapiens
  misc_RNA (1)...(19): siRNA sense strand
gauaaaguuuccaguguau

SEQ ID NO: 1872651 - RNA, 19 nt, Homo sapiens
  misc_RNA (1)...(19): siRNA sense strand
cuaaagacaugacuggaaa

SEQ ID NO: 1872652 - RNA, 19 nt, Homo sapiens
  misc_RNA (1)...(19): siRNA sense strand
guuaagcgcuggaucaaug

SEQ ID NO: 1872653 - RNA, 19 nt, Homo sapiens
  misc_RNA (1)...(19): siRNA sense strand
gaagauaagcuaugaugug

SEQ ID NO: 1872654 - RNA, 19 nt, Homo sapiens
  misc_RNA (1)...(19): siRNA sense strand
uaucuuagcuucuguugga

SEQ ID NO: 1872655 - RNA, 19 nt, Homo sapiens
  misc_RNA (1)...(19): siRNA sense strand
gaucaccgauggaacaaug

SEQ ID NO: 1872656 - RNA, 19 nt, Homo sapiens
  misc_RNA (1)...(19): siRNA sense strand
ugaagaggcugucaacaau

SEQ ID NO: 1872657 - RNA, 19 nt, Homo sapiens
  misc_RNA (1)...(19): siRNA sense strand
ggagaagagugcuguuuua

SEQ ID NO: 1872658 - RNA, 19 nt, Homo sapiens
  misc_RNA (1)...(19): siRNA sense strand
gaagauguuugcauauucu

SEQ ID NO: 1872659 - RNA, 19 nt, Homo sapiens
  misc_RNA (1)...(19): siRNA sense strand
agaaaguacugaagccuaa

SEQ ID NO: 1872660 - RNA, 19 nt, Homo sapiens
  misc_RNA (1)...(19): siRNA sense strand
gaagaggcugucaacaaua

SEQ ID NO: 1872661 - RNA, 19 nt, Homo sapiens
  misc_RNA (1)...(19): siRNA sense strand
gguaguggcuccaauccuu

SEQ ID NO: 1872662 - RNA, 19 nt, Homo sapiens
  misc_RNA (1)...(19): siRNA sense strand
acaggaggcucguauauuc

SEQ ID NO: 1872663 - RNA, 19 nt, Homo sapiens
  misc_RNA (1)...(19): siRNA sense strand
ugagagguccgauaaagua

SEQ ID NO: 1872664 - RNA, 19 nt, Homo sapiens
  misc_RNA (1)...(19): siRNA sense strand
gcuggaagaucucgaagug

SEQ ID NO: 1872665 - RNA, 19 nt, Homo sapiens
  misc_RNA (1)...(19): siRNA sense strand
ggaguccuguaucaccuua

SEQ ID NO: 1872666 - RNA, 19 nt, Homo sapiens
  misc_RNA (1)...(19): siRNA sense strand
guucagcacugguaucuuc

SEQ ID NO: 1872667 - RNA, 19 nt, Homo sapiens
  misc_RNA (1)...(19): siRNA sense strand
uaaaguaccugagaacaag

SEQ ID NO: 1872668 - RNA, 19 nt, Homo sapiens
  misc_RNA (1)...(19): siRNA sense strand
gaacaacggaagcuacaga

SEQ ID NO: 1872669 - RNA, 19 nt, Homo sapiens
  misc_RNA (1)...(19): siRNA sense strand
ccaagauguugaauaaguu

SEQ ID NO: 1872670 - RNA, 19 nt, Homo sapiens
  misc_RNA (1)...(19): siRNA sense strand
aggagaaugugcuaccuua

SEQ ID NO: 1872671 - RNA, 19 nt, Homo sapiens
  misc_RNA (1)...(19): siRNA sense strand
ucaagucacaguuugcuua

SEQ ID NO: 1872672 - RNA, 19 nt, Homo sapiens
  misc_RNA (1)...(19): siRNA sense strand
guacugaagccuaacuuug

SEQ ID NO: 1872673 - RNA, 19 nt, Homo sapiens
  misc_RNA (1)...(19): siRNA sense strand
ggugaacacuuuggaacaa

SEQ ID NO: 1872674 - RNA, 19 nt, Homo sapiens
  misc_RNA (1)...(19): siRNA sense strand
ggucucaagucacaguuug

SEQ ID NO: 1872675 - RNA, 19 nt, Homo sapiens
  misc_RNA (1)...(19): siRNA sense strand
ugcaagccauugaaagaua

SEQ ID NO: 1872676 - RNA, 19 nt, Homo sapiens
  misc_RNA (1)...(19): siRNA sense strand
gauguuaucuuagcuucug

SEQ ID NO: 1872677 - RNA, 19 nt, Homo sapiens
  misc_RNA (1)...(19): siRNA sense strand
gacugugucugaccauauu

SEQ ID NO: 1872678 - RNA, 19 nt, Homo sapiens
  misc_RNA (1)...(19): siRNA sense strand
gggaagaggugggagauac

SEQ ID NO: 1872679 - RNA, 19 nt, Homo sapiens
  misc_RNA (1)...(19): siRNA sense strand
cagagguggcuaugauuua

SEQ ID NO: 1872680 - RNA, 19 nt, Homo sapiens
  misc_RNA (1)...(19): siRNA sense strand
ugaugaagauaagcuauga

SEQ ID NO: 1872681 - RNA, 19 nt, Homo sapiens
  misc_RNA (1)...(19): siRNA sense strand
uaaaucuggucucaaguca

SEQ ID NO: 1872682 - RNA, 19 nt, Homo sapiens
  misc_RNA (1)...(19): siRNA sense strand
uagaaagaaugaucgacuu

SEQ ID NO: 1872683 - RNA, 19 nt, Homo sapiens
  misc_RNA (1)...(19): siRNA sense strand
gaucaaugaagcccaagaa

SEQ ID NO: 1872684 - RNA, 19 nt, Homo sapiens
  misc_RNA (1)...(19): siRNA sense strand
aagaggcugucaacaauau

SEQ ID NO: 1872685 - RNA, 19 nt, Homo sapiens
  misc_RNA (1)...(19): siRNA sense strand
ggaaaccuuugcccucagu

SEQ ID NO: 1872686 - RNA, 19 nt, Homo sapiens
  misc_RNA (1)...(19): siRNA sense strand
agaagauguuugcauauuc

SEQ ID NO: 1872687 - RNA, 19 nt, Homo sapiens
  misc_RNA (1)...(19): siRNA sense strand
ugucagaaguaaagagaga

SEQ ID NO: 1872688 - RNA, 19 nt, Homo sapiens
  misc_RNA (1)...(19): siRNA sense strand
gaggauggguaugaugaug

SEQ ID NO: 1872689 - RNA, 19 nt, Homo sapiens
  misc_RNA (1)...(19): siRNA sense strand
agacaugacuggaaaagaa

SEQ ID NO: 1872690 - RNA, 19 nt, Homo sapiens
  misc_RNA (1)...(19): siRNA sense strand
gcaagccauugaaagauac

SEQ ID NO: 1872691 - RNA, 19 nt, Homo sapiens
  misc_RNA (1)...(19): siRNA sense strand
uguaucaccuuagaaagaa

SEQ ID NO: 1872692 - RNA, 19 nt, Homo sapiens
  misc_RNA (1)...(19): siRNA sense strand
caugugagagguccgauaa

SEQ ID NO: 1872693 - RNA, 19 nt, Homo sapiens
  misc_RNA (1)...(19): siRNA sense strand
gguaugaugaugaguaugu

SEQ ID NO: 1872694 - RNA, 19 nt, Homo sapiens
  misc_RNA (1)...(19): siRNA sense strand
uccaagauguugaauaagu

SEQ ID NO: 1872695 - RNA, 19 nt, Homo sapiens
  misc_RNA (1)...(19): siRNA sense strand
gggagauaccuuugagaaa

SEQ ID NO: 1872696 - RNA, 19 nt, Homo sapiens
  misc_RNA (1)...(19): siRNA sense strand
uaucuucccugcacaugau

SEQ ID NO: 1872697 - RNA, 19 nt, Homo sapiens
  misc_RNA (1)...(19): siRNA sense strand
aaagagagaacaccuguag

SEQ ID NO: 1872698 - RNA, 19 nt, Homo sapiens
  misc_RNA (1)...(19): siRNA sense strand
ucaaugaaacuccaaucaa

SEQ ID NO: 1872699 - RNA, 19 nt, Homo sapiens
  misc_RNA (1)...(19): siRNA sense strand
ccgauaaaguaccugagaa

SEQ ID NO: 1872700 - RNA, 19 nt, Homo sapiens
  misc_RNA (1)...(19): siRNA sense strand
uccuuuagcugcaccauga

SEQ ID NO: 1872701 - RNA, 19 nt, Homo sapiens
  misc_RNA (1)...(19): siRNA sense strand
gaaacuccaaucaauccaa

SEQ ID NO: 1872702 - RNA, 19 nt, Homo sapiens
  misc_RNA (1)...(19): siRNA sense strand
ccgaauugccagucgcuua

SEQ ID NO: 1872703 - RNA, 19 nt, Homo sapiens
  misc_RNA (1)...(19): siRNA sense strand
caagaagauguuugcauau

SEQ ID NO: 1872704 - RNA, 19 nt, Homo sapiens
  misc_RNA (1)...(19): siRNA sense strand
cugaggaugugauaauugu

SEQ ID NO: 1872705 - RNA, 19 nt, Homo sapiens
  misc_RNA (1)...(19): siRNA sense strand
agagguggcuaugauuuau

SEQ ID NO: 1872706 - RNA, 19 nt, Homo sapiens
  misc_RNA (1)...(19): siRNA sense strand
aaucuggucucaagucaca

SEQ ID NO: 1872707 - RNA, 19 nt, Homo sapiens
  misc_RNA (1)...(19): siRNA sense strand
gaagcaggccauuguggau

SEQ ID NO: 1872708 - RNA, 19 nt, Homo sapiens
  misc_RNA (1)...(19): siRNA sense strand
uaccuuaccaucaaagaaa

SEQ ID NO: 1872709 - RNA, 19 nt, Homo sapiens
  misc_RNA (1)...(19): siRNA sense strand
gagagaacaccuguagaug

SEQ ID NO: 1872710 - RNA, 19 nt, Homo sapiens
  misc_RNA (1)...(19): siRNA sense strand
ucagagguggcuaugauuu

SEQ ID NO: 1872711 - RNA, 19 nt, Homo sapiens
  misc_RNA (1)...(19): siRNA sense strand
caaugaagcccaagaagcu

SEQ ID NO: 1872712 - RNA, 19 nt, Homo sapiens
  misc_RNA (1)...(19): siRNA sense strand
gaggaugugauaauuguca

SEQ ID NO: 1872713 - RNA, 19 nt, Homo sapiens
  misc_RNA (1)...(19): siRNA sense strand
uaagcuaugaugugguuaa

SEQ ID NO: 1872714 - RNA, 19 nt, Homo sapiens
  misc_RNA (1)...(19): siRNA sense strand
gagaacaagaauucccauu

SEQ ID NO: 1872715 - RNA, 19 nt, Homo sapiens
  misc_RNA (1)...(19): siRNA sense strand
cagaugaggauggguauga

SEQ ID NO: 1872716 - RNA, 19 nt, Homo sapiens
  misc_RNA (1)...(19): siRNA sense strand
gcaggccauuguggauaaa

SEQ ID NO: 1872717 - RNA, 19 nt, Homo sapiens
  misc_RNA (1)...(19): siRNA sense strand
cuuagcuucuguuggauaa

SEQ ID NO: 1872718 - RNA, 19 nt, Homo sapiens
  misc_RNA (1)...(19): siRNA sense strand
ggauggguaugaugaugag

SEQ ID NO: 1872719 - RNA, 19 nt, Homo sapiens
  misc_RNA (1)...(19): siRNA sense strand
uccaaucaauccaagaaga

SEQ ID NO: 1872720 - RNA, 19 nt, Homo sapiens
  misc_RNA (1)...(19): siRNA sense strand
uacuaaaucuggucucaag

SEQ ID NO: 1872721 - RNA, 19 nt, Homo sapiens
  misc_RNA (1)...(19): siRNA sense strand
guugcaagccauugaaaga

SEQ ID NO: 1872722 - RNA, 19 nt, Homo sapiens
  misc_RNA (1)...(19): siRNA sense strand
agagaacaccuguagaugu

SEQ ID NO: 1872723 - RNA, 19 nt, Homo sapiens
  misc_RNA (1)...(19): siRNA sense strand
agagagaacaccuguagau

SEQ ID NO: 1872724 - RNA, 19 nt, Homo sapiens
  misc_RNA (1)...(19): siRNA sense strand
ggugggagauaccuuugag

SEQ ID NO: 1872725 - RNA, 19 nt, Homo sapiens
  misc_RNA (1)...(19): siRNA sense strand
gauaaaguaccugagaaca

SEQ ID NO: 1872726 - RNA, 19 nt, Homo sapiens
  misc_RNA (1)...(19): siRNA sense strand
gugcuaccuuaccaucaaa

SEQ ID NO: 1872727 - RNA, 19 nt, Homo sapiens
  misc_RNA (1)...(19): siRNA sense strand
auucagagguggcuaugau

SEQ ID NO: 1872728 - RNA, 19 nt, Homo sapiens
  misc_RNA (1)...(19): siRNA sense strand
cauugggaguccuguauca

SEQ ID NO: 1872729 - RNA, 19 nt, Homo sapiens
  misc_RNA (1)...(19): siRNA sense strand
ugugagagguccgauaaag

SEQ ID NO: 1872730 - RNA, 19 nt, Homo sapiens
  misc_RNA (1)...(19): siRNA sense strand
uaccugagaacaagaauuc

SEQ ID NO: 1872731 - RNA, 19 nt, Homo sapiens
  misc_RNA (1)...(19): siRNA sense strand
guaguggcuccaauccuuu

SEQ ID NO: 1872732 - RNA, 19 nt, Homo sapiens
  misc_RNA (1)...(19): siRNA sense strand
uuacaggaggcucguauau

SEQ ID NO: 1872733 - RNA, 19 nt, Homo sapiens
  misc_RNA (1)...(19): siRNA sense strand
gacgaggagucugguagug

SEQ ID NO: 1872734 - RNA, 19 nt, Homo sapiens
  misc_RNA (1)...(19): siRNA sense strand
ggacgaggagucugguagu

SEQ ID NO: 1872735 - RNA, 19 nt, Homo sapiens
  misc_RNA (1)...(19): siRNA sense strand
ggaggcucguauauucaau

SEQ ID NO: 1872736 - RNA, 19 nt, Homo sapiens
  misc_RNA (1)...(19): siRNA sense strand
ugucaacaauaucaucaca

SEQ ID NO: 1872737 - RNA, 19 nt, Homo sapiens
  misc_RNA (1)...(19): siRNA sense strand
ugaccauauucagaaagua

SEQ ID NO: 1872738 - RNA, 19 nt, Homo sapiens
  misc_RNA (1)...(19): siRNA sense strand
ugugcuaccuuaccaucaa

SEQ ID NO: 1872739 - RNA, 19 nt, Homo sapiens
  misc_RNA (1)...(19): siRNA sense strand
ccaaucaauccaagaagau

SEQ ID NO: 1872740 - RNA, 19 nt, Homo sapiens
  misc_RNA (1)...(19): siRNA sense strand
uggguaugaugaugaguau

SEQ ID NO: 1872741 - RNA, 19 nt, Homo sapiens
  misc_RNA (1)...(19): siRNA sense strand
uaaagagagaacaccugua

SEQ ID NO: 1872742 - RNA, 19 nt, Homo sapiens
  misc_RNA (1)...(19): siRNA sense strand
auaaaguaccugagaacaa

SEQ ID NO: 1872743 - RNA, 19 nt, Homo sapiens
  misc_RNA (1)...(19): siRNA sense strand
gugacugugucugaccaua

SEQ ID NO: 1872744 - RNA, 19 nt, Homo sapiens
  misc_RNA (1)...(19): siRNA sense strand
ggaaggauggugcaaauua

SEQ ID NO: 1872745 - RNA, 19 nt, Homo sapiens
  misc_RNA (1)...(19): siRNA sense strand
gaagacugauuacaagaau

SEQ ID NO: 1872746 - RNA, 19 nt, Homo sapiens
  misc_RNA (1)...(19): siRNA sense strand
caucaugaaugcagauauu

SEQ ID NO: 1872747 - RNA, 19 nt, Homo sapiens
  misc_RNA (1)...(19): siRNA sense strand
gaaggauggugcaaauuag

SEQ ID NO: 1872748 - RNA, 19 nt, Homo sapiens
  misc_RNA (1)...(19): siRNA sense strand
uugaugagcugaagacuga

SEQ ID NO: 1872749 - RNA, 19 nt, Homo sapiens
  misc_RNA (1)...(19): siRNA sense strand
gcugaagacugauuacaag

SEQ ID NO: 1872750 - RNA, 19 nt, Homo sapiens
  misc_RNA (1)...(19): siRNA sense strand
cauccacgcuuucuucugu

SEQ ID NO: 1872751 - RNA, 19 nt, Homo sapiens
  misc_RNA (1)...(19): siRNA sense strand
uauauggcaugaucuaugu

SEQ ID NO: 1872752 - RNA, 19 nt, Homo sapiens
  misc_RNA (1)...(19): siRNA sense strand
ccuauagaccaguguaaua

SEQ ID NO: 1872753 - RNA, 19 nt, Homo sapiens
  misc_RNA (1)...(19): siRNA sense strand
gaaggaaggauggugcaaa

SEQ ID NO: 1872754 - RNA, 19 nt, Homo sapiens
  misc_RNA (1)...(19): siRNA sense strand
cuacaaccaucaugaaugc

SEQ ID NO: 1872755 - RNA, 19 nt, Homo sapiens
  misc_RNA (1)...(19): siRNA sense strand
uuucuucugugucauguuu

SEQ ID NO: 1872756 - RNA, 19 nt, Homo sapiens
  misc_RNA (1)...(19): siRNA sense strand
aaggaaggauggugcaaau

SEQ ID NO: 1872757 - RNA, 19 nt, Homo sapiens
  misc_RNA (1)...(19): siRNA sense strand
cuaccuauauggcaugauc

SEQ ID NO: 1872758 - RNA, 19 nt, Homo sapiens
  misc_RNA (1)...(19): siRNA sense strand
uuacaagaauccuauagac

SEQ ID NO: 1872759 - RNA, 19 nt, Homo sapiens
  misc_RNA (1)...(19): siRNA sense strand
ugaagacugauuacaagaa

SEQ ID NO: 1872760 - RNA, 19 nt, Homo sapiens
  misc_RNA (1)...(19): siRNA sense strand
uauaugaguagaccaguga

SEQ ID NO: 1872761 - RNA, 19 nt, Homo sapiens
  misc_RNA (1)...(19): siRNA sense strand
gcucaucuucuucgccauu

SEQ ID NO: 1872762 - RNA, 19 nt, Homo sapiens
  misc_RNA (1)...(19): siRNA sense strand
gaugagcugaagacugauu

SEQ ID NO: 1872763 - RNA, 19 nt, Homo sapiens
  misc_RNA (1)...(19): siRNA sense strand
gacccuacaaccaucauga

SEQ ID NO: 1872764 - RNA, 19 nt, Homo sapiens
  misc_RNA (1)...(19): siRNA sense strand
cauuauagcauuugaugag

SEQ ID NO: 1872765 - RNA, 19 nt, Homo sapiens
  misc_RNA (1)...(19): siRNA sense strand
uacacugggucucaauaug

SEQ ID NO: 1872766 - RNA, 19 nt, Homo sapiens
  misc_RNA (1)...(19): siRNA sense strand
uagcauauugucagaagga

SEQ ID NO: 1872767 - RNA, 19 nt, Homo sapiens
  misc_RNA (1)...(19): siRNA sense strand
gcacauuauagcauuugau

SEQ ID NO: 1872768 - RNA, 19 nt, Homo sapiens
  misc_RNA (1)...(19): siRNA sense strand
gauggugcaaauuagcuuu

SEQ ID NO: 1872769 - RNA, 19 nt, Homo sapiens
  misc_RNA (1)...(19): siRNA sense strand
cacauuauagcauuugaug

SEQ ID NO: 1872770 - RNA, 19 nt, Homo sapiens
  misc_RNA (1)...(19): siRNA sense strand
ucuagcauauugucagaag

SEQ ID NO: 1872771 - RNA, 19 nt, Homo sapiens
  misc_RNA (1)...(19): siRNA sense strand
cuauauggcaugaucuaug

SEQ ID NO: 1872772 - RNA, 19 nt, Homo sapiens
  misc_RNA (1)...(19): siRNA sense strand
ccaguguaauacccugaau

SEQ ID NO: 1872773 - RNA, 19 nt, Homo sapiens
  misc_RNA (1)...(19): siRNA sense strand
uauggcaugaucuauguuu

SEQ ID NO: 1872774 - RNA, 19 nt, Homo sapiens
  misc_RNA (1)...(19): siRNA sense strand
auuuggagguauaugagua

SEQ ID NO: 1872775 - RNA, 19 nt, Homo sapiens
  misc_RNA (1)...(19): siRNA sense strand
ccucauccacgcuuucuuc

SEQ ID NO: 1872776 - RNA, 19 nt, Homo sapiens
  misc_RNA (1)...(19): siRNA sense strand
ccuacaaccaucaugaaug

SEQ ID NO: 1872777 - RNA, 19 nt, Homo sapiens
  misc_RNA (1)...(19): siRNA sense strand
ggcacauuauagcauuuga

SEQ ID NO: 1872778 - RNA, 19 nt, Homo sapiens
  misc_RNA (1)...(19): siRNA sense strand
gcagcagaguggcuuacac

SEQ ID NO: 1872779 - RNA, 19 nt, Homo sapiens
  misc_RNA (1)...(19): siRNA sense strand
gagcugaagacugauuaca

SEQ ID NO: 1872780 - RNA, 19 nt, Homo sapiens
  misc_RNA (1)...(19): siRNA sense strand
ugugucauguuucuuugug

SEQ ID NO: 1872781 - RNA, 19 nt, Homo sapiens
  misc_RNA (1)...(19): siRNA sense strand
uuacacugggucucaauau

SEQ ID NO: 1872782 - RNA, 19 nt, Homo sapiens
  misc_RNA (1)...(19): siRNA sense strand
uuuggcacauuauagcauu

SEQ ID NO: 1872783 - RNA, 19 nt, Homo sapiens
  misc_RNA (1)...(19): siRNA sense strand
gaguagaccagugaugagu

SEQ ID NO: 1872784 - RNA, 19 nt, Homo sapiens
  misc_RNA (1)...(19): siRNA sense strand
ggugaagccuggaaauuaa

SEQ ID NO: 1872785 - RNA, 19 nt, Homo sapiens
  misc_RNA (1)...(19): siRNA sense strand
gcucacaggucuuauuuga

SEQ ID NO: 1872786 - RNA, 19 nt, Homo sapiens
  misc_RNA (1)...(19): siRNA sense strand
ccucauggcuuaacucauu

SEQ ID NO: 1872787 - RNA, 19 nt, Homo sapiens
  misc_RNA (1)...(19): siRNA sense strand
ucaaacagcagaagaagua

SEQ ID NO: 1872788 - RNA, 19 nt, Homo sapiens
  misc_RNA (1)...(19): siRNA sense strand
gugacuaccucauggcuua

SEQ ID NO: 1872789 - RNA, 19 nt, Homo sapiens
  misc_RNA (1)...(19): siRNA sense strand
guacaagucagacaucuuu

SEQ ID NO: 1872790 - RNA, 19 nt, Homo sapiens
  misc_RNA (1)...(19): siRNA sense strand
gaauaacuguggacacugu

SEQ ID NO: 1872791 - RNA, 19 nt, Homo sapiens
  misc_RNA (1)...(19): siRNA sense strand
gggugaagccuggaaauua

SEQ ID NO: 1872792 - RNA, 19 nt, Homo sapiens
  misc_RNA (1)...(19): siRNA sense strand
gagagaaggccagcagaua

SEQ ID NO: 1872793 - RNA, 19 nt, Homo sapiens
  misc_RNA (1)...(19): siRNA sense strand
gaggagcgcuuuuaucaaa

SEQ ID NO: 1872794 - RNA, 19 nt, Homo sapiens
  misc_RNA (1)...(19): siRNA sense strand
gagaauuggguaccacaua

SEQ ID NO: 1872795 - RNA, 19 nt, Homo sapiens
  misc_RNA (1)...(19): siRNA sense strand
ucacaggucuuauuugacu

SEQ ID NO: 1872796 - RNA, 19 nt, Homo sapiens
  misc_RNA (1)...(19): siRNA sense strand
agaaggagcagaccaacua

SEQ ID NO: 1872797 - RNA, 19 nt, Homo sapiens
  misc_RNA (1)...(19): siRNA sense strand
agaauuggguaccacauau

SEQ ID NO: 1872798 - RNA, 19 nt, Homo sapiens
  misc_RNA (1)...(19): siRNA sense strand
gaaggccagcagauacaua

SEQ ID NO: 1872799 - RNA, 19 nt, Homo sapiens
  misc_RNA (1)...(19): siRNA sense strand
gguaccacauaucucuaua

SEQ ID NO: 1872800 - RNA, 19 nt, Homo sapiens
  misc_RNA (1)...(19): siRNA sense strand
ggagauuccugauuuaccu

SEQ ID NO: 1872801 - RNA, 19 nt, Homo sapiens
  misc_RNA (1)...(19): siRNA sense strand
aaguuuaucugaaggaaga

SEQ ID NO: 1872802 - RNA, 19 nt, Homo sapiens
  misc_RNA (1)...(19): siRNA sense strand
uauacagccuuucuacuuc

SEQ ID NO: 1872803 - RNA, 19 nt, Homo sapiens
  misc_RNA (1)...(19): siRNA sense strand
cuacagcucacaggucuua

SEQ ID NO: 1872804 - RNA, 19 nt, Homo sapiens
  misc_RNA (1)...(19): siRNA sense strand
cagcaaagagccagaacuu

SEQ ID NO: 1872805 - RNA, 19 nt, Homo sapiens
  misc_RNA (1)...(19): siRNA sense strand
gccagcagauacauagaga

SEQ ID NO: 1872806 - RNA, 19 nt, Homo sapiens
  misc_RNA (1)...(19): siRNA sense strand
aaacagagaagcagcaaag

SEQ ID NO: 1872807 - RNA, 19 nt, Homo sapiens
  misc_RNA (1)...(19): siRNA sense strand
gcuggaggacauaggaaua

SEQ ID NO: 1872808 - RNA, 19 nt, Homo sapiens
  misc_RNA (1)...(19): siRNA sense strand
cagcucacaggucuuauuu

SEQ ID NO: 1872809 - RNA, 19 nt, Homo sapiens
  misc_RNA (1)...(19): siRNA sense strand
cuauacagccuuucuacuu

SEQ ID NO: 1872810 - RNA, 19 nt, Homo sapiens
  misc_RNA (1)...(19): siRNA sense strand
gagaaggccagcagauaca

SEQ ID NO: 1872811 - RNA, 19 nt, Homo sapiens
  misc_RNA (1)...(19): siRNA sense strand
ugaaacaucaaacagagaa

SEQ ID NO: 1872812 - RNA, 19 nt, Homo sapiens
  misc_RNA (1)...(19): siRNA sense strand
aagcaguggucacaaacuu

SEQ ID NO: 1872813 - RNA, 19 nt, Homo sapiens
  misc_RNA (1)...(19): siRNA sense strand
gaagguacaagucagacau

SEQ ID NO: 1872814 - RNA, 19 nt, Homo sapiens
  misc_RNA (1)...(19): siRNA sense strand
ggagagaaggccagcagau

SEQ ID NO: 1872815 - RNA, 19 nt, Homo sapiens
  misc_RNA (1)...(19): siRNA sense strand
ggauauaggaaucaaggau

SEQ ID NO: 1872816 - RNA, 19 nt, Homo sapiens
  misc_RNA (1)...(19): siRNA sense strand
ccaaguuuaucugaaggaa

SEQ ID NO: 1872817 - RNA, 19 nt, Homo sapiens
  misc_RNA (1)...(19): siRNA sense strand
uaccacauaucucuauaca

SEQ ID NO: 1872818 - RNA, 19 nt, Homo sapiens
  misc_RNA (1)...(19): siRNA sense strand
ucagacaucuuuugaaaca

SEQ ID NO: 1872819 - RNA, 19 nt, Homo sapiens
  misc_RNA (1)...(19): siRNA sense strand
gaugaagguacaagucaga

SEQ ID NO: 1872820 - RNA, 19 nt, Homo sapiens
  misc_RNA (1)...(19): siRNA sense strand
cagcagauacauagagaau

SEQ ID NO: 1872821 - RNA, 19 nt, Homo sapiens
  misc_RNA (1)...(19): siRNA sense strand
ggaagaagaagaaaagaau

SEQ ID NO: 1872822 - RNA, 19 nt, Homo sapiens
  misc_RNA (1)...(19): siRNA sense strand
cuacugcuugcucuucuua

SEQ ID NO: 1872823 - RNA, 19 nt, Homo sapiens
  misc_RNA (1)...(19): siRNA sense strand
auuaagcaguggucacaaa

SEQ ID NO: 1872824 - RNA, 19 nt, Homo sapiens
  misc_RNA (1)...(19): siRNA sense strand
cagccuuucuacuuccuuu

SEQ ID NO: 1872825 - RNA, 19 nt, Homo sapiens
  misc_RNA (1)...(19): siRNA sense strand
agaacuugccuaaaccuuu

SEQ ID NO: 1872826 - RNA, 19 nt, Homo sapiens
  misc_RNA (1)...(19): siRNA sense strand
gaaggaagaagaagaaaag

SEQ ID NO: 1872827 - RNA, 19 nt, Homo sapiens
  misc_RNA (1)...(19): siRNA sense strand
agccagaacuugccuaaac

SEQ ID NO: 1872828 - RNA, 19 nt, Homo sapiens
  misc_RNA (1)...(19): siRNA sense strand
ugcuugcucuucuuacuuu

SEQ ID NO: 1872829 - RNA, 19 nt, Homo sapiens
  misc_RNA (1)...(19): siRNA sense strand
ugauuuaccugaagaaccu

SEQ ID NO: 1872830 - RNA, 19 nt, Homo sapiens
  misc_RNA (1)...(19): siRNA sense strand
gaggacauaggaauaacug

SEQ ID NO: 1872831 - RNA, 19 nt, Homo sapiens
  misc_RNA (1)...(19): siRNA sense strand
caccaggaaaugaaauuga

SEQ ID NO: 1872832 - RNA, 19 nt, Homo sapiens
  misc_RNA (1)...(19): siRNA sense strand
agucagacaucuuuugaaa

SEQ ID NO: 1872833 - RNA, 19 nt, Homo sapiens
  misc_RNA (1)...(19): siRNA sense strand
acaacaagaagcacaagga

SEQ ID NO: 1872834 - RNA, 19 nt, Homo sapiens
  misc_RNA (1)...(19): siRNA sense strand
gaaggagcagaccaacuag

SEQ ID NO: 1872835 - RNA, 19 nt, Homo sapiens
  misc_RNA (1)...(19): siRNA sense strand
gaauuggguaccacauauc

SEQ ID NO: 1872836 - RNA, 19 nt, Homo sapiens
  misc_RNA (1)...(19): siRNA sense strand
gacuggaugacgagaauug

SEQ ID NO: 1872837 - RNA, 19 nt, Homo sapiens
  misc_RNA (1)...(19): siRNA sense strand
caggaaaugaaauugagaa

SEQ ID NO: 1872838 - RNA, 19 nt, Homo sapiens
  misc_RNA (1)...(19): siRNA sense strand
gcuugcucuucuuacuuua

SEQ ID NO: 1872839 - RNA, 19 nt, Homo sapiens
  misc_RNA (1)...(19): siRNA sense strand
uguggacacuguacucauc

SEQ ID NO: 1872840 - RNA, 19 nt, Homo sapiens
  misc_RNA (1)...(19): siRNA sense strand
cugaacagcccacaugcaa

SEQ ID NO: 1872841 - RNA, 19 nt, Homo sapiens
  misc_RNA (1)...(19): siRNA sense strand
gugaugaagguacaaguca

SEQ ID NO: 1872842 - RNA, 19 nt, Homo sapiens
  misc_RNA (1)...(19): siRNA sense strand
gcuacugcuugcucuucuu

SEQ ID NO: 1872843 - RNA, 19 nt, Homo sapiens
  misc_RNA (1)...(19): siRNA sense strand
aaaccucaccaggaaauga

SEQ ID NO: 1872844 - RNA, 19 nt, Homo sapiens
  misc_RNA (1)...(19): siRNA sense strand
uuuaaaaccucaccaggaa

SEQ ID NO: 1872845 - RNA, 19 nt, Homo sapiens
  misc_RNA (1)...(19): siRNA sense strand
ucugaaggaagaagaagaa

SEQ ID NO: 1872846 - RNA, 19 nt, Homo sapiens
  misc_RNA (1)...(19): siRNA sense strand
aggaauaacuguggacacu

SEQ ID NO: 1872847 - RNA, 19 nt, Homo sapiens
  misc_RNA (1)...(19): siRNA sense strand
ggagcgcuuuuaucaaaug

SEQ ID NO: 1872848 - RNA, 19 nt, Homo sapiens
  misc_RNA (1)...(19): siRNA sense strand
caagaagcacaaggagaga

SEQ ID NO: 1872849 - RNA, 19 nt, Homo sapiens
  misc_RNA (1)...(19): siRNA sense strand
ggguaccacauaucucuau

SEQ ID NO: 1872850 - RNA, 19 nt, Homo sapiens
  misc_RNA (1)...(19): siRNA sense strand
gaagaagaagaaaagaaug

SEQ ID NO: 1872851 - RNA, 19 nt, Homo sapiens
  misc_RNA (1)...(19): siRNA sense strand
agagaaggccagcagauac

SEQ ID NO: 1872852 - RNA, 19 nt, Homo sapiens
  misc_RNA (1)...(19): siRNA sense strand
gaagaagaaaagaaugaga

SEQ ID NO: 1872853 - RNA, 19 nt, Homo sapiens
  misc_RNA (1)...(19): siRNA sense strand
caaacagagaagcagcaaa

SEQ ID NO: 1872854 - RNA, 19 nt, Homo sapiens
  misc_RNA (1)...(19): siRNA sense strand
ugacgagaauuggguacca

SEQ ID NO: 1872855 - RNA, 19 nt, Homo sapiens
  misc_RNA (1)...(19): siRNA sense strand
gauuccugauuuaccugaa

SEQ ID NO: 1872856 - RNA, 19 nt, Homo sapiens
  misc_RNA (1)...(19): siRNA sense strand
gcuggagagugccauuaua

SEQ ID NO: 1872857 - RNA, 19 nt, Homo sapiens
  misc_RNA (1)...(19): siRNA sense strand
ggagagugccauuauaaca

SEQ ID NO: 1872858 - RNA, 19 nt, Homo sapiens
  misc_RNA (1)...(19): siRNA sense strand
gagagugccauuauaacaa

SEQ ID NO: 1872859 - RNA, 19 nt, Homo sapiens
  misc_RNA (1)...(19): siRNA sense strand
cagaucauauucacaaugg

SEQ ID NO: 1872860 - RNA, 19 nt, Homo sapiens
  misc_RNA (1)...(19): siRNA sense strand
uaagagaaacauagggaaa

SEQ ID NO: 1872861 - RNA, 19 nt, Homo sapiens
  misc_RNA (1)...(19): siRNA sense strand
gcauucugcugggcacuuu

SEQ ID NO: 1872862 - RNA, 19 nt, Homo sapiens
  misc_RNA (1)...(19): siRNA sense strand
ggacaaacuaagagaaaca

SEQ ID NO: 1872863 - RNA, 19 nt, Homo sapiens
  misc_RNA (1)...(19): siRNA sense strand
gaaauguagagaucuguuc

SEQ ID NO: 1872864 - RNA, 19 nt, Homo sapiens
  misc_RNA (1)...(19): siRNA sense strand
caaacuaagagaaacauag

SEQ ID NO: 1872865 - RNA, 19 nt, Homo sapiens
  misc_RNA (1)...(19): siRNA sense strand
ggaaauguagagaucuguu

SEQ ID NO: 1872866 - RNA, 19 nt, Homo sapiens
  misc_RNA (1)...(19): siRNA sense strand
gugcugcuguugacuguuc

SEQ ID NO: 1872867 - RNA, 19 nt, Homo sapiens
  misc_RNA (1)...(19): siRNA sense strand
ggagaaagacuggcuuggu

SEQ ID NO: 1872868 - RNA, 19 nt, Homo sapiens
  misc_RNA (1)...(19): siRNA sense strand
ccaccaauggacaaacuaa

SEQ ID NO: 1872869 - RNA, 19 nt, Homo sapiens
  misc_RNA (1)...(19): siRNA sense strand
aaaaggaaauguagagauc

SEQ ID NO: 1872870 - RNA, 19 nt, Homo sapiens
  misc_RNA (1)...(19): siRNA sense strand
cugcugggcacuuuacuaa

SEQ ID NO: 1872871 - RNA, 19 nt, Homo sapiens
  misc_RNA (1)...(19): siRNA sense strand
gccauuauaacaacaaauc

SEQ ID NO: 1872872 - RNA, 19 nt, Homo sapiens
  misc_RNA (1)...(19): siRNA sense strand
cuggagagugccauuauaa

SEQ ID NO: 1872873 - RNA, 19 nt, Homo sapiens
  misc_RNA (1)...(19): siRNA sense strand
cauauucacaauggcuuua

SEQ ID NO: 1872874 - RNA, 19 nt, Homo sapiens
  misc_RNA (1)...(19): siRNA sense strand
gggcuggagagugccauua

SEQ ID NO: 1872875 - RNA, 19 nt, Homo sapiens
  misc_RNA (1)...(19): siRNA sense strand
gaaaaggaaauguagagau

SEQ ID NO: 1872876 - RNA, 19 nt, Homo sapiens
  misc_RNA (1)...(19): siRNA sense strand
cugcagcugugccagauca

SEQ ID NO: 1872877 - RNA, 19 nt, Homo sapiens
  misc_RNA (1)...(19): siRNA sense strand
gugccauuauaacaacaaa

SEQ ID NO: 1872878 - RNA, 19 nt, Homo sapiens
  misc_RNA (1)...(19): siRNA sense strand
caauggacaaacuaagaga

SEQ ID NO: 1872879 - RNA, 19 nt, Homo sapiens
  misc_RNA (1)...(19): siRNA sense strand
aaggaaauguagagaucug

SEQ ID NO: 1872880 - RNA, 19 nt, Homo sapiens
  misc_RNA (1)...(19): siRNA sense strand
aaacuaagagaaacauagg

SEQ ID NO: 1872881 - RNA, 19 nt, Homo sapiens
  misc_RNA (1)...(19): siRNA sense strand
uguugcugcuucugcuaua

SEQ ID NO: 1872882 - RNA, 19 nt, Homo sapiens
  misc_RNA (1)...(19): siRNA sense strand
agagugccauuauaacaac

SEQ ID NO: 1872883 - RNA, 19 nt, Homo sapiens
  misc_RNA (1)...(19): siRNA sense strand
ccaauggacaaacuaagag

SEQ ID NO: 1872884 - RNA, 19 nt, Homo sapiens
  misc_RNA (1)...(19): siRNA sense strand
aaacauagggaaaaggaaa

SEQ ID NO: 1872885 - RNA, 19 nt, Homo sapiens
  misc_RNA (1)...(19): siRNA sense strand
gaagggcucuggaugaauu

SEQ ID NO: 1872886 - RNA, 19 nt, Homo sapiens
  misc_RNA (1)...(19): siRNA sense strand
acagauaagcgaagaaaua

SEQ ID NO: 1872887 - RNA, 19 nt, Homo sapiens
  misc_RNA (1)...(19): siRNA sense strand
gcaacauuauugucuuuga

SEQ ID NO: 1872888 - RNA, 19 nt, Homo sapiens
  misc_RNA (1)...(19): siRNA sense strand
ccacauaggucagaaacga

SEQ ID NO: 1872889 - RNA, 19 nt, Homo sapiens
  misc_RNA (1)...(19): siRNA sense strand
caucagagauuucuacaac

SEQ ID NO: 1872890 - RNA, 19 nt, Homo sapiens
  misc_RNA (1)...(19): siRNA sense strand
gggaagggcucuggaugaa

SEQ ID NO: 1872891 - RNA, 19 nt, Homo sapiens
  misc_RNA (1)...(19): siRNA sense strand
agaaauacgacaaugcuua

SEQ ID NO: 1872892 - RNA, 19 nt, Homo sapiens
  misc_RNA (1)...(19): siRNA sense strand
caacccagccauccacaua

SEQ ID NO: 1872893 - RNA, 19 nt, Homo sapiens
  misc_RNA (1)...(19): siRNA sense strand
gaagcaaggguacagauau

SEQ ID NO: 1872894 - RNA, 19 nt, Homo sapiens
  misc_RNA (1)...(19): siRNA sense strand
cagcaacauuauugucuuu

SEQ ID NO: 1872895 - RNA, 19 nt, Homo sapiens
  misc_RNA (1)...(19): siRNA sense strand
guaagaccuccaccaguua

SEQ ID NO: 1872896 - RNA, 19 nt, Homo sapiens
  misc_RNA (1)...(19): siRNA sense strand
gcagcaacauuauugucuu

SEQ ID NO: 1872897 - RNA, 19 nt, Homo sapiens
  misc_RNA (1)...(19): siRNA sense strand
auacgacaaugcuuaguaa

SEQ ID NO: 1872898 - RNA, 19 nt, Homo sapiens
  misc_RNA (1)...(19): siRNA sense strand
gaaauacgacaaugcuuag

SEQ ID NO: 1872899 - RNA, 19 nt, Homo sapiens
  misc_RNA (1)...(19): siRNA sense strand
ccaauauaaucaucagaga

SEQ ID NO: 1872900 - RNA, 19 nt, Homo sapiens
  misc_RNA (1)...(19): siRNA sense strand
aguaagaccuccaccaguu

SEQ ID NO: 1872901 - RNA, 19 nt, Homo sapiens
  misc_RNA (1)...(19): siRNA sense strand
gauaagcgaagaaauacga

SEQ ID NO: 1872902 - RNA, 19 nt, Homo sapiens
  misc_RNA (1)...(19): siRNA sense strand
gaagaaauacgacaaugcu

SEQ ID NO: 1872903 - RNA, 19 nt, Homo sapiens
  misc_RNA (1)...(19): siRNA sense strand
gcgaagaaauacgacaaug

SEQ ID NO: 1872904 - RNA, 19 nt, Homo sapiens
  misc_RNA (1)...(19): siRNA sense strand
caacauuauugucuuugag

SEQ ID NO: 1872905 - RNA, 19 nt, Homo sapiens
  misc_RNA (1)...(19): siRNA sense strand
gaaagaagcaaggguacag

SEQ ID NO: 1872906 - RNA, 19 nt, Homo sapiens
  misc_RNA (1)...(19): siRNA sense strand
acacacagauaagcgaaga

SEQ ID NO: 1872907 - RNA, 19 nt, Homo sapiens
  misc_RNA (1)...(19): siRNA sense strand
gggcaucuucguucugauu

SEQ ID NO: 1872908 - RNA, 19 nt, Homo sapiens
  misc_RNA (1)...(19): siRNA sense strand
ggacagccaauauaaucau

SEQ ID NO: 1872909 - RNA, 19 nt, Homo sapiens
  misc_RNA (1)...(19): siRNA sense strand
ggccaaagcauaccuucug

SEQ ID NO: 1872910 - RNA, 19 nt, Homo sapiens
  misc_RNA (1)...(19): siRNA sense strand
agaagcaaggguacagaua

SEQ ID NO: 1872911 - RNA, 19 nt, Homo sapiens
  misc_RNA (1)...(19): siRNA sense strand
aagcaaggguacagauauc

SEQ ID NO: 1872912 - RNA, 19 nt, Homo sapiens
  misc_RNA (1)...(19): siRNA sense strand
caaugcaaguucuauagcu

SEQ ID NO: 1872913 - RNA, 19 nt, Homo sapiens
  misc_RNA (1)...(19): siRNA sense strand
acacagauaagcgaagaaa

SEQ ID NO: 1872914 - RNA, 19 nt, Homo sapiens
  misc_RNA (1)...(19): siRNA sense strand
cuccaccaguuaugucuaa

SEQ ID NO: 1872915 - RNA, 19 nt, Homo sapiens
  misc_RNA (1)...(19): siRNA sense strand
cgagagggccaaagcauac

SEQ ID NO: 1872916 - RNA, 19 nt, Homo sapiens
  misc_RNA (1)...(19): siRNA sense strand
aauacgacaaugcuuagua

SEQ ID NO: 1872917 - RNA, 19 nt, Homo sapiens
  misc_RNA (1)...(19): siRNA sense strand
gcugcuguccucuucauug

SEQ ID NO: 1872918 - RNA, 19 nt, Homo sapiens
  misc_RNA (1)...(19): siRNA sense strand
gacagccaauauaaucauc

SEQ ID NO: 1872919 - RNA, 19 nt, Homo sapiens
  misc_RNA (1)...(19): siRNA sense strand
gagaguaucagcuuuuguu

SEQ ID NO: 1872920 - RNA, 19 nt, Homo sapiens
  misc_RNA (1)...(19): siRNA sense strand
gggucugcuuuguggauuu

SEQ ID NO: 1872921 - RNA, 19 nt, Homo sapiens
  misc_RNA (1)...(19): siRNA sense strand
gcgcugcuguccucuucau

SEQ ID NO: 1872922 - RNA, 19 nt, Homo sapiens
  misc_RNA (1)...(19): siRNA sense strand
uaagaccuccaccaguuau

SEQ ID NO: 1872923 - RNA, 19 nt, Homo sapiens
  misc_RNA (1)...(19): siRNA sense strand
ugacgggcaucuucguucu

SEQ ID NO: 1872924 - RNA, 19 nt, Homo sapiens
  misc_RNA (1)...(19): siRNA sense strand
cagauaagcgaagaaauac

SEQ ID NO: 1872925 - RNA, 19 nt, Homo sapiens
  misc_RNA (1)...(19): siRNA sense strand
uggcaucuguggcaugaag

SEQ ID NO: 1872926 - RNA, 19 nt, Homo sapiens
  misc_RNA (1)...(19): siRNA sense strand
aagcgcugcuguccucuuc

SEQ ID NO: 1872927 - RNA, 19 nt, Homo sapiens
  misc_RNA (1)...(19): siRNA sense strand
gcaaugcaaguucuauagc

SEQ ID NO: 1872928 - RNA, 19 nt, Homo sapiens
  misc_RNA (1)...(19): siRNA sense strand
ugggaagggcucuggauga

SEQ ID NO: 1872929 - RNA, 19 nt, Homo sapiens
  misc_RNA (1)...(19): siRNA sense strand
acgagagggccaaagcaua

SEQ ID NO: 1872930 - RNA, 19 nt, Homo sapiens
  misc_RNA (1)...(19): siRNA sense strand
ccucauguguguggcuguu

SEQ ID NO: 1872931 - RNA, 19 nt, Homo sapiens
  misc_RNA (1)...(19): siRNA sense strand
cgaagaaauacgacaaugc

SEQ ID NO: 1872932 - RNA, 19 nt, Homo sapiens
  misc_RNA (1)...(19): siRNA sense strand
ggaagggcucuggaugaau

SEQ ID NO: 1872933 - RNA, 19 nt, Homo sapiens
  misc_RNA (1)...(19): siRNA sense strand
guucuauagcuccuuguug

SEQ ID NO: 1872934 - RNA, 19 nt, Homo sapiens
  misc_RNA (1)...(19): siRNA sense strand
cuggacagccaauauaauc

SEQ ID NO: 1872935 - RNA, 19 nt, Homo sapiens
  misc_RNA (1)...(19): siRNA sense strand
gcaaggguacagauaucca

SEQ ID NO: 1872936 - RNA, 19 nt, Homo sapiens
  misc_RNA (1)...(19): siRNA sense strand
gagaaugccuaugagaaug

SEQ ID NO: 1872937 - RNA, 19 nt, Homo sapiens
  misc_RNA (1)...(19): siRNA sense strand
ugagaaugccuaugagaau

SEQ ID NO: 1872938 - RNA, 19 nt, Homo sapiens
  misc_RNA (1)...(19): siRNA sense strand
gcccucagccuccucauuc

SEQ ID NO: 1872939 - RNA, 19 nt, Homo sapiens
  misc_RNA (1)...(19): siRNA sense strand
gaaugugcccgaggaggaa

SEQ ID NO: 1872940 - RNA, 19 nt, Homo sapiens
  misc_RNA (1)...(19): siRNA sense strand
gaaugccuaugagaaugug

SEQ ID NO: 1872941 - RNA, 19 nt, Homo sapiens
  misc_RNA (1)...(19): siRNA sense strand
gaacagauggaagguacuc

SEQ ID NO: 1872942 - RNA, 19 nt, Homo sapiens
  misc_RNA (1)...(19): siRNA sense strand
caugagaaugccuaugaga

SEQ ID NO: 1872943 - RNA, 19 nt, Homo sapiens
  misc_RNA (1)...(19): siRNA sense strand
gauccugaccgucggaaac

SEQ ID NO: 1872944 - RNA, 19 nt, Homo sapiens
  misc_RNA (1)...(19): siRNA sense strand
gaagaaagaugaggcugau

SEQ ID NO: 1872945 - RNA, 19 nt, Homo sapiens
  misc_RNA (1)...(19): siRNA sense strand
agaaagaugaggcugauua

SEQ ID NO: 1872946 - RNA, 19 nt, Homo sapiens
  misc_RNA (1)...(19): siRNA sense strand
aagaugaggcugauuauaa

SEQ ID NO: 1872947 - RNA, 19 nt, Homo sapiens
  misc_RNA (1)...(19): siRNA sense strand
gaaagaugaggcugauuau

SEQ ID NO: 1872948 - RNA, 19 nt, Homo sapiens
  misc_RNA (1)...(19): siRNA sense strand
aaacagaagggaagaaaga

SEQ ID NO: 1872949 - RNA, 19 nt, Homo sapiens
  misc_RNA (1)...(19): siRNA sense strand
ccgccaagaugaucaaaga

SEQ ID NO: 1872950 - RNA, 19 nt, Homo sapiens
  misc_RNA (1)...(19): siRNA sense strand
gaaauucuccaacaacaac

SEQ ID NO: 1872951 - RNA, 19 nt, Homo sapiens
  misc_RNA (1)...(19): siRNA sense strand
ucaaagagacaauggacaa

SEQ ID NO: 1872952 - RNA, 19 nt, Homo sapiens
  misc_RNA (1)...(19): siRNA sense strand
cagaagggaagaaagauga

SEQ ID NO: 1872953 - RNA, 19 nt, Homo sapiens
  misc_RNA (1)...(19): siRNA sense strand
aagagacaauggacaagaa

SEQ ID NO: 1872954 - RNA, 19 nt, Homo sapiens
  misc_RNA (1)...(19): siRNA sense strand
ugaagaaccuccucuaccu

SEQ ID NO: 1872955 - RNA, 19 nt, Homo sapiens
  misc_RNA (1)...(19): siRNA sense strand
ggacaugccagaggagaug

SEQ ID NO: 1872956 - RNA, 19 nt, Homo sapiens
  misc_RNA (1)...(19): siRNA sense strand
agaugaggcugauuauaag

SEQ ID NO: 1872957 - RNA, 19 nt, Homo sapiens
  misc_RNA (1)...(19): siRNA sense strand
ggcgagggcuuuggguuug

SEQ ID NO: 1872958 - RNA, 19 nt, Homo sapiens
  misc_RNA (1)...(19): siRNA sense strand
gccaagaugaucaaagaga

SEQ ID NO: 1872959 - RNA, 19 nt, Homo sapiens
  misc_RNA (1)...(19): siRNA sense strand
aaagaugaggcugauuaua

SEQ ID NO: 1872960 - RNA, 19 nt, Homo sapiens
  misc_RNA (1)...(19): siRNA sense strand
gaaacagaagggaagaaag

SEQ ID NO: 1872961 - RNA, 19 nt, Homo sapiens
  misc_RNA (1)...(19): siRNA sense strand
agacaauggacaagaaguu

SEQ ID NO: 1872962 - RNA, 19 nt, Homo sapiens
  misc_RNA (1)...(19): siRNA sense strand
agaaacagaagggaagaaa

SEQ ID NO: 1872963 - RNA, 19 nt, Homo sapiens
  misc_RNA (1)...(19): siRNA sense strand
gcgagggcuuuggguuuga

SEQ ID NO: 1872964 - RNA, 19 nt, Homo sapiens
  misc_RNA (1)...(19): siRNA sense strand
ggagaaacagaagggaaga

SEQ ID NO: 1872965 - RNA, 19 nt, Homo sapiens
  misc_RNA (1)...(19): siRNA sense strand
gacaauggacaagaaguuc

SEQ ID NO: 1872966 - RNA, 19 nt, Homo sapiens
  misc_RNA (1)...(19): siRNA sense strand
gaaccuccucuaccuguac

SEQ ID NO: 1872967 - RNA, 19 nt, Homo sapiens
  misc_RNA (1)...(19): siRNA sense strand
ggugaucggcgagggcuuu

SEQ ID NO: 1872968 - RNA, 19 nt, Homo sapiens
  misc_RNA (1)...(19): siRNA sense strand
gagaaacagaagggaagaa

SEQ ID NO: 1872969 - RNA, 19 nt, Homo sapiens
  misc_RNA (1)...(19): siRNA sense strand
aaagagacaauggacaaga

SEQ ID NO: 1872970 - RNA, 19 nt, Homo sapiens
  misc_RNA (1)...(19): siRNA sense strand
agaaccuccucuaccugua

SEQ ID NO: 1872971 - RNA, 19 nt, Homo sapiens
  misc_RNA (1)...(19): siRNA sense strand
cggcgagggcuuuggguuu

SEQ ID NO: 1872972 - RNA, 19 nt, Homo sapiens
  misc_RNA (1)...(19): siRNA sense strand
auaagcgacugcagaccuu

SEQ ID NO: 1872973 - RNA, 19 nt, Homo sapiens
  misc_RNA (1)...(19): siRNA sense strand
gaugaucaaagagacaaug

SEQ ID NO: 1872974 - RNA, 19 nt, Homo sapiens
  misc_RNA (1)...(19): siRNA sense strand
caagaugaucaaagagaca

SEQ ID NO: 1872975 - RNA, 19 nt, Homo sapiens
  misc_RNA (1)...(19): siRNA sense strand
uggagaccauggagcuaug

SEQ ID NO: 1872976 - RNA, 19 nt, Homo sapiens
  misc_RNA (1)...(19): siRNA sense strand
ggugaagaaccuccucuac

SEQ ID NO: 1872977 - RNA, 19 nt, Homo sapiens
  misc_RNA (1)...(19): siRNA sense strand
ggaaauugcucaagaacua

SEQ ID NO: 1872978 - RNA, 19 nt, Homo sapiens
  misc_RNA (1)...(19): siRNA sense strand
gaagaguacuuuccaacua

SEQ ID NO: 1872979 - RNA, 19 nt, Homo sapiens
  misc_RNA (1)...(19): siRNA sense strand
gcaaaccaaucucauucua

SEQ ID NO: 1872980 - RNA, 19 nt, Homo sapiens
  misc_RNA (1)...(19): siRNA sense strand
caacaucgcucgccaucug

SEQ ID NO: 1872981 - RNA, 19 nt, Homo sapiens
  misc_RNA (1)...(19): siRNA sense strand
caagaacuauaccauaaga

SEQ ID NO: 1872982 - RNA, 19 nt, Homo sapiens
  misc_RNA (1)...(19): siRNA sense strand
gaagagugcucggcguauu

SEQ ID NO: 1872983 - RNA, 19 nt, Homo sapiens
  misc_RNA (1)...(19): siRNA sense strand
gcaaggaacugcggagcuu

SEQ ID NO: 1872984 - RNA, 19 nt, Homo sapiens
  misc_RNA (1)...(19): siRNA sense strand
ggaaacaaaucagcaaucu

SEQ ID NO: 1872985 - RNA, 19 nt, Homo sapiens
  misc_RNA (1)...(19): siRNA sense strand
uaaacagagugacuucaaa

SEQ ID NO: 1872986 - RNA, 19 nt, Homo sapiens
  misc_RNA (1)...(19): siRNA sense strand
ccugacagcucuuguauca

SEQ ID NO: 1872987 - RNA, 19 nt, Homo sapiens
  misc_RNA (1)...(19): siRNA sense strand
gcucaagaacuauaccaua

SEQ ID NO: 1872988 - RNA, 19 nt, Homo sapiens
  misc_RNA (1)...(19): siRNA sense strand
cucaagaacuauaccauaa

SEQ ID NO: 1872989 - RNA, 19 nt, Homo sapiens
  misc_RNA (1)...(19): siRNA sense strand
uaagagacauguggaaaca

SEQ ID NO: 1872990 - RNA, 19 nt, Homo sapiens
  misc_RNA (1)...(19): siRNA sense strand
agagacauguggaaacaaa

SEQ ID NO: 1872991 - RNA, 19 nt, Homo sapiens
  misc_RNA (1)...(19): siRNA sense strand
ucaggaaauugcucaagaa

SEQ ID NO: 1872992 - RNA, 19 nt, Homo sapiens
  misc_RNA (1)...(19): siRNA sense strand
gaagcgagagcuaaacaga

SEQ ID NO: 1872993 - RNA, 19 nt, Homo sapiens
  misc_RNA (1)...(19): siRNA sense strand
caaguuucccucacuguaa

SEQ ID NO: 1872994 - RNA, 19 nt, Homo sapiens
  misc_RNA (1)...(19): siRNA sense strand
ugacagcucuuguaucacu

SEQ ID NO: 1872995 - RNA, 19 nt, Homo sapiens
  misc_RNA (1)...(19): siRNA sense strand
guaaacagagugacuucaa

SEQ ID NO: 1872996 - RNA, 19 nt, Homo sapiens
  misc_RNA (1)...(19): siRNA sense strand
gcaauuuacaucuguggaa

SEQ ID NO: 1872997 - RNA, 19 nt, Homo sapiens
  misc_RNA (1)...(19): siRNA sense strand
aaagaagacucacaaaaga

SEQ ID NO: 1872998 - RNA, 19 nt, Homo sapiens
  misc_RNA (1)...(19): siRNA sense strand
ugagaaagauaacaacacu

SEQ ID NO: 1872999 - RNA, 19 nt, Homo sapiens
  misc_RNA (1)...(19): siRNA sense strand
caacaugccugugguuucg

SEQ ID NO: 1873000 - RNA, 19 nt, Homo sapiens
  misc_RNA (1)...(19): siRNA sense strand
gaaaacagaagaguacuuu

SEQ ID NO: 1873001 - RNA, 19 nt, Homo sapiens
  misc_RNA (1)...(19): siRNA sense strand
aagaguacuuuccaacuau

SEQ ID NO: 1873002 - RNA, 19 nt, Homo sapiens
  misc_RNA (1)...(19): siRNA sense strand
uaucacugcucucugucua

SEQ ID NO: 1873003 - RNA, 19 nt, Homo sapiens
  misc_RNA (1)...(19): siRNA sense strand
uuacaucuguggaauagca

SEQ ID NO: 1873004 - RNA, 19 nt, Homo sapiens
  misc_RNA (1)...(19): siRNA sense strand
aaagugaggcagacaaguu

SEQ ID NO: 1873005 - RNA, 19 nt, Homo sapiens
  misc_RNA (1)...(19): siRNA sense strand
caugaggccgucaccauaa

SEQ ID NO: 1873006 - RNA, 19 nt, Homo sapiens
  misc_RNA (1)...(19): siRNA sense strand
caauuuacaucuguggaau

SEQ ID NO: 1873007 - RNA, 19 nt, Homo sapiens
  misc_RNA (1)...(19): siRNA sense strand
acagagugacuucaaauga

SEQ ID NO: 1873008 - RNA, 19 nt, Homo sapiens
  misc_RNA (1)...(19): siRNA sense strand
ucaugaggccgucaccaua

SEQ ID NO: 1873009 - RNA, 19 nt, Homo sapiens
  misc_RNA (1)...(19): siRNA sense strand
ccaaguuucccucacugua

SEQ ID NO: 1873010 - RNA, 19 nt, Homo sapiens
  misc_RNA (1)...(19): siRNA sense strand
ucacugcucucugucuaug

SEQ ID NO: 1873011 - RNA, 19 nt, Homo sapiens
  misc_RNA (1)...(19): siRNA sense strand
gaaauugcucaagaacuau

SEQ ID NO: 1873012 - RNA, 19 nt, Homo sapiens
  misc_RNA (1)...(19): siRNA sense strand
caaaccaaucucauucuau

SEQ ID NO: 1873013 - RNA, 19 nt, Homo sapiens
  misc_RNA (1)...(19): siRNA sense strand
aauccaacccucuaagaaa

SEQ ID NO: 1873014 - RNA, 19 nt, Homo sapiens
  misc_RNA (1)...(19): siRNA sense strand
gcaaccggaugcccuucug

SEQ ID NO: 1873015 - RNA, 19 nt, Homo sapiens
  misc_RNA (1)...(19): siRNA sense strand
cauaagagacauguggaaa

SEQ ID NO: 1873016 - RNA, 19 nt, Homo sapiens
  misc_RNA (1)...(19): siRNA sense strand
aaacagagugacuucaaau

SEQ ID NO: 1873017 - RNA, 19 nt, Homo sapiens
  misc_RNA (1)...(19): siRNA sense strand
cggaugcccuucugagcaa

SEQ ID NO: 1873018 - RNA, 19 nt, Homo sapiens
  misc_RNA (1)...(19): siRNA sense strand
cagagugacuucaaaugac

SEQ ID NO: 1873019 - RNA, 19 nt, Homo sapiens
  misc_RNA (1)...(19): siRNA sense strand
agagugacuucaaaugaca

SEQ ID NO: 1873020 - RNA, 19 nt, Homo sapiens
  misc_RNA (1)...(19): siRNA sense strand
agaacuauaccauaagaga

SEQ ID NO: 1873021 - RNA, 19 nt, Homo sapiens
  misc_RNA (1)...(19): siRNA sense strand
gaaacaaaucagcaaucug

SEQ ID NO: 1873022 - RNA, 19 nt, Homo sapiens
  misc_RNA (1)...(19): siRNA sense strand
acagaagaguacuuuccaa

SEQ ID NO: 1873023 - RNA, 19 nt, Homo sapiens
  misc_RNA (1)...(19): siRNA sense strand
aaguuucccucacuguaaa

SEQ ID NO: 1873024 - RNA, 19 nt, Homo sapiens
  misc_RNA (1)...(19): siRNA sense strand
auacuccucuccaaaucaa

SEQ ID NO: 1873025 - RNA, 19 nt, Homo sapiens
  misc_RNA (1)...(19): siRNA sense strand
ucauacuccucuccaaauc

SEQ ID NO: 1873026 - RNA, 19 nt, Homo sapiens
  misc_RNA (1)...(19): siRNA sense strand
caacacuuaugaaaacaga

SEQ ID NO: 1873027 - RNA, 19 nt, Homo sapiens
  misc_RNA (1)...(19): siRNA sense strand
caaccgugguaccuagaag

SEQ ID NO: 1873028 - RNA, 19 nt, Homo sapiens
  misc_RNA (1)...(19): siRNA sense strand
aaauccaacccucuaagaa

SEQ ID NO: 1873029 - RNA, 19 nt, Homo sapiens
  misc_RNA (1)...(19): siRNA sense strand
acagugcaauuuacaucug

SEQ ID NO: 1873030 - RNA, 19 nt, Homo sapiens
  misc_RNA (1)...(19): siRNA sense strand
uucaggaaauugcucaaga

SEQ ID NO: 1873031 - RNA, 19 nt, Homo sapiens
  misc_RNA (1)...(19): siRNA sense strand
agcgagagcuaaacagaca

SEQ ID NO: 1873032 - RNA, 19 nt, Homo sapiens
  misc_RNA (1)...(19): siRNA sense strand
ugacagugcaauuuacauc

SEQ ID NO: 1873033 - RNA, 19 nt, Homo sapiens
  misc_RNA (1)...(19): siRNA sense strand
aaaagaagacucacaaaag

SEQ ID NO: 1873034 - RNA, 19 nt, Homo sapiens
  misc_RNA (1)...(19): siRNA sense strand
acacuggugguaagagaaa

SEQ ID NO: 1873035 - RNA, 19 nt, Homo sapiens
  misc_RNA (1)...(19): siRNA sense strand
ccaacaugccugugguuuc

SEQ ID NO: 1873036 - RNA, 19 nt, Homo sapiens
  misc_RNA (1)...(19): siRNA sense strand
agaguacuuuccaacuaug

SEQ ID NO: 1873037 - RNA, 19 nt, Homo sapiens
  misc_RNA (1)...(19): siRNA sense strand
cugagaaccugugcuugga

SEQ ID NO: 1873038 - RNA, 19 nt, Homo sapiens
  misc_RNA (1)...(19): siRNA sense strand
aagagugcucggcguauuu

SEQ ID NO: 1873039 - RNA, 19 nt, Homo sapiens
  misc_RNA (1)...(19): siRNA sense strand
gagaaagauaacaacacuu

SEQ ID NO: 1873040 - RNA, 19 nt, Homo sapiens
  misc_RNA (1)...(19): siRNA sense strand
gugcguggccuucauacuc

SEQ ID NO: 1873041 - RNA, 19 nt, Homo sapiens
  misc_RNA (1)...(19): siRNA sense strand
gccgucaccauaaagugua

SEQ ID NO: 1873042 - RNA, 19 nt, Homo sapiens
  misc_RNA (1)...(19): siRNA sense strand
ccauaagagacauguggaa

SEQ ID NO: 1873043 - RNA, 19 nt, Homo sapiens
  misc_RNA (1)...(19): siRNA sense strand
ggugguaagagaaauuaag

SEQ ID NO: 1873044 - RNA, 19 nt, Homo sapiens
  misc_RNA (1)...(19): siRNA sense strand
gccggaagcgagagcuaaa

SEQ ID NO: 1873045 - RNA, 19 nt, Homo sapiens
  misc_RNA (1)...(19): siRNA sense strand
cagugcaauuuacaucugu

SEQ ID NO: 1873046 - RNA, 19 nt, Homo sapiens
  misc_RNA (1)...(19): siRNA sense strand
cugcaaaccaaucucauuc

SEQ ID NO: 1873047 - RNA, 19 nt, Homo sapiens
  misc_RNA (1)...(19): siRNA sense strand
gaguacuuuccaacuauga

SEQ ID NO: 1873048 - RNA, 19 nt, Homo sapiens
  misc_RNA (1)...(19): siRNA sense strand
aaacagaagaguacuuucc

SEQ ID NO: 1873049 - RNA, 19 nt, Homo sapiens
  misc_RNA (1)...(19): siRNA sense strand
gacauguggaaacaaauca

SEQ ID NO: 1873050 - RNA, 19 nt, Homo sapiens
  misc_RNA (1)...(19): siRNA sense strand
cuucauacuccucuccaaa

SEQ ID NO: 1873051 - RNA, 19 nt, Homo sapiens
  misc_RNA (1)...(19): siRNA sense strand
uuguaucacugcucucugu

SEQ ID NO: 1873052 - RNA, 19 nt, Homo sapiens
  misc_RNA (1)...(19): siRNA sense strand
caaccggaugcccuucuga

SEQ ID NO: 1873053 - RNA, 19 nt, Homo sapiens
  misc_RNA (1)...(19): siRNA sense strand
caucugcaaaccaaucuca

SEQ ID NO: 1873054 - RNA, 19 nt, Homo sapiens
  misc_RNA (1)...(19): siRNA sense strand
augaggccgucaccauaaa

SEQ ID NO: 1873055 - RNA, 19 nt, Homo sapiens
  misc_RNA (1)...(19): siRNA sense strand
ucaagaacuauaccauaag

SEQ ID NO: 1873056 - RNA, 19 nt, Homo sapiens
  misc_RNA (1)...(19): siRNA sense strand
gaacgagucuuuguaguaa

SEQ ID NO: 1873057 - RNA, 19 nt, Homo sapiens
  misc_RNA (1)...(19): siRNA sense strand
ggaaagaucacaaagauuu

SEQ ID NO: 1873058 - RNA, 19 nt, Homo sapiens
  misc_RNA (1)...(19): siRNA sense strand
ggagauauguuggaaauga

SEQ ID NO: 1873059 - RNA, 19 nt, Homo sapiens
  misc_RNA (1)...(19): siRNA sense strand
ggaaauacaugcauacaca

SEQ ID NO: 1873060 - RNA, 19 nt, Homo sapiens
  misc_RNA (1)...(19): siRNA sense strand
ggagggauguggcuauuaa

SEQ ID NO: 1873061 - RNA, 19 nt, Homo sapiens
  misc_RNA (1)...(19): siRNA sense strand
ggauguggcuauuaaagua

SEQ ID NO: 1873062 - RNA, 19 nt, Homo sapiens
  misc_RNA (1)...(19): siRNA sense strand
ggaaugcaguguaaagauu

SEQ ID NO: 1873063 - RNA, 19 nt, Homo sapiens
  misc_RNA (1)...(19): siRNA sense strand
gggaacagauacagauaua

SEQ ID NO: 1873064 - RNA, 19 nt, Homo sapiens
  misc_RNA (1)...(19): siRNA sense strand
gaaugaaucuggaucaaag

SEQ ID NO: 1873065 - RNA, 19 nt, Homo sapiens
  misc_RNA (1)...(19): siRNA sense strand
ccaaagcacuucauuaugg

SEQ ID NO: 1873066 - RNA, 19 nt, Homo sapiens
  misc_RNA (1)...(19): siRNA sense strand
ccaaauccauggagagaaa

SEQ ID NO: 1873067 - RNA, 19 nt, Homo sapiens
  misc_RNA (1)...(19): siRNA sense strand
gcauacaguuucauuucua

SEQ ID NO: 1873068 - RNA, 19 nt, Homo sapiens
  misc_RNA (1)...(19): siRNA sense strand
gaaagagacgucugucaaa

SEQ ID NO: 1873069 - RNA, 19 nt, Homo sapiens
  misc_RNA (1)...(19): siRNA sense strand
ggaguuaucaucuauguga

SEQ ID NO: 1873070 - RNA, 19 nt, Homo sapiens
  misc_RNA (1)...(19): siRNA sense strand
gaaaguuccacacacauuu

SEQ ID NO: 1873071 - RNA, 19 nt, Homo sapiens
  misc_RNA (1)...(19): siRNA sense strand
gaaagucaacuccguaaug

SEQ ID NO: 1873072 - RNA, 19 nt, Homo sapiens
  misc_RNA (1)...(19): siRNA sense strand
gaaauucuccgcauaucuu

SEQ ID NO: 1873073 - RNA, 19 nt, Homo sapiens
  misc_RNA (1)...(19): siRNA sense strand
gaaucuggaucaaaguauu

SEQ ID NO: 1873074 - RNA, 19 nt, Homo sapiens
  misc_RNA (1)...(19): siRNA sense strand
uaaacaaucugcuucaagu

SEQ ID NO: 1873075 - RNA, 19 nt, Homo sapiens
  misc_RNA (1)...(19): siRNA sense strand
guguaaagauugcaaauuc

SEQ ID NO: 1873076 - RNA, 19 nt, Homo sapiens
  misc_RNA (1)...(19): siRNA sense strand
ugaagcaauugaucugaua

SEQ ID NO: 1873077 - RNA, 19 nt, Homo sapiens
  misc_RNA (1)...(19): siRNA sense strand
gccaaggaaugcaguguaa

SEQ ID NO: 1873078 - RNA, 19 nt, Homo sapiens
  misc_RNA (1)...(19): siRNA sense strand
cagaugauauggaagaaga

SEQ ID NO: 1873079 - RNA, 19 nt, Homo sapiens
  misc_RNA (1)...(19): siRNA sense strand
gucaaggacugaaauguga

SEQ ID NO: 1873080 - RNA, 19 nt, Homo sapiens
  misc_RNA (1)...(19): siRNA sense strand
acaaguaucucuguaucua

SEQ ID NO: 1873081 - RNA, 19 nt, Homo sapiens
  misc_RNA (1)...(19): siRNA sense strand
guaaugaaguggcuauuuu

SEQ ID NO: 1873082 - RNA, 19 nt, Homo sapiens
  misc_RNA (1)...(19): siRNA sense strand
gagccucaguggcacauuu

SEQ ID NO: 1873083 - RNA, 19 nt, Homo sapiens
  misc_RNA (1)...(19): siRNA sense strand
gguaggaacuccagcauac

SEQ ID NO: 1873084 - RNA, 19 nt, Homo sapiens
  misc_RNA (1)...(19): siRNA sense strand
gggagaguguuaccauuga

SEQ ID NO: 1873085 - RNA, 19 nt, Homo sapiens
  misc_RNA (1)...(19): siRNA sense strand
aaagucaacuccguaauga

SEQ ID NO: 1873086 - RNA, 19 nt, Homo sapiens
  misc_RNA (1)...(19): siRNA sense strand
ugagaaagaggcauuauug

SEQ ID NO: 1873087 - RNA, 19 nt, Homo sapiens
  misc_RNA (1)...(19): siRNA sense strand
caaauucaacugccauaaa

SEQ ID NO: 1873088 - RNA, 19 nt, Homo sapiens
  misc_RNA (1)...(19): siRNA sense strand
gcugggaaauacaugcaua

SEQ ID NO: 1873089 - RNA, 19 nt, Homo sapiens
  misc_RNA (1)...(19): siRNA sense strand
gaucuugugugcuccauag

SEQ ID NO: 1873090 - RNA, 19 nt, Homo sapiens
  misc_RNA (1)...(19): siRNA sense strand
gcagcaauccacacuguuu

SEQ ID NO: 1873091 - RNA, 19 nt, Homo sapiens
  misc_RNA (1)...(19): siRNA sense strand
cauuugcuguucacucuua

SEQ ID NO: 1873092 - RNA, 19 nt, Homo sapiens
  misc_RNA (1)...(19): siRNA sense strand
uaacuguaguggaguaaga

SEQ ID NO: 1873093 - RNA, 19 nt, Homo sapiens
  misc_RNA (1)...(19): siRNA sense strand
ccuucaagauuccaaauaa

SEQ ID NO: 1873094 - RNA, 19 nt, Homo sapiens
  misc_RNA (1)...(19): siRNA sense strand
ugaaggcuguggauuaaau

SEQ ID NO: 1873095 - RNA, 19 nt, Homo sapiens
  misc_RNA (1)...(19): siRNA sense strand
gauaaacaaucugcuucaa

SEQ ID NO: 1873096 - RNA, 19 nt, Homo sapiens
  misc_RNA (1)...(19): siRNA sense strand
ggacagcucucauaauccu

SEQ ID NO: 1873097 - RNA, 19 nt, Homo sapiens
  misc_RNA (1)...(19): siRNA sense strand
cauaaacgcugugcaucaa

SEQ ID NO: 1873098 - RNA, 19 nt, Homo sapiens
  misc_RNA (1)...(19): siRNA sense strand
auacaugcauacacacaua

SEQ ID NO: 1873099 - RNA, 19 nt, Homo sapiens
  misc_RNA (1)...(19): siRNA sense strand
gaacguuacauuacacaug

SEQ ID NO: 1873100 - RNA, 19 nt, Homo sapiens
  misc_RNA (1)...(19): siRNA sense strand
gaagcugugugacuuugga

SEQ ID NO: 1873101 - RNA, 19 nt, Homo sapiens
  misc_RNA (1)...(19): siRNA sense strand
acagauauaccaauggaua

SEQ ID NO: 1873102 - RNA, 19 nt, Homo sapiens
  misc_RNA (1)...(19): siRNA sense strand
ugaggaaucugcauuuuaa

SEQ ID NO: 1873103 - RNA, 19 nt, Homo sapiens
  misc_RNA (1)...(19): siRNA sense strand
guggauaucaguacuguuu

SEQ ID NO: 1873104 - RNA, 19 nt, Homo sapiens
  misc_RNA (1)...(19): siRNA sense strand
gcuccuacuuucugugauu

SEQ ID NO: 1873105 - RNA, 19 nt, Homo sapiens
  misc_RNA (1)...(19): siRNA sense strand
agacuuggcuugaccuuag

SEQ ID NO: 1873106 - RNA, 19 nt, Homo sapiens
  misc_RNA (1)...(19): siRNA sense strand
gcaagggaaagaucacaaa

SEQ ID NO: 1873107 - RNA, 19 nt, Homo sapiens
  misc_RNA (1)...(19): siRNA sense strand
gaaccaaguaagagaauuc

SEQ ID NO: 1873108 - RNA, 19 nt, Homo sapiens
  misc_RNA (1)...(19): siRNA sense strand
ugugaaggcuguggauuaa

SEQ ID NO: 1873109 - RNA, 19 nt, Homo sapiens
  misc_RNA (1)...(19): siRNA sense strand
ggagaguguuaccauugaa

SEQ ID NO: 1873110 - RNA, 19 nt, Homo sapiens
  misc_RNA (1)...(19): siRNA sense strand
gcauggagauauguuggaa

SEQ ID NO: 1873111 - RNA, 19 nt, Homo sapiens
  misc_RNA (1)...(19): siRNA sense strand
agacgucugucaaauguau

SEQ ID NO: 1873112 - RNA, 19 nt, Homo sapiens
  misc_RNA (1)...(19): siRNA sense strand
gcccgacucucuaauggaa

SEQ ID NO: 1873113 - RNA, 19 nt, Homo sapiens
  misc_RNA (1)...(19): siRNA sense strand
aaauaacuguaguggagua

SEQ ID NO: 1873114 - RNA, 19 nt, Homo sapiens
  misc_RNA (1)...(19): siRNA sense strand
caggagaucugugguagga

SEQ ID NO: 1873115 - RNA, 19 nt, Homo sapiens
  misc_RNA (1)...(19): siRNA sense strand
gcagcacaauggugaagga

SEQ ID NO: 1873116 - RNA, 19 nt, Homo sapiens
  misc_RNA (1)...(19): siRNA sense strand
uaccucagcagaugaaaua

SEQ ID NO: 1873117 - RNA, 19 nt, Homo sapiens
  misc_RNA (1)...(19): siRNA sense strand
cuacaggacuaucagacuu

SEQ ID NO: 1873118 - RNA, 19 nt, Homo sapiens
  misc_RNA (1)...(19): siRNA sense strand
gcaauugaucugauaaaca

SEQ ID NO: 1873119 - RNA, 19 nt, Homo sapiens
  misc_RNA (1)...(19): siRNA sense strand
gcauuuauguacccaccaa

SEQ ID NO: 1873120 - RNA, 19 nt, Homo sapiens
  misc_RNA (1)...(19): siRNA sense strand
gaaguucuccggagcaaag

SEQ ID NO: 1873121 - RNA, 19 nt, Homo sapiens
  misc_RNA (1)...(19): siRNA sense strand
acagauacuuguugcuuug

SEQ ID NO: 1873122 - RNA, 19 nt, Homo sapiens
  misc_RNA (1)...(19): siRNA sense strand
gggauaaccugagaaagag

SEQ ID NO: 1873123 - RNA, 19 nt, Homo sapiens
  misc_RNA (1)...(19): siRNA sense strand
ccacacacauuugcuguuc

SEQ ID NO: 1873124 - RNA, 19 nt, Homo sapiens
  misc_RNA (1)...(19): siRNA sense strand
agagacgucugucaaaugu

SEQ ID NO: 1873125 - RNA, 19 nt, Homo sapiens
  misc_RNA (1)...(19): siRNA sense strand
uaaacgaugugccuucaag

SEQ ID NO: 1873126 - RNA, 19 nt, Homo sapiens
  misc_RNA (1)...(19): siRNA sense strand
ugaaggagaccuaguggaa

SEQ ID NO: 1873127 - RNA, 19 nt, Homo sapiens
  misc_RNA (1)...(19): siRNA sense strand
cgaugugccuucaagauuc

SEQ ID NO: 1873128 - RNA, 19 nt, Homo sapiens
  misc_RNA (1)...(19): siRNA sense strand
gaccuuagagaauuugaaa

SEQ ID NO: 1873129 - RNA, 19 nt, Homo sapiens
  misc_RNA (1)...(19): siRNA sense strand
gagaauguggauaucagua

SEQ ID NO: 1873130 - RNA, 19 nt, Homo sapiens
  misc_RNA (1)...(19): siRNA sense strand
cgagauuucacaaacauuu

SEQ ID NO: 1873131 - RNA, 19 nt, Homo sapiens
  misc_RNA (1)...(19): siRNA sense strand
ggaaccaaguaagagaauu

SEQ ID NO: 1873132 - RNA, 19 nt, Homo sapiens
  misc_RNA (1)...(19): siRNA sense strand
aaagagacgucugucaaau

SEQ ID NO: 1873133 - RNA, 19 nt, Homo sapiens
  misc_RNA (1)...(19): siRNA sense strand
ccacgagauuucacaaaca

SEQ ID NO: 1873134 - RNA, 19 nt, Homo sapiens
  misc_RNA (1)...(19): siRNA sense strand
gagaaaacguuacaguguu

SEQ ID NO: 1873135 - RNA, 19 nt, Homo sapiens
  misc_RNA (1)...(19): siRNA sense strand
gaagcaauugaucugauaa

SEQ ID NO: 1873136 - RNA, 19 nt, Homo sapiens
  misc_RNA (1)...(19): siRNA sense strand
cacagauacuuguugcuuu

SEQ ID NO: 1873137 - RNA, 19 nt, Homo sapiens
  misc_RNA (1)...(19): siRNA sense strand
ccagaacgaauuacuaaau

SEQ ID NO: 1873138 - RNA, 19 nt, Homo sapiens
  misc_RNA (1)...(19): siRNA sense strand
gaaugcaguguaaagauug

SEQ ID NO: 1873139 - RNA, 19 nt, Homo sapiens
  misc_RNA (1)...(19): siRNA sense strand
ggaugaagauauaaaugac

SEQ ID NO: 1873140 - RNA, 19 nt, Homo sapiens
  misc_RNA (1)...(19): siRNA sense strand
uacaaccguucccuagaua

SEQ ID NO: 1873141 - RNA, 19 nt, Homo sapiens
  misc_RNA (1)...(19): siRNA sense strand
gcacgcaucauuggugaaa

SEQ ID NO: 1873142 - RNA, 19 nt, Homo sapiens
  misc_RNA (1)...(19): siRNA sense strand
gagauauguuggaaaugau

SEQ ID NO: 1873143 - RNA, 19 nt, Homo sapiens
  misc_RNA (1)...(19): siRNA sense strand
agaacgagucuuuguagua

SEQ ID NO: 1873144 - RNA, 19 nt, Homo sapiens
  misc_RNA (1)...(19): siRNA sense strand
uaaugaggguuguacaauc

SEQ ID NO: 1873145 - RNA, 19 nt, Homo sapiens
  misc_RNA (1)...(19): siRNA sense strand
agggaaagaucacaaagau

SEQ ID NO: 1873146 - RNA, 19 nt, Homo sapiens
  misc_RNA (1)...(19): siRNA sense strand
gaauuugaaacucgcauug

SEQ ID NO: 1873147 - RNA, 19 nt, Homo sapiens
  misc_RNA (1)...(19): siRNA sense strand
ggauaucaguacuguuuac

SEQ ID NO: 1873148 - RNA, 19 nt, Homo sapiens
  misc_RNA (1)...(19): siRNA sense strand
gcaaauucaacugccauaa

SEQ ID NO: 1873149 - RNA, 19 nt, Homo sapiens
  misc_RNA (1)...(19): siRNA sense strand
uuacaaccguucccuagau

SEQ ID NO: 1873150 - RNA, 19 nt, Homo sapiens
  misc_RNA (1)...(19): siRNA sense strand
agaauauugugcacuguga

SEQ ID NO: 1873151 - RNA, 19 nt, Homo sapiens
  misc_RNA (1)...(19): siRNA sense strand
ggguuuggaugacacagaa

SEQ ID NO: 1873152 - RNA, 19 nt, Homo sapiens
  misc_RNA (1)...(19): siRNA sense strand
cauaaacgaugugccuuca

SEQ ID NO: 1873153 - RNA, 19 nt, Homo sapiens
  misc_RNA (1)...(19): siRNA sense strand
guaucucuguaucuaauug

SEQ ID NO: 1873154 - RNA, 19 nt, Homo sapiens
  misc_RNA (1)...(19): siRNA sense strand
uuacacccgucccacgaua

SEQ ID NO: 1873155 - RNA, 19 nt, Homo sapiens
  misc_RNA (1)...(19): siRNA sense strand
uuguaaaccuggaauguau

SEQ ID NO: 1873156 - RNA, 19 nt, Homo sapiens
  misc_RNA (1)...(19): siRNA sense strand
gaagcaauguucugugauu

SEQ ID NO: 1873157 - RNA, 19 nt, Homo sapiens
  misc_RNA (1)...(19): siRNA sense strand
ucacggauauccucuguug

SEQ ID NO: 1873158 - RNA, 19 nt, Homo sapiens
  misc_RNA (1)...(19): siRNA sense strand
ggugauacuguacaaauua

SEQ ID NO: 1873159 - RNA, 19 nt, Homo sapiens
  misc_RNA (1)...(19): siRNA sense strand
gaggguaacaaucaaauaa

SEQ ID NO: 1873160 - RNA, 19 nt, Homo sapiens
  misc_RNA (1)...(19): siRNA sense strand
caaauaacauguagaaacg

SEQ ID NO: 1873161 - RNA, 19 nt, Homo sapiens
  misc_RNA (1)...(19): siRNA sense strand
gaacaggugacauaguuga

SEQ ID NO: 1873162 - RNA, 19 nt, Homo sapiens
  misc_RNA (1)...(19): siRNA sense strand
aagaacaggugacauaguu

SEQ ID NO: 1873163 - RNA, 19 nt, Homo sapiens
  misc_RNA (1)...(19): siRNA sense strand
ggaaggugauacuguacaa

SEQ ID NO: 1873164 - RNA, 19 nt, Homo sapiens
  misc_RNA (1)...(19): siRNA sense strand
caggggaaguuuucuauua

SEQ ID NO: 1873165 - RNA, 19 nt, Homo sapiens
  misc_RNA (1)...(19): siRNA sense strand
ggguaacaaucaaauaaca

SEQ ID NO: 1873166 - RNA, 19 nt, Homo sapiens
  misc_RNA (1)...(19): siRNA sense strand
caggugacauaguugaauu

SEQ ID NO: 1873167 - RNA, 19 nt, Homo sapiens
  misc_RNA (1)...(19): siRNA sense strand
ucuggaaggugauacugua

SEQ ID NO: 1873168 - RNA, 19 nt, Homo sapiens
  misc_RNA (1)...(19): siRNA sense strand
caacacaggauacagacuu

SEQ ID NO: 1873169 - RNA, 19 nt, Homo sapiens
  misc_RNA (1)...(19): siRNA sense strand
cgagcaaugugucagaaug

SEQ ID NO: 1873170 - RNA, 19 nt, Homo sapiens
  misc_RNA (1)...(19): siRNA sense strand
auucuaaucucacggauau

SEQ ID NO: 1873171 - RNA, 19 nt, Homo sapiens
  misc_RNA (1)...(19): siRNA sense strand
gcuccagguucaucaguug

SEQ ID NO: 1873172 - RNA, 19 nt, Homo sapiens
  misc_RNA (1)...(19): siRNA sense strand
ggaauucuauaugaugaag

SEQ ID NO: 1873173 - RNA, 19 nt, Homo sapiens
  misc_RNA (1)...(19): siRNA sense strand
augcuuagauccaugugua

SEQ ID NO: 1873174 - RNA, 19 nt, Homo sapiens
  misc_RNA (1)...(19): siRNA sense strand
gauacagacuucaaaacaa

SEQ ID NO: 1873175 - RNA, 19 nt, Homo sapiens
  misc_RNA (1)...(19): siRNA sense strand
ccaaaugcagguccacuau

SEQ ID NO: 1873176 - RNA, 19 nt, Homo sapiens
  misc_RNA (1)...(19): siRNA sense strand
caaaugcagguccacuauu

SEQ ID NO: 1873177 - RNA, 19 nt, Homo sapiens
  misc_RNA (1)...(19): siRNA sense strand
auggagacauuacuucauu

SEQ ID NO: 1873178 - RNA, 19 nt, Homo sapiens
  misc_RNA (1)...(19): siRNA sense strand
accauggaauucuauauga

SEQ ID NO: 1873179 - RNA, 19 nt, Homo sapiens
  misc_RNA (1)...(19): siRNA sense strand
guucaucaguugaguacca

SEQ ID NO: 1873180 - RNA, 19 nt, Homo sapiens
  misc_RNA (1)...(19): siRNA sense strand
ccauggaauucuauaugau

SEQ ID NO: 1873181 - RNA, 19 nt, Homo sapiens
  misc_RNA (1)...(19): siRNA sense strand
aagcaauguucugugauuu

SEQ ID NO: 1873182 - RNA, 19 nt, Homo sapiens
  misc_RNA (1)...(19): siRNA sense strand
caguguaauucuaaucuca

SEQ ID NO: 1873183 - RNA, 19 nt, Homo sapiens
  misc_RNA (1)...(19): siRNA sense strand
gacuguguuucuuuccuuu

SEQ ID NO: 1873184 - RNA, 19 nt, Homo sapiens
  misc_RNA (1)...(19): siRNA sense strand
ugccagaacuuguaucaac

SEQ ID NO: 1873185 - RNA, 19 nt, Homo sapiens
  misc_RNA (1)...(19): siRNA sense strand
ccuggucaguguaauucua

SEQ ID NO: 1873186 - RNA, 19 nt, Homo sapiens
  misc_RNA (1)...(19): siRNA sense strand
gguccacuccucccaaaug

SEQ ID NO: 1873187 - RNA, 19 nt, Homo sapiens
  misc_RNA (1)...(19): siRNA sense strand
uaaaguggacaaaccaaca

SEQ ID NO: 1873188 - RNA, 19 nt, Homo sapiens
  misc_RNA (1)...(19): siRNA sense strand
cagaacuuguaucaacuug

SEQ ID NO: 1873189 - RNA, 19 nt, Homo sapiens
  misc_RNA (1)...(19): siRNA sense strand
uucaagaacaggugacaua

SEQ ID NO: 1873190 - RNA, 19 nt, Homo sapiens
  misc_RNA (1)...(19): siRNA sense strand
gaaugggaaacugguauau

SEQ ID NO: 1873191 - RNA, 19 nt, Homo sapiens
  misc_RNA (1)...(19): siRNA sense strand
gaaggugauacuguacaaa

SEQ ID NO: 1873192 - RNA, 19 nt, Homo sapiens
  misc_RNA (1)...(19): siRNA sense strand
caacuugaggguaacaauc

SEQ ID NO: 1873193 - RNA, 19 nt, Homo sapiens
  misc_RNA (1)...(19): siRNA sense strand
gcauaacgugcgcagaaga

SEQ ID NO: 1873194 - RNA, 19 nt, Homo sapiens
  misc_RNA (1)...(19): siRNA sense strand
ugaggguaacaaucaaaua

SEQ ID NO: 1873195 - RNA, 19 nt, Homo sapiens
  misc_RNA (1)...(19): siRNA sense strand
ucucagacuguguuucuuu

SEQ ID NO: 1873196 - RNA, 19 nt, Homo sapiens
  misc_RNA (1)...(19): siRNA sense strand
cauaacgugcgcagaagaa

SEQ ID NO: 1873197 - RNA, 19 nt, Homo sapiens
  misc_RNA (1)...(19): siRNA sense strand
gcaauguucugugauuuuc

SEQ ID NO: 1873198 - RNA, 19 nt, Homo sapiens
  misc_RNA (1)...(19): siRNA sense strand
agacuguguuucuuuccuu

SEQ ID NO: 1873199 - RNA, 19 nt, Homo sapiens
  misc_RNA (1)...(19): siRNA sense strand
agaaugggaaacugguaua

SEQ ID NO: 1873200 - RNA, 19 nt, Homo sapiens
  misc_RNA (1)...(19): siRNA sense strand
cuuagauccauguguaaua

SEQ ID NO: 1873201 - RNA, 19 nt, Homo sapiens
  misc_RNA (1)...(19): siRNA sense strand
ucauuccuguugucaguau

SEQ ID NO: 1873202 - RNA, 19 nt, Homo sapiens
  misc_RNA (1)...(19): siRNA sense strand
acaaacacaucuggaaggu

SEQ ID NO: 1873203 - RNA, 19 nt, Homo sapiens
  misc_RNA (1)...(19): siRNA sense strand
cauggaauucuauaugaug

SEQ ID NO: 1873204 - RNA, 19 nt, Homo sapiens
  misc_RNA (1)...(19): siRNA sense strand
caagaacaggugacauagu

SEQ ID NO: 1873205 - RNA, 19 nt, Homo sapiens
  misc_RNA (1)...(19): siRNA sense strand
agauccauguguaauauca

SEQ ID NO: 1873206 - RNA, 19 nt, Homo sapiens
  misc_RNA (1)...(19): siRNA sense strand
ggucagaaccaccaaaaug

SEQ ID NO: 1873207 - RNA, 19 nt, Homo sapiens
  misc_RNA (1)...(19): siRNA sense strand
gaaacggacaauggucaga

SEQ ID NO: 1873208 - RNA, 19 nt, Homo sapiens
  misc_RNA (1)...(19): siRNA sense strand
aguauaugcuccagguuca

SEQ ID NO: 1873209 - RNA, 19 nt, Homo sapiens
  misc_RNA (1)...(19): siRNA sense strand
gccagaacuuguaucaacu

SEQ ID NO: 1873210 - RNA, 19 nt, Homo sapiens
  misc_RNA (1)...(19): siRNA sense strand
aggugauacuguacaaauu

SEQ ID NO: 1873211 - RNA, 19 nt, Homo sapiens
  misc_RNA (1)...(19): siRNA sense strand
gagcaaugugucagaaugg

SEQ ID NO: 1873212 - RNA, 19 nt, Homo sapiens
  misc_RNA (1)...(19): siRNA sense strand
ucucauucauuucgagcaa

SEQ ID NO: 1873213 - RNA, 19 nt, Homo sapiens
  misc_RNA (1)...(19): siRNA sense strand
cuucauuccuguugucagu

SEQ ID NO: 1873214 - RNA, 19 nt, Homo sapiens
  misc_RNA (1)...(19): siRNA sense strand
gcuccuggucaguguaauu

SEQ ID NO: 1873215 - RNA, 19 nt, Homo sapiens
  misc_RNA (1)...(19): siRNA sense strand
aaauuaaaguggacaaacc

SEQ ID NO: 1873216 - RNA, 19 nt, Homo sapiens
  misc_RNA (1)...(19): siRNA sense strand
ggauacagacuucaaaaca

SEQ ID NO: 1873217 - RNA, 19 nt, Homo sapiens
  misc_RNA (1)...(19): siRNA sense strand
cagaaugggaaacugguau

SEQ ID NO: 1873218 - RNA, 19 nt, Homo sapiens
  misc_RNA (1)...(19): siRNA sense strand
gugacauaguugaauuugu

SEQ ID NO: 1873219 - RNA, 19 nt, Homo sapiens
  misc_RNA (1)...(19): siRNA sense strand
ccagaacuuguaucaacuu

SEQ ID NO: 1873220 - RNA, 19 nt, Homo sapiens
  misc_RNA (1)...(19): siRNA sense strand
ucucacggauauccucugu

SEQ ID NO: 1873221 - RNA, 19 nt, Homo sapiens
  misc_RNA (1)...(19): siRNA sense strand
ggugacauaguugaauuug

SEQ ID NO: 1873222 - RNA, 19 nt, Homo sapiens
  misc_RNA (1)...(19): siRNA sense strand
aaacggacaauggucagaa

SEQ ID NO: 1873223 - RNA, 19 nt, Homo sapiens
  misc_RNA (1)...(19): siRNA sense strand
ucagaaugggaaacuggua

SEQ ID NO: 1873224 - RNA, 19 nt, Homo sapiens
  misc_RNA (1)...(19): siRNA sense strand
caaaccaacaaaagcuuua

SEQ ID NO: 1873225 - RNA, 19 nt, Homo sapiens
  misc_RNA (1)...(19): siRNA sense strand
ccaccaaaaugcuuagauc

SEQ ID NO: 1873226 - RNA, 19 nt, Homo sapiens
  misc_RNA (1)...(19): siRNA sense strand
aaaguggacaaaccaacaa

SEQ ID NO: 1873227 - RNA, 19 nt, Homo sapiens
  misc_RNA (1)...(19): siRNA sense strand
aaggugauacuguacaaau

SEQ ID NO: 1873228 - RNA, 19 nt, Homo sapiens
  misc_RNA (1)...(19): siRNA sense strand
gauaucauccaacaaaauc

SEQ ID NO: 1873229 - RNA, 19 nt, Homo sapiens
  misc_RNA (1)...(19): siRNA sense strand
guuuguaaaucuggauauc

SEQ ID NO: 1873230 - RNA, 19 nt, Homo sapiens
  misc_RNA (1)...(19): siRNA sense strand
guaccagugccagaacuug

SEQ ID NO: 1873231 - RNA, 19 nt, Homo sapiens
  misc_RNA (1)...(19): siRNA sense strand
uuacuucauuccuguuguc

SEQ ID NO: 1873232 - RNA, 19 nt, Homo sapiens
  misc_RNA (1)...(19): siRNA sense strand
acacaucuggaaggugaua

SEQ ID NO: 1873233 - RNA, 19 nt, Homo sapiens
  misc_RNA (1)...(19): siRNA sense strand
ugguauaucccaguuguga

SEQ ID NO: 1873234 - RNA, 19 nt, Homo sapiens
  misc_RNA (1)...(19): siRNA sense strand
aaccauggaauucuauaug

SEQ ID NO: 1873235 - RNA, 19 nt, Homo sapiens
  misc_RNA (1)...(19): siRNA sense strand
ggacgaagcucuggauaaa

SEQ ID NO: 1873236 - RNA, 19 nt, Homo sapiens
  misc_RNA (1)...(19): siRNA sense strand
uaagagagcagccaauuua

SEQ ID NO: 1873237 - RNA, 19 nt, Homo sapiens
  misc_RNA (1)...(19): siRNA sense strand
gaaauaagauucugaagcu

SEQ ID NO: 1873238 - RNA, 19 nt, Homo sapiens
  misc_RNA (1)...(19): siRNA sense strand
gaaagaaauucaaguugga

SEQ ID NO: 1873239 - RNA, 19 nt, Homo sapiens
  misc_RNA (1)...(19): siRNA sense strand
caaagagacuuacuauuca

SEQ ID NO: 1873240 - RNA, 19 nt, Homo sapiens
  misc_RNA (1)...(19): siRNA sense strand
ggacggagaaaccaauuua

SEQ ID NO: 1873241 - RNA, 19 nt, Homo sapiens
  misc_RNA (1)...(19): siRNA sense strand
gcauuuaccuuuauaccaa

SEQ ID NO: 1873242 - RNA, 19 nt, Homo sapiens
  misc_RNA (1)...(19): siRNA sense strand
ugaaaggacuuacaauguu

SEQ ID NO: 1873243 - RNA, 19 nt, Homo sapiens
  misc_RNA (1)...(19): siRNA sense strand
gaaaggacuuacaauguuc

SEQ ID NO: 1873244 - RNA, 19 nt, Homo sapiens
  misc_RNA (1)...(19): siRNA sense strand
gaauguacauggcaaguca

SEQ ID NO: 1873245 - RNA, 19 nt, Homo sapiens
  misc_RNA (1)...(19): siRNA sense strand
gaaagagacucagaaacga

SEQ ID NO: 1873246 - RNA, 19 nt, Homo sapiens
  misc_RNA (1)...(19): siRNA sense strand
guacaacgcauuuaccuuu

SEQ ID NO: 1873247 - RNA, 19 nt, Homo sapiens
  misc_RNA (1)...(19): siRNA sense strand
gagaguaaauaugcgaaua

SEQ ID NO: 1873248 - RNA, 19 nt, Homo sapiens
  misc_RNA (1)...(19): siRNA sense strand
ggaaacugcugaaaauaua

SEQ ID NO: 1873249 - RNA, 19 nt, Homo sapiens
  misc_RNA (1)...(19): siRNA sense strand
uggaauacauguucucuuu

SEQ ID NO: 1873250 - RNA, 19 nt, Homo sapiens
  misc_RNA (1)...(19): siRNA sense strand
caacgcauuuaccuuuaua

SEQ ID NO: 1873251 - RNA, 19 nt, Homo sapiens
  misc_RNA (1)...(19): siRNA sense strand
ggacaaagagacuuacuau

SEQ ID NO: 1873252 - RNA, 19 nt, Homo sapiens
  misc_RNA (1)...(19): siRNA sense strand
gaagauacauuggcuacau

SEQ ID NO: 1873253 - RNA, 19 nt, Homo sapiens
  misc_RNA (1)...(19): siRNA sense strand
gagcagccaauuuauauuu

SEQ ID NO: 1873254 - RNA, 19 nt, Homo sapiens
  misc_RNA (1)...(19): siRNA sense strand
gaucaaaacugcccacauu

SEQ ID NO: 1873255 - RNA, 19 nt, Homo sapiens
  misc_RNA (1)...(19): siRNA sense strand
gauggcagguucaaaguug

SEQ ID NO: 1873256 - RNA, 19 nt, Homo sapiens
  misc_RNA (1)...(19): siRNA sense strand
gggcgucacugcaaucaaa

SEQ ID NO: 1873257 - RNA, 19 nt, Homo sapiens
  misc_RNA (1)...(19): siRNA sense strand
ccaaagagaagauacauug

SEQ ID NO: 1873258 - RNA, 19 nt, Homo sapiens
  misc_RNA (1)...(19): siRNA sense strand
gagagcagccaauuuauau

SEQ ID NO: 1873259 - RNA, 19 nt, Homo sapiens
  misc_RNA (1)...(19): siRNA sense strand
gcaaaugaaacucuuagaa

SEQ ID NO: 1873260 - RNA, 19 nt, Homo sapiens
  misc_RNA (1)...(19): siRNA sense strand
acaaagagacuuacuauuc

SEQ ID NO: 1873261 - RNA, 19 nt, Homo sapiens
  misc_RNA (1)...(19): siRNA sense strand
uaacaucgaugauccucuu

SEQ ID NO: 1873262 - RNA, 19 nt, Homo sapiens
  misc_RNA (1)...(19): siRNA sense strand
cuagauaaguuuacaggaa

SEQ ID NO: 1873263 - RNA, 19 nt, Homo sapiens
  misc_RNA (1)...(19): siRNA sense strand
aaaggaggcuagaagcuaa

SEQ ID NO: 1873264 - RNA, 19 nt, Homo sapiens
  misc_RNA (1)...(19): siRNA sense strand
cgaugaaggugcccuggua

SEQ ID NO: 1873265 - RNA, 19 nt, Homo sapiens
  misc_RNA (1)...(19): siRNA sense strand
uggaauaaguggacaagaa

SEQ ID NO: 1873266 - RNA, 19 nt, Homo sapiens
  misc_RNA (1)...(19): siRNA sense strand
gugcugacacuguuauuua

SEQ ID NO: 1873267 - RNA, 19 nt, Homo sapiens
  misc_RNA (1)...(19): siRNA sense strand
uaaaggugcugacacuguu

SEQ ID NO: 1873268 - RNA, 19 nt, Homo sapiens
  misc_RNA (1)...(19): siRNA sense strand
ggauaucuuugcaaaugaa

SEQ ID NO: 1873269 - RNA, 19 nt, Homo sapiens
  misc_RNA (1)...(19): siRNA sense strand
gaaugaauccuacuaagca

SEQ ID NO: 1873270 - RNA, 19 nt, Homo sapiens
  misc_RNA (1)...(19): siRNA sense strand
ccaauaaccgacuagauaa

SEQ ID NO: 1873271 - RNA, 19 nt, Homo sapiens
  misc_RNA (1)...(19): siRNA sense strand
ccaucugcauuucaauuua

SEQ ID NO: 1873272 - RNA, 19 nt, Homo sapiens
  misc_RNA (1)...(19): siRNA sense strand
ggacagagucacuucauca

SEQ ID NO: 1873273 - RNA, 19 nt, Homo sapiens
  misc_RNA (1)...(19): siRNA sense strand
gagacuuacuauucaacua

SEQ ID NO: 1873274 - RNA, 19 nt, Homo sapiens
  misc_RNA (1)...(19): siRNA sense strand
ccacauuggcguuggaaua

SEQ ID NO: 1873275 - RNA, 19 nt, Homo sapiens
  misc_RNA (1)...(19): siRNA sense strand
guaaauaugcgaauaaugc

SEQ ID NO: 1873276 - RNA, 19 nt, Homo sapiens
  misc_RNA (1)...(19): siRNA sense strand
ccaaugacgugaacaugau

SEQ ID NO: 1873277 - RNA, 19 nt, Homo sapiens
  misc_RNA (1)...(19): siRNA sense strand
cccaauaaccgacuagaua

SEQ ID NO: 1873278 - RNA, 19 nt, Homo sapiens
  misc_RNA (1)...(19): siRNA sense strand
gcacugaaaggacuuacaa

SEQ ID NO: 1873279 - RNA, 19 nt, Homo sapiens
  misc_RNA (1)...(19): siRNA sense strand
gggaggauauuaauucucu

SEQ ID NO: 1873280 - RNA, 19 nt, Homo sapiens
  misc_RNA (1)...(19): siRNA sense strand
ggaagugauucgucuugga

SEQ ID NO: 1873281 - RNA, 19 nt, Homo sapiens
  misc_RNA (1)...(19): siRNA sense strand
gugauaagauccagaagca

SEQ ID NO: 1873282 - RNA, 19 nt, Homo sapiens
  misc_RNA (1)...(19): siRNA sense strand
ccauacauuugguuaacua

SEQ ID NO: 1873283 - RNA, 19 nt, Homo sapiens
  misc_RNA (1)...(19): siRNA sense strand
gaaagagccagaaguacga

SEQ ID NO: 1873284 - RNA, 19 nt, Homo sapiens
  misc_RNA (1)...(19): siRNA sense strand
caaaguugcuaaguggaaa

SEQ ID NO: 1873285 - RNA, 19 nt, Homo sapiens
  misc_RNA (1)...(19): siRNA sense strand
gaacgguuacaucgaauga

SEQ ID NO: 1873286 - RNA, 19 nt, Homo sapiens
  misc_RNA (1)...(19): siRNA sense strand
uaugaacgguuacaucgaa

SEQ ID NO: 1873287 - RNA, 19 nt, Homo sapiens
  misc_RNA (1)...(19): siRNA sense strand
gaacugggcacugaaagga

SEQ ID NO: 1873288 - RNA, 19 nt, Homo sapiens
  misc_RNA (1)...(19): siRNA sense strand
guaccucuaugauggagaa

SEQ ID NO: 1873289 - RNA, 19 nt, Homo sapiens
  misc_RNA (1)...(19): siRNA sense strand
cagauuggcuuggauacuu

SEQ ID NO: 1873290 - RNA, 19 nt, Homo sapiens
  misc_RNA (1)...(19): siRNA sense strand
ggccgauggucuuacauaa

SEQ ID NO: 1873291 - RNA, 19 nt, Homo sapiens
  misc_RNA (1)...(19): siRNA sense strand
cuacagugaugaugaaaca

SEQ ID NO: 1873292 - RNA, 19 nt, Homo sapiens
  misc_RNA (1)...(19): siRNA sense strand
gaaccaccacacucaauga

SEQ ID NO: 1873293 - RNA, 19 nt, Homo sapiens
  misc_RNA (1)...(19): siRNA sense strand
guacccaucucucucuaug

SEQ ID NO: 1873294 - RNA, 19 nt, Homo sapiens
  misc_RNA (1)...(19): siRNA sense strand
uaccguggauuccucauuu

SEQ ID NO: 1873295 - RNA, 19 nt, Homo sapiens
  misc_RNA (1)...(19): siRNA sense strand
uacaacgcauuuaccuuua

SEQ ID NO: 1873296 - RNA, 19 nt, Homo sapiens
  misc_RNA (1)...(19): siRNA sense strand
aagcugaaguucccaagaa

SEQ ID NO: 1873297 - RNA, 19 nt, Homo sapiens
  misc_RNA (1)...(19): siRNA sense strand
cuacagcuauugaagacaa

SEQ ID NO: 1873298 - RNA, 19 nt, Homo sapiens
  misc_RNA (1)...(19): siRNA sense strand
gcaaauccagucagggaaa

SEQ ID NO: 1873299 - RNA, 19 nt, Homo sapiens
  misc_RNA (1)...(19): siRNA sense strand
uaugaccacuaucuuauug

SEQ ID NO: 1873300 - RNA, 19 nt, Homo sapiens
  misc_RNA (1)...(19): siRNA sense strand
gugaagagguacaagaaag

SEQ ID NO: 1873301 - RNA, 19 nt, Homo sapiens
  misc_RNA (1)...(19): siRNA sense strand
gcuagaagcuaagaaagag

SEQ ID NO: 1873302 - RNA, 19 nt, Homo sapiens
  misc_RNA (1)...(19): siRNA sense strand
aaggcaauaucaagcuuua

SEQ ID NO: 1873303 - RNA, 19 nt, Homo sapiens
  misc_RNA (1)...(19): siRNA sense strand
gagaggcaccuuccgacua

SEQ ID NO: 1873304 - RNA, 19 nt, Homo sapiens
  misc_RNA (1)...(19): siRNA sense strand
aaacagaagaugaacuuga

SEQ ID NO: 1873305 - RNA, 19 nt, Homo sapiens
  misc_RNA (1)...(19): siRNA sense strand
cuugugaacuucugacuga

SEQ ID NO: 1873306 - RNA, 19 nt, Homo sapiens
  misc_RNA (1)...(19): siRNA sense strand
ggacgugugaagucauuaa

SEQ ID NO: 1873307 - RNA, 19 nt, Homo sapiens
  misc_RNA (1)...(19): siRNA sense strand
ugagacagccauacauuug

SEQ ID NO: 1873308 - RNA, 19 nt, Homo sapiens
  misc_RNA (1)...(19): siRNA sense strand
gaauacauguucucuuucc

SEQ ID NO: 1873309 - RNA, 19 nt, Homo sapiens
  misc_RNA (1)...(19): siRNA sense strand
aaacuuugccuuuacuuug

SEQ ID NO: 1873310 - RNA, 19 nt, Homo sapiens
  misc_RNA (1)...(19): siRNA sense strand
ccaccacacucaaugaaca

SEQ ID NO: 1873311 - RNA, 19 nt, Homo sapiens
  misc_RNA (1)...(19): siRNA sense strand
uaagaugucacuugaaauc

SEQ ID NO: 1873312 - RNA, 19 nt, Homo sapiens
  misc_RNA (1)...(19): siRNA sense strand
uaacuaucauccugacugu

SEQ ID NO: 1873313 - RNA, 19 nt, Homo sapiens
  misc_RNA (1)...(19): siRNA sense strand
gaagcauugcacuuuauuu

SEQ ID NO: 1873314 - RNA, 19 nt, Homo sapiens
  misc_RNA (1)...(19): siRNA sense strand
uccauuauaucuucucuga

SEQ ID NO: 1873315 - RNA, 19 nt, Homo sapiens
  misc_RNA (1)...(19): siRNA sense strand
acugggaccugcaaaugua

SEQ ID NO: 1873316 - RNA, 19 nt, Homo sapiens
  misc_RNA (1)...(19): siRNA sense strand
gaaucuguuugagcaguuu

SEQ ID NO: 1873317 - RNA, 19 nt, Homo sapiens
  misc_RNA (1)...(19): siRNA sense strand
ucauaccucuuggagcuua

SEQ ID NO: 1873318 - RNA, 19 nt, Homo sapiens
  misc_RNA (1)...(19): siRNA sense strand
ggaauaaguggacaagaag

SEQ ID NO: 1873319 - RNA, 19 nt, Homo sapiens
  misc_RNA (1)...(19): siRNA sense strand
guucuugguugaaugaaau

SEQ ID NO: 1873320 - RNA, 19 nt, Homo sapiens
  misc_RNA (1)...(19): siRNA sense strand
ggaaaccgugccuuaauca

SEQ ID NO: 1873321 - RNA, 19 nt, Homo sapiens
  misc_RNA (1)...(19): siRNA sense strand
caaaugaaacucuuagaac

SEQ ID NO: 1873322 - RNA, 19 nt, Homo sapiens
  misc_RNA (1)...(19): siRNA sense strand
gaaggcaauaucaagcuuu

SEQ ID NO: 1873323 - RNA, 19 nt, Homo sapiens
  misc_RNA (1)...(19): siRNA sense strand
uugaugaacuacaugguuu

SEQ ID NO: 1873324 - RNA, 19 nt, Homo sapiens
  misc_RNA (1)...(19): siRNA sense strand
guaauuaggaacaccgauu

SEQ ID NO: 1873325 - RNA, 19 nt, Homo sapiens
  misc_RNA (1)...(19): siRNA sense strand
gaaugugaagaacccaaua

SEQ ID NO: 1873326 - RNA, 19 nt, Homo sapiens
  misc_RNA (1)...(19): siRNA sense strand
guugcuaaguggaaagaaa

SEQ ID NO: 1873327 - RNA, 19 nt, Homo sapiens
  misc_RNA (1)...(19): siRNA sense strand
gggaaaaccagauuuaaaa

SEQ ID NO: 1873328 - RNA, 19 nt, Homo sapiens
  misc_RNA (1)...(19): siRNA sense strand
gaaccgggagccauucaga

SEQ ID NO: 1873329 - RNA, 19 nt, Homo sapiens
  misc_RNA (1)...(19): siRNA sense strand
ggaagcauugcacuuuauu

SEQ ID NO: 1873330 - RNA, 19 nt, Homo sapiens
  misc_RNA (1)...(19): siRNA sense strand
ggaugugagugacaaacug

SEQ ID NO: 1873331 - RNA, 19 nt, Homo sapiens
  misc_RNA (1)...(19): siRNA sense strand
cuggauaucuuugcaaaug

SEQ ID NO: 1873332 - RNA, 19 nt, Homo sapiens
  misc_RNA (1)...(19): siRNA sense strand
guaaaggugcugacacugu

SEQ ID NO: 1873333 - RNA, 19 nt, Homo sapiens
  misc_RNA (1)...(19): siRNA sense strand
ggaagcgaaugucuaucau

SEQ ID NO: 1873334 - RNA, 19 nt, Homo sapiens
  misc_RNA (1)...(19): siRNA sense strand
caaauguacuaugcugaga

SEQ ID NO: 1873335 - RNA, 19 nt, Homo sapiens
  misc_RNA (1)...(19): siRNA sense strand
gcacagagaucucaaacua

SEQ ID NO: 1873336 - RNA, 19 nt, Homo sapiens
  misc_RNA (1)...(19): siRNA sense strand
gaagacaucuacaagcuua

SEQ ID NO: 1873337 - RNA, 19 nt, Homo sapiens
  misc_RNA (1)...(19): siRNA sense strand
caagaaagguguugacaga

SEQ ID NO: 1873338 - RNA, 19 nt, Homo sapiens
  misc_RNA (1)...(19): siRNA sense strand
gaaauaccuucaugaacaa

SEQ ID NO: 1873339 - RNA, 19 nt, Homo sapiens
  misc_RNA (1)...(19): siRNA sense strand
ccggagaucucgcggauua

SEQ ID NO: 1873340 - RNA, 19 nt, Homo sapiens
  misc_RNA (1)...(19): siRNA sense strand
gaaggucaauggcucauau

SEQ ID NO: 1873341 - RNA, 19 nt, Homo sapiens
  misc_RNA (1)...(19): siRNA sense strand
aaauagagcuucacagaau

SEQ ID NO: 1873342 - RNA, 19 nt, Homo sapiens
  misc_RNA (1)...(19): siRNA sense strand
ggagaucugccuaguguua

SEQ ID NO: 1873343 - RNA, 19 nt, Homo sapiens
  misc_RNA (1)...(19): siRNA sense strand
caagauauauugacacaca

SEQ ID NO: 1873344 - RNA, 19 nt, Homo sapiens
  misc_RNA (1)...(19): siRNA sense strand
gcacuuaauugcuaguaug

SEQ ID NO: 1873345 - RNA, 19 nt, Homo sapiens
  misc_RNA (1)...(19): siRNA sense strand
guuacgagaugacagauuu

SEQ ID NO: 1873346 - RNA, 19 nt, Homo sapiens
  misc_RNA (1)...(19): siRNA sense strand
caacaauggugcucacaug

SEQ ID NO: 1873347 - RNA, 19 nt, Homo sapiens
  misc_RNA (1)...(19): siRNA sense strand
gaaauagagcuucacagaa

SEQ ID NO: 1873348 - RNA, 19 nt, Homo sapiens
  misc_RNA (1)...(19): siRNA sense strand
cuacaaaucucaaagaaac

SEQ ID NO: 1873349 - RNA, 19 nt, Homo sapiens
  misc_RNA (1)...(19): siRNA sense strand
gauugugucuggacugaaa

SEQ ID NO: 1873350 - RNA, 19 nt, Homo sapiens
  misc_RNA (1)...(19): siRNA sense strand
gggaaaagauugacaaaga

SEQ ID NO: 1873351 - RNA, 19 nt, Homo sapiens
  misc_RNA (1)...(19): siRNA sense strand
gaagcaagguauacaaugc

SEQ ID NO: 1873352 - RNA, 19 nt, Homo sapiens
  misc_RNA (1)...(19): siRNA sense strand
gaacacagaaggagaacga

SEQ ID NO: 1873353 - RNA, 19 nt, Homo sapiens
  misc_RNA (1)...(19): siRNA sense strand
ccaaauggguugauuacuc

SEQ ID NO: 1873354 - RNA, 19 nt, Homo sapiens
  misc_RNA (1)...(19): siRNA sense strand
gccggaagcugauugcauu

SEQ ID NO: 1873355 - RNA, 19 nt, Homo sapiens
  misc_RNA (1)...(19): siRNA sense strand
gcaaacacaggacagauga

SEQ ID NO: 1873356 - RNA, 19 nt, Homo sapiens
  misc_RNA (1)...(19): siRNA sense strand
ugacggugcugaaauacuu

SEQ ID NO: 1873357 - RNA, 19 nt, Homo sapiens
  misc_RNA (1)...(19): siRNA sense strand
ggacauggcugugaaucag

SEQ ID NO: 1873358 - RNA, 19 nt, Homo sapiens
  misc_RNA (1)...(19): siRNA sense strand
caaauggguugauuacucu

SEQ ID NO: 1873359 - RNA, 19 nt, Homo sapiens
  misc_RNA (1)...(19): siRNA sense strand
guggagaucugccuagugu

SEQ ID NO: 1873360 - RNA, 19 nt, Homo sapiens
  misc_RNA (1)...(19): siRNA sense strand
ggaaaagauugacaaagaa

SEQ ID NO: 1873361 - RNA, 19 nt, Homo sapiens
  misc_RNA (1)...(19): siRNA sense strand
gcuuaggcaugauuugaaa

SEQ ID NO: 1873362 - RNA, 19 nt, Homo sapiens
  misc_RNA (1)...(19): siRNA sense strand
ucuucuagcuguugucaua

SEQ ID NO: 1873363 - RNA, 19 nt, Homo sapiens
  misc_RNA (1)...(19): siRNA sense strand
gacaaagcaagauauauug

SEQ ID NO: 1873364 - RNA, 19 nt, Homo sapiens
  misc_RNA (1)...(19): siRNA sense strand
gcugaugucuggcuguuca

SEQ ID NO: 1873365 - RNA, 19 nt, Homo sapiens
  misc_RNA (1)...(19): siRNA sense strand
acaaagaaauagagcuuca

SEQ ID NO: 1873366 - RNA, 19 nt, Homo sapiens
  misc_RNA (1)...(19): siRNA sense strand
uaggauaucuacaacuuuc

SEQ ID NO: 1873367 - RNA, 19 nt, Homo sapiens
  misc_RNA (1)...(19): siRNA sense strand
gucauacaguuccagauuu

SEQ ID NO: 1873368 - RNA, 19 nt, Homo sapiens
  misc_RNA (1)...(19): siRNA sense strand
cuaaugaugcucuuuaaug

SEQ ID NO: 1873369 - RNA, 19 nt, Homo sapiens
  misc_RNA (1)...(19): siRNA sense strand
agaaauagagcuucacaga

SEQ ID NO: 1873370 - RNA, 19 nt, Homo sapiens
  misc_RNA (1)...(19): siRNA sense strand
aagugacggugcugaaaua

SEQ ID NO: 1873371 - RNA, 19 nt, Homo sapiens
  misc_RNA (1)...(19): siRNA sense strand
cagaggaucgucccaguuu

SEQ ID NO: 1873372 - RNA, 19 nt, Homo sapiens
  misc_RNA (1)...(19): siRNA sense strand
ucacagaauucuucaucau

SEQ ID NO: 1873373 - RNA, 19 nt, Homo sapiens
  misc_RNA (1)...(19): siRNA sense strand
gcaauuuauuagucaagug

SEQ ID NO: 1873374 - RNA, 19 nt, Homo sapiens
  misc_RNA (1)...(19): siRNA sense strand
cuuaauugcuaguauguug

SEQ ID NO: 1873375 - RNA, 19 nt, Homo sapiens
  misc_RNA (1)...(19): siRNA sense strand
gauacuaccucaggcagau

SEQ ID NO: 1873376 - RNA, 19 nt, Homo sapiens
  misc_RNA (1)...(19): siRNA sense strand
ucuacaagcuuaggcauga

SEQ ID NO: 1873377 - RNA, 19 nt, Homo sapiens
  misc_RNA (1)...(19): siRNA sense strand
gagcuucacagaauucuuc

SEQ ID NO: 1873378 - RNA, 19 nt, Homo sapiens
  misc_RNA (1)...(19): siRNA sense strand
gcugacaacucugcugaug

SEQ ID NO: 1873379 - RNA, 19 nt, Homo sapiens
  misc_RNA (1)...(19): siRNA sense strand
cagcugagcacaucauuuc

SEQ ID NO: 1873380 - RNA, 19 nt, Homo sapiens
  misc_RNA (1)...(19): siRNA sense strand
ggaagcaagguauacaaug

SEQ ID NO: 1873381 - RNA, 19 nt, Homo sapiens
  misc_RNA (1)...(19): siRNA sense strand
acaaggacauggcugugaa

SEQ ID NO: 1873382 - RNA, 19 nt, Homo sapiens
  misc_RNA (1)...(19): siRNA sense strand
guagcuaaaccucaucaaa

SEQ ID NO: 1873383 - RNA, 19 nt, Homo sapiens
  misc_RNA (1)...(19): siRNA sense strand
ggaauaugcccugaacaug

SEQ ID NO: 1873384 - RNA, 19 nt, Homo sapiens
  misc_RNA (1)...(19): siRNA sense strand
gagccuccuuccagacaaa

SEQ ID NO: 1873385 - RNA, 19 nt, Homo sapiens
  misc_RNA (1)...(19): siRNA sense strand
gcuaguauguuguccaaaa

SEQ ID NO: 1873386 - RNA, 19 nt, Homo sapiens
  misc_RNA (1)...(19): siRNA sense strand
cagaguagcuaaaccucau

SEQ ID NO: 1873387 - RNA, 19 nt, Homo sapiens
  misc_RNA (1)...(19): siRNA sense strand
gcccuaaugaugcucuuua

SEQ ID NO: 1873388 - RNA, 19 nt, Homo sapiens
  misc_RNA (1)...(19): siRNA sense strand
cacagaauucuucaucaua

SEQ ID NO: 1873389 - RNA, 19 nt, Homo sapiens
  misc_RNA (1)...(19): siRNA sense strand
ucauacaguuccagauuuc

SEQ ID NO: 1873390 - RNA, 19 nt, Homo sapiens
  misc_RNA (1)...(19): siRNA sense strand
gccagaaguucgauacuac

SEQ ID NO: 1873391 - RNA, 19 nt, Homo sapiens
  misc_RNA (1)...(19): siRNA sense strand
ugaacaugcucuuacaaag

SEQ ID NO: 1873392 - RNA, 19 nt, Homo sapiens
  misc_RNA (1)...(19): siRNA sense strand
ugauaaggcccuaaugaug

SEQ ID NO: 1873393 - RNA, 19 nt, Homo sapiens
  misc_RNA (1)...(19): siRNA sense strand
acgcagagcuuggccaaug

SEQ ID NO: 1873394 - RNA, 19 nt, Homo sapiens
  misc_RNA (1)...(19): siRNA sense strand
ucaccaaauggguugauua

SEQ ID NO: 1873395 - RNA, 19 nt, Homo sapiens
  misc_RNA (1)...(19): siRNA sense strand
gcauaagggaagcaaggua

SEQ ID NO: 1873396 - RNA, 19 nt, Homo sapiens
  misc_RNA (1)...(19): siRNA sense strand
gucaauggcucauauuuug

SEQ ID NO: 1873397 - RNA, 19 nt, Homo sapiens
  misc_RNA (1)...(19): siRNA sense strand
ccucauggaugguggagau

SEQ ID NO: 1873398 - RNA, 19 nt, Homo sapiens
  misc_RNA (1)...(19): siRNA sense strand
gggcuucacuccggacaga

SEQ ID NO: 1873399 - RNA, 19 nt, Homo sapiens
  misc_RNA (1)...(19): siRNA sense strand
uaaugaagccauggaacua

SEQ ID NO: 1873400 - RNA, 19 nt, Homo sapiens
  misc_RNA (1)...(19): siRNA sense strand
caucaaugaggauaggaua

SEQ ID NO: 1873401 - RNA, 19 nt, Homo sapiens
  misc_RNA (1)...(19): siRNA sense strand
ugacaaagaaauagagcuu

SEQ ID NO: 1873402 - RNA, 19 nt, Homo sapiens
  misc_RNA (1)...(19): siRNA sense strand
ccaccuaccaccacaguug

SEQ ID NO: 1873403 - RNA, 19 nt, Homo sapiens
  misc_RNA (1)...(19): siRNA sense strand
gaaacuacaaaucucaaag

SEQ ID NO: 1873404 - RNA, 19 nt, Homo sapiens
  misc_RNA (1)...(19): siRNA sense strand
aauagagcuucacagaauu

SEQ ID NO: 1873405 - RNA, 19 nt, Homo sapiens
  misc_RNA (1)...(19): siRNA sense strand
caagcccagcuaagaauuu

SEQ ID NO: 1873406 - RNA, 19 nt, Homo sapiens
  misc_RNA (1)...(19): siRNA sense strand
uaucaagcccagcuaagaa

SEQ ID NO: 1873407 - RNA, 19 nt, Homo sapiens
  misc_RNA (1)...(19): siRNA sense strand
acauuuacauucucuugga

SEQ ID NO: 1873408 - RNA, 19 nt, Homo sapiens
  misc_RNA (1)...(19): siRNA sense strand
uggcuguucaucagaauua

SEQ ID NO: 1873409 - RNA, 19 nt, Homo sapiens
  misc_RNA (1)...(19): siRNA sense strand
gugaauuucuaccaugauc

SEQ ID NO: 1873410 - RNA, 19 nt, Homo sapiens
  misc_RNA (1)...(19): siRNA sense strand
gcagugaaugccuugaaga

SEQ ID NO: 1873411 - RNA, 19 nt, Homo sapiens
  misc_RNA (1)...(19): siRNA sense strand
gaaaacaagcagcagauug

SEQ ID NO: 1873412 - RNA, 19 nt, Homo sapiens
  misc_RNA (1)...(19): siRNA sense strand
gaggagcuccagccaccua

SEQ ID NO: 1873413 - RNA, 19 nt, Homo sapiens
  misc_RNA (1)...(19): siRNA sense strand
acacagaaggagaacgaua

SEQ ID NO: 1873414 - RNA, 19 nt, Homo sapiens
  misc_RNA (1)...(19): siRNA sense strand
cuacuucgaggacaaagaa

SEQ ID NO: 1873415 - RNA, 19 nt, Homo sapiens
  misc_RNA (1)...(19): siRNA sense strand
ccugagcaauuuauuaguc

SEQ ID NO: 1873416 - RNA, 19 nt, Homo sapiens
  misc_RNA (1)...(19): siRNA sense strand
gcagcugagcacaucauuu

SEQ ID NO: 1873417 - RNA, 19 nt, Homo sapiens
  misc_RNA (1)...(19): siRNA sense strand
cugauugcauucccaaaga

SEQ ID NO: 1873418 - RNA, 19 nt, Homo sapiens
  misc_RNA (1)...(19): siRNA sense strand
uagcuaaaccucaucaaag

SEQ ID NO: 1873419 - RNA, 19 nt, Homo sapiens
  misc_RNA (1)...(19): siRNA sense strand
gaaagcaagaaagguguug

SEQ ID NO: 1873420 - RNA, 19 nt, Homo sapiens
  misc_RNA (1)...(19): siRNA sense strand
aguuccagauuuccacuua

SEQ ID NO: 1873421 - RNA, 19 nt, Homo sapiens
  misc_RNA (1)...(19): siRNA sense strand
gcucauauuuugaaagcaa

SEQ ID NO: 1873422 - RNA, 19 nt, Homo sapiens
  misc_RNA (1)...(19): siRNA sense strand
caagugacggugcugaaau

SEQ ID NO: 1873423 - RNA, 19 nt, Homo sapiens
  misc_RNA (1)...(19): siRNA sense strand
ggaacacccgcaguagaaa

SEQ ID NO: 1873424 - RNA, 19 nt, Homo sapiens
  misc_RNA (1)...(19): siRNA sense strand
uggaacacccgcaguagaa

SEQ ID NO: 1873425 - RNA, 19 nt, Homo sapiens
  misc_RNA (1)...(19): siRNA sense strand
cauaagggaagcaagguau

SEQ ID NO: 1873426 - RNA, 19 nt, Homo sapiens
  misc_RNA (1)...(19): siRNA sense strand
cugaaguccucaacaaaca

SEQ ID NO: 1873427 - RNA, 19 nt, Homo sapiens
  misc_RNA (1)...(19): siRNA sense strand
cgagaugacagauuugaca

SEQ ID NO: 1873428 - RNA, 19 nt, Homo sapiens
  misc_RNA (1)...(19): siRNA sense strand
augaugcucuuuaaugaug

SEQ ID NO: 1873429 - RNA, 19 nt, Homo sapiens
  misc_RNA (1)...(19): siRNA sense strand
cccuaaugaugcucuuuaa

SEQ ID NO: 1873430 - RNA, 19 nt, Homo sapiens
  misc_RNA (1)...(19): siRNA sense strand
gagaugacagauuugacaa

SEQ ID NO: 1873431 - RNA, 19 nt, Homo sapiens
  misc_RNA (1)...(19): siRNA sense strand
ugucauacaguuccagauu

SEQ ID NO: 1873432 - RNA, 19 nt, Homo sapiens
  misc_RNA (1)...(19): siRNA sense strand
uaacucagcaacccagcaa

SEQ ID NO: 1873433 - RNA, 19 nt, Homo sapiens
  misc_RNA (1)...(19): siRNA sense strand
gaauuucuaccaugaucau

SEQ ID NO: 1873434 - RNA, 19 nt, Homo sapiens
  misc_RNA (1)...(19): siRNA sense strand
ugaaugccuugaagacagu

SEQ ID NO: 1873435 - RNA, 19 nt, Homo sapiens
  misc_RNA (1)...(19): siRNA sense strand
gaaagacacugacuacugu

SEQ ID NO: 1873436 - RNA, 19 nt, Homo sapiens
  misc_RNA (1)...(19): siRNA sense strand
aaauuugccuguaauggua

SEQ ID NO: 1873437 - RNA, 19 nt, Homo sapiens
  misc_RNA (1)...(19): siRNA sense strand
ggacugaggauuacauuca

SEQ ID NO: 1873438 - RNA, 19 nt, Homo sapiens
  misc_RNA (1)...(19): siRNA sense strand
caacggaacggcagaaaga

SEQ ID NO: 1873439 - RNA, 19 nt, Homo sapiens
  misc_RNA (1)...(19): siRNA sense strand
uaagguucauggauucuaa

SEQ ID NO: 1873440 - RNA, 19 nt, Homo sapiens
  misc_RNA (1)...(19): siRNA sense strand
gaaauuugccuguaauggu

SEQ ID NO: 1873441 - RNA, 19 nt, Homo sapiens
  misc_RNA (1)...(19): siRNA sense strand
gauugaacauccugaauac

SEQ ID NO: 1873442 - RNA, 19 nt, Homo sapiens
  misc_RNA (1)...(19): siRNA sense strand
cggcagggacugaggauua

SEQ ID NO: 1873443 - RNA, 19 nt, Homo sapiens
  misc_RNA (1)...(19): siRNA sense strand
guaaugguacugugauuga

SEQ ID NO: 1873444 - RNA, 19 nt, Homo sapiens
  misc_RNA (1)...(19): siRNA sense strand
guaaaggaggaacagcuua

SEQ ID NO: 1873445 - RNA, 19 nt, Homo sapiens
  misc_RNA (1)...(19): siRNA sense strand
gcagaaagacacugacuac

SEQ ID NO: 1873446 - RNA, 19 nt, Homo sapiens
  misc_RNA (1)...(19): siRNA sense strand
uaaaggaggaacagcuuaa

SEQ ID NO: 1873447 - RNA, 19 nt, Homo sapiens
  misc_RNA (1)...(19): siRNA sense strand
gcuucaaggugaccaaaga

SEQ ID NO: 1873448 - RNA, 19 nt, Homo sapiens
  misc_RNA (1)...(19): siRNA sense strand
ugauugaacauccugaaua

SEQ ID NO: 1873449 - RNA, 19 nt, Homo sapiens
  misc_RNA (1)...(19): siRNA sense strand
caacuaagggugacgacuu

SEQ ID NO: 1873450 - RNA, 19 nt, Homo sapiens
  misc_RNA (1)...(19): siRNA sense strand
gggcauugcagaugauuau

SEQ ID NO: 1873451 - RNA, 19 nt, Homo sapiens
  misc_RNA (1)...(19): siRNA sense strand
gcuuaagguucauggauuc

SEQ ID NO: 1873452 - RNA, 19 nt, Homo sapiens
  misc_RNA (1)...(19): siRNA sense strand
ggaggaacagcuuaagguu

SEQ ID NO: 1873453 - RNA, 19 nt, Homo sapiens
  misc_RNA (1)...(19): siRNA sense strand
gcauugcagaugauuauga

SEQ ID NO: 1873454 - RNA, 19 nt, Homo sapiens
  misc_RNA (1)...(19): siRNA sense strand
agaaacuugugaaagcuuu

SEQ ID NO: 1873455 - RNA, 19 nt, Homo sapiens
  misc_RNA (1)...(19): siRNA sense strand
gagagguuauucagcuuca

SEQ ID NO: 1873456 - RNA, 19 nt, Homo sapiens
  misc_RNA (1)...(19): siRNA sense strand
agaaagacacugacuacug

SEQ ID NO: 1873457 - RNA, 19 nt, Homo sapiens
  misc_RNA (1)...(19): siRNA sense strand
ugcagaugauuaugacaaa

SEQ ID NO: 1873458 - RNA, 19 nt, Homo sapiens
  misc_RNA (1)...(19): siRNA sense strand
aaaagaaacuugugaaagc

SEQ ID NO: 1873459 - RNA, 19 nt, Homo sapiens
  misc_RNA (1)...(19): siRNA sense strand
uaaugguacugugauugaa

SEQ ID NO: 1873460 - RNA, 19 nt, Homo sapiens
  misc_RNA (1)...(19): siRNA sense strand
acugaggauuacauucaua

SEQ ID NO: 1873461 - RNA, 19 nt, Homo sapiens
  misc_RNA (1)...(19): siRNA sense strand
gacugaggauuacauucau

SEQ ID NO: 1873462 - RNA, 19 nt, Homo sapiens
  misc_RNA (1)...(19): siRNA sense strand
ggcagaaagacacugacua

SEQ ID NO: 1873463 - RNA, 19 nt, Homo sapiens
  misc_RNA (1)...(19): siRNA sense strand
cuuggagguuggcauugua

SEQ ID NO: 1873464 - RNA, 19 nt, Homo sapiens
  misc_RNA (1)...(19): siRNA sense strand
aaagaaacuugugaaagcu

SEQ ID NO: 1873465 - RNA, 19 nt, Homo sapiens
  misc_RNA (1)...(19): siRNA sense strand
ggagguuggcauuguaaag

SEQ ID NO: 1873466 - RNA, 19 nt, Homo sapiens
  misc_RNA (1)...(19): siRNA sense strand
gcaacggaacggcagaaag

SEQ ID NO: 1873467 - RNA, 19 nt, Homo sapiens
  misc_RNA (1)...(19): siRNA sense strand
caucugccaguuucucuug

SEQ ID NO: 1873468 - RNA, 19 nt, Homo sapiens
  misc_RNA (1)...(19): siRNA sense strand
guucagggcauugcagaug

SEQ ID NO: 1873469 - RNA, 19 nt, Homo sapiens
  misc_RNA (1)...(19): siRNA sense strand
gcagaugauuaugacaaaa

SEQ ID NO: 1873470 - RNA, 19 nt, Homo sapiens
  misc_RNA (1)...(19): siRNA sense strand
ggcagggacugaggauuac

SEQ ID NO: 1873471 - RNA, 19 nt, Homo sapiens
  misc_RNA (1)...(19): siRNA sense strand
cagcuuaagguucauggau

SEQ ID NO: 1873472 - RNA, 19 nt, Homo sapiens
  misc_RNA (1)...(19): siRNA sense strand
agcuuaagguucauggauu

SEQ ID NO: 1873473 - RNA, 19 nt, Homo sapiens
  misc_RNA (1)...(19): siRNA sense strand
ucagggcauugcagaugau

SEQ ID NO: 1873474 - RNA, 19 nt, Homo sapiens
  misc_RNA (1)...(19): siRNA sense strand
gagguuggcauuguaaagg

SEQ ID NO: 1873475 - RNA, 19 nt, Homo sapiens
  misc_RNA (1)...(19): siRNA sense strand
cggagagguuauucagcuu

SEQ ID NO: 1873476 - RNA, 19 nt, Homo sapiens
  misc_RNA (1)...(19): siRNA sense strand
gaagagaaggccauugaga

SEQ ID NO: 1873477 - RNA, 19 nt, Homo sapiens
  misc_RNA (1)...(19): siRNA sense strand
gaucugcccucugccuuug

SEQ ID NO: 1873478 - RNA, 19 nt, Homo sapiens
  misc_RNA (1)...(19): siRNA sense strand
gcaaggccuucgacaugau

SEQ ID NO: 1873479 - RNA, 19 nt, Homo sapiens
  misc_RNA (1)...(19): siRNA sense strand
gacaugaucgaggccauua

SEQ ID NO: 1873480 - RNA, 19 nt, Homo sapiens
  misc_RNA (1)...(19): siRNA sense strand
gcacucgggcucaccauca

SEQ ID NO: 1873481 - RNA, 19 nt, Homo sapiens
  misc_RNA (1)...(19): siRNA sense strand
gaccacauccaccucauca

SEQ ID NO: 1873482 - RNA, 19 nt, Homo sapiens
  misc_RNA (1)...(19): siRNA sense strand
ccauugagaagguggauga

SEQ ID NO: 1873483 - RNA, 19 nt, Homo sapiens
  misc_RNA (1)...(19): siRNA sense strand
aagagaaggccauugagaa

SEQ ID NO: 1873484 - RNA, 19 nt, Homo sapiens
  misc_RNA (1)...(19): siRNA sense strand
ggaucugcccucugccuuu

SEQ ID NO: 1873485 - RNA, 19 nt, Homo sapiens
  misc_RNA (1)...(19): siRNA sense strand
cgcaaggccuucgacauga

SEQ ID NO: 1873486 - RNA, 19 nt, Homo sapiens
  misc_RNA (1)...(19): siRNA sense strand
ucgcaaggccuucgacaug

SEQ ID NO: 1873487 - RNA, 19 nt, Homo sapiens
  misc_RNA (1)...(19): siRNA sense strand
agaaggccauugagaaggu

SEQ ID NO: 1873488 - RNA, 19 nt, Homo sapiens
  misc_RNA (1)...(19): siRNA sense strand
gcuggaggacuucaucuuc

SEQ ID NO: 1873489 - RNA, 19 nt, Homo sapiens
  misc_RNA (1)...(19): siRNA sense strand
gaacggcugggugacuuug

SEQ ID NO: 1873490 - RNA, 19 nt, Homo sapiens
  misc_RNA (1)...(19): siRNA sense strand
caacugccgaggugauguu

SEQ ID NO: 1873491 - RNA, 19 nt, Homo sapiens
  misc_RNA (1)...(19): siRNA sense strand
uugaagagaaggccauuga

SEQ ID NO: 1873492 - RNA, 19 nt, Homo sapiens
  misc_RNA (1)...(19): siRNA sense strand
ccugaacacccacaaagug

SEQ ID NO: 1873493 - RNA, 19 nt, Homo sapiens
  misc_RNA (1)...(19): siRNA sense strand
gcagcgugaucgaccacau

SEQ ID NO: 1873494 - RNA, 19 nt, Homo sapiens
  misc_RNA (1)...(19): siRNA sense strand
caacgucaaggagcuguau

SEQ ID NO: 1873495 - RNA, 19 nt, Homo sapiens
  misc_RNA (1)...(19): siRNA sense strand
ugccuucccugacgaguuc

SEQ ID NO: 1873496 - RNA, 19 nt, Homo sapiens
  misc_RNA (1)...(19): siRNA sense strand
gagaguuacauggguauca

SEQ ID NO: 1873497 - RNA, 19 nt, Homo sapiens
  misc_RNA (1)...(19): siRNA sense strand
augaccugcuggagaguua

SEQ ID NO: 1873498 - RNA, 19 nt, Homo sapiens
  misc_RNA (1)...(19): siRNA sense strand
ucaucaagcgcaucaagga

SEQ ID NO: 1873499 - RNA, 19 nt, Homo sapiens
  misc_RNA (1)...(19): siRNA sense strand
agagaaggccauugagaag

SEQ ID NO: 1873500 - RNA, 19 nt, Homo sapiens
  misc_RNA (1)...(19): siRNA sense strand
ugguggagcugggaaagga

SEQ ID NO: 1873501 - RNA, 19 nt, Homo sapiens
  misc_RNA (1)...(19): siRNA sense strand
caaggagggcagcgugauc

SEQ ID NO: 1873502 - RNA, 19 nt, Homo sapiens
  misc_RNA (1)...(19): siRNA sense strand
caaaguggacauggacaag

SEQ ID NO: 1873503 - RNA, 19 nt, Homo sapiens
  misc_RNA (1)...(19): siRNA sense strand
cagcgugggcgacaugauc

SEQ ID NO: 1873504 - RNA, 19 nt, Homo sapiens
  misc_RNA (1)...(19): siRNA sense strand
caucaacgcugucuucuau

SEQ ID NO: 1873505 - RNA, 19 nt, Homo sapiens
  misc_RNA (1)...(19): siRNA sense strand
gaagagagucggcagauga

SEQ ID NO: 1873506 - RNA, 19 nt, Homo sapiens
  misc_RNA (1)...(19): siRNA sense strand
ucaacgcugucuucuauua

SEQ ID NO: 1873507 - RNA, 19 nt, Homo sapiens
  misc_RNA (1)...(19): siRNA sense strand
ggaauucaaugcugaugau

SEQ ID NO: 1873508 - RNA, 19 nt, Homo sapiens
  misc_RNA (1)...(19): siRNA sense strand
ccaagagugugcuaaagaa

SEQ ID NO: 1873509 - RNA, 19 nt, Homo sapiens
  misc_RNA (1)...(19): siRNA sense strand
caucguggcugaacucuuc

SEQ ID NO: 1873510 - RNA, 19 nt, Homo sapiens
  misc_RNA (1)...(19): siRNA sense strand
cagcugacgugacccauga

SEQ ID NO: 1873511 - RNA, 19 nt, Homo sapiens
  misc_RNA (1)...(19): siRNA sense strand
ggagccagccaaagugaua

SEQ ID NO: 1873512 - RNA, 19 nt, Homo sapiens
  misc_RNA (1)...(19): siRNA sense strand
caacuggaccucaaauuuc

SEQ ID NO: 1873513 - RNA, 19 nt, Homo sapiens
  misc_RNA (1)...(19): siRNA sense strand
ccaacuggaccucaaauuu

SEQ ID NO: 1873514 - RNA, 19 nt, Homo sapiens
  misc_RNA (1)...(19): siRNA sense strand
cuacaacacuggagucauc

SEQ ID NO: 1873515 - RNA, 19 nt, Homo sapiens
  misc_RNA (1)...(19): siRNA sense strand
ucaaaguuccugagacuaa

SEQ ID NO: 1873516 - RNA, 19 nt, Homo sapiens
  misc_RNA (1)...(19): siRNA sense strand
caaaguuccugagacuaaa

SEQ ID NO: 1873517 - RNA, 19 nt, Homo sapiens
  misc_RNA (1)...(19): siRNA sense strand
ccacgagcaucuucgagaa

SEQ ID NO: 1873518 - RNA, 19 nt, Homo sapiens
  misc_RNA (1)...(19): siRNA sense strand
gagcaucguggccaucuuu

SEQ ID NO: 1873519 - RNA, 19 nt, Homo sapiens
  misc_RNA (1)...(19): siRNA sense strand
ggaagagagucggcagaug

SEQ ID NO: 1873520 - RNA, 19 nt, Homo sapiens
  misc_RNA (1)...(19): siRNA sense strand
caucuucaccuacuucaaa

SEQ ID NO: 1873521 - RNA, 19 nt, Homo sapiens
  misc_RNA (1)...(19): siRNA sense strand
gggcaaguccuuugagaug

SEQ ID NO: 1873522 - RNA, 19 nt, Homo sapiens
  misc_RNA (1)...(19): siRNA sense strand
gaccucaaauuucauugug

SEQ ID NO: 1873523 - RNA, 19 nt, Homo sapiens
  misc_RNA (1)...(19): siRNA sense strand
guaugugggugaaguguca

SEQ ID NO: 1873524 - RNA, 19 nt, Homo sapiens
  misc_RNA (1)...(19): siRNA sense strand
gcucaugggcuucucgaaa

SEQ ID NO: 1873525 - RNA, 19 nt, Homo sapiens
  misc_RNA (1)...(19): siRNA sense strand
gcaugugcuuccaguaugu

SEQ ID NO: 1873526 - RNA, 19 nt, Homo sapiens
  misc_RNA (1)...(19): siRNA sense strand
gaaacugggcaaguccuuu

SEQ ID NO: 1873527 - RNA, 19 nt, Homo sapiens
  misc_RNA (1)...(19): siRNA sense strand
ggccggaccuucgaugaga

SEQ ID NO: 1873528 - RNA, 19 nt, Homo sapiens
  misc_RNA (1)...(19): siRNA sense strand
gggcaugugcuuccaguau

SEQ ID NO: 1873529 - RNA, 19 nt, Homo sapiens
  misc_RNA (1)...(19): siRNA sense strand
gccaagagugugcuaaaga

SEQ ID NO: 1873530 - RNA, 19 nt, Homo sapiens
  misc_RNA (1)...(19): siRNA sense strand
cagccaaagugauaagaca

SEQ ID NO: 1873531 - RNA, 19 nt, Homo sapiens
  misc_RNA (1)...(19): siRNA sense strand
ggcaugugcuuccaguaug

SEQ ID NO: 1873532 - RNA, 19 nt, Homo sapiens
  misc_RNA (1)...(19): siRNA sense strand
gagcagcuacccuggaugu

SEQ ID NO: 1873533 - RNA, 19 nt, Homo sapiens
  misc_RNA (1)...(19): siRNA sense strand
gcagcugucuggcaucaac

SEQ ID NO: 1873534 - RNA, 19 nt, Homo sapiens
  misc_RNA (1)...(19): siRNA sense strand
ugcaggagaugaaggaaga

SEQ ID NO: 1873535 - RNA, 19 nt, Homo sapiens
  misc_RNA (1)...(19): siRNA sense strand
agaaggugaucgaggaguu

SEQ ID NO: 1873536 - RNA, 19 nt, Homo sapiens
  misc_RNA (1)...(19): siRNA sense strand
guucuguucuucaucuuca

SEQ ID NO: 1873537 - RNA, 19 nt, Homo sapiens
  misc_RNA (1)...(19): siRNA sense strand
gcaucaacgcugucuucua

SEQ ID NO: 1873538 - RNA, 19 nt, Homo sapiens
  misc_RNA (1)...(19): siRNA sense strand
gcaaguccuuugagaugcu

SEQ ID NO: 1873539 - RNA, 19 nt, Homo sapiens
  misc_RNA (1)...(19): siRNA sense strand
ggaccucaaauuucauugu

SEQ ID NO: 1873540 - RNA, 19 nt, Homo sapiens
  misc_RNA (1)...(19): siRNA sense strand
ucacugugcuccugguucu

SEQ ID NO: 1873541 - RNA, 19 nt, Homo sapiens
  misc_RNA (1)...(19): siRNA sense strand
ggagaugaaggaagagagu

SEQ ID NO: 1873542 - RNA, 19 nt, Homo sapiens
  misc_RNA (1)...(19): siRNA sense strand
aaacugggcaaguccuuug

SEQ ID NO: 1873543 - RNA, 19 nt, Homo sapiens
  misc_RNA (1)...(19): siRNA sense strand
acacuggagucaucaaugc

SEQ ID NO: 1873544 - RNA, 19 nt, Homo sapiens
  misc_RNA (1)...(19): siRNA sense strand
cccaugaccugcaggagau

SEQ ID NO: 1873545 - RNA, 19 nt, Homo sapiens
  misc_RNA (1)...(19): siRNA sense strand
gggccaagagugugcuaaa

SEQ ID NO: 1873546 - RNA, 19 nt, Homo sapiens
  misc_RNA (1)...(19): siRNA sense strand
caacacuggagucaucaau

SEQ ID NO: 1873547 - RNA, 19 nt, Homo sapiens
  misc_RNA (1)...(19): siRNA sense strand
aacuggaccucaaauuuca

SEQ ID NO: 1873548 - RNA, 19 nt, Homo sapiens
  misc_RNA (1)...(19): siRNA sense strand
ggccaagagugugcuaaag

SEQ ID NO: 1873549 - RNA, 19 nt, Homo sapiens
  misc_RNA (1)...(19): siRNA sense strand
cuucaaaguuccugagacu

SEQ ID NO: 1873550 - RNA, 19 nt, Homo sapiens
  misc_RNA (1)...(19): siRNA sense strand
ucucgaaacugggcaaguc

SEQ ID NO: 1873551 - RNA, 19 nt, Homo sapiens
  misc_RNA (1)...(19): siRNA sense strand
ucaccauccuggagcuguu

SEQ ID NO: 1873552 - RNA, 19 nt, Homo sapiens
  misc_RNA (1)...(19): siRNA sense strand
gcaucgugcugcccuucug

SEQ ID NO: 1873553 - RNA, 19 nt, Homo sapiens
  misc_RNA (1)...(19): siRNA sense strand
ucgaggaguucuacaacca

SEQ ID NO: 1873554 - RNA, 19 nt, Homo sapiens
  misc_RNA (1)...(19): siRNA sense strand
ggaguucuacaaccagaca

SEQ ID NO: 1873555 - RNA, 19 nt, Homo sapiens
  misc_RNA (1)...(19): siRNA sense strand
gcuccugguucuguucuuc

SEQ ID NO: 1873556 - RNA, 19 nt, Homo sapiens
  misc_RNA (1)...(19): siRNA sense strand
gaaggugaucgaggaguuc

SEQ ID NO: 1873557 - RNA, 19 nt, Homo sapiens
  misc_RNA (1)...(19): siRNA sense strand
gguugugccauacucauga

SEQ ID NO: 1873558 - RNA, 19 nt, Homo sapiens
  misc_RNA (1)...(19): siRNA sense strand
gaucgaggaguucuacaac

SEQ ID NO: 1873559 - RNA, 19 nt, Homo sapiens
  misc_RNA (1)...(19): siRNA sense strand
uggagcagcuacccuggau

SEQ ID NO: 1873560 - RNA, 19 nt, Homo sapiens
  misc_RNA (1)...(19): siRNA sense strand
cccuggauguccuaucuga

SEQ ID NO: 1873561 - RNA, 19 nt, Homo sapiens
  misc_RNA (1)...(19): siRNA sense strand
ccauguaugugggugaagu

SEQ ID NO: 1873562 - RNA, 19 nt, Homo sapiens
  misc_RNA (1)...(19): siRNA sense strand
gagccagccaaagugauaa

SEQ ID NO: 1873563 - RNA, 19 nt, Homo sapiens
  misc_RNA (1)...(19): siRNA sense strand
ccucaucgcccagguguuc

SEQ ID NO: 1873564 - RNA, 19 nt, Homo sapiens
  misc_RNA (1)...(19): siRNA sense strand
gacauggguccaccgcuau

SEQ ID NO: 1873565 - RNA, 19 nt, Homo sapiens
  misc_RNA (1)...(19): siRNA sense strand
ucaacacggccuucacugu

SEQ ID NO: 1873566 - RNA, 19 nt, Homo sapiens
  misc_RNA (1)...(19): siRNA sense strand
gcaguuuggcuacaacacu

SEQ ID NO: 1873567 - RNA, 19 nt, Homo sapiens
  misc_RNA (1)...(19): siRNA sense strand
uacccuggauguccuaucu

SEQ ID NO: 1873568 - RNA, 19 nt, Homo sapiens
  misc_RNA (1)...(19): siRNA sense strand
gccuguguaugccaccauu

SEQ ID NO: 1873569 - RNA, 19 nt, Homo sapiens
  misc_RNA (1)...(19): siRNA sense strand
gggugcagcagccugugua

SEQ ID NO: 1873570 - RNA, 19 nt, Homo sapiens
  misc_RNA (1)...(19): siRNA sense strand
ccucucaguggccaucuuu

SEQ ID NO: 1873571 - RNA, 19 nt, Homo sapiens
  misc_RNA (1)...(19): siRNA sense strand
guauguggagcaacugugu

SEQ ID NO: 1873572 - RNA, 19 nt, Homo sapiens
  misc_RNA (1)...(19): siRNA sense strand
caggcuucgugcccaugua

SEQ ID NO: 1873573 - RNA, 19 nt, Homo sapiens
  misc_RNA (1)...(19): siRNA sense strand
gcuuggcucccugcaguuu

SEQ ID NO: 1873574 - RNA, 19 nt, Homo sapiens
  misc_RNA (1)...(19): siRNA sense strand
gcuuuguggccuucuuuga

SEQ ID NO: 1873575 - RNA, 19 nt, Homo sapiens
  misc_RNA (1)...(19): siRNA sense strand
gcaaauagcacauuguuaa

SEQ ID NO: 1873576 - RNA, 19 nt, Homo sapiens
  misc_RNA (1)...(19): siRNA sense strand
ggaaacacauguggacuaa

SEQ ID NO: 1873577 - RNA, 19 nt, Homo sapiens
  misc_RNA (1)...(19): siRNA sense strand
gaaguuaccauuucaguau

SEQ ID NO: 1873578 - RNA, 19 nt, Homo sapiens
  misc_RNA (1)...(19): siRNA sense strand
gaagaagucuguguauauc

SEQ ID NO: 1873579 - RNA, 19 nt, Homo sapiens
  misc_RNA (1)...(19): siRNA sense strand
guaaagcgaaguuauguaa

SEQ ID NO: 1873580 - RNA, 19 nt, Homo sapiens
  misc_RNA (1)...(19): siRNA sense strand
gaaagaagaagacaaugau

SEQ ID NO: 1873581 - RNA, 19 nt, Homo sapiens
  misc_RNA (1)...(19): siRNA sense strand
agacaugacuugcaucaga

SEQ ID NO: 1873582 - RNA, 19 nt, Homo sapiens
  misc_RNA (1)...(19): siRNA sense strand
gaacuuagccgaguagaag

SEQ ID NO: 1873583 - RNA, 19 nt, Homo sapiens
  misc_RNA (1)...(19): siRNA sense strand
gaggugaaguuaccauuuc

SEQ ID NO: 1873584 - RNA, 19 nt, Homo sapiens
  misc_RNA (1)...(19): siRNA sense strand
uagaagaagucuguguaua

SEQ ID NO: 1873585 - RNA, 19 nt, Homo sapiens
  misc_RNA (1)...(19): siRNA sense strand
gaugaaccaaugacaaauu

SEQ ID NO: 1873586 - RNA, 19 nt, Homo sapiens
  misc_RNA (1)...(19): siRNA sense strand
gaagaagacaaugaugaaa

SEQ ID NO: 1873587 - RNA, 19 nt, Homo sapiens
  misc_RNA (1)...(19): siRNA sense strand
agaagaagucuguguauau

SEQ ID NO: 1873588 - RNA, 19 nt, Homo sapiens
  misc_RNA (1)...(19): siRNA sense strand
ggaggugaaguuaccauuu

SEQ ID NO: 1873589 - RNA, 19 nt, Homo sapiens
  misc_RNA (1)...(19): siRNA sense strand
cagaugaaccaaugacaaa

SEQ ID NO: 1873590 - RNA, 19 nt, Homo sapiens
  misc_RNA (1)...(19): siRNA sense strand
uaacuaugacugcaacaaa

SEQ ID NO: 1873591 - RNA, 19 nt, Homo sapiens
  misc_RNA (1)...(19): siRNA sense strand
aaacacauguggacuaaaa

SEQ ID NO: 1873592 - RNA, 19 nt, Homo sapiens
  misc_RNA (1)...(19): siRNA sense strand
cgacgaugcuugcacauac

SEQ ID NO: 1873593 - RNA, 19 nt, Homo sapiens
  misc_RNA (1)...(19): siRNA sense strand
uacuggagcuguuguagaa

SEQ ID NO: 1873594 - RNA, 19 nt, Homo sapiens
  misc_RNA (1)...(19): siRNA sense strand
caagagggcuguacaaaag

SEQ ID NO: 1873595 - RNA, 19 nt, Homo sapiens
  misc_RNA (1)...(19): siRNA sense strand
gauguaaagcgaaguuaug

SEQ ID NO: 1873596 - RNA, 19 nt, Homo sapiens
  misc_RNA (1)...(19): siRNA sense strand
gggaaacacauguggacua

SEQ ID NO: 1873597 - RNA, 19 nt, Homo sapiens
  misc_RNA (1)...(19): siRNA sense strand
agucaaaccugaagucaag

SEQ ID NO: 1873598 - RNA, 19 nt, Homo sapiens
  misc_RNA (1)...(19): siRNA sense strand
gagagaaggaauuugauca

SEQ ID NO: 1873599 - RNA, 19 nt, Homo sapiens
  misc_RNA (1)...(19): siRNA sense strand
aaacucacuuccagaacuu

SEQ ID NO: 1873600 - RNA, 19 nt, Homo sapiens
  misc_RNA (1)...(19): siRNA sense strand
ucugauuucuuaagcauug

SEQ ID NO: 1873601 - RNA, 19 nt, Homo sapiens
  misc_RNA (1)...(19): siRNA sense strand
agaagcaaauagcacauug

SEQ ID NO: 1873602 - RNA, 19 nt, Homo sapiens
  misc_RNA (1)...(19): siRNA sense strand
agaaagaagaagacaauga

SEQ ID NO: 1873603 - RNA, 19 nt, Homo sapiens
  misc_RNA (1)...(19): siRNA sense strand
gcaucagacuggaggugaa

SEQ ID NO: 1873604 - RNA, 19 nt, Homo sapiens
  misc_RNA (1)...(19): siRNA sense strand
ccauuucaguauaugcuaa

SEQ ID NO: 1873605 - RNA, 19 nt, Homo sapiens
  misc_RNA (1)...(19): siRNA sense strand
aauggaggguguucaaaga

SEQ ID NO: 1873606 - RNA, 19 nt, Homo sapiens
  misc_RNA (1)...(19): siRNA sense strand
gaaauuauggggugugauu

SEQ ID NO: 1873607 - RNA, 19 nt, Homo sapiens
  misc_RNA (1)...(19): siRNA sense strand
gagaagaacaacugauuuu

SEQ ID NO: 1873608 - RNA, 19 nt, Homo sapiens
  misc_RNA (1)...(19): siRNA sense strand
gaauggaggguguucaaag

SEQ ID NO: 1873609 - RNA, 19 nt, Homo sapiens
  misc_RNA (1)...(19): siRNA sense strand
ucaagacuacugagaagaa

SEQ ID NO: 1873610 - RNA, 19 nt, Homo sapiens
  misc_RNA (1)...(19): siRNA sense strand
aaagguagacauaauagug

SEQ ID NO: 1873611 - RNA, 19 nt, Homo sapiens
  misc_RNA (1)...(19): siRNA sense strand
ugaaggagagaaggaauuu

SEQ ID NO: 1873612 - RNA, 19 nt, Homo sapiens
  misc_RNA (1)...(19): siRNA sense strand
agaagaagacaaugaugaa

SEQ ID NO: 1873613 - RNA, 19 nt, Homo sapiens
  misc_RNA (1)...(19): siRNA sense strand
aagaagaagacaaugauga

SEQ ID NO: 1873614 - RNA, 19 nt, Homo sapiens
  misc_RNA (1)...(19): siRNA sense strand
ggagagaaggaauuugauc

SEQ ID NO: 1873615 - RNA, 19 nt, Homo sapiens
  misc_RNA (1)...(19): siRNA sense strand
aagagaagaacaacugauu

SEQ ID NO: 1873616 - RNA, 19 nt, Homo sapiens
  misc_RNA (1)...(19): siRNA sense strand
uguauaucauucuggagua

SEQ ID NO: 1873617 - RNA, 19 nt, Homo sapiens
  misc_RNA (1)...(19): siRNA sense strand
auugggaccucauguaaga

SEQ ID NO: 1873618 - RNA, 19 nt, Homo sapiens
  misc_RNA (1)...(19): siRNA sense strand
guaagagaagaacaacuga

SEQ ID NO: 1873619 - RNA, 19 nt, Homo sapiens
  misc_RNA (1)...(19): siRNA sense strand
aaggagagaaggaauuuga

SEQ ID NO: 1873620 - RNA, 19 nt, Homo sapiens
  misc_RNA (1)...(19): siRNA sense strand
gaagucuguguauaucauu

SEQ ID NO: 1873621 - RNA, 19 nt, Homo sapiens
  misc_RNA (1)...(19): siRNA sense strand
gaagcaaauagcacauugu

SEQ ID NO: 1873622 - RNA, 19 nt, Homo sapiens
  misc_RNA (1)...(19): siRNA sense strand
agagaagaacaacugauuu

SEQ ID NO: 1873623 - RNA, 19 nt, Homo sapiens
  misc_RNA (1)...(19): siRNA sense strand
gaggguguucaaagacaua

SEQ ID NO: 1873624 - RNA, 19 nt, Homo sapiens
  misc_RNA (1)...(19): siRNA sense strand
gaaauacuggagcuguugu

SEQ ID NO: 1873625 - RNA, 19 nt, Homo sapiens
  misc_RNA (1)...(19): siRNA sense strand
uaagccaguagaagcaaua

SEQ ID NO: 1873626 - RNA, 19 nt, Homo sapiens
  misc_RNA (1)...(19): siRNA sense strand
guagacaugacuugcauca

SEQ ID NO: 1873627 - RNA, 19 nt, Homo sapiens
  misc_RNA (1)...(19): siRNA sense strand
agaagucuguguauaucau

SEQ ID NO: 1873628 - RNA, 19 nt, Homo sapiens
  misc_RNA (1)...(19): siRNA sense strand
ggaggguguucaaagacau

SEQ ID NO: 1873629 - RNA, 19 nt, Homo sapiens
  misc_RNA (1)...(19): siRNA sense strand
ccagaugaaccaaugacaa

SEQ ID NO: 1873630 - RNA, 19 nt, Homo sapiens
  misc_RNA (1)...(19): siRNA sense strand
ugacugcaacaaagauuga

SEQ ID NO: 1873631 - RNA, 19 nt, Homo sapiens
  misc_RNA (1)...(19): siRNA sense strand
caagacuacugagaagaag

SEQ ID NO: 1873632 - RNA, 19 nt, Homo sapiens
  misc_RNA (1)...(19): siRNA sense strand
aagcaaauagcacauuguu

SEQ ID NO: 1873633 - RNA, 19 nt, Homo sapiens
  misc_RNA (1)...(19): siRNA sense strand
ucuagaagaagucugugua

SEQ ID NO: 1873634 - RNA, 19 nt, Homo sapiens
  misc_RNA (1)...(19): siRNA sense strand
agauugggaccucauguaa

SEQ ID NO: 1873635 - RNA, 19 nt, Homo sapiens
  misc_RNA (1)...(19): siRNA sense strand
aagcccagaugaaccaaug

SEQ ID NO: 1873636 - RNA, 19 nt, Homo sapiens
  misc_RNA (1)...(19): siRNA sense strand
uguaagagaagaacaacug

SEQ ID NO: 1873637 - RNA, 19 nt, Homo sapiens
  misc_RNA (1)...(19): siRNA sense strand
ugagaccaauuccgacgau

SEQ ID NO: 1873638 - RNA, 19 nt, Homo sapiens
  misc_RNA (1)...(19): siRNA sense strand
aaauaucugccucccuaaa

SEQ ID NO: 1873639 - RNA, 19 nt, Homo sapiens
  misc_RNA (1)...(19): siRNA sense strand
guagacauaauagugagaa

SEQ ID NO: 1873640 - RNA, 19 nt, Homo sapiens
  misc_RNA (1)...(19): siRNA sense strand
gaaggagagaaggaauuug

SEQ ID NO: 1873641 - RNA, 19 nt, Homo sapiens
  misc_RNA (1)...(19): siRNA sense strand
cagacuggaggugaaguua

SEQ ID NO: 1873642 - RNA, 19 nt, Homo sapiens
  misc_RNA (1)...(19): siRNA sense strand
cuggagcuguuguagaaga

SEQ ID NO: 1873643 - RNA, 19 nt, Homo sapiens
  misc_RNA (1)...(19): siRNA sense strand
aaacugucaucagggaaug

SEQ ID NO: 1873644 - RNA, 19 nt, Homo sapiens
  misc_RNA (1)...(19): siRNA sense strand
aaacuuaaacugucaucag

SEQ ID NO: 1873645 - RNA, 19 nt, Homo sapiens
  misc_RNA (1)...(19): siRNA sense strand
ugaaauacuggagcuguug

SEQ ID NO: 1873646 - RNA, 19 nt, Homo sapiens
  misc_RNA (1)...(19): siRNA sense strand
cuagaagaagucuguguau

SEQ ID NO: 1873647 - RNA, 19 nt, Homo sapiens
  misc_RNA (1)...(19): siRNA sense strand
aagauugggaccucaugua

SEQ ID NO: 1873648 - RNA, 19 nt, Homo sapiens
  misc_RNA (1)...(19): siRNA sense strand
uaaacugucaucagggaau

SEQ ID NO: 1873649 - RNA, 19 nt, Homo sapiens
  misc_RNA (1)...(19): siRNA sense strand
agagaaggaauuugaucaa

SEQ ID NO: 1873650 - RNA, 19 nt, Homo sapiens
  misc_RNA (1)...(19): siRNA sense strand
aaggguuggucuugcugua

SEQ ID NO: 1873651 - RNA, 19 nt, Homo sapiens
  misc_RNA (1)...(19): siRNA sense strand
ggguuggucuugcuguaag

SEQ ID NO: 1873652 - RNA, 19 nt, Homo sapiens
  misc_RNA (1)...(19): siRNA sense strand
aagguagacauaauaguga

SEQ ID NO: 1873653 - RNA, 19 nt, Homo sapiens
  misc_RNA (1)...(19): siRNA sense strand
gggugugauugauguaaag

SEQ ID NO: 1873654 - RNA, 19 nt, Homo sapiens
  misc_RNA (1)...(19): siRNA sense strand
gcauuaaaggguuggucuu

SEQ ID NO: 1873655 - RNA, 19 nt, Homo sapiens
  misc_RNA (1)...(19): siRNA sense strand
gaaacacauguggacuaaa

SEQ ID NO: 1873656 - RNA, 19 nt, Homo sapiens
  misc_RNA (1)...(19): siRNA sense strand
gaguaccuauuuuccauga

SEQ ID NO: 1873657 - RNA, 19 nt, Homo sapiens
  misc_RNA (1)...(19): siRNA sense strand
cauucuggaguaccuauuu

SEQ ID NO: 1873658 - RNA, 19 nt, Homo sapiens
  misc_RNA (1)...(19): siRNA sense strand
caaauuucaggaacacauc

SEQ ID NO: 1873659 - RNA, 19 nt, Homo sapiens
  misc_RNA (1)...(19): siRNA sense strand
guaacuaugacugcaacaa

SEQ ID NO: 1873660 - RNA, 19 nt, Homo sapiens
  misc_RNA (1)...(19): siRNA sense strand
cauuaaaggguuggucuug

SEQ ID NO: 1873661 - RNA, 19 nt, Homo sapiens
  misc_RNA (1)...(19): siRNA sense strand
gagucuagaagaagucugu

SEQ ID NO: 1873662 - RNA, 19 nt, Homo sapiens
  misc_RNA (1)...(19): siRNA sense strand
gaccucauguaagaaugga

SEQ ID NO: 1873663 - RNA, 19 nt, Homo sapiens
  misc_RNA (1)...(19): siRNA sense strand
ccaaauuucaggaacacau

SEQ ID NO: 1873664 - RNA, 19 nt, Homo sapiens
  misc_RNA (1)...(19): siRNA sense strand
gccaguagaagcaauaaaa

SEQ ID NO: 1873665 - RNA, 19 nt, Homo sapiens
  misc_RNA (1)...(19): siRNA sense strand
uccagaacuuagccgagua

SEQ ID NO: 1873666 - RNA, 19 nt, Homo sapiens
  misc_RNA (1)...(19): siRNA sense strand
uuaaaggguuggucuugcu

SEQ ID NO: 1873667 - RNA, 19 nt, Homo sapiens
  misc_RNA (1)...(19): siRNA sense strand
ccaagagggcuguacaaaa

SEQ ID NO: 1873668 - RNA, 19 nt, Homo sapiens
  misc_RNA (1)...(19): siRNA sense strand
guauaucauucuggaguac

SEQ ID NO: 1873669 - RNA, 19 nt, Homo sapiens
  misc_RNA (1)...(19): siRNA sense strand
uggaggguguucaaagaca

SEQ ID NO: 1873670 - RNA, 19 nt, Homo sapiens
  misc_RNA (1)...(19): siRNA sense strand
aaagaagaagacaaugaug

SEQ ID NO: 1873671 - RNA, 19 nt, Homo sapiens
  misc_RNA (1)...(19): siRNA sense strand
ggaccucauguaagaaugg

SEQ ID NO: 1873672 - RNA, 19 nt, Homo sapiens
  misc_RNA (1)...(19): siRNA sense strand
caggaacacaucauucaag

SEQ ID NO: 1873673 - RNA, 19 nt, Homo sapiens
  misc_RNA (1)...(19): siRNA sense strand
aaagaccaagcccagauga

SEQ ID NO: 1873674 - RNA, 19 nt, Homo sapiens
  misc_RNA (1)...(19): siRNA sense strand
gagcuguuguagaagaaaa

SEQ ID NO: 1873675 - RNA, 19 nt, Homo sapiens
  misc_RNA (1)...(19): siRNA sense strand
gcaauaaccaagccucuuu

SEQ ID NO: 1873676 - RNA, 19 nt, Homo sapiens
  misc_RNA (1)...(19): siRNA sense strand
gaucuacuccugccuaauu

SEQ ID NO: 1873677 - RNA, 19 nt, Homo sapiens
  misc_RNA (1)...(19): siRNA sense strand
ucauugugcuccacuguua

SEQ ID NO: 1873678 - RNA, 19 nt, Homo sapiens
  misc_RNA (1)...(19): siRNA sense strand
ggaaacgggcuaauucuug

SEQ ID NO: 1873679 - RNA, 19 nt, Homo sapiens
  misc_RNA (1)...(19): siRNA sense strand
uaaccaagccucuuuccua

SEQ ID NO: 1873680 - RNA, 19 nt, Homo sapiens
  misc_RNA (1)...(19): siRNA sense strand
gcacaagaacccaaaccua

SEQ ID NO: 1873681 - RNA, 19 nt, Homo sapiens
  misc_RNA (1)...(19): siRNA sense strand
uugcugacauuucugauua

SEQ ID NO: 1873682 - RNA, 19 nt, Homo sapiens
  misc_RNA (1)...(19): siRNA sense strand
ccuugucgcuugagaauuu

SEQ ID NO: 1873683 - RNA, 19 nt, Homo sapiens
  misc_RNA (1)...(19): siRNA sense strand
gcaucaguguggaucguua

SEQ ID NO: 1873684 - RNA, 19 nt, Homo sapiens
  misc_RNA (1)...(19): siRNA sense strand
ggauauaucaucucaguuc

SEQ ID NO: 1873685 - RNA, 19 nt, Homo sapiens
  misc_RNA (1)...(19): siRNA sense strand
agagauaaaugaccgaaga

SEQ ID NO: 1873686 - RNA, 19 nt, Homo sapiens
  misc_RNA (1)...(19): siRNA sense strand
uaggauaaccaguguauuu

SEQ ID NO: 1873687 - RNA, 19 nt, Homo sapiens
  misc_RNA (1)...(19): siRNA sense strand
gcuaauucuugcuccauuu

SEQ ID NO: 1873688 - RNA, 19 nt, Homo sapiens
  misc_RNA (1)...(19): siRNA sense strand
gaagacuguuugagacaau

SEQ ID NO: 1873689 - RNA, 19 nt, Homo sapiens
  misc_RNA (1)...(19): siRNA sense strand
gaacaugagcaguggcauu

SEQ ID NO: 1873690 - RNA, 19 nt, Homo sapiens
  misc_RNA (1)...(19): siRNA sense strand
ccaagccucuuuccuacaa

SEQ ID NO: 1873691 - RNA, 19 nt, Homo sapiens
  misc_RNA (1)...(19): siRNA sense strand
ccaacucuguccuucuuaa

SEQ ID NO: 1873692 - RNA, 19 nt, Homo sapiens
  misc_RNA (1)...(19): siRNA sense strand
ggaucguuaucuugcaaua

SEQ ID NO: 1873693 - RNA, 19 nt, Homo sapiens
  misc_RNA (1)...(19): siRNA sense strand
caaccuggcuugcaguaag

SEQ ID NO: 1873694 - RNA, 19 nt, Homo sapiens
  misc_RNA (1)...(19): siRNA sense strand
gcuccacuguuacaucauu

SEQ ID NO: 1873695 - RNA, 19 nt, Homo sapiens
  misc_RNA (1)...(19): siRNA sense strand
gacagugguuauuguguug

SEQ ID NO: 1873696 - RNA, 19 nt, Homo sapiens
  misc_RNA (1)...(19): siRNA sense strand
ugacauuucugauuauugc

SEQ ID NO: 1873697 - RNA, 19 nt, Homo sapiens
  misc_RNA (1)...(19): siRNA sense strand
gauggcauaugcugaucuu

SEQ ID NO: 1873698 - RNA, 19 nt, Homo sapiens
  misc_RNA (1)...(19): siRNA sense strand
agacagugguuauuguguu

SEQ ID NO: 1873699 - RNA, 19 nt, Homo sapiens
  misc_RNA (1)...(19): siRNA sense strand
gcugacauuucugauuauu

SEQ ID NO: 1873700 - RNA, 19 nt, Homo sapiens
  misc_RNA (1)...(19): siRNA sense strand
ggaagcacaagaacccaaa

SEQ ID NO: 1873701 - RNA, 19 nt, Homo sapiens
  misc_RNA (1)...(19): siRNA sense strand
guaugugugugaaggauca

SEQ ID NO: 1873702 - RNA, 19 nt, Homo sapiens
  misc_RNA (1)...(19): siRNA sense strand
gucaugagguagauucuuc

SEQ ID NO: 1873703 - RNA, 19 nt, Homo sapiens
  misc_RNA (1)...(19): siRNA sense strand
gaauggaggauccugaaca

SEQ ID NO: 1873704 - RNA, 19 nt, Homo sapiens
  misc_RNA (1)...(19): siRNA sense strand
guagauucuuccagagaga

SEQ ID NO: 1873705 - RNA, 19 nt, Homo sapiens
  misc_RNA (1)...(19): siRNA sense strand
gugcuccacuguuacauca

SEQ ID NO: 1873706 - RNA, 19 nt, Homo sapiens
  misc_RNA (1)...(19): siRNA sense strand
ggaggauccugaacaugag

SEQ ID NO: 1873707 - RNA, 19 nt, Homo sapiens
  misc_RNA (1)...(19): siRNA sense strand
ucauuaacuugccggguuu

SEQ ID NO: 1873708 - RNA, 19 nt, Homo sapiens
  misc_RNA (1)...(19): siRNA sense strand
acaguuaucuuugccuuuc

SEQ ID NO: 1873709 - RNA, 19 nt, Homo sapiens
  misc_RNA (1)...(19): siRNA sense strand
uggaggauccugaacauga

SEQ ID NO: 1873710 - RNA, 19 nt, Homo sapiens
  misc_RNA (1)...(19): siRNA sense strand
ccacuguuacaucauuaua

SEQ ID NO: 1873711 - RNA, 19 nt, Homo sapiens
  misc_RNA (1)...(19): siRNA sense strand
gauauaucaucucaguucu

SEQ ID NO: 1873712 - RNA, 19 nt, Homo sapiens
  misc_RNA (1)...(19): siRNA sense strand
cgaagacuguuugagacaa

SEQ ID NO: 1873713 - RNA, 19 nt, Homo sapiens
  misc_RNA (1)...(19): siRNA sense strand
uuacuggcuuuauuguuug

SEQ ID NO: 1873714 - RNA, 19 nt, Homo sapiens
  misc_RNA (1)...(19): siRNA sense strand
caagaacccaaaccuagga

SEQ ID NO: 1873715 - RNA, 19 nt, Homo sapiens
  misc_RNA (1)...(19): siRNA sense strand
acaccaaagagauaaauga

SEQ ID NO: 1873716 - RNA, 19 nt, Homo sapiens
  misc_RNA (1)...(19): siRNA sense strand
gcuauuucauucagacgau

SEQ ID NO: 1873717 - RNA, 19 nt, Homo sapiens
  misc_RNA (1)...(19): siRNA sense strand
cuaggaaacgggcuaauuc

SEQ ID NO: 1873718 - RNA, 19 nt, Homo sapiens
  misc_RNA (1)...(19): siRNA sense strand
uggcuuuauuguuugcuua

SEQ ID NO: 1873719 - RNA, 19 nt, Homo sapiens
  misc_RNA (1)...(19): siRNA sense strand
ggauaaccaguguauuuua

SEQ ID NO: 1873720 - RNA, 19 nt, Homo sapiens
  misc_RNA (1)...(19): siRNA sense strand
caugagcaguggcauugug

SEQ ID NO: 1873721 - RNA, 19 nt, Homo sapiens
  misc_RNA (1)...(19): siRNA sense strand
ucauucagacgauggcaua

SEQ ID NO: 1873722 - RNA, 19 nt, Homo sapiens
  misc_RNA (1)...(19): siRNA sense strand
ggcuaauucuugcuccauu

SEQ ID NO: 1873723 - RNA, 19 nt, Homo sapiens
  misc_RNA (1)...(19): siRNA sense strand
gcacaccaaagagauaaau

SEQ ID NO: 1873724 - RNA, 19 nt, Homo sapiens
  misc_RNA (1)...(19): siRNA sense strand
uaucuuugccuuucauugu

SEQ ID NO: 1873725 - RNA, 19 nt, Homo sapiens
  misc_RNA (1)...(19): siRNA sense strand
gaacccaaaccuaggaaac

SEQ ID NO: 1873726 - RNA, 19 nt, Homo sapiens
  misc_RNA (1)...(19): siRNA sense strand
uggcuugcaguaaguaaua

SEQ ID NO: 1873727 - RNA, 19 nt, Homo sapiens
  misc_RNA (1)...(19): siRNA sense strand
ucagcacaccaaagagaua

SEQ ID NO: 1873728 - RNA, 19 nt, Homo sapiens
  misc_RNA (1)...(19): siRNA sense strand
gcucaccagugccuauuuu

SEQ ID NO: 1873729 - RNA, 19 nt, Homo sapiens
  misc_RNA (1)...(19): siRNA sense strand
gagcaguggcauugugaau

SEQ ID NO: 1873730 - RNA, 19 nt, Homo sapiens
  misc_RNA (1)...(19): siRNA sense strand
cgucacuccugcccacuug

SEQ ID NO: 1873731 - RNA, 19 nt, Homo sapiens
  misc_RNA (1)...(19): siRNA sense strand
uggcaugucuugcuugcau

SEQ ID NO: 1873732 - RNA, 19 nt, Homo sapiens
  misc_RNA (1)...(19): siRNA sense strand
guccacgagucauuaacuu

SEQ ID NO: 1873733 - RNA, 19 nt, Homo sapiens
  misc_RNA (1)...(19): siRNA sense strand
gcuugagaauuugcauuau

SEQ ID NO: 1873734 - RNA, 19 nt, Homo sapiens
  misc_RNA (1)...(19): siRNA sense strand
caguguggaucguuaucuu

SEQ ID NO: 1873735 - RNA, 19 nt, Homo sapiens
  misc_RNA (1)...(19): siRNA sense strand
acuaccagcuauuucauuc

SEQ ID NO: 1873736 - RNA, 19 nt, Homo sapiens
  misc_RNA (1)...(19): siRNA sense strand
ggaucaggaagcacaagaa

SEQ ID NO: 1873737 - RNA, 19 nt, Homo sapiens
  misc_RNA (1)...(19): siRNA sense strand
guuauuguguugcugacau

SEQ ID NO: 1873738 - RNA, 19 nt, Homo sapiens
  misc_RNA (1)...(19): siRNA sense strand
cgcuugagaauuugcauua

SEQ ID NO: 1873739 - RNA, 19 nt, Homo sapiens
  misc_RNA (1)...(19): siRNA sense strand
guuagcugcuugguuccua

SEQ ID NO: 1873740 - RNA, 19 nt, Homo sapiens
  misc_RNA (1)...(19): siRNA sense strand
uaauauacagccucuccaa

SEQ ID NO: 1873741 - RNA, 19 nt, Homo sapiens
  misc_RNA (1)...(19): siRNA sense strand
acucuguccuucuuaacaa

SEQ ID NO: 1873742 - RNA, 19 nt, Homo sapiens
  misc_RNA (1)...(19): siRNA sense strand
agaaagcucccgggucuug

SEQ ID NO: 1873743 - RNA, 19 nt, Homo sapiens
  misc_RNA (1)...(19): siRNA sense strand
cagcacaccaaagagauaa

SEQ ID NO: 1873744 - RNA, 19 nt, Homo sapiens
  misc_RNA (1)...(19): siRNA sense strand
ucgagacagugguuauugu

SEQ ID NO: 1873745 - RNA, 19 nt, Homo sapiens
  misc_RNA (1)...(19): siRNA sense strand
uauacuaccagcuauuuca

SEQ ID NO: 1873746 - RNA, 19 nt, Homo sapiens
  misc_RNA (1)...(19): siRNA sense strand
guggaucguuaucuugcaa

SEQ ID NO: 1873747 - RNA, 19 nt, Homo sapiens
  misc_RNA (1)...(19): siRNA sense strand
uuggauauaucaucucagu

SEQ ID NO: 1873748 - RNA, 19 nt, Homo sapiens
  misc_RNA (1)...(19): siRNA sense strand
uggaucuacuccugccuaa

SEQ ID NO: 1873749 - RNA, 19 nt, Homo sapiens
  misc_RNA (1)...(19): siRNA sense strand
gccgucagcacaccaaaga

SEQ ID NO: 1873750 - RNA, 19 nt, Homo sapiens
  misc_RNA (1)...(19): siRNA sense strand
ucaccuacuuccacauuuu

SEQ ID NO: 1873751 - RNA, 19 nt, Homo sapiens
  misc_RNA (1)...(19): siRNA sense strand
ucuauggcaugucuugcuu

SEQ ID NO: 1873752 - RNA, 19 nt, Homo sapiens
  misc_RNA (1)...(19): siRNA sense strand
ccuaggaaacgggcuaauu

SEQ ID NO: 1873753 - RNA, 19 nt, Homo sapiens
  misc_RNA (1)...(19): siRNA sense strand
gcucccgggucuuggacaa

SEQ ID NO: 1873754 - RNA, 19 nt, Homo sapiens
  misc_RNA (1)...(19): siRNA sense strand
cgucagcacaccaaagaga

SEQ ID NO: 1873755 - RNA, 19 nt, Homo sapiens
  misc_RNA (1)...(19): siRNA sense strand
ucauuauacuaccagcuau

SEQ ID NO: 1873756 - RNA, 19 nt, Homo sapiens
  misc_RNA (1)...(19): siRNA sense strand
aauggaggauccugaacau

SEQ ID NO: 1873757 - RNA, 19 nt, Homo sapiens
  misc_RNA (1)...(19): siRNA sense strand
gaaggaucaggaagcacaa

SEQ ID NO: 1873758 - RNA, 19 nt, Homo sapiens
  misc_RNA (1)...(19): siRNA sense strand
gacgauggcauaugcugau

SEQ ID NO: 1873759 - RNA, 19 nt, Homo sapiens
  misc_RNA (1)...(19): siRNA sense strand
gagcccgauucccuaguca

SEQ ID NO: 1873760 - RNA, 19 nt, Homo sapiens
  misc_RNA (1)...(19): siRNA sense strand
gaucaggaagcacaagaac

SEQ ID NO: 1873761 - RNA, 19 nt, Homo sapiens
  misc_RNA (1)...(19): siRNA sense strand
gagacagugguuauugugu

SEQ ID NO: 1873762 - RNA, 19 nt, Homo sapiens
  misc_RNA (1)...(19): siRNA sense strand
uuauuguguugcugacauu

SEQ ID NO: 1873763 - RNA, 19 nt, Homo sapiens
  misc_RNA (1)...(19): siRNA sense strand
ggcauaugcugaucuuuuc

SEQ ID NO: 1873764 - RNA, 19 nt, Homo sapiens
  misc_RNA (1)...(19): siRNA sense strand
cuccacuguuacaucauua

SEQ ID NO: 1873765 - RNA, 19 nt, Homo sapiens
  misc_RNA (1)...(19): siRNA sense strand
gguguccacgagucauuaa

SEQ ID NO: 1873766 - RNA, 19 nt, Homo sapiens
  misc_RNA (1)...(19): siRNA sense strand
cgagacagugguuauugug

SEQ ID NO: 1873767 - RNA, 19 nt, Homo sapiens
  misc_RNA (1)...(19): siRNA sense strand
caauaaccaagccucuuuc

SEQ ID NO: 1873768 - RNA, 19 nt, Homo sapiens
  misc_RNA (1)...(19): siRNA sense strand
cuaauucuugcuccauuug

SEQ ID NO: 1873769 - RNA, 19 nt, Homo sapiens
  misc_RNA (1)...(19): siRNA sense strand
ggaaggagaucuacaagua

SEQ ID NO: 1873770 - RNA, 19 nt, Homo sapiens
  misc_RNA (1)...(19): siRNA sense strand
ggaaugagguggauccuua

SEQ ID NO: 1873771 - RNA, 19 nt, Homo sapiens
  misc_RNA (1)...(19): siRNA sense strand
gaacacagcaccaucauuu

SEQ ID NO: 1873772 - RNA, 19 nt, Homo sapiens
  misc_RNA (1)...(19): siRNA sense strand
acaaagaggucuaugauau

SEQ ID NO: 1873773 - RNA, 19 nt, Homo sapiens
  misc_RNA (1)...(19): siRNA sense strand
gaggagaguucagaguuua

SEQ ID NO: 1873774 - RNA, 19 nt, Homo sapiens
  misc_RNA (1)...(19): siRNA sense strand
ggaacaagcaggacccuaa

SEQ ID NO: 1873775 - RNA, 19 nt, Homo sapiens
  misc_RNA (1)...(19): siRNA sense strand
ggucuaugauauugcauuu

SEQ ID NO: 1873776 - RNA, 19 nt, Homo sapiens
  misc_RNA (1)...(19): siRNA sense strand
uuagguaccucaagcauug

SEQ ID NO: 1873777 - RNA, 19 nt, Homo sapiens
  misc_RNA (1)...(19): siRNA sense strand
aaggagagaucaacaaugu

SEQ ID NO: 1873778 - RNA, 19 nt, Homo sapiens
  misc_RNA (1)...(19): siRNA sense strand
aaagaggucuaugauauug

SEQ ID NO: 1873779 - RNA, 19 nt, Homo sapiens
  misc_RNA (1)...(19): siRNA sense strand
caaagaggucuaugauauu

SEQ ID NO: 1873780 - RNA, 19 nt, Homo sapiens
  misc_RNA (1)...(19): siRNA sense strand
aaacaaccaucgagcaugu

SEQ ID NO: 1873781 - RNA, 19 nt, Homo sapiens
  misc_RNA (1)...(19): siRNA sense strand
gcugaucgcccaugacaaa

SEQ ID NO: 1873782 - RNA, 19 nt, Homo sapiens
  misc_RNA (1)...(19): siRNA sense strand
ugaggagaguucagaguuu

SEQ ID NO: 1873783 - RNA, 19 nt, Homo sapiens
  misc_RNA (1)...(19): siRNA sense strand
ggagacagggcagguguua

SEQ ID NO: 1873784 - RNA, 19 nt, Homo sapiens
  misc_RNA (1)...(19): siRNA sense strand
caacaacugccuggagaua

SEQ ID NO: 1873785 - RNA, 19 nt, Homo sapiens
  misc_RNA (1)...(19): siRNA sense strand
gacaaagaggucuaugaua

SEQ ID NO: 1873786 - RNA, 19 nt, Homo sapiens
  misc_RNA (1)...(19): siRNA sense strand
gcaaacggaaggagaucua

SEQ ID NO: 1873787 - RNA, 19 nt, Homo sapiens
  misc_RNA (1)...(19): siRNA sense strand
gcaccaucauuuacgaaga

SEQ ID NO: 1873788 - RNA, 19 nt, Homo sapiens
  misc_RNA (1)...(19): siRNA sense strand
gaaggagaucuacaaguau

SEQ ID NO: 1873789 - RNA, 19 nt, Homo sapiens
  misc_RNA (1)...(19): siRNA sense strand
gaagcgcccuggacagucu

SEQ ID NO: 1873790 - RNA, 19 nt, Homo sapiens
  misc_RNA (1)...(19): siRNA sense strand
gauacgacaugcaccaucu

SEQ ID NO: 1873791 - RNA, 19 nt, Homo sapiens
  misc_RNA (1)...(19): siRNA sense strand
caacucagcccgacuggau

SEQ ID NO: 1873792 - RNA, 19 nt, Homo sapiens
  misc_RNA (1)...(19): siRNA sense strand
gcagcuucguggaggagua

SEQ ID NO: 1873793 - RNA, 19 nt, Homo sapiens
  misc_RNA (1)...(19): siRNA sense strand
gaaggagagaucaacaaug

SEQ ID NO: 1873794 - RNA, 19 nt, Homo sapiens
  misc_RNA (1)...(19): siRNA sense strand
ugagguggauccuuaucuu

SEQ ID NO: 1873795 - RNA, 19 nt, Homo sapiens
  misc_RNA (1)...(19): siRNA sense strand
ugacaaagaggucuaugau

SEQ ID NO: 1873796 - RNA, 19 nt, Homo sapiens
  misc_RNA (1)...(19): siRNA sense strand
gguggauccuuaucuuuua

SEQ ID NO: 1873797 - RNA, 19 nt, Homo sapiens
  misc_RNA (1)...(19): siRNA sense strand
aaggagaucuacaaguaug

SEQ ID NO: 1873798 - RNA, 19 nt, Homo sapiens
  misc_RNA (1)...(19): siRNA sense strand
caacaacaagguucagcuu

SEQ ID NO: 1873799 - RNA, 19 nt, Homo sapiens
  misc_RNA (1)...(19): siRNA sense strand
gagguggauccuuaucuuu

SEQ ID NO: 1873800 - RNA, 19 nt, Homo sapiens
  misc_RNA (1)...(19): siRNA sense strand
gagaguucagaguuuauuu

SEQ ID NO: 1873801 - RNA, 19 nt, Homo sapiens
  misc_RNA (1)...(19): siRNA sense strand
ggagaguucagaguuuauu

SEQ ID NO: 1873802 - RNA, 19 nt, Homo sapiens
  misc_RNA (1)...(19): siRNA sense strand
caacaagcggugacuaucu

SEQ ID NO: 1873803 - RNA, 19 nt, Homo sapiens
  misc_RNA (1)...(19): siRNA sense strand
gaucgcccaugacaaagag

SEQ ID NO: 1873804 - RNA, 19 nt, Homo sapiens
  misc_RNA (1)...(19): siRNA sense strand
ggaguacaacaacaagguu

SEQ ID NO: 1873805 - RNA, 19 nt, Homo sapiens
  misc_RNA (1)...(19): siRNA sense strand
guggaggguuggugaaaca

SEQ ID NO: 1873806 - RNA, 19 nt, Homo sapiens
  misc_RNA (1)...(19): siRNA sense strand
agguucagcuuguugguuu

SEQ ID NO: 1873807 - RNA, 19 nt, Homo sapiens
  misc_RNA (1)...(19): siRNA sense strand
gguucagcuuguugguuua

SEQ ID NO: 1873808 - RNA, 19 nt, Homo sapiens
  misc_RNA (1)...(19): siRNA sense strand
cuaacuaccuggccaccau

SEQ ID NO: 1873809 - RNA, 19 nt, Homo sapiens
  misc_RNA (1)...(19): siRNA sense strand
cagaguuuauuugcagaaa

SEQ ID NO: 1873810 - RNA, 19 nt, Homo sapiens
  misc_RNA (1)...(19): siRNA sense strand
gcucggugcggauguuuga

SEQ ID NO: 1873811 - RNA, 19 nt, Homo sapiens
  misc_RNA (1)...(19): siRNA sense strand
ggagaucuacaaguaugaa

SEQ ID NO: 1873812 - RNA, 19 nt, Homo sapiens
  misc_RNA (1)...(19): siRNA sense strand
acaagcaggacccuaacua

SEQ ID NO: 1873813 - RNA, 19 nt, Homo sapiens
  misc_RNA (1)...(19): siRNA sense strand
gcaacaagcggugacuauc

SEQ ID NO: 1873814 - RNA, 19 nt, Homo sapiens
  misc_RNA (1)...(19): siRNA sense strand
ugaaggagagaucaacaau

SEQ ID NO: 1873815 - RNA, 19 nt, Homo sapiens
  misc_RNA (1)...(19): siRNA sense strand
gaacaagcaggacccuaac

SEQ ID NO: 1873816 - RNA, 19 nt, Homo sapiens
  misc_RNA (1)...(19): siRNA sense strand
gaaugagguggauccuuau

SEQ ID NO: 1873817 - RNA, 19 nt, Homo sapiens
  misc_RNA (1)...(19): siRNA sense strand
aggcuggaguguuugcuaa

SEQ ID NO: 1873818 - RNA, 19 nt, Homo sapiens
  misc_RNA (1)...(19): siRNA sense strand
ggcaacaagcggugacuau

SEQ ID NO: 1873819 - RNA, 19 nt, Homo sapiens
  misc_RNA (1)...(19): siRNA sense strand
caucgagcaugugucaaug

SEQ ID NO: 1873820 - RNA, 19 nt, Homo sapiens
  misc_RNA (1)...(19): siRNA sense strand
ugaccuccuuugacuggaa

SEQ ID NO: 1873821 - RNA, 19 nt, Homo sapiens
  misc_RNA (1)...(19): siRNA sense strand
guggaucccugacacaaaa

SEQ ID NO: 1873822 - RNA, 19 nt, Homo sapiens
  misc_RNA (1)...(19): siRNA sense strand
gguguuagggcgagugaau

SEQ ID NO: 1873823 - RNA, 19 nt, Homo sapiens
  misc_RNA (1)...(19): siRNA sense strand
cuagaacacagcaccauca

SEQ ID NO: 1873824 - RNA, 19 nt, Homo sapiens
  misc_RNA (1)...(19): siRNA sense strand
ggacagucuacgcgaugaa

SEQ ID NO: 1873825 - RNA, 19 nt, Homo sapiens
  misc_RNA (1)...(19): siRNA sense strand
cagcugaucgcccaugaca

SEQ ID NO: 1873826 - RNA, 19 nt, Homo sapiens
  misc_RNA (1)...(19): siRNA sense strand
ggaucgccaucugcuacaa

SEQ ID NO: 1873827 - RNA, 19 nt, Homo sapiens
  misc_RNA (1)...(19): siRNA sense strand
ccaucgagcaugugucaau

SEQ ID NO: 1873828 - RNA, 19 nt, Homo sapiens
  misc_RNA (1)...(19): siRNA sense strand
agaggucuaugauauugca

SEQ ID NO: 1873829 - RNA, 19 nt, Homo sapiens
  misc_RNA (1)...(19): siRNA sense strand
ugacuggaaugagguggau

SEQ ID NO: 1873830 - RNA, 19 nt, Homo sapiens
  misc_RNA (1)...(19): siRNA sense strand
gagguggugauucuagaug

SEQ ID NO: 1873831 - RNA, 19 nt, Homo sapiens
  misc_RNA (1)...(19): siRNA sense strand
acacagcaccaucauuuac

SEQ ID NO: 1873832 - RNA, 19 nt, Homo sapiens
  misc_RNA (1)...(19): siRNA sense strand
gggacauguuugccucugu

SEQ ID NO: 1873833 - RNA, 19 nt, Homo sapiens
  misc_RNA (1)...(19): siRNA sense strand
ggaggaguacaacaacaag

SEQ ID NO: 1873834 - RNA, 19 nt, Homo sapiens
  misc_RNA (1)...(19): siRNA sense strand
acaacugccuggagauacu

SEQ ID NO: 1873835 - RNA, 19 nt, Homo sapiens
  misc_RNA (1)...(19): siRNA sense strand
ugaccuccgccaucuagaa

SEQ ID NO: 1873836 - RNA, 19 nt, Homo sapiens
  misc_RNA (1)...(19): siRNA sense strand
guggaggaguacaacaaca

SEQ ID NO: 1873837 - RNA, 19 nt, Homo sapiens
  misc_RNA (1)...(19): siRNA sense strand
aacacagcaccaucauuua

SEQ ID NO: 1873838 - RNA, 19 nt, Homo sapiens
  misc_RNA (1)...(19): siRNA sense strand
gaugaggagaguucagagu

SEQ ID NO: 1873839 - RNA, 19 nt, Homo sapiens
  misc_RNA (1)...(19): siRNA sense strand
caagcaggacccuaacuac

SEQ ID NO: 1873840 - RNA, 19 nt, Homo sapiens
  misc_RNA (1)...(19): siRNA sense strand
ggaggguuggugaaacaga

SEQ ID NO: 1873841 - RNA, 19 nt, Homo sapiens
  misc_RNA (1)...(19): siRNA sense strand
agaguucagaguuuauuug

SEQ ID NO: 1873842 - RNA, 19 nt, Homo sapiens
  misc_RNA (1)...(19): siRNA sense strand
gguggugauucuagauguc

SEQ ID NO: 1873843 - RNA, 19 nt, Homo sapiens
  misc_RNA (1)...(19): siRNA sense strand
ggagguggugauucuagau

SEQ ID NO: 1873844 - RNA, 19 nt, Homo sapiens
  misc_RNA (1)...(19): siRNA sense strand
uggagguggugauucuaga

SEQ ID NO: 1873845 - RNA, 19 nt, Homo sapiens
  misc_RNA (1)...(19): siRNA sense strand
acagcaccaucauuuacga

SEQ ID NO: 1873846 - RNA, 19 nt, Homo sapiens
  misc_RNA (1)...(19): siRNA sense strand
gaccuccuuugacuggaau

SEQ ID NO: 1873847 - RNA, 19 nt, Homo sapiens
  misc_RNA (1)...(19): siRNA sense strand
ucagcuuguugguuuagau

SEQ ID NO: 1873848 - RNA, 19 nt, Homo sapiens
  misc_RNA (1)...(19): siRNA sense strand
ggccuacacagcugaagga

SEQ ID NO: 1873849 - RNA, 19 nt, Homo sapiens
  misc_RNA (1)...(19): siRNA sense strand
acgaagacccacagcauca

SEQ ID NO: 1873850 - RNA, 19 nt, Homo sapiens
  misc_RNA (1)...(19): siRNA sense strand
uuacgaagacccacagcau

SEQ ID NO: 1873851 - RNA, 19 nt, Homo sapiens
  misc_RNA (1)...(19): siRNA sense strand
caccaucauuuacgaagac

SEQ ID NO: 1873852 - RNA, 19 nt, Homo sapiens
  misc_RNA (1)...(19): siRNA sense strand
agacagggcagguguuagg

SEQ ID NO: 1873853 - RNA, 19 nt, Homo sapiens
  misc_RNA (1)...(19): siRNA sense strand
uagaugaggagaguucaga

SEQ ID NO: 1873854 - RNA, 19 nt, Homo sapiens
  misc_RNA (1)...(19): siRNA sense strand
guucagcucugucgaauua

SEQ ID NO: 1873855 - RNA, 19 nt, Homo sapiens
  misc_RNA (1)...(19): siRNA sense strand
gaaaccaucuguaccugua

SEQ ID NO: 1873856 - RNA, 19 nt, Homo sapiens
  misc_RNA (1)...(19): siRNA sense strand
gaauaaugauugcucagua

SEQ ID NO: 1873857 - RNA, 19 nt, Homo sapiens
  misc_RNA (1)...(19): siRNA sense strand
ggaagaagauacugauaau

SEQ ID NO: 1873858 - RNA, 19 nt, Homo sapiens
  misc_RNA (1)...(19): siRNA sense strand
caacaacaaugcaguauuc

SEQ ID NO: 1873859 - RNA, 19 nt, Homo sapiens
  misc_RNA (1)...(19): siRNA sense strand
caacaagccucaaugaugu

SEQ ID NO: 1873860 - RNA, 19 nt, Homo sapiens
  misc_RNA (1)...(19): siRNA sense strand
gacaggagauugaaugaaa

SEQ ID NO: 1873861 - RNA, 19 nt, Homo sapiens
  misc_RNA (1)...(19): siRNA sense strand
uaacaucccuggaagaaga

SEQ ID NO: 1873862 - RNA, 19 nt, Homo sapiens
  misc_RNA (1)...(19): siRNA sense strand
gaaaguaguggaugacauu

SEQ ID NO: 1873863 - RNA, 19 nt, Homo sapiens
  misc_RNA (1)...(19): siRNA sense strand
ggaaaugcuucuacagaga

SEQ ID NO: 1873864 - RNA, 19 nt, Homo sapiens
  misc_RNA (1)...(19): siRNA sense strand
gaggugagaucauguuuca

SEQ ID NO: 1873865 - RNA, 19 nt, Homo sapiens
  misc_RNA (1)...(19): siRNA sense strand
gcucaaagauugcugaaag

SEQ ID NO: 1873866 - RNA, 19 nt, Homo sapiens
  misc_RNA (1)...(19): siRNA sense strand
gcccaaagcacauuaaauu

SEQ ID NO: 1873867 - RNA, 19 nt, Homo sapiens
  misc_RNA (1)...(19): siRNA sense strand
ccucaaugauguuacuuua

SEQ ID NO: 1873868 - RNA, 19 nt, Homo sapiens
  misc_RNA (1)...(19): siRNA sense strand
gaagcagacuguaaaccaa

SEQ ID NO: 1873869 - RNA, 19 nt, Homo sapiens
  misc_RNA (1)...(19): siRNA sense strand
ugggaaagcuucaguguga

SEQ ID NO: 1873870 - RNA, 19 nt, Homo sapiens
  misc_RNA (1)...(19): siRNA sense strand
gagaucauguuucaauaug

SEQ ID NO: 1873871 - RNA, 19 nt, Homo sapiens
  misc_RNA (1)...(19): siRNA sense strand
uaaagaagcagacuguaaa

SEQ ID NO: 1873872 - RNA, 19 nt, Homo sapiens
  misc_RNA (1)...(19): siRNA sense strand
gauauuccuugucaucauu

SEQ ID NO: 1873873 - RNA, 19 nt, Homo sapiens
  misc_RNA (1)...(19): siRNA sense strand
gaaaugaucaaccaaguca

SEQ ID NO: 1873874 - RNA, 19 nt, Homo sapiens
  misc_RNA (1)...(19): siRNA sense strand
ggauugcucuguauaagau

SEQ ID NO: 1873875 - RNA, 19 nt, Homo sapiens
  misc_RNA (1)...(19): siRNA sense strand
gagaaaugaucaaccaagu

SEQ ID NO: 1873876 - RNA, 19 nt, Homo sapiens
  misc_RNA (1)...(19): siRNA sense strand
gaauggaaaugcuucuaca

SEQ ID NO: 1873877 - RNA, 19 nt, Homo sapiens
  misc_RNA (1)...(19): siRNA sense strand
uauaacgaauggcaccuua

SEQ ID NO: 1873878 - RNA, 19 nt, Homo sapiens
  misc_RNA (1)...(19): siRNA sense strand
uuacugacguucaagauau

SEQ ID NO: 1873879 - RNA, 19 nt, Homo sapiens
  misc_RNA (1)...(19): siRNA sense strand
gaguaucgcuggccuuaca

SEQ ID NO: 1873880 - RNA, 19 nt, Homo sapiens
  misc_RNA (1)...(19): siRNA sense strand
caauggaggcgguaucuuu

SEQ ID NO: 1873881 - RNA, 19 nt, Homo sapiens
  misc_RNA (1)...(19): siRNA sense strand
gaucagcuacgucauauca

SEQ ID NO: 1873882 - RNA, 19 nt, Homo sapiens
  misc_RNA (1)...(19): siRNA sense strand
uaacgugaccuucauguau

SEQ ID NO: 1873883 - RNA, 19 nt, Homo sapiens
  misc_RNA (1)...(19): siRNA sense strand
caggaugaguuaacaguga

SEQ ID NO: 1873884 - RNA, 19 nt, Homo sapiens
  misc_RNA (1)...(19): siRNA sense strand
gaucaacaacaaugcagua

SEQ ID NO: 1873885 - RNA, 19 nt, Homo sapiens
  misc_RNA (1)...(19): siRNA sense strand
uagaagcauuccauaugua

SEQ ID NO: 1873886 - RNA, 19 nt, Homo sapiens
  misc_RNA (1)...(19): siRNA sense strand
gugagaucauguuucaaua

SEQ ID NO: 1873887 - RNA, 19 nt, Homo sapiens
  misc_RNA (1)...(19): siRNA sense strand
caauuacucuuccuucauc

SEQ ID NO: 1873888 - RNA, 19 nt, Homo sapiens
  misc_RNA (1)...(19): siRNA sense strand
gcaauagccgcuuuggaaa

SEQ ID NO: 1873889 - RNA, 19 nt, Homo sapiens
  misc_RNA (1)...(19): siRNA sense strand
uugcugagccuccagauua

SEQ ID NO: 1873890 - RNA, 19 nt, Homo sapiens
  misc_RNA (1)...(19): siRNA sense strand
guaccuggcccuugucaaa

SEQ ID NO: 1873891 - RNA, 19 nt, Homo sapiens
  misc_RNA (1)...(19): siRNA sense strand
gcucugacguucauuacau

SEQ ID NO: 1873892 - RNA, 19 nt, Homo sapiens
  misc_RNA (1)...(19): siRNA sense strand
gaaacaacaagccucaaug

SEQ ID NO: 1873893 - RNA, 19 nt, Homo sapiens
  misc_RNA (1)...(19): siRNA sense strand
cuagaagcauuccauaugu

SEQ ID NO: 1873894 - RNA, 19 nt, Homo sapiens
  misc_RNA (1)...(19): siRNA sense strand
guugugggcuuucaucaau

SEQ ID NO: 1873895 - RNA, 19 nt, Homo sapiens
  misc_RNA (1)...(19): siRNA sense strand
gcacauguuuaacgagaag

SEQ ID NO: 1873896 - RNA, 19 nt, Homo sapiens
  misc_RNA (1)...(19): siRNA sense strand
aaacaacaagccucaauga

SEQ ID NO: 1873897 - RNA, 19 nt, Homo sapiens
  misc_RNA (1)...(19): siRNA sense strand
ucaaauuccuuacagucaa

SEQ ID NO: 1873898 - RNA, 19 nt, Homo sapiens
  misc_RNA (1)...(19): siRNA sense strand
cugcaaaucuucagguuuc

SEQ ID NO: 1873899 - RNA, 19 nt, Homo sapiens
  misc_RNA (1)...(19): siRNA sense strand
gaguaaagauucgaccaau

SEQ ID NO: 1873900 - RNA, 19 nt, Homo sapiens
  misc_RNA (1)...(19): siRNA sense strand
ccaaagcacauuaaauugu

SEQ ID NO: 1873901 - RNA, 19 nt, Homo sapiens
  misc_RNA (1)...(19): siRNA sense strand
uaagcuuacucccuucaaa

SEQ ID NO: 1873902 - RNA, 19 nt, Homo sapiens
  misc_RNA (1)...(19): siRNA sense strand
ggaugggccuagaagcauu

SEQ ID NO: 1873903 - RNA, 19 nt, Homo sapiens
  misc_RNA (1)...(19): siRNA sense strand
aaagauugcugaaaguagu

SEQ ID NO: 1873904 - RNA, 19 nt, Homo sapiens
  misc_RNA (1)...(19): siRNA sense strand
ggaguccugucucuaagug

SEQ ID NO: 1873905 - RNA, 19 nt, Homo sapiens
  misc_RNA (1)...(19): siRNA sense strand
uuaaagaagcagacuguaa

SEQ ID NO: 1873906 - RNA, 19 nt, Homo sapiens
  misc_RNA (1)...(19): siRNA sense strand
gccaguaguuucaacacaa

SEQ ID NO: 1873907 - RNA, 19 nt, Homo sapiens
  misc_RNA (1)...(19): siRNA sense strand
guaaagauucgaccaaugg

SEQ ID NO: 1873908 - RNA, 19 nt, Homo sapiens
  misc_RNA (1)...(19): siRNA sense strand
accaccaccugcuaaauua

SEQ ID NO: 1873909 - RNA, 19 nt, Homo sapiens
  misc_RNA (1)...(19): siRNA sense strand
guguccagcucuucaaauu

SEQ ID NO: 1873910 - RNA, 19 nt, Homo sapiens
  misc_RNA (1)...(19): siRNA sense strand
gaugacuucugcuggauca

SEQ ID NO: 1873911 - RNA, 19 nt, Homo sapiens
  misc_RNA (1)...(19): siRNA sense strand
ggugagaucauguuucaau

SEQ ID NO: 1873912 - RNA, 19 nt, Homo sapiens
  misc_RNA (1)...(19): siRNA sense strand
gaagcuuacacuuuauuga

SEQ ID NO: 1873913 - RNA, 19 nt, Homo sapiens
  misc_RNA (1)...(19): siRNA sense strand
caacaaugcaguauucuac

SEQ ID NO: 1873914 - RNA, 19 nt, Homo sapiens
  misc_RNA (1)...(19): siRNA sense strand
acaacaagccucaaugaug

SEQ ID NO: 1873915 - RNA, 19 nt, Homo sapiens
  misc_RNA (1)...(19): siRNA sense strand
cggggaagcuuacacuuua

SEQ ID NO: 1873916 - RNA, 19 nt, Homo sapiens
  misc_RNA (1)...(19): siRNA sense strand
gauaaagaaagcacuguuc

SEQ ID NO: 1873917 - RNA, 19 nt, Homo sapiens
  misc_RNA (1)...(19): siRNA sense strand
gauguuacuuuaagcuuac

SEQ ID NO: 1873918 - RNA, 19 nt, Homo sapiens
  misc_RNA (1)...(19): siRNA sense strand
ggaauggggucucuuuuag

SEQ ID NO: 1873919 - RNA, 19 nt, Homo sapiens
  misc_RNA (1)...(19): siRNA sense strand
gguaacaucccuggaagaa

SEQ ID NO: 1873920 - RNA, 19 nt, Homo sapiens
  misc_RNA (1)...(19): siRNA sense strand
cagugacucuuguaaccua

SEQ ID NO: 1873921 - RNA, 19 nt, Homo sapiens
  misc_RNA (1)...(19): siRNA sense strand
caauguucccucuccaaua

SEQ ID NO: 1873922 - RNA, 19 nt, Homo sapiens
  misc_RNA (1)...(19): siRNA sense strand
gcaauuugucaucuauuug

SEQ ID NO: 1873923 - RNA, 19 nt, Homo sapiens
  misc_RNA (1)...(19): siRNA sense strand
gggaauaacuuggggcuuu

SEQ ID NO: 1873924 - RNA, 19 nt, Homo sapiens
  misc_RNA (1)...(19): siRNA sense strand
acauuacgguggugggaua

SEQ ID NO: 1873925 - RNA, 19 nt, Homo sapiens
  misc_RNA (1)...(19): siRNA sense strand
uaaccucgcaggagaaaug

SEQ ID NO: 1873926 - RNA, 19 nt, Homo sapiens
  misc_RNA (1)...(19): siRNA sense strand
gucaacaccagcaguauuu

SEQ ID NO: 1873927 - RNA, 19 nt, Homo sapiens
  misc_RNA (1)...(19): siRNA sense strand
uaacuggaguccugucucu

SEQ ID NO: 1873928 - RNA, 19 nt, Homo sapiens
  misc_RNA (1)...(19): siRNA sense strand
caggagaaaugaucaacca

SEQ ID NO: 1873929 - RNA, 19 nt, Homo sapiens
  misc_RNA (1)...(19): siRNA sense strand
uggaagaagauacugauaa

SEQ ID NO: 1873930 - RNA, 19 nt, Homo sapiens
  misc_RNA (1)...(19): siRNA sense strand
gagccaggaugaguuaaca

SEQ ID NO: 1873931 - RNA, 19 nt, Homo sapiens
  misc_RNA (1)...(19): siRNA sense strand
ccugcuaaauuaucuguug

SEQ ID NO: 1873932 - RNA, 19 nt, Homo sapiens
  misc_RNA (1)...(19): siRNA sense strand
ucagcucugucgaauuaaa

SEQ ID NO: 1873933 - RNA, 19 nt, Homo sapiens
  misc_RNA (1)...(19): siRNA sense strand
uuacgguggugggauauuu

SEQ ID NO: 1873934 - RNA, 19 nt, Homo sapiens
  misc_RNA (1)...(19): siRNA sense strand
ucacauggaugggccuaga

SEQ ID NO: 1873935 - RNA, 19 nt, Homo sapiens
  misc_RNA (1)...(19): siRNA sense strand
gcuaaauuaucuguuguca

SEQ ID NO: 1873936 - RNA, 19 nt, Homo sapiens
  misc_RNA (1)...(19): siRNA sense strand
uggcuguauuucuucauua

SEQ ID NO: 1873937 - RNA, 19 nt, Homo sapiens
  misc_RNA (1)...(19): siRNA sense strand
ucaaagauugcugaaagua

SEQ ID NO: 1873938 - RNA, 19 nt, Homo sapiens
  misc_RNA (1)...(19): siRNA sense strand
aauguucccucuccaauag

SEQ ID NO: 1873939 - RNA, 19 nt, Homo sapiens
  misc_RNA (1)...(19): siRNA sense strand
gaugugugccuucacgauu

SEQ ID NO: 1873940 - RNA, 19 nt, Homo sapiens
  misc_RNA (1)...(19): siRNA sense strand
guaucuguuugccaucuuu

SEQ ID NO: 1873941 - RNA, 19 nt, Homo sapiens
  misc_RNA (1)...(19): siRNA sense strand
ccuagaagcauuccauaug

SEQ ID NO: 1873942 - RNA, 19 nt, Homo sapiens
  misc_RNA (1)...(19): siRNA sense strand
gcaucucaguggcuguauu

SEQ ID NO: 1873943 - RNA, 19 nt, Homo sapiens
  misc_RNA (1)...(19): siRNA sense strand
ucagcagacuccuucauuc

SEQ ID NO: 1873944 - RNA, 19 nt, Homo sapiens
  misc_RNA (1)...(19): siRNA sense strand
ugcaauagccgcuuuggaa

SEQ ID NO: 1873945 - RNA, 19 nt, Homo sapiens
  misc_RNA (1)...(19): siRNA sense strand
caaauuccuuacagucaag

SEQ ID NO: 1873946 - RNA, 19 nt, Homo sapiens
  misc_RNA (1)...(19): siRNA sense strand
caucucaguggcuguauuu

SEQ ID NO: 1873947 - RNA, 19 nt, Homo sapiens
  misc_RNA (1)...(19): siRNA sense strand
agaggaggcuggucagaca

SEQ ID NO: 1873948 - RNA, 19 nt, Homo sapiens
  misc_RNA (1)...(19): siRNA sense strand
ccaggguucaguucaauuu

SEQ ID NO: 1873949 - RNA, 19 nt, Homo sapiens
  misc_RNA (1)...(19): siRNA sense strand
cacaauuacucuuccuuca

SEQ ID NO: 1873950 - RNA, 19 nt, Homo sapiens
  misc_RNA (1)...(19): siRNA sense strand
gcugugugcugcucugcuu

SEQ ID NO: 1873951 - RNA, 19 nt, Homo sapiens
  misc_RNA (1)...(19): siRNA sense strand
ugugggcuuucaucaauuu

SEQ ID NO: 1873952 - RNA, 19 nt, Homo sapiens
  misc_RNA (1)...(19): siRNA sense strand
ggaagcuuacacuuuauug

SEQ ID NO: 1873953 - RNA, 19 nt, Homo sapiens
  misc_RNA (1)...(19): siRNA sense strand
caaggaguguccagcucuu

SEQ ID NO: 1873954 - RNA, 19 nt, Homo sapiens
  misc_RNA (1)...(19): siRNA sense strand
aaagggagaucucaugauu

SEQ ID NO: 1873955 - RNA, 19 nt, Homo sapiens
  misc_RNA (1)...(19): siRNA sense strand
caucuuggcucuauucuuc

SEQ ID NO: 1873956 - RNA, 19 nt, Homo sapiens
  misc_RNA (1)...(19): siRNA sense strand
gaccaacccuacuauguga

SEQ ID NO: 1873957 - RNA, 19 nt, Homo sapiens
  misc_RNA (1)...(19): siRNA sense strand
aaaugaagcuccugcuguu

SEQ ID NO: 1873958 - RNA, 19 nt, Homo sapiens
  misc_RNA (1)...(19): siRNA sense strand
agggagaucucaugauuga

SEQ ID NO: 1873959 - RNA, 19 nt, Homo sapiens
  misc_RNA (1)...(19): siRNA sense strand
aaagccagcuggagaucua

SEQ ID NO: 1873960 - RNA, 19 nt, Homo sapiens
  misc_RNA (1)...(19): siRNA sense strand
gacaugagcgucuuugaug

SEQ ID NO: 1873961 - RNA, 19 nt, Homo sapiens
  misc_RNA (1)...(19): siRNA sense strand
ggaccaacccuacuaugug

SEQ ID NO: 1873962 - RNA, 19 nt, Homo sapiens
  misc_RNA (1)...(19): siRNA sense strand
gcucuauucuuccacaugu

SEQ ID NO: 1873963 - RNA, 19 nt, Homo sapiens
  misc_RNA (1)...(19): siRNA sense strand
gcaccugccugugacauca

SEQ ID NO: 1873964 - RNA, 19 nt, Homo sapiens
  misc_RNA (1)...(19): siRNA sense strand
cuucagaccugggugcaua

SEQ ID NO: 1873965 - RNA, 19 nt, Homo sapiens
  misc_RNA (1)...(19): siRNA sense strand
ggagaucucaugauugaca

SEQ ID NO: 1873966 - RNA, 19 nt, Homo sapiens
  misc_RNA (1)...(19): siRNA sense strand
gcccagacuucccgaaugu

SEQ ID NO: 1873967 - RNA, 19 nt, Homo sapiens
  misc_RNA (1)...(19): siRNA sense strand
ugaccacgcuuuccacaca

SEQ ID NO: 1873968 - RNA, 19 nt, Homo sapiens
  misc_RNA (1)...(19): siRNA sense strand
gcuggucuuugcccuauga

SEQ ID NO: 1873969 - RNA, 19 nt, Homo sapiens
  misc_RNA (1)...(19): siRNA sense strand
gggcagcacccagauguuu

SEQ ID NO: 1873970 - RNA, 19 nt, Homo sapiens
  misc_RNA (1)...(19): siRNA sense strand
gagacaguccagccucuuu

SEQ ID NO: 1873971 - RNA, 19 nt, Homo sapiens
  misc_RNA (1)...(19): siRNA sense strand
ucaaggaggugcgcuucuu

SEQ ID NO: 1873972 - RNA, 19 nt, Homo sapiens
  misc_RNA (1)...(19): siRNA sense strand
ucagcucccugucuaugaa

SEQ ID NO: 1873973 - RNA, 19 nt, Homo sapiens
  misc_RNA (1)...(19): siRNA sense strand
gcgcuggucuuugcccuau

SEQ ID NO: 1873974 - RNA, 19 nt, Homo sapiens
  misc_RNA (1)...(19): siRNA sense strand
aacaucagcucccugucua

SEQ ID NO: 1873975 - RNA, 19 nt, Homo sapiens
  misc_RNA (1)...(19): siRNA sense strand
agcagaaacucaagaagga

SEQ ID NO: 1873976 - RNA, 19 nt, Homo sapiens
  misc_RNA (1)...(19): siRNA sense strand
caacaucagcucccugucu

SEQ ID NO: 1873977 - RNA, 19 nt, Homo sapiens
  misc_RNA (1)...(19): siRNA sense strand
uguaugaauucgugggauu

SEQ ID NO: 1873978 - RNA, 19 nt, Homo sapiens
  misc_RNA (1)...(19): siRNA sense strand
ccuuugaggugguggagaa

SEQ ID NO: 1873979 - RNA, 19 nt, Homo sapiens
  misc_RNA (1)...(19): siRNA sense strand
gcacaaagggagaucucau

SEQ ID NO: 1873980 - RNA, 19 nt, Homo sapiens
  misc_RNA (1)...(19): siRNA sense strand
guucugcaccugccuguga

SEQ ID NO: 1873981 - RNA, 19 nt, Homo sapiens
  misc_RNA (1)...(19): siRNA sense strand
acaagaccauccaguccuu

SEQ ID NO: 1873982 - RNA, 19 nt, Homo sapiens
  misc_RNA (1)...(19): siRNA sense strand
gauugacagucgcauugug

SEQ ID NO: 1873983 - RNA, 19 nt, Homo sapiens
  misc_RNA (1)...(19): siRNA sense strand
cgucuuugaugccuacaug

SEQ ID NO: 1873984 - RNA, 19 nt, Homo sapiens
  misc_RNA (1)...(19): siRNA sense strand
gaaaccuguugcuggaucu

SEQ ID NO: 1873985 - RNA, 19 nt, Homo sapiens
  misc_RNA (1)...(19): siRNA sense strand
gaacaagaacagagaaacc

SEQ ID NO: 1873986 - RNA, 19 nt, Homo sapiens
  misc_RNA (1)...(19): siRNA sense strand
ggcccagacuucccgaaug

SEQ ID NO: 1873987 - RNA, 19 nt, Homo sapiens
  misc_RNA (1)...(19): siRNA sense strand
ggaggaccaacccuacuau

SEQ ID NO: 1873988 - RNA, 19 nt, Homo sapiens
  misc_RNA (1)...(19): siRNA sense strand
ucuacccgcugcugaaaga

SEQ ID NO: 1873989 - RNA, 19 nt, Homo sapiens
  misc_RNA (1)...(19): siRNA sense strand
cgacaugagcgucuuugau

SEQ ID NO: 1873990 - RNA, 19 nt, Homo sapiens
  misc_RNA (1)...(19): siRNA sense strand
agacuucccgaauguauga

SEQ ID NO: 1873991 - RNA, 19 nt, Homo sapiens
  misc_RNA (1)...(19): siRNA sense strand
acaaagggagaucucauga

SEQ ID NO: 1873992 - RNA, 19 nt, Homo sapiens
  misc_RNA (1)...(19): siRNA sense strand
agaccugggugcauaacau

SEQ ID NO: 1873993 - RNA, 19 nt, Homo sapiens
  misc_RNA (1)...(19): siRNA sense strand
gaccacgcuuuccacacaa

SEQ ID NO: 1873994 - RNA, 19 nt, Homo sapiens
  misc_RNA (1)...(19): siRNA sense strand
gcacccagauguuuucuac

SEQ ID NO: 1873995 - RNA, 19 nt, Homo sapiens
  misc_RNA (1)...(19): siRNA sense strand
ccagacuucccgaauguau

SEQ ID NO: 1873996 - RNA, 19 nt, Homo sapiens
  misc_RNA (1)...(19): siRNA sense strand
gcuuggcgcuggucuuugc

SEQ ID NO: 1873997 - RNA, 19 nt, Homo sapiens
  misc_RNA (1)...(19): siRNA sense strand
ugacaucaucccacaagau

SEQ ID NO: 1873998 - RNA, 19 nt, Homo sapiens
  misc_RNA (1)...(19): siRNA sense strand
gcaugcacgugcugguucu

SEQ ID NO: 1873999 - RNA, 19 nt, Homo sapiens
  misc_RNA (1)...(19): siRNA sense strand
caaagggagaucucaugau

SEQ ID NO: 1874000 - RNA, 19 nt, Homo sapiens
  misc_RNA (1)...(19): siRNA sense strand
gcgaugccaugaauuugcu

SEQ ID NO: 1874001 - RNA, 19 nt, Homo sapiens
  misc_RNA (1)...(19): siRNA sense strand
ugaauucgugggauuggaa

SEQ ID NO: 1874002 - RNA, 19 nt, Homo sapiens
  misc_RNA (1)...(19): siRNA sense strand
gacugucccugagcaaauc

SEQ ID NO: 1874003 - RNA, 19 nt, Homo sapiens
  misc_RNA (1)...(19): siRNA sense strand
gcaugggugaccacgcuuu

SEQ ID NO: 1874004 - RNA, 19 nt, Homo sapiens
  misc_RNA (1)...(19): siRNA sense strand
cguguuccguucccgagaa

SEQ ID NO: 1874005 - RNA, 19 nt, Homo sapiens
  misc_RNA (1)...(19): siRNA sense strand
ugaagcuccugcuguuucu

SEQ ID NO: 1874006 - RNA, 19 nt, Homo sapiens
  misc_RNA (1)...(19): siRNA sense strand
cacaaagggagaucucaug

SEQ ID NO: 1874007 - RNA, 19 nt, Homo sapiens
  misc_RNA (1)...(19): siRNA sense strand
cuccugcuguuucugguuu

SEQ ID NO: 1874008 - RNA, 19 nt, Homo sapiens
  misc_RNA (1)...(19): siRNA sense strand
caaggaggugcgcuucuuc

SEQ ID NO: 1874009 - RNA, 19 nt, Homo sapiens
  misc_RNA (1)...(19): siRNA sense strand
gccacguggugcucaagga

SEQ ID NO: 1874010 - RNA, 19 nt, Homo sapiens
  misc_RNA (1)...(19): siRNA sense strand
ggucuuugcccuaugaaaa

SEQ ID NO: 1874011 - RNA, 19 nt, Homo sapiens
  misc_RNA (1)...(19): siRNA sense strand
caucagcucccugucuaug

SEQ ID NO: 1874012 - RNA, 19 nt, Homo sapiens
  misc_RNA (1)...(19): siRNA sense strand
gaggaccaacccuacuaug

SEQ ID NO: 1874013 - RNA, 19 nt, Homo sapiens
  misc_RNA (1)...(19): siRNA sense strand
gugacaucaucccacaaga

SEQ ID NO: 1874014 - RNA, 19 nt, Homo sapiens
  misc_RNA (1)...(19): siRNA sense strand
guugcuggaucuucugucu

SEQ ID NO: 1874015 - RNA, 19 nt, Homo sapiens
  misc_RNA (1)...(19): siRNA sense strand
aaagguuucucgacuucag

SEQ ID NO: 1874016 - RNA, 19 nt, Homo sapiens
  misc_RNA (1)...(19): siRNA sense strand
ggaggugcgcuucuucaac

SEQ ID NO: 1874017 - RNA, 19 nt, Homo sapiens
  misc_RNA (1)...(19): siRNA sense strand
guaugaauucgugggauug

SEQ ID NO: 1874018 - RNA, 19 nt, Homo sapiens
  misc_RNA (1)...(19): siRNA sense strand
gagcagaucugggacaaga

SEQ ID NO: 1874019 - RNA, 19 nt, Homo sapiens
  misc_RNA (1)...(19): siRNA sense strand
gacaagauccuaaguguga

SEQ ID NO: 1874020 - RNA, 19 nt, Homo sapiens
  misc_RNA (1)...(19): siRNA sense strand
ggaagggcguccuggcuaa

SEQ ID NO: 1874021 - RNA, 19 nt, Homo sapiens
  misc_RNA (1)...(19): siRNA sense strand
ggaaugagucucucuggaa

SEQ ID NO: 1874022 - RNA, 19 nt, Homo sapiens
  misc_RNA (1)...(19): siRNA sense strand
gggacaagauccuaagugu

SEQ ID NO: 1874023 - RNA, 19 nt, Homo sapiens
  misc_RNA (1)...(19): siRNA sense strand
gcaccgggauagacaggaa

SEQ ID NO: 1874024 - RNA, 19 nt, Homo sapiens
  misc_RNA (1)...(19): siRNA sense strand
ucucuuccauugcagcuua

SEQ ID NO: 1874025 - RNA, 19 nt, Homo sapiens
  misc_RNA (1)...(19): siRNA sense strand
cuagaacacuggcauugga

SEQ ID NO: 1874026 - RNA, 19 nt, Homo sapiens
  misc_RNA (1)...(19): siRNA sense strand
ccaaggacauccggguaaa

SEQ ID NO: 1874027 - RNA, 19 nt, Homo sapiens
  misc_RNA (1)...(19): siRNA sense strand
ucagaggacugugcaggaa

SEQ ID NO: 1874028 - RNA, 19 nt, Homo sapiens
  misc_RNA (1)...(19): siRNA sense strand
gaacuucaaggaacaucau

SEQ ID NO: 1874029 - RNA, 19 nt, Homo sapiens
  misc_RNA (1)...(19): siRNA sense strand
gaugagcagcaccgggaua

SEQ ID NO: 1874030 - RNA, 19 nt, Homo sapiens
  misc_RNA (1)...(19): siRNA sense strand
gccaguugcugcccuacau

SEQ ID NO: 1874031 - RNA, 19 nt, Homo sapiens
  misc_RNA (1)...(19): siRNA sense strand
cuacuccacucggcucuga

SEQ ID NO: 1874032 - RNA, 19 nt, Homo sapiens
  misc_RNA (1)...(19): siRNA sense strand
cauugcagcuuauaaucca

SEQ ID NO: 1874033 - RNA, 19 nt, Homo sapiens
  misc_RNA (1)...(19): siRNA sense strand
gcugcugggucucacuaga

SEQ ID NO: 1874034 - RNA, 19 nt, Homo sapiens
  misc_RNA (1)...(19): siRNA sense strand
caucagcugcagaggauug

SEQ ID NO: 1874035 - RNA, 19 nt, Homo sapiens
  misc_RNA (1)...(19): siRNA sense strand
gugagcagaucugggacaa

SEQ ID NO: 1874036 - RNA, 19 nt, Homo sapiens
  misc_RNA (1)...(19): siRNA sense strand
gagucucucuggaagaacu

SEQ ID NO: 1874037 - RNA, 19 nt, Homo sapiens
  misc_RNA (1)...(19): siRNA sense strand
agaggacugugcaggaauc

SEQ ID NO: 1874038 - RNA, 19 nt, Homo sapiens
  misc_RNA (1)...(19): siRNA sense strand
ggcgcugggugucuacaau

SEQ ID NO: 1874039 - RNA, 19 nt, Homo sapiens
  misc_RNA (1)...(19): siRNA sense strand
ccuggucucuuccauugca

SEQ ID NO: 1874040 - RNA, 19 nt, Homo sapiens
  misc_RNA (1)...(19): siRNA sense strand
ucacuagaacacuggcauu

SEQ ID NO: 1874041 - RNA, 19 nt, Homo sapiens
  misc_RNA (1)...(19): siRNA sense strand
auccuggucucuuccauug

SEQ ID NO: 1874042 - RNA, 19 nt, Homo sapiens
  misc_RNA (1)...(19): siRNA sense strand
gagcagcaccgggauagac

SEQ ID NO: 1874043 - RNA, 19 nt, Homo sapiens
  misc_RNA (1)...(19): siRNA sense strand
augagucucucuggaagaa

SEQ ID NO: 1874044 - RNA, 19 nt, Homo sapiens
  misc_RNA (1)...(19): siRNA sense strand
caggaauuaucaaaacuga

SEQ ID NO: 1874045 - RNA, 19 nt, Homo sapiens
  misc_RNA (1)...(19): siRNA sense strand
cccaaggacauccggguaa

SEQ ID NO: 1874046 - RNA, 19 nt, Homo sapiens
  misc_RNA (1)...(19): siRNA sense strand
gcgcugcugggucucacua

SEQ ID NO: 1874047 - RNA, 19 nt, Homo sapiens
  misc_RNA (1)...(19): siRNA sense strand
ugugcuaggcuuucuguga

SEQ ID NO: 1874048 - RNA, 19 nt, Homo sapiens
  misc_RNA (1)...(19): siRNA sense strand
gcgcugggugucuacaaug

SEQ ID NO: 1874049 - RNA, 19 nt, Homo sapiens
  misc_RNA (1)...(19): siRNA sense strand
gagcagaucugggacaaga

SEQ ID NO: 1874050 - RNA, 19 nt, Homo sapiens
  misc_RNA (1)...(19): siRNA sense strand
gacaagauccuaaguguga

SEQ ID NO: 1874051 - RNA, 19 nt, Homo sapiens
  misc_RNA (1)...(19): siRNA sense strand
ggaagggcguccuggcuaa

SEQ ID NO: 1874052 - RNA, 19 nt, Homo sapiens
  misc_RNA (1)...(19): siRNA sense strand
ggaaugagucucucuggaa

SEQ ID NO: 1874053 - RNA, 19 nt, Homo sapiens
  misc_RNA (1)...(19): siRNA sense strand
gggacaagauccuaagugu

SEQ ID NO: 1874054 - RNA, 19 nt, Homo sapiens
  misc_RNA (1)...(19): siRNA sense strand
gcaccgggauagacaggaa

SEQ ID NO: 1874055 - RNA, 19 nt, Homo sapiens
  misc_RNA (1)...(19): siRNA sense strand
ucucuuccauugcagcuua

SEQ ID NO: 1874056 - RNA, 19 nt, Homo sapiens
  misc_RNA (1)...(19): siRNA sense strand
cuagaacacuggcauugga

SEQ ID NO: 1874057 - RNA, 19 nt, Homo sapiens
  misc_RNA (1)...(19): siRNA sense strand
ccaaggacauccggguaaa

SEQ ID NO: 1874058 - RNA, 19 nt, Homo sapiens
  misc_RNA (1)...(19): siRNA sense strand
ucagaggacugugcaggaa

SEQ ID NO: 1874059 - RNA, 19 nt, Homo sapiens
  misc_RNA (1)...(19): siRNA sense strand
gaacuucaaggaacaucau

SEQ ID NO: 1874060 - RNA, 19 nt, Homo sapiens
  misc_RNA (1)...(19): siRNA sense strand
gaugagcagcaccgggaua

SEQ ID NO: 1874061 - RNA, 19 nt, Homo sapiens
  misc_RNA (1)...(19): siRNA sense strand
gccaguugcugcccuacau

SEQ ID NO: 1874062 - RNA, 19 nt, Homo sapiens
  misc_RNA (1)...(19): siRNA sense strand
cuacuccacucggcucuga

SEQ ID NO: 1874063 - RNA, 19 nt, Homo sapiens
  misc_RNA (1)...(19): siRNA sense strand
cauugcagcuuauaaucca

SEQ ID NO: 1874064 - RNA, 19 nt, Homo sapiens
  misc_RNA (1)...(19): siRNA sense strand
gcugcugggucucacuaga

SEQ ID NO: 1874065 - RNA, 19 nt, Homo sapiens
  misc_RNA (1)...(19): siRNA sense strand
caucagcugcagaggauug

SEQ ID NO: 1874066 - RNA, 19 nt, Homo sapiens
  misc_RNA (1)...(19): siRNA sense strand
gugagcagaucugggacaa

SEQ ID NO: 1874067 - RNA, 19 nt, Homo sapiens
  misc_RNA (1)...(19): siRNA sense strand
gagucucucuggaagaacu

SEQ ID NO: 1874068 - RNA, 19 nt, Homo sapiens
  misc_RNA (1)...(19): siRNA sense strand
agaggacugugcaggaauc

SEQ ID NO: 1874069 - RNA, 19 nt, Homo sapiens
  misc_RNA (1)...(19): siRNA sense strand
ggcgcugggugucuacaau

SEQ ID NO: 1874070 - RNA, 19 nt, Homo sapiens
  misc_RNA (1)...(19): siRNA sense strand
ccuggucucuuccauugca

SEQ ID NO: 1874071 - RNA, 19 nt, Homo sapiens
  misc_RNA (1)...(19): siRNA sense strand
ucacuagaacacuggcauu

SEQ ID NO: 1874072 - RNA, 19 nt, Homo sapiens
  misc_RNA (1)...(19): siRNA sense strand
auccuggucucuuccauug

SEQ ID NO: 1874073 - RNA, 19 nt, Homo sapiens
  misc_RNA (1)...(19): siRNA sense strand
gagcagcaccgggauagac

SEQ ID NO: 1874074 - RNA, 19 nt, Homo sapiens
  misc_RNA (1)...(19): siRNA sense strand
augagucucucuggaagaa

SEQ ID NO: 1874075 - RNA, 19 nt, Homo sapiens
  misc_RNA (1)...(19): siRNA sense strand
caggaauuaucaaaacuga

SEQ ID NO: 1874076 - RNA, 19 nt, Homo sapiens
  misc_RNA (1)...(19): siRNA sense strand
cccaaggacauccggguaa

SEQ ID NO: 1874077 - RNA, 19 nt, Homo sapiens
  misc_RNA (1)...(19): siRNA sense strand
gcgcugcugggucucacua

SEQ ID NO: 1874078 - RNA, 19 nt, Homo sapiens
  misc_RNA (1)...(19): siRNA sense strand
ugugcuaggcuuucuguga

SEQ ID NO: 1874079 - RNA, 19 nt, Homo sapiens
  misc_RNA (1)...(19): siRNA sense strand
gcgcugggugucuacaaug

SEQ ID NO: 1874080 - RNA, 19 nt, Homo sapiens
  misc_RNA (1)...(19): siRNA sense strand
ggacagaggacaugagaua

SEQ ID NO: 1874081 - RNA, 19 nt, Homo sapiens
  misc_RNA (1)...(19): siRNA sense strand
gauacugucuugaauacua

SEQ ID NO: 1874082 - RNA, 19 nt, Homo sapiens
  misc_RNA (1)...(19): siRNA sense strand
gcaaaugccugauacuuuu

SEQ ID NO: 1874083 - RNA, 19 nt, Homo sapiens
  misc_RNA (1)...(19): siRNA sense strand
caaagugucaagcauguua

SEQ ID NO: 1874084 - RNA, 19 nt, Homo sapiens
  misc_RNA (1)...(19): siRNA sense strand
gagauacugucuugaauac

SEQ ID NO: 1874085 - RNA, 19 nt, Homo sapiens
  misc_RNA (1)...(19): siRNA sense strand
gaacugccaggacuucaaa

SEQ ID NO: 1874086 - RNA, 19 nt, Homo sapiens
  misc_RNA (1)...(19): siRNA sense strand
ucgcacaccuuaaagcaaa

SEQ ID NO: 1874087 - RNA, 19 nt, Homo sapiens
  misc_RNA (1)...(19): siRNA sense strand
ugauggagcugugccaauu

SEQ ID NO: 1874088 - RNA, 19 nt, Homo sapiens
  misc_RNA (1)...(19): siRNA sense strand
agagacagcugcuccuuca

SEQ ID NO: 1874089 - RNA, 19 nt, Homo sapiens
  misc_RNA (1)...(19): siRNA sense strand
acaaacaggugaucucucu

SEQ ID NO: 1874090 - RNA, 19 nt, Homo sapiens
  misc_RNA (1)...(19): siRNA sense strand
gaagaaugcaacauauauc

SEQ ID NO: 1874091 - RNA, 19 nt, Homo sapiens
  misc_RNA (1)...(19): siRNA sense strand
aaaagugccuugagaauau

SEQ ID NO: 1874092 - RNA, 19 nt, Homo sapiens
  misc_RNA (1)...(19): siRNA sense strand
gaaugcaacauauaucugu

SEQ ID NO: 1874093 - RNA, 19 nt, Homo sapiens
  misc_RNA (1)...(19): siRNA sense strand
ugagauacugucuugaaua

SEQ ID NO: 1874094 - RNA, 19 nt, Homo sapiens
  misc_RNA (1)...(19): siRNA sense strand
gcaguccagugaccuuuca

SEQ ID NO: 1874095 - RNA, 19 nt, Homo sapiens
  misc_RNA (1)...(19): siRNA sense strand
gaggaagccaugaacacua

SEQ ID NO: 1874096 - RNA, 19 nt, Homo sapiens
  misc_RNA (1)...(19): siRNA sense strand
ccagugaccuuucaguuuu

SEQ ID NO: 1874097 - RNA, 19 nt, Homo sapiens
  misc_RNA (1)...(19): siRNA sense strand
ugucaagcauguuaauguu

SEQ ID NO: 1874098 - RNA, 19 nt, Homo sapiens
  misc_RNA (1)...(19): siRNA sense strand
gacagcugcuccuucagaa

SEQ ID NO: 1874099 - RNA, 19 nt, Homo sapiens
  misc_RNA (1)...(19): siRNA sense strand
gacgugggcuuccauaucg

SEQ ID NO: 1874100 - RNA, 19 nt, Homo sapiens
  misc_RNA (1)...(19): siRNA sense strand
gggcucagaccaucaguga

SEQ ID NO: 1874101 - RNA, 19 nt, Homo sapiens
  misc_RNA (1)...(19): siRNA sense strand
aaacagaggagacccugaa

SEQ ID NO: 1874102 - RNA, 19 nt, Homo sapiens
  misc_RNA (1)...(19): siRNA sense strand
caugagauacugucuugaa

SEQ ID NO: 1874103 - RNA, 19 nt, Homo sapiens
  misc_RNA (1)...(19): siRNA sense strand
ucugaagaaugcaacauau

SEQ ID NO: 1874104 - RNA, 19 nt, Homo sapiens
  misc_RNA (1)...(19): siRNA sense strand
ucaagcauguuaauguuac

SEQ ID NO: 1874105 - RNA, 19 nt, Homo sapiens
  misc_RNA (1)...(19): siRNA sense strand
cuucaaagcccacaaccaa

SEQ ID NO: 1874106 - RNA, 19 nt, Homo sapiens
  misc_RNA (1)...(19): siRNA sense strand
caaaagugccuugagaaua

SEQ ID NO: 1874107 - RNA, 19 nt, Homo sapiens
  misc_RNA (1)...(19): siRNA sense strand
caggaaacauagcaaaugc

SEQ ID NO: 1874108 - RNA, 19 nt, Homo sapiens
  misc_RNA (1)...(19): siRNA sense strand
cauagcaaaugccugauac

SEQ ID NO: 1874109 - RNA, 19 nt, Homo sapiens
  misc_RNA (1)...(19): siRNA sense strand
cagaaaacacuaccaagua

SEQ ID NO: 1874110 - RNA, 19 nt, Homo sapiens
  misc_RNA (1)...(19): siRNA sense strand
gcucaacccaugccugaug

SEQ ID NO: 1874111 - RNA, 19 nt, Homo sapiens
  misc_RNA (1)...(19): siRNA sense strand
gucaagcauguuaauguua

SEQ ID NO: 1874112 - RNA, 19 nt, Homo sapiens
  misc_RNA (1)...(19): siRNA sense strand
ccacauucauauauuugca

SEQ ID NO: 1874113 - RNA, 19 nt, Homo sapiens
  misc_RNA (1)...(19): siRNA sense strand
ggaccgaggaagccaugaa

SEQ ID NO: 1874114 - RNA, 19 nt, Homo sapiens
  misc_RNA (1)...(19): siRNA sense strand
cagaggacaugagauacug

SEQ ID NO: 1874115 - RNA, 19 nt, Homo sapiens
  misc_RNA (1)...(19): siRNA sense strand
ggaacugccaggacuucaa

SEQ ID NO: 1874116 - RNA, 19 nt, Homo sapiens
  misc_RNA (1)...(19): siRNA sense strand
cugaagaaugcaacauaua

SEQ ID NO: 1874117 - RNA, 19 nt, Homo sapiens
  misc_RNA (1)...(19): siRNA sense strand
cccaaagugucaagcaugu

SEQ ID NO: 1874118 - RNA, 19 nt, Homo sapiens
  misc_RNA (1)...(19): siRNA sense strand
uauauuugcaguccaguga

SEQ ID NO: 1874119 - RNA, 19 nt, Homo sapiens
  misc_RNA (1)...(19): siRNA sense strand
gagacuaauuccucuucca

SEQ ID NO: 1874120 - RNA, 19 nt, Homo sapiens
  misc_RNA (1)...(19): siRNA sense strand
ucaggaaacauagcaaaug

SEQ ID NO: 1874121 - RNA, 19 nt, Homo sapiens
  misc_RNA (1)...(19): siRNA sense strand
uacuauuccugguuucuga

SEQ ID NO: 1874122 - RNA, 19 nt, Homo sapiens
  misc_RNA (1)...(19): siRNA sense strand
ggcgccugcugcugagaua

SEQ ID NO: 1874123 - RNA, 19 nt, Homo sapiens
  misc_RNA (1)...(19): siRNA sense strand
agcaaaugccugauacuuu

SEQ ID NO: 1874124 - RNA, 19 nt, Homo sapiens
  misc_RNA (1)...(19): siRNA sense strand
ggagcugugccaauucuuc

SEQ ID NO: 1874125 - RNA, 19 nt, Homo sapiens
  misc_RNA (1)...(19): siRNA sense strand
agacagcugcuccuucaga

SEQ ID NO: 1874126 - RNA, 19 nt, Homo sapiens
  misc_RNA (1)...(19): siRNA sense strand
gccaauucuuccagcaaug

SEQ ID NO: 1874127 - RNA, 19 nt, Homo sapiens
  misc_RNA (1)...(19): siRNA sense strand
guucaggaaacauagcaaa

SEQ ID NO: 1874128 - RNA, 19 nt, Homo sapiens
  misc_RNA (1)...(19): siRNA sense strand
gcaaaagugccuugagaau

SEQ ID NO: 1874129 - RNA, 19 nt, Homo sapiens
  misc_RNA (1)...(19): siRNA sense strand
uagcaaaugccugauacuu

SEQ ID NO: 1874130 - RNA, 19 nt, Homo sapiens
  misc_RNA (1)...(19): siRNA sense strand
uccagugaccuuucaguuu

SEQ ID NO: 1874131 - RNA, 19 nt, Homo sapiens
  misc_RNA (1)...(19): siRNA sense strand
gacuaauuccucuuccaaa

SEQ ID NO: 1874132 - RNA, 19 nt, Homo sapiens
  misc_RNA (1)...(19): siRNA sense strand
ggcuggagguggaagaaag

SEQ ID NO: 1874133 - RNA, 19 nt, Homo sapiens
  misc_RNA (1)...(19): siRNA sense strand
acuaauuccucuuccaaag

SEQ ID NO: 1874134 - RNA, 19 nt, Homo sapiens
  misc_RNA (1)...(19): siRNA sense strand
acauagcaaaugccugaua

SEQ ID NO: 1874135 - RNA, 19 nt, Homo sapiens
  misc_RNA (1)...(19): siRNA sense strand
gagggucucucugggaaac

SEQ ID NO: 1874136 - RNA, 19 nt, Homo sapiens
  misc_RNA (1)...(19): siRNA sense strand
gagcacacccugggcaucu

SEQ ID NO: 1874137 - RNA, 19 nt, Homo sapiens
  misc_RNA (1)...(19): siRNA sense strand
caggacagaggacaugaga

SEQ ID NO: 1874138 - RNA, 19 nt, Homo sapiens
  misc_RNA (1)...(19): siRNA sense strand
gaagccaugaacacuacaa

SEQ ID NO: 1874139 - RNA, 19 nt, Homo sapiens
  misc_RNA (1)...(19): siRNA sense strand
cugggcaucugcucugaga

SEQ ID NO: 1874140 - RNA, 19 nt, Homo sapiens
  misc_RNA (1)...(19): siRNA sense strand
aagcaaaagugccuugaga

SEQ ID NO: 1874141 - RNA, 19 nt, Homo sapiens
  misc_RNA (1)...(19): siRNA sense strand
agacuaauuccucuuccaa

SEQ ID NO: 1874142 - RNA, 19 nt, Homo sapiens
  misc_RNA (1)...(19): siRNA sense strand
gugucaagcauguuaaugu

SEQ ID NO: 1874143 - RNA, 19 nt, Homo sapiens
  misc_RNA (1)...(19): siRNA sense strand
uagagaaagguuugaaucu

SEQ ID NO: 1874144 - RNA, 19 nt, Homo sapiens
  misc_RNA (1)...(19): siRNA sense strand
gauccucucccuggacaga

SEQ ID NO: 1874145 - RNA, 19 nt, Homo sapiens
  misc_RNA (1)...(19): siRNA sense strand
ggacuucaaagcccacaac

SEQ ID NO: 1874146 - RNA, 19 nt, Homo sapiens
  misc_RNA (1)...(19): siRNA sense strand
uaucugcaagucuguguga

SEQ ID NO: 1874147 - RNA, 19 nt, Homo sapiens
  misc_RNA (1)...(19): siRNA sense strand
aggaagccaugaacacuac

SEQ ID NO: 1874148 - RNA, 19 nt, Homo sapiens
  misc_RNA (1)...(19): siRNA sense strand
uuagagaaagguuugaauc

SEQ ID NO: 1874149 - RNA, 19 nt, Homo sapiens
  misc_RNA (1)...(19): siRNA sense strand
agacgugggcuuccauauc

SEQ ID NO: 1874150 - RNA, 19 nt, Homo sapiens
  misc_RNA (1)...(19): siRNA sense strand
caaagacauguaccagagu

SEQ ID NO: 1874151 - RNA, 19 nt, Homo sapiens
  misc_RNA (1)...(19): siRNA sense strand
ugccaauucuuccagcaau

SEQ ID NO: 1874152 - RNA, 19 nt, Homo sapiens
  misc_RNA (1)...(19): siRNA sense strand
ccaagaccccaucaaguuu

SEQ ID NO: 1874153 - RNA, 19 nt, Homo sapiens
  misc_RNA (1)...(19): siRNA sense strand
ccacaaacaggugaucucu

SEQ ID NO: 1874154 - RNA, 19 nt, Homo sapiens
  misc_RNA (1)...(19): siRNA sense strand
ucaaagcccacaaccaaaa

SEQ ID NO: 1874155 - RNA, 19 nt, Homo sapiens
  misc_RNA (1)...(19): siRNA sense strand
caaaugccugauacuuuua

SEQ ID NO: 1874156 - RNA, 19 nt, Homo sapiens
  misc_RNA (1)...(19): siRNA sense strand
gauggagcugugccaauuc

SEQ ID NO: 1874157 - RNA, 19 nt, Homo sapiens
  misc_RNA (1)...(19): siRNA sense strand
aaacugaccuggagaagua

SEQ ID NO: 1874158 - RNA, 19 nt, Homo sapiens
  misc_RNA (1)...(19): siRNA sense strand
gcacugagaccaucauuga

SEQ ID NO: 1874159 - RNA, 19 nt, Homo sapiens
  misc_RNA (1)...(19): siRNA sense strand
gaacccauauggagaaugu

SEQ ID NO: 1874160 - RNA, 19 nt, Homo sapiens
  misc_RNA (1)...(19): siRNA sense strand
gaagacaccuacaccaaca

SEQ ID NO: 1874161 - RNA, 19 nt, Homo sapiens
  misc_RNA (1)...(19): siRNA sense strand
gagagcaauucuaccauaa

SEQ ID NO: 1874162 - RNA, 19 nt, Homo sapiens
  misc_RNA (1)...(19): siRNA sense strand
acacaaaccagcuuauaua

SEQ ID NO: 1874163 - RNA, 19 nt, Homo sapiens
  misc_RNA (1)...(19): siRNA sense strand
ggauaaagcacuucuaaag

SEQ ID NO: 1874164 - RNA, 19 nt, Homo sapiens
  misc_RNA (1)...(19): siRNA sense strand
ggacauguucgacaagaaa

SEQ ID NO: 1874165 - RNA, 19 nt, Homo sapiens
  misc_RNA (1)...(19): siRNA sense strand
ggagaaguauaacaaugug

SEQ ID NO: 1874166 - RNA, 19 nt, Homo sapiens
  misc_RNA (1)...(19): siRNA sense strand
agagagcaauucuaccaua

SEQ ID NO: 1874167 - RNA, 19 nt, Homo sapiens
  misc_RNA (1)...(19): siRNA sense strand
gggcauagauaccaccaau

SEQ ID NO: 1874168 - RNA, 19 nt, Homo sapiens
  misc_RNA (1)...(19): siRNA sense strand
gcaagaugguccagaaguc

SEQ ID NO: 1874169 - RNA, 19 nt, Homo sapiens
  misc_RNA (1)...(19): siRNA sense strand
ggaguucacagaaauaaug

SEQ ID NO: 1874170 - RNA, 19 nt, Homo sapiens
  misc_RNA (1)...(19): siRNA sense strand
ggauuggugccuucucuua

SEQ ID NO: 1874171 - RNA, 19 nt, Homo sapiens
  misc_RNA (1)...(19): siRNA sense strand
ccaccacucugcccaagaa

SEQ ID NO: 1874172 - RNA, 19 nt, Homo sapiens
  misc_RNA (1)...(19): siRNA sense strand
gauauugagggcauagaua

SEQ ID NO: 1874173 - RNA, 19 nt, Homo sapiens
  misc_RNA (1)...(19): siRNA sense strand
caacaaggaccuggauaaa

SEQ ID NO: 1874174 - RNA, 19 nt, Homo sapiens
  misc_RNA (1)...(19): siRNA sense strand
gaauguguaugacuucuac

SEQ ID NO: 1874175 - RNA, 19 nt, Homo sapiens
  misc_RNA (1)...(19): siRNA sense strand
caaauuuggccucggagua

SEQ ID NO: 1874176 - RNA, 19 nt, Homo sapiens
  misc_RNA (1)...(19): siRNA sense strand
ggaccuggauaaagcacuu

SEQ ID NO: 1874177 - RNA, 19 nt, Homo sapiens
  misc_RNA (1)...(19): siRNA sense strand
gaucuuucauacacccuuu

SEQ ID NO: 1874178 - RNA, 19 nt, Homo sapiens
  misc_RNA (1)...(19): siRNA sense strand
aaacagugcucauggaacu

SEQ ID NO: 1874179 - RNA, 19 nt, Homo sapiens
  misc_RNA (1)...(19): siRNA sense strand
gagcaauucuaccauaagg

SEQ ID NO: 1874180 - RNA, 19 nt, Homo sapiens
  misc_RNA (1)...(19): siRNA sense strand
gcaggaaaccucccucaca

SEQ ID NO: 1874181 - RNA, 19 nt, Homo sapiens
  misc_RNA (1)...(19): siRNA sense strand
ucacagaaauaaugaacca

SEQ ID NO: 1874182 - RNA, 19 nt, Homo sapiens
  misc_RNA (1)...(19): siRNA sense strand
ccaacaaggaccuggauaa

SEQ ID NO: 1874183 - RNA, 19 nt, Homo sapiens
  misc_RNA (1)...(19): siRNA sense strand
caagagcggugcaggaaac

SEQ ID NO: 1874184 - RNA, 19 nt, Homo sapiens
  misc_RNA (1)...(19): siRNA sense strand
gaaauaaugaaccaaagag

SEQ ID NO: 1874185 - RNA, 19 nt, Homo sapiens
  misc_RNA (1)...(19): siRNA sense strand
gcacaucagaccugccaaa

SEQ ID NO: 1874186 - RNA, 19 nt, Homo sapiens
  misc_RNA (1)...(19): siRNA sense strand
ccaaagagagcaauucuac

SEQ ID NO: 1874187 - RNA, 19 nt, Homo sapiens
  misc_RNA (1)...(19): siRNA sense strand
acaaggaccuggauaaagc

SEQ ID NO: 1874188 - RNA, 19 nt, Homo sapiens
  misc_RNA (1)...(19): siRNA sense strand
cacaaaccagcuuauauaa

SEQ ID NO: 1874189 - RNA, 19 nt, Homo sapiens
  misc_RNA (1)...(19): siRNA sense strand
gaaccaaagagagcaauuc

SEQ ID NO: 1874190 - RNA, 19 nt, Homo sapiens
  misc_RNA (1)...(19): siRNA sense strand
gauaaagcacuucuaaagg

SEQ ID NO: 1874191 - RNA, 19 nt, Homo sapiens
  misc_RNA (1)...(19): siRNA sense strand
ccugaggaguucacagaaa

SEQ ID NO: 1874192 - RNA, 19 nt, Homo sapiens
  misc_RNA (1)...(19): siRNA sense strand
cagcaucgccgaaaguaug

SEQ ID NO: 1874193 - RNA, 19 nt, Homo sapiens
  misc_RNA (1)...(19): siRNA sense strand
gaggaguucacagaaauaa

SEQ ID NO: 1874194 - RNA, 19 nt, Homo sapiens
  misc_RNA (1)...(19): siRNA sense strand
aaacagauacuuggccaaa

SEQ ID NO: 1874195 - RNA, 19 nt, Homo sapiens
  misc_RNA (1)...(19): siRNA sense strand
gacaagagcggugcaggaa

SEQ ID NO: 1874196 - RNA, 19 nt, Homo sapiens
  misc_RNA (1)...(19): siRNA sense strand
cuucacccuugacgauuua

SEQ ID NO: 1874197 - RNA, 19 nt, Homo sapiens
  misc_RNA (1)...(19): siRNA sense strand
guccaaagcugucaaaaca

SEQ ID NO: 1874198 - RNA, 19 nt, Homo sapiens
  misc_RNA (1)...(19): siRNA sense strand
cagaaauaaugaaccaaag

SEQ ID NO: 1874199 - RNA, 19 nt, Homo sapiens
  misc_RNA (1)...(19): siRNA sense strand
gaaguauaacaauguggaa

SEQ ID NO: 1874200 - RNA, 19 nt, Homo sapiens
  misc_RNA (1)...(19): siRNA sense strand
acacacaaaccagcuuaua

SEQ ID NO: 1874201 - RNA, 19 nt, Homo sapiens
  misc_RNA (1)...(19): siRNA sense strand
ugacacacaaaccagcuua

SEQ ID NO: 1874202 - RNA, 19 nt, Homo sapiens
  misc_RNA (1)...(19): siRNA sense strand
uggagaauguguaugacuu

SEQ ID NO: 1874203 - RNA, 19 nt, Homo sapiens
  misc_RNA (1)...(19): siRNA sense strand
gguacugccucccucuuca

SEQ ID NO: 1874204 - RNA, 19 nt, Homo sapiens
  misc_RNA (1)...(19): siRNA sense strand
cuacuucccagcccaauau

SEQ ID NO: 1874205 - RNA, 19 nt, Homo sapiens
  misc_RNA (1)...(19): siRNA sense strand
cugaggaguucacagaaau

SEQ ID NO: 1874206 - RNA, 19 nt, Homo sapiens
  misc_RNA (1)...(19): siRNA sense strand
ggagaauguguaugacuuc

SEQ ID NO: 1874207 - RNA, 19 nt, Homo sapiens
  misc_RNA (1)...(19): siRNA sense strand
guauaacaauguggaagca

SEQ ID NO: 1874208 - RNA, 19 nt, Homo sapiens
  misc_RNA (1)...(19): siRNA sense strand
aaagagagcaauucuacca

SEQ ID NO: 1874209 - RNA, 19 nt, Homo sapiens
  misc_RNA (1)...(19): siRNA sense strand
ccuucacccuugacgauuu

SEQ ID NO: 1874210 - RNA, 19 nt, Homo sapiens
  misc_RNA (1)...(19): siRNA sense strand
acagauacuuggccaaagg

SEQ ID NO: 1874211 - RNA, 19 nt, Homo sapiens
  misc_RNA (1)...(19): siRNA sense strand
cuggagaaguauaacaaug

SEQ ID NO: 1874212 - RNA, 19 nt, Homo sapiens
  misc_RNA (1)...(19): siRNA sense strand
caggacauguucgacaaga

SEQ ID NO: 1874213 - RNA, 19 nt, Homo sapiens
  misc_RNA (1)...(19): siRNA sense strand
cacacaaaccagcuuauau

SEQ ID NO: 1874214 - RNA, 19 nt, Homo sapiens
  misc_RNA (1)...(19): siRNA sense strand
ggccuuggaucgauguuac

SEQ ID NO: 1874215 - RNA, 19 nt, Homo sapiens
  misc_RNA (1)...(19): siRNA sense strand
ugaggaguucacagaaaua

SEQ ID NO: 1874216 - RNA, 19 nt, Homo sapiens
  misc_RNA (1)...(19): siRNA sense strand
uguggaagcaggaaaguau

SEQ ID NO: 1874217 - RNA, 19 nt, Homo sapiens
  misc_RNA (1)...(19): siRNA sense strand
gagcagcaucgccgaaagu

SEQ ID NO: 1874218 - RNA, 19 nt, Homo sapiens
  misc_RNA (1)...(19): siRNA sense strand
gauuggugccuucucuuau

SEQ ID NO: 1874219 - RNA, 19 nt, Homo sapiens
  misc_RNA (1)...(19): siRNA sense strand
cuggauaaagcacuucuaa

SEQ ID NO: 1874220 - RNA, 19 nt, Homo sapiens
  misc_RNA (1)...(19): siRNA sense strand
cccaauauguggaccaaac

SEQ ID NO: 1874221 - RNA, 19 nt, Homo sapiens
  misc_RNA (1)...(19): siRNA sense strand
gaguucacagaaauaauga

SEQ ID NO: 1874222 - RNA, 19 nt, Homo sapiens
  misc_RNA (1)...(19): siRNA sense strand
guggaagcaggaaaguaua

SEQ ID NO: 1874223 - RNA, 19 nt, Homo sapiens
  misc_RNA (1)...(19): siRNA sense strand
caggauuggugccuucucu

SEQ ID NO: 1874224 - RNA, 19 nt, Homo sapiens
  misc_RNA (1)...(19): siRNA sense strand
auauggagaauguguauga

SEQ ID NO: 1874225 - RNA, 19 nt, Homo sapiens
  misc_RNA (1)...(19): siRNA sense strand
gaagcgcauucugcaacug

SEQ ID NO: 1874226 - RNA, 19 nt, Homo sapiens
  misc_RNA (1)...(19): siRNA sense strand
caaguccaaagcugucaaa

SEQ ID NO: 1874227 - RNA, 19 nt, Homo sapiens
  misc_RNA (1)...(19): siRNA sense strand
ccauauggagaauguguau

SEQ ID NO: 1874228 - RNA, 19 nt, Homo sapiens
  misc_RNA (1)...(19): siRNA sense strand
cccuuuaccucuccacuca

SEQ ID NO: 1874229 - RNA, 19 nt, Homo sapiens
  misc_RNA (1)...(19): siRNA sense strand
aaaggccucucaggacaug

SEQ ID NO: 1874230 - RNA, 19 nt, Homo sapiens
  misc_RNA (1)...(19): siRNA sense strand
ggccucggaguacccaaua

SEQ ID NO: 1874231 - RNA, 19 nt, Homo sapiens
  misc_RNA (1)...(19): siRNA sense strand
cgccuagccucccgaaagu

SEQ ID NO: 1874232 - RNA, 19 nt, Homo sapiens
  misc_RNA (1)...(19): siRNA sense strand
uuauggcucugguuuagca

SEQ ID NO: 1874233 - RNA, 19 nt, Homo sapiens
  misc_RNA (1)...(19): siRNA sense strand
ucuuauggcucugguuuag

SEQ ID NO: 1874234 - RNA, 19 nt, Homo sapiens
  misc_RNA (1)...(19): siRNA sense strand
auaaggggcuggaggcuuu

SEQ ID NO: 1874235 - RNA, 19 nt, Homo sapiens
  misc_RNA (1)...(19): siRNA sense strand
ggaguacccaauaguggau

SEQ ID NO: 1874236 - RNA, 19 nt, Homo sapiens
  misc_RNA (1)...(19): siRNA sense strand
ugacuucuacaaaccaaau

SEQ ID NO: 1874237 - RNA, 19 nt, Homo sapiens
  misc_RNA (1)...(19): siRNA sense strand
uggagaaguauaacaaugu

SEQ ID NO: 1874238 - RNA, 19 nt, Homo sapiens
  misc_RNA (1)...(19): siRNA sense strand
acaccuacaccaacaagga

SEQ ID NO: 1874239 - RNA, 19 nt, Homo sapiens
  misc_RNA (1)...(19): siRNA sense strand
uuugcaagaugguccagaa

SEQ ID NO: 1874240 - RNA, 19 nt, Homo sapiens
  misc_RNA (1)...(19): siRNA sense strand
cugagaccaucauugacaa

SEQ ID NO: 1874241 - RNA, 19 nt, Homo sapiens
  misc_RNA (1)...(19): siRNA sense strand
gcucuccccuggacaaguu

SEQ ID NO: 1874242 - RNA, 19 nt, Homo sapiens
  misc_RNA (1)...(19): siRNA sense strand
ucucuuauggcucugguuu

SEQ ID NO: 1874243 - RNA, 19 nt, Homo sapiens
  misc_RNA (1)...(19): siRNA sense strand
uggaagacaccuacaccaa

SEQ ID NO: 1874244 - RNA, 19 nt, Homo sapiens
  misc_RNA (1)...(19): siRNA sense strand
aauaguggaugggaagcuu

SEQ ID NO: 1874245 - RNA, 19 nt, Homo sapiens
  misc_RNA (1)...(19): siRNA sense strand
ucuguugacuccagugaag

SEQ ID NO: 1874246 - RNA, 19 nt, Homo sapiens
  misc_RNA (1)...(19): siRNA sense strand
ucaaaacagugcucaugga

SEQ ID NO: 1874247 - RNA, 19 nt, Homo sapiens
  misc_RNA (1)...(19): siRNA sense strand
gggaacccauauggagaau

SEQ ID NO: 1874248 - RNA, 19 nt, Homo sapiens
  misc_RNA (1)...(19): siRNA sense strand
caucagaccugccaaaacg

SEQ ID NO: 1874249 - RNA, 19 nt, Homo sapiens
  misc_RNA (1)...(19): siRNA sense strand
guacugccucccucuucaa

SEQ ID NO: 1874250 - RNA, 19 nt, Homo sapiens
  misc_RNA (1)...(19): siRNA sense strand
gcagcaucgccgaaaguau

SEQ ID NO: 1874251 - RNA, 19 nt, Homo sapiens
  misc_RNA (1)...(19): siRNA sense strand
ggugacacaaacagccuuu

SEQ ID NO: 1874252 - RNA, 19 nt, Homo sapiens
  misc_RNA (1)...(19): siRNA sense strand
ccacucugcccaagaacug

SEQ ID NO: 1874253 - RNA, 19 nt, Homo sapiens
  misc_RNA (1)...(19): siRNA sense strand
uggcucgccugauguucaa

SEQ ID NO: 1874254 - RNA, 19 nt, Homo sapiens
  misc_RNA (1)...(19): siRNA sense strand
gggcuucugcucaguccaa

SEQ ID NO: 1874255 - RNA, 19 nt, Homo sapiens
  misc_RNA (1)...(19): siRNA sense strand
caaacugaccuggagaagu

SEQ ID NO: 1874256 - RNA, 19 nt, Homo sapiens
  misc_RNA (1)...(19): siRNA sense strand
ggaagcaggaaaguauaca

SEQ ID NO: 1874257 - RNA, 19 nt, Homo sapiens
  misc_RNA (1)...(19): siRNA sense strand
ucaccgagacgcagguuaa

SEQ ID NO: 1874258 - RNA, 19 nt, Homo sapiens
  misc_RNA (1)...(19): siRNA sense strand
agacgcagguuaagaucug

SEQ ID NO: 1874259 - RNA, 19 nt, Homo sapiens
  misc_RNA (1)...(19): siRNA sense strand
ccggugcucuaccacgaaa

SEQ ID NO: 1874260 - RNA, 19 nt, Homo sapiens
  misc_RNA (1)...(19): siRNA sense strand
ccuccuuccucaucgagaa

SEQ ID NO: 1874261 - RNA, 19 nt, Homo sapiens
  misc_RNA (1)...(19): siRNA sense strand
ccgagacgcagguuaagau

SEQ ID NO: 1874262 - RNA, 19 nt, Homo sapiens
  misc_RNA (1)...(19): siRNA sense strand
gguaagaacuucagucaaa

SEQ ID NO: 1874263 - RNA, 19 nt, Homo sapiens
  misc_RNA (1)...(19): siRNA sense strand
caagaaagauccucgcuaa

SEQ ID NO: 1874264 - RNA, 19 nt, Homo sapiens
  misc_RNA (1)...(19): siRNA sense strand
gaaagucucaagccaaaua

SEQ ID NO: 1874265 - RNA, 19 nt, Homo sapiens
  misc_RNA (1)...(19): siRNA sense strand
ucagagaaccuucaaguua

SEQ ID NO: 1874266 - RNA, 19 nt, Homo sapiens
  misc_RNA (1)...(19): siRNA sense strand
cagagaaccuucaaguuaa

SEQ ID NO: 1874267 - RNA, 19 nt, Homo sapiens
  misc_RNA (1)...(19): siRNA sense strand
gggaagggcuuuagucaga

SEQ ID NO: 1874268 - RNA, 19 nt, Homo sapiens
  misc_RNA (1)...(19): siRNA sense strand
gagaaacccugugaccaua

SEQ ID NO: 1874269 - RNA, 19 nt, Homo sapiens
  misc_RNA (1)...(19): siRNA sense strand
gcucgaaccuucacauuca

SEQ ID NO: 1874270 - RNA, 19 nt, Homo sapiens
  misc_RNA (1)...(19): siRNA sense strand
gagagaagccuuaccaaug

SEQ ID NO: 1874271 - RNA, 19 nt, Homo sapiens
  misc_RNA (1)...(19): siRNA sense strand
caaagugguuguuucgaaa

SEQ ID NO: 1874272 - RNA, 19 nt, Homo sapiens
  misc_RNA (1)...(19): siRNA sense strand
gaagaaagcacugagagaa

SEQ ID NO: 1874273 - RNA, 19 nt, Homo sapiens
  misc_RNA (1)...(19): siRNA sense strand
gaaacauauuugccuuuga

SEQ ID NO: 1874274 - RNA, 19 nt, Homo sapiens
  misc_RNA (1)...(19): siRNA sense strand
gcagacgucucuuuguaau

SEQ ID NO: 1874275 - RNA, 19 nt, Homo sapiens
  misc_RNA (1)...(19): siRNA sense strand
aagcagacgucucuuugua

SEQ ID NO: 1874276 - RNA, 19 nt, Homo sapiens
  misc_RNA (1)...(19): siRNA sense strand
ucagugaaguucuguaaga

SEQ ID NO: 1874277 - RNA, 19 nt, Homo sapiens
  misc_RNA (1)...(19): siRNA sense strand
cagaugagaagccuuauaa

SEQ ID NO: 1874278 - RNA, 19 nt, Homo sapiens
  misc_RNA (1)...(19): siRNA sense strand
ugagaagccuuauaagugu

SEQ ID NO: 1874279 - RNA, 19 nt, Homo sapiens
  misc_RNA (1)...(19): siRNA sense strand
ucaaagugguuguuucgaa

SEQ ID NO: 1874280 - RNA, 19 nt, Homo sapiens
  misc_RNA (1)...(19): siRNA sense strand
cuacaaaugugagcaaugu

SEQ ID NO: 1874281 - RNA, 19 nt, Homo sapiens
  misc_RNA (1)...(19): siRNA sense strand
aaucacagguggucaguug

SEQ ID NO: 1874282 - RNA, 19 nt, Homo sapiens
  misc_RNA (1)...(19): siRNA sense strand
gcucaaaccugcacaucca

SEQ ID NO: 1874283 - RNA, 19 nt, Homo sapiens
  misc_RNA (1)...(19): siRNA sense strand
gaaacccugugaccauaau

SEQ ID NO: 1874284 - RNA, 19 nt, Homo sapiens
  misc_RNA (1)...(19): siRNA sense strand
gagagaggcccuacaagug

SEQ ID NO: 1874285 - RNA, 19 nt, Homo sapiens
  misc_RNA (1)...(19): siRNA sense strand
ggagagaggcccuacaagu

SEQ ID NO: 1874286 - RNA, 19 nt, Homo sapiens
  misc_RNA (1)...(19): siRNA sense strand
acacagaugagaagccuua

SEQ ID NO: 1874287 - RNA, 19 nt, Homo sapiens
  misc_RNA (1)...(19): siRNA sense strand
gaugagaagccuuauaagu

SEQ ID NO: 1874288 - RNA, 19 nt, Homo sapiens
  misc_RNA (1)...(19): siRNA sense strand
ggaagaaagcacugagaga

SEQ ID NO: 1874289 - RNA, 19 nt, Homo sapiens
  misc_RNA (1)...(19): siRNA sense strand
caagucugcucauccauca

SEQ ID NO: 1874290 - RNA, 19 nt, Homo sapiens
  misc_RNA (1)...(19): siRNA sense strand
ggagaaacccugugaccau

SEQ ID NO: 1874291 - RNA, 19 nt, Homo sapiens
  misc_RNA (1)...(19): siRNA sense strand
ugaaacauauuugccuuug

SEQ ID NO: 1874292 - RNA, 19 nt, Homo sapiens
  misc_RNA (1)...(19): siRNA sense strand
gaagggauuuagccagagu

SEQ ID NO: 1874293 - RNA, 19 nt, Homo sapiens
  misc_RNA (1)...(19): siRNA sense strand
gaucuucgcauccaucuca

SEQ ID NO: 1874294 - RNA, 19 nt, Homo sapiens
  misc_RNA (1)...(19): siRNA sense strand
ggagagaagccuuaccaau

SEQ ID NO: 1874295 - RNA, 19 nt, Homo sapiens
  misc_RNA (1)...(19): siRNA sense strand
ucagagagaccacacagaa

SEQ ID NO: 1874296 - RNA, 19 nt, Homo sapiens
  misc_RNA (1)...(19): siRNA sense strand
ggaagucaggauuguauug

SEQ ID NO: 1874297 - RNA, 19 nt, Homo sapiens
  misc_RNA (1)...(19): siRNA sense strand
cuacaaguguggugagugu

SEQ ID NO: 1874298 - RNA, 19 nt, Homo sapiens
  misc_RNA (1)...(19): siRNA sense strand
agagaaccuucaaguuaaa

SEQ ID NO: 1874299 - RNA, 19 nt, Homo sapiens
  misc_RNA (1)...(19): siRNA sense strand
ggagagaagcccuaugagu

SEQ ID NO: 1874300 - RNA, 19 nt, Homo sapiens
  misc_RNA (1)...(19): siRNA sense strand
ggagagaagcccuaugagu

SEQ ID NO: 1874301 - RNA, 19 nt, Homo sapiens
  misc_RNA (1)...(19): siRNA sense strand
gacuguaacugcaaagaca

SEQ ID NO: 1874302 - RNA, 19 nt, Homo sapiens
  misc_RNA (1)...(19): siRNA sense strand
gcuacuacuucaucagaga

SEQ ID NO: 1874303 - RNA, 19 nt, Homo sapiens
  misc_RNA (1)...(19): siRNA sense strand
cauaauaacugugggaaaa

SEQ ID NO: 1874304 - RNA, 19 nt, Homo sapiens
  misc_RNA (1)...(19): siRNA sense strand
gcucaagucugcucaucca

SEQ ID NO: 1874305 - RNA, 19 nt, Homo sapiens
  misc_RNA (1)...(19): siRNA sense strand
agacauucauggauggaaa

SEQ ID NO: 1874306 - RNA, 19 nt, Homo sapiens
  misc_RNA (1)...(19): siRNA sense strand
gagcuacuacuucaucaga

SEQ ID NO: 1874307 - RNA, 19 nt, Homo sapiens
  misc_RNA (1)...(19): siRNA sense strand
cgagucugcuuauccauca

SEQ ID NO: 1874308 - RNA, 19 nt, Homo sapiens
  misc_RNA (1)...(19): siRNA sense strand
ugugaugacucuucaaagu

SEQ ID NO: 1874309 - RNA, 19 nt, Homo sapiens
  misc_RNA (1)...(19): siRNA sense strand
agagaagccuuaccaaugc

SEQ ID NO: 1874310 - RNA, 19 nt, Homo sapiens
  misc_RNA (1)...(19): siRNA sense strand
aauccacacugcagagaaa

SEQ ID NO: 1874311 - RNA, 19 nt, Homo sapiens
  misc_RNA (1)...(19): siRNA sense strand
gaaagugaaacauauuugc

SEQ ID NO: 1874312 - RNA, 19 nt, Homo sapiens
  misc_RNA (1)...(19): siRNA sense strand
guaagaacuucagucaaag

SEQ ID NO: 1874313 - RNA, 19 nt, Homo sapiens
  misc_RNA (1)...(19): siRNA sense strand
gagccugaacuagauauuu

SEQ ID NO: 1874314 - RNA, 19 nt, Homo sapiens
  misc_RNA (1)...(19): siRNA sense strand
ccagcggguucacaagaaa

SEQ ID NO: 1874315 - RNA, 19 nt, Homo sapiens
  misc_RNA (1)...(19): siRNA sense strand
acacaggagagaagccuua

SEQ ID NO: 1874316 - RNA, 19 nt, Homo sapiens
  misc_RNA (1)...(19): siRNA sense strand
gcaagugugggaagggauu

SEQ ID NO: 1874317 - RNA, 19 nt, Homo sapiens
  misc_RNA (1)...(19): siRNA sense strand
ccaaauagacacacaagac

SEQ ID NO: 1874318 - RNA, 19 nt, Homo sapiens
  misc_RNA (1)...(19): siRNA sense strand
ggagagaagcccuaucacu

SEQ ID NO: 1874319 - RNA, 19 nt, Homo sapiens
  misc_RNA (1)...(19): siRNA sense strand
ucacagguggucaguugua

SEQ ID NO: 1874320 - RNA, 19 nt, Homo sapiens
  misc_RNA (1)...(19): siRNA sense strand
gaagucaggauuguauugu

SEQ ID NO: 1874321 - RNA, 19 nt, Homo sapiens
  misc_RNA (1)...(19): siRNA sense strand
agacgucucuuuguaaugg

SEQ ID NO: 1874322 - RNA, 19 nt, Homo sapiens
  misc_RNA (1)...(19): siRNA sense strand
uaaauggugaggcaacuug

SEQ ID NO: 1874323 - RNA, 19 nt, Homo sapiens
  misc_RNA (1)...(19): siRNA sense strand
aaacagggacagugugaug

SEQ ID NO: 1874324 - RNA, 19 nt, Homo sapiens
  misc_RNA (1)...(19): siRNA sense strand
gcuccaaacugcacaucca

SEQ ID NO: 1874325 - RNA, 19 nt, Homo sapiens
  misc_RNA (1)...(19): siRNA sense strand
gcucgagucugcuuaucca

SEQ ID NO: 1874326 - RNA, 19 nt, Homo sapiens
  misc_RNA (1)...(19): siRNA sense strand
gagagaccacacagaagaa

SEQ ID NO: 1874327 - RNA, 19 nt, Homo sapiens
  misc_RNA (1)...(19): siRNA sense strand
agucaggauuguauuguga

SEQ ID NO: 1874328 - RNA, 19 nt, Homo sapiens
  misc_RNA (1)...(19): siRNA sense strand
gagcucgaaccuucacauu

SEQ ID NO: 1874329 - RNA, 19 nt, Homo sapiens
  misc_RNA (1)...(19): siRNA sense strand
acacugcagagaaacaaua

SEQ ID NO: 1874330 - RNA, 19 nt, Homo sapiens
  misc_RNA (1)...(19): siRNA sense strand
uggaucccauugacuguaa

SEQ ID NO: 1874331 - RNA, 19 nt, Homo sapiens
  misc_RNA (1)...(19): siRNA sense strand
agagagaccacacagaaga

SEQ ID NO: 1874332 - RNA, 19 nt, Homo sapiens
  misc_RNA (1)...(19): siRNA sense strand
ucgaaaacauugaaaguga

SEQ ID NO: 1874333 - RNA, 19 nt, Homo sapiens
  misc_RNA (1)...(19): siRNA sense strand
aagaaagcacugagagaaa

SEQ ID NO: 1874334 - RNA, 19 nt, Homo sapiens
  misc_RNA (1)...(19): siRNA sense strand
caaauagacacacaagacu

SEQ ID NO: 1874335 - RNA, 19 nt, Homo sapiens
  misc_RNA (1)...(19): siRNA sense strand
ggggaaaguuguucagaga

SEQ ID NO: 1874336 - RNA, 19 nt, Homo sapiens
  misc_RNA (1)...(19): siRNA sense strand
caggaaagcagacgucucu

SEQ ID NO: 1874337 - RNA, 19 nt, Homo sapiens
  misc_RNA (1)...(19): siRNA sense strand
agccagagcucggaucuuc

SEQ ID NO: 1874338 - RNA, 19 nt, Homo sapiens
  misc_RNA (1)...(19): siRNA sense strand
ccagaaacagggacagugu

SEQ ID NO: 1874339 - RNA, 19 nt, Homo sapiens
  misc_RNA (1)...(19): siRNA sense strand
cagaggagaaacccuguga

SEQ ID NO: 1874340 - RNA, 19 nt, Homo sapiens
  misc_RNA (1)...(19): siRNA sense strand
ggauuuagccagaguucca

SEQ ID NO: 1874341 - RNA, 19 nt, Homo sapiens
  misc_RNA (1)...(19): siRNA sense strand
agagaagcccuaucacugu

SEQ ID NO: 1874342 - RNA, 19 nt, Homo sapiens
  misc_RNA (1)...(19): siRNA sense strand
caggagagaggcccuacaa

SEQ ID NO: 1874343 - RNA, 19 nt, Homo sapiens
  misc_RNA (1)...(19): siRNA sense strand
agagaagcccuaugagugu

SEQ ID NO: 1874344 - RNA, 19 nt, Homo sapiens
  misc_RNA (1)...(19): siRNA sense strand
caagccaaauagacacaca

SEQ ID NO: 1874345 - RNA, 19 nt, Homo sapiens
  misc_RNA (1)...(19): siRNA sense strand
guuccaaacuccucaucca

SEQ ID NO: 1874346 - RNA, 19 nt, Homo sapiens
  misc_RNA (1)...(19): siRNA sense strand
agccugaacuagauauuuc

SEQ ID NO: 1874347 - RNA, 19 nt, Homo sapiens
  misc_RNA (1)...(19): siRNA sense strand
ugugaggagugugguauga

SEQ ID NO: 1874348 - RNA, 19 nt, Homo sapiens
  misc_RNA (1)...(19): siRNA sense strand
augagaagccuuauaagug

SEQ ID NO: 1874349 - RNA, 19 nt, Homo sapiens
  misc_RNA (1)...(19): siRNA sense strand
agaaagcacugagagaaaa

SEQ ID NO: 1874350 - RNA, 19 nt, Homo sapiens
  misc_RNA (1)...(19): siRNA sense strand
agaaacagggacaguguga

SEQ ID NO: 1874351 - RNA, 19 nt, Homo sapiens
  misc_RNA (1)...(19): siRNA sense strand
gcacauccaccagcgagau

SEQ ID NO: 1874352 - RNA, 19 nt, Homo sapiens
  misc_RNA (1)...(19): siRNA sense strand
gggaaaguuguucagagaa

SEQ ID NO: 1874353 - RNA, 19 nt, Homo sapiens
  misc_RNA (1)...(19): siRNA sense strand
cuggagagaagcccuauga

SEQ ID NO: 1874354 - RNA, 19 nt, Homo sapiens
  misc_RNA (1)...(19): siRNA sense strand
agagaggcccuacaagugu

SEQ ID NO: 1874355 - RNA, 19 nt, Homo sapiens
  misc_RNA (1)...(19): siRNA sense strand
gugaaacauauuugccuuu

SEQ ID NO: 1874356 - RNA, 19 nt, Homo sapiens
  misc_RNA (1)...(19): siRNA sense strand
cuggagagaagcccuauga

SEQ ID NO: 1874357 - RNA, 19 nt, Homo sapiens
  misc_RNA (1)...(19): siRNA sense strand
gaaaucacagguggucagu

SEQ ID NO: 1874358 - RNA, 19 nt, Homo sapiens
  misc_RNA (1)...(19): siRNA sense strand
cgaaaacauugaaagugaa

SEQ ID NO: 1874359 - RNA, 19 nt, Homo sapiens
  misc_RNA (1)...(19): siRNA sense strand
ggagcucgagucugcuuau

SEQ ID NO: 1874360 - RNA, 19 nt, Homo sapiens
  misc_RNA (1)...(19): siRNA sense strand
guacaauuacuggaaguca

SEQ ID NO: 1874361 - RNA, 19 nt, Homo sapiens
  misc_RNA (1)...(19): siRNA sense strand
gggacagugugaugacucu

SEQ ID NO: 1874362 - RNA, 19 nt, Homo sapiens
  misc_RNA (1)...(19): siRNA sense strand
ugaaaucgauggaacuaua

SEQ ID NO: 1874363 - RNA, 19 nt, Homo sapiens
  misc_RNA (1)...(19): siRNA sense strand
gcaaagugaucauuguuga

SEQ ID NO: 1874364 - RNA, 19 nt, Homo sapiens
  misc_RNA (1)...(19): siRNA sense strand
aaacauuggugcacaguuc

SEQ ID NO: 1874365 - RNA, 19 nt, Homo sapiens
  misc_RNA (1)...(19): siRNA sense strand
cguuuaagccuauuaguaa

SEQ ID NO: 1874366 - RNA, 19 nt, Homo sapiens
  misc_RNA (1)...(19): siRNA sense strand
ugacggugcuugacuaugg

SEQ ID NO: 1874367 - RNA, 19 nt, Homo sapiens
  misc_RNA (1)...(19): siRNA sense strand
gcuugacuauggaaagaaa

SEQ ID NO: 1874368 - RNA, 19 nt, Homo sapiens
  misc_RNA (1)...(19): siRNA sense strand
gagcaaagugaucauuguu

SEQ ID NO: 1874369 - RNA, 19 nt, Homo sapiens
  misc_RNA (1)...(19): siRNA sense strand
caucuuccauccugagaau

SEQ ID NO: 1874370 - RNA, 19 nt, Homo sapiens
  misc_RNA (1)...(19): siRNA sense strand
ccagugcaacgucagcuua

SEQ ID NO: 1874371 - RNA, 19 nt, Homo sapiens
  misc_RNA (1)...(19): siRNA sense strand
ugagcaaagugaucauugu

SEQ ID NO: 1874372 - RNA, 19 nt, Homo sapiens
  misc_RNA (1)...(19): siRNA sense strand
gagaauggugggcuucaga

SEQ ID NO: 1874373 - RNA, 19 nt, Homo sapiens
  misc_RNA (1)...(19): siRNA sense strand
gugcuugacuauggaaaga

SEQ ID NO: 1874374 - RNA, 19 nt, Homo sapiens
  misc_RNA (1)...(19): siRNA sense strand
caacgucagcuuaaagaag

SEQ ID NO: 1874375 - RNA, 19 nt, Homo sapiens
  misc_RNA (1)...(19): siRNA sense strand
gagcugagcaaagugauca

SEQ ID NO: 1874376 - RNA, 19 nt, Homo sapiens
  misc_RNA (1)...(19): siRNA sense strand
ggcgggagcugagcaaagu

SEQ ID NO: 1874377 - RNA, 19 nt, Homo sapiens
  misc_RNA (1)...(19): siRNA sense strand
gaaugugugcucuuuacug

SEQ ID NO: 1874378 - RNA, 19 nt, Homo sapiens
  misc_RNA (1)...(19): siRNA sense strand
acaguucguuuaagccuau

SEQ ID NO: 1874379 - RNA, 19 nt, Homo sapiens
  misc_RNA (1)...(19): siRNA sense strand
ccagcuaaguaccuucuuc

SEQ ID NO: 1874380 - RNA, 19 nt, Homo sapiens
  misc_RNA (1)...(19): siRNA sense strand
gaaagaaauguguggucau

SEQ ID NO: 1874381 - RNA, 19 nt, Homo sapiens
  misc_RNA (1)...(19): siRNA sense strand
gaaaucgauggaacuauac

SEQ ID NO: 1874382 - RNA, 19 nt, Homo sapiens
  misc_RNA (1)...(19): siRNA sense strand
gaaacauuggugcacaguu

SEQ ID NO: 1874383 - RNA, 19 nt, Homo sapiens
  misc_RNA (1)...(19): siRNA sense strand
gugcacaguucguuuaagc

SEQ ID NO: 1874384 - RNA, 19 nt, Homo sapiens
  misc_RNA (1)...(19): siRNA sense strand
agaagccaccagcuaagua

SEQ ID NO: 1874385 - RNA, 19 nt, Homo sapiens
  misc_RNA (1)...(19): siRNA sense strand
gcaacgucagcuuaaagaa

SEQ ID NO: 1874386 - RNA, 19 nt, Homo sapiens
  misc_RNA (1)...(19): siRNA sense strand
uucagagaaucauguguuu

SEQ ID NO: 1874387 - RNA, 19 nt, Homo sapiens
  misc_RNA (1)...(19): siRNA sense strand
gaagccaccagcuaaguac

SEQ ID NO: 1874388 - RNA, 19 nt, Homo sapiens
  misc_RNA (1)...(19): siRNA sense strand
ucguuuaagccuauuagua

SEQ ID NO: 1874389 - RNA, 19 nt, Homo sapiens
  misc_RNA (1)...(19): siRNA sense strand
gcagcauccuuagcuccuu

SEQ ID NO: 1874390 - RNA, 19 nt, Homo sapiens
  misc_RNA (1)...(19): siRNA sense strand
guugaaaucgauggaacua

SEQ ID NO: 1874391 - RNA, 19 nt, Homo sapiens
  misc_RNA (1)...(19): siRNA sense strand
gacggugcuugacuaugga

SEQ ID NO: 1874392 - RNA, 19 nt, Homo sapiens
  misc_RNA (1)...(19): siRNA sense strand
cuucagagaaucauguguu

SEQ ID NO: 1874393 - RNA, 19 nt, Homo sapiens
  misc_RNA (1)...(19): siRNA sense strand
cccuguggcugaccuccua

SEQ ID NO: 1874394 - RNA, 19 nt, Homo sapiens
  misc_RNA (1)...(19): siRNA sense strand
gugcugaagcggccacaug

SEQ ID NO: 1874395 - RNA, 19 nt, Homo sapiens
  misc_RNA (1)...(19): siRNA sense strand
ggagaauggugggcuucag

SEQ ID NO: 1874396 - RNA, 19 nt, Homo sapiens
  misc_RNA (1)...(19): siRNA sense strand
uugaaugugugcucuuuac

SEQ ID NO: 1874397 - RNA, 19 nt, Homo sapiens
  misc_RNA (1)...(19): siRNA sense strand
aaagugaucauuguugaca

SEQ ID NO: 1874398 - RNA, 19 nt, Homo sapiens
  misc_RNA (1)...(19): siRNA sense strand
acaauuccccugccucaua

SEQ ID NO: 1874399 - RNA, 19 nt, Homo sapiens
  misc_RNA (1)...(19): siRNA sense strand
gcugagcaaagugaucauu

SEQ ID NO: 1874400 - RNA, 19 nt, Homo sapiens
  misc_RNA (1)...(19): siRNA sense strand
ggaaggagauaaacugaaa

SEQ ID NO: 1874401 - RNA, 19 nt, Homo sapiens
  misc_RNA (1)...(19): siRNA sense strand
caaacaagcuucaggaaau

SEQ ID NO: 1874402 - RNA, 19 nt, Homo sapiens
  misc_RNA (1)...(19): siRNA sense strand
gaacgcaacagaaucauuu

SEQ ID NO: 1874403 - RNA, 19 nt, Homo sapiens
  misc_RNA (1)...(19): siRNA sense strand
ugaagaaguuuccauagaa

SEQ ID NO: 1874404 - RNA, 19 nt, Homo sapiens
  misc_RNA (1)...(19): siRNA sense strand
gcaacagaaucauuuguau

SEQ ID NO: 1874405 - RNA, 19 nt, Homo sapiens
  misc_RNA (1)...(19): siRNA sense strand
ggaauaugauagucuccua

SEQ ID NO: 1874406 - RNA, 19 nt, Homo sapiens
  misc_RNA (1)...(19): siRNA sense strand
ggagguauauccuuucaca

SEQ ID NO: 1874407 - RNA, 19 nt, Homo sapiens
  misc_RNA (1)...(19): siRNA sense strand
aaacaagcuucaggaaaua

SEQ ID NO: 1874408 - RNA, 19 nt, Homo sapiens
  misc_RNA (1)...(19): siRNA sense strand
gaccagcccuaucaagaaa

SEQ ID NO: 1874409 - RNA, 19 nt, Homo sapiens
  misc_RNA (1)...(19): siRNA sense strand
ggagauaaacugaaacuca

SEQ ID NO: 1874410 - RNA, 19 nt, Homo sapiens
  misc_RNA (1)...(19): siRNA sense strand
gagagaagaguaugacaaa

SEQ ID NO: 1874411 - RNA, 19 nt, Homo sapiens
  misc_RNA (1)...(19): siRNA sense strand
gaagaaguuuccauagaag

SEQ ID NO: 1874412 - RNA, 19 nt, Homo sapiens
  misc_RNA (1)...(19): siRNA sense strand
aaaggaaacucugaagauu

SEQ ID NO: 1874413 - RNA, 19 nt, Homo sapiens
  misc_RNA (1)...(19): siRNA sense strand
gaagaucauugccauagca

SEQ ID NO: 1874414 - RNA, 19 nt, Homo sapiens
  misc_RNA (1)...(19): siRNA sense strand
ucagguaacucccagaaga

SEQ ID NO: 1874415 - RNA, 19 nt, Homo sapiens
  misc_RNA (1)...(19): siRNA sense strand
gacugaaccugaagaaguu

SEQ ID NO: 1874416 - RNA, 19 nt, Homo sapiens
  misc_RNA (1)...(19): siRNA sense strand
ugaagaaucuacuguaucu

SEQ ID NO: 1874417 - RNA, 19 nt, Homo sapiens
  misc_RNA (1)...(19): siRNA sense strand
caagaaagaggaagaagga

SEQ ID NO: 1874418 - RNA, 19 nt, Homo sapiens
  misc_RNA (1)...(19): siRNA sense strand
gaguugagaucuguaauuc

SEQ ID NO: 1874419 - RNA, 19 nt, Homo sapiens
  misc_RNA (1)...(19): siRNA sense strand
ccaaaaggauugauuagaa

SEQ ID NO: 1874420 - RNA, 19 nt, Homo sapiens
  misc_RNA (1)...(19): siRNA sense strand
caagaaagacauacucaau

SEQ ID NO: 1874421 - RNA, 19 nt, Homo sapiens
  misc_RNA (1)...(19): siRNA sense strand
ccaagcagcaguuucuuaa

SEQ ID NO: 1874422 - RNA, 19 nt, Homo sapiens
  misc_RNA (1)...(19): siRNA sense strand
ggaccagcccuaucaagaa

SEQ ID NO: 1874423 - RNA, 19 nt, Homo sapiens
  misc_RNA (1)...(19): siRNA sense strand
gaucuguaauucauaguca

SEQ ID NO: 1874424 - RNA, 19 nt, Homo sapiens
  misc_RNA (1)...(19): siRNA sense strand
gaaacucugaagauugaua

SEQ ID NO: 1874425 - RNA, 19 nt, Homo sapiens
  misc_RNA (1)...(19): siRNA sense strand
aggaaacucugaagauuga

SEQ ID NO: 1874426 - RNA, 19 nt, Homo sapiens
  misc_RNA (1)...(19): siRNA sense strand
caaaggaaacucugaagau

SEQ ID NO: 1874427 - RNA, 19 nt, Homo sapiens
  misc_RNA (1)...(19): siRNA sense strand
gagcaacgauuuaaaacuu

SEQ ID NO: 1874428 - RNA, 19 nt, Homo sapiens
  misc_RNA (1)...(19): siRNA sense strand
ggaaacuucaccagacuuu

SEQ ID NO: 1874429 - RNA, 19 nt, Homo sapiens
  misc_RNA (1)...(19): siRNA sense strand
gcaaaggaaacucugaaga

SEQ ID NO: 1874430 - RNA, 19 nt, Homo sapiens
  misc_RNA (1)...(19): siRNA sense strand
guauauccuuucacacuug

SEQ ID NO: 1874431 - RNA, 19 nt, Homo sapiens
  misc_RNA (1)...(19): siRNA sense strand
guugagaucuguaauucau

SEQ ID NO: 1874432 - RNA, 19 nt, Homo sapiens
  misc_RNA (1)...(19): siRNA sense strand
gaaagaggaagaaggaagu

SEQ ID NO: 1874433 - RNA, 19 nt, Homo sapiens
  misc_RNA (1)...(19): siRNA sense strand
ggaguugagaucuguaauu

SEQ ID NO: 1874434 - RNA, 19 nt, Homo sapiens
  misc_RNA (1)...(19): siRNA sense strand
aaccaagacugaagacuga

SEQ ID NO: 1874435 - RNA, 19 nt, Homo sapiens
  misc_RNA (1)...(19): siRNA sense strand
ggaugcagauacugaagga

SEQ ID NO: 1874436 - RNA, 19 nt, Homo sapiens
  misc_RNA (1)...(19): siRNA sense strand
aaacaaacccgagaaacaa

SEQ ID NO: 1874437 - RNA, 19 nt, Homo sapiens
  misc_RNA (1)...(19): siRNA sense strand
aaggagaaauucaauggaa

SEQ ID NO: 1874438 - RNA, 19 nt, Homo sapiens
  misc_RNA (1)...(19): siRNA sense strand
gacacaaucuccaaaauga

SEQ ID NO: 1874439 - RNA, 19 nt, Homo sapiens
  misc_RNA (1)...(19): siRNA sense strand
agacacaguucuuccaugu

SEQ ID NO: 1874440 - RNA, 19 nt, Homo sapiens
  misc_RNA (1)...(19): siRNA sense strand
gguauauccuuucacacuu

SEQ ID NO: 1874441 - RNA, 19 nt, Homo sapiens
  misc_RNA (1)...(19): siRNA sense strand
cugaagaaguuuccauaga

SEQ ID NO: 1874442 - RNA, 19 nt, Homo sapiens
  misc_RNA (1)...(19): siRNA sense strand
caaugaagaaucuacugua

SEQ ID NO: 1874443 - RNA, 19 nt, Homo sapiens
  misc_RNA (1)...(19): siRNA sense strand
ucaaucagcuuugcucaca

SEQ ID NO: 1874444 - RNA, 19 nt, Homo sapiens
  misc_RNA (1)...(19): siRNA sense strand
gaccacaaucuacgaaauu

SEQ ID NO: 1874445 - RNA, 19 nt, Homo sapiens
  misc_RNA (1)...(19): siRNA sense strand
agagugaccucaaagaagu

SEQ ID NO: 1874446 - RNA, 19 nt, Homo sapiens
  misc_RNA (1)...(19): siRNA sense strand
gaagacugaaccugaagaa

SEQ ID NO: 1874447 - RNA, 19 nt, Homo sapiens
  misc_RNA (1)...(19): siRNA sense strand
gagcaaaggaaacucugaa

SEQ ID NO: 1874448 - RNA, 19 nt, Homo sapiens
  misc_RNA (1)...(19): siRNA sense strand
caacugagaaugaagucuu

SEQ ID NO: 1874449 - RNA, 19 nt, Homo sapiens
  misc_RNA (1)...(19): siRNA sense strand
gaagaccacaaucuacgaa

SEQ ID NO: 1874450 - RNA, 19 nt, Homo sapiens
  misc_RNA (1)...(19): siRNA sense strand
ucuacgaaauucaggauga

SEQ ID NO: 1874451 - RNA, 19 nt, Homo sapiens
  misc_RNA (1)...(19): siRNA sense strand
ugagaucuguaauucauag

SEQ ID NO: 1874452 - RNA, 19 nt, Homo sapiens
  misc_RNA (1)...(19): siRNA sense strand
ccaaagagcagaagaaaau

SEQ ID NO: 1874453 - RNA, 19 nt, Homo sapiens
  misc_RNA (1)...(19): siRNA sense strand
gaggaaggagauaaacuga

SEQ ID NO: 1874454 - RNA, 19 nt, Homo sapiens
  misc_RNA (1)...(19): siRNA sense strand
gaaggagaaauucaaugga

SEQ ID NO: 1874455 - RNA, 19 nt, Homo sapiens
  misc_RNA (1)...(19): siRNA sense strand
uaaaucagaagaccacaau

SEQ ID NO: 1874456 - RNA, 19 nt, Homo sapiens
  misc_RNA (1)...(19): siRNA sense strand
agaaaaggcuggacccaaa

SEQ ID NO: 1874457 - RNA, 19 nt, Homo sapiens
  misc_RNA (1)...(19): siRNA sense strand
gaaacauggagaucccaaa

SEQ ID NO: 1874458 - RNA, 19 nt, Homo sapiens
  misc_RNA (1)...(19): siRNA sense strand
caagaaaagugaagacaca

SEQ ID NO: 1874459 - RNA, 19 nt, Homo sapiens
  misc_RNA (1)...(19): siRNA sense strand
guaacucccagaagaaaug

SEQ ID NO: 1874460 - RNA, 19 nt, Homo sapiens
  misc_RNA (1)...(19): siRNA sense strand
ccagagugaccucaaagaa

SEQ ID NO: 1874461 - RNA, 19 nt, Homo sapiens
  misc_RNA (1)...(19): siRNA sense strand
cgaaaacaguggccaaaug

SEQ ID NO: 1874462 - RNA, 19 nt, Homo sapiens
  misc_RNA (1)...(19): siRNA sense strand
gcugaacgcaacagaauca

SEQ ID NO: 1874463 - RNA, 19 nt, Homo sapiens
  misc_RNA (1)...(19): siRNA sense strand
caacagagcaaaggaaacu

SEQ ID NO: 1874464 - RNA, 19 nt, Homo sapiens
  misc_RNA (1)...(19): siRNA sense strand
agaccuggcugaaacucuu

SEQ ID NO: 1874465 - RNA, 19 nt, Homo sapiens
  misc_RNA (1)...(19): siRNA sense strand
cagcguaacuccuaaaauc

SEQ ID NO: 1874466 - RNA, 19 nt, Homo sapiens
  misc_RNA (1)...(19): siRNA sense strand
acaaacaagcuucaggaaa

SEQ ID NO: 1874467 - RNA, 19 nt, Homo sapiens
  misc_RNA (1)...(19): siRNA sense strand
aagaaucuacuguaucuga

SEQ ID NO: 1874468 - RNA, 19 nt, Homo sapiens
  misc_RNA (1)...(19): siRNA sense strand
ggaaagaaaaucaucauca

SEQ ID NO: 1874469 - RNA, 19 nt, Homo sapiens
  misc_RNA (1)...(19): siRNA sense strand
ggagaaauucaauggaaag

SEQ ID NO: 1874470 - RNA, 19 nt, Homo sapiens
  misc_RNA (1)...(19): siRNA sense strand
aaacaguggccaaauguca

SEQ ID NO: 1874471 - RNA, 19 nt, Homo sapiens
  misc_RNA (1)...(19): siRNA sense strand
gaacagcgucagcuuccau

SEQ ID NO: 1874472 - RNA, 19 nt, Homo sapiens
  misc_RNA (1)...(19): siRNA sense strand
agaaagacauacucaaucc

SEQ ID NO: 1874473 - RNA, 19 nt, Homo sapiens
  misc_RNA (1)...(19): siRNA sense strand
ggacgacugaacacaauca

SEQ ID NO: 1874474 - RNA, 19 nt, Homo sapiens
  misc_RNA (1)...(19): siRNA sense strand
uguuugagguacauaagaa

SEQ ID NO: 1874475 - RNA, 19 nt, Homo sapiens
  misc_RNA (1)...(19): siRNA sense strand
uuacugagcaacgauuuaa

SEQ ID NO: 1874476 - RNA, 19 nt, Homo sapiens
  misc_RNA (1)...(19): siRNA sense strand
agacugaaccugaagaagu

SEQ ID NO: 1874477 - RNA, 19 nt, Homo sapiens
  misc_RNA (1)...(19): siRNA sense strand
gaaggaagggagucauuuu

SEQ ID NO: 1874478 - RNA, 19 nt, Homo sapiens
  misc_RNA (1)...(19): siRNA sense strand
uuagaaugguuaaguccuu

SEQ ID NO: 1874479 - RNA, 19 nt, Homo sapiens
  misc_RNA (1)...(19): siRNA sense strand
gaaaacaguggccaaaugu

SEQ ID NO: 1874480 - RNA, 19 nt, Homo sapiens
  misc_RNA (1)...(19): siRNA sense strand
gcccaaagagcagaagaaa

SEQ ID NO: 1874481 - RNA, 19 nt, Homo sapiens
  misc_RNA (1)...(19): siRNA sense strand
aggagaaauucaauggaaa

SEQ ID NO: 1874482 - RNA, 19 nt, Homo sapiens
  misc_RNA (1)...(19): siRNA sense strand
agaggucaaugaagaaucu

SEQ ID NO: 1874483 - RNA, 19 nt, Homo sapiens
  misc_RNA (1)...(19): siRNA sense strand
ccagcccuaucaagaaaga

SEQ ID NO: 1874484 - RNA, 19 nt, Homo sapiens
  misc_RNA (1)...(19): siRNA sense strand
auauugaccuaaaggagaa

SEQ ID NO: 1874485 - RNA, 19 nt, Homo sapiens
  misc_RNA (1)...(19): siRNA sense strand
aagaagugauggugcugaa

SEQ ID NO: 1874486 - RNA, 19 nt, Homo sapiens
  misc_RNA (1)...(19): siRNA sense strand
gcaguuucuuaaccacguu

SEQ ID NO: 1874487 - RNA, 19 nt, Homo sapiens
  misc_RNA (1)...(19): siRNA sense strand
agaccacaaucuacgaaau

SEQ ID NO: 1874488 - RNA, 19 nt, Homo sapiens
  misc_RNA (1)...(19): siRNA sense strand
agaaucuacuguaucugaa

SEQ ID NO: 1874489 - RNA, 19 nt, Homo sapiens
  misc_RNA (1)...(19): siRNA sense strand
ggccaaaugucagguaacu

SEQ ID NO: 1874490 - RNA, 19 nt, Homo sapiens
  misc_RNA (1)...(19): siRNA sense strand
caacaccaagcagcaguuu

SEQ ID NO: 1874491 - RNA, 19 nt, Homo sapiens
  misc_RNA (1)...(19): siRNA sense strand
ugaaggaagggagucauuu

SEQ ID NO: 1874492 - RNA, 19 nt, Homo sapiens
  misc_RNA (1)...(19): siRNA sense strand
gaagacacaaucuccaaaa

SEQ ID NO: 1874493 - RNA, 19 nt, Homo sapiens
  misc_RNA (1)...(19): siRNA sense strand
ccucagaugccaccaacaa

SEQ ID NO: 1874494 - RNA, 19 nt, Homo sapiens
  misc_RNA (1)...(19): siRNA sense strand
uccuagaggucaaugaaga

SEQ ID NO: 1874495 - RNA, 19 nt, Homo sapiens
  misc_RNA (1)...(19): siRNA sense strand
caaacccgagaaacaauga

SEQ ID NO: 1874496 - RNA, 19 nt, Homo sapiens
  misc_RNA (1)...(19): siRNA sense strand
cgacugaacacaaucaacu

SEQ ID NO: 1874497 - RNA, 19 nt, Homo sapiens
  misc_RNA (1)...(19): siRNA sense strand
aaagaagaucauugccaua

SEQ ID NO: 1874498 - RNA, 19 nt, Homo sapiens
  misc_RNA (1)...(19): siRNA sense strand
cgcaacagaaucauuugua

SEQ ID NO: 1874499 - RNA, 19 nt, Homo sapiens
  misc_RNA (1)...(19): siRNA sense strand
acugaagacugaaccugaa

SEQ ID NO: 1874500 - RNA, 19 nt, Homo sapiens
  misc_RNA (1)...(19): siRNA sense strand
caacuggacucuccggauu

SEQ ID NO: 1874501 - RNA, 19 nt, Homo sapiens
  misc_RNA (1)...(19): siRNA sense strand
caucagcagugaccagugu

SEQ ID NO: 1874502 - RNA, 19 nt, Homo sapiens
  misc_RNA (1)...(19): siRNA sense strand
ggccaggauugcuacaguu

SEQ ID NO: 1874503 - RNA, 19 nt, Homo sapiens
  misc_RNA (1)...(19): siRNA sense strand
caggauugcuacaguugug

SEQ ID NO: 1874504 - RNA, 19 nt, Homo sapiens
  misc_RNA (1)...(19): siRNA sense strand
ccucugcucucaccucauc

SEQ ID NO: 1874505 - RNA, 19 nt, Homo sapiens
  misc_RNA (1)...(19): siRNA sense strand
ugaccaguguggccaaagu

SEQ ID NO: 1874506 - RNA, 19 nt, Homo sapiens
  misc_RNA (1)...(19): siRNA sense strand
cuccauagcagccaagaug

SEQ ID NO: 1874507 - RNA, 19 nt, Homo sapiens
  misc_RNA (1)...(19): siRNA sense strand
cauagcagccaagaugaug

SEQ ID NO: 1874508 - RNA, 19 nt, Homo sapiens
  misc_RNA (1)...(19): siRNA sense strand
gccaggauugcuacaguug

SEQ ID NO: 1874509 - RNA, 19 nt, Homo sapiens
  misc_RNA (1)...(19): siRNA sense strand
cggcugucauugcgagguu

SEQ ID NO: 1874510 - RNA, 19 nt, Homo sapiens
  misc_RNA (1)...(19): siRNA sense strand
aaagagaucuacucggaua

SEQ ID NO: 1874511 - RNA, 19 nt, Homo sapiens
  misc_RNA (1)...(19): siRNA sense strand
gaacuggcuucgggaauuu

SEQ ID NO: 1874512 - RNA, 19 nt, Homo sapiens
  misc_RNA (1)...(19): siRNA sense strand
gugaugcgaugaaagaaua

SEQ ID NO: 1874513 - RNA, 19 nt, Homo sapiens
  misc_RNA (1)...(19): siRNA sense strand
uaacagggcucgagucuac

SEQ ID NO: 1874514 - RNA, 19 nt, Homo sapiens
  misc_RNA (1)...(19): siRNA sense strand
gcaccgcgcucuuggaguu

SEQ ID NO: 1874515 - RNA, 19 nt, Homo sapiens
  misc_RNA (1)...(19): siRNA sense strand
cgagaagguuuccuacuuu

SEQ ID NO: 1874516 - RNA, 19 nt, Homo sapiens
  misc_RNA (1)...(19): siRNA sense strand
gaacuauugucgagugaug

SEQ ID NO: 1874517 - RNA, 19 nt, Homo sapiens
  misc_RNA (1)...(19): siRNA sense strand
gaagguuuccuacuuugua

SEQ ID NO: 1874518 - RNA, 19 nt, Homo sapiens
  misc_RNA (1)...(19): siRNA sense strand
gaucuacucggauaccuua

SEQ ID NO: 1874519 - RNA, 19 nt, Homo sapiens
  misc_RNA (1)...(19): siRNA sense strand
ggaguugucugucuuuaag

SEQ ID NO: 1874520 - RNA, 19 nt, Homo sapiens
  misc_RNA (1)...(19): siRNA sense strand
gagaagguuuccuacuuug

SEQ ID NO: 1874521 - RNA, 19 nt, Homo sapiens
  misc_RNA (1)...(19): siRNA sense strand
ggacaaguucgucaaagaa

SEQ ID NO: 1874522 - RNA, 19 nt, Homo sapiens
  misc_RNA (1)...(19): siRNA sense strand
ggaagguuaugcuccaguu

SEQ ID NO: 1874523 - RNA, 19 nt, Homo sapiens
  misc_RNA (1)...(19): siRNA sense strand
gcuaagaaguauagaaagg

SEQ ID NO: 1874524 - RNA, 19 nt, Homo sapiens
  misc_RNA (1)...(19): siRNA sense strand
gacaacgaccggaagguua

SEQ ID NO: 1874525 - RNA, 19 nt, Homo sapiens
  misc_RNA (1)...(19): siRNA sense strand
cagaaaaccugcagaagaa

SEQ ID NO: 1874526 - RNA, 19 nt, Homo sapiens
  misc_RNA (1)...(19): siRNA sense strand
aaacaagcccuuccgugua

SEQ ID NO: 1874527 - RNA, 19 nt, Homo sapiens
  misc_RNA (1)...(19): siRNA sense strand
gcacgcccaugcuggagaa

SEQ ID NO: 1874528 - RNA, 19 nt, Homo sapiens
  misc_RNA (1)...(19): siRNA sense strand
gagugcaaauggucaagaa

SEQ ID NO: 1874529 - RNA, 19 nt, Homo sapiens
  misc_RNA (1)...(19): siRNA sense strand
caguuugacuuuaaagcua

SEQ ID NO: 1874530 - RNA, 19 nt, Homo sapiens
  misc_RNA (1)...(19): siRNA sense strand
ucgagaagguuuccuacuu

SEQ ID NO: 1874531 - RNA, 19 nt, Homo sapiens
  misc_RNA (1)...(19): siRNA sense strand
gcacuucacggcacuagga

SEQ ID NO: 1874532 - RNA, 19 nt, Homo sapiens
  misc_RNA (1)...(19): siRNA sense strand
gaagguuaugcuccaguua

SEQ ID NO: 1874533 - RNA, 19 nt, Homo sapiens
  misc_RNA (1)...(19): siRNA sense strand
aaaggucgcuggcaaagag

SEQ ID NO: 1874534 - RNA, 19 nt, Homo sapiens
  misc_RNA (1)...(19): siRNA sense strand
ggacaacgaccggaagguu

SEQ ID NO: 1874535 - RNA, 19 nt, Homo sapiens
  misc_RNA (1)...(19): siRNA sense strand
ccaaugaaguggugaagcu

SEQ ID NO: 1874536 - RNA, 19 nt, Homo sapiens
  misc_RNA (1)...(19): siRNA sense strand
cgagugaugcgaugaaaga

SEQ ID NO: 1874537 - RNA, 19 nt, Homo sapiens
  misc_RNA (1)...(19): siRNA sense strand
cuaggaagcuuuuauuuuc

SEQ ID NO: 1874538 - RNA, 19 nt, Homo sapiens
  misc_RNA (1)...(19): siRNA sense strand
cggacgagguggugcauug

SEQ ID NO: 1874539 - RNA, 19 nt, Homo sapiens
  misc_RNA (1)...(19): siRNA sense strand
agaacuggcuucgggaauu

SEQ ID NO: 1874540 - RNA, 19 nt, Homo sapiens
  misc_RNA (1)...(19): siRNA sense strand
gcuacgugcuggacagaau

SEQ ID NO: 1874541 - RNA, 19 nt, Homo sapiens
  misc_RNA (1)...(19): siRNA sense strand
gaaacucuucgacuacuuc

SEQ ID NO: 1874542 - RNA, 19 nt, Homo sapiens
  misc_RNA (1)...(19): siRNA sense strand
ucuaccaguuugacuuuaa

SEQ ID NO: 1874543 - RNA, 19 nt, Homo sapiens
  misc_RNA (1)...(19): siRNA sense strand
gccuuugacuuggugaaua

SEQ ID NO: 1874544 - RNA, 19 nt, Homo sapiens
  misc_RNA (1)...(19): siRNA sense strand
ccagcuacccguacaguga

SEQ ID NO: 1874545 - RNA, 19 nt, Homo sapiens
  misc_RNA (1)...(19): siRNA sense strand
uggacaaguucgucaaaga

SEQ ID NO: 1874546 - RNA, 19 nt, Homo sapiens
  misc_RNA (1)...(19): siRNA sense strand
uggagacgcucugcacaaa

SEQ ID NO: 1874547 - RNA, 19 nt, Homo sapiens
  misc_RNA (1)...(19): siRNA sense strand
cuaccaguuugacuuuaaa

SEQ ID NO: 1874548 - RNA, 19 nt, Homo sapiens
  misc_RNA (1)...(19): siRNA sense strand
agacugugccuuugacuug

SEQ ID NO: 1874549 - RNA, 19 nt, Homo sapiens
  misc_RNA (1)...(19): siRNA sense strand
gaaguggugaagcucauau

SEQ ID NO: 1874550 - RNA, 19 nt, Homo sapiens
  misc_RNA (1)...(19): siRNA sense strand
caucuaccaguuugacuuu

SEQ ID NO: 1874551 - RNA, 19 nt, Homo sapiens
  misc_RNA (1)...(19): siRNA sense strand
gcucuucgacgacccagaa

SEQ ID NO: 1874552 - RNA, 19 nt, Homo sapiens
  misc_RNA (1)...(19): siRNA sense strand
gaaaggucgcuggcaaaga

SEQ ID NO: 1874553 - RNA, 19 nt, Homo sapiens
  misc_RNA (1)...(19): siRNA sense strand
guuaugcuccaguuagaaa

SEQ ID NO: 1874554 - RNA, 19 nt, Homo sapiens
  misc_RNA (1)...(19): siRNA sense strand
ccuuugacuuggugaauau

SEQ ID NO: 1874555 - RNA, 19 nt, Homo sapiens
  misc_RNA (1)...(19): siRNA sense strand
caaggaguugucugucuuu

SEQ ID NO: 1874556 - RNA, 19 nt, Homo sapiens
  misc_RNA (1)...(19): siRNA sense strand
ggugagcaguacaugaaca

SEQ ID NO: 1874557 - RNA, 19 nt, Homo sapiens
  misc_RNA (1)...(19): siRNA sense strand
gagucuaccuggaugaaaa

SEQ ID NO: 1874558 - RNA, 19 nt, Homo sapiens
  misc_RNA (1)...(19): siRNA sense strand
uguaugaacuggacaucuc

SEQ ID NO: 1874559 - RNA, 19 nt, Homo sapiens
  misc_RNA (1)...(19): siRNA sense strand
gguuuccuacuuuguauuu

SEQ ID NO: 1874560 - RNA, 19 nt, Homo sapiens
  misc_RNA (1)...(19): siRNA sense strand
gcgaugaaagaauauaaca

SEQ ID NO: 1874561 - RNA, 19 nt, Homo sapiens
  misc_RNA (1)...(19): siRNA sense strand
gcacuaggaagcuuuuauu

SEQ ID NO: 1874562 - RNA, 19 nt, Homo sapiens
  misc_RNA (1)...(19): siRNA sense strand
acacaagccgcacuucaug

SEQ ID NO: 1874563 - RNA, 19 nt, Homo sapiens
  misc_RNA (1)...(19): siRNA sense strand
gugcuggacagaaucauug

SEQ ID NO: 1874564 - RNA, 19 nt, Homo sapiens
  misc_RNA (1)...(19): siRNA sense strand
ccaugaugcuuccaaucug

SEQ ID NO: 1874565 - RNA, 19 nt, Homo sapiens
  misc_RNA (1)...(19): siRNA sense strand
caacgugggcucgcucuuc

SEQ ID NO: 1874566 - RNA, 19 nt, Homo sapiens
  misc_RNA (1)...(19): siRNA sense strand
gauucgagaagguuuccua

SEQ ID NO: 1874567 - RNA, 19 nt, Homo sapiens
  misc_RNA (1)...(19): siRNA sense strand
gaauauccaucuuuuccau

SEQ ID NO: 1874568 - RNA, 19 nt, Homo sapiens
  misc_RNA (1)...(19): siRNA sense strand
aaggaguugucugucuuua

SEQ ID NO: 1874569 - RNA, 19 nt, Homo sapiens
  misc_RNA (1)...(19): siRNA sense strand
uagaaaggucgcuggcaaa

SEQ ID NO: 1874570 - RNA, 19 nt, Homo sapiens
  misc_RNA (1)...(19): siRNA sense strand
ccagaaaaccugcagaaga

SEQ ID NO: 1874571 - RNA, 19 nt, Homo sapiens
  misc_RNA (1)...(19): siRNA sense strand
aacaagcccuuccguguac

SEQ ID NO: 1874572 - RNA, 19 nt, Homo sapiens
  misc_RNA (1)...(19): siRNA sense strand
acaaaucccaggagcacuu

SEQ ID NO: 1874573 - RNA, 19 nt, Homo sapiens
  misc_RNA (1)...(19): siRNA sense strand
uggugaagcucauauuucg

SEQ ID NO: 1874574 - RNA, 19 nt, Homo sapiens
  misc_RNA (1)...(19): siRNA sense strand
guggugaagcucauauuuc

SEQ ID NO: 1874575 - RNA, 19 nt, Homo sapiens
  misc_RNA (1)...(19): siRNA sense strand
agaaguuuccgcaggacua

SEQ ID NO: 1874576 - RNA, 19 nt, Homo sapiens
  misc_RNA (1)...(19): siRNA sense strand
gaugcgaugaaagaauaua

SEQ ID NO: 1874577 - RNA, 19 nt, Homo sapiens
  misc_RNA (1)...(19): siRNA sense strand
aagguuuccuacuuuguau

SEQ ID NO: 1874578 - RNA, 19 nt, Homo sapiens
  misc_RNA (1)...(19): siRNA sense strand
ucacggcacuaggaagcuu

SEQ ID NO: 1874579 - RNA, 19 nt, Homo sapiens
  misc_RNA (1)...(19): siRNA sense strand
cauugcagacugugccuuu

SEQ ID NO: 1874580 - RNA, 19 nt, Homo sapiens
  misc_RNA (1)...(19): siRNA sense strand
agaaacucuucgacuacuu

SEQ ID NO: 1874581 - RNA, 19 nt, Homo sapiens
  misc_RNA (1)...(19): siRNA sense strand
gagacgcucugcacaaaag

SEQ ID NO: 1874582 - RNA, 19 nt, Homo sapiens
  misc_RNA (1)...(19): siRNA sense strand
cuacucggauaccuuagag

SEQ ID NO: 1874583 - RNA, 19 nt, Homo sapiens
  misc_RNA (1)...(19): siRNA sense strand
ggaguuugacaaggaguug

SEQ ID NO: 1874584 - RNA, 19 nt, Homo sapiens
  misc_RNA (1)...(19): siRNA sense strand
aagaacuauugucgaguga

SEQ ID NO: 1874585 - RNA, 19 nt, Homo sapiens
  misc_RNA (1)...(19): siRNA sense strand
acaacgaccggaagguuau

SEQ ID NO: 1874586 - RNA, 19 nt, Homo sapiens
  misc_RNA (1)...(19): siRNA sense strand
gucgagugaugcgaugaaa

SEQ ID NO: 1874587 - RNA, 19 nt, Homo sapiens
  misc_RNA (1)...(19): siRNA sense strand
gcacaaaagccaccaugca

SEQ ID NO: 1874588 - RNA, 19 nt, Homo sapiens
  misc_RNA (1)...(19): siRNA sense strand
acacacaagccgcacuuca

SEQ ID NO: 1874589 - RNA, 19 nt, Homo sapiens
  misc_RNA (1)...(19): siRNA sense strand
guggagacgcucugcacaa

SEQ ID NO: 1874590 - RNA, 19 nt, Homo sapiens
  misc_RNA (1)...(19): siRNA sense strand
uguauuuggugauuucaac

SEQ ID NO: 1874591 - RNA, 19 nt, Homo sapiens
  misc_RNA (1)...(19): siRNA sense strand
ggaauugcguuuacacuua

SEQ ID NO: 1874592 - RNA, 19 nt, Homo sapiens
  misc_RNA (1)...(19): siRNA sense strand
ggaaacugaucauuaagaa

SEQ ID NO: 1874593 - RNA, 19 nt, Homo sapiens
  misc_RNA (1)...(19): siRNA sense strand
gaugauaaauucacuguuc

SEQ ID NO: 1874594 - RNA, 19 nt, Homo sapiens
  misc_RNA (1)...(19): siRNA sense strand
gggagaagcucuaugacuu

SEQ ID NO: 1874595 - RNA, 19 nt, Homo sapiens
  misc_RNA (1)...(19): siRNA sense strand
cgacagggaugaaguacaa

SEQ ID NO: 1874596 - RNA, 19 nt, Homo sapiens
  misc_RNA (1)...(19): siRNA sense strand
aaacgcagcugcccaucua

SEQ ID NO: 1874597 - RNA, 19 nt, Homo sapiens
  misc_RNA (1)...(19): siRNA sense strand
gaagaucacguccugguuu

SEQ ID NO: 1874598 - RNA, 19 nt, Homo sapiens
  misc_RNA (1)...(19): siRNA sense strand
uuaaggccauccaagauua

SEQ ID NO: 1874599 - RNA, 19 nt, Homo sapiens
  misc_RNA (1)...(19): siRNA sense strand
gcagaaaccaucauccaaa

SEQ ID NO: 1874600 - RNA, 19 nt, Homo sapiens
  misc_RNA (1)...(19): siRNA sense strand
cagcaucacugaaaucauc

SEQ ID NO: 1874601 - RNA, 19 nt, Homo sapiens
  misc_RNA (1)...(19): siRNA sense strand
ugaauaaguuggugaucuu

SEQ ID NO: 1874602 - RNA, 19 nt, Homo sapiens
  misc_RNA (1)...(19): siRNA sense strand
gcacgaggguccugagucu

SEQ ID NO: 1874603 - RNA, 19 nt, Homo sapiens
  misc_RNA (1)...(19): siRNA sense strand
gagaagcucuaugacuuug

SEQ ID NO: 1874604 - RNA, 19 nt, Homo sapiens
  misc_RNA (1)...(19): siRNA sense strand
ggagaagcucuaugacuuu

SEQ ID NO: 1874605 - RNA, 19 nt, Homo sapiens
  misc_RNA (1)...(19): siRNA sense strand
cugggaaacugaucauuaa

SEQ ID NO: 1874606 - RNA, 19 nt, Homo sapiens
  misc_RNA (1)...(19): siRNA sense strand
ucacgcaccucuucugguu

SEQ ID NO: 1874607 - RNA, 19 nt, Homo sapiens
  misc_RNA (1)...(19): siRNA sense strand
gaagcucuaugacuuugug

SEQ ID NO: 1874608 - RNA, 19 nt, Homo sapiens
  misc_RNA (1)...(19): siRNA sense strand
ugacgaagcccgagauguu

SEQ ID NO: 1874609 - RNA, 19 nt, Homo sapiens
  misc_RNA (1)...(19): siRNA sense strand
ugaagaaacugaccacacu

SEQ ID NO: 1874610 - RNA, 19 nt, Homo sapiens
  misc_RNA (1)...(19): siRNA sense strand
ggaggaagaaaucacguuu

SEQ ID NO: 1874611 - RNA, 19 nt, Homo sapiens
  misc_RNA (1)...(19): siRNA sense strand
acaccgagcucccgcauca

SEQ ID NO: 1874612 - RNA, 19 nt, Homo sapiens
  misc_RNA (1)...(19): siRNA sense strand
ggccauccaagauuauuua

SEQ ID NO: 1874613 - RNA, 19 nt, Homo sapiens
  misc_RNA (1)...(19): siRNA sense strand
gagacugacucgggacaaa

SEQ ID NO: 1874614 - RNA, 19 nt, Homo sapiens
  misc_RNA (1)...(19): siRNA sense strand
aaacagagaaggagaagau

SEQ ID NO: 1874615 - RNA, 19 nt, Homo sapiens
  misc_RNA (1)...(19): siRNA sense strand
ccaggacucugaauuugug

SEQ ID NO: 1874616 - RNA, 19 nt, Homo sapiens
  misc_RNA (1)...(19): siRNA sense strand
gcccaggacucugaauuug

SEQ ID NO: 1874617 - RNA, 19 nt, Homo sapiens
  misc_RNA (1)...(19): siRNA sense strand
ccaagucccagaccaaauu

SEQ ID NO: 1874618 - RNA, 19 nt, Homo sapiens
  misc_RNA (1)...(19): siRNA sense strand
ggagucacuucccaguuug

SEQ ID NO: 1874619 - RNA, 19 nt, Homo sapiens
  misc_RNA (1)...(19): siRNA sense strand
gaauugcguuuacacuuac

SEQ ID NO: 1874620 - RNA, 19 nt, Homo sapiens
  misc_RNA (1)...(19): siRNA sense strand
cgagggagaagcucuauga

SEQ ID NO: 1874621 - RNA, 19 nt, Homo sapiens
  misc_RNA (1)...(19): siRNA sense strand
ugaagcccauuaucucuga

SEQ ID NO: 1874622 - RNA, 19 nt, Homo sapiens
  misc_RNA (1)...(19): siRNA sense strand
ccaaagcugaagcccauua

SEQ ID NO: 1874623 - RNA, 19 nt, Homo sapiens
  misc_RNA (1)...(19): siRNA sense strand
ggacgacucugcggacuac

SEQ ID NO: 1874624 - RNA, 19 nt, Homo sapiens
  misc_RNA (1)...(19): siRNA sense strand
aggagucacuucccaguuu

SEQ ID NO: 1874625 - RNA, 19 nt, Homo sapiens
  misc_RNA (1)...(19): siRNA sense strand
gaagacggagcgugaugaa

SEQ ID NO: 1874626 - RNA, 19 nt, Homo sapiens
  misc_RNA (1)...(19): siRNA sense strand
cauccaagauuauuuaagc

SEQ ID NO: 1874627 - RNA, 19 nt, Homo sapiens
  misc_RNA (1)...(19): siRNA sense strand
ccauaucacccaagaaguu

SEQ ID NO: 1874628 - RNA, 19 nt, Homo sapiens
  misc_RNA (1)...(19): siRNA sense strand
gcauugcccuucgguuaga

SEQ ID NO: 1874629 - RNA, 19 nt, Homo sapiens
  misc_RNA (1)...(19): siRNA sense strand
gcaccuggaacauggguaa

SEQ ID NO: 1874630 - RNA, 19 nt, Homo sapiens
  misc_RNA (1)...(19): siRNA sense strand
gggaaacugaucauuaaga

SEQ ID NO: 1874631 - RNA, 19 nt, Homo sapiens
  misc_RNA (1)...(19): siRNA sense strand
cguuuacacuuacagaauu

SEQ ID NO: 1874632 - RNA, 19 nt, Homo sapiens
  misc_RNA (1)...(19): siRNA sense strand
aaacucaggcgaaaccaaa

SEQ ID NO: 1874633 - RNA, 19 nt, Homo sapiens
  misc_RNA (1)...(19): siRNA sense strand
ccaaggacagauugaguuu

SEQ ID NO: 1874634 - RNA, 19 nt, Homo sapiens
  misc_RNA (1)...(19): siRNA sense strand
ggagggagcagaaggucuu

SEQ ID NO: 1874635 - RNA, 19 nt, Homo sapiens
  misc_RNA (1)...(19): siRNA sense strand
ucugggaaacugaucauua

SEQ ID NO: 1874636 - RNA, 19 nt, Homo sapiens
  misc_RNA (1)...(19): siRNA sense strand
ugacagcgacgaauccuau

SEQ ID NO: 1874637 - RNA, 19 nt, Homo sapiens
  misc_RNA (1)...(19): siRNA sense strand
gaauucugcccaaugaaga

SEQ ID NO: 1874638 - RNA, 19 nt, Homo sapiens
  misc_RNA (1)...(19): siRNA sense strand
ccacacugcucugcaagga

SEQ ID NO: 1874639 - RNA, 19 nt, Homo sapiens
  misc_RNA (1)...(19): siRNA sense strand
gaaguuuggugagacucuu

SEQ ID NO: 1874640 - RNA, 19 nt, Homo sapiens
  misc_RNA (1)...(19): siRNA sense strand
gaagcugagucccuuuaac

SEQ ID NO: 1874641 - RNA, 19 nt, Homo sapiens
  misc_RNA (1)...(19): siRNA sense strand
ggagcucuauggagaaguc

SEQ ID NO: 1874642 - RNA, 19 nt, Homo sapiens
  misc_RNA (1)...(19): siRNA sense strand
caaagucgacguugagucu

SEQ ID NO: 1874643 - RNA, 19 nt, Homo sapiens
  misc_RNA (1)...(19): siRNA sense strand
caggugcuaugccacauug

SEQ ID NO: 1874644 - RNA, 19 nt, Homo sapiens
  misc_RNA (1)...(19): siRNA sense strand
gaagacaggcauugcaaac

SEQ ID NO: 1874645 - RNA, 19 nt, Homo sapiens
  misc_RNA (1)...(19): siRNA sense strand
ugaccacacugcucugcaa

SEQ ID NO: 1874646 - RNA, 19 nt, Homo sapiens
  misc_RNA (1)...(19): siRNA sense strand
cugagucccuuuaacauca

SEQ ID NO: 1874647 - RNA, 19 nt, Homo sapiens
  misc_RNA (1)...(19): siRNA sense strand
ggaguugacaggccacuuc

SEQ ID NO: 1874648 - RNA, 19 nt, Homo sapiens
  misc_RNA (1)...(19): siRNA sense strand
gggagcugguggugaaguu

SEQ ID NO: 1874649 - RNA, 19 nt, Homo sapiens
  misc_RNA (1)...(19): siRNA sense strand
gacugacucgggacaaaua

SEQ ID NO: 1874650 - RNA, 19 nt, Homo sapiens
  misc_RNA (1)...(19): siRNA sense strand
guucugaggacaaguucua

SEQ ID NO: 1874651 - RNA, 19 nt, Homo sapiens
  misc_RNA (1)...(19): siRNA sense strand
gacgaagcccgagauguuu

SEQ ID NO: 1874652 - RNA, 19 nt, Homo sapiens
  misc_RNA (1)...(19): siRNA sense strand
gcuccagcaucacugaaau

SEQ ID NO: 1874653 - RNA, 19 nt, Homo sapiens
  misc_RNA (1)...(19): siRNA sense strand
cugcauugcccuucgguua

SEQ ID NO: 1874654 - RNA, 19 nt, Homo sapiens
  misc_RNA (1)...(19): siRNA sense strand
cgagcugcuuggagaguuu

SEQ ID NO: 1874655 - RNA, 19 nt, Homo sapiens
  misc_RNA (1)...(19): siRNA sense strand
acaaauacgccuacaccaa

SEQ ID NO: 1874656 - RNA, 19 nt, Homo sapiens
  misc_RNA (1)...(19): siRNA sense strand
aaaucaagcagcagcagua

SEQ ID NO: 1874657 - RNA, 19 nt, Homo sapiens
  misc_RNA (1)...(19): siRNA sense strand
ugcaagaaaucaccagugu

SEQ ID NO: 1874658 - RNA, 19 nt, Homo sapiens
  misc_RNA (1)...(19): siRNA sense strand
aaacacucccugcaagaaa

SEQ ID NO: 1874659 - RNA, 19 nt, Homo sapiens
  misc_RNA (1)...(19): siRNA sense strand
caaacacucccugcaagaa

SEQ ID NO: 1874660 - RNA, 19 nt, Homo sapiens
  misc_RNA (1)...(19): siRNA sense strand
ggcuggagauccucaaaca

SEQ ID NO: 1874661 - RNA, 19 nt, Homo sapiens
  misc_RNA (1)...(19): siRNA sense strand
gacaugaucaccaucuuca

SEQ ID NO: 1874662 - RNA, 19 nt, Homo sapiens
  misc_RNA (1)...(19): siRNA sense strand
uggaccagcucaucgaguu

SEQ ID NO: 1874663 - RNA, 19 nt, Homo sapiens
  misc_RNA (1)...(19): siRNA sense strand
gaccagcacauccucauca

SEQ ID NO: 1874664 - RNA, 19 nt, Homo sapiens
  misc_RNA (1)...(19): siRNA sense strand
ccacaucuguacugacaac

SEQ ID NO: 1874665 - RNA, 19 nt, Homo sapiens
  misc_RNA (1)...(19): siRNA sense strand
cagaaaccaucauccaaaa

SEQ ID NO: 1874666 - RNA, 19 nt, Homo sapiens
  misc_RNA (1)...(19): siRNA sense strand
gaaacucaggcgaaaccaa

SEQ ID NO: 1874667 - RNA, 19 nt, Homo sapiens
  misc_RNA (1)...(19): siRNA sense strand
agacggagcgugaugaauc

SEQ ID NO: 1874668 - RNA, 19 nt, Homo sapiens
  misc_RNA (1)...(19): siRNA sense strand
gcgacaucaugacgaguga

SEQ ID NO: 1874669 - RNA, 19 nt, Homo sapiens
  misc_RNA (1)...(19): siRNA sense strand
gaggaagaaaucacguuug

SEQ ID NO: 1874670 - RNA, 19 nt, Homo sapiens
  misc_RNA (1)...(19): siRNA sense strand
gcucauuaagucacagaaa

SEQ ID NO: 1874671 - RNA, 19 nt, Homo sapiens
  misc_RNA (1)...(19): siRNA sense strand
ggccaaagacccugaagag

SEQ ID NO: 1874672 - RNA, 19 nt, Homo sapiens
  misc_RNA (1)...(19): siRNA sense strand
ggaaggagaaaaugaagaa

SEQ ID NO: 1874673 - RNA, 19 nt, Homo sapiens
  misc_RNA (1)...(19): siRNA sense strand
gaccaagucccagaccaaa

SEQ ID NO: 1874674 - RNA, 19 nt, Homo sapiens
  misc_RNA (1)...(19): siRNA sense strand
aaggacagauugaguuucu

SEQ ID NO: 1874675 - RNA, 19 nt, Homo sapiens
  misc_RNA (1)...(19): siRNA sense strand
ugacagccaaggacagauu

SEQ ID NO: 1874676 - RNA, 19 nt, Homo sapiens
  misc_RNA (1)...(19): siRNA sense strand
gaccagcugcucacagaga

SEQ ID NO: 1874677 - RNA, 19 nt, Homo sapiens
  misc_RNA (1)...(19): siRNA sense strand
aaaagaaacucaggcgaaa

SEQ ID NO: 1874678 - RNA, 19 nt, Homo sapiens
  misc_RNA (1)...(19): siRNA sense strand
ugaagaacaagcacucaga

SEQ ID NO: 1874679 - RNA, 19 nt, Homo sapiens
  misc_RNA (1)...(19): siRNA sense strand
cacagaaagugucgugucu

SEQ ID NO: 1874680 - RNA, 19 nt, Homo sapiens
  misc_RNA (1)...(19): siRNA sense strand
ugcaguggcuccagcauca

SEQ ID NO: 1874681 - RNA, 19 nt, Homo sapiens
  misc_RNA (1)...(19): siRNA sense strand
gugagacucuuccaaagcu

SEQ ID NO: 1874682 - RNA, 19 nt, Homo sapiens
  misc_RNA (1)...(19): siRNA sense strand
caaauucuaccuggaguuc

SEQ ID NO: 1874683 - RNA, 19 nt, Homo sapiens
  misc_RNA (1)...(19): siRNA sense strand
gccaaggacagauugaguu

SEQ ID NO: 1874684 - RNA, 19 nt, Homo sapiens
  misc_RNA (1)...(19): siRNA sense strand
gacaggcauugcaaacaca

SEQ ID NO: 1874685 - RNA, 19 nt, Homo sapiens
  misc_RNA (1)...(19): siRNA sense strand
ugcagcagaugaagaacaa

SEQ ID NO: 1874686 - RNA, 19 nt, Homo sapiens
  misc_RNA (1)...(19): siRNA sense strand
cauaucacccaagaaguuu

SEQ ID NO: 1874687 - RNA, 19 nt, Homo sapiens
  misc_RNA (1)...(19): siRNA sense strand
ggaccagcucaucgaguuu

SEQ ID NO: 1874688 - RNA, 19 nt, Homo sapiens
  misc_RNA (1)...(19): siRNA sense strand
aagaagcugagucccuuua

SEQ ID NO: 1874689 - RNA, 19 nt, Homo sapiens
  misc_RNA (1)...(19): siRNA sense strand
gaaacgcagcugcccaucu

SEQ ID NO: 1874690 - RNA, 19 nt, Homo sapiens
  misc_RNA (1)...(19): siRNA sense strand
ccaugagguucuucaccaa

SEQ ID NO: 1874691 - RNA, 19 nt, Homo sapiens
  misc_RNA (1)...(19): siRNA sense strand
gacccucugucccuacuga

SEQ ID NO: 1874692 - RNA, 19 nt, Homo sapiens
  misc_RNA (1)...(19): siRNA sense strand
gaccgugaguugcuacagu

SEQ ID NO: 1874693 - RNA, 19 nt, Homo sapiens
  misc_RNA (1)...(19): siRNA sense strand
agagaugcgugagaaguug

SEQ ID NO: 1874694 - RNA, 19 nt, Homo sapiens
  misc_RNA (1)...(19): siRNA sense strand
cagagaugcgugagaaguu

SEQ ID NO: 1874695 - RNA, 19 nt, Homo sapiens
  misc_RNA (1)...(19): siRNA sense strand
gcugguggccgacaguaau

SEQ ID NO: 1874696 - RNA, 19 nt, Homo sapiens
  misc_RNA (1)...(19): siRNA sense strand
gagacgacaucugcuccau

SEQ ID NO: 1874697 - RNA, 19 nt, Homo sapiens
  misc_RNA (1)...(19): siRNA sense strand
gugcggccaccacuucgua

SEQ ID NO: 1874698 - RNA, 19 nt, Homo sapiens
  misc_RNA (1)...(19): siRNA sense strand
ccagagaugcgugagaagu

SEQ ID NO: 1874699 - RNA, 19 nt, Homo sapiens
  misc_RNA (1)...(19): siRNA sense strand
ccagaccucucaccaucac

SEQ ID NO: 1874700 - RNA, 19 nt, Homo sapiens
  misc_RNA (1)...(19): siRNA sense strand
caaagaaccugauugguau

SEQ ID NO: 1874701 - RNA, 19 nt, Homo sapiens
  misc_RNA (1)...(19): siRNA sense strand
gcacaaacgcuucuucgua

SEQ ID NO: 1874702 - RNA, 19 nt, Homo sapiens
  misc_RNA (1)...(19): siRNA sense strand
ccacagcucugcuuccuuu

SEQ ID NO: 1874703 - RNA, 19 nt, Homo sapiens
  misc_RNA (1)...(19): siRNA sense strand
gaucaucaaucccaucaga

SEQ ID NO: 1874704 - RNA, 19 nt, Homo sapiens
  misc_RNA (1)...(19): siRNA sense strand
aaagaggucuggcaaguga

SEQ ID NO: 1874705 - RNA, 19 nt, Homo sapiens
  misc_RNA (1)...(19): siRNA sense strand
acaaagaaccugauuggua

SEQ ID NO: 1874706 - RNA, 19 nt, Homo sapiens
  misc_RNA (1)...(19): siRNA sense strand
gcacugaggaguacaugaa

SEQ ID NO: 1874707 - RNA, 19 nt, Homo sapiens
  misc_RNA (1)...(19): siRNA sense strand
ccaccacucucaugucuug

SEQ ID NO: 1874708 - RNA, 19 nt, Homo sapiens
  misc_RNA (1)...(19): siRNA sense strand
ggagaauggucuuaacuac

SEQ ID NO: 1874709 - RNA, 19 nt, Homo sapiens
  misc_RNA (1)...(19): siRNA sense strand
gagagcugcuucaacauca

SEQ ID NO: 1874710 - RNA, 19 nt, Homo sapiens
  misc_RNA (1)...(19): siRNA sense strand
ggaaagcuguggacaaacg

SEQ ID NO: 1874711 - RNA, 19 nt, Homo sapiens
  misc_RNA (1)...(19): siRNA sense strand
gaauggucuuaacuacaua

SEQ ID NO: 1874712 - RNA, 19 nt, Homo sapiens
  misc_RNA (1)...(19): siRNA sense strand
cccaauggcuacaugauga

SEQ ID NO: 1874713 - RNA, 19 nt, Homo sapiens
  misc_RNA (1)...(19): siRNA sense strand
gaaccugauugguaucuac

SEQ ID NO: 1874714 - RNA, 19 nt, Homo sapiens
  misc_RNA (1)...(19): siRNA sense strand
gagcuaagcaacuauaucu

SEQ ID NO: 1874715 - RNA, 19 nt, Homo sapiens
  misc_RNA (1)...(19): siRNA sense strand
ucaaagaggucuggcaagu

SEQ ID NO: 1874716 - RNA, 19 nt, Homo sapiens
  misc_RNA (1)...(19): siRNA sense strand
agaauggucuuaacuacau

SEQ ID NO: 1874717 - RNA, 19 nt, Homo sapiens
  misc_RNA (1)...(19): siRNA sense strand
ccacggcgaucuagugcuu

SEQ ID NO: 1874718 - RNA, 19 nt, Homo sapiens
  misc_RNA (1)...(19): siRNA sense strand
gcacaggugacuacaugaa

SEQ ID NO: 1874719 - RNA, 19 nt, Homo sapiens
  misc_RNA (1)...(19): siRNA sense strand
caaccagagugccaaagug

SEQ ID NO: 1874720 - RNA, 19 nt, Homo sapiens
  misc_RNA (1)...(19): siRNA sense strand
ggccaugagugaugaguuc

SEQ ID NO: 1874721 - RNA, 19 nt, Homo sapiens
  misc_RNA (1)...(19): siRNA sense strand
cuacauagaccuggauuug

SEQ ID NO: 1874722 - RNA, 19 nt, Homo sapiens
  misc_RNA (1)...(19): siRNA sense strand
guaccaggcucuccuacag

SEQ ID NO: 1874723 - RNA, 19 nt, Homo sapiens
  misc_RNA (1)...(19): siRNA sense strand
gggugaaccucaguccuaa

SEQ ID NO: 1874724 - RNA, 19 nt, Homo sapiens
  misc_RNA (1)...(19): siRNA sense strand
caucagcaccuccgccuuu

SEQ ID NO: 1874725 - RNA, 19 nt, Homo sapiens
  misc_RNA (1)...(19): siRNA sense strand
gaggagcuaagcaacuaua

SEQ ID NO: 1874726 - RNA, 19 nt, Homo sapiens
  misc_RNA (1)...(19): siRNA sense strand
aaagggcaguggagacuau

SEQ ID NO: 1874727 - RNA, 19 nt, Homo sapiens
  misc_RNA (1)...(19): siRNA sense strand
uggcugcucuccugacauu

SEQ ID NO: 1874728 - RNA, 19 nt, Homo sapiens
  misc_RNA (1)...(19): siRNA sense strand
gcaacacagugcccuuugg

SEQ ID NO: 1874729 - RNA, 19 nt, Homo sapiens
  misc_RNA (1)...(19): siRNA sense strand
cugcagaucuggauaaucg

SEQ ID NO: 1874730 - RNA, 19 nt, Homo sapiens
  misc_RNA (1)...(19): siRNA sense strand
cagcaucaguuuccagaag

SEQ ID NO: 1874731 - RNA, 19 nt, Homo sapiens
  misc_RNA (1)...(19): siRNA sense strand
gucaaggacuucaaacagu

SEQ ID NO: 1874732 - RNA, 19 nt, Homo sapiens
  misc_RNA (1)...(19): siRNA sense strand
gagacuauaugcccaugag

SEQ ID NO: 1874733 - RNA, 19 nt, Homo sapiens
  misc_RNA (1)...(19): siRNA sense strand
uggcuuccauugaggagua

SEQ ID NO: 1874734 - RNA, 19 nt, Homo sapiens
  misc_RNA (1)...(19): siRNA sense strand
uguaagcuaugcugacaug

SEQ ID NO: 1874735 - RNA, 19 nt, Homo sapiens
  misc_RNA (1)...(19): siRNA sense strand
aggaggagcuaagcaacua

SEQ ID NO: 1874736 - RNA, 19 nt, Homo sapiens
  misc_RNA (1)...(19): siRNA sense strand
gagaauggucuuaacuaca

SEQ ID NO: 1874737 - RNA, 19 nt, Homo sapiens
  misc_RNA (1)...(19): siRNA sense strand
gucagucugucguccagua

SEQ ID NO: 1874738 - RNA, 19 nt, Homo sapiens
  misc_RNA (1)...(19): siRNA sense strand
acauagaccuggauuuggu

SEQ ID NO: 1874739 - RNA, 19 nt, Homo sapiens
  misc_RNA (1)...(19): siRNA sense strand
cagcagcgaggaugugaaa

SEQ ID NO: 1874740 - RNA, 19 nt, Homo sapiens
  misc_RNA (1)...(19): siRNA sense strand
auggaaagcuguggacaaa

SEQ ID NO: 1874741 - RNA, 19 nt, Homo sapiens
  misc_RNA (1)...(19): siRNA sense strand
gaaagggcaguggagacua

SEQ ID NO: 1874742 - RNA, 19 nt, Homo sapiens
  misc_RNA (1)...(19): siRNA sense strand
aggcauagcuccgagacuu

SEQ ID NO: 1874743 - RNA, 19 nt, Homo sapiens
  misc_RNA (1)...(19): siRNA sense strand
ugaucagucuggcuacuug

SEQ ID NO: 1874744 - RNA, 19 nt, Homo sapiens
  misc_RNA (1)...(19): siRNA sense strand
ccaaggagccagccaaacu

SEQ ID NO: 1874745 - RNA, 19 nt, Homo sapiens
  misc_RNA (1)...(19): siRNA sense strand
uugcacaggugacuacaug

SEQ ID NO: 1874746 - RNA, 19 nt, Homo sapiens
  misc_RNA (1)...(19): siRNA sense strand
gagcccagccuuccacauc

SEQ ID NO: 1874747 - RNA, 19 nt, Homo sapiens
  misc_RNA (1)...(19): siRNA sense strand
caacacagugcccuuugga

SEQ ID NO: 1874748 - RNA, 19 nt, Homo sapiens
  misc_RNA (1)...(19): siRNA sense strand
gcaaccagagugccaaagu

SEQ ID NO: 1874749 - RNA, 19 nt, Homo sapiens
  misc_RNA (1)...(19): siRNA sense strand
agacaaagaaccugauugg

SEQ ID NO: 1874750 - RNA, 19 nt, Homo sapiens
  misc_RNA (1)...(19): siRNA sense strand
ggagccagccaaacugugu

SEQ ID NO: 1874751 - RNA, 19 nt, Homo sapiens
  misc_RNA (1)...(19): siRNA sense strand
ccaagagcaugcacaaacg

SEQ ID NO: 1874752 - RNA, 19 nt, Homo sapiens
  misc_RNA (1)...(19): siRNA sense strand
ggucaaggacuucaaacag

SEQ ID NO: 1874753 - RNA, 19 nt, Homo sapiens
  misc_RNA (1)...(19): siRNA sense strand
acaagccaguccucuccua

SEQ ID NO: 1874754 - RNA, 19 nt, Homo sapiens
  misc_RNA (1)...(19): siRNA sense strand
ggccaccacucucaugucu

SEQ ID NO: 1874755 - RNA, 19 nt, Homo sapiens
  misc_RNA (1)...(19): siRNA sense strand
agaggagggucuggaaaug

SEQ ID NO: 1874756 - RNA, 19 nt, Homo sapiens
  misc_RNA (1)...(19): siRNA sense strand
caccucggauugucucuuc

SEQ ID NO: 1874757 - RNA, 19 nt, Homo sapiens
  misc_RNA (1)...(19): siRNA sense strand
gggcugacuccaagaacaa

SEQ ID NO: 1874758 - RNA, 19 nt, Homo sapiens
  misc_RNA (1)...(19): siRNA sense strand
aggaguacaugaagaugga

SEQ ID NO: 1874759 - RNA, 19 nt, Homo sapiens
  misc_RNA (1)...(19): siRNA sense strand
agacuggcacugaggagua

SEQ ID NO: 1874760 - RNA, 19 nt, Homo sapiens
  misc_RNA (1)...(19): siRNA sense strand
guggagagcagcgguggua

SEQ ID NO: 1874761 - RNA, 19 nt, Homo sapiens
  misc_RNA (1)...(19): siRNA sense strand
ggaguacacagagaugaug

SEQ ID NO: 1874762 - RNA, 19 nt, Homo sapiens
  misc_RNA (1)...(19): siRNA sense strand
ggaguuccuuccgcagugu

SEQ ID NO: 1874763 - RNA, 19 nt, Homo sapiens
  misc_RNA (1)...(19): siRNA sense strand
acaggugacuacaugaaca

SEQ ID NO: 1874764 - RNA, 19 nt, Homo sapiens
  misc_RNA (1)...(19): siRNA sense strand
gcaagaccaucagcuucgu

SEQ ID NO: 1874765 - RNA, 19 nt, Homo sapiens
  misc_RNA (1)...(19): siRNA sense strand
uggagaauggucuuaacua

SEQ ID NO: 1874766 - RNA, 19 nt, Homo sapiens
  misc_RNA (1)...(19): siRNA sense strand
cgggugaaccucaguccua

SEQ ID NO: 1874767 - RNA, 19 nt, Homo sapiens
  misc_RNA (1)...(19): siRNA sense strand
ccauugaggaguacacaga

SEQ ID NO: 1874768 - RNA, 19 nt, Homo sapiens
  misc_RNA (1)...(19): siRNA sense strand
ggagcuaagcaacuauauc

SEQ ID NO: 1874769 - RNA, 19 nt, Homo sapiens
  misc_RNA (1)...(19): siRNA sense strand
gcauagcuccgagacuuuc

SEQ ID NO: 1874770 - RNA, 19 nt, Homo sapiens
  misc_RNA (1)...(19): siRNA sense strand
cagcugcucagaccaauag

SEQ ID NO: 1874771 - RNA, 19 nt, Homo sapiens
  misc_RNA (1)...(19): siRNA sense strand
agccaguccucuccuacua

SEQ ID NO: 1874772 - RNA, 19 nt, Homo sapiens
  misc_RNA (1)...(19): siRNA sense strand
ccacagcagaucaucaauc

SEQ ID NO: 1874773 - RNA, 19 nt, Homo sapiens
  misc_RNA (1)...(19): siRNA sense strand
ccagcaagaccaucagcuu

SEQ ID NO: 1874774 - RNA, 19 nt, Homo sapiens
  misc_RNA (1)...(19): siRNA sense strand
caaagaggucuggcaagug

SEQ ID NO: 1874775 - RNA, 19 nt, Homo sapiens
  misc_RNA (1)...(19): siRNA sense strand
ccuguaagcuaugcugaca

SEQ ID NO: 1874776 - RNA, 19 nt, Homo sapiens
  misc_RNA (1)...(19): siRNA sense strand
gcucuggucgccuucucua

SEQ ID NO: 1874777 - RNA, 19 nt, Homo sapiens
  misc_RNA (1)...(19): siRNA sense strand
ccucaguggcuuccauuga

SEQ ID NO: 1874778 - RNA, 19 nt, Homo sapiens
  misc_RNA (1)...(19): siRNA sense strand
gugcugcagaucuggauaa

SEQ ID NO: 1874779 - RNA, 19 nt, Homo sapiens
  misc_RNA (1)...(19): siRNA sense strand
gcuccagucccugcgauuu

SEQ ID NO: 1874780 - RNA, 19 nt, Homo sapiens
  misc_RNA (1)...(19): siRNA sense strand
gcacauccccuaccauuac

SEQ ID NO: 1874781 - RNA, 19 nt, Homo sapiens
  misc_RNA (1)...(19): siRNA sense strand
gaggaguacacagagauga

SEQ ID NO: 1874782 - RNA, 19 nt, Homo sapiens
  misc_RNA (1)...(19): siRNA sense strand
gcaucaguuuccagaagca

SEQ ID NO: 1874783 - RNA, 19 nt, Homo sapiens
  misc_RNA (1)...(19): siRNA sense strand
caaggagccagccaaacug

SEQ ID NO: 1874784 - RNA, 19 nt, Homo sapiens
  misc_RNA (1)...(19): siRNA sense strand
gcucugcuuccuuugagaa

SEQ ID NO: 1874785 - RNA, 19 nt, Homo sapiens
  misc_RNA (1)...(19): siRNA sense strand
ugaccaugcagaugaguug

SEQ ID NO: 1874786 - RNA, 19 nt, Homo sapiens
  misc_RNA (1)...(19): siRNA sense strand
ucauugccaagauccuuua

SEQ ID NO: 1874787 - RNA, 19 nt, Homo sapiens
  misc_RNA (1)...(19): siRNA sense strand
ggagagcagcggugguaag

SEQ ID NO: 1874788 - RNA, 19 nt, Homo sapiens
  misc_RNA (1)...(19): siRNA sense strand
gguggcugcucuccugaca

SEQ ID NO: 1874789 - RNA, 19 nt, Homo sapiens
  misc_RNA (1)...(19): siRNA sense strand
cacagcagaucaucaaucc

SEQ ID NO: 1874790 - RNA, 19 nt, Homo sapiens
  misc_RNA (1)...(19): siRNA sense strand
gggcaguggagacuauaug

SEQ ID NO: 1874791 - RNA, 19 nt, Homo sapiens
  misc_RNA (1)...(19): siRNA sense strand
caccuccgccuuuccacua

SEQ ID NO: 1874792 - RNA, 19 nt, Homo sapiens
  misc_RNA (1)...(19): siRNA sense strand
ggcauagcuccgagacuuu

SEQ ID NO: 1874793 - RNA, 19 nt, Homo sapiens
  misc_RNA (1)...(19): siRNA sense strand
ccagagugccaaagugauc

SEQ ID NO: 1874794 - RNA, 19 nt, Homo sapiens
  misc_RNA (1)...(19): siRNA sense strand
gugaggaggagcuaagcaa

SEQ ID NO: 1874795 - RNA, 19 nt, Homo sapiens
  misc_RNA (1)...(19): siRNA sense strand
uggauuuggucaaggacuu

SEQ ID NO: 1874796 - RNA, 19 nt, Homo sapiens
  misc_RNA (1)...(19): siRNA sense strand
cugcuuccuuugagaaugu

SEQ ID NO: 1874797 - RNA, 19 nt, Homo sapiens
  misc_RNA (1)...(19): siRNA sense strand
cagcucugcuuccuuugag

SEQ ID NO: 1874798 - RNA, 19 nt, Homo sapiens
  misc_RNA (1)...(19): siRNA sense strand
aggaagagacuggcacuga

SEQ ID NO: 1874799 - RNA, 19 nt, Homo sapiens
  misc_RNA (1)...(19): siRNA sense strand
acacagcugcucagaccaa

SEQ ID NO: 1874800 - RNA, 19 nt, Homo sapiens
  misc_RNA (1)...(19): siRNA sense strand
caaagacucucccuaugaa

SEQ ID NO: 1874801 - RNA, 19 nt, Homo sapiens
  misc_RNA (1)...(19): siRNA sense strand
gcaaagacucucccuauga

SEQ ID NO: 1874802 - RNA, 19 nt, Homo sapiens
  misc_RNA (1)...(19): siRNA sense strand
gcagagaucgccacauugu

SEQ ID NO: 1874803 - RNA, 19 nt, Homo sapiens
  misc_RNA (1)...(19): siRNA sense strand
acauugaccuggagaagaa

SEQ ID NO: 1874804 - RNA, 19 nt, Homo sapiens
  misc_RNA (1)...(19): siRNA sense strand
gaagaggaggagaacauug

SEQ ID NO: 1874805 - RNA, 19 nt, Homo sapiens
  misc_RNA (1)...(19): siRNA sense strand
gugcaaagacucucccuau

SEQ ID NO: 1874806 - RNA, 19 nt, Homo sapiens
  misc_RNA (1)...(19): siRNA sense strand
ggaagaggaggagaacauu

SEQ ID NO: 1874807 - RNA, 19 nt, Homo sapiens
  misc_RNA (1)...(19): siRNA sense strand
gaacauugaccuggagaag

SEQ ID NO: 1874808 - RNA, 19 nt, Homo sapiens
  misc_RNA (1)...(19): siRNA sense strand
gauuaaaccagaccguguu

SEQ ID NO: 1874809 - RNA, 19 nt, Homo sapiens
  misc_RNA (1)...(19): siRNA sense strand
uaaaccagaccguguugaa

SEQ ID NO: 1874810 - RNA, 19 nt, Homo sapiens
  misc_RNA (1)...(19): siRNA sense strand
gcagcgaggacgaggaaga

SEQ ID NO: 1874811 - RNA, 19 nt, Homo sapiens
  misc_RNA (1)...(19): siRNA sense strand
gguccacacucaccucucu

SEQ ID NO: 1874812 - RNA, 19 nt, Homo sapiens
  misc_RNA (1)...(19): siRNA sense strand
ggcccucgguuauccauuc

SEQ ID NO: 1874813 - RNA, 19 nt, Homo sapiens
  misc_RNA (1)...(19): siRNA sense strand
ccuaugaauugaagaaagg

SEQ ID NO: 1874814 - RNA, 19 nt, Homo sapiens
  misc_RNA (1)...(19): siRNA sense strand
aagaggaggagaacauuga

SEQ ID NO: 1874815 - RNA, 19 nt, Homo sapiens
  misc_RNA (1)...(19): siRNA sense strand
ugcaaagacucucccuaug

SEQ ID NO: 1874816 - RNA, 19 nt, Homo sapiens
  misc_RNA (1)...(19): siRNA sense strand
ucaacgagcaccgcaagaa

SEQ ID NO: 1874817 - RNA, 19 nt, Homo sapiens
  misc_RNA (1)...(19): siRNA sense strand
gaauugaagaaagguaugu

SEQ ID NO: 1874818 - RNA, 19 nt, Homo sapiens
  misc_RNA (1)...(19): siRNA sense strand
cuaaagacccgaaaauguu

SEQ ID NO: 1874819 - RNA, 19 nt, Homo sapiens
  misc_RNA (1)...(19): siRNA sense strand
gcuaaagacccgaaaaugu

SEQ ID NO: 1874820 - RNA, 19 nt, Homo sapiens
  misc_RNA (1)...(19): siRNA sense strand
agacucucccuaugaauug

SEQ ID NO: 1874821 - RNA, 19 nt, Homo sapiens
  misc_RNA (1)...(19): siRNA sense strand
ccaccaagggcgagaagau

SEQ ID NO: 1874822 - RNA, 19 nt, Homo sapiens
  misc_RNA (1)...(19): siRNA sense strand
aagacucucccuaugaauu

SEQ ID NO: 1874823 - RNA, 19 nt, Homo sapiens
  misc_RNA (1)...(19): siRNA sense strand
aggaggagcugagcagaag

SEQ ID NO: 1874824 - RNA, 19 nt, Homo sapiens
  misc_RNA (1)...(19): siRNA sense strand
cagcuagaccugugcaaag

SEQ ID NO: 1874825 - RNA, 19 nt, Homo sapiens
  misc_RNA (1)...(19): siRNA sense strand
agcccaaacuguggucuuu

SEQ ID NO: 1874826 - RNA, 19 nt, Homo sapiens
  misc_RNA (1)...(19): siRNA sense strand
cccagaagcccgaggacaa

SEQ ID NO: 1874827 - RNA, 19 nt, Homo sapiens
  misc_RNA (1)...(19): siRNA sense strand
gaucaugcuggccaucauc

SEQ ID NO: 1874828 - RNA, 19 nt, Homo sapiens
  misc_RNA (1)...(19): siRNA sense strand
gacccagcguaccggaaga

SEQ ID NO: 1874829 - RNA, 19 nt, Homo sapiens
  misc_RNA (1)...(19): siRNA sense strand
gccucaagaaagagaauaa

SEQ ID NO: 1874830 - RNA, 19 nt, Homo sapiens
  misc_RNA (1)...(19): siRNA sense strand
ggagccagucucagcuaga

SEQ ID NO: 1874831 - RNA, 19 nt, Homo sapiens
  misc_RNA (1)...(19): siRNA sense strand
caacgagcaccgcaagaac

SEQ ID NO: 1874832 - RNA, 19 nt, Homo sapiens
  misc_RNA (1)...(19): siRNA sense strand
caggaggagcugagcagaa

SEQ ID NO: 1874833 - RNA, 19 nt, Homo sapiens
  misc_RNA (1)...(19): siRNA sense strand
gcggagccagucucagcua

SEQ ID NO: 1874834 - RNA, 19 nt, Homo sapiens
  misc_RNA (1)...(19): siRNA sense strand
gacucucccuaugaauuga

SEQ ID NO: 1874835 - RNA, 19 nt, Homo sapiens
  misc_RNA (1)...(19): siRNA sense strand
gggaggcugugguucuugu

SEQ ID NO: 1874836 - RNA, 19 nt, Homo sapiens
  misc_RNA (1)...(19): siRNA sense strand
caagggaggcugugguucu

SEQ ID NO: 1874837 - RNA, 19 nt, Homo sapiens
  misc_RNA (1)...(19): siRNA sense strand
gcugcaagcccugcuguug

SEQ ID NO: 1874838 - RNA, 19 nt, Homo sapiens
  misc_RNA (1)...(19): siRNA sense strand
gcccugcuguugcucuuca

SEQ ID NO: 1874839 - RNA, 19 nt, Homo sapiens
  misc_RNA (1)...(19): siRNA sense strand
gcugugucccugugugcua

SEQ ID NO: 1874840 - RNA, 19 nt, Homo sapiens
  misc_RNA (1)...(19): siRNA sense strand
aagggaggcugugguucuu

SEQ ID NO: 1874841 - RNA, 19 nt, Homo sapiens
  misc_RNA (1)...(19): siRNA sense strand
caggaaagguccaaguuua

SEQ ID NO: 1874842 - RNA, 19 nt, Homo sapiens
  misc_RNA (1)...(19): siRNA sense strand
gcucagaucucuacccauu

SEQ ID NO: 1874843 - RNA, 19 nt, Homo sapiens
  misc_RNA (1)...(19): siRNA sense strand
gagcauagcaccugucauu

SEQ ID NO: 1874844 - RNA, 19 nt, Homo sapiens
  misc_RNA (1)...(19): siRNA sense strand
uggaauagcccucgucuua

SEQ ID NO: 1874845 - RNA, 19 nt, Homo sapiens
  misc_RNA (1)...(19): siRNA sense strand
gaauagcccucgucuuaca

SEQ ID NO: 1874846 - RNA, 19 nt, Homo sapiens
  misc_RNA (1)...(19): siRNA sense strand
ccucauagguggcuucauu

SEQ ID NO: 1874847 - RNA, 19 nt, Homo sapiens
  misc_RNA (1)...(19): siRNA sense strand
cauagcaccugucauugua

SEQ ID NO: 1874848 - RNA, 19 nt, Homo sapiens
  misc_RNA (1)...(19): siRNA sense strand
caucauauccuccuugaaa

SEQ ID NO: 1874849 - RNA, 19 nt, Homo sapiens
  misc_RNA (1)...(19): siRNA sense strand
ggaggaaugucuucuucuu

SEQ ID NO: 1874850 - RNA, 19 nt, Homo sapiens
  misc_RNA (1)...(19): siRNA sense strand
gacgcucucuugcggauua

SEQ ID NO: 1874851 - RNA, 19 nt, Homo sapiens
  misc_RNA (1)...(19): siRNA sense strand
caucaaagcuaugcucaga

SEQ ID NO: 1874852 - RNA, 19 nt, Homo sapiens
  misc_RNA (1)...(19): siRNA sense strand
agaagcagauguccaagaa

SEQ ID NO: 1874853 - RNA, 19 nt, Homo sapiens
  misc_RNA (1)...(19): siRNA sense strand
caacuuacaucagcucugu

SEQ ID NO: 1874854 - RNA, 19 nt, Homo sapiens
  misc_RNA (1)...(19): siRNA sense strand
ucagaucucuacccauuug

SEQ ID NO: 1874855 - RNA, 19 nt, Homo sapiens
  misc_RNA (1)...(19): siRNA sense strand
gucagcggauuucuucuua

SEQ ID NO: 1874856 - RNA, 19 nt, Homo sapiens
  misc_RNA (1)...(19): siRNA sense strand
agaaugggcuaaagagaga

SEQ ID NO: 1874857 - RNA, 19 nt, Homo sapiens
  misc_RNA (1)...(19): siRNA sense strand
caacaggucgggucuucua

SEQ ID NO: 1874858 - RNA, 19 nt, Homo sapiens
  misc_RNA (1)...(19): siRNA sense strand
gcggauuucuucuuaguca

SEQ ID NO: 1874859 - RNA, 19 nt, Homo sapiens
  misc_RNA (1)...(19): siRNA sense strand
aagcagauguccaagaaug

SEQ ID NO: 1874860 - RNA, 19 nt, Homo sapiens
  misc_RNA (1)...(19): siRNA sense strand
ucaaagcuaugcucagauc

SEQ ID NO: 1874861 - RNA, 19 nt, Homo sapiens
  misc_RNA (1)...(19): siRNA sense strand
cagagacaauggacuucua

SEQ ID NO: 1874862 - RNA, 19 nt, Homo sapiens
  misc_RNA (1)...(19): siRNA sense strand
gcuccaagguauuccaguu

SEQ ID NO: 1874863 - RNA, 19 nt, Homo sapiens
  misc_RNA (1)...(19): siRNA sense strand
gaaagguccaaguuuaugu

SEQ ID NO: 1874864 - RNA, 19 nt, Homo sapiens
  misc_RNA (1)...(19): siRNA sense strand
ggaaagguccaaguuuaug

SEQ ID NO: 1874865 - RNA, 19 nt, Homo sapiens
  misc_RNA (1)...(19): siRNA sense strand
gaguuuggguggaggaaug

SEQ ID NO: 1874866 - RNA, 19 nt, Homo sapiens
  misc_RNA (1)...(19): siRNA sense strand
gcauagcaccugucauugu

SEQ ID NO: 1874867 - RNA, 19 nt, Homo sapiens
  misc_RNA (1)...(19): siRNA sense strand
auagguggcuucauuagug

SEQ ID NO: 1874868 - RNA, 19 nt, Homo sapiens
  misc_RNA (1)...(19): siRNA sense strand
gguuuguugugauuuauga

SEQ ID NO: 1874869 - RNA, 19 nt, Homo sapiens
  misc_RNA (1)...(19): siRNA sense strand
cagauuuccuucuaaccaa

SEQ ID NO: 1874870 - RNA, 19 nt, Homo sapiens
  misc_RNA (1)...(19): siRNA sense strand
cgucuuacauuucugcaau

SEQ ID NO: 1874871 - RNA, 19 nt, Homo sapiens
  misc_RNA (1)...(19): siRNA sense strand
ccaggaaagguccaaguuu

SEQ ID NO: 1874872 - RNA, 19 nt, Homo sapiens
  misc_RNA (1)...(19): siRNA sense strand
agauauugcuccaagguau

SEQ ID NO: 1874873 - RNA, 19 nt, Homo sapiens
  misc_RNA (1)...(19): siRNA sense strand
agucagggauuuauaucaa

SEQ ID NO: 1874874 - RNA, 19 nt, Homo sapiens
  misc_RNA (1)...(19): siRNA sense strand
uuacugggaugcuuuacug

SEQ ID NO: 1874875 - RNA, 19 nt, Homo sapiens
  misc_RNA (1)...(19): siRNA sense strand
uggauaagcaccucagaaa

SEQ ID NO: 1874876 - RNA, 19 nt, Homo sapiens
  misc_RNA (1)...(19): siRNA sense strand
ucugguuuguugugauuua

SEQ ID NO: 1874877 - RNA, 19 nt, Homo sapiens
  misc_RNA (1)...(19): siRNA sense strand
gaauguuacugggaugcuu

SEQ ID NO: 1874878 - RNA, 19 nt, Homo sapiens
  misc_RNA (1)...(19): siRNA sense strand
gagaagcagauguccaaga

SEQ ID NO: 1874879 - RNA, 19 nt, Homo sapiens
  misc_RNA (1)...(19): siRNA sense strand
ccucauauuuggagaagca

SEQ ID NO: 1874880 - RNA, 19 nt, Homo sapiens
  misc_RNA (1)...(19): siRNA sense strand
guggaggaaugucuucuuc

SEQ ID NO: 1874881 - RNA, 19 nt, Homo sapiens
  misc_RNA (1)...(19): siRNA sense strand
gguccaaguuuauguucug

SEQ ID NO: 1874882 - RNA, 19 nt, Homo sapiens
  misc_RNA (1)...(19): siRNA sense strand
ucagggauuuauaucaaug

SEQ ID NO: 1874883 - RNA, 19 nt, Homo sapiens
  misc_RNA (1)...(19): siRNA sense strand
caucagagacaauggacuu

SEQ ID NO: 1874884 - RNA, 19 nt, Homo sapiens
  misc_RNA (1)...(19): siRNA sense strand
gaggaaugucuucuucuug

SEQ ID NO: 1874885 - RNA, 19 nt, Homo sapiens
  misc_RNA (1)...(19): siRNA sense strand
ucacaacgauagcacaaaa

SEQ ID NO: 1874886 - RNA, 19 nt, Homo sapiens
  misc_RNA (1)...(19): siRNA sense strand
cagcggauuucuucuuagu

SEQ ID NO: 1874887 - RNA, 19 nt, Homo sapiens
  misc_RNA (1)...(19): siRNA sense strand
gggagcaucaagaggauuu

SEQ ID NO: 1874888 - RNA, 19 nt, Homo sapiens
  misc_RNA (1)...(19): siRNA sense strand
gcagauuuccuucuaacca

SEQ ID NO: 1874889 - RNA, 19 nt, Homo sapiens
  misc_RNA (1)...(19): siRNA sense strand
ugccuucucugguuuguug

SEQ ID NO: 1874890 - RNA, 19 nt, Homo sapiens
  misc_RNA (1)...(19): siRNA sense strand
ggugcugccuguugacuca

SEQ ID NO: 1874891 - RNA, 19 nt, Homo sapiens
  misc_RNA (1)...(19): siRNA sense strand
ccauuugguccauauguuu

SEQ ID NO: 1874892 - RNA, 19 nt, Homo sapiens
  misc_RNA (1)...(19): siRNA sense strand
caagaaugggcuaaagaga

SEQ ID NO: 1874893 - RNA, 19 nt, Homo sapiens
  misc_RNA (1)...(19): siRNA sense strand
gauauugcuccaagguauu

SEQ ID NO: 1874894 - RNA, 19 nt, Homo sapiens
  misc_RNA (1)...(19): siRNA sense strand
gacaauggacuucuaucug

SEQ ID NO: 1874895 - RNA, 19 nt, Homo sapiens
  misc_RNA (1)...(19): siRNA sense strand
uaacaucagagacaaugga

SEQ ID NO: 1874896 - RNA, 19 nt, Homo sapiens
  misc_RNA (1)...(19): siRNA sense strand
uacaucauauccuccuuga

SEQ ID NO: 1874897 - RNA, 19 nt, Homo sapiens
  misc_RNA (1)...(19): siRNA sense strand
cauuugguccauauguuua

SEQ ID NO: 1874898 - RNA, 19 nt, Homo sapiens
  misc_RNA (1)...(19): siRNA sense strand
caucaaugguuaguuagca

SEQ ID NO: 1874899 - RNA, 19 nt, Homo sapiens
  misc_RNA (1)...(19): siRNA sense strand
ucucugguuuguugugauu

SEQ ID NO: 1874900 - RNA, 19 nt, Homo sapiens
  misc_RNA (1)...(19): siRNA sense strand
acucuucuaccucauauuu

SEQ ID NO: 1874901 - RNA, 19 nt, Homo sapiens
  misc_RNA (1)...(19): siRNA sense strand
caucagcucuguguaccau

SEQ ID NO: 1874902 - RNA, 19 nt, Homo sapiens
  misc_RNA (1)...(19): siRNA sense strand
caagaacgaagcagacucu

SEQ ID NO: 1874903 - RNA, 19 nt, Homo sapiens
  misc_RNA (1)...(19): siRNA sense strand
cuacucuucuaccucauau

SEQ ID NO: 1874904 - RNA, 19 nt, Homo sapiens
  misc_RNA (1)...(19): siRNA sense strand
ggcccuuugucuucuauau

SEQ ID NO: 1874905 - RNA, 19 nt, Homo sapiens
  misc_RNA (1)...(19): siRNA sense strand
uagguggcuucauuaguga

SEQ ID NO: 1874906 - RNA, 19 nt, Homo sapiens
  misc_RNA (1)...(19): siRNA sense strand
cuacccauuugguccauau

SEQ ID NO: 1874907 - RNA, 19 nt, Homo sapiens
  misc_RNA (1)...(19): siRNA sense strand
ccauauguuuaggcuguuu

SEQ ID NO: 1874908 - RNA, 19 nt, Homo sapiens
  misc_RNA (1)...(19): siRNA sense strand
gcccucgucuuacauuucu

SEQ ID NO: 1874909 - RNA, 19 nt, Homo sapiens
  misc_RNA (1)...(19): siRNA sense strand
uguuaggacuacucuucua

SEQ ID NO: 1874910 - RNA, 19 nt, Homo sapiens
  misc_RNA (1)...(19): siRNA sense strand
cugaggugcugccuguuga

SEQ ID NO: 1874911 - RNA, 19 nt, Homo sapiens
  misc_RNA (1)...(19): siRNA sense strand
gcauugcuuuaucaggaau

SEQ ID NO: 1874912 - RNA, 19 nt, Homo sapiens
  misc_RNA (1)...(19): siRNA sense strand
caacagcacaagcccucaa

SEQ ID NO: 1874913 - RNA, 19 nt, Homo sapiens
  misc_RNA (1)...(19): siRNA sense strand
ccaagaaugggcuaaagag

SEQ ID NO: 1874914 - RNA, 19 nt, Homo sapiens
  misc_RNA (1)...(19): siRNA sense strand
ggaauagcccucgucuuac

SEQ ID NO: 1874915 - RNA, 19 nt, Homo sapiens
  misc_RNA (1)...(19): siRNA sense strand
ugcuuuaucaggaauguua

SEQ ID NO: 1874916 - RNA, 19 nt, Homo sapiens
  misc_RNA (1)...(19): siRNA sense strand
ucagcucuguguaccaugu

SEQ ID NO: 1874917 - RNA, 19 nt, Homo sapiens
  misc_RNA (1)...(19): siRNA sense strand
gucagggauuuauaucaau

SEQ ID NO: 1874918 - RNA, 19 nt, Homo sapiens
  misc_RNA (1)...(19): siRNA sense strand
uuaccucaauuccggcuau

SEQ ID NO: 1874919 - RNA, 19 nt, Homo sapiens
  misc_RNA (1)...(19): siRNA sense strand
uaucugcccuuccuuuuau

SEQ ID NO: 1874920 - RNA, 19 nt, Homo sapiens
  misc_RNA (1)...(19): siRNA sense strand
cccauuugguccauauguu

SEQ ID NO: 1874921 - RNA, 19 nt, Homo sapiens
  misc_RNA (1)...(19): siRNA sense strand
ggaaugucuucuucuugcu

SEQ ID NO: 1874922 - RNA, 19 nt, Homo sapiens
  misc_RNA (1)...(19): siRNA sense strand
ccugcaaaguccucaauac

SEQ ID NO: 1874923 - RNA, 19 nt, Homo sapiens
  misc_RNA (1)...(19): siRNA sense strand
agauuuccuucuaaccaaa

SEQ ID NO: 1874924 - RNA, 19 nt, Homo sapiens
  misc_RNA (1)...(19): siRNA sense strand
gcuaugcucagaucucuac

SEQ ID NO: 1874925 - RNA, 19 nt, Homo sapiens
  misc_RNA (1)...(19): siRNA sense strand
gcagccucuucccaucaaa

SEQ ID NO: 1874926 - RNA, 19 nt, Homo sapiens
  misc_RNA (1)...(19): siRNA sense strand
gguggcccuuugucuucua

SEQ ID NO: 1874927 - RNA, 19 nt, Homo sapiens
  misc_RNA (1)...(19): siRNA sense strand
gcugccuguugacucauuu

SEQ ID NO: 1874928 - RNA, 19 nt, Homo sapiens
  misc_RNA (1)...(19): siRNA sense strand
cuauaucuuuggagguguu

SEQ ID NO: 1874929 - RNA, 19 nt, Homo sapiens
  misc_RNA (1)...(19): siRNA sense strand
gagagaaaacucacucguu

SEQ ID NO: 1874930 - RNA, 19 nt, Homo sapiens
  misc_RNA (1)...(19): siRNA sense strand
uagauauugcuccaaggua

SEQ ID NO: 1874931 - RNA, 19 nt, Homo sapiens
  misc_RNA (1)...(19): siRNA sense strand
guuaacaucagagacaaug

SEQ ID NO: 1874932 - RNA, 19 nt, Homo sapiens
  misc_RNA (1)...(19): siRNA sense strand
auacauaccaacuuacauc

SEQ ID NO: 1874933 - RNA, 19 nt, Homo sapiens
  misc_RNA (1)...(19): siRNA sense strand
ccucuucccaucaaagcua

SEQ ID NO: 1874934 - RNA, 19 nt, Homo sapiens
  misc_RNA (1)...(19): siRNA sense strand
ugucuucuauaucuuugga

SEQ ID NO: 1874935 - RNA, 19 nt, Homo sapiens
  misc_RNA (1)...(19): siRNA sense strand
gaagcagauguccaagaau

SEQ ID NO: 1874936 - RNA, 19 nt, Homo sapiens
  misc_RNA (1)...(19): siRNA sense strand
ucauuugguggccuaagua

SEQ ID NO: 1874937 - RNA, 19 nt, Homo sapiens
  misc_RNA (1)...(19): siRNA sense strand
aacaacaggucgggucuuc

SEQ ID NO: 1874938 - RNA, 19 nt, Homo sapiens
  misc_RNA (1)...(19): siRNA sense strand
uagcccucgucuuacauuu

SEQ ID NO: 1874939 - RNA, 19 nt, Homo sapiens
  misc_RNA (1)...(19): siRNA sense strand
gcucuguguaccauguuaa

SEQ ID NO: 1874940 - RNA, 19 nt, Homo sapiens
  misc_RNA (1)...(19): siRNA sense strand
aaagguccaaguuuauguu

SEQ ID NO: 1874941 - RNA, 19 nt, Homo sapiens
  misc_RNA (1)...(19): siRNA sense strand
ucuaugagcugaaagaaga

SEQ ID NO: 1874942 - RNA, 19 nt, Homo sapiens
  misc_RNA (1)...(19): siRNA sense strand
gagcugacuucggaacuaa

SEQ ID NO: 1874943 - RNA, 19 nt, Homo sapiens
  misc_RNA (1)...(19): siRNA sense strand
gaaccaaggagcugacuuc

SEQ ID NO: 1874944 - RNA, 19 nt, Homo sapiens
  misc_RNA (1)...(19): siRNA sense strand
ggagcugacuucggaacua

SEQ ID NO: 1874945 - RNA, 19 nt, Homo sapiens
  misc_RNA (1)...(19): siRNA sense strand
uaagaguuacccuggauua

SEQ ID NO: 1874946 - RNA, 19 nt, Homo sapiens
  misc_RNA (1)...(19): siRNA sense strand
gaagacaagagcuacaaug

SEQ ID NO: 1874947 - RNA, 19 nt, Homo sapiens
  misc_RNA (1)...(19): siRNA sense strand
ugggcaacauuaagaguua

SEQ ID NO: 1874948 - RNA, 19 nt, Homo sapiens
  misc_RNA (1)...(19): siRNA sense strand
gaacuaaaggagaacuuca

SEQ ID NO: 1874949 - RNA, 19 nt, Homo sapiens
  misc_RNA (1)...(19): siRNA sense strand
ugaaagaagacaagagcua

SEQ ID NO: 1874950 - RNA, 19 nt, Homo sapiens
  misc_RNA (1)...(19): siRNA sense strand
gaacuuccaggacaaccaa

SEQ ID NO: 1874951 - RNA, 19 nt, Homo sapiens
  misc_RNA (1)...(19): siRNA sense strand
gaagacaaagacccgcaaa

SEQ ID NO: 1874952 - RNA, 19 nt, Homo sapiens
  misc_RNA (1)...(19): siRNA sense strand
cuucggaacuaaaggagaa

SEQ ID NO: 1874953 - RNA, 19 nt, Homo sapiens
  misc_RNA (1)...(19): siRNA sense strand
caccaucuaugagcugaaa

SEQ ID NO: 1874954 - RNA, 19 nt, Homo sapiens
  misc_RNA (1)...(19): siRNA sense strand
cgucuucccugucccaauc

SEQ ID NO: 1874955 - RNA, 19 nt, Homo sapiens
  misc_RNA (1)...(19): siRNA sense strand
aaacagggaguacuucaag

SEQ ID NO: 1874956 - RNA, 19 nt, Homo sapiens
  misc_RNA (1)...(19): siRNA sense strand
ggaacuaaaggagaacuuc

SEQ ID NO: 1874957 - RNA, 19 nt, Homo sapiens
  misc_RNA (1)...(19): siRNA sense strand
ucucugggccucccugaaa

SEQ ID NO: 1874958 - RNA, 19 nt, Homo sapiens
  misc_RNA (1)...(19): siRNA sense strand
ucaccuccguccuguuuag

SEQ ID NO: 1874959 - RNA, 19 nt, Homo sapiens
  misc_RNA (1)...(19): siRNA sense strand
ugucaccuccguccuguuu

SEQ ID NO: 1874960 - RNA, 19 nt, Homo sapiens
  misc_RNA (1)...(19): siRNA sense strand
uacccuggauuaacgaguu

SEQ ID NO: 1874961 - RNA, 19 nt, Homo sapiens
  misc_RNA (1)...(19): siRNA sense strand
gaucaggacuuuuguucca

SEQ ID NO: 1874962 - RNA, 19 nt, Homo sapiens
  misc_RNA (1)...(19): siRNA sense strand
uguaugccaccaucuauga

SEQ ID NO: 1874963 - RNA, 19 nt, Homo sapiens
  misc_RNA (1)...(19): siRNA sense strand
gacaaagacccgcaaaaga

SEQ ID NO: 1874964 - RNA, 19 nt, Homo sapiens
  misc_RNA (1)...(19): siRNA sense strand
acuacuggaucaggacuuu

SEQ ID NO: 1874965 - RNA, 19 nt, Homo sapiens
  misc_RNA (1)...(19): siRNA sense strand
agggaguacuucaagauca

SEQ ID NO: 1874966 - RNA, 19 nt, Homo sapiens
  misc_RNA (1)...(19): siRNA sense strand
gagcugaaagaagacaaga

SEQ ID NO: 1874967 - RNA, 19 nt, Homo sapiens
  misc_RNA (1)...(19): siRNA sense strand
ugacuucggaacuaaagga

SEQ ID NO: 1874968 - RNA, 19 nt, Homo sapiens
  misc_RNA (1)...(19): siRNA sense strand
aagacaagagcuacaaugu

SEQ ID NO: 1874969 - RNA, 19 nt, Homo sapiens
  misc_RNA (1)...(19): siRNA sense strand
gggaguacuucaagaucac

SEQ ID NO: 1874970 - RNA, 19 nt, Homo sapiens
  misc_RNA (1)...(19): siRNA sense strand
acaaagacccgcaaaagau

SEQ ID NO: 1874971 - RNA, 19 nt, Homo sapiens
  misc_RNA (1)...(19): siRNA sense strand
ucacgcugggcaacauuaa

SEQ ID NO: 1874972 - RNA, 19 nt, Homo sapiens
  misc_RNA (1)...(19): siRNA sense strand
ccaucuaugagcugaaaga

SEQ ID NO: 1874973 - RNA, 19 nt, Homo sapiens
  misc_RNA (1)...(19): siRNA sense strand
gaacagaaccuucaggaau

SEQ ID NO: 1874974 - RNA, 19 nt, Homo sapiens
  misc_RNA (1)...(19): siRNA sense strand
ggauacacgugcauuuaaa

SEQ ID NO: 1874975 - RNA, 19 nt, Homo sapiens
  misc_RNA (1)...(19): siRNA sense strand
ggaacaacuuuaccaguga

SEQ ID NO: 1874976 - RNA, 19 nt, Homo sapiens
  misc_RNA (1)...(19): siRNA sense strand
gcagacaaauaucaaaugg

SEQ ID NO: 1874977 - RNA, 19 nt, Homo sapiens
  misc_RNA (1)...(19): siRNA sense strand
gaacaacuuuaccagugau

SEQ ID NO: 1874978 - RNA, 19 nt, Homo sapiens
  misc_RNA (1)...(19): siRNA sense strand
aacagaaccuucaggaauu

SEQ ID NO: 1874979 - RNA, 19 nt, Homo sapiens
  misc_RNA (1)...(19): siRNA sense strand
ucacaaugcagacaaauau

SEQ ID NO: 1874980 - RNA, 19 nt, Homo sapiens
  misc_RNA (1)...(19): siRNA sense strand
gcacuuaagccucggaaca

SEQ ID NO: 1874981 - RNA, 19 nt, Homo sapiens
  misc_RNA (1)...(19): siRNA sense strand
gagucacaaugcagacaaa

SEQ ID NO: 1874982 - RNA, 19 nt, Homo sapiens
  misc_RNA (1)...(19): siRNA sense strand
gggagauuguugcaaggaa

SEQ ID NO: 1874983 - RNA, 19 nt, Homo sapiens
  misc_RNA (1)...(19): siRNA sense strand
agaaaggaaugaagaacag

SEQ ID NO: 1874984 - RNA, 19 nt, Homo sapiens
  misc_RNA (1)...(19): siRNA sense strand
gaaugaagaacagaaccuu

SEQ ID NO: 1874985 - RNA, 19 nt, Homo sapiens
  misc_RNA (1)...(19): siRNA sense strand
gaaaggaaugaagaacaga

SEQ ID NO: 1874986 - RNA, 19 nt, Homo sapiens
  misc_RNA (1)...(19): siRNA sense strand
acagaaccuucaggaauug

SEQ ID NO: 1874987 - RNA, 19 nt, Homo sapiens
  misc_RNA (1)...(19): siRNA sense strand
aauaucaaaugggagauug

SEQ ID NO: 1874988 - RNA, 19 nt, Homo sapiens
  misc_RNA (1)...(19): siRNA sense strand
uggauacacgugcauuuaa

SEQ ID NO: 1874989 - RNA, 19 nt, Homo sapiens
  misc_RNA (1)...(19): siRNA sense strand
cagaaaggaaugaagaaca

SEQ ID NO: 1874990 - RNA, 19 nt, Homo sapiens
  misc_RNA (1)...(19): siRNA sense strand
gucacaaugcagacaaaua

SEQ ID NO: 1874991 - RNA, 19 nt, Homo sapiens
  misc_RNA (1)...(19): siRNA sense strand
cuucaggaauugagucaca

SEQ ID NO: 1874992 - RNA, 19 nt, Homo sapiens
  misc_RNA (1)...(19): siRNA sense strand
acaaugcagacaaauauca

SEQ ID NO: 1874993 - RNA, 19 nt, Homo sapiens
  misc_RNA (1)...(19): siRNA sense strand
gagauuguugcaaggaaga

SEQ ID NO: 1874994 - RNA, 19 nt, Homo sapiens
  misc_RNA (1)...(19): siRNA sense strand
gccguucuccagcgcuuua

SEQ ID NO: 1874995 - RNA, 19 nt, Homo sapiens
  misc_RNA (1)...(19): siRNA sense strand
caaugcagacaaauaucaa

SEQ ID NO: 1874996 - RNA, 19 nt, Homo sapiens
  misc_RNA (1)...(19): siRNA sense strand
caacuuuaccagugauucu

SEQ ID NO: 1874997 - RNA, 19 nt, Homo sapiens
  misc_RNA (1)...(19): siRNA sense strand
uaccagaaaggaaugaaga

SEQ ID NO: 1874998 - RNA, 19 nt, Homo sapiens
  misc_RNA (1)...(19): siRNA sense strand
aaaggaaugaagaacagaa

SEQ ID NO: 1874999 - RNA, 19 nt, Homo sapiens
  misc_RNA (1)...(19): siRNA sense strand
uaucaaaugggagauuguu

SEQ ID NO: 1875000 - RNA, 19 nt, Homo sapiens
  misc_RNA (1)...(19): siRNA sense strand
caaaugggagauuguugca

SEQ ID NO: 1875001 - RNA, 19 nt, Homo sapiens
  misc_RNA (1)...(19): siRNA sense strand
gaaccuucaggaauugagu

SEQ ID NO: 1875002 - RNA, 19 nt, Homo sapiens
  misc_RNA (1)...(19): siRNA sense strand
uauggauacacgugcauuu

SEQ ID NO: 1875003 - RNA, 19 nt, Homo sapiens
  misc_RNA (1)...(19): siRNA sense strand
ggaaugaagaacagaaccu

SEQ ID NO: 1875004 - RNA, 19 nt, Homo sapiens
  misc_RNA (1)...(19): siRNA sense strand
auggauacacgugcauuua

SEQ ID NO: 1875005 - RNA, 19 nt, Homo sapiens
  misc_RNA (1)...(19): siRNA sense strand
gguaugaucuucuucuguu

SEQ ID NO: 1875006 - RNA, 19 nt, Homo sapiens
  misc_RNA (1)...(19): siRNA sense strand
caaaggauguucaagaaag

SEQ ID NO: 1875007 - RNA, 19 nt, Homo sapiens
  misc_RNA (1)...(19): siRNA sense strand
ggccugauguccaugauga

SEQ ID NO: 1875008 - RNA, 19 nt, Homo sapiens
  misc_RNA (1)...(19): siRNA sense strand
uauauucacugaccguuug

SEQ ID NO: 1875009 - RNA, 19 nt, Homo sapiens
  misc_RNA (1)...(19): siRNA sense strand
ccauguggccuucuacuuu

SEQ ID NO: 1875010 - RNA, 19 nt, Homo sapiens
  misc_RNA (1)...(19): siRNA sense strand
cugaguaccuucauguuug

SEQ ID NO: 1875011 - RNA, 19 nt, Homo sapiens
  misc_RNA (1)...(19): siRNA sense strand
gagauuccagcaaggauaa

SEQ ID NO: 1875012 - RNA, 19 nt, Homo sapiens
  misc_RNA (1)...(19): siRNA sense strand
uuaagaagaucuacuugca

SEQ ID NO: 1875013 - RNA, 19 nt, Homo sapiens
  misc_RNA (1)...(19): siRNA sense strand
uggcucagcucaggaagua

SEQ ID NO: 1875014 - RNA, 19 nt, Homo sapiens
  misc_RNA (1)...(19): siRNA sense strand
caucugggccuucggaauu

SEQ ID NO: 1875015 - RNA, 19 nt, Homo sapiens
  misc_RNA (1)...(19): siRNA sense strand
gcccuuggcuacuuuguuc

SEQ ID NO: 1875016 - RNA, 19 nt, Homo sapiens
  misc_RNA (1)...(19): siRNA sense strand
gcugaguaccuucauguuu

SEQ ID NO: 1875017 - RNA, 19 nt, Homo sapiens
  misc_RNA (1)...(19): siRNA sense strand
cagcaaggauaagauguug

SEQ ID NO: 1875018 - RNA, 19 nt, Homo sapiens
  misc_RNA (1)...(19): siRNA sense strand
cauguggccuucuacuuug

SEQ ID NO: 1875019 - RNA, 19 nt, Homo sapiens
  misc_RNA (1)...(19): siRNA sense strand
cuacuuuguucccuaugua

SEQ ID NO: 1875020 - RNA, 19 nt, Homo sapiens
  misc_RNA (1)...(19): siRNA sense strand
gcaggaggcagaccaggaa

SEQ ID NO: 1875021 - RNA, 19 nt, Homo sapiens
  misc_RNA (1)...(19): siRNA sense strand
aaaggauguucaagaaaga

SEQ ID NO: 1875022 - RNA, 19 nt, Homo sapiens
  misc_RNA (1)...(19): siRNA sense strand
gggauucucuuugguugug

SEQ ID NO: 1875023 - RNA, 19 nt, Homo sapiens
  misc_RNA (1)...(19): siRNA sense strand
agaaagagcagagagauuc

SEQ ID NO: 1875024 - RNA, 19 nt, Homo sapiens
  misc_RNA (1)...(19): siRNA sense strand
cguuugggcugccgaauca

SEQ ID NO: 1875025 - RNA, 19 nt, Homo sapiens
  misc_RNA (1)...(19): siRNA sense strand
guucucccauugugaguau

SEQ ID NO: 1875026 - RNA, 19 nt, Homo sapiens
  misc_RNA (1)...(19): siRNA sense strand
auguacaccugaugaagua

SEQ ID NO: 1875027 - RNA, 19 nt, Homo sapiens
  misc_RNA (1)...(19): siRNA sense strand
cuacuucaccuacgggauu

SEQ ID NO: 1875028 - RNA, 19 nt, Homo sapiens
  misc_RNA (1)...(19): siRNA sense strand
ucaaaggauguucaagaaa

SEQ ID NO: 1875029 - RNA, 19 nt, Homo sapiens
  misc_RNA (1)...(19): siRNA sense strand
aucaaaggauguucaagaa

SEQ ID NO: 1875030 - RNA, 19 nt, Homo sapiens
  misc_RNA (1)...(19): siRNA sense strand
gcuacuuuguucccuaugu

SEQ ID NO: 1875031 - RNA, 19 nt, Homo sapiens
  misc_RNA (1)...(19): siRNA sense strand
cauccugggccacuacuuu

SEQ ID NO: 1875032 - RNA, 19 nt, Homo sapiens
  misc_RNA (1)...(19): siRNA sense strand
ucaagaaagagcagagaga

SEQ ID NO: 1875033 - RNA, 19 nt, Homo sapiens
  misc_RNA (1)...(19): siRNA sense strand
caagaaagagcagagagau

SEQ ID NO: 1875034 - RNA, 19 nt, Homo sapiens
  misc_RNA (1)...(19): siRNA sense strand
gugcaacggcuccaucuuc

SEQ ID NO: 1875035 - RNA, 19 nt, Homo sapiens
  misc_RNA (1)...(19): siRNA sense strand
cuucauguuuguucuuaug

SEQ ID NO: 1875036 - RNA, 19 nt, Homo sapiens
  misc_RNA (1)...(19): siRNA sense strand
ugaguaccuucauguuugu

SEQ ID NO: 1875037 - RNA, 19 nt, Homo sapiens
  misc_RNA (1)...(19): siRNA sense strand
cgauggguaugaucuucuu

SEQ ID NO: 1875038 - RNA, 19 nt, Homo sapiens
  misc_RNA (1)...(19): siRNA sense strand
gcagcagcagaaacaagua

SEQ ID NO: 1875039 - RNA, 19 nt, Homo sapiens
  misc_RNA (1)...(19): siRNA sense strand
gggcuguaauccucuucuu

SEQ ID NO: 1875040 - RNA, 19 nt, Homo sapiens
  misc_RNA (1)...(19): siRNA sense strand
guauauucacugaccguuu

SEQ ID NO: 1875041 - RNA, 19 nt, Homo sapiens
  misc_RNA (1)...(19): siRNA sense strand
gacuuaagaagaucuacuu

SEQ ID NO: 1875042 - RNA, 19 nt, Homo sapiens
  misc_RNA (1)...(19): siRNA sense strand
gcuguuccuucgccuuuca

SEQ ID NO: 1875043 - RNA, 19 nt, Homo sapiens
  misc_RNA (1)...(19): siRNA sense strand
ccagcaaggauaagauguu

SEQ ID NO: 1875044 - RNA, 19 nt, Homo sapiens
  misc_RNA (1)...(19): siRNA sense strand
ucccuggacuuaagaagau

SEQ ID NO: 1875045 - RNA, 19 nt, Homo sapiens
  misc_RNA (1)...(19): siRNA sense strand
cuucuucuguucucccauu

SEQ ID NO: 1875046 - RNA, 19 nt, Homo sapiens
  misc_RNA (1)...(19): siRNA sense strand
caacgcacuuaccgcaucu

SEQ ID NO: 1875047 - RNA, 19 nt, Homo sapiens
  misc_RNA (1)...(19): siRNA sense strand
gggcugccguugcuuucau

SEQ ID NO: 1875048 - RNA, 19 nt, Homo sapiens
  misc_RNA (1)...(19): siRNA sense strand
ugccggagcuggaguucga

SEQ ID NO: 1875049 - RNA, 19 nt, Homo sapiens
  misc_RNA (1)...(19): siRNA sense strand
agagauuccagcaaggaua

SEQ ID NO: 1875050 - RNA, 19 nt, Homo sapiens
  misc_RNA (1)...(19): siRNA sense strand
guaugaucuucuucuguuc

SEQ ID NO: 1875051 - RNA, 19 nt, Homo sapiens
  misc_RNA (1)...(19): siRNA sense strand
ugucaggccacaucaguga

SEQ ID NO: 1875052 - RNA, 19 nt, Homo sapiens
  misc_RNA (1)...(19): siRNA sense strand
guacaccugaugaaguaug

SEQ ID NO: 1875053 - RNA, 19 nt, Homo sapiens
  misc_RNA (1)...(19): siRNA sense strand
ccuuugcgauggcuucuuc

SEQ ID NO: 1875054 - RNA, 19 nt, Homo sapiens
  misc_RNA (1)...(19): siRNA sense strand
acaaguaccagccacaaag

SEQ ID NO: 1875055 - RNA, 19 nt, Homo sapiens
  misc_RNA (1)...(19): siRNA sense strand
agaucaagcuggcccaaac

SEQ ID NO: 1875056 - RNA, 19 nt, Homo sapiens
  misc_RNA (1)...(19): siRNA sense strand
guaccuucauguuuguucu

SEQ ID NO: 1875057 - RNA, 19 nt, Homo sapiens
  misc_RNA (1)...(19): siRNA sense strand
ccuacgggauucucuuugg

SEQ ID NO: 1875058 - RNA, 19 nt, Homo sapiens
  misc_RNA (1)...(19): siRNA sense strand
aagaaagagcagagagauu

SEQ ID NO: 1875059 - RNA, 19 nt, Homo sapiens
  misc_RNA (1)...(19): siRNA sense strand
ggacuuaagaagaucuacu

SEQ ID NO: 1875060 - RNA, 19 nt, Homo sapiens
  misc_RNA (1)...(19): siRNA sense strand
aaacaaguaccagccacaa

SEQ ID NO: 1875061 - RNA, 19 nt, Homo sapiens
  misc_RNA (1)...(19): siRNA sense strand
ggugcugaguaccuucaug

SEQ ID NO: 1875062 - RNA, 19 nt, Homo sapiens
  misc_RNA (1)...(19): siRNA sense strand
ggccuacuccgcaacuguu

SEQ ID NO: 1875063 - RNA, 19 nt, Homo sapiens
  misc_RNA (1)...(19): siRNA sense strand
uggcuacuuuguucccuau

SEQ ID NO: 1875064 - RNA, 19 nt, Homo sapiens
  misc_RNA (1)...(19): siRNA sense strand
caccuacgggauucucuuu

SEQ ID NO: 1875065 - RNA, 19 nt, Homo sapiens
  misc_RNA (1)...(19): siRNA sense strand
gagagauuccagcaaggau

SEQ ID NO: 1875066 - RNA, 19 nt, Homo sapiens
  misc_RNA (1)...(19): siRNA sense strand
ggccuugggcgucuugugu

SEQ ID NO: 1875067 - RNA, 19 nt, Homo sapiens
  misc_RNA (1)...(19): siRNA sense strand
ugggugcucuuggugugua

SEQ ID NO: 1875068 - RNA, 19 nt, Homo sapiens
  misc_RNA (1)...(19): siRNA sense strand
gugcugaguaccuucaugu

SEQ ID NO: 1875069 - RNA, 19 nt, Homo sapiens
  misc_RNA (1)...(19): siRNA sense strand
uggaggaggaguucucaga

SEQ ID NO: 1875070 - RNA, 19 nt, Homo sapiens
  misc_RNA (1)...(19): siRNA sense strand
ggagaaagcuaaagugauu

SEQ ID NO: 1875071 - RNA, 19 nt, Homo sapiens
  misc_RNA (1)...(19): siRNA sense strand
ggagggagcuguagaagau

SEQ ID NO: 1875072 - RNA, 19 nt, Homo sapiens
  misc_RNA (1)...(19): siRNA sense strand
caagacugaucaauacuua

SEQ ID NO: 1875073 - RNA, 19 nt, Homo sapiens
  misc_RNA (1)...(19): siRNA sense strand
ccaaagaguccauuaauuu

SEQ ID NO: 1875074 - RNA, 19 nt, Homo sapiens
  misc_RNA (1)...(19): siRNA sense strand
gaaagagcuuguuggauga

SEQ ID NO: 1875075 - RNA, 19 nt, Homo sapiens
  misc_RNA (1)...(19): siRNA sense strand
gaagaccacucaacgaaga

SEQ ID NO: 1875076 - RNA, 19 nt, Homo sapiens
  misc_RNA (1)...(19): siRNA sense strand
ggaaguagaugccuuggau

SEQ ID NO: 1875077 - RNA, 19 nt, Homo sapiens
  misc_RNA (1)...(19): siRNA sense strand
aagaucagcugccauguua

SEQ ID NO: 1875078 - RNA, 19 nt, Homo sapiens
  misc_RNA (1)...(19): siRNA sense strand
guagagagcuggcugaaag

SEQ ID NO: 1875079 - RNA, 19 nt, Homo sapiens
  misc_RNA (1)...(19): siRNA sense strand
gagcucagauugauaggaa

SEQ ID NO: 1875080 - RNA, 19 nt, Homo sapiens
  misc_RNA (1)...(19): siRNA sense strand
gccaaagaguccauuaauu

SEQ ID NO: 1875081 - RNA, 19 nt, Homo sapiens
  misc_RNA (1)...(19): siRNA sense strand
gaaccauaccgcauguuua

SEQ ID NO: 1875082 - RNA, 19 nt, Homo sapiens
  misc_RNA (1)...(19): siRNA sense strand
ugucagagcucucgauguu

SEQ ID NO: 1875083 - RNA, 19 nt, Homo sapiens
  misc_RNA (1)...(19): siRNA sense strand
ccagaggcuucuauaagua

SEQ ID NO: 1875084 - RNA, 19 nt, Homo sapiens
  misc_RNA (1)...(19): siRNA sense strand
uggaugagauuguccuuaa

SEQ ID NO: 1875085 - RNA, 19 nt, Homo sapiens
  misc_RNA (1)...(19): siRNA sense strand
gcagacagacuucaagaga

SEQ ID NO: 1875086 - RNA, 19 nt, Homo sapiens
  misc_RNA (1)...(19): siRNA sense strand
uaaagggaguucagcaaga

SEQ ID NO: 1875087 - RNA, 19 nt, Homo sapiens
  misc_RNA (1)...(19): siRNA sense strand
gaagacagucggcuaugaa

SEQ ID NO: 1875088 - RNA, 19 nt, Homo sapiens
  misc_RNA (1)...(19): siRNA sense strand
gaagaucagcugccauguu

SEQ ID NO: 1875089 - RNA, 19 nt, Homo sapiens
  misc_RNA (1)...(19): siRNA sense strand
cauccaagacugaucaaua

SEQ ID NO: 1875090 - RNA, 19 nt, Homo sapiens
  misc_RNA (1)...(19): siRNA sense strand
ccaugaaguucgagagaaa

SEQ ID NO: 1875091 - RNA, 19 nt, Homo sapiens
  misc_RNA (1)...(19): siRNA sense strand
ccacagggguuaucuauga

SEQ ID NO: 1875092 - RNA, 19 nt, Homo sapiens
  misc_RNA (1)...(19): siRNA sense strand
gcuacgguguucaguauga

SEQ ID NO: 1875093 - RNA, 19 nt, Homo sapiens
  misc_RNA (1)...(19): siRNA sense strand
ggauuaagccagaagauca

SEQ ID NO: 1875094 - RNA, 19 nt, Homo sapiens
  misc_RNA (1)...(19): siRNA sense strand
agacagacuucaagagaga

SEQ ID NO: 1875095 - RNA, 19 nt, Homo sapiens
  misc_RNA (1)...(19): siRNA sense strand
gaacagaagguuacauagg

SEQ ID NO: 1875096 - RNA, 19 nt, Homo sapiens
  misc_RNA (1)...(19): siRNA sense strand
caucggaaagggacauuua

SEQ ID NO: 1875097 - RNA, 19 nt, Homo sapiens
  misc_RNA (1)...(19): siRNA sense strand
gacagucggcuaugaauga

SEQ ID NO: 1875098 - RNA, 19 nt, Homo sapiens
  misc_RNA (1)...(19): siRNA sense strand
agaagccacuuaugaauca

SEQ ID NO: 1875099 - RNA, 19 nt, Homo sapiens
  misc_RNA (1)...(19): siRNA sense strand
aaauagaagccacuuauga

SEQ ID NO: 1875100 - RNA, 19 nt, Homo sapiens
  misc_RNA (1)...(19): siRNA sense strand
guuggaaccugaaggaaug

SEQ ID NO: 1875101 - RNA, 19 nt, Homo sapiens
  misc_RNA (1)...(19): siRNA sense strand
ggaucagccuucuauagga

SEQ ID NO: 1875102 - RNA, 19 nt, Homo sapiens
  misc_RNA (1)...(19): siRNA sense strand
gaacaugcagaaagaaauc

SEQ ID NO: 1875103 - RNA, 19 nt, Homo sapiens
  misc_RNA (1)...(19): siRNA sense strand
caaagaguccauuaauuuc

SEQ ID NO: 1875104 - RNA, 19 nt, Homo sapiens
  misc_RNA (1)...(19): siRNA sense strand
ccagagcccuugaagaagu

SEQ ID NO: 1875105 - RNA, 19 nt, Homo sapiens
  misc_RNA (1)...(19): siRNA sense strand
gaucagccuucuauaggau

SEQ ID NO: 1875106 - RNA, 19 nt, Homo sapiens
  misc_RNA (1)...(19): siRNA sense strand
cgaagacagucggcuauga

SEQ ID NO: 1875107 - RNA, 19 nt, Homo sapiens
  misc_RNA (1)...(19): siRNA sense strand
gaaaauagaagccacuuau

SEQ ID NO: 1875108 - RNA, 19 nt, Homo sapiens
  misc_RNA (1)...(19): siRNA sense strand
caacaacgauaugaaagag

SEQ ID NO: 1875109 - RNA, 19 nt, Homo sapiens
  misc_RNA (1)...(19): siRNA sense strand
auaggaaacucuacaaaca

SEQ ID NO: 1875110 - RNA, 19 nt, Homo sapiens
  misc_RNA (1)...(19): siRNA sense strand
gaaggcauuucuguguuga

SEQ ID NO: 1875111 - RNA, 19 nt, Homo sapiens
  misc_RNA (1)...(19): siRNA sense strand
uuacauaggagucuugauu

SEQ ID NO: 1875112 - RNA, 19 nt, Homo sapiens
  misc_RNA (1)...(19): siRNA sense strand
ggaaucaacgccagucuuc

SEQ ID NO: 1875113 - RNA, 19 nt, Homo sapiens
  misc_RNA (1)...(19): siRNA sense strand
gauacugucccuccauuga

SEQ ID NO: 1875114 - RNA, 19 nt, Homo sapiens
  misc_RNA (1)...(19): siRNA sense strand
ucgauguucugaaguauga

SEQ ID NO: 1875115 - RNA, 19 nt, Homo sapiens
  misc_RNA (1)...(19): siRNA sense strand
cagcugaguuacaagagaa

SEQ ID NO: 1875116 - RNA, 19 nt, Homo sapiens
  misc_RNA (1)...(19): siRNA sense strand
gcauccagcaggacguuua

SEQ ID NO: 1875117 - RNA, 19 nt, Homo sapiens
  misc_RNA (1)...(19): siRNA sense strand
cgagagaaacuacauuuua

SEQ ID NO: 1875118 - RNA, 19 nt, Homo sapiens
  misc_RNA (1)...(19): siRNA sense strand
aacagaagguuacauagga

SEQ ID NO: 1875119 - RNA, 19 nt, Homo sapiens
  misc_RNA (1)...(19): siRNA sense strand
gcuaccagcugaguuacaa

SEQ ID NO: 1875120 - RNA, 19 nt, Homo sapiens
  misc_RNA (1)...(19): siRNA sense strand
aaugagacaguauggauua

SEQ ID NO: 1875121 - RNA, 19 nt, Homo sapiens
  misc_RNA (1)...(19): siRNA sense strand
aaacagaacaugcagaaag

SEQ ID NO: 1875122 - RNA, 19 nt, Homo sapiens
  misc_RNA (1)...(19): siRNA sense strand
agaugaagcucuccaacug

SEQ ID NO: 1875123 - RNA, 19 nt, Homo sapiens
  misc_RNA (1)...(19): siRNA sense strand
gaugagauuguccuuaaga

SEQ ID NO: 1875124 - RNA, 19 nt, Homo sapiens
  misc_RNA (1)...(19): siRNA sense strand
cagcugccauguuacuuga

SEQ ID NO: 1875125 - RNA, 19 nt, Homo sapiens
  misc_RNA (1)...(19): siRNA sense strand
gagagaaacuacauuuuag

SEQ ID NO: 1875126 - RNA, 19 nt, Homo sapiens
  misc_RNA (1)...(19): siRNA sense strand
gauaugaaagagcuuguug

SEQ ID NO: 1875127 - RNA, 19 nt, Homo sapiens
  misc_RNA (1)...(19): siRNA sense strand
ccgaacagaagguuacaua

SEQ ID NO: 1875128 - RNA, 19 nt, Homo sapiens
  misc_RNA (1)...(19): siRNA sense strand
caucagaggcuuggagaaa

SEQ ID NO: 1875129 - RNA, 19 nt, Homo sapiens
  misc_RNA (1)...(19): siRNA sense strand
gacgcuaccagcugaguua

SEQ ID NO: 1875130 - RNA, 19 nt, Homo sapiens
  misc_RNA (1)...(19): siRNA sense strand
aacagaacaugcagaaaga

SEQ ID NO: 1875131 - RNA, 19 nt, Homo sapiens
  misc_RNA (1)...(19): siRNA sense strand
acauaggagucuugauuga

SEQ ID NO: 1875132 - RNA, 19 nt, Homo sapiens
  misc_RNA (1)...(19): siRNA sense strand
ggauggaagcacaguauau

SEQ ID NO: 1875133 - RNA, 19 nt, Homo sapiens
  misc_RNA (1)...(19): siRNA sense strand
gacaauccauccauaccau

SEQ ID NO: 1875134 - RNA, 19 nt, Homo sapiens
  misc_RNA (1)...(19): siRNA sense strand
uaucagggaugugucuuug

SEQ ID NO: 1875135 - RNA, 19 nt, Homo sapiens
  misc_RNA (1)...(19): siRNA sense strand
gaccuagauuauuugacua

SEQ ID NO: 1875136 - RNA, 19 nt, Homo sapiens
  misc_RNA (1)...(19): siRNA sense strand
gaaccugaaggaauggauu

SEQ ID NO: 1875137 - RNA, 19 nt, Homo sapiens
  misc_RNA (1)...(19): siRNA sense strand
ugagaggcaugauuguaau

SEQ ID NO: 1875138 - RNA, 19 nt, Homo sapiens
  misc_RNA (1)...(19): siRNA sense strand
gugaagaccacucaacgaa

SEQ ID NO: 1875139 - RNA, 19 nt, Homo sapiens
  misc_RNA (1)...(19): siRNA sense strand
caucaucaaucugcugaga

SEQ ID NO: 1875140 - RNA, 19 nt, Homo sapiens
  misc_RNA (1)...(19): siRNA sense strand
agucugguguacauuauaa

SEQ ID NO: 1875141 - RNA, 19 nt, Homo sapiens
  misc_RNA (1)...(19): siRNA sense strand
cagagcccuugaagaagua

SEQ ID NO: 1875142 - RNA, 19 nt, Homo sapiens
  misc_RNA (1)...(19): siRNA sense strand
ugaggaaguugacauggau

SEQ ID NO: 1875143 - RNA, 19 nt, Homo sapiens
  misc_RNA (1)...(19): siRNA sense strand
cccagaggcuucuauaagu

SEQ ID NO: 1875144 - RNA, 19 nt, Homo sapiens
  misc_RNA (1)...(19): siRNA sense strand
cgaguagaguuccguuugu

SEQ ID NO: 1875145 - RNA, 19 nt, Homo sapiens
  misc_RNA (1)...(19): siRNA sense strand
uccauaccauucagcuuua

SEQ ID NO: 1875146 - RNA, 19 nt, Homo sapiens
  misc_RNA (1)...(19): siRNA sense strand
gauggaagcacaguauaug

SEQ ID NO: 1875147 - RNA, 19 nt, Homo sapiens
  misc_RNA (1)...(19): siRNA sense strand
aauagaagccacuuaugaa

SEQ ID NO: 1875148 - RNA, 19 nt, Homo sapiens
  misc_RNA (1)...(19): siRNA sense strand
uugaauacaccacugcuua

SEQ ID NO: 1875149 - RNA, 19 nt, Homo sapiens
  misc_RNA (1)...(19): siRNA sense strand
guucaacgacucuucuuug

SEQ ID NO: 1875150 - RNA, 19 nt, Homo sapiens
  misc_RNA (1)...(19): siRNA sense strand
agaccuagauuauuugacu

SEQ ID NO: 1875151 - RNA, 19 nt, Homo sapiens
  misc_RNA (1)...(19): siRNA sense strand
auacaccacugcuuacugu

SEQ ID NO: 1875152 - RNA, 19 nt, Homo sapiens
  misc_RNA (1)...(19): siRNA sense strand
aggaaacucuacaaacaga

SEQ ID NO: 1875153 - RNA, 19 nt, Homo sapiens
  misc_RNA (1)...(19): siRNA sense strand
gauaggaaacucuacaaac

SEQ ID NO: 1875154 - RNA, 19 nt, Homo sapiens
  misc_RNA (1)...(19): siRNA sense strand
ucagagcucucgauguucu

SEQ ID NO: 1875155 - RNA, 19 nt, Homo sapiens
  misc_RNA (1)...(19): siRNA sense strand
ccaacaacgauaugaaaga

SEQ ID NO: 1875156 - RNA, 19 nt, Homo sapiens
  misc_RNA (1)...(19): siRNA sense strand
auaggagucuugauugaug

SEQ ID NO: 1875157 - RNA, 19 nt, Homo sapiens
  misc_RNA (1)...(19): siRNA sense strand
gagagugugauucugacua

SEQ ID NO: 1875158 - RNA, 19 nt, Homo sapiens
  misc_RNA (1)...(19): siRNA sense strand
aaguugacauggauucauu

SEQ ID NO: 1875159 - RNA, 19 nt, Homo sapiens
  misc_RNA (1)...(19): siRNA sense strand
gcaugauuguaauuggauu

SEQ ID NO: 1875160 - RNA, 19 nt, Homo sapiens
  misc_RNA (1)...(19): siRNA sense strand
acaaacagaacaugcagaa

SEQ ID NO: 1875161 - RNA, 19 nt, Homo sapiens
  misc_RNA (1)...(19): siRNA sense strand
ucacugcgcccugauaaug

SEQ ID NO: 1875162 - RNA, 19 nt, Homo sapiens
  misc_RNA (1)...(19): siRNA sense strand
ccagcugaguuacaagaga

SEQ ID NO: 1875163 - RNA, 19 nt, Homo sapiens
  misc_RNA (1)...(19): siRNA sense strand
ccaaugagacaguauggau

SEQ ID NO: 1875164 - RNA, 19 nt, Homo sapiens
  misc_RNA (1)...(19): siRNA sense strand
cacaguauaugcagagagu

SEQ ID NO: 1875165 - RNA, 19 nt, Homo sapiens
  misc_RNA (1)...(19): siRNA sense strand
cagaacaugcagaaagaaa

SEQ ID NO: 1875166 - RNA, 19 nt, Homo sapiens
  misc_RNA (1)...(19): siRNA sense strand
aaagggaguucagcaagau

SEQ ID NO: 1875167 - RNA, 19 nt, Homo sapiens
  misc_RNA (1)...(19): siRNA sense strand
ugaaguaugaggaaguuga

SEQ ID NO: 1875168 - RNA, 19 nt, Homo sapiens
  misc_RNA (1)...(19): siRNA sense strand
aagccucccuuugugguua

SEQ ID NO: 1875169 - RNA, 19 nt, Homo sapiens
  misc_RNA (1)...(19): siRNA sense strand
ucagggaugugucuuuguc

SEQ ID NO: 1875170 - RNA, 19 nt, Homo sapiens
  misc_RNA (1)...(19): siRNA sense strand
ggagaaagcuaaagugauu

SEQ ID NO: 1875171 - RNA, 19 nt, Homo sapiens
  misc_RNA (1)...(19): siRNA sense strand
ggagggagcuguagaagau

SEQ ID NO: 1875172 - RNA, 19 nt, Homo sapiens
  misc_RNA (1)...(19): siRNA sense strand
caagacugaucaauacuua

SEQ ID NO: 1875173 - RNA, 19 nt, Homo sapiens
  misc_RNA (1)...(19): siRNA sense strand
ccaaagaguccauuaauuu

SEQ ID NO: 1875174 - RNA, 19 nt, Homo sapiens
  misc_RNA (1)...(19): siRNA sense strand
gaaagagcuuguuggauga

SEQ ID NO: 1875175 - RNA, 19 nt, Homo sapiens
  misc_RNA (1)...(19): siRNA sense strand
gaagaccacucaacgaaga

SEQ ID NO: 1875176 - RNA, 19 nt, Homo sapiens
  misc_RNA (1)...(19): siRNA sense strand
ggaaguagaugccuuggau

SEQ ID NO: 1875177 - RNA, 19 nt, Homo sapiens
  misc_RNA (1)...(19): siRNA sense strand
aagaucagcugccauguua

SEQ ID NO: 1875178 - RNA, 19 nt, Homo sapiens
  misc_RNA (1)...(19): siRNA sense strand
guagagagcuggcugaaag

SEQ ID NO: 1875179 - RNA, 19 nt, Homo sapiens
  misc_RNA (1)...(19): siRNA sense strand
gagcucagauugauaggaa

SEQ ID NO: 1875180 - RNA, 19 nt, Homo sapiens
  misc_RNA (1)...(19): siRNA sense strand
ggucagaugucauguaauc

SEQ ID NO: 1875181 - RNA, 19 nt, Homo sapiens
  misc_RNA (1)...(19): siRNA sense strand
gccaaagaguccauuaauu

SEQ ID NO: 1875182 - RNA, 19 nt, Homo sapiens
  misc_RNA (1)...(19): siRNA sense strand
gaaccauaccgcauguuua

SEQ ID NO: 1875183 - RNA, 19 nt, Homo sapiens
  misc_RNA (1)...(19): siRNA sense strand
ugucagagcucucgauguu

SEQ ID NO: 1875184 - RNA, 19 nt, Homo sapiens
  misc_RNA (1)...(19): siRNA sense strand
ccagaggcuucuauaagua

SEQ ID NO: 1875185 - RNA, 19 nt, Homo sapiens
  misc_RNA (1)...(19): siRNA sense strand
uggaugagauuguccuuaa

SEQ ID NO: 1875186 - RNA, 19 nt, Homo sapiens
  misc_RNA (1)...(19): siRNA sense strand
ggacucugcuccucacuca

SEQ ID NO: 1875187 - RNA, 19 nt, Homo sapiens
  misc_RNA (1)...(19): siRNA sense strand
gcagacagacuucaagaga

SEQ ID NO: 1875188 - RNA, 19 nt, Homo sapiens
  misc_RNA (1)...(19): siRNA sense strand
uaaagggaguucagcaaga

SEQ ID NO: 1875189 - RNA, 19 nt, Homo sapiens
  misc_RNA (1)...(19): siRNA sense strand
gaagacagucggcuaugaa

SEQ ID NO: 1875190 - RNA, 19 nt, Homo sapiens
  misc_RNA (1)...(19): siRNA sense strand
gaagaucagcugccauguu

SEQ ID NO: 1875191 - RNA, 19 nt, Homo sapiens
  misc_RNA (1)...(19): siRNA sense strand
cauccaagacugaucaaua

SEQ ID NO: 1875192 - RNA, 19 nt, Homo sapiens
  misc_RNA (1)...(19): siRNA sense strand
ccaugaaguucgagagaaa

SEQ ID NO: 1875193 - RNA, 19 nt, Homo sapiens
  misc_RNA (1)...(19): siRNA sense strand
ccacagggguuaucuauga

SEQ ID NO: 1875194 - RNA, 19 nt, Homo sapiens
  misc_RNA (1)...(19): siRNA sense strand
gcuacgguguucaguauga

SEQ ID NO: 1875195 - RNA, 19 nt, Homo sapiens
  misc_RNA (1)...(19): siRNA sense strand
ggauuaagccagaagauca

SEQ ID NO: 1875196 - RNA, 19 nt, Homo sapiens
  misc_RNA (1)...(19): siRNA sense strand
agacagacuucaagagaga

SEQ ID NO: 1875197 - RNA, 19 nt, Homo sapiens
  misc_RNA (1)...(19): siRNA sense strand
gaacagaagguuacauagg

SEQ ID NO: 1875198 - RNA, 19 nt, Homo sapiens
  misc_RNA (1)...(19): siRNA sense strand
caucggaaagggacauuua

SEQ ID NO: 1875199 - RNA, 19 nt, Homo sapiens
  misc_RNA (1)...(19): siRNA sense strand
gacagucggcuaugaauga

SEQ ID NO: 1875200 - RNA, 19 nt, Homo sapiens
  misc_RNA (1)...(19): siRNA sense strand
agaagccacuuaugaauca

SEQ ID NO: 1875201 - RNA, 19 nt, Homo sapiens
  misc_RNA (1)...(19): siRNA sense strand
aaauagaagccacuuauga

SEQ ID NO: 1875202 - RNA, 19 nt, Homo sapiens
  misc_RNA (1)...(19): siRNA sense strand
guuggaaccugaaggaaug

SEQ ID NO: 1875203 - RNA, 19 nt, Homo sapiens
  misc_RNA (1)...(19): siRNA sense strand
ggaucagccuucuauagga

SEQ ID NO: 1875204 - RNA, 19 nt, Homo sapiens
  misc_RNA (1)...(19): siRNA sense strand
gaacaugcagaaagaaauc

SEQ ID NO: 1875205 - RNA, 19 nt, Homo sapiens
  misc_RNA (1)...(19): siRNA sense strand
caaagaguccauuaauuuc

SEQ ID NO: 1875206 - RNA, 19 nt, Homo sapiens
  misc_RNA (1)...(19): siRNA sense strand
ccagagcccuugaagaagu

SEQ ID NO: 1875207 - RNA, 19 nt, Homo sapiens
  misc_RNA (1)...(19): siRNA sense strand
gaucagccuucuauaggau

SEQ ID NO: 1875208 - RNA, 19 nt, Homo sapiens
  misc_RNA (1)...(19): siRNA sense strand
cgaagacagucggcuauga

SEQ ID NO: 1875209 - RNA, 19 nt, Homo sapiens
  misc_RNA (1)...(19): siRNA sense strand
gaaaauagaagccacuuau

SEQ ID NO: 1875210 - RNA, 19 nt, Homo sapiens
  misc_RNA (1)...(19): siRNA sense strand
caacaacgauaugaaagag

SEQ ID NO: 1875211 - RNA, 19 nt, Homo sapiens
  misc_RNA (1)...(19): siRNA sense strand
auaggaaacucuacaaaca

SEQ ID NO: 1875212 - RNA, 19 nt, Homo sapiens
  misc_RNA (1)...(19): siRNA sense strand
gaaggcauuucuguguuga

SEQ ID NO: 1875213 - RNA, 19 nt, Homo sapiens
  misc_RNA (1)...(19): siRNA sense strand
uuacauaggagucuugauu

SEQ ID NO: 1875214 - RNA, 19 nt, Homo sapiens
  misc_RNA (1)...(19): siRNA sense strand
ggaaucaacgccagucuuc

SEQ ID NO: 1875215 - RNA, 19 nt, Homo sapiens
  misc_RNA (1)...(19): siRNA sense strand
gauacugucccuccauuga

SEQ ID NO: 1875216 - RNA, 19 nt, Homo sapiens
  misc_RNA (1)...(19): siRNA sense strand
ucgauguucugaaguauga

SEQ ID NO: 1875217 - RNA, 19 nt, Homo sapiens
  misc_RNA (1)...(19): siRNA sense strand
cagcugaguuacaagagaa

SEQ ID NO: 1875218 - RNA, 19 nt, Homo sapiens
  misc_RNA (1)...(19): siRNA sense strand
gcauccagcaggacguuua

SEQ ID NO: 1875219 - RNA, 19 nt, Homo sapiens
  misc_RNA (1)...(19): siRNA sense strand
cgagagaaacuacauuuua

SEQ ID NO: 1875220 - RNA, 19 nt, Homo sapiens
  misc_RNA (1)...(19): siRNA sense strand
aacagaagguuacauagga

SEQ ID NO: 1875221 - RNA, 19 nt, Homo sapiens
  misc_RNA (1)...(19): siRNA sense strand
gcuaccagcugaguuacaa

SEQ ID NO: 1875222 - RNA, 19 nt, Homo sapiens
  misc_RNA (1)...(19): siRNA sense strand
aaugagacaguauggauua

SEQ ID NO: 1875223 - RNA, 19 nt, Homo sapiens
  misc_RNA (1)...(19): siRNA sense strand
ucggucagaugucauguaa

SEQ ID NO: 1875224 - RNA, 19 nt, Homo sapiens
  misc_RNA (1)...(19): siRNA sense strand
aaacagaacaugcagaaag

SEQ ID NO: 1875225 - RNA, 19 nt, Homo sapiens
  misc_RNA (1)...(19): siRNA sense strand
agaugaagcucuccaacug

SEQ ID NO: 1875226 - RNA, 19 nt, Homo sapiens
  misc_RNA (1)...(19): siRNA sense strand
gaugagauuguccuuaaga

SEQ ID NO: 1875227 - RNA, 19 nt, Homo sapiens
  misc_RNA (1)...(19): siRNA sense strand
cagcugccauguuacuuga

SEQ ID NO: 1875228 - RNA, 19 nt, Homo sapiens
  misc_RNA (1)...(19): siRNA sense strand
gagagaaacuacauuuuag

SEQ ID NO: 1875229 - RNA, 19 nt, Homo sapiens
  misc_RNA (1)...(19): siRNA sense strand
gauaugaaagagcuuguug

SEQ ID NO: 1875230 - RNA, 19 nt, Homo sapiens
  misc_RNA (1)...(19): siRNA sense strand
ccgaacagaagguuacaua

SEQ ID NO: 1875231 - RNA, 19 nt, Homo sapiens
  misc_RNA (1)...(19): siRNA sense strand
caucagaggcuuggagaaa

SEQ ID NO: 1875232 - RNA, 19 nt, Homo sapiens
  misc_RNA (1)...(19): siRNA sense strand
gacgcuaccagcugaguua

SEQ ID NO: 1875233 - RNA, 19 nt, Homo sapiens
  misc_RNA (1)...(19): siRNA sense strand
aacagaacaugcagaaaga

SEQ ID NO: 1875234 - RNA, 19 nt, Homo sapiens
  misc_RNA (1)...(19): siRNA sense strand
acauaggagucuugauuga

SEQ ID NO: 1875235 - RNA, 19 nt, Homo sapiens
  misc_RNA (1)...(19): siRNA sense strand
ggauggaagcacaguauau

SEQ ID NO: 1875236 - RNA, 19 nt, Homo sapiens
  misc_RNA (1)...(19): siRNA sense strand
gacaauccauccauaccau

SEQ ID NO: 1875237 - RNA, 19 nt, Homo sapiens
  misc_RNA (1)...(19): siRNA sense strand
uaucagggaugugucuuug

SEQ ID NO: 1875238 - RNA, 19 nt, Homo sapiens
  misc_RNA (1)...(19): siRNA sense strand
gaccuagauuauuugacua

SEQ ID NO: 1875239 - RNA, 19 nt, Homo sapiens
  misc_RNA (1)...(19): siRNA sense strand
gaaccugaaggaauggauu

SEQ ID NO: 1875240 - RNA, 19 nt, Homo sapiens
  misc_RNA (1)...(19): siRNA sense strand
ugagaggcaugauuguaau

SEQ ID NO: 1875241 - RNA, 19 nt, Homo sapiens
  misc_RNA (1)...(19): siRNA sense strand
gugaagaccacucaacgaa

SEQ ID NO: 1875242 - RNA, 19 nt, Homo sapiens
  misc_RNA (1)...(19): siRNA sense strand
caucaucaaucugcugaga

SEQ ID NO: 1875243 - RNA, 19 nt, Homo sapiens
  misc_RNA (1)...(19): siRNA sense strand
cagagcccuugaagaagua

SEQ ID NO: 1875244 - RNA, 19 nt, Homo sapiens
  misc_RNA (1)...(19): siRNA sense strand
ugaggaaguugacauggau

SEQ ID NO: 1875245 - RNA, 19 nt, Homo sapiens
  misc_RNA (1)...(19): siRNA sense strand
cccagaggcuucuauaagu

SEQ ID NO: 1875246 - RNA, 19 nt, Homo sapiens
  misc_RNA (1)...(19): siRNA sense strand
cgaguagaguuccguuugu

SEQ ID NO: 1875247 - RNA, 19 nt, Homo sapiens
  misc_RNA (1)...(19): siRNA sense strand
uccauaccauucagcuuua

SEQ ID NO: 1875248 - RNA, 19 nt, Homo sapiens
  misc_RNA (1)...(19): siRNA sense strand
agucugguguacauuauaa

SEQ ID NO: 1875249 - RNA, 19 nt, Homo sapiens
  misc_RNA (1)...(19): siRNA sense strand
uugaauacaccacugcuua

SEQ ID NO: 1875250 - RNA, 19 nt, Homo sapiens
  misc_RNA (1)...(19): siRNA sense strand
aauagaagccacuuaugaa

SEQ ID NO: 1875251 - RNA, 19 nt, Homo sapiens
  misc_RNA (1)...(19): siRNA sense strand
guucaacgacucuucuuug

SEQ ID NO: 1875252 - RNA, 19 nt, Homo sapiens
  misc_RNA (1)...(19): siRNA sense strand
gauggaagcacaguauaug

SEQ ID NO: 1875253 - RNA, 19 nt, Homo sapiens
  misc_RNA (1)...(19): siRNA sense strand
agaccuagauuauuugacu

SEQ ID NO: 1875254 - RNA, 19 nt, Homo sapiens
  misc_RNA (1)...(19): siRNA sense strand
gauaggaaacucuacaaac

SEQ ID NO: 1875255 - RNA, 19 nt, Homo sapiens
  misc_RNA (1)...(19): siRNA sense strand
ucagagcucucgauguucu

SEQ ID NO: 1875256 - RNA, 19 nt, Homo sapiens
  misc_RNA (1)...(19): siRNA sense strand
ccaacaacgauaugaaaga

SEQ ID NO: 1875257 - RNA, 19 nt, Homo sapiens
  misc_RNA (1)...(19): siRNA sense strand
auaggagucuugauugaug

SEQ ID NO: 1875258 - RNA, 19 nt, Homo sapiens
  misc_RNA (1)...(19): siRNA sense strand
auacaccacugcuuacugu

SEQ ID NO: 1875259 - RNA, 19 nt, Homo sapiens
  misc_RNA (1)...(19): siRNA sense strand
aggaaacucuacaaacaga

SEQ ID NO: 1875260 - RNA, 19 nt, Homo sapiens
  misc_RNA (1)...(19): siRNA sense strand
gagagugugauucugacua

SEQ ID NO: 1875261 - RNA, 19 nt, Homo sapiens
  misc_RNA (1)...(19): siRNA sense strand
aaguugacauggauucauu

SEQ ID NO: 1875262 - RNA, 19 nt, Homo sapiens
  misc_RNA (1)...(19): siRNA sense strand
gcaugauuguaauuggauu

SEQ ID NO: 1875263 - RNA, 19 nt, Homo sapiens
  misc_RNA (1)...(19): siRNA sense strand
acaaacagaacaugcagaa

SEQ ID NO: 1875264 - RNA, 19 nt, Homo sapiens
  misc_RNA (1)...(19): siRNA sense strand
ucacugcgcccugauaaug

SEQ ID NO: 1875265 - RNA, 19 nt, Homo sapiens
  misc_RNA (1)...(19): siRNA sense strand
ccagcugaguuacaagaga

SEQ ID NO: 1875266 - RNA, 19 nt, Homo sapiens
  misc_RNA (1)...(19): siRNA sense strand
ccaaugagacaguauggau

SEQ ID NO: 1875267 - RNA, 19 nt, Homo sapiens
  misc_RNA (1)...(19): siRNA sense strand
cacaguauaugcagagagu

SEQ ID NO: 1875268 - RNA, 19 nt, Homo sapiens
  misc_RNA (1)...(19): siRNA sense strand
ugaaguaugaggaaguuga

SEQ ID NO: 1875269 - RNA, 19 nt, Homo sapiens
  misc_RNA (1)...(19): siRNA sense strand
aaagggaguucagcaagau

SEQ ID NO: 1875270 - RNA, 19 nt, Homo sapiens
  misc_RNA (1)...(19): siRNA sense strand
gcacguggcuggcuugcuu

SEQ ID NO: 1875271 - RNA, 19 nt, Homo sapiens
  misc_RNA (1)...(19): siRNA sense strand
gcaagaaacagaagcacua

SEQ ID NO: 1875272 - RNA, 19 nt, Homo sapiens
  misc_RNA (1)...(19): siRNA sense strand
aagaguggcuggaggaauu

SEQ ID NO: 1875273 - RNA, 19 nt, Homo sapiens
  misc_RNA (1)...(19): siRNA sense strand
gaugagagucggcagauga

SEQ ID NO: 1875274 - RNA, 19 nt, Homo sapiens
  misc_RNA (1)...(19): siRNA sense strand
cuacacuucuggccaguuu

SEQ ID NO: 1875275 - RNA, 19 nt, Homo sapiens
  misc_RNA (1)...(19): siRNA sense strand
gcauccagccugacuugua

SEQ ID NO: 1875276 - RNA, 19 nt, Homo sapiens
  misc_RNA (1)...(19): siRNA sense strand
ggaguaaucugggcuuugc

SEQ ID NO: 1875277 - RNA, 19 nt, Homo sapiens
  misc_RNA (1)...(19): siRNA sense strand
gaagcacuacccauacuga

SEQ ID NO: 1875278 - RNA, 19 nt, Homo sapiens
  misc_RNA (1)...(19): siRNA sense strand
ggaggaaugugggcgcuau

SEQ ID NO: 1875279 - RNA, 19 nt, Homo sapiens
  misc_RNA (1)...(19): siRNA sense strand
cauauccugugcaugauga

SEQ ID NO: 1875280 - RNA, 19 nt, Homo sapiens
  misc_RNA (1)...(19): siRNA sense strand
uggaggaucugcaccauag

SEQ ID NO: 1875281 - RNA, 19 nt, Homo sapiens
  misc_RNA (1)...(19): siRNA sense strand
ccucauggguugcuguguu

SEQ ID NO: 1875282 - RNA, 19 nt, Homo sapiens
  misc_RNA (1)...(19): siRNA sense strand
ggaggaauucaguuucuug

SEQ ID NO: 1875283 - RNA, 19 nt, Homo sapiens
  misc_RNA (1)...(19): siRNA sense strand
gaaaucggcugggccuacu

SEQ ID NO: 1875284 - RNA, 19 nt, Homo sapiens
  misc_RNA (1)...(19): siRNA sense strand
aacagaagcacuacccaua

SEQ ID NO: 1875285 - RNA, 19 nt, Homo sapiens
  misc_RNA (1)...(19): siRNA sense strand
cagaagcacuacccauacu

SEQ ID NO: 1875286 - RNA, 19 nt, Homo sapiens
  misc_RNA (1)...(19): siRNA sense strand
cauccagccugacuuguac

SEQ ID NO: 1875287 - RNA, 19 nt, Homo sapiens
  misc_RNA (1)...(19): siRNA sense strand
cucauggguugcuguguuu

SEQ ID NO: 1875288 - RNA, 19 nt, Homo sapiens
  misc_RNA (1)...(19): siRNA sense strand
gaagaguggcuggaggaau

SEQ ID NO: 1875289 - RNA, 19 nt, Homo sapiens
  misc_RNA (1)...(19): siRNA sense strand
gaggaucugcaccauagug

SEQ ID NO: 1875290 - RNA, 19 nt, Homo sapiens
  misc_RNA (1)...(19): siRNA sense strand
aaucugggcuuugcugucu

SEQ ID NO: 1875291 - RNA, 19 nt, Homo sapiens
  misc_RNA (1)...(19): siRNA sense strand
gcagacuuguggcuacacu

SEQ ID NO: 1875292 - RNA, 19 nt, Homo sapiens
  misc_RNA (1)...(19): siRNA sense strand
ucugggcuuugcugucuuu

SEQ ID NO: 1875293 - RNA, 19 nt, Homo sapiens
  misc_RNA (1)...(19): siRNA sense strand
gugcucauauccugugcau

SEQ ID NO: 1875294 - RNA, 19 nt, Homo sapiens
  misc_RNA (1)...(19): siRNA sense strand
gggcugggacagugaggaa

SEQ ID NO: 1875295 - RNA, 19 nt, Homo sapiens
  misc_RNA (1)...(19): siRNA sense strand
ggaagaguggcuggaggaa

SEQ ID NO: 1875296 - RNA, 19 nt, Homo sapiens
  misc_RNA (1)...(19): siRNA sense strand
gcuuugcugucuuuucuuu

SEQ ID NO: 1875297 - RNA, 19 nt, Homo sapiens
  misc_RNA (1)...(19): siRNA sense strand
acacuucuggccaguuuga

SEQ ID NO: 1875298 - RNA, 19 nt, Homo sapiens
  misc_RNA (1)...(19): siRNA sense strand
ggcagaugauggugauggu

SEQ ID NO: 1875299 - RNA, 19 nt, Homo sapiens
  misc_RNA (1)...(19): siRNA sense strand
ggaauaagcuuguacagaa

SEQ ID NO: 1875300 - RNA, 19 nt, Homo sapiens
  misc_RNA (1)...(19): siRNA sense strand
gaaauucaguacccacuua

SEQ ID NO: 1875301 - RNA, 19 nt, Homo sapiens
  misc_RNA (1)...(19): siRNA sense strand
agacagaccucaucuauaa

SEQ ID NO: 1875302 - RNA, 19 nt, Homo sapiens
  misc_RNA (1)...(19): siRNA sense strand
gaaaucaggugucaucaau

SEQ ID NO: 1875303 - RNA, 19 nt, Homo sapiens
  misc_RNA (1)...(19): siRNA sense strand
gaaauucagccuucagaua

SEQ ID NO: 1875304 - RNA, 19 nt, Homo sapiens
  misc_RNA (1)...(19): siRNA sense strand
gcacuuacuugguugcuuu

SEQ ID NO: 1875305 - RNA, 19 nt, Homo sapiens
  misc_RNA (1)...(19): siRNA sense strand
auagaaagcuggugacuaa

SEQ ID NO: 1875306 - RNA, 19 nt, Homo sapiens
  misc_RNA (1)...(19): siRNA sense strand
uaagggaucuucucucuug

SEQ ID NO: 1875307 - RNA, 19 nt, Homo sapiens
  misc_RNA (1)...(19): siRNA sense strand
ggacagaucgccauuguug

SEQ ID NO: 1875308 - RNA, 19 nt, Homo sapiens
  misc_RNA (1)...(19): siRNA sense strand
caacaaacuuggacugaug

SEQ ID NO: 1875309 - RNA, 19 nt, Homo sapiens
  misc_RNA (1)...(19): siRNA sense strand
gaugagcacuuacuugguu

SEQ ID NO: 1875310 - RNA, 19 nt, Homo sapiens
  misc_RNA (1)...(19): siRNA sense strand
gagccaaccuuaucaacaa

SEQ ID NO: 1875311 - RNA, 19 nt, Homo sapiens
  misc_RNA (1)...(19): siRNA sense strand
caaagaaggcugccauaaa

SEQ ID NO: 1875312 - RNA, 19 nt, Homo sapiens
  misc_RNA (1)...(19): siRNA sense strand
aagcugagauccuggaaua

SEQ ID NO: 1875313 - RNA, 19 nt, Homo sapiens
  misc_RNA (1)...(19): siRNA sense strand
ggaaacaacugugaagcuu

SEQ ID NO: 1875314 - RNA, 19 nt, Homo sapiens
  misc_RNA (1)...(19): siRNA sense strand
gcaauacaccgcuuuauca

SEQ ID NO: 1875315 - RNA, 19 nt, Homo sapiens
  misc_RNA (1)...(19): siRNA sense strand
gaacuggaauaagcuugua

SEQ ID NO: 1875316 - RNA, 19 nt, Homo sapiens
  misc_RNA (1)...(19): siRNA sense strand
caagagggccuuugauuug

SEQ ID NO: 1875317 - RNA, 19 nt, Homo sapiens
  misc_RNA (1)...(19): siRNA sense strand
ggaaugaccuauggcuaaa

SEQ ID NO: 1875318 - RNA, 19 nt, Homo sapiens
  misc_RNA (1)...(19): siRNA sense strand
caaagagccuuguuuacau

SEQ ID NO: 1875319 - RNA, 19 nt, Homo sapiens
  misc_RNA (1)...(19): siRNA sense strand
gauaagaaaucagguguca

SEQ ID NO: 1875320 - RNA, 19 nt, Homo sapiens
  misc_RNA (1)...(19): siRNA sense strand
uagcacaggucauaauauu

SEQ ID NO: 1875321 - RNA, 19 nt, Homo sapiens
  misc_RNA (1)...(19): siRNA sense strand
ccacuuucauggaguauuu

SEQ ID NO: 1875322 - RNA, 19 nt, Homo sapiens
  misc_RNA (1)...(19): siRNA sense strand
aaacuuaccuuagugaaga

SEQ ID NO: 1875323 - RNA, 19 nt, Homo sapiens
  misc_RNA (1)...(19): siRNA sense strand
ggagauaacuuccgaacac

SEQ ID NO: 1875324 - RNA, 19 nt, Homo sapiens
  misc_RNA (1)...(19): siRNA sense strand
gcacaggucauaauauuuc

SEQ ID NO: 1875325 - RNA, 19 nt, Homo sapiens
  misc_RNA (1)...(19): siRNA sense strand
gcacuaauccaucaguuga

SEQ ID NO: 1875326 - RNA, 19 nt, Homo sapiens
  misc_RNA (1)...(19): siRNA sense strand
gaucuucucucuuguugau

SEQ ID NO: 1875327 - RNA, 19 nt, Homo sapiens
  misc_RNA (1)...(19): siRNA sense strand
ggucagcccugcuagaguu

SEQ ID NO: 1875328 - RNA, 19 nt, Homo sapiens
  misc_RNA (1)...(19): siRNA sense strand
caaagacacauuuaucuga

SEQ ID NO: 1875329 - RNA, 19 nt, Homo sapiens
  misc_RNA (1)...(19): siRNA sense strand
cugaugagguggaauauga

SEQ ID NO: 1875330 - RNA, 19 nt, Homo sapiens
  misc_RNA (1)...(19): siRNA sense strand
caacaaagacacauuuauc

SEQ ID NO: 1875331 - RNA, 19 nt, Homo sapiens
  misc_RNA (1)...(19): siRNA sense strand
ucaaagagaacuggaauaa

SEQ ID NO: 1875332 - RNA, 19 nt, Homo sapiens
  misc_RNA (1)...(19): siRNA sense strand
ugaagaggauuaugaguca

SEQ ID NO: 1875333 - RNA, 19 nt, Homo sapiens
  misc_RNA (1)...(19): siRNA sense strand
ucacagcuaugcaucuauu

SEQ ID NO: 1875334 - RNA, 19 nt, Homo sapiens
  misc_RNA (1)...(19): siRNA sense strand
gcggaagcuuuacugguua

SEQ ID NO: 1875335 - RNA, 19 nt, Homo sapiens
  misc_RNA (1)...(19): siRNA sense strand
uuucuuagaugcucgauuu

SEQ ID NO: 1875336 - RNA, 19 nt, Homo sapiens
  misc_RNA (1)...(19): siRNA sense strand
uggaucaacuuaccuguuu

SEQ ID NO: 1875337 - RNA, 19 nt, Homo sapiens
  misc_RNA (1)...(19): siRNA sense strand
aaagagaacuggaauaagc

SEQ ID NO: 1875338 - RNA, 19 nt, Homo sapiens
  misc_RNA (1)...(19): siRNA sense strand
gggaagcacuaauccauca

SEQ ID NO: 1875339 - RNA, 19 nt, Homo sapiens
  misc_RNA (1)...(19): siRNA sense strand
aaagaaggcugccauaaaa

SEQ ID NO: 1875340 - RNA, 19 nt, Homo sapiens
  misc_RNA (1)...(19): siRNA sense strand
gaagaugagcacuuacuug

SEQ ID NO: 1875341 - RNA, 19 nt, Homo sapiens
  misc_RNA (1)...(19): siRNA sense strand
gaagucaucagucguucua

SEQ ID NO: 1875342 - RNA, 19 nt, Homo sapiens
  misc_RNA (1)...(19): siRNA sense strand
cuacacagaugaaaguaau

SEQ ID NO: 1875343 - RNA, 19 nt, Homo sapiens
  misc_RNA (1)...(19): siRNA sense strand
ggaggaggaugaagaggau

SEQ ID NO: 1875344 - RNA, 19 nt, Homo sapiens
  misc_RNA (1)...(19): siRNA sense strand
ugacaacuguguucaaagu

SEQ ID NO: 1875345 - RNA, 19 nt, Homo sapiens
  misc_RNA (1)...(19): siRNA sense strand
uauauaugcuguaccagaa

SEQ ID NO: 1875346 - RNA, 19 nt, Homo sapiens
  misc_RNA (1)...(19): siRNA sense strand
gaagcugucuuuuaucauu

SEQ ID NO: 1875347 - RNA, 19 nt, Homo sapiens
  misc_RNA (1)...(19): siRNA sense strand
caucaucuguucagucuuc

SEQ ID NO: 1875348 - RNA, 19 nt, Homo sapiens
  misc_RNA (1)...(19): siRNA sense strand
gugugaagaugagcacuua

SEQ ID NO: 1875349 - RNA, 19 nt, Homo sapiens
  misc_RNA (1)...(19): siRNA sense strand
gaauaagcuuguacagaag

SEQ ID NO: 1875350 - RNA, 19 nt, Homo sapiens
  misc_RNA (1)...(19): siRNA sense strand
gaacagugggucgacauuu

SEQ ID NO: 1875351 - RNA, 19 nt, Homo sapiens
  misc_RNA (1)...(19): siRNA sense strand
caugacaacuguguucaaa

SEQ ID NO: 1875352 - RNA, 19 nt, Homo sapiens
  misc_RNA (1)...(19): siRNA sense strand
caagcuaccuguggcauau

SEQ ID NO: 1875353 - RNA, 19 nt, Homo sapiens
  misc_RNA (1)...(19): siRNA sense strand
gaugaucugugggauaguu

SEQ ID NO: 1875354 - RNA, 19 nt, Homo sapiens
  misc_RNA (1)...(19): siRNA sense strand
acaaugaagugguggaaug

SEQ ID NO: 1875355 - RNA, 19 nt, Homo sapiens
  misc_RNA (1)...(19): siRNA sense strand
auacaccgcuuuaucaaau

SEQ ID NO: 1875356 - RNA, 19 nt, Homo sapiens
  misc_RNA (1)...(19): siRNA sense strand
aagcuuuacugguuaauga

SEQ ID NO: 1875357 - RNA, 19 nt, Homo sapiens
  misc_RNA (1)...(19): siRNA sense strand
ccaaagagccuuguuuaca

SEQ ID NO: 1875358 - RNA, 19 nt, Homo sapiens
  misc_RNA (1)...(19): siRNA sense strand
gagaggagacacuucugua

SEQ ID NO: 1875359 - RNA, 19 nt, Homo sapiens
  misc_RNA (1)...(19): siRNA sense strand
gcaaucugguaacaaugaa

SEQ ID NO: 1875360 - RNA, 19 nt, Homo sapiens
  misc_RNA (1)...(19): siRNA sense strand
caacaucuuugaacuugca

SEQ ID NO: 1875361 - RNA, 19 nt, Homo sapiens
  misc_RNA (1)...(19): siRNA sense strand
ucaggugucaucaaucuua

SEQ ID NO: 1875362 - RNA, 19 nt, Homo sapiens
  misc_RNA (1)...(19): siRNA sense strand
uuacuugguugcuuucauu

SEQ ID NO: 1875363 - RNA, 19 nt, Homo sapiens
  misc_RNA (1)...(19): siRNA sense strand
aaaccaaacacuagaugua

SEQ ID NO: 1875364 - RNA, 19 nt, Homo sapiens
  misc_RNA (1)...(19): siRNA sense strand
caguaacacuucuucaaug

SEQ ID NO: 1875365 - RNA, 19 nt, Homo sapiens
  misc_RNA (1)...(19): siRNA sense strand
aggagacacuucuguauga

SEQ ID NO: 1875366 - RNA, 19 nt, Homo sapiens
  misc_RNA (1)...(19): siRNA sense strand
ggacuaauucagccauuug

SEQ ID NO: 1875367 - RNA, 19 nt, Homo sapiens
  misc_RNA (1)...(19): siRNA sense strand
caacaacaucuuugaacuu

SEQ ID NO: 1875368 - RNA, 19 nt, Homo sapiens
  misc_RNA (1)...(19): siRNA sense strand
gauguaaagagaaugauga

SEQ ID NO: 1875369 - RNA, 19 nt, Homo sapiens
  misc_RNA (1)...(19): siRNA sense strand
caaauaugccuaagaaguc

SEQ ID NO: 1875370 - RNA, 19 nt, Homo sapiens
  misc_RNA (1)...(19): siRNA sense strand
cggcaaauauaucuaguuc

SEQ ID NO: 1875371 - RNA, 19 nt, Homo sapiens
  misc_RNA (1)...(19): siRNA sense strand
ccacuacgcuaugaacuca

SEQ ID NO: 1875372 - RNA, 19 nt, Homo sapiens
  misc_RNA (1)...(19): siRNA sense strand
ccucaagacuggugacuag

SEQ ID NO: 1875373 - RNA, 19 nt, Homo sapiens
  misc_RNA (1)...(19): siRNA sense strand
cuuagaugcucgauuuaaa

SEQ ID NO: 1875374 - RNA, 19 nt, Homo sapiens
  misc_RNA (1)...(19): siRNA sense strand
gacaaaggcuggucauucc

SEQ ID NO: 1875375 - RNA, 19 nt, Homo sapiens
  misc_RNA (1)...(19): siRNA sense strand
gggucaaagugaauauaaa

SEQ ID NO: 1875376 - RNA, 19 nt, Homo sapiens
  misc_RNA (1)...(19): siRNA sense strand
ccaauaucaucaucuguuc

SEQ ID NO: 1875377 - RNA, 19 nt, Homo sapiens
  misc_RNA (1)...(19): siRNA sense strand
gaaccuaaccucgaugaca

SEQ ID NO: 1875378 - RNA, 19 nt, Homo sapiens
  misc_RNA (1)...(19): siRNA sense strand
gggaacugcucuacuacug

SEQ ID NO: 1875379 - RNA, 19 nt, Homo sapiens
  misc_RNA (1)...(19): siRNA sense strand
ugucaucaaucuuacagaa

SEQ ID NO: 1875380 - RNA, 19 nt, Homo sapiens
  misc_RNA (1)...(19): siRNA sense strand
uaagaaaucaggugucauc

SEQ ID NO: 1875381 - RNA, 19 nt, Homo sapiens
  misc_RNA (1)...(19): siRNA sense strand
ggucacaaaccaaacacua

SEQ ID NO: 1875382 - RNA, 19 nt, Homo sapiens
  misc_RNA (1)...(19): siRNA sense strand
gggaucuucucucuuguug

SEQ ID NO: 1875383 - RNA, 19 nt, Homo sapiens
  misc_RNA (1)...(19): siRNA sense strand
cauagcacaggucauaaua

SEQ ID NO: 1875384 - RNA, 19 nt, Homo sapiens
  misc_RNA (1)...(19): siRNA sense strand
uuaaugaggucacaaacca

SEQ ID NO: 1875385 - RNA, 19 nt, Homo sapiens
  misc_RNA (1)...(19): siRNA sense strand
cauaagggaugagcaauac

SEQ ID NO: 1875386 - RNA, 19 nt, Homo sapiens
  misc_RNA (1)...(19): siRNA sense strand
ccaaagaaggcugccauaa

SEQ ID NO: 1875387 - RNA, 19 nt, Homo sapiens
  misc_RNA (1)...(19): siRNA sense strand
ucacugaaggaagaaauua

SEQ ID NO: 1875388 - RNA, 19 nt, Homo sapiens
  misc_RNA (1)...(19): siRNA sense strand
ucaaauaugccuaagaagu

SEQ ID NO: 1875389 - RNA, 19 nt, Homo sapiens
  misc_RNA (1)...(19): siRNA sense strand
caggucacauggaauauca

SEQ ID NO: 1875390 - RNA, 19 nt, Homo sapiens
  misc_RNA (1)...(19): siRNA sense strand
gaggaugugcggaagcuuu

SEQ ID NO: 1875391 - RNA, 19 nt, Homo sapiens
  misc_RNA (1)...(19): siRNA sense strand
gugaugaucugugggauag

SEQ ID NO: 1875392 - RNA, 19 nt, Homo sapiens
  misc_RNA (1)...(19): siRNA sense strand
aaucacagcuaugcaucua

SEQ ID NO: 1875393 - RNA, 19 nt, Homo sapiens
  misc_RNA (1)...(19): siRNA sense strand
aaacaacugugaagcuucu

SEQ ID NO: 1875394 - RNA, 19 nt, Homo sapiens
  misc_RNA (1)...(19): siRNA sense strand
uaagaagucaucagucguu

SEQ ID NO: 1875395 - RNA, 19 nt, Homo sapiens
  misc_RNA (1)...(19): siRNA sense strand
auagaguacucggcaaaua

SEQ ID NO: 1875396 - RNA, 19 nt, Homo sapiens
  misc_RNA (1)...(19): siRNA sense strand
gggcacaauuauacguuga

SEQ ID NO: 1875397 - RNA, 19 nt, Homo sapiens
  misc_RNA (1)...(19): siRNA sense strand
caugaagaaagauuccuua

SEQ ID NO: 1875398 - RNA, 19 nt, Homo sapiens
  misc_RNA (1)...(19): siRNA sense strand
ucagacagaccucaucuau

SEQ ID NO: 1875399 - RNA, 19 nt, Homo sapiens
  misc_RNA (1)...(19): siRNA sense strand
ucaacaagcuggccaacua

SEQ ID NO: 1875400 - RNA, 19 nt, Homo sapiens
  misc_RNA (1)...(19): siRNA sense strand
ggacguaccuggacaagca

SEQ ID NO: 1875401 - RNA, 19 nt, Homo sapiens
  misc_RNA (1)...(19): siRNA sense strand
gaacauacggucccuaaug

SEQ ID NO: 1875402 - RNA, 19 nt, Homo sapiens
  misc_RNA (1)...(19): siRNA sense strand
agaaggaccugcagauguu

SEQ ID NO: 1875403 - RNA, 19 nt, Homo sapiens
  misc_RNA (1)...(19): siRNA sense strand
ggaagaacauggcacuuuu

SEQ ID NO: 1875404 - RNA, 19 nt, Homo sapiens
  misc_RNA (1)...(19): siRNA sense strand
ggcguggucuuacgagaua

SEQ ID NO: 1875405 - RNA, 19 nt, Homo sapiens
  misc_RNA (1)...(19): siRNA sense strand
aggaggagauggacaguaa

SEQ ID NO: 1875406 - RNA, 19 nt, Homo sapiens
  misc_RNA (1)...(19): siRNA sense strand
gagaacauacggucccuaa

SEQ ID NO: 1875407 - RNA, 19 nt, Homo sapiens
  misc_RNA (1)...(19): siRNA sense strand
gaacaacgucaccgaaauc

SEQ ID NO: 1875408 - RNA, 19 nt, Homo sapiens
  misc_RNA (1)...(19): siRNA sense strand
gggaagaacauggcacuuu

SEQ ID NO: 1875409 - RNA, 19 nt, Homo sapiens
  misc_RNA (1)...(19): siRNA sense strand
gaagaaggaccugcagaug

SEQ ID NO: 1875410 - RNA, 19 nt, Homo sapiens
  misc_RNA (1)...(19): siRNA sense strand
agaugcagcuguccaagaa

SEQ ID NO: 1875411 - RNA, 19 nt, Homo sapiens
  misc_RNA (1)...(19): siRNA sense strand
gcaagggccugaccaucgu

SEQ ID NO: 1875412 - RNA, 19 nt, Homo sapiens
  misc_RNA (1)...(19): siRNA sense strand
aacauacggucccuaauga

SEQ ID NO: 1875413 - RNA, 19 nt, Homo sapiens
  misc_RNA (1)...(19): siRNA sense strand
ucaaguaugucaacaagcu

SEQ ID NO: 1875414 - RNA, 19 nt, Homo sapiens
  misc_RNA (1)...(19): siRNA sense strand
gcugaucgcugagaaguac

SEQ ID NO: 1875415 - RNA, 19 nt, Homo sapiens
  misc_RNA (1)...(19): siRNA sense strand
ggaagugccggaugcguau

SEQ ID NO: 1875416 - RNA, 19 nt, Homo sapiens
  misc_RNA (1)...(19): siRNA sense strand
gggcguuuguggagaagaa

SEQ ID NO: 1875417 - RNA, 19 nt, Homo sapiens
  misc_RNA (1)...(19): siRNA sense strand
cagccuauccgguuucaaa

SEQ ID NO: 1875418 - RNA, 19 nt, Homo sapiens
  misc_RNA (1)...(19): siRNA sense strand
cgacgucuuucaucuaucu

SEQ ID NO: 1875419 - RNA, 19 nt, Homo sapiens
  misc_RNA (1)...(19): siRNA sense strand
uggaagaacuuuguagaca

SEQ ID NO: 1875420 - RNA, 19 nt, Homo sapiens
  misc_RNA (1)...(19): siRNA sense strand
ggaccauccuggccauagu

SEQ ID NO: 1875421 - RNA, 19 nt, Homo sapiens
  misc_RNA (1)...(19): siRNA sense strand
agaacaacgucaccgaaau

SEQ ID NO: 1875422 - RNA, 19 nt, Homo sapiens
  misc_RNA (1)...(19): siRNA sense strand
gaucaccaucuacuccuaa

SEQ ID NO: 1875423 - RNA, 19 nt, Homo sapiens
  misc_RNA (1)...(19): siRNA sense strand
ccucaaggaugcacagaag

SEQ ID NO: 1875424 - RNA, 19 nt, Homo sapiens
  misc_RNA (1)...(19): siRNA sense strand
ugagugcgaucgcuaccaa

SEQ ID NO: 1875425 - RNA, 19 nt, Homo sapiens
  misc_RNA (1)...(19): siRNA sense strand
cuacauggaguuucuugaa

SEQ ID NO: 1875426 - RNA, 19 nt, Homo sapiens
  misc_RNA (1)...(19): siRNA sense strand
cgucaaguaugucaacaag

SEQ ID NO: 1875427 - RNA, 19 nt, Homo sapiens
  misc_RNA (1)...(19): siRNA sense strand
cgagaggacacuaaugaug

SEQ ID NO: 1875428 - RNA, 19 nt, Homo sapiens
  misc_RNA (1)...(19): siRNA sense strand
gagaaccuguggaguacgu

SEQ ID NO: 1875429 - RNA, 19 nt, Homo sapiens
  misc_RNA (1)...(19): siRNA sense strand
cagaacaacgucaccgaaa

SEQ ID NO: 1875430 - RNA, 19 nt, Homo sapiens
  misc_RNA (1)...(19): siRNA sense strand
uguccucgcugcucaacaa

SEQ ID NO: 1875431 - RNA, 19 nt, Homo sapiens
  misc_RNA (1)...(19): siRNA sense strand
acaccagccuauccgguuu

SEQ ID NO: 1875432 - RNA, 19 nt, Homo sapiens
  misc_RNA (1)...(19): siRNA sense strand
cauugaaggcguggucuua

SEQ ID NO: 1875433 - RNA, 19 nt, Homo sapiens
  misc_RNA (1)...(19): siRNA sense strand
gaacauccugggcgucauc

SEQ ID NO: 1875434 - RNA, 19 nt, Homo sapiens
  misc_RNA (1)...(19): siRNA sense strand
cuggagaaccuguggagua

SEQ ID NO: 1875435 - RNA, 19 nt, Homo sapiens
  misc_RNA (1)...(19): siRNA sense strand
uacgagaggacacuaauga

SEQ ID NO: 1875436 - RNA, 19 nt, Homo sapiens
  misc_RNA (1)...(19): siRNA sense strand
cuaaugagcacagagaaga

SEQ ID NO: 1875437 - RNA, 19 nt, Homo sapiens
  misc_RNA (1)...(19): siRNA sense strand
gagacgagaacuacaugga

SEQ ID NO: 1875438 - RNA, 19 nt, Homo sapiens
  misc_RNA (1)...(19): siRNA sense strand
gcaggggccauguauauuu

SEQ ID NO: 1875439 - RNA, 19 nt, Homo sapiens
  misc_RNA (1)...(19): siRNA sense strand
cugcagauguucuuguauc

SEQ ID NO: 1875440 - RNA, 19 nt, Homo sapiens
  misc_RNA (1)...(19): siRNA sense strand
ccagacaaggugcagauga

SEQ ID NO: 1875441 - RNA, 19 nt, Homo sapiens
  misc_RNA (1)...(19): siRNA sense strand
agaggacacuaaugaugga

SEQ ID NO: 1875442 - RNA, 19 nt, Homo sapiens
  misc_RNA (1)...(19): siRNA sense strand
gcagggagacgagaacuac

SEQ ID NO: 1875443 - RNA, 19 nt, Homo sapiens
  misc_RNA (1)...(19): siRNA sense strand
ucaauggcgucguccucaa

SEQ ID NO: 1875444 - RNA, 19 nt, Homo sapiens
  misc_RNA (1)...(19): siRNA sense strand
cagauguucuuguaucacu

SEQ ID NO: 1875445 - RNA, 19 nt, Homo sapiens
  misc_RNA (1)...(19): siRNA sense strand
caugccagguccucccaaa

SEQ ID NO: 1875446 - RNA, 19 nt, Homo sapiens
  misc_RNA (1)...(19): siRNA sense strand
agaagcugaucgcugagaa

SEQ ID NO: 1875447 - RNA, 19 nt, Homo sapiens
  misc_RNA (1)...(19): siRNA sense strand
acauggaguuucuugaagu

SEQ ID NO: 1875448 - RNA, 19 nt, Homo sapiens
  misc_RNA (1)...(19): siRNA sense strand
acgaguacuucauccagaa

SEQ ID NO: 1875449 - RNA, 19 nt, Homo sapiens
  misc_RNA (1)...(19): siRNA sense strand
gauguucuuguaucacuug

SEQ ID NO: 1875450 - RNA, 19 nt, Homo sapiens
  misc_RNA (1)...(19): siRNA sense strand
aagaaggaccugcagaugu

SEQ ID NO: 1875451 - RNA, 19 nt, Homo sapiens
  misc_RNA (1)...(19): siRNA sense strand
ugaagaaggaccugcagau

SEQ ID NO: 1875452 - RNA, 19 nt, Homo sapiens
  misc_RNA (1)...(19): siRNA sense strand
cgucaucggcuccuucuuc

SEQ ID NO: 1875453 - RNA, 19 nt, Homo sapiens
  misc_RNA (1)...(19): siRNA sense strand
gaaaacgacauaucugcuu

SEQ ID NO: 1875454 - RNA, 19 nt, Homo sapiens
  misc_RNA (1)...(19): siRNA sense strand
ucaucuaucucuccugcau

SEQ ID NO: 1875455 - RNA, 19 nt, Homo sapiens
  misc_RNA (1)...(19): siRNA sense strand
ugaucaccaucuacuccua

SEQ ID NO: 1875456 - RNA, 19 nt, Homo sapiens
  misc_RNA (1)...(19): siRNA sense strand
gcagagacaccagccuauc

SEQ ID NO: 1875457 - RNA, 19 nt, Homo sapiens
  misc_RNA (1)...(19): siRNA sense strand
cagacaaggugcagaugac

SEQ ID NO: 1875458 - RNA, 19 nt, Homo sapiens
  misc_RNA (1)...(19): siRNA sense strand
caacaaugucgagguggaa

SEQ ID NO: 1875459 - RNA, 19 nt, Homo sapiens
  misc_RNA (1)...(19): siRNA sense strand
ugugcuaccuguucgugaa

SEQ ID NO: 1875460 - RNA, 19 nt, Homo sapiens
  misc_RNA (1)...(19): siRNA sense strand
aaaacgacauaucugcuuu

SEQ ID NO: 1875461 - RNA, 19 nt, Homo sapiens
  misc_RNA (1)...(19): siRNA sense strand
acacggcugugaagcucaa

SEQ ID NO: 1875462 - RNA, 19 nt, Homo sapiens
  misc_RNA (1)...(19): siRNA sense strand
gaggaggagauggacagua

SEQ ID NO: 1875463 - RNA, 19 nt, Homo sapiens
  misc_RNA (1)...(19): siRNA sense strand
uaucugcuuucaccuacga

SEQ ID NO: 1875464 - RNA, 19 nt, Homo sapiens
  misc_RNA (1)...(19): siRNA sense strand
ggcggguccuacuacauga

SEQ ID NO: 1875465 - RNA, 19 nt, Homo sapiens
  misc_RNA (1)...(19): siRNA sense strand
gcaccuucaucggcgucua

SEQ ID NO: 1875466 - RNA, 19 nt, Homo sapiens
  misc_RNA (1)...(19): siRNA sense strand
cuggcugcaucuacaagua

SEQ ID NO: 1875467 - RNA, 19 nt, Homo sapiens
  misc_RNA (1)...(19): siRNA sense strand
cguccacgcuucaaguucu

SEQ ID NO: 1875468 - RNA, 19 nt, Homo sapiens
  misc_RNA (1)...(19): siRNA sense strand
ccuacggcauccacaacaa

SEQ ID NO: 1875469 - RNA, 19 nt, Homo sapiens
  misc_RNA (1)...(19): siRNA sense strand
cauggaguuucuugaaguc

SEQ ID NO: 1875470 - RNA, 19 nt, Homo sapiens
  misc_RNA (1)...(19): siRNA sense strand
uacauggaguuucuugaag

SEQ ID NO: 1875471 - RNA, 19 nt, Homo sapiens
  misc_RNA (1)...(19): siRNA sense strand
gagaagcugaucgcugaga

SEQ ID NO: 1875472 - RNA, 19 nt, Homo sapiens
  misc_RNA (1)...(19): siRNA sense strand
cagaugcagcuguccaaga

SEQ ID NO: 1875473 - RNA, 19 nt, Homo sapiens
  misc_RNA (1)...(19): siRNA sense strand
gcgcaugggcaccuucauc

SEQ ID NO: 1875474 - RNA, 19 nt, Homo sapiens
  misc_RNA (1)...(19): siRNA sense strand
aaacagcccauuccucaac

SEQ ID NO: 1875475 - RNA, 19 nt, Homo sapiens
  misc_RNA (1)...(19): siRNA sense strand
uggagaaccuguggaguac

SEQ ID NO: 1875476 - RNA, 19 nt, Homo sapiens
  misc_RNA (1)...(19): siRNA sense strand
ccucaugugcuaccuguuc

SEQ ID NO: 1875477 - RNA, 19 nt, Homo sapiens
  misc_RNA (1)...(19): siRNA sense strand
cagcugguccugcucaaca

SEQ ID NO: 1875478 - RNA, 19 nt, Homo sapiens
  misc_RNA (1)...(19): siRNA sense strand
acauaucugcuuucaccua

SEQ ID NO: 1875479 - RNA, 19 nt, Homo sapiens
  misc_RNA (1)...(19): siRNA sense strand
guccacgcuucaaguucua

SEQ ID NO: 1875480 - RNA, 19 nt, Homo sapiens
  misc_RNA (1)...(19): siRNA sense strand
caggggccauguauauuuu

SEQ ID NO: 1875481 - RNA, 19 nt, Homo sapiens
  misc_RNA (1)...(19): siRNA sense strand
caacaagcuggccaacuac

SEQ ID NO: 1875482 - RNA, 19 nt, Homo sapiens
  misc_RNA (1)...(19): siRNA sense strand
uuguaucacuugcgcauca

SEQ ID NO: 1875483 - RNA, 19 nt, Homo sapiens
  misc_RNA (1)...(19): siRNA sense strand
ucaaggaugcacagaaguc

SEQ ID NO: 1875484 - RNA, 19 nt, Homo sapiens
  misc_RNA (1)...(19): siRNA sense strand
uaucauggcggguucaaac

SEQ ID NO: 1875485 - RNA, 19 nt, Homo sapiens
  misc_RNA (1)...(19): siRNA sense strand
ccagcacacugcccuacgu

SEQ ID NO: 1875486 - RNA, 19 nt, Homo sapiens
  misc_RNA (1)...(19): siRNA sense strand
ucauggcccugguggucuu

SEQ ID NO: 1875487 - RNA, 19 nt, Homo sapiens
  misc_RNA (1)...(19): siRNA sense strand
gggagacgagaacuacaug

SEQ ID NO: 1875488 - RNA, 19 nt, Homo sapiens
  misc_RNA (1)...(19): siRNA sense strand
gccuggcgcugauguucau

SEQ ID NO: 1875489 - RNA, 19 nt, Homo sapiens
  misc_RNA (1)...(19): siRNA sense strand
uguccauccuggccaucua

SEQ ID NO: 1875490 - RNA, 19 nt, Homo sapiens
  misc_RNA (1)...(19): siRNA sense strand
ccuauccgguuucaaagac

SEQ ID NO: 1875491 - RNA, 19 nt, Homo sapiens
  misc_RNA (1)...(19): siRNA sense strand
gaagcugaucgcugagaag

SEQ ID NO: 1875492 - RNA, 19 nt, Homo sapiens
  misc_RNA (1)...(19): siRNA sense strand
cagcuggcggguccuacua

SEQ ID NO: 1875493 - RNA, 19 nt, Homo sapiens
  misc_RNA (1)...(19): siRNA sense strand
ugcagauguucuuguauca

SEQ ID NO: 1875494 - RNA, 19 nt, Homo sapiens
  misc_RNA (1)...(19): siRNA sense strand
ucuacaaguacaucgagua

SEQ ID NO: 1875495 - RNA, 19 nt, Homo sapiens
  misc_RNA (1)...(19): siRNA sense strand
gucaucggcuccuucuucu

SEQ ID NO: 1875496 - RNA, 19 nt, Homo sapiens
  misc_RNA (1)...(19): siRNA sense strand
gcuggcggguccuacuaca

SEQ ID NO: 1875497 - RNA, 19 nt, Homo sapiens
  misc_RNA (1)...(19): siRNA sense strand
ucgaguaucuggugaagug

SEQ ID NO: 1875498 - RNA, 19 nt, Homo sapiens
  misc_RNA (1)...(19): siRNA sense strand
ggaaggguaaagucgagua

SEQ ID NO: 1875499 - RNA, 19 nt, Homo sapiens
  misc_RNA (1)...(19): siRNA sense strand
gcacgugggagccagaaga

SEQ ID NO: 1875500 - RNA, 19 nt, Homo sapiens
  misc_RNA (1)...(19): siRNA sense strand
guggagagcauccggaaga

SEQ ID NO: 1875501 - RNA, 19 nt, Homo sapiens
  misc_RNA (1)...(19): siRNA sense strand
cccgaaaggcccacaagua

SEQ ID NO: 1875502 - RNA, 19 nt, Homo sapiens
  misc_RNA (1)...(19): siRNA sense strand
gaaggguaaagucgaguau

SEQ ID NO: 1875503 - RNA, 19 nt, Homo sapiens
  misc_RNA (1)...(19): siRNA sense strand
gaaaggcccacaaguaccu

SEQ ID NO: 1875504 - RNA, 19 nt, Homo sapiens
  misc_RNA (1)...(19): siRNA sense strand
ccgaaaggcccacaaguac

SEQ ID NO: 1875505 - RNA, 19 nt, Homo sapiens
  misc_RNA (1)...(19): siRNA sense strand
aggguaaagucgaguaucu

SEQ ID NO: 1875506 - RNA, 19 nt, Homo sapiens
  misc_RNA (1)...(19): siRNA sense strand
uggagagcauccggaagaa

SEQ ID NO: 1875507 - RNA, 19 nt, Homo sapiens
  misc_RNA (1)...(19): siRNA sense strand
gaggagagagaccgagcau

SEQ ID NO: 1875508 - RNA, 19 nt, Homo sapiens
  misc_RNA (1)...(19): siRNA sense strand
ggagagccacagccaucga

SEQ ID NO: 1875509 - RNA, 19 nt, Homo sapiens
  misc_RNA (1)...(19): siRNA sense strand
gcgaagagcugcccgagua

SEQ ID NO: 1875510 - RNA, 19 nt, Homo sapiens
  misc_RNA (1)...(19): siRNA sense strand
gcaacaaacugcaaaauug

SEQ ID NO: 1875511 - RNA, 19 nt, Homo sapiens
  misc_RNA (1)...(19): siRNA sense strand
gcagagagcccaccuguac

SEQ ID NO: 1875512 - RNA, 19 nt, Homo sapiens
  misc_RNA (1)...(19): siRNA sense strand
ggaacuacauccucaaggu

SEQ ID NO: 1875513 - RNA, 19 nt, Homo sapiens
  misc_RNA (1)...(19): siRNA sense strand
cuacacaggucgcuacguu

SEQ ID NO: 1875514 - RNA, 19 nt, Homo sapiens
  misc_RNA (1)...(19): siRNA sense strand
gcacgugaacccaaaguau

SEQ ID NO: 1875515 - RNA, 19 nt, Homo sapiens
  misc_RNA (1)...(19): siRNA sense strand
ccucagcgcuccgagagua

SEQ ID NO: 1875516 - RNA, 19 nt, Homo sapiens
  misc_RNA (1)...(19): siRNA sense strand
ccaacaacguggugagaug

SEQ ID NO: 1875517 - RNA, 19 nt, Homo sapiens
  misc_RNA (1)...(19): siRNA sense strand
guggugagaugcaacauuc

SEQ ID NO: 1875518 - RNA, 19 nt, Homo sapiens
  misc_RNA (1)...(19): siRNA sense strand
gaacccaaaguauauuguu

SEQ ID NO: 1875519 - RNA, 19 nt, Homo sapiens
  misc_RNA (1)...(19): siRNA sense strand
gugcaagcauccacuuaug

SEQ ID NO: 1875520 - RNA, 19 nt, Homo sapiens
  misc_RNA (1)...(19): siRNA sense strand
gcaagcauccacuuaugug

SEQ ID NO: 1875521 - RNA, 19 nt, Homo sapiens
  misc_RNA (1)...(19): siRNA sense strand
ggaccuacgaccaggguuu

SEQ ID NO: 1875522 - RNA, 19 nt, Homo sapiens
  misc_RNA (1)...(19): siRNA sense strand
cacgugaacccaaaguaua

SEQ ID NO: 1875523 - RNA, 19 nt, Homo sapiens
  misc_RNA (1)...(19): siRNA sense strand
gaacaacgggcagguguac

SEQ ID NO: 1875524 - RNA, 19 nt, Homo sapiens
  misc_RNA (1)...(19): siRNA sense strand
cgaccaggguuucguguac

SEQ ID NO: 1875525 - RNA, 19 nt, Homo sapiens
  misc_RNA (1)...(19): siRNA sense strand
gcuaugacaccuacaaugc

SEQ ID NO: 1875526 - RNA, 19 nt, Homo sapiens
  misc_RNA (1)...(19): siRNA sense strand
ccacuacgaccuacuggau

SEQ ID NO: 1875527 - RNA, 19 nt, Homo sapiens
  misc_RNA (1)...(19): siRNA sense strand
guguacagcuugcucaacu

SEQ ID NO: 1875528 - RNA, 19 nt, Homo sapiens
  misc_RNA (1)...(19): siRNA sense strand
guucagccacuacgaccua

SEQ ID NO: 1875529 - RNA, 19 nt, Homo sapiens
  misc_RNA (1)...(19): siRNA sense strand
gaugcaacauucacuacac

SEQ ID NO: 1875530 - RNA, 19 nt, Homo sapiens
  misc_RNA (1)...(19): siRNA sense strand
gccaguggaucgacauaac

SEQ ID NO: 1875531 - RNA, 19 nt, Homo sapiens
  misc_RNA (1)...(19): siRNA sense strand
ugagaugcaacauucacua

SEQ ID NO: 1875532 - RNA, 19 nt, Homo sapiens
  misc_RNA (1)...(19): siRNA sense strand
gagaugcaacauucacuac

SEQ ID NO: 1875533 - RNA, 19 nt, Homo sapiens
  misc_RNA (1)...(19): siRNA sense strand
acacaggucgcuacguuuc

SEQ ID NO: 1875534 - RNA, 19 nt, Homo sapiens
  misc_RNA (1)...(19): siRNA sense strand
ucgcuacguuucugcaaca

SEQ ID NO: 1875535 - RNA, 19 nt, Homo sapiens
  misc_RNA (1)...(19): siRNA sense strand
ccagggcacagcagacuuc

SEQ ID NO: 1875536 - RNA, 19 nt, Homo sapiens
  misc_RNA (1)...(19): siRNA sense strand
ccacagcauggacgaguuc

SEQ ID NO: 1875537 - RNA, 19 nt, Homo sapiens
  misc_RNA (1)...(19): siRNA sense strand
gugaacccaaaguauauug

SEQ ID NO: 1875538 - RNA, 19 nt, Homo sapiens
  misc_RNA (1)...(19): siRNA sense strand
ccuccuacccgcagcaguu

SEQ ID NO: 1875539 - RNA, 19 nt, Homo sapiens
  misc_RNA (1)...(19): siRNA sense strand
ggaaggaccugucaaucuu

SEQ ID NO: 1875540 - RNA, 19 nt, Homo sapiens
  misc_RNA (1)...(19): siRNA sense strand
gcacauacuucauuacugu

SEQ ID NO: 1875541 - RNA, 19 nt, Homo sapiens
  misc_RNA (1)...(19): siRNA sense strand
ggaagaaccugccaagcuu

SEQ ID NO: 1875542 - RNA, 19 nt, Homo sapiens
  misc_RNA (1)...(19): siRNA sense strand
ggaagaaccugccaagcuu

SEQ ID NO: 1875543 - RNA, 19 nt, Homo sapiens
  misc_RNA (1)...(19): siRNA sense strand
ggaagaaccugccaagcuu

SEQ ID NO: 1875544 - RNA, 19 nt, Homo sapiens
  misc_RNA (1)...(19): siRNA sense strand
ggaagaaccugccaagcuu

SEQ ID NO: 1875545 - RNA, 19 nt, Homo sapiens
  misc_RNA (1)...(19): siRNA sense strand
ggaagaaccugccaagcuu

SEQ ID NO: 1875546 - RNA, 19 nt, Homo sapiens
  misc_RNA (1)...(19): siRNA sense strand
ggaagaaccugccaagcuu

SEQ ID NO: 1875547 - RNA, 19 nt, Homo sapiens
  misc_RNA (1)...(19): siRNA sense strand
ggaagaaccugccaagcuu

SEQ ID NO: 1875548 - RNA, 19 nt, Homo sapiens
  misc_RNA (1)...(19): siRNA sense strand
ggaagaaccugccaagcuu

SEQ ID NO: 1875549 - RNA, 19 nt, Homo sapiens
  misc_RNA (1)...(19): siRNA sense strand
ggaagaaccugccaagcuu

SEQ ID NO: 1875550 - RNA, 19 nt, Homo sapiens
  misc_RNA (1)...(19): siRNA sense strand
ggaagaaccugccaagcuu

SEQ ID NO: 1875551 - RNA, 19 nt, Homo sapiens
  misc_RNA (1)...(19): siRNA sense strand
ggaagaaccugccaagcuu

SEQ ID NO: 1875552 - RNA, 19 nt, Homo sapiens
  misc_RNA (1)...(19): siRNA sense strand
ggaagaaccugccaagcuu

SEQ ID NO: 1875553 - RNA, 19 nt, Homo sapiens
  misc_RNA (1)...(19): siRNA sense strand
ggaagaaccugccaagcuu

SEQ ID NO: 1875554 - RNA, 19 nt, Homo sapiens
  misc_RNA (1)...(19): siRNA sense strand
ggaagaaccugccaagcuu

SEQ ID NO: 1875555 - RNA, 19 nt, Homo sapiens
  misc_RNA (1)...(19): siRNA sense strand
ggaagaaccugccaagcuu

SEQ ID NO: 1875556 - RNA, 19 nt, Homo sapiens
  misc_RNA (1)...(19): siRNA sense strand
ggaagaaccugccaagcuu

SEQ ID NO: 1875557 - RNA, 19 nt, Homo sapiens
  misc_RNA (1)...(19): siRNA sense strand
ggaagaaccugccaagcuu

SEQ ID NO: 1875558 - RNA, 19 nt, Homo sapiens
  misc_RNA (1)...(19): siRNA sense strand
ggaagaaccugccaagcuu

SEQ ID NO: 1875559 - RNA, 19 nt, Homo sapiens
  misc_RNA (1)...(19): siRNA sense strand
ggaagaaccugccaagcuu

SEQ ID NO: 1875560 - RNA, 19 nt, Homo sapiens
  misc_RNA (1)...(19): siRNA sense strand
ggaagaaccugccaagcuu

SEQ ID NO: 1875561 - RNA, 19 nt, Homo sapiens
  misc_RNA (1)...(19): siRNA sense strand
ggaagaaccugccaagcuu

SEQ ID NO: 1875562 - RNA, 19 nt, Homo sapiens
  misc_RNA (1)...(19): siRNA sense strand
ggaagaaccugccaagcuu

SEQ ID NO: 1875563 - RNA, 19 nt, Homo sapiens
  misc_RNA (1)...(19): siRNA sense strand
ggaagaaccugccaagcuu

SEQ ID NO: 1875564 - RNA, 19 nt, Homo sapiens
  misc_RNA (1)...(19): siRNA sense strand
ggaagaaccugccaagcuu

SEQ ID NO: 1875565 - RNA, 19 nt, Homo sapiens
  misc_RNA (1)...(19): siRNA sense strand
ggaagaaccugccaagcuu

SEQ ID NO: 1875566 - RNA, 19 nt, Homo sapiens
  misc_RNA (1)...(19): siRNA sense strand
ggaagaaccugccaagcuu

SEQ ID NO: 1875567 - RNA, 19 nt, Homo sapiens
  misc_RNA (1)...(19): siRNA sense strand
ggaagaaccugccaagcuu

SEQ ID NO: 1875568 - RNA, 19 nt, Homo sapiens
  misc_RNA (1)...(19): siRNA sense strand
ggaagaaccugccaagcuu

SEQ ID NO: 1875569 - RNA, 19 nt, Homo sapiens
  misc_RNA (1)...(19): siRNA sense strand
ggaagaaccugccaagcuu

SEQ ID NO: 1875570 - RNA, 19 nt, Homo sapiens
  misc_RNA (1)...(19): siRNA sense strand
ggaagaaccugccaagcuu

SEQ ID NO: 1875571 - RNA, 19 nt, Homo sapiens
  misc_RNA (1)...(19): siRNA sense strand
ggaaggaccugccaagcuu

SEQ ID NO: 1875572 - RNA, 19 nt, Homo sapiens
  misc_RNA (1)...(19): siRNA sense strand
caaggcacauacuucauua

SEQ ID NO: 1875573 - RNA, 19 nt, Homo sapiens
  misc_RNA (1)...(19): siRNA sense strand
ggaaggacaugucaaucuu

SEQ ID NO: 1875574 - RNA, 19 nt, Homo sapiens
  misc_RNA (1)...(19): siRNA sense strand
ggaaucaacucuccucaca

SEQ ID NO: 1875575 - RNA, 19 nt, Homo sapiens
  misc_RNA (1)...(19): siRNA sense strand
gaagaagcaccaacugaaa

SEQ ID NO: 1875576 - RNA, 19 nt, Homo sapiens
  misc_RNA (1)...(19): siRNA sense strand
gaacaagguuuggaaagca

SEQ ID NO: 1875577 - RNA, 19 nt, Homo sapiens
  misc_RNA (1)...(19): siRNA sense strand
ggaaggacaugucagucuu

SEQ ID NO: 1875578 - RNA, 19 nt, Homo sapiens
  misc_RNA (1)...(19): siRNA sense strand
ggaaggacaugucagucuu

SEQ ID NO: 1875579 - RNA, 19 nt, Homo sapiens
  misc_RNA (1)...(19): siRNA sense strand
gaacaagcaccaccugaga

SEQ ID NO: 1875580 - RNA, 19 nt, Homo sapiens
  misc_RNA (1)...(19): siRNA sense strand
gagggaaugaugagaaaua

SEQ ID NO: 1875581 - RNA, 19 nt, Homo sapiens
  misc_RNA (1)...(19): siRNA sense strand
gcaagucagucucagaaca

SEQ ID NO: 1875582 - RNA, 19 nt, Homo sapiens
  misc_RNA (1)...(19): siRNA sense strand
gaaauggacagaguuauca

SEQ ID NO: 1875583 - RNA, 19 nt, Homo sapiens
  misc_RNA (1)...(19): siRNA sense strand
uaucgaggcucauucucua

SEQ ID NO: 1875584 - RNA, 19 nt, Homo sapiens
  misc_RNA (1)...(19): siRNA sense strand
uggcagcuccuuauuguua

SEQ ID NO: 1875585 - RNA, 19 nt, Homo sapiens
  misc_RNA (1)...(19): siRNA sense strand
gauauugccuugcuaaagc

SEQ ID NO: 1875586 - RNA, 19 nt, Homo sapiens
  misc_RNA (1)...(19): siRNA sense strand
gcauggaggcucauucuga

SEQ ID NO: 1875587 - RNA, 19 nt, Homo sapiens
  misc_RNA (1)...(19): siRNA sense strand
uggcagcuccuuauuguua

SEQ ID NO: 1875588 - RNA, 19 nt, Homo sapiens
  misc_RNA (1)...(19): siRNA sense strand
uggcagcuccuuauuguua

SEQ ID NO: 1875589 - RNA, 19 nt, Homo sapiens
  misc_RNA (1)...(19): siRNA sense strand
uggcagcuccuuauuguua

SEQ ID NO: 1875590 - RNA, 19 nt, Homo sapiens
  misc_RNA (1)...(19): siRNA sense strand
cauaauaggaccacagaaa

SEQ ID NO: 1875591 - RNA, 19 nt, Homo sapiens
  misc_RNA (1)...(19): siRNA sense strand
uggcagcuccuuauuguua

SEQ ID NO: 1875592 - RNA, 19 nt, Homo sapiens
  misc_RNA (1)...(19): siRNA sense strand
uggcagcuccuuauuguua

SEQ ID NO: 1875593 - RNA, 19 nt, Homo sapiens
  misc_RNA (1)...(19): siRNA sense strand
uggcagcuccuuauuguua

SEQ ID NO: 1875594 - RNA, 19 nt, Homo sapiens
  misc_RNA (1)...(19): siRNA sense strand
uggcagcuccuuauuguua

SEQ ID NO: 1875595 - RNA, 19 nt, Homo sapiens
  misc_RNA (1)...(19): siRNA sense strand
uggcagcuccuuauuguua

SEQ ID NO: 1875596 - RNA, 19 nt, Homo sapiens
  misc_RNA (1)...(19): siRNA sense strand
uggcagcuccuuauuguua

SEQ ID NO: 1875597 - RNA, 19 nt, Homo sapiens
  misc_RNA (1)...(19): siRNA sense strand
uggcagcuccuuauuguua

SEQ ID NO: 1875598 - RNA, 19 nt, Homo sapiens
  misc_RNA (1)...(19): siRNA sense strand
uggcagcuccuuauuguua

SEQ ID NO: 1875599 - RNA, 19 nt, Homo sapiens
  misc_RNA (1)...(19): siRNA sense strand
uggcagcuccuuauuguua

SEQ ID NO: 1875600 - RNA, 19 nt, Homo sapiens
  misc_RNA (1)...(19): siRNA sense strand
uggcagcuccuuauuguua

SEQ ID NO: 1875601 - RNA, 19 nt, Homo sapiens
  misc_RNA (1)...(19): siRNA sense strand
uggcagcuccuuauuguua

SEQ ID NO: 1875602 - RNA, 19 nt, Homo sapiens
  misc_RNA (1)...(19): siRNA sense strand
uggcagcuccuuauuguua

SEQ ID NO: 1875603 - RNA, 19 nt, Homo sapiens
  misc_RNA (1)...(19): siRNA sense strand
uggcagcuccuuauuguua

SEQ ID NO: 1875604 - RNA, 19 nt, Homo sapiens
  misc_RNA (1)...(19): siRNA sense strand
uggcagcuccuuauuguua

SEQ ID NO: 1875605 - RNA, 19 nt, Homo sapiens
  misc_RNA (1)...(19): siRNA sense strand
uggcagcuccuuauuguua

SEQ ID NO: 1875606 - RNA, 19 nt, Homo sapiens
  misc_RNA (1)...(19): siRNA sense strand
uggcagcuccuuauuguua

SEQ ID NO: 1875607 - RNA, 19 nt, Homo sapiens
  misc_RNA (1)...(19): siRNA sense strand
uggcagcuccuuauuguua

SEQ ID NO: 1875608 - RNA, 19 nt, Homo sapiens
  misc_RNA (1)...(19): siRNA sense strand
uggcagcuccuuauuguua

SEQ ID NO: 1875609 - RNA, 19 nt, Homo sapiens
  misc_RNA (1)...(19): siRNA sense strand
uggcagcuccuuauuguua

SEQ ID NO: 1875610 - RNA, 19 nt, Homo sapiens
  misc_RNA (1)...(19): siRNA sense strand
uggcagcuccuuauuguua

SEQ ID NO: 1875611 - RNA, 19 nt, Homo sapiens
  misc_RNA (1)...(19): siRNA sense strand
uggcagcuccuuauuguua

SEQ ID NO: 1875612 - RNA, 19 nt, Homo sapiens
  misc_RNA (1)...(19): siRNA sense strand
uggcagcuccuuauuguua

SEQ ID NO: 1875613 - RNA, 19 nt, Homo sapiens
  misc_RNA (1)...(19): siRNA sense strand
uggcagcuccuuauuguua

SEQ ID NO: 1875614 - RNA, 19 nt, Homo sapiens
  misc_RNA (1)...(19): siRNA sense strand
uggcagcuccuuauuguua

SEQ ID NO: 1875615 - RNA, 19 nt, Homo sapiens
  misc_RNA (1)...(19): siRNA sense strand
uggcagcuccuuauuguua

SEQ ID NO: 1875616 - RNA, 19 nt, Homo sapiens
  misc_RNA (1)...(19): siRNA sense strand
ggacugcuacuaccauuau

SEQ ID NO: 1875617 - RNA, 19 nt, Homo sapiens
  misc_RNA (1)...(19): siRNA sense strand
ccgaagaaauguccuggaa

SEQ ID NO: 1875618 - RNA, 19 nt, Homo sapiens
  misc_RNA (1)...(19): siRNA sense strand
gcagcuccuuauuguuaua

SEQ ID NO: 1875619 - RNA, 19 nt, Homo sapiens
  misc_RNA (1)...(19): siRNA sense strand
gcagauauugccuugcuaa

SEQ ID NO: 1875620 - RNA, 19 nt, Homo sapiens
  misc_RNA (1)...(19): siRNA sense strand
gcagcuccuuauuguuaua

SEQ ID NO: 1875621 - RNA, 19 nt, Homo sapiens
  misc_RNA (1)...(19): siRNA sense strand
gcagcuccuuauuguuaua

SEQ ID NO: 1875622 - RNA, 19 nt, Homo sapiens
  misc_RNA (1)...(19): siRNA sense strand
gcagcuccuuauuguuaua

SEQ ID NO: 1875623 - RNA, 19 nt, Homo sapiens
  misc_RNA (1)...(19): siRNA sense strand
gcagcuccuuauuguuaua

SEQ ID NO: 1875624 - RNA, 19 nt, Homo sapiens
  misc_RNA (1)...(19): siRNA sense strand
gcagcuccuuauuguuaua

SEQ ID NO: 1875625 - RNA, 19 nt, Homo sapiens
  misc_RNA (1)...(19): siRNA sense strand
gcagcuccuuauuguuaua

SEQ ID NO: 1875626 - RNA, 19 nt, Homo sapiens
  misc_RNA (1)...(19): siRNA sense strand
gcagcuccuuauuguuaua

SEQ ID NO: 1875627 - RNA, 19 nt, Homo sapiens
  misc_RNA (1)...(19): siRNA sense strand
gcagcuccuuauuguuaua

SEQ ID NO: 1875628 - RNA, 19 nt, Homo sapiens
  misc_RNA (1)...(19): siRNA sense strand
gcagcuccuuauuguuaua

SEQ ID NO: 1875629 - RNA, 19 nt, Homo sapiens
  misc_RNA (1)...(19): siRNA sense strand
gcagcuccuuauuguuaua

SEQ ID NO: 1875630 - RNA, 19 nt, Homo sapiens
  misc_RNA (1)...(19): siRNA sense strand
gcagcuccuuauuguuaua

SEQ ID NO: 1875631 - RNA, 19 nt, Homo sapiens
  misc_RNA (1)...(19): siRNA sense strand
gcagcuccuuauuguuaua

SEQ ID NO: 1875632 - RNA, 19 nt, Homo sapiens
  misc_RNA (1)...(19): siRNA sense strand
gcagcuccuuauuguuaua

SEQ ID NO: 1875633 - RNA, 19 nt, Homo sapiens
  misc_RNA (1)...(19): siRNA sense strand
gcagcuccuuauuguuaua

SEQ ID NO: 1875634 - RNA, 19 nt, Homo sapiens
  misc_RNA (1)...(19): siRNA sense strand
gcagcuccuuauuguuaua

SEQ ID NO: 1875635 - RNA, 19 nt, Homo sapiens
  misc_RNA (1)...(19): siRNA sense strand
gcagcuccuuauuguuaua

SEQ ID NO: 1875636 - RNA, 19 nt, Homo sapiens
  misc_RNA (1)...(19): siRNA sense strand
gcagcuccuuauuguuaua

SEQ ID NO: 1875637 - RNA, 19 nt, Homo sapiens
  misc_RNA (1)...(19): siRNA sense strand
gcagcuccuuauuguuaua

SEQ ID NO: 1875638 - RNA, 19 nt, Homo sapiens
  misc_RNA (1)...(19): siRNA sense strand
gcagcuccuuauuguuaua

SEQ ID NO: 1875639 - RNA, 19 nt, Homo sapiens
  misc_RNA (1)...(19): siRNA sense strand
ccacagagcuccacugguu

SEQ ID NO: 1875640 - RNA, 19 nt, Homo sapiens
  misc_RNA (1)...(19): siRNA sense strand
caagaagucuacauugaaa

SEQ ID NO: 1875641 - RNA, 19 nt, Homo sapiens
  misc_RNA (1)...(19): siRNA sense strand
ggaggagacuguccguauu

SEQ ID NO: 1875642 - RNA, 19 nt, Homo sapiens
  misc_RNA (1)...(19): siRNA sense strand
caacaaggucacccaaaua

SEQ ID NO: 1875643 - RNA, 19 nt, Homo sapiens
  misc_RNA (1)...(19): siRNA sense strand
gagcccugcuacauuaaua

SEQ ID NO: 1875644 - RNA, 19 nt, Homo sapiens
  misc_RNA (1)...(19): siRNA sense strand
ggaucgagauuuccauguu

SEQ ID NO: 1875645 - RNA, 19 nt, Homo sapiens
  misc_RNA (1)...(19): siRNA sense strand
ccagugcccuuccaucuau

SEQ ID NO: 1875646 - RNA, 19 nt, Homo sapiens
  misc_RNA (1)...(19): siRNA sense strand
gcccagcccucauuauaug

SEQ ID NO: 1875647 - RNA, 19 nt, Homo sapiens
  misc_RNA (1)...(19): siRNA sense strand
guacaacccauacaaacaa

SEQ ID NO: 1875648 - RNA, 19 nt, Homo sapiens
  misc_RNA (1)...(19): siRNA sense strand
ucaacaaggucacccaaau

SEQ ID NO: 1875649 - RNA, 19 nt, Homo sapiens
  misc_RNA (1)...(19): siRNA sense strand
ggagaccacccauuccuuu

SEQ ID NO: 1875650 - RNA, 19 nt, Homo sapiens
  misc_RNA (1)...(19): siRNA sense strand
caaccaagaagucuacauu

SEQ ID NO: 1875651 - RNA, 19 nt, Homo sapiens
  misc_RNA (1)...(19): siRNA sense strand
gaagaccuauaucacagau

SEQ ID NO: 1875652 - RNA, 19 nt, Homo sapiens
  misc_RNA (1)...(19): siRNA sense strand
gcgguggucuccugucuga

SEQ ID NO: 1875653 - RNA, 19 nt, Homo sapiens
  misc_RNA (1)...(19): siRNA sense strand
gaucgagauuuccauguuc

SEQ ID NO: 1875654 - RNA, 19 nt, Homo sapiens
  misc_RNA (1)...(19): siRNA sense strand
caagaagaccuauaucaca

SEQ ID NO: 1875655 - RNA, 19 nt, Homo sapiens
  misc_RNA (1)...(19): siRNA sense strand
ccaagaagucuacauugaa

SEQ ID NO: 1875656 - RNA, 19 nt, Homo sapiens
  misc_RNA (1)...(19): siRNA sense strand
ggacuuccacaagaaauuu

SEQ ID NO: 1875657 - RNA, 19 nt, Homo sapiens
  misc_RNA (1)...(19): siRNA sense strand
ugcgagcccugcuacauua

SEQ ID NO: 1875658 - RNA, 19 nt, Homo sapiens
  misc_RNA (1)...(19): siRNA sense strand
gagcuccacugguucaaca

SEQ ID NO: 1875659 - RNA, 19 nt, Homo sapiens
  misc_RNA (1)...(19): siRNA sense strand
cagcccagcccucauuaua

SEQ ID NO: 1875660 - RNA, 19 nt, Homo sapiens
  misc_RNA (1)...(19): siRNA sense strand
gggcacauccucugcaaga

SEQ ID NO: 1875661 - RNA, 19 nt, Homo sapiens
  misc_RNA (1)...(19): siRNA sense strand
gaugcuguaugacauggaa

SEQ ID NO: 1875662 - RNA, 19 nt, Homo sapiens
  misc_RNA (1)...(19): siRNA sense strand
uaaguacaacccauacaaa

SEQ ID NO: 1875663 - RNA, 19 nt, Homo sapiens
  misc_RNA (1)...(19): siRNA sense strand
ccuaucauccucacuguuu

SEQ ID NO: 1875664 - RNA, 19 nt, Homo sapiens
  misc_RNA (1)...(19): siRNA sense strand
accaagaagucuacauuga

SEQ ID NO: 1875665 - RNA, 19 nt, Homo sapiens
  misc_RNA (1)...(19): siRNA sense strand
caucuuggcugaccuugag

SEQ ID NO: 1875666 - RNA, 19 nt, Homo sapiens
  misc_RNA (1)...(19): siRNA sense strand
gaggagacuguccguauug

SEQ ID NO: 1875667 - RNA, 19 nt, Homo sapiens
  misc_RNA (1)...(19): siRNA sense strand
gaacccuccugggauguau

SEQ ID NO: 1875668 - RNA, 19 nt, Homo sapiens
  misc_RNA (1)...(19): siRNA sense strand
ggcgagcacugaccuuuag

SEQ ID NO: 1875669 - RNA, 19 nt, Homo sapiens
  misc_RNA (1)...(19): siRNA sense strand
gccauucuaugcuguggaa

SEQ ID NO: 1875670 - RNA, 19 nt, Homo sapiens
  misc_RNA (1)...(19): siRNA sense strand
uaacagcaaccaagaaguc

SEQ ID NO: 1875671 - RNA, 19 nt, Homo sapiens
  misc_RNA (1)...(19): siRNA sense strand
ucacaggacacaagagaau

SEQ ID NO: 1875672 - RNA, 19 nt, Homo sapiens
  misc_RNA (1)...(19): siRNA sense strand
ccagggacgcuauuaugaa

SEQ ID NO: 1875673 - RNA, 19 nt, Homo sapiens
  misc_RNA (1)...(19): siRNA sense strand
cauggauuaugccuacauu

SEQ ID NO: 1875674 - RNA, 19 nt, Homo sapiens
  misc_RNA (1)...(19): siRNA sense strand
gcauugaggacuuccacaa

SEQ ID NO: 1875675 - RNA, 19 nt, Homo sapiens
  misc_RNA (1)...(19): siRNA sense strand
cagggacgcuauuaugaag

SEQ ID NO: 1875676 - RNA, 19 nt, Homo sapiens
  misc_RNA (1)...(19): siRNA sense strand
acgcugagauugacuccuu

SEQ ID NO: 1875677 - RNA, 19 nt, Homo sapiens
  misc_RNA (1)...(19): siRNA sense strand
gcccagaggaugagcuuga

SEQ ID NO: 1875678 - RNA, 19 nt, Homo sapiens
  misc_RNA (1)...(19): siRNA sense strand
caaccagggacgcuauuau

SEQ ID NO: 1875679 - RNA, 19 nt, Homo sapiens
  misc_RNA (1)...(19): siRNA sense strand
cuauaacacucagccaguu

SEQ ID NO: 1875680 - RNA, 19 nt, Homo sapiens
  misc_RNA (1)...(19): siRNA sense strand
aaauccaccugcugacgaa

SEQ ID NO: 1875681 - RNA, 19 nt, Homo sapiens
  misc_RNA (1)...(19): siRNA sense strand
gagauaaccaaggcugcua

SEQ ID NO: 1875682 - RNA, 19 nt, Homo sapiens
  misc_RNA (1)...(19): siRNA sense strand
gcuccaaucggaacacuca

SEQ ID NO: 1875683 - RNA, 19 nt, Homo sapiens
  misc_RNA (1)...(19): siRNA sense strand
ggcuuuggaucgagauuuc

SEQ ID NO: 1875684 - RNA, 19 nt, Homo sapiens
  misc_RNA (1)...(19): siRNA sense strand
cuaaguacaacccauacaa

SEQ ID NO: 1875685 - RNA, 19 nt, Homo sapiens
  misc_RNA (1)...(19): siRNA sense strand
ucacccaaauaccuggaaa

SEQ ID NO: 1875686 - RNA, 19 nt, Homo sapiens
  misc_RNA (1)...(19): siRNA sense strand
ccaaccagggacgcuauua

SEQ ID NO: 1875687 - RNA, 19 nt, Homo sapiens
  misc_RNA (1)...(19): siRNA sense strand
gugcaaggagccuauuaug

SEQ ID NO: 1875688 - RNA, 19 nt, Homo sapiens
  misc_RNA (1)...(19): siRNA sense strand
uugaggacuuccacaagaa

SEQ ID NO: 1875689 - RNA, 19 nt, Homo sapiens
  misc_RNA (1)...(19): siRNA sense strand
cuucaucaggacaaauuua

SEQ ID NO: 1875690 - RNA, 19 nt, Homo sapiens
  misc_RNA (1)...(19): siRNA sense strand
gagaccacccauuccuuug

SEQ ID NO: 1875691 - RNA, 19 nt, Homo sapiens
  misc_RNA (1)...(19): siRNA sense strand
caucaggacaaauuuaugg

SEQ ID NO: 1875692 - RNA, 19 nt, Homo sapiens
  misc_RNA (1)...(19): siRNA sense strand
auugaggacuuccacaaga

SEQ ID NO: 1875693 - RNA, 19 nt, Homo sapiens
  misc_RNA (1)...(19): siRNA sense strand
ccaagaagaccuauaucac

SEQ ID NO: 1875694 - RNA, 19 nt, Homo sapiens
  misc_RNA (1)...(19): siRNA sense strand
gagggcagccauucuaugc

SEQ ID NO: 1875695 - RNA, 19 nt, Homo sapiens
  misc_RNA (1)...(19): siRNA sense strand
aucuaucucuggaaacuuu

SEQ ID NO: 1875696 - RNA, 19 nt, Homo sapiens
  misc_RNA (1)...(19): siRNA sense strand
gcuauuaugaaggcuacua

SEQ ID NO: 1875697 - RNA, 19 nt, Homo sapiens
  misc_RNA (1)...(19): siRNA sense strand
ccuuuaaugugcaggugaa

SEQ ID NO: 1875698 - RNA, 19 nt, Homo sapiens
  misc_RNA (1)...(19): siRNA sense strand
cccaagaagaccuauauca

SEQ ID NO: 1875699 - RNA, 19 nt, Homo sapiens
  misc_RNA (1)...(19): siRNA sense strand
ucacugcauugaggacuuc

SEQ ID NO: 1875700 - RNA, 19 nt, Homo sapiens
  misc_RNA (1)...(19): siRNA sense strand
ccaucuaucucuggaaacu

SEQ ID NO: 1875701 - RNA, 19 nt, Homo sapiens
  misc_RNA (1)...(19): siRNA sense strand
ggccuaucauccucacugu

SEQ ID NO: 1875702 - RNA, 19 nt, Homo sapiens
  misc_RNA (1)...(19): siRNA sense strand
gucccaagaagaccuauau

SEQ ID NO: 1875703 - RNA, 19 nt, Homo sapiens
  misc_RNA (1)...(19): siRNA sense strand
ccugcuacauuaauacucu

SEQ ID NO: 1875704 - RNA, 19 nt, Homo sapiens
  misc_RNA (1)...(19): siRNA sense strand
ggauuaugccuacauucca

SEQ ID NO: 1875705 - RNA, 19 nt, Homo sapiens
  misc_RNA (1)...(19): siRNA sense strand
ugaggacuuccacaagaaa

SEQ ID NO: 1875706 - RNA, 19 nt, Homo sapiens
  misc_RNA (1)...(19): siRNA sense strand
caccuccaccucuagauga

SEQ ID NO: 1875707 - RNA, 19 nt, Homo sapiens
  misc_RNA (1)...(19): siRNA sense strand
ccaccgggaaggccuauca

SEQ ID NO: 1875708 - RNA, 19 nt, Homo sapiens
  misc_RNA (1)...(19): siRNA sense strand
aggaugcacugccauggau

SEQ ID NO: 1875709 - RNA, 19 nt, Homo sapiens
  misc_RNA (1)...(19): siRNA sense strand
ugugcucgcuguggagaaa

SEQ ID NO: 1875710 - RNA, 19 nt, Homo sapiens
  misc_RNA (1)...(19): siRNA sense strand
gagccuggguauggguaug

SEQ ID NO: 1875711 - RNA, 19 nt, Homo sapiens
  misc_RNA (1)...(19): siRNA sense strand
ccucuaacagcaaccaaga

SEQ ID NO: 1875712 - RNA, 19 nt, Homo sapiens
  misc_RNA (1)...(19): siRNA sense strand
aaccuaaguacaacccaua

SEQ ID NO: 1875713 - RNA, 19 nt, Homo sapiens
  misc_RNA (1)...(19): siRNA sense strand
uccaccaccucuugaugaa

SEQ ID NO: 1875714 - RNA, 19 nt, Homo sapiens
  misc_RNA (1)...(19): siRNA sense strand
aacagccucuccuccaguu

SEQ ID NO: 1875715 - RNA, 19 nt, Homo sapiens
  misc_RNA (1)...(19): siRNA sense strand
gguggucuccugucugaag

SEQ ID NO: 1875716 - RNA, 19 nt, Homo sapiens
  misc_RNA (1)...(19): siRNA sense strand
ccaccuccaccucuagaug

SEQ ID NO: 1875717 - RNA, 19 nt, Homo sapiens
  misc_RNA (1)...(19): siRNA sense strand
cuggagcagugcaaugugu

SEQ ID NO: 1875718 - RNA, 19 nt, Homo sapiens
  misc_RNA (1)...(19): siRNA sense strand
ugccauggaucaggucuuc

SEQ ID NO: 1875719 - RNA, 19 nt, Homo sapiens
  misc_RNA (1)...(19): siRNA sense strand
aaagaugcuguaugacaug

SEQ ID NO: 1875720 - RNA, 19 nt, Homo sapiens
  misc_RNA (1)...(19): siRNA sense strand
aaaagaugcuguaugacau

SEQ ID NO: 1875721 - RNA, 19 nt, Homo sapiens
  misc_RNA (1)...(19): siRNA sense strand
ucacuggucccaagaagac

SEQ ID NO: 1875722 - RNA, 19 nt, Homo sapiens
  misc_RNA (1)...(19): siRNA sense strand
gcaguguccaccuccuuca

SEQ ID NO: 1875723 - RNA, 19 nt, Homo sapiens
  misc_RNA (1)...(19): siRNA sense strand
aggcgagcacugaccuuua

SEQ ID NO: 1875724 - RNA, 19 nt, Homo sapiens
  misc_RNA (1)...(19): siRNA sense strand
ggagacuguccguauugug

SEQ ID NO: 1875725 - RNA, 19 nt, Homo sapiens
  misc_RNA (1)...(19): siRNA sense strand
gaggacuuccacaagaaau

SEQ ID NO: 1875726 - RNA, 19 nt, Homo sapiens
  misc_RNA (1)...(19): siRNA sense strand
gaugcacugccauggauca

SEQ ID NO: 1875727 - RNA, 19 nt, Homo sapiens
  misc_RNA (1)...(19): siRNA sense strand
aaccagggacgcuauuaug

SEQ ID NO: 1875728 - RNA, 19 nt, Homo sapiens
  misc_RNA (1)...(19): siRNA sense strand
gaacagauccgccugaaga

SEQ ID NO: 1875729 - RNA, 19 nt, Homo sapiens
  misc_RNA (1)...(19): siRNA sense strand
gaguuugccuugcucauug

SEQ ID NO: 1875730 - RNA, 19 nt, Homo sapiens
  misc_RNA (1)...(19): siRNA sense strand
ggagauaguugacuuugcu

SEQ ID NO: 1875731 - RNA, 19 nt, Homo sapiens
  misc_RNA (1)...(19): siRNA sense strand
ugacuuugcuaaacagcua

SEQ ID NO: 1875732 - RNA, 19 nt, Homo sapiens
  misc_RNA (1)...(19): siRNA sense strand
ccucaaggauuucaguuau

SEQ ID NO: 1875733 - RNA, 19 nt, Homo sapiens
  misc_RNA (1)...(19): siRNA sense strand
gaucugggaugugcacgaa

SEQ ID NO: 1875734 - RNA, 19 nt, Homo sapiens
  misc_RNA (1)...(19): siRNA sense strand
acagagauccguccacaaa

SEQ ID NO: 1875735 - RNA, 19 nt, Homo sapiens
  misc_RNA (1)...(19): siRNA sense strand
ucacugagcuggccaucgu

SEQ ID NO: 1875736 - RNA, 19 nt, Homo sapiens
  misc_RNA (1)...(19): siRNA sense strand
gcagcugcauccucagaga

SEQ ID NO: 1875737 - RNA, 19 nt, Homo sapiens
  misc_RNA (1)...(19): siRNA sense strand
gauaguugacuuugcuaaa

SEQ ID NO: 1875738 - RNA, 19 nt, Homo sapiens
  misc_RNA (1)...(19): siRNA sense strand
caagggagcgcacuacauc

SEQ ID NO: 1875739 - RNA, 19 nt, Homo sapiens
  misc_RNA (1)...(19): siRNA sense strand
ugacauuccuccugacucu

SEQ ID NO: 1875740 - RNA, 19 nt, Homo sapiens
  misc_RNA (1)...(19): siRNA sense strand
gcaggagauaguugacuuu

SEQ ID NO: 1875741 - RNA, 19 nt, Homo sapiens
  misc_RNA (1)...(19): siRNA sense strand
gagcugcaacucaaugaug

SEQ ID NO: 1875742 - RNA, 19 nt, Homo sapiens
  misc_RNA (1)...(19): siRNA sense strand
cucaaggauuucaguuaua

SEQ ID NO: 1875743 - RNA, 19 nt, Homo sapiens
  misc_RNA (1)...(19): siRNA sense strand
gcaaguggaauucaucaac

SEQ ID NO: 1875744 - RNA, 19 nt, Homo sapiens
  misc_RNA (1)...(19): siRNA sense strand
cagauugcccugcugaaga

SEQ ID NO: 1875745 - RNA, 19 nt, Homo sapiens
  misc_RNA (1)...(19): siRNA sense strand
gcagcgcuuugcccacuuc

SEQ ID NO: 1875746 - RNA, 19 nt, Homo sapiens
  misc_RNA (1)...(19): siRNA sense strand
gggcuuccacuacaauguu

SEQ ID NO: 1875747 - RNA, 19 nt, Homo sapiens
  misc_RNA (1)...(19): siRNA sense strand
gaguaucaccuuccucaag

SEQ ID NO: 1875748 - RNA, 19 nt, Homo sapiens
  misc_RNA (1)...(19): siRNA sense strand
gguacaacccugggaguga

SEQ ID NO: 1875749 - RNA, 19 nt, Homo sapiens
  misc_RNA (1)...(19): siRNA sense strand
gaagccaggcgcacaggau

SEQ ID NO: 1875750 - RNA, 19 nt, Homo sapiens
  misc_RNA (1)...(19): siRNA sense strand
guuauaaccgggaagacuu

SEQ ID NO: 1875751 - RNA, 19 nt, Homo sapiens
  misc_RNA (1)...(19): siRNA sense strand
gcacuacaucugccacagu

SEQ ID NO: 1875752 - RNA, 19 nt, Homo sapiens
  misc_RNA (1)...(19): siRNA sense strand
ucugggaugugcacgaaug

SEQ ID NO: 1875753 - RNA, 19 nt, Homo sapiens
  misc_RNA (1)...(19): siRNA sense strand
ccacggaugcuaaugaaac

SEQ ID NO: 1875754 - RNA, 19 nt, Homo sapiens
  misc_RNA (1)...(19): siRNA sense strand
aagaacagauccgccugaa

SEQ ID NO: 1875755 - RNA, 19 nt, Homo sapiens
  misc_RNA (1)...(19): siRNA sense strand
gcucagcccggaacaacug

SEQ ID NO: 1875756 - RNA, 19 nt, Homo sapiens
  misc_RNA (1)...(19): siRNA sense strand
cgaguuugccuugcucauu

SEQ ID NO: 1875757 - RNA, 19 nt, Homo sapiens
  misc_RNA (1)...(19): siRNA sense strand
uaguugacuuugcuaaaca

SEQ ID NO: 1875758 - RNA, 19 nt, Homo sapiens
  misc_RNA (1)...(19): siRNA sense strand
cggaacaacugggcaugau

SEQ ID NO: 1875759 - RNA, 19 nt, Homo sapiens
  misc_RNA (1)...(19): siRNA sense strand
ggccaugaaugagcugcaa

SEQ ID NO: 1875760 - RNA, 19 nt, Homo sapiens
  misc_RNA (1)...(19): siRNA sense strand
ucccacggaugcuaaugaa

SEQ ID NO: 1875761 - RNA, 19 nt, Homo sapiens
  misc_RNA (1)...(19): siRNA sense strand
cuucagaacccacagagau

SEQ ID NO: 1875762 - RNA, 19 nt, Homo sapiens
  misc_RNA (1)...(19): siRNA sense strand
gagugucggcuucgcaaau

SEQ ID NO: 1875763 - RNA, 19 nt, Homo sapiens
  misc_RNA (1)...(19): siRNA sense strand
ugcaggagauaguugacuu

SEQ ID NO: 1875764 - RNA, 19 nt, Homo sapiens
  misc_RNA (1)...(19): siRNA sense strand
ggaacaacugggcaugauc

SEQ ID NO: 1875765 - RNA, 19 nt, Homo sapiens
  misc_RNA (1)...(19): siRNA sense strand
cgaucgaggugaugcuucu

SEQ ID NO: 1875766 - RNA, 19 nt, Homo sapiens
  misc_RNA (1)...(19): siRNA sense strand
gagauaguugacuuugcua

SEQ ID NO: 1875767 - RNA, 19 nt, Homo sapiens
  misc_RNA (1)...(19): siRNA sense strand
gcuuugcccacuucacuga

SEQ ID NO: 1875768 - RNA, 19 nt, Homo sapiens
  misc_RNA (1)...(19): siRNA sense strand
gauguucccacggaugcua

SEQ ID NO: 1875769 - RNA, 19 nt, Homo sapiens
  misc_RNA (1)...(19): siRNA sense strand
ucaaugaugccgaguuugc

SEQ ID NO: 1875770 - RNA, 19 nt, Homo sapiens
  misc_RNA (1)...(19): siRNA sense strand
ccucgggcuuccacuacaa

SEQ ID NO: 1875771 - RNA, 19 nt, Homo sapiens
  misc_RNA (1)...(19): siRNA sense strand
gaguguguccugucagaag

SEQ ID NO: 1875772 - RNA, 19 nt, Homo sapiens
  misc_RNA (1)...(19): siRNA sense strand
ucuccagggccaugaauga

SEQ ID NO: 1875773 - RNA, 19 nt, Homo sapiens
  misc_RNA (1)...(19): siRNA sense strand
agacaucucggagguacaa

SEQ ID NO: 1875774 - RNA, 19 nt, Homo sapiens
  misc_RNA (1)...(19): siRNA sense strand
gggcugcaagggauucuuc

SEQ ID NO: 1875775 - RNA, 19 nt, Homo sapiens
  misc_RNA (1)...(19): siRNA sense strand
uuauaaccgggaagacuuu

SEQ ID NO: 1875776 - RNA, 19 nt, Homo sapiens
  misc_RNA (1)...(19): siRNA sense strand
ggagagaacuaugaugaua

SEQ ID NO: 1875777 - RNA, 19 nt, Homo sapiens
  misc_RNA (1)...(19): siRNA sense strand
gaacaucaguuguggaaau

SEQ ID NO: 1875778 - RNA, 19 nt, Homo sapiens
  misc_RNA (1)...(19): siRNA sense strand
gaacuaugaugauaacuca

SEQ ID NO: 1875779 - RNA, 19 nt, Homo sapiens
  misc_RNA (1)...(19): siRNA sense strand
gagaagaauucacuuacaa

SEQ ID NO: 1875780 - RNA, 19 nt, Homo sapiens
  misc_RNA (1)...(19): siRNA sense strand
gaauugggcuaugaaguuu

SEQ ID NO: 1875781 - RNA, 19 nt, Homo sapiens
  misc_RNA (1)...(19): siRNA sense strand
ccagaaaggucuacaguuc

SEQ ID NO: 1875782 - RNA, 19 nt, Homo sapiens
  misc_RNA (1)...(19): siRNA sense strand
cgacuccaauuacauuaua

SEQ ID NO: 1875783 - RNA, 19 nt, Homo sapiens
  misc_RNA (1)...(19): siRNA sense strand
gaaacagagugguccagaa

SEQ ID NO: 1875784 - RNA, 19 nt, Homo sapiens
  misc_RNA (1)...(19): siRNA sense strand
gcacaacccacacuucaaa

SEQ ID NO: 1875785 - RNA, 19 nt, Homo sapiens
  misc_RNA (1)...(19): siRNA sense strand
gaagguuugucugugaaua

SEQ ID NO: 1875786 - RNA, 19 nt, Homo sapiens
  misc_RNA (1)...(19): siRNA sense strand
gaaguaugcucaggaaauc

SEQ ID NO: 1875787 - RNA, 19 nt, Homo sapiens
  misc_RNA (1)...(19): siRNA sense strand
caacaucaacaaugcauuu

SEQ ID NO: 1875788 - RNA, 19 nt, Homo sapiens
  misc_RNA (1)...(19): siRNA sense strand
gggaacauguuuauaaugg

SEQ ID NO: 1875789 - RNA, 19 nt, Homo sapiens
  misc_RNA (1)...(19): siRNA sense strand
gugaaaccauuacaucuga

SEQ ID NO: 1875790 - RNA, 19 nt, Homo sapiens
  misc_RNA (1)...(19): siRNA sense strand
cuucguaccuuggaauuua

SEQ ID NO: 1875791 - RNA, 19 nt, Homo sapiens
  misc_RNA (1)...(19): siRNA sense strand
ucagggaacauguuuauaa

SEQ ID NO: 1875792 - RNA, 19 nt, Homo sapiens
  misc_RNA (1)...(19): siRNA sense strand
gaauuuauaccgaaaggaa

SEQ ID NO: 1875793 - RNA, 19 nt, Homo sapiens
  misc_RNA (1)...(19): siRNA sense strand
gaaaggaagguuugucugu

SEQ ID NO: 1875794 - RNA, 19 nt, Homo sapiens
  misc_RNA (1)...(19): siRNA sense strand
caacagaaagggcccaauu

SEQ ID NO: 1875795 - RNA, 19 nt, Homo sapiens
  misc_RNA (1)...(19): siRNA sense strand
gauauaggaucuggaggaa

SEQ ID NO: 1875796 - RNA, 19 nt, Homo sapiens
  misc_RNA (1)...(19): siRNA sense strand
guauucaccugaccucuug

SEQ ID NO: 1875797 - RNA, 19 nt, Homo sapiens
  misc_RNA (1)...(19): siRNA sense strand
ggaaaucgaugagaugaac

SEQ ID NO: 1875798 - RNA, 19 nt, Homo sapiens
  misc_RNA (1)...(19): siRNA sense strand
gauugacccuugagacuau

SEQ ID NO: 1875799 - RNA, 19 nt, Homo sapiens
  misc_RNA (1)...(19): siRNA sense strand
ugaauaugcuggugagguu

SEQ ID NO: 1875800 - RNA, 19 nt, Homo sapiens
  misc_RNA (1)...(19): siRNA sense strand
guacugcuuuccugccuuu

SEQ ID NO: 1875801 - RNA, 19 nt, Homo sapiens
  misc_RNA (1)...(19): siRNA sense strand
gaugagagccuugaagaug

SEQ ID NO: 1875802 - RNA, 19 nt, Homo sapiens
  misc_RNA (1)...(19): siRNA sense strand
agaaacaacucgcaacauc

SEQ ID NO: 1875803 - RNA, 19 nt, Homo sapiens
  misc_RNA (1)...(19): siRNA sense strand
gagagaacuaugaugauaa

SEQ ID NO: 1875804 - RNA, 19 nt, Homo sapiens
  misc_RNA (1)...(19): siRNA sense strand
uuaagcaucucaacaacuu

SEQ ID NO: 1875805 - RNA, 19 nt, Homo sapiens
  misc_RNA (1)...(19): siRNA sense strand
gaaggaacccagcaugugu

SEQ ID NO: 1875806 - RNA, 19 nt, Homo sapiens
  misc_RNA (1)...(19): siRNA sense strand
ugaaugaauugggcuauga

SEQ ID NO: 1875807 - RNA, 19 nt, Homo sapiens
  misc_RNA (1)...(19): siRNA sense strand
gaaguucagagaagaauuc

SEQ ID NO: 1875808 - RNA, 19 nt, Homo sapiens
  misc_RNA (1)...(19): siRNA sense strand
ccaacuaccacgucuuuaa

SEQ ID NO: 1875809 - RNA, 19 nt, Homo sapiens
  misc_RNA (1)...(19): siRNA sense strand
ccaaagcacuucccaaagc

SEQ ID NO: 1875810 - RNA, 19 nt, Homo sapiens
  misc_RNA (1)...(19): siRNA sense strand
ucagagaagaauucacuua

SEQ ID NO: 1875811 - RNA, 19 nt, Homo sapiens
  misc_RNA (1)...(19): siRNA sense strand
gagaugagagccuugaaga

SEQ ID NO: 1875812 - RNA, 19 nt, Homo sapiens
  misc_RNA (1)...(19): siRNA sense strand
uauaggaucuggaggaaag

SEQ ID NO: 1875813 - RNA, 19 nt, Homo sapiens
  misc_RNA (1)...(19): siRNA sense strand
gugguuggaucaagaagaa

SEQ ID NO: 1875814 - RNA, 19 nt, Homo sapiens
  misc_RNA (1)...(19): siRNA sense strand
gaaacaacucgcaacauca

SEQ ID NO: 1875815 - RNA, 19 nt, Homo sapiens
  misc_RNA (1)...(19): siRNA sense strand
caaaucauguacugcuuuc

SEQ ID NO: 1875816 - RNA, 19 nt, Homo sapiens
  misc_RNA (1)...(19): siRNA sense strand
aaacagagugguccagaaa

SEQ ID NO: 1875817 - RNA, 19 nt, Homo sapiens
  misc_RNA (1)...(19): siRNA sense strand
cagggaacauguuuauaau

SEQ ID NO: 1875818 - RNA, 19 nt, Homo sapiens
  misc_RNA (1)...(19): siRNA sense strand
caaccacaacgaaccauuu

SEQ ID NO: 1875819 - RNA, 19 nt, Homo sapiens
  misc_RNA (1)...(19): siRNA sense strand
ugaauugggcuaugaaguu

SEQ ID NO: 1875820 - RNA, 19 nt, Homo sapiens
  misc_RNA (1)...(19): siRNA sense strand
caaaauccgacuccaauua

SEQ ID NO: 1875821 - RNA, 19 nt, Homo sapiens
  misc_RNA (1)...(19): siRNA sense strand
gaaucccggugaaaccauu

SEQ ID NO: 1875822 - RNA, 19 nt, Homo sapiens
  misc_RNA (1)...(19): siRNA sense strand
caacgaaccauuucucgau

SEQ ID NO: 1875823 - RNA, 19 nt, Homo sapiens
  misc_RNA (1)...(19): siRNA sense strand
gucagugccuccaaagaaa

SEQ ID NO: 1875824 - RNA, 19 nt, Homo sapiens
  misc_RNA (1)...(19): siRNA sense strand
cgacugagcagcuggaugu

SEQ ID NO: 1875825 - RNA, 19 nt, Homo sapiens
  misc_RNA (1)...(19): siRNA sense strand
auaagugggugccucauga

SEQ ID NO: 1875826 - RNA, 19 nt, Homo sapiens
  misc_RNA (1)...(19): siRNA sense strand
cugaagaacucaaugucaa

SEQ ID NO: 1875827 - RNA, 19 nt, Homo sapiens
  misc_RNA (1)...(19): siRNA sense strand
ccaaagaaaggcuagauca

SEQ ID NO: 1875828 - RNA, 19 nt, Homo sapiens
  misc_RNA (1)...(19): siRNA sense strand
cccaggaacugcuaacgaa

SEQ ID NO: 1875829 - RNA, 19 nt, Homo sapiens
  misc_RNA (1)...(19): siRNA sense strand
cacgagaaguugcugaaga

SEQ ID NO: 1875830 - RNA, 19 nt, Homo sapiens
  misc_RNA (1)...(19): siRNA sense strand
caaaaugggucguaaagca

SEQ ID NO: 1875831 - RNA, 19 nt, Homo sapiens
  misc_RNA (1)...(19): siRNA sense strand
uggcauuggucaacagaaa

SEQ ID NO: 1875832 - RNA, 19 nt, Homo sapiens
  misc_RNA (1)...(19): siRNA sense strand
guagaaaagucgaacauca

SEQ ID NO: 1875833 - RNA, 19 nt, Homo sapiens
  misc_RNA (1)...(19): siRNA sense strand
cauuacaucugagaaguau

SEQ ID NO: 1875834 - RNA, 19 nt, Homo sapiens
  misc_RNA (1)...(19): siRNA sense strand
acgagaaguugcugaagaa

SEQ ID NO: 1875835 - RNA, 19 nt, Homo sapiens
  misc_RNA (1)...(19): siRNA sense strand
gugcaguggugguucaaga

SEQ ID NO: 1875836 - RNA, 19 nt, Homo sapiens
  misc_RNA (1)...(19): siRNA sense strand
gcagaaacaacucgcaaca

SEQ ID NO: 1875837 - RNA, 19 nt, Homo sapiens
  misc_RNA (1)...(19): siRNA sense strand
aaggaagguuugucuguga

SEQ ID NO: 1875838 - RNA, 19 nt, Homo sapiens
  misc_RNA (1)...(19): siRNA sense strand
gagaaggaacccagcaugu

SEQ ID NO: 1875839 - RNA, 19 nt, Homo sapiens
  misc_RNA (1)...(19): siRNA sense strand
gaucaugggaaacuaagga

SEQ ID NO: 1875840 - RNA, 19 nt, Homo sapiens
  misc_RNA (1)...(19): siRNA sense strand
agagaagaauucacuuaca

SEQ ID NO: 1875841 - RNA, 19 nt, Homo sapiens
  misc_RNA (1)...(19): siRNA sense strand
uuacuguggugccaaauca

SEQ ID NO: 1875842 - RNA, 19 nt, Homo sapiens
  misc_RNA (1)...(19): siRNA sense strand
aaagaaaggcuagaucaug

SEQ ID NO: 1875843 - RNA, 19 nt, Homo sapiens
  misc_RNA (1)...(19): siRNA sense strand
caucagggaacauguuuau

SEQ ID NO: 1875844 - RNA, 19 nt, Homo sapiens
  misc_RNA (1)...(19): siRNA sense strand
gaagaauucacuuacaaac

SEQ ID NO: 1875845 - RNA, 19 nt, Homo sapiens
  misc_RNA (1)...(19): siRNA sense strand
gaaagggcccaauucuucu

SEQ ID NO: 1875846 - RNA, 19 nt, Homo sapiens
  misc_RNA (1)...(19): siRNA sense strand
cacuacagcuuucugaauc

SEQ ID NO: 1875847 - RNA, 19 nt, Homo sapiens
  misc_RNA (1)...(19): siRNA sense strand
agugucaucuucucuuauu

SEQ ID NO: 1875848 - RNA, 19 nt, Homo sapiens
  misc_RNA (1)...(19): siRNA sense strand
aaacaacucgcaacaucaa

SEQ ID NO: 1875849 - RNA, 19 nt, Homo sapiens
  misc_RNA (1)...(19): siRNA sense strand
ccaaaucauguacugcuuu

SEQ ID NO: 1875850 - RNA, 19 nt, Homo sapiens
  misc_RNA (1)...(19): siRNA sense strand
gaaugaauugggcuaugaa

SEQ ID NO: 1875851 - RNA, 19 nt, Homo sapiens
  misc_RNA (1)...(19): siRNA sense strand
ccaguacacuccugaucau

SEQ ID NO: 1875852 - RNA, 19 nt, Homo sapiens
  misc_RNA (1)...(19): siRNA sense strand
gcuagaucaugggaaacua

SEQ ID NO: 1875853 - RNA, 19 nt, Homo sapiens
  misc_RNA (1)...(19): siRNA sense strand
acaggaauaaaccaacuua

SEQ ID NO: 1875854 - RNA, 19 nt, Homo sapiens
  misc_RNA (1)...(19): siRNA sense strand
gauaacucaugccuuagag

SEQ ID NO: 1875855 - RNA, 19 nt, Homo sapiens
  misc_RNA (1)...(19): siRNA sense strand
uguugacccuacuuauaua

SEQ ID NO: 1875856 - RNA, 19 nt, Homo sapiens
  misc_RNA (1)...(19): siRNA sense strand
gaaaccauuacaucugaga

SEQ ID NO: 1875857 - RNA, 19 nt, Homo sapiens
  misc_RNA (1)...(19): siRNA sense strand
cugcuggucugauccacua

SEQ ID NO: 1875858 - RNA, 19 nt, Homo sapiens
  misc_RNA (1)...(19): siRNA sense strand
gaagaugaggagcguagug

SEQ ID NO: 1875859 - RNA, 19 nt, Homo sapiens
  misc_RNA (1)...(19): siRNA sense strand
acucaugccuuagagauau

SEQ ID NO: 1875860 - RNA, 19 nt, Homo sapiens
  misc_RNA (1)...(19): siRNA sense strand
aaggcuagaucaugggaaa

SEQ ID NO: 1875861 - RNA, 19 nt, Homo sapiens
  misc_RNA (1)...(19): siRNA sense strand
guugagagcaaucaucgaa

SEQ ID NO: 1875862 - RNA, 19 nt, Homo sapiens
  misc_RNA (1)...(19): siRNA sense strand
caacuaccacgucuuuaag

SEQ ID NO: 1875863 - RNA, 19 nt, Homo sapiens
  misc_RNA (1)...(19): siRNA sense strand
caaagauauugugccagaa

SEQ ID NO: 1875864 - RNA, 19 nt, Homo sapiens
  misc_RNA (1)...(19): siRNA sense strand
agaaguaugcucaggaaau

SEQ ID NO: 1875865 - RNA, 19 nt, Homo sapiens
  misc_RNA (1)...(19): siRNA sense strand
ccacuacagcuuucugaau

SEQ ID NO: 1875866 - RNA, 19 nt, Homo sapiens
  misc_RNA (1)...(19): siRNA sense strand
gauaagugggugccucaug

SEQ ID NO: 1875867 - RNA, 19 nt, Homo sapiens
  misc_RNA (1)...(19): siRNA sense strand
gcugaagaacucaauguca

SEQ ID NO: 1875868 - RNA, 19 nt, Homo sapiens
  misc_RNA (1)...(19): siRNA sense strand
augagagccuugaagauga

SEQ ID NO: 1875869 - RNA, 19 nt, Homo sapiens
  misc_RNA (1)...(19): siRNA sense strand
uaaagcagcagaaacaacu

SEQ ID NO: 1875870 - RNA, 19 nt, Homo sapiens
  misc_RNA (1)...(19): siRNA sense strand
caaagaaaggcuagaucau

SEQ ID NO: 1875871 - RNA, 19 nt, Homo sapiens
  misc_RNA (1)...(19): siRNA sense strand
ggugaaaccauuacaucug

SEQ ID NO: 1875872 - RNA, 19 nt, Homo sapiens
  misc_RNA (1)...(19): siRNA sense strand
gccaaaucauguacugcuu

SEQ ID NO: 1875873 - RNA, 19 nt, Homo sapiens
  misc_RNA (1)...(19): siRNA sense strand
agagaacuaugaugauaac

SEQ ID NO: 1875874 - RNA, 19 nt, Homo sapiens
  misc_RNA (1)...(19): siRNA sense strand
uaacucaugccuuagagau

SEQ ID NO: 1875875 - RNA, 19 nt, Homo sapiens
  misc_RNA (1)...(19): siRNA sense strand
ccucaugagcugacugaaa

SEQ ID NO: 1875876 - RNA, 19 nt, Homo sapiens
  misc_RNA (1)...(19): siRNA sense strand
ggagagagaugcuucaaau

SEQ ID NO: 1875877 - RNA, 19 nt, Homo sapiens
  misc_RNA (1)...(19): siRNA sense strand
aaacuaaacuggacaggua

SEQ ID NO: 1875878 - RNA, 19 nt, Homo sapiens
  misc_RNA (1)...(19): siRNA sense strand
gagaagcaaugggaauuua

SEQ ID NO: 1875879 - RNA, 19 nt, Homo sapiens
  misc_RNA (1)...(19): siRNA sense strand
gaauggagcgucaaacuaa

SEQ ID NO: 1875880 - RNA, 19 nt, Homo sapiens
  misc_RNA (1)...(19): siRNA sense strand
gaucuuaccuacaaugaau

SEQ ID NO: 1875881 - RNA, 19 nt, Homo sapiens
  misc_RNA (1)...(19): siRNA sense strand
gugaugaaguggagguuua

SEQ ID NO: 1875882 - RNA, 19 nt, Homo sapiens
  misc_RNA (1)...(19): siRNA sense strand
agacagagguggaaaguuc

SEQ ID NO: 1875883 - RNA, 19 nt, Homo sapiens
  misc_RNA (1)...(19): siRNA sense strand
ggagaggcauccauuaaca

SEQ ID NO: 1875884 - RNA, 19 nt, Homo sapiens
  misc_RNA (1)...(19): siRNA sense strand
ucaaauugguccacggaua

SEQ ID NO: 1875885 - RNA, 19 nt, Homo sapiens
  misc_RNA (1)...(19): siRNA sense strand
ggcaugaucuuaccuacaa

SEQ ID NO: 1875886 - RNA, 19 nt, Homo sapiens
  misc_RNA (1)...(19): siRNA sense strand
gagagaugcuucaaauugg

SEQ ID NO: 1875887 - RNA, 19 nt, Homo sapiens
  misc_RNA (1)...(19): siRNA sense strand
aaacagaccuuuggcuaug

SEQ ID NO: 1875888 - RNA, 19 nt, Homo sapiens
  misc_RNA (1)...(19): siRNA sense strand
caaauugguccacggauaa

SEQ ID NO: 1875889 - RNA, 19 nt, Homo sapiens
  misc_RNA (1)...(19): siRNA sense strand
gggugaaacuucuaagaga

SEQ ID NO: 1875890 - RNA, 19 nt, Homo sapiens
  misc_RNA (1)...(19): siRNA sense strand
ugagaaacauauugugaug

SEQ ID NO: 1875891 - RNA, 19 nt, Homo sapiens
  misc_RNA (1)...(19): siRNA sense strand
gcaaugggaauuuacauca

SEQ ID NO: 1875892 - RNA, 19 nt, Homo sapiens
  misc_RNA (1)...(19): siRNA sense strand
gaaguggagauuaguguga

SEQ ID NO: 1875893 - RNA, 19 nt, Homo sapiens
  misc_RNA (1)...(19): siRNA sense strand
aagaugagccugacacaaa

SEQ ID NO: 1875894 - RNA, 19 nt, Homo sapiens
  misc_RNA (1)...(19): siRNA sense strand
caaaggacauguggagauc

SEQ ID NO: 1875895 - RNA, 19 nt, Homo sapiens
  misc_RNA (1)...(19): siRNA sense strand
agagagaugcuucaaauug

SEQ ID NO: 1875896 - RNA, 19 nt, Homo sapiens
  misc_RNA (1)...(19): siRNA sense strand
ccaugcuccugcaacauua

SEQ ID NO: 1875897 - RNA, 19 nt, Homo sapiens
  misc_RNA (1)...(19): siRNA sense strand
caacgucucuggggaauuu

SEQ ID NO: 1875898 - RNA, 19 nt, Homo sapiens
  misc_RNA (1)...(19): siRNA sense strand
agacugagcugugcaugga

SEQ ID NO: 1875899 - RNA, 19 nt, Homo sapiens
  misc_RNA (1)...(19): siRNA sense strand
gcaaagggaaacuuaucuu

SEQ ID NO: 1875900 - RNA, 19 nt, Homo sapiens
  misc_RNA (1)...(19): siRNA sense strand
aagggaaacuuaucuucuu

SEQ ID NO: 1875901 - RNA, 19 nt, Homo sapiens
  misc_RNA (1)...(19): siRNA sense strand
gaaaguuccacaugguaga

SEQ ID NO: 1875902 - RNA, 19 nt, Homo sapiens
  misc_RNA (1)...(19): siRNA sense strand
gaagugaguaagcuugaug

SEQ ID NO: 1875903 - RNA, 19 nt, Homo sapiens
  misc_RNA (1)...(19): siRNA sense strand
ccaccaacgucaacaacug

SEQ ID NO: 1875904 - RNA, 19 nt, Homo sapiens
  misc_RNA (1)...(19): siRNA sense strand
gaaguggagguuuaaaucu

SEQ ID NO: 1875905 - RNA, 19 nt, Homo sapiens
  misc_RNA (1)...(19): siRNA sense strand
ugaauggagcgucaaacua

SEQ ID NO: 1875906 - RNA, 19 nt, Homo sapiens
  misc_RNA (1)...(19): siRNA sense strand
gagagagaugcuucaaauu

SEQ ID NO: 1875907 - RNA, 19 nt, Homo sapiens
  misc_RNA (1)...(19): siRNA sense strand
caaagggaaacuuaucuuc

SEQ ID NO: 1875908 - RNA, 19 nt, Homo sapiens
  misc_RNA (1)...(19): siRNA sense strand
uaaacagaccuuuggcuau

SEQ ID NO: 1875909 - RNA, 19 nt, Homo sapiens
  misc_RNA (1)...(19): siRNA sense strand
uacaaugaauggagaguca

SEQ ID NO: 1875910 - RNA, 19 nt, Homo sapiens
  misc_RNA (1)...(19): siRNA sense strand
gaagcaaugggaauuuaca

SEQ ID NO: 1875911 - RNA, 19 nt, Homo sapiens
  misc_RNA (1)...(19): siRNA sense strand
uggaugaaguggagauuag

SEQ ID NO: 1875912 - RNA, 19 nt, Homo sapiens
  misc_RNA (1)...(19): siRNA sense strand
guacuacuuugagggcauu

SEQ ID NO: 1875913 - RNA, 19 nt, Homo sapiens
  misc_RNA (1)...(19): siRNA sense strand
caaaucucguggccuuaau

SEQ ID NO: 1875914 - RNA, 19 nt, Homo sapiens
  misc_RNA (1)...(19): siRNA sense strand
ggaagugaguaagcuugau

SEQ ID NO: 1875915 - RNA, 19 nt, Homo sapiens
  misc_RNA (1)...(19): siRNA sense strand
gcauuaaacagaccuuugg

SEQ ID NO: 1875916 - RNA, 19 nt, Homo sapiens
  misc_RNA (1)...(19): siRNA sense strand
gugugagccuugccaaaga

SEQ ID NO: 1875917 - RNA, 19 nt, Homo sapiens
  misc_RNA (1)...(19): siRNA sense strand
agggaaacuuaucuucuuu

SEQ ID NO: 1875918 - RNA, 19 nt, Homo sapiens
  misc_RNA (1)...(19): siRNA sense strand
cuauggcgcacgcuuauuu

SEQ ID NO: 1875919 - RNA, 19 nt, Homo sapiens
  misc_RNA (1)...(19): siRNA sense strand
ugaccuucaucgacaagaa

SEQ ID NO: 1875920 - RNA, 19 nt, Homo sapiens
  misc_RNA (1)...(19): siRNA sense strand
gagaggcauccauuaacaa

SEQ ID NO: 1875921 - RNA, 19 nt, Homo sapiens
  misc_RNA (1)...(19): siRNA sense strand
ugaaguggagguuuaaauc

SEQ ID NO: 1875922 - RNA, 19 nt, Homo sapiens
  misc_RNA (1)...(19): siRNA sense strand
gaauggagagucaguagac

SEQ ID NO: 1875923 - RNA, 19 nt, Homo sapiens
  misc_RNA (1)...(19): siRNA sense strand
aaucgcaaagggaaacuua

SEQ ID NO: 1875924 - RNA, 19 nt, Homo sapiens
  misc_RNA (1)...(19): siRNA sense strand
agaugagccugacacaaau

SEQ ID NO: 1875925 - RNA, 19 nt, Homo sapiens
  misc_RNA (1)...(19): siRNA sense strand
uggcagcgguacuacuuug

SEQ ID NO: 1875926 - RNA, 19 nt, Homo sapiens
  misc_RNA (1)...(19): siRNA sense strand
aaguggagguuuaaaucuu

SEQ ID NO: 1875927 - RNA, 19 nt, Homo sapiens
  misc_RNA (1)...(19): siRNA sense strand
gagaaacauauugugauga

SEQ ID NO: 1875928 - RNA, 19 nt, Homo sapiens
  misc_RNA (1)...(19): siRNA sense strand
uaagagaagcaaugggaau

SEQ ID NO: 1875929 - RNA, 19 nt, Homo sapiens
  misc_RNA (1)...(19): siRNA sense strand
ccugagaaacauauuguga

SEQ ID NO: 1875930 - RNA, 19 nt, Homo sapiens
  misc_RNA (1)...(19): siRNA sense strand
gaaacauauugugaugaag

SEQ ID NO: 1875931 - RNA, 19 nt, Homo sapiens
  misc_RNA (1)...(19): siRNA sense strand
aaacagcguggaugaagug

SEQ ID NO: 1875932 - RNA, 19 nt, Homo sapiens
  misc_RNA (1)...(19): siRNA sense strand
gcagacagagguggaaagu

SEQ ID NO: 1875933 - RNA, 19 nt, Homo sapiens
  misc_RNA (1)...(19): siRNA sense strand
cugaggagcgcaaggcuaa

SEQ ID NO: 1875934 - RNA, 19 nt, Homo sapiens
  misc_RNA (1)...(19): siRNA sense strand
uaacaaucgcaaagggaaa

SEQ ID NO: 1875935 - RNA, 19 nt, Homo sapiens
  misc_RNA (1)...(19): siRNA sense strand
acaaaucucguggccuuaa

SEQ ID NO: 1875936 - RNA, 19 nt, Homo sapiens
  misc_RNA (1)...(19): siRNA sense strand
aauggagcgucaaacuaaa

SEQ ID NO: 1875937 - RNA, 19 nt, Homo sapiens
  misc_RNA (1)...(19): siRNA sense strand
aguggagguuuaaaucuug

SEQ ID NO: 1875938 - RNA, 19 nt, Homo sapiens
  misc_RNA (1)...(19): siRNA sense strand
gagcuggugcaggccuuua

SEQ ID NO: 1875939 - RNA, 19 nt, Homo sapiens
  misc_RNA (1)...(19): siRNA sense strand
guggaugaaguggagauua

SEQ ID NO: 1875940 - RNA, 19 nt, Homo sapiens
  misc_RNA (1)...(19): siRNA sense strand
gaagcagacagagguggaa

SEQ ID NO: 1875941 - RNA, 19 nt, Homo sapiens
  misc_RNA (1)...(19): siRNA sense strand
caaugggaauuuacaucag

SEQ ID NO: 1875942 - RNA, 19 nt, Homo sapiens
  misc_RNA (1)...(19): siRNA sense strand
acaaaggacauguggagau

SEQ ID NO: 1875943 - RNA, 19 nt, Homo sapiens
  misc_RNA (1)...(19): siRNA sense strand
ggcauuaaacagaccuuug

SEQ ID NO: 1875944 - RNA, 19 nt, Homo sapiens
  misc_RNA (1)...(19): siRNA sense strand
cuacuuugagggcauuaaa

SEQ ID NO: 1875945 - RNA, 19 nt, Homo sapiens
  misc_RNA (1)...(19): siRNA sense strand
aaaugaagaaggcaagugu

SEQ ID NO: 1875946 - RNA, 19 nt, Homo sapiens
  misc_RNA (1)...(19): siRNA sense strand
ucaaaauccccacuuguaa

SEQ ID NO: 1875947 - RNA, 19 nt, Homo sapiens
  misc_RNA (1)...(19): siRNA sense strand
uuacaucagcacccucaaa

SEQ ID NO: 1875948 - RNA, 19 nt, Homo sapiens
  misc_RNA (1)...(19): siRNA sense strand
gaugaaguggagauuagug

SEQ ID NO: 1875949 - RNA, 19 nt, Homo sapiens
  misc_RNA (1)...(19): siRNA sense strand
gaaaacagcguggaugaag

SEQ ID NO: 1875950 - RNA, 19 nt, Homo sapiens
  misc_RNA (1)...(19): siRNA sense strand
ugacggaagugaguaagcu

SEQ ID NO: 1875951 - RNA, 19 nt, Homo sapiens
  misc_RNA (1)...(19): siRNA sense strand
agagaagcaaugggaauuu

SEQ ID NO: 1875952 - RNA, 19 nt, Homo sapiens
  misc_RNA (1)...(19): siRNA sense strand
caaagaugagccugacaca

SEQ ID NO: 1875953 - RNA, 19 nt, Homo sapiens
  misc_RNA (1)...(19): siRNA sense strand
caauuugucugaugaaaac

SEQ ID NO: 1875954 - RNA, 19 nt, Homo sapiens
  misc_RNA (1)...(19): siRNA sense strand
gcacuggacggagagagau

SEQ ID NO: 1875955 - RNA, 19 nt, Homo sapiens
  misc_RNA (1)...(19): siRNA sense strand
gucaaaauccccacuugua

SEQ ID NO: 1875956 - RNA, 19 nt, Homo sapiens
  misc_RNA (1)...(19): siRNA sense strand
gaaggaagaaggggugaaa

SEQ ID NO: 1875957 - RNA, 19 nt, Homo sapiens
  misc_RNA (1)...(19): siRNA sense strand
gcaugaucuuaccuacaau

SEQ ID NO: 1875958 - RNA, 19 nt, Homo sapiens
  misc_RNA (1)...(19): siRNA sense strand
acaagaacggagagacuga

SEQ ID NO: 1875959 - RNA, 19 nt, Homo sapiens
  misc_RNA (1)...(19): siRNA sense strand
aggcauccauuaacaaucg

SEQ ID NO: 1875960 - RNA, 19 nt, Homo sapiens
  misc_RNA (1)...(19): siRNA sense strand
aaagggaaacuuaucuucu

SEQ ID NO: 1875961 - RNA, 19 nt, Homo sapiens
  misc_RNA (1)...(19): siRNA sense strand
cagugcagguucaaaauga

SEQ ID NO: 1875962 - RNA, 19 nt, Homo sapiens
  misc_RNA (1)...(19): siRNA sense strand
agagaugcuucaaauuggu

SEQ ID NO: 1875963 - RNA, 19 nt, Homo sapiens
  misc_RNA (1)...(19): siRNA sense strand
cgacaagaacggagagacu

SEQ ID NO: 1875964 - RNA, 19 nt, Homo sapiens
  misc_RNA (1)...(19): siRNA sense strand
cccaugcuccugcaacauu

SEQ ID NO: 1875965 - RNA, 19 nt, Homo sapiens
  misc_RNA (1)...(19): siRNA sense strand
cuaagccugcuccuucaaa

SEQ ID NO: 1875966 - RNA, 19 nt, Homo sapiens
  misc_RNA (1)...(19): siRNA sense strand
agugugaggugacggaagu

SEQ ID NO: 1875967 - RNA, 19 nt, Homo sapiens
  misc_RNA (1)...(19): siRNA sense strand
aagagaagcaaugggaauu

SEQ ID NO: 1875968 - RNA, 19 nt, Homo sapiens
  misc_RNA (1)...(19): siRNA sense strand
cccaauuugucugaugaaa

SEQ ID NO: 1875969 - RNA, 19 nt, Homo sapiens
  misc_RNA (1)...(19): siRNA sense strand
ucucguggccuuaaugaag

SEQ ID NO: 1875970 - RNA, 19 nt, Homo sapiens
  misc_RNA (1)...(19): siRNA sense strand
cggauaagcugaaaacacu

SEQ ID NO: 1875971 - RNA, 19 nt, Homo sapiens
  misc_RNA (1)...(19): siRNA sense strand
gaugaaguggagguuuaaa

SEQ ID NO: 1875972 - RNA, 19 nt, Homo sapiens
  misc_RNA (1)...(19): siRNA sense strand
guccacggauaagcugaaa

SEQ ID NO: 1875973 - RNA, 19 nt, Homo sapiens
  misc_RNA (1)...(19): siRNA sense strand
cagaccuguuggagucaaa

SEQ ID NO: 1875974 - RNA, 19 nt, Homo sapiens
  misc_RNA (1)...(19): siRNA sense strand
uggcuauggcgcacgcuua

SEQ ID NO: 1875975 - RNA, 19 nt, Homo sapiens
  misc_RNA (1)...(19): siRNA sense strand
aacauuagaagcagacaga

SEQ ID NO: 1875976 - RNA, 19 nt, Homo sapiens
  misc_RNA (1)...(19): siRNA sense strand
gaaauuaguucucagugua

SEQ ID NO: 1875977 - RNA, 19 nt, Homo sapiens
  misc_RNA (1)...(19): siRNA sense strand
gcagaaacaucgcuuaaug

SEQ ID NO: 1875978 - RNA, 19 nt, Homo sapiens
  misc_RNA (1)...(19): siRNA sense strand
gaacaccgcuucucugaca

SEQ ID NO: 1875979 - RNA, 19 nt, Homo sapiens
  misc_RNA (1)...(19): siRNA sense strand
gaucagaugugcauugaga

SEQ ID NO: 1875980 - RNA, 19 nt, Homo sapiens
  misc_RNA (1)...(19): siRNA sense strand
gaacuucaauggcaauaau

SEQ ID NO: 1875981 - RNA, 19 nt, Homo sapiens
  misc_RNA (1)...(19): siRNA sense strand
gcagagcaccauuaauuua

SEQ ID NO: 1875982 - RNA, 19 nt, Homo sapiens
  misc_RNA (1)...(19): siRNA sense strand
caaagaauguccucagcua

SEQ ID NO: 1875983 - RNA, 19 nt, Homo sapiens
  misc_RNA (1)...(19): siRNA sense strand
uuaacuaggugccagauua

SEQ ID NO: 1875984 - RNA, 19 nt, Homo sapiens
  misc_RNA (1)...(19): siRNA sense strand
gggaaucacuuucaagaug

SEQ ID NO: 1875985 - RNA, 19 nt, Homo sapiens
  misc_RNA (1)...(19): siRNA sense strand
cagauuaacuggauacaug

SEQ ID NO: 1875986 - RNA, 19 nt, Homo sapiens
  misc_RNA (1)...(19): siRNA sense strand
gacagcaacucacuugaaa

SEQ ID NO: 1875987 - RNA, 19 nt, Homo sapiens
  misc_RNA (1)...(19): siRNA sense strand
gaucaauugugucaaauca

SEQ ID NO: 1875988 - RNA, 19 nt, Homo sapiens
  misc_RNA (1)...(19): siRNA sense strand
cagcagagcaccauuaauu

SEQ ID NO: 1875989 - RNA, 19 nt, Homo sapiens
  misc_RNA (1)...(19): siRNA sense strand
ugaaaucccugacacucua

SEQ ID NO: 1875990 - RNA, 19 nt, Homo sapiens
  misc_RNA (1)...(19): siRNA sense strand
gcaguuaaauaccuucuca

SEQ ID NO: 1875991 - RNA, 19 nt, Homo sapiens
  misc_RNA (1)...(19): siRNA sense strand
gaauaaugcuauacacuac

SEQ ID NO: 1875992 - RNA, 19 nt, Homo sapiens
  misc_RNA (1)...(19): siRNA sense strand
gaguuaagcuaucugaugu

SEQ ID NO: 1875993 - RNA, 19 nt, Homo sapiens
  misc_RNA (1)...(19): siRNA sense strand
aaccauauuuccuccauua

SEQ ID NO: 1875994 - RNA, 19 nt, Homo sapiens
  misc_RNA (1)...(19): siRNA sense strand
uuggaaagcuuguaucuug

SEQ ID NO: 1875995 - RNA, 19 nt, Homo sapiens
  misc_RNA (1)...(19): siRNA sense strand
aaugagccauguagacuua

SEQ ID NO: 1875996 - RNA, 19 nt, Homo sapiens
  misc_RNA (1)...(19): siRNA sense strand
gaugaagggucugaacuug

SEQ ID NO: 1875997 - RNA, 19 nt, Homo sapiens
  misc_RNA (1)...(19): siRNA sense strand
uauccaaucucgaguuuau

SEQ ID NO: 1875998 - RNA, 19 nt, Homo sapiens
  misc_RNA (1)...(19): siRNA sense strand
gcaaacccgccaucucuaa

SEQ ID NO: 1875999 - RNA, 19 nt, Homo sapiens
  misc_RNA (1)...(19): siRNA sense strand
ugacgaagauauuaguuca

SEQ ID NO: 1876000 - RNA, 19 nt, Homo sapiens
  misc_RNA (1)...(19): siRNA sense strand
ucacccaacuccaagaauu

SEQ ID NO: 1876001 - RNA, 19 nt, Homo sapiens
  misc_RNA (1)...(19): siRNA sense strand
gcuauacacuacaucucua

SEQ ID NO: 1876002 - RNA, 19 nt, Homo sapiens
  misc_RNA (1)...(19): siRNA sense strand
ggaguuaagcuaucugaug

SEQ ID NO: 1876003 - RNA, 19 nt, Homo sapiens
  misc_RNA (1)...(19): siRNA sense strand
gagcaggccaucaaccuaa

SEQ ID NO: 1876004 - RNA, 19 nt, Homo sapiens
  misc_RNA (1)...(19): siRNA sense strand
ccacaaagucccuuccaaa

SEQ ID NO: 1876005 - RNA, 19 nt, Homo sapiens
  misc_RNA (1)...(19): siRNA sense strand
uaagcuaucugaugucaag

SEQ ID NO: 1876006 - RNA, 19 nt, Homo sapiens
  misc_RNA (1)...(19): siRNA sense strand
gggaucagaugugcauuga

SEQ ID NO: 1876007 - RNA, 19 nt, Homo sapiens
  misc_RNA (1)...(19): siRNA sense strand
ccaagucacugaagcaucu

SEQ ID NO: 1876008 - RNA, 19 nt, Homo sapiens
  misc_RNA (1)...(19): siRNA sense strand
aaauuuaggucucagugaa

SEQ ID NO: 1876009 - RNA, 19 nt, Homo sapiens
  misc_RNA (1)...(19): siRNA sense strand
gaaagaagccaacaaaaca

SEQ ID NO: 1876010 - RNA, 19 nt, Homo sapiens
  misc_RNA (1)...(19): siRNA sense strand
acacuugauuuaagccaua

SEQ ID NO: 1876011 - RNA, 19 nt, Homo sapiens
  misc_RNA (1)...(19): siRNA sense strand
gaaagcuuguaucuuggaa

SEQ ID NO: 1876012 - RNA, 19 nt, Homo sapiens
  misc_RNA (1)...(19): siRNA sense strand
ugagaaagaagccaacaaa

SEQ ID NO: 1876013 - RNA, 19 nt, Homo sapiens
  misc_RNA (1)...(19): siRNA sense strand
caacagcauuaacaucauc

SEQ ID NO: 1876014 - RNA, 19 nt, Homo sapiens
  misc_RNA (1)...(19): siRNA sense strand
aaucagugcugccaauuuc

SEQ ID NO: 1876015 - RNA, 19 nt, Homo sapiens
  misc_RNA (1)...(19): siRNA sense strand
cauauuuccuccauuaagu

SEQ ID NO: 1876016 - RNA, 19 nt, Homo sapiens
  misc_RNA (1)...(19): siRNA sense strand
ucaaaucagugcugccaau

SEQ ID NO: 1876017 - RNA, 19 nt, Homo sapiens
  misc_RNA (1)...(19): siRNA sense strand
acucaugaaucuuaccuuu

SEQ ID NO: 1876018 - RNA, 19 nt, Homo sapiens
  misc_RNA (1)...(19): siRNA sense strand
gaacucuacuacucagucu

SEQ ID NO: 1876019 - RNA, 19 nt, Homo sapiens
  misc_RNA (1)...(19): siRNA sense strand
acuccaaauuugucuguua

SEQ ID NO: 1876020 - RNA, 19 nt, Homo sapiens
  misc_RNA (1)...(19): siRNA sense strand
uaacuaggugccagauuaa

SEQ ID NO: 1876021 - RNA, 19 nt, Homo sapiens
  misc_RNA (1)...(19): siRNA sense strand
ucaauugugucaaaucagu

SEQ ID NO: 1876022 - RNA, 19 nt, Homo sapiens
  misc_RNA (1)...(19): siRNA sense strand
uaucugaugucaagcuuuc

SEQ ID NO: 1876023 - RNA, 19 nt, Homo sapiens
  misc_RNA (1)...(19): siRNA sense strand
gaauauccaaucucgaguu

SEQ ID NO: 1876024 - RNA, 19 nt, Homo sapiens
  misc_RNA (1)...(19): siRNA sense strand
gggaacauuugaggacauu

SEQ ID NO: 1876025 - RNA, 19 nt, Homo sapiens
  misc_RNA (1)...(19): siRNA sense strand
guacuggauuuucagaaua

SEQ ID NO: 1876026 - RNA, 19 nt, Homo sapiens
  misc_RNA (1)...(19): siRNA sense strand
gcaaccauauuuccuccau

SEQ ID NO: 1876027 - RNA, 19 nt, Homo sapiens
  misc_RNA (1)...(19): siRNA sense strand
ucaauggucugcagaacuc

SEQ ID NO: 1876028 - RNA, 19 nt, Homo sapiens
  misc_RNA (1)...(19): siRNA sense strand
cauuaaugcuccacaaagu

SEQ ID NO: 1876029 - RNA, 19 nt, Homo sapiens
  misc_RNA (1)...(19): siRNA sense strand
ucauuucgaucaauugugu

SEQ ID NO: 1876030 - RNA, 19 nt, Homo sapiens
  misc_RNA (1)...(19): siRNA sense strand
aauauccaaucucgaguuu

SEQ ID NO: 1876031 - RNA, 19 nt, Homo sapiens
  misc_RNA (1)...(19): siRNA sense strand
guggaaauaccaacacauu

SEQ ID NO: 1876032 - RNA, 19 nt, Homo sapiens
  misc_RNA (1)...(19): siRNA sense strand
gauuacagccauaggcauu

SEQ ID NO: 1876033 - RNA, 19 nt, Homo sapiens
  misc_RNA (1)...(19): siRNA sense strand
aagcuuuccugugggauua

SEQ ID NO: 1876034 - RNA, 19 nt, Homo sapiens
  misc_RNA (1)...(19): siRNA sense strand
gccaacagcauuaacauca

SEQ ID NO: 1876035 - RNA, 19 nt, Homo sapiens
  misc_RNA (1)...(19): siRNA sense strand
ucuccggcaucucaacuua

SEQ ID NO: 1876036 - RNA, 19 nt, Homo sapiens
  misc_RNA (1)...(19): siRNA sense strand
gauuuaagccauaaugaca

SEQ ID NO: 1876037 - RNA, 19 nt, Homo sapiens
  misc_RNA (1)...(19): siRNA sense strand
ccgcuucucugacaucuca

SEQ ID NO: 1876038 - RNA, 19 nt, Homo sapiens
  misc_RNA (1)...(19): siRNA sense strand
ucaagggacucugugaaau

SEQ ID NO: 1876039 - RNA, 19 nt, Homo sapiens
  misc_RNA (1)...(19): siRNA sense strand
ggcaauaauguuaaaggua

SEQ ID NO: 1876040 - RNA, 19 nt, Homo sapiens
  misc_RNA (1)...(19): siRNA sense strand
gaacuccaaauuugucugu

SEQ ID NO: 1876041 - RNA, 19 nt, Homo sapiens
  misc_RNA (1)...(19): siRNA sense strand
cgacagcauugauucucuu

SEQ ID NO: 1876042 - RNA, 19 nt, Homo sapiens
  misc_RNA (1)...(19): siRNA sense strand
uaggaaaccuucagacacu

SEQ ID NO: 1876043 - RNA, 19 nt, Homo sapiens
  misc_RNA (1)...(19): siRNA sense strand
ggaugaagggucugaacuu

SEQ ID NO: 1876044 - RNA, 19 nt, Homo sapiens
  misc_RNA (1)...(19): siRNA sense strand
caucucauccaccacauuu

SEQ ID NO: 1876045 - RNA, 19 nt, Homo sapiens
  misc_RNA (1)...(19): siRNA sense strand
caagggacucugugaaaug

SEQ ID NO: 1876046 - RNA, 19 nt, Homo sapiens
  misc_RNA (1)...(19): siRNA sense strand
gcacggaaucugaaaguac

SEQ ID NO: 1876047 - RNA, 19 nt, Homo sapiens
  misc_RNA (1)...(19): siRNA sense strand
gaugugcauugagaaagaa

SEQ ID NO: 1876048 - RNA, 19 nt, Homo sapiens
  misc_RNA (1)...(19): siRNA sense strand
ugacgucagcugcuucuuu

SEQ ID NO: 1876049 - RNA, 19 nt, Homo sapiens
  misc_RNA (1)...(19): siRNA sense strand
ggauacaugaagacacuuu

SEQ ID NO: 1876050 - RNA, 19 nt, Homo sapiens
  misc_RNA (1)...(19): siRNA sense strand
gaggagaccacgugugcaa

SEQ ID NO: 1876051 - RNA, 19 nt, Homo sapiens
  misc_RNA (1)...(19): siRNA sense strand
agcuagaacuccucgauuu

SEQ ID NO: 1876052 - RNA, 19 nt, Homo sapiens
  misc_RNA (1)...(19): siRNA sense strand
cugcagaacucuacuacuc

SEQ ID NO: 1876053 - RNA, 19 nt, Homo sapiens
  misc_RNA (1)...(19): siRNA sense strand
ggagcaggccaucaaccua

SEQ ID NO: 1876054 - RNA, 19 nt, Homo sapiens
  misc_RNA (1)...(19): siRNA sense strand
ggaaauccccugauauuca

SEQ ID NO: 1876055 - RNA, 19 nt, Homo sapiens
  misc_RNA (1)...(19): siRNA sense strand
aaacgggaauauccaaucu

SEQ ID NO: 1876056 - RNA, 19 nt, Homo sapiens
  misc_RNA (1)...(19): siRNA sense strand
guuaagcuaucugauguca

SEQ ID NO: 1876057 - RNA, 19 nt, Homo sapiens
  misc_RNA (1)...(19): siRNA sense strand
gcuagaacuccucgauuug

SEQ ID NO: 1876058 - RNA, 19 nt, Homo sapiens
  misc_RNA (1)...(19): siRNA sense strand
ugacagcaacucacuugaa

SEQ ID NO: 1876059 - RNA, 19 nt, Homo sapiens
  misc_RNA (1)...(19): siRNA sense strand
ggaaagcuuguaucuugga

SEQ ID NO: 1876060 - RNA, 19 nt, Homo sapiens
  misc_RNA (1)...(19): siRNA sense strand
ggagaaacuaggaaaccuu

SEQ ID NO: 1876061 - RNA, 19 nt, Homo sapiens
  misc_RNA (1)...(19): siRNA sense strand
gaggcaacgugaagaaacu

SEQ ID NO: 1876062 - RNA, 19 nt, Homo sapiens
  misc_RNA (1)...(19): siRNA sense strand
ucugugaaaugucuguuga

SEQ ID NO: 1876063 - RNA, 19 nt, Homo sapiens
  misc_RNA (1)...(19): siRNA sense strand
ucagcagacucaugaaucu

SEQ ID NO: 1876064 - RNA, 19 nt, Homo sapiens
  misc_RNA (1)...(19): siRNA sense strand
gacgucagcugcuucuuuu

SEQ ID NO: 1876065 - RNA, 19 nt, Homo sapiens
  misc_RNA (1)...(19): siRNA sense strand
gcuuggagguucugauuuu

SEQ ID NO: 1876066 - RNA, 19 nt, Homo sapiens
  misc_RNA (1)...(19): siRNA sense strand
acacauuaaugcuccacaa

SEQ ID NO: 1876067 - RNA, 19 nt, Homo sapiens
  misc_RNA (1)...(19): siRNA sense strand
caaccauauuuccuccauu

SEQ ID NO: 1876068 - RNA, 19 nt, Homo sapiens
  misc_RNA (1)...(19): siRNA sense strand
gaaauccccugauauucau

SEQ ID NO: 1876069 - RNA, 19 nt, Homo sapiens
  misc_RNA (1)...(19): siRNA sense strand
agaauguccucagcuagaa

SEQ ID NO: 1876070 - RNA, 19 nt, Homo sapiens
  misc_RNA (1)...(19): siRNA sense strand
ggaaaccuucagacacuug

SEQ ID NO: 1876071 - RNA, 19 nt, Homo sapiens
  misc_RNA (1)...(19): siRNA sense strand
agaugugcauugagaaaga

SEQ ID NO: 1876072 - RNA, 19 nt, Homo sapiens
  misc_RNA (1)...(19): siRNA sense strand
uuaacuggauacaugaaga

SEQ ID NO: 1876073 - RNA, 19 nt, Homo sapiens
  misc_RNA (1)...(19): siRNA sense strand
uaucuuggaagcaaccaua

SEQ ID NO: 1876074 - RNA, 19 nt, Homo sapiens
  misc_RNA (1)...(19): siRNA sense strand
acuuacugcuuccuugaua

SEQ ID NO: 1876075 - RNA, 19 nt, Homo sapiens
  misc_RNA (1)...(19): siRNA sense strand
gcuaucugaugucaagcuu

SEQ ID NO: 1876076 - RNA, 19 nt, Homo sapiens
  misc_RNA (1)...(19): siRNA sense strand
gaagaaagccuaugaacuu

SEQ ID NO: 1876077 - RNA, 19 nt, Homo sapiens
  misc_RNA (1)...(19): siRNA sense strand
gcaaauagcuuaggcaaag

SEQ ID NO: 1876078 - RNA, 19 nt, Homo sapiens
  misc_RNA (1)...(19): siRNA sense strand
ggacaaaguucuucucaag

SEQ ID NO: 1876079 - RNA, 19 nt, Homo sapiens
  misc_RNA (1)...(19): siRNA sense strand
gaaaccagaucuucgaguu

SEQ ID NO: 1876080 - RNA, 19 nt, Homo sapiens
  misc_RNA (1)...(19): siRNA sense strand
gcacugauauggacaaagu

SEQ ID NO: 1876081 - RNA, 19 nt, Homo sapiens
  misc_RNA (1)...(19): siRNA sense strand
gcagccagcucaacguuaa

SEQ ID NO: 1876082 - RNA, 19 nt, Homo sapiens
  misc_RNA (1)...(19): siRNA sense strand
gcaaagucaugccuacaaa

SEQ ID NO: 1876083 - RNA, 19 nt, Homo sapiens
  misc_RNA (1)...(19): siRNA sense strand
acaaaguucuucucaagua

SEQ ID NO: 1876084 - RNA, 19 nt, Homo sapiens
  misc_RNA (1)...(19): siRNA sense strand
gagaaaguuuggauuaaug

SEQ ID NO: 1876085 - RNA, 19 nt, Homo sapiens
  misc_RNA (1)...(19): siRNA sense strand
ugaaauagcacucaucauu

SEQ ID NO: 1876086 - RNA, 19 nt, Homo sapiens
  misc_RNA (1)...(19): siRNA sense strand
cuacaacacugauuauuca

SEQ ID NO: 1876087 - RNA, 19 nt, Homo sapiens
  misc_RNA (1)...(19): siRNA sense strand
caaaccacauuacauagaa

SEQ ID NO: 1876088 - RNA, 19 nt, Homo sapiens
  misc_RNA (1)...(19): siRNA sense strand
gaauggauuuguaaacuca

SEQ ID NO: 1876089 - RNA, 19 nt, Homo sapiens
  misc_RNA (1)...(19): siRNA sense strand
caacagcucuaacaaacug

SEQ ID NO: 1876090 - RNA, 19 nt, Homo sapiens
  misc_RNA (1)...(19): siRNA sense strand
gaagaggaauuggaguuga

SEQ ID NO: 1876091 - RNA, 19 nt, Homo sapiens
  misc_RNA (1)...(19): siRNA sense strand
cgacuuccauucuccaauu

SEQ ID NO: 1876092 - RNA, 19 nt, Homo sapiens
  misc_RNA (1)...(19): siRNA sense strand
gaaagccuaugaacuuagu

SEQ ID NO: 1876093 - RNA, 19 nt, Homo sapiens
  misc_RNA (1)...(19): siRNA sense strand
ucuaguagcuccuaugaug

SEQ ID NO: 1876094 - RNA, 19 nt, Homo sapiens
  misc_RNA (1)...(19): siRNA sense strand
gcccucagcucucuuguug

SEQ ID NO: 1876095 - RNA, 19 nt, Homo sapiens
  misc_RNA (1)...(19): siRNA sense strand
gaacaagaaggaacacaga

SEQ ID NO: 1876096 - RNA, 19 nt, Homo sapiens
  misc_RNA (1)...(19): siRNA sense strand
ccucaaaccacauuacaua

SEQ ID NO: 1876097 - RNA, 19 nt, Homo sapiens
  misc_RNA (1)...(19): siRNA sense strand
aagaaagccuaugaacuua

SEQ ID NO: 1876098 - RNA, 19 nt, Homo sapiens
  misc_RNA (1)...(19): siRNA sense strand
caagagcuucuccaaauuu

SEQ ID NO: 1876099 - RNA, 19 nt, Homo sapiens
  misc_RNA (1)...(19): siRNA sense strand
ccucagagaccaccaagua

SEQ ID NO: 1876100 - RNA, 19 nt, Homo sapiens
  misc_RNA (1)...(19): siRNA sense strand
ucaagagcuucuccaaauu

SEQ ID NO: 1876101 - RNA, 19 nt, Homo sapiens
  misc_RNA (1)...(19): siRNA sense strand
gcucugugacugugaaaua

SEQ ID NO: 1876102 - RNA, 19 nt, Homo sapiens
  misc_RNA (1)...(19): siRNA sense strand
auacaaaucacacgcauaa

SEQ ID NO: 1876103 - RNA, 19 nt, Homo sapiens
  misc_RNA (1)...(19): siRNA sense strand
ggugggauguugagcacua

SEQ ID NO: 1876104 - RNA, 19 nt, Homo sapiens
  misc_RNA (1)...(19): siRNA sense strand
caaaguucuucucaaguau

SEQ ID NO: 1876105 - RNA, 19 nt, Homo sapiens
  misc_RNA (1)...(19): siRNA sense strand
ggacuuguguacucagcaa

SEQ ID NO: 1876106 - RNA, 19 nt, Homo sapiens
  misc_RNA (1)...(19): siRNA sense strand
gcucaacguuaacagauuc

SEQ ID NO: 1876107 - RNA, 19 nt, Homo sapiens
  misc_RNA (1)...(19): siRNA sense strand
cucaagagcuucuccaaau

SEQ ID NO: 1876108 - RNA, 19 nt, Homo sapiens
  misc_RNA (1)...(19): siRNA sense strand
ggaauggauuuguaaacuc

SEQ ID NO: 1876109 - RNA, 19 nt, Homo sapiens
  misc_RNA (1)...(19): siRNA sense strand
gaaccaacucggauauugu

SEQ ID NO: 1876110 - RNA, 19 nt, Homo sapiens
  misc_RNA (1)...(19): siRNA sense strand
ggaaugaacaguaggaaac

SEQ ID NO: 1876111 - RNA, 19 nt, Homo sapiens
  misc_RNA (1)...(19): siRNA sense strand
gauaauaugaugcggaauc

SEQ ID NO: 1876112 - RNA, 19 nt, Homo sapiens
  misc_RNA (1)...(19): siRNA sense strand
gggaauggauuuguaaacu

SEQ ID NO: 1876113 - RNA, 19 nt, Homo sapiens
  misc_RNA (1)...(19): siRNA sense strand
gguuccaauuuauccauua

SEQ ID NO: 1876114 - RNA, 19 nt, Homo sapiens
  misc_RNA (1)...(19): siRNA sense strand
ucacacgcauaauggauga

SEQ ID NO: 1876115 - RNA, 19 nt, Homo sapiens
  misc_RNA (1)...(19): siRNA sense strand
gcccagacccugauacuuc

SEQ ID NO: 1876116 - RNA, 19 nt, Homo sapiens
  misc_RNA (1)...(19): siRNA sense strand
ucucaggguuccaauuuau

SEQ ID NO: 1876117 - RNA, 19 nt, Homo sapiens
  misc_RNA (1)...(19): siRNA sense strand
gugguaaucuuggaaugaa

SEQ ID NO: 1876118 - RNA, 19 nt, Homo sapiens
  misc_RNA (1)...(19): siRNA sense strand
gcagaaccaacucggauau

SEQ ID NO: 1876119 - RNA, 19 nt, Homo sapiens
  misc_RNA (1)...(19): siRNA sense strand
caucaaguccgaaccgauu

SEQ ID NO: 1876120 - RNA, 19 nt, Homo sapiens
  misc_RNA (1)...(19): siRNA sense strand
uaucucaggguuccaauuu

SEQ ID NO: 1876121 - RNA, 19 nt, Homo sapiens
  misc_RNA (1)...(19): siRNA sense strand
acaaaucacacgcauaaug

SEQ ID NO: 1876122 - RNA, 19 nt, Homo sapiens
  misc_RNA (1)...(19): siRNA sense strand
ccucagaacuuuucaaugu

SEQ ID NO: 1876123 - RNA, 19 nt, Homo sapiens
  misc_RNA (1)...(19): siRNA sense strand
agaaccaacucggauauug

SEQ ID NO: 1876124 - RNA, 19 nt, Homo sapiens
  misc_RNA (1)...(19): siRNA sense strand
caaaucacacgcauaaugg

SEQ ID NO: 1876125 - RNA, 19 nt, Homo sapiens
  misc_RNA (1)...(19): siRNA sense strand
ggaagaggaauuggaguug

SEQ ID NO: 1876126 - RNA, 19 nt, Homo sapiens
  misc_RNA (1)...(19): siRNA sense strand
caaugcaggugggauguug

SEQ ID NO: 1876127 - RNA, 19 nt, Homo sapiens
  misc_RNA (1)...(19): siRNA sense strand
ggaaccgacaggucacuuu

SEQ ID NO: 1876128 - RNA, 19 nt, Homo sapiens
  misc_RNA (1)...(19): siRNA sense strand
uaaugaagaaagccuauga

SEQ ID NO: 1876129 - RNA, 19 nt, Homo sapiens
  misc_RNA (1)...(19): siRNA sense strand
caugaugccuccacuaucg

SEQ ID NO: 1876130 - RNA, 19 nt, Homo sapiens
  misc_RNA (1)...(19): siRNA sense strand
uugaggcucugaacaagaa

SEQ ID NO: 1876131 - RNA, 19 nt, Homo sapiens
  misc_RNA (1)...(19): siRNA sense strand
caauaugcuagcacugaua

SEQ ID NO: 1876132 - RNA, 19 nt, Homo sapiens
  misc_RNA (1)...(19): siRNA sense strand
gcucuaguagcuccuauga

SEQ ID NO: 1876133 - RNA, 19 nt, Homo sapiens
  misc_RNA (1)...(19): siRNA sense strand
aagaggaauuggaguugaa

SEQ ID NO: 1876134 - RNA, 19 nt, Homo sapiens
  misc_RNA (1)...(19): siRNA sense strand
ucaaaccacauuacauaga

SEQ ID NO: 1876135 - RNA, 19 nt, Homo sapiens
  misc_RNA (1)...(19): siRNA sense strand
caaaggaucaguaguucuc

SEQ ID NO: 1876136 - RNA, 19 nt, Homo sapiens
  misc_RNA (1)...(19): siRNA sense strand
gagcuucuccaaauuugau

SEQ ID NO: 1876137 - RNA, 19 nt, Homo sapiens
  misc_RNA (1)...(19): siRNA sense strand
gcauaauggaugaaaggaa

SEQ ID NO: 1876138 - RNA, 19 nt, Homo sapiens
  misc_RNA (1)...(19): siRNA sense strand
gaguugaacacccaaagga

SEQ ID NO: 1876139 - RNA, 19 nt, Homo sapiens
  misc_RNA (1)...(19): siRNA sense strand
gagcuacuggugcaaauag

SEQ ID NO: 1876140 - RNA, 19 nt, Homo sapiens
  misc_RNA (1)...(19): siRNA sense strand
uaacuccacauacagaaga

SEQ ID NO: 1876141 - RNA, 19 nt, Homo sapiens
  misc_RNA (1)...(19): siRNA sense strand
ucaauaugcuagcacugau

SEQ ID NO: 1876142 - RNA, 19 nt, Homo sapiens
  misc_RNA (1)...(19): siRNA sense strand
ucaagccacucaaccucuu

SEQ ID NO: 1876143 - RNA, 19 nt, Homo sapiens
  misc_RNA (1)...(19): siRNA sense strand
ggagcuacuggugcaaaua

SEQ ID NO: 1876144 - RNA, 19 nt, Homo sapiens
  misc_RNA (1)...(19): siRNA sense strand
uuuguaaacucaagagcuu

SEQ ID NO: 1876145 - RNA, 19 nt, Homo sapiens
  misc_RNA (1)...(19): siRNA sense strand
aagagcuucuccaaauuug

SEQ ID NO: 1876146 - RNA, 19 nt, Homo sapiens
  misc_RNA (1)...(19): siRNA sense strand
aaucuuggaaugaacagua

SEQ ID NO: 1876147 - RNA, 19 nt, Homo sapiens
  misc_RNA (1)...(19): siRNA sense strand
caaauagcuuaggcaaagu

SEQ ID NO: 1876148 - RNA, 19 nt, Homo sapiens
  misc_RNA (1)...(19): siRNA sense strand
caugaaagcagaaccaacu

SEQ ID NO: 1876149 - RNA, 19 nt, Homo sapiens
  misc_RNA (1)...(19): siRNA sense strand
uagcuuaggcaaagucaug

SEQ ID NO: 1876150 - RNA, 19 nt, Homo sapiens
  misc_RNA (1)...(19): siRNA sense strand
gauacuucauaugugcuaa

SEQ ID NO: 1876151 - RNA, 19 nt, Homo sapiens
  misc_RNA (1)...(19): siRNA sense strand
gaacaguaggaaaccagau

SEQ ID NO: 1876152 - RNA, 19 nt, Homo sapiens
  misc_RNA (1)...(19): siRNA sense strand
cccaaacacugaggacaga

SEQ ID NO: 1876153 - RNA, 19 nt, Homo sapiens
  misc_RNA (1)...(19): siRNA sense strand
ggguuccaauuuauccauu

SEQ ID NO: 1876154 - RNA, 19 nt, Homo sapiens
  misc_RNA (1)...(19): siRNA sense strand
ggcuucaacucgccaggaa

SEQ ID NO: 1876155 - RNA, 19 nt, Homo sapiens
  misc_RNA (1)...(19): siRNA sense strand
ccuacaacacugauuauuc

SEQ ID NO: 1876156 - RNA, 19 nt, Homo sapiens
  misc_RNA (1)...(19): siRNA sense strand
cccaaaggaucaguaguuc

SEQ ID NO: 1876157 - RNA, 19 nt, Homo sapiens
  misc_RNA (1)...(19): siRNA sense strand
aaccagaucuucgaguugu

SEQ ID NO: 1876158 - RNA, 19 nt, Homo sapiens
  misc_RNA (1)...(19): siRNA sense strand
gcacuacagaccucacagu

SEQ ID NO: 1876159 - RNA, 19 nt, Homo sapiens
  misc_RNA (1)...(19): siRNA sense strand
uaaagcgaaugaggaugga

SEQ ID NO: 1876160 - RNA, 19 nt, Homo sapiens
  misc_RNA (1)...(19): siRNA sense strand
gacuuccauucuccaauug

SEQ ID NO: 1876161 - RNA, 19 nt, Homo sapiens
  misc_RNA (1)...(19): siRNA sense strand
ggugguaaucuuggaauga

SEQ ID NO: 1876162 - RNA, 19 nt, Homo sapiens
  misc_RNA (1)...(19): siRNA sense strand
uaucggaggaagaggaauu

SEQ ID NO: 1876163 - RNA, 19 nt, Homo sapiens
  misc_RNA (1)...(19): siRNA sense strand
gaaagcccuucuguaaagc

SEQ ID NO: 1876164 - RNA, 19 nt, Homo sapiens
  misc_RNA (1)...(19): siRNA sense strand
cccagacccugauacuuca

SEQ ID NO: 1876165 - RNA, 19 nt, Homo sapiens
  misc_RNA (1)...(19): siRNA sense strand
gaaccgacaggucacuuuu

SEQ ID NO: 1876166 - RNA, 19 nt, Homo sapiens
  misc_RNA (1)...(19): siRNA sense strand
ccucagcucucuuguugcu

SEQ ID NO: 1876167 - RNA, 19 nt, Homo sapiens
  misc_RNA (1)...(19): siRNA sense strand
uccuggagcuccucagaga

SEQ ID NO: 1876168 - RNA, 19 nt, Homo sapiens
  misc_RNA (1)...(19): siRNA sense strand
gaaccucaugaaagcagaa

SEQ ID NO: 1876169 - RNA, 19 nt, Homo sapiens
  misc_RNA (1)...(19): siRNA sense strand
caaacacugaggacagaga

SEQ ID NO: 1876170 - RNA, 19 nt, Homo sapiens
  misc_RNA (1)...(19): siRNA sense strand
uucaacagcucuaacaaac

SEQ ID NO: 1876171 - RNA, 19 nt, Homo sapiens
  misc_RNA (1)...(19): siRNA sense strand
gaccucacagugccaaaug

SEQ ID NO: 1876172 - RNA, 19 nt, Homo sapiens
  misc_RNA (1)...(19): siRNA sense strand
gacaaaguucuucucaagu

SEQ ID NO: 1876173 - RNA, 19 nt, Homo sapiens
  misc_RNA (1)...(19): siRNA sense strand
ugaagaaagccuaugaacu

SEQ ID NO: 1876174 - RNA, 19 nt, Homo sapiens
  misc_RNA (1)...(19): siRNA sense strand
gcagcagcaccaccuagga

SEQ ID NO: 1876175 - RNA, 19 nt, Homo sapiens
  misc_RNA (1)...(19): siRNA sense strand
gauauggacaaaguucuuc

SEQ ID NO: 1876176 - RNA, 19 nt, Homo sapiens
  misc_RNA (1)...(19): siRNA sense strand
gaacugaccuuccagagaa

SEQ ID NO: 1876177 - RNA, 19 nt, Homo sapiens
  misc_RNA (1)...(19): siRNA sense strand
gagcacagcugguuugaga

SEQ ID NO: 1876178 - RNA, 19 nt, Homo sapiens
  misc_RNA (1)...(19): siRNA sense strand
gaauaugucuucacuguca

SEQ ID NO: 1876179 - RNA, 19 nt, Homo sapiens
  misc_RNA (1)...(19): siRNA sense strand
gaggacaucuagcucaaua

SEQ ID NO: 1876180 - RNA, 19 nt, Homo sapiens
  misc_RNA (1)...(19): siRNA sense strand
gcaaccagcugcccaaguu

SEQ ID NO: 1876181 - RNA, 19 nt, Homo sapiens
  misc_RNA (1)...(19): siRNA sense strand
caacuucaaucaacagaaa

SEQ ID NO: 1876182 - RNA, 19 nt, Homo sapiens
  misc_RNA (1)...(19): siRNA sense strand
gacagggucuucaccuuua

SEQ ID NO: 1876183 - RNA, 19 nt, Homo sapiens
  misc_RNA (1)...(19): siRNA sense strand
gagagaaggcauagaauaa

SEQ ID NO: 1876184 - RNA, 19 nt, Homo sapiens
  misc_RNA (1)...(19): siRNA sense strand
gaaauauacugauccagau

SEQ ID NO: 1876185 - RNA, 19 nt, Homo sapiens
  misc_RNA (1)...(19): siRNA sense strand
ugaaguggcucccaucaaa

SEQ ID NO: 1876186 - RNA, 19 nt, Homo sapiens
  misc_RNA (1)...(19): siRNA sense strand
gagauaagauccacugcuu

SEQ ID NO: 1876187 - RNA, 19 nt, Homo sapiens
  misc_RNA (1)...(19): siRNA sense strand
gaaauggucuucaaaauca

SEQ ID NO: 1876188 - RNA, 19 nt, Homo sapiens
  misc_RNA (1)...(19): siRNA sense strand
cagaggagcagaagaaaua

SEQ ID NO: 1876189 - RNA, 19 nt, Homo sapiens
  misc_RNA (1)...(19): siRNA sense strand
gaacaaagaaagccagaga

SEQ ID NO: 1876190 - RNA, 19 nt, Homo sapiens
  misc_RNA (1)...(19): siRNA sense strand
cacaauggaucaccuuuaa

SEQ ID NO: 1876191 - RNA, 19 nt, Homo sapiens
  misc_RNA (1)...(19): siRNA sense strand
acaaauggcuggaaugugu

SEQ ID NO: 1876192 - RNA, 19 nt, Homo sapiens
  misc_RNA (1)...(19): siRNA sense strand
gcaagaggauuuugucuaa

SEQ ID NO: 1876193 - RNA, 19 nt, Homo sapiens
  misc_RNA (1)...(19): siRNA sense strand
caacaucgucuuuaccaua

SEQ ID NO: 1876194 - RNA, 19 nt, Homo sapiens
  misc_RNA (1)...(19): siRNA sense strand
ugaagaaacuggcugaugu

SEQ ID NO: 1876195 - RNA, 19 nt, Homo sapiens
  misc_RNA (1)...(19): siRNA sense strand
ggcaaccacugaugaaauu

SEQ ID NO: 1876196 - RNA, 19 nt, Homo sapiens
  misc_RNA (1)...(19): siRNA sense strand
gcacacaccggacauuuau

SEQ ID NO: 1876197 - RNA, 19 nt, Homo sapiens
  misc_RNA (1)...(19): siRNA sense strand
gaagaacggccaucaaagu

SEQ ID NO: 1876198 - RNA, 19 nt, Homo sapiens
  misc_RNA (1)...(19): siRNA sense strand
ggacauuuauggugcugaa

SEQ ID NO: 1876199 - RNA, 19 nt, Homo sapiens
  misc_RNA (1)...(19): siRNA sense strand
ggucuucaccuuuaucuuu

SEQ ID NO: 1876200 - RNA, 19 nt, Homo sapiens
  misc_RNA (1)...(19): siRNA sense strand
cagaagaaguggaauaucu

SEQ ID NO: 1876201 - RNA, 19 nt, Homo sapiens
  misc_RNA (1)...(19): siRNA sense strand
uaaacacacucaucaagau

SEQ ID NO: 1876202 - RNA, 19 nt, Homo sapiens
  misc_RNA (1)...(19): siRNA sense strand
gaagaugaagccaccagua

SEQ ID NO: 1876203 - RNA, 19 nt, Homo sapiens
  misc_RNA (1)...(19): siRNA sense strand
ucaugaagauguucgcuuu

SEQ ID NO: 1876204 - RNA, 19 nt, Homo sapiens
  misc_RNA (1)...(19): siRNA sense strand
cagaagaaauacuacaaug

SEQ ID NO: 1876205 - RNA, 19 nt, Homo sapiens
  misc_RNA (1)...(19): siRNA sense strand
gagaguggauugagaacau

SEQ ID NO: 1876206 - RNA, 19 nt, Homo sapiens
  misc_RNA (1)...(19): siRNA sense strand
ggaguuggauucucugaag

SEQ ID NO: 1876207 - RNA, 19 nt, Homo sapiens
  misc_RNA (1)...(19): siRNA sense strand
ggacgacuuugacauguuc

SEQ ID NO: 1876208 - RNA, 19 nt, Homo sapiens
  misc_RNA (1)...(19): siRNA sense strand
ugaaagcuuugcuggagua

SEQ ID NO: 1876209 - RNA, 19 nt, Homo sapiens
  misc_RNA (1)...(19): siRNA sense strand
gagaaggcauagaauaaag

SEQ ID NO: 1876210 - RNA, 19 nt, Homo sapiens
  misc_RNA (1)...(19): siRNA sense strand
acaucuagcucaauacaaa

SEQ ID NO: 1876211 - RNA, 19 nt, Homo sapiens
  misc_RNA (1)...(19): siRNA sense strand
gggugaagcucaagacaau

SEQ ID NO: 1876212 - RNA, 19 nt, Homo sapiens
  misc_RNA (1)...(19): siRNA sense strand
ccacugcccugaugguuau

SEQ ID NO: 1876213 - RNA, 19 nt, Homo sapiens
  misc_RNA (1)...(19): siRNA sense strand
gcgaaugugucaugaagau

SEQ ID NO: 1876214 - RNA, 19 nt, Homo sapiens
  misc_RNA (1)...(19): siRNA sense strand
ggugagacguggaaagaug

SEQ ID NO: 1876215 - RNA, 19 nt, Homo sapiens
  misc_RNA (1)...(19): siRNA sense strand
ggaggugcaucaacuauac

SEQ ID NO: 1876216 - RNA, 19 nt, Homo sapiens
  misc_RNA (1)...(19): siRNA sense strand
ggacaacguguacauguau

SEQ ID NO: 1876217 - RNA, 19 nt, Homo sapiens
  misc_RNA (1)...(19): siRNA sense strand
gcacaugcacgacuucuuc

SEQ ID NO: 1876218 - RNA, 19 nt, Homo sapiens
  misc_RNA (1)...(19): siRNA sense strand
ggagauagagaagcaaauu

SEQ ID NO: 1876219 - RNA, 19 nt, Homo sapiens
  misc_RNA (1)...(19): siRNA sense strand
ggaggcuucuucacacuga

SEQ ID NO: 1876220 - RNA, 19 nt, Homo sapiens
  misc_RNA (1)...(19): siRNA sense strand
guggaucucuggccuuuga

SEQ ID NO: 1876221 - RNA, 19 nt, Homo sapiens
  misc_RNA (1)...(19): siRNA sense strand
gguuauaucugccuuaaaa

SEQ ID NO: 1876222 - RNA, 19 nt, Homo sapiens
  misc_RNA (1)...(19): siRNA sense strand
gaagcaagaagacauuuca

SEQ ID NO: 1876223 - RNA, 19 nt, Homo sapiens
  misc_RNA (1)...(19): siRNA sense strand
aaucugaucuugaugacuu

SEQ ID NO: 1876224 - RNA, 19 nt, Homo sapiens
  misc_RNA (1)...(19): siRNA sense strand
gaacaaagggaggaccauu

SEQ ID NO: 1876225 - RNA, 19 nt, Homo sapiens
  misc_RNA (1)...(19): siRNA sense strand
ccacucaguuuauuaccuu

SEQ ID NO: 1876226 - RNA, 19 nt, Homo sapiens
  misc_RNA (1)...(19): siRNA sense strand
acaaugccaugaagaaguu

SEQ ID NO: 1876227 - RNA, 19 nt, Homo sapiens
  misc_RNA (1)...(19): siRNA sense strand
ugacagaggagcagaagaa

SEQ ID NO: 1876228 - RNA, 19 nt, Homo sapiens
  misc_RNA (1)...(19): siRNA sense strand
caucgucuuuaccauauuu

SEQ ID NO: 1876229 - RNA, 19 nt, Homo sapiens
  misc_RNA (1)...(19): siRNA sense strand
caaugaguguugucaguau

SEQ ID NO: 1876230 - RNA, 19 nt, Homo sapiens
  misc_RNA (1)...(19): siRNA sense strand
ugagagaaggcauagaaua

SEQ ID NO: 1876231 - RNA, 19 nt, Homo sapiens
  misc_RNA (1)...(19): siRNA sense strand
ucaaugagacaaccaacua

SEQ ID NO: 1876232 - RNA, 19 nt, Homo sapiens
  misc_RNA (1)...(19): siRNA sense strand
cagaagaacggccaucaaa

SEQ ID NO: 1876233 - RNA, 19 nt, Homo sapiens
  misc_RNA (1)...(19): siRNA sense strand
gcaaugaguguugucagua

SEQ ID NO: 1876234 - RNA, 19 nt, Homo sapiens
  misc_RNA (1)...(19): siRNA sense strand
ggagacugaugaccaaagu

SEQ ID NO: 1876235 - RNA, 19 nt, Homo sapiens
  misc_RNA (1)...(19): siRNA sense strand
ccacaauggaucaccuuua

SEQ ID NO: 1876236 - RNA, 19 nt, Homo sapiens
  misc_RNA (1)...(19): siRNA sense strand
ccagaggccacucaguuua

SEQ ID NO: 1876237 - RNA, 19 nt, Homo sapiens
  misc_RNA (1)...(19): siRNA sense strand
ucccugagcuggcagauga

SEQ ID NO: 1876238 - RNA, 19 nt, Homo sapiens
  misc_RNA (1)...(19): siRNA sense strand
auacuuagaugaaccuuuc

SEQ ID NO: 1876239 - RNA, 19 nt, Homo sapiens
  misc_RNA (1)...(19): siRNA sense strand
ucagagggcuccacagaag

SEQ ID NO: 1876240 - RNA, 19 nt, Homo sapiens
  misc_RNA (1)...(19): siRNA sense strand
ccucgaaacuaacaacuuc

SEQ ID NO: 1876241 - RNA, 19 nt, Homo sapiens
  misc_RNA (1)...(19): siRNA sense strand
ggaaccugguggugcuuaa

SEQ ID NO: 1876242 - RNA, 19 nt, Homo sapiens
  misc_RNA (1)...(19): siRNA sense strand
caacuacucaucucacaga

SEQ ID NO: 1876243 - RNA, 19 nt, Homo sapiens
  misc_RNA (1)...(19): siRNA sense strand
gcuggaauguguuugacuu

SEQ ID NO: 1876244 - RNA, 19 nt, Homo sapiens
  misc_RNA (1)...(19): siRNA sense strand
ccacauugcugccaacacu

SEQ ID NO: 1876245 - RNA, 19 nt, Homo sapiens
  misc_RNA (1)...(19): siRNA sense strand
cuauaccgauggagaguuu

SEQ ID NO: 1876246 - RNA, 19 nt, Homo sapiens
  misc_RNA (1)...(19): siRNA sense strand
gcacuggaacaucuucuga

SEQ ID NO: 1876247 - RNA, 19 nt, Homo sapiens
  misc_RNA (1)...(19): siRNA sense strand
gauacuggcaagaggauuu

SEQ ID NO: 1876248 - RNA, 19 nt, Homo sapiens
  misc_RNA (1)...(19): siRNA sense strand
caaccacucuccgauggaa

SEQ ID NO: 1876249 - RNA, 19 nt, Homo sapiens
  misc_RNA (1)...(19): siRNA sense strand
guaccuuugucgauuguga

SEQ ID NO: 1876250 - RNA, 19 nt, Homo sapiens
  misc_RNA (1)...(19): siRNA sense strand
gcuggcagaugaccuggaa

SEQ ID NO: 1876251 - RNA, 19 nt, Homo sapiens
  misc_RNA (1)...(19): siRNA sense strand
cagcuugucucagaaguau

SEQ ID NO: 1876252 - RNA, 19 nt, Homo sapiens
  misc_RNA (1)...(19): siRNA sense strand
cacagaugauggagucuuu

SEQ ID NO: 1876253 - RNA, 19 nt, Homo sapiens
  misc_RNA (1)...(19): siRNA sense strand
gcagaaggaccaagaagag

SEQ ID NO: 1876254 - RNA, 19 nt, Homo sapiens
  misc_RNA (1)...(19): siRNA sense strand
gcagaagaaauacuacaau

SEQ ID NO: 1876255 - RNA, 19 nt, Homo sapiens
  misc_RNA (1)...(19): siRNA sense strand
uuggaucccucgaaacuaa

SEQ ID NO: 1876256 - RNA, 19 nt, Homo sapiens
  misc_RNA (1)...(19): siRNA sense strand
gggugaaucugaucuugau

SEQ ID NO: 1876257 - RNA, 19 nt, Homo sapiens
  misc_RNA (1)...(19): siRNA sense strand
gauaggcaacaucgucuuu

SEQ ID NO: 1876258 - RNA, 19 nt, Homo sapiens
  misc_RNA (1)...(19): siRNA sense strand
ccacagaagacaacaaauc

SEQ ID NO: 1876259 - RNA, 19 nt, Homo sapiens
  misc_RNA (1)...(19): siRNA sense strand
ucauuacccuggcauaugu

SEQ ID NO: 1876260 - RNA, 19 nt, Homo sapiens
  misc_RNA (1)...(19): siRNA sense strand
uuugaagccuugauaaaga

SEQ ID NO: 1876261 - RNA, 19 nt, Homo sapiens
  misc_RNA (1)...(19): siRNA sense strand
aggcaaauauggaggagaa

SEQ ID NO: 1876262 - RNA, 19 nt, Homo sapiens
  misc_RNA (1)...(19): siRNA sense strand
gcuauuccuugucauguuc

SEQ ID NO: 1876263 - RNA, 19 nt, Homo sapiens
  misc_RNA (1)...(19): siRNA sense strand
ggaauguguuugacuucau

SEQ ID NO: 1876264 - RNA, 19 nt, Homo sapiens
  misc_RNA (1)...(19): siRNA sense strand
gaaugugucaugaagaugu

SEQ ID NO: 1876265 - RNA, 19 nt, Homo sapiens
  misc_RNA (1)...(19): siRNA sense strand
gguggagacugaugaccaa

SEQ ID NO: 1876266 - RNA, 19 nt, Homo sapiens
  misc_RNA (1)...(19): siRNA sense strand
cuuugucgauugugaauaa

SEQ ID NO: 1876267 - RNA, 19 nt, Homo sapiens
  misc_RNA (1)...(19): siRNA sense strand
acagugacuucaucgcuaa

SEQ ID NO: 1876268 - RNA, 19 nt, Homo sapiens
  misc_RNA (1)...(19): siRNA sense strand
guucaucgcccugcuauug

SEQ ID NO: 1876269 - RNA, 19 nt, Homo sapiens
  misc_RNA (1)...(19): siRNA sense strand
ucaucaagaucaucggaaa

SEQ ID NO: 1876270 - RNA, 19 nt, Homo sapiens
  misc_RNA (1)...(19): siRNA sense strand
uggagaagaugaacaccaa

SEQ ID NO: 1876271 - RNA, 19 nt, Homo sapiens
  misc_RNA (1)...(19): siRNA sense strand
uaacaacuuccgucgcuuu

SEQ ID NO: 1876272 - RNA, 19 nt, Homo sapiens
  misc_RNA (1)...(19): siRNA sense strand
cugaugaaauugaagcaaa

SEQ ID NO: 1876273 - RNA, 19 nt, Homo sapiens
  misc_RNA (1)...(19): siRNA sense strand
ccugaggacuucugggaaa

SEQ ID NO: 1876274 - RNA, 19 nt, Homo sapiens
  misc_RNA (1)...(19): siRNA sense strand
ggaacuggcuggauuuuag

SEQ ID NO: 1876275 - RNA, 19 nt, Homo sapiens
  misc_RNA (1)...(19): siRNA sense strand
uaaaugaguucacguaccu

SEQ ID NO: 1876276 - RNA, 19 nt, Homo sapiens
  misc_RNA (1)...(19): siRNA sense strand
cauuaugacuccacauuua

SEQ ID NO: 1876277 - RNA, 19 nt, Homo sapiens
  misc_RNA (1)...(19): siRNA sense strand
guucuuauguaccgcauua

SEQ ID NO: 1876278 - RNA, 19 nt, Homo sapiens
  misc_RNA (1)...(19): siRNA sense strand
gcauuaugacuccacauuu

SEQ ID NO: 1876279 - RNA, 19 nt, Homo sapiens
  misc_RNA (1)...(19): siRNA sense strand
gacuccacauuuaugaaua

SEQ ID NO: 1876280 - RNA, 19 nt, Homo sapiens
  misc_RNA (1)...(19): siRNA sense strand
aaugacaacuggaagacuu

SEQ ID NO: 1876281 - RNA, 19 nt, Homo sapiens
  misc_RNA (1)...(19): siRNA sense strand
ccaggguuauauuugaauu

SEQ ID NO: 1876282 - RNA, 19 nt, Homo sapiens
  misc_RNA (1)...(19): siRNA sense strand
acuccaggguuauauuuga

SEQ ID NO: 1876283 - RNA, 19 nt, Homo sapiens
  misc_RNA (1)...(19): siRNA sense strand
gggaaugacaacuggaaga

SEQ ID NO: 1876284 - RNA, 19 nt, Homo sapiens
  misc_RNA (1)...(19): siRNA sense strand
uauggacccuggaguucuu

SEQ ID NO: 1876285 - RNA, 19 nt, Homo sapiens
  misc_RNA (1)...(19): siRNA sense strand
ggauaaaaggaacaaagua

SEQ ID NO: 1876286 - RNA, 19 nt, Homo sapiens
  misc_RNA (1)...(19): siRNA sense strand
ucaaagaggauaaaaggaa

SEQ ID NO: 1876287 - RNA, 19 nt, Homo sapiens
  misc_RNA (1)...(19): siRNA sense strand
acccuggaguucuuaugua

SEQ ID NO: 1876288 - RNA, 19 nt, Homo sapiens
  misc_RNA (1)...(19): siRNA sense strand
cuuauguaccgcauuauga

SEQ ID NO: 1876289 - RNA, 19 nt, Homo sapiens
  misc_RNA (1)...(19): siRNA sense strand
ugacuccacauuuaugaau

SEQ ID NO: 1876290 - RNA, 19 nt, Homo sapiens
  misc_RNA (1)...(19): siRNA sense strand
gacccuggaguucuuaugu

SEQ ID NO: 1876291 - RNA, 19 nt, Homo sapiens
  misc_RNA (1)...(19): siRNA sense strand
uaugacuccacauuuauga

SEQ ID NO: 1876292 - RNA, 19 nt, Homo sapiens
  misc_RNA (1)...(19): siRNA sense strand
ggaaugacaacuggaagac

SEQ ID NO: 1876293 - RNA, 19 nt, Homo sapiens
  misc_RNA (1)...(19): siRNA sense strand
cuccaggguuauauuugaa

SEQ ID NO: 1876294 - RNA, 19 nt, Homo sapiens
  misc_RNA (1)...(19): siRNA sense strand
ggagagagcucauauauca

SEQ ID NO: 1876295 - RNA, 19 nt, Homo sapiens
  misc_RNA (1)...(19): siRNA sense strand
gcacacaucuccagcgaua

SEQ ID NO: 1876296 - RNA, 19 nt, Homo sapiens
  misc_RNA (1)...(19): siRNA sense strand
gcaaacaucuguggaauga

SEQ ID NO: 1876297 - RNA, 19 nt, Homo sapiens
  misc_RNA (1)...(19): siRNA sense strand
ggacggaccgggaugauua

SEQ ID NO: 1876298 - RNA, 19 nt, Homo sapiens
  misc_RNA (1)...(19): siRNA sense strand
ggacagaacauuuccauug

SEQ ID NO: 1876299 - RNA, 19 nt, Homo sapiens
  misc_RNA (1)...(19): siRNA sense strand
caucuuggcugauaauuug

SEQ ID NO: 1876300 - RNA, 19 nt, Homo sapiens
  misc_RNA (1)...(19): siRNA sense strand
ucaauacacccuaugauua

SEQ ID NO: 1876301 - RNA, 19 nt, Homo sapiens
  misc_RNA (1)...(19): siRNA sense strand
aaacaucuguggaaugauu

SEQ ID NO: 1876302 - RNA, 19 nt, Homo sapiens
  misc_RNA (1)...(19): siRNA sense strand
agaaagcucugguuacuug

SEQ ID NO: 1876303 - RNA, 19 nt, Homo sapiens
  misc_RNA (1)...(19): siRNA sense strand
gcacaacuuugacaccuau

SEQ ID NO: 1876304 - RNA, 19 nt, Homo sapiens
  misc_RNA (1)...(19): siRNA sense strand
agacugaaguucccucuaa

SEQ ID NO: 1876305 - RNA, 19 nt, Homo sapiens
  misc_RNA (1)...(19): siRNA sense strand
uaaaggagccauucuguau

SEQ ID NO: 1876306 - RNA, 19 nt, Homo sapiens
  misc_RNA (1)...(19): siRNA sense strand
cauagcagcuguaccgauu

SEQ ID NO: 1876307 - RNA, 19 nt, Homo sapiens
  misc_RNA (1)...(19): siRNA sense strand
gaauuuaccuagaugacau

SEQ ID NO: 1876308 - RNA, 19 nt, Homo sapiens
  misc_RNA (1)...(19): siRNA sense strand
caucauauuuguggacuuu

SEQ ID NO: 1876309 - RNA, 19 nt, Homo sapiens
  misc_RNA (1)...(19): siRNA sense strand
gaaggagagagcucauaua

SEQ ID NO: 1876310 - RNA, 19 nt, Homo sapiens
  misc_RNA (1)...(19): siRNA sense strand
cuaccagccuuucucauuu

SEQ ID NO: 1876311 - RNA, 19 nt, Homo sapiens
  misc_RNA (1)...(19): siRNA sense strand
ggacaacgccuggauuuca

SEQ ID NO: 1876312 - RNA, 19 nt, Homo sapiens
  misc_RNA (1)...(19): siRNA sense strand
ggaccgggaugauuaugug

SEQ ID NO: 1876313 - RNA, 19 nt, Homo sapiens
  misc_RNA (1)...(19): siRNA sense strand
gagaugaugaccacaauug

SEQ ID NO: 1876314 - RNA, 19 nt, Homo sapiens
  misc_RNA (1)...(19): siRNA sense strand
ggacaugcuuucuucuaca

SEQ ID NO: 1876315 - RNA, 19 nt, Homo sapiens
  misc_RNA (1)...(19): siRNA sense strand
caauacacccuaugauuau

SEQ ID NO: 1876316 - RNA, 19 nt, Homo sapiens
  misc_RNA (1)...(19): siRNA sense strand
uaccagccuuucucauuua

SEQ ID NO: 1876317 - RNA, 19 nt, Homo sapiens
  misc_RNA (1)...(19): siRNA sense strand
gccaagaucccugaguuua

SEQ ID NO: 1876318 - RNA, 19 nt, Homo sapiens
  misc_RNA (1)...(19): siRNA sense strand
gggcuggagugguuucauu

SEQ ID NO: 1876319 - RNA, 19 nt, Homo sapiens
  misc_RNA (1)...(19): siRNA sense strand
ccaaggaugugccuauaag

SEQ ID NO: 1876320 - RNA, 19 nt, Homo sapiens
  misc_RNA (1)...(19): siRNA sense strand
gacagaacauuuccauugg

SEQ ID NO: 1876321 - RNA, 19 nt, Homo sapiens
  misc_RNA (1)...(19): siRNA sense strand
ggccaaggaugugccuaua

SEQ ID NO: 1876322 - RNA, 19 nt, Homo sapiens
  misc_RNA (1)...(19): siRNA sense strand
uagcagcuguaccgauuaa

SEQ ID NO: 1876323 - RNA, 19 nt, Homo sapiens
  misc_RNA (1)...(19): siRNA sense strand
acagaaggauauuucagaa

SEQ ID NO: 1876324 - RNA, 19 nt, Homo sapiens
  misc_RNA (1)...(19): siRNA sense strand
gaagaagguucgggaaagg

SEQ ID NO: 1876325 - RNA, 19 nt, Homo sapiens
  misc_RNA (1)...(19): siRNA sense strand
ccaagaucccugaguuuaa

SEQ ID NO: 1876326 - RNA, 19 nt, Homo sapiens
  misc_RNA (1)...(19): siRNA sense strand
cagccaagaucccugaguu

SEQ ID NO: 1876327 - RNA, 19 nt, Homo sapiens
  misc_RNA (1)...(19): siRNA sense strand
agagagcucauauaucaua

SEQ ID NO: 1876328 - RNA, 19 nt, Homo sapiens
  misc_RNA (1)...(19): siRNA sense strand
gacauccucuugcagaaau

SEQ ID NO: 1876329 - RNA, 19 nt, Homo sapiens
  misc_RNA (1)...(19): siRNA sense strand
gauuaagcaucuuccugaa

SEQ ID NO: 1876330 - RNA, 19 nt, Homo sapiens
  misc_RNA (1)...(19): siRNA sense strand
uugcagaaauccagaaaug

SEQ ID NO: 1876331 - RNA, 19 nt, Homo sapiens
  misc_RNA (1)...(19): siRNA sense strand
caaagaggaacagaaguuu

SEQ ID NO: 1876332 - RNA, 19 nt, Homo sapiens
  misc_RNA (1)...(19): siRNA sense strand
ucaaagaggaacagaaguu

SEQ ID NO: 1876333 - RNA, 19 nt, Homo sapiens
  misc_RNA (1)...(19): siRNA sense strand
gauuagauccacuugcauu

SEQ ID NO: 1876334 - RNA, 19 nt, Homo sapiens
  misc_RNA (1)...(19): siRNA sense strand
aaacagacaggugauaauu

SEQ ID NO: 1876335 - RNA, 19 nt, Homo sapiens
  misc_RNA (1)...(19): siRNA sense strand
gaauuucucccaaguccuu

SEQ ID NO: 1876336 - RNA, 19 nt, Homo sapiens
  misc_RNA (1)...(19): siRNA sense strand
uagagaggcugaaccgaau

SEQ ID NO: 1876337 - RNA, 19 nt, Homo sapiens
  misc_RNA (1)...(19): siRNA sense strand
accaaauucuuucagguua

SEQ ID NO: 1876338 - RNA, 19 nt, Homo sapiens
  misc_RNA (1)...(19): siRNA sense strand
ugaaccgaauguacaauug

SEQ ID NO: 1876339 - RNA, 19 nt, Homo sapiens
  misc_RNA (1)...(19): siRNA sense strand
gaccaaauucuuucagguu

SEQ ID NO: 1876340 - RNA, 19 nt, Homo sapiens
  misc_RNA (1)...(19): siRNA sense strand
gacuugggcuggagugguu

SEQ ID NO: 1876341 - RNA, 19 nt, Homo sapiens
  misc_RNA (1)...(19): siRNA sense strand
acagacaggugauaauuac

SEQ ID NO: 1876342 - RNA, 19 nt, Homo sapiens
  misc_RNA (1)...(19): siRNA sense strand
ucagagcccucgauucuac

SEQ ID NO: 1876343 - RNA, 19 nt, Homo sapiens
  misc_RNA (1)...(19): siRNA sense strand
ggaagaggcagcccuacug

SEQ ID NO: 1876344 - RNA, 19 nt, Homo sapiens
  misc_RNA (1)...(19): siRNA sense strand
ucagugccauugauuuaga

SEQ ID NO: 1876345 - RNA, 19 nt, Homo sapiens
  misc_RNA (1)...(19): siRNA sense strand
caagaucccugaguuuaac

SEQ ID NO: 1876346 - RNA, 19 nt, Homo sapiens
  misc_RNA (1)...(19): siRNA sense strand
gaggaagcccuaccuguca

SEQ ID NO: 1876347 - RNA, 19 nt, Homo sapiens
  misc_RNA (1)...(19): siRNA sense strand
gacugaaguucccucuaaa

SEQ ID NO: 1876348 - RNA, 19 nt, Homo sapiens
  misc_RNA (1)...(19): siRNA sense strand
ccuuacaucuuggcugaua

SEQ ID NO: 1876349 - RNA, 19 nt, Homo sapiens
  misc_RNA (1)...(19): siRNA sense strand
uggugaaggugcagacuuu

SEQ ID NO: 1876350 - RNA, 19 nt, Homo sapiens
  misc_RNA (1)...(19): siRNA sense strand
ggauuucagugccauugau

SEQ ID NO: 1876351 - RNA, 19 nt, Homo sapiens
  misc_RNA (1)...(19): siRNA sense strand
ggacauccucuugcagaaa

SEQ ID NO: 1876352 - RNA, 19 nt, Homo sapiens
  misc_RNA (1)...(19): siRNA sense strand
gcucaaagaggaacagaag

SEQ ID NO: 1876353 - RNA, 19 nt, Homo sapiens
  misc_RNA (1)...(19): siRNA sense strand
ucauauuuguggacuuuga

SEQ ID NO: 1876354 - RNA, 19 nt, Homo sapiens
  misc_RNA (1)...(19): siRNA sense strand
ggugauaauuaccauccuu

SEQ ID NO: 1876355 - RNA, 19 nt, Homo sapiens
  misc_RNA (1)...(19): siRNA sense strand
gaaaacagacaggugauaa

SEQ ID NO: 1876356 - RNA, 19 nt, Homo sapiens
  misc_RNA (1)...(19): siRNA sense strand
aaauguacaugaugcagau

SEQ ID NO: 1876357 - RNA, 19 nt, Homo sapiens
  misc_RNA (1)...(19): siRNA sense strand
acacaucuccagcgauaaa

SEQ ID NO: 1876358 - RNA, 19 nt, Homo sapiens
  misc_RNA (1)...(19): siRNA sense strand
cuacuggagucucggauuc

SEQ ID NO: 1876359 - RNA, 19 nt, Homo sapiens
  misc_RNA (1)...(19): siRNA sense strand
gaacagaaggauauuucag

SEQ ID NO: 1876360 - RNA, 19 nt, Homo sapiens
  misc_RNA (1)...(19): siRNA sense strand
cuaaaggagccauucugua

SEQ ID NO: 1876361 - RNA, 19 nt, Homo sapiens
  misc_RNA (1)...(19): siRNA sense strand
gacccaaacccuugccaaa

SEQ ID NO: 1876362 - RNA, 19 nt, Homo sapiens
  misc_RNA (1)...(19): siRNA sense strand
caccacaacucacacucuu

SEQ ID NO: 1876363 - RNA, 19 nt, Homo sapiens
  misc_RNA (1)...(19): siRNA sense strand
caucauagaacacgagauc

SEQ ID NO: 1876364 - RNA, 19 nt, Homo sapiens
  misc_RNA (1)...(19): siRNA sense strand
gcuaaaggagccauucugu

SEQ ID NO: 1876365 - RNA, 19 nt, Homo sapiens
  misc_RNA (1)...(19): siRNA sense strand
gaugaugaccacaauugga

SEQ ID NO: 1876366 - RNA, 19 nt, Homo sapiens
  misc_RNA (1)...(19): siRNA sense strand
gggacauccucuugcagaa

SEQ ID NO: 1876367 - RNA, 19 nt, Homo sapiens
  misc_RNA (1)...(19): siRNA sense strand
gcacuaccagccuuucuca

SEQ ID NO: 1876368 - RNA, 19 nt, Homo sapiens
  misc_RNA (1)...(19): siRNA sense strand
aaggagagagcucauauau

SEQ ID NO: 1876369 - RNA, 19 nt, Homo sapiens
  misc_RNA (1)...(19): siRNA sense strand
cagccuuucucauuuaaca

SEQ ID NO: 1876370 - RNA, 19 nt, Homo sapiens
  misc_RNA (1)...(19): siRNA sense strand
gcaggucuccgaagaaggu

SEQ ID NO: 1876371 - RNA, 19 nt, Homo sapiens
  misc_RNA (1)...(19): siRNA sense strand
ugacagcacaggcaauguu

SEQ ID NO: 1876372 - RNA, 19 nt, Homo sapiens
  misc_RNA (1)...(19): siRNA sense strand
uuucagugccauugauuua

SEQ ID NO: 1876373 - RNA, 19 nt, Homo sapiens
  misc_RNA (1)...(19): siRNA sense strand
gcaaguguucccaccauca

SEQ ID NO: 1876374 - RNA, 19 nt, Homo sapiens
  misc_RNA (1)...(19): siRNA sense strand
gcaccagagaugacacuga

SEQ ID NO: 1876375 - RNA, 19 nt, Homo sapiens
  misc_RNA (1)...(19): siRNA sense strand
ggugggaaccuaucauaca

SEQ ID NO: 1876376 - RNA, 19 nt, Homo sapiens
  misc_RNA (1)...(19): siRNA sense strand
ugaaggagagagcucauau

SEQ ID NO: 1876377 - RNA, 19 nt, Homo sapiens
  misc_RNA (1)...(19): siRNA sense strand
gcaucugugugaacgugaa

SEQ ID NO: 1876378 - RNA, 19 nt, Homo sapiens
  misc_RNA (1)...(19): siRNA sense strand
ccagaaauggccugagaga

SEQ ID NO: 1876379 - RNA, 19 nt, Homo sapiens
  misc_RNA (1)...(19): siRNA sense strand
caacaugugggacagaaca

SEQ ID NO: 1876380 - RNA, 19 nt, Homo sapiens
  misc_RNA (1)...(19): siRNA sense strand
ggacguuccccauuccuua

SEQ ID NO: 1876381 - RNA, 19 nt, Homo sapiens
  misc_RNA (1)...(19): siRNA sense strand
ccaaauagcagagaaagcu

SEQ ID NO: 1876382 - RNA, 19 nt, Homo sapiens
  misc_RNA (1)...(19): siRNA sense strand
gaugacagcacaggcaaug

SEQ ID NO: 1876383 - RNA, 19 nt, Homo sapiens
  misc_RNA (1)...(19): siRNA sense strand
gugaacagaaggauauuuc

SEQ ID NO: 1876384 - RNA, 19 nt, Homo sapiens
  misc_RNA (1)...(19): siRNA sense strand
gccaaggaugugccuauaa

SEQ ID NO: 1876385 - RNA, 19 nt, Homo sapiens
  misc_RNA (1)...(19): siRNA sense strand
cgggaaaggccauguuaga

SEQ ID NO: 1876386 - RNA, 19 nt, Homo sapiens
  misc_RNA (1)...(19): siRNA sense strand
cagcaggucuccgaagaag

SEQ ID NO: 1876387 - RNA, 19 nt, Homo sapiens
  misc_RNA (1)...(19): siRNA sense strand
gcagcaggucuccgaagaa

SEQ ID NO: 1876388 - RNA, 19 nt, Homo sapiens
  misc_RNA (1)...(19): siRNA sense strand
uuuguggacuuugaagaua

SEQ ID NO: 1876389 - RNA, 19 nt, Homo sapiens
  misc_RNA (1)...(19): siRNA sense strand
aacagacaggugauaauua

SEQ ID NO: 1876390 - RNA, 19 nt, Homo sapiens
  misc_RNA (1)...(19): siRNA sense strand
ggaauuuaccuagaugaca

SEQ ID NO: 1876391 - RNA, 19 nt, Homo sapiens
  misc_RNA (1)...(19): siRNA sense strand
uggagucucggauucuuua

SEQ ID NO: 1876392 - RNA, 19 nt, Homo sapiens
  misc_RNA (1)...(19): siRNA sense strand
ggagaugaugaccacaauu

SEQ ID NO: 1876393 - RNA, 19 nt, Homo sapiens
  misc_RNA (1)...(19): siRNA sense strand
caucuccagcgauaaauga

SEQ ID NO: 1876394 - RNA, 19 nt, Homo sapiens
  misc_RNA (1)...(19): siRNA sense strand
gaccagagcuugugaagaa

SEQ ID NO: 1876395 - RNA, 19 nt, Homo sapiens
  misc_RNA (1)...(19): siRNA sense strand
ggacaucgacccagagaaa

SEQ ID NO: 1876396 - RNA, 19 nt, Homo sapiens
  misc_RNA (1)...(19): siRNA sense strand
cgauauggcugucaguauu

SEQ ID NO: 1876397 - RNA, 19 nt, Homo sapiens
  misc_RNA (1)...(19): siRNA sense strand
gauauggcugucaguauua

SEQ ID NO: 1876398 - RNA, 19 nt, Homo sapiens
  misc_RNA (1)...(19): siRNA sense strand
gaacacacagggcgauaug

SEQ ID NO: 1876399 - RNA, 19 nt, Homo sapiens
  misc_RNA (1)...(19): siRNA sense strand
gaagaugaacacccacaau

SEQ ID NO: 1876400 - RNA, 19 nt, Homo sapiens
  misc_RNA (1)...(19): siRNA sense strand
acacgaauauccuaaguac

SEQ ID NO: 1876401 - RNA, 19 nt, Homo sapiens
  misc_RNA (1)...(19): siRNA sense strand
gugcuaugguuaugacuug

SEQ ID NO: 1876402 - RNA, 19 nt, Homo sapiens
  misc_RNA (1)...(19): siRNA sense strand
gaacgugacccugcugugu

SEQ ID NO: 1876403 - RNA, 19 nt, Homo sapiens
  misc_RNA (1)...(19): siRNA sense strand
gacuugaacucucccuaug

SEQ ID NO: 1876404 - RNA, 19 nt, Homo sapiens
  misc_RNA (1)...(19): siRNA sense strand
cuaaguaccaggcugaauu

SEQ ID NO: 1876405 - RNA, 19 nt, Homo sapiens
  misc_RNA (1)...(19): siRNA sense strand
gcacacccuucaucucagu

SEQ ID NO: 1876406 - RNA, 19 nt, Homo sapiens
  misc_RNA (1)...(19): siRNA sense strand
ggaguaccgucuauauagg

SEQ ID NO: 1876407 - RNA, 19 nt, Homo sapiens
  misc_RNA (1)...(19): siRNA sense strand
ggcaaacacuggacaucga

SEQ ID NO: 1876408 - RNA, 19 nt, Homo sapiens
  misc_RNA (1)...(19): siRNA sense strand
uaaggaaggagaagaugaa

SEQ ID NO: 1876409 - RNA, 19 nt, Homo sapiens
  misc_RNA (1)...(19): siRNA sense strand
caggaguaccgucuauaua

SEQ ID NO: 1876410 - RNA, 19 nt, Homo sapiens
  misc_RNA (1)...(19): siRNA sense strand
ggacacacagccugaagau

SEQ ID NO: 1876411 - RNA, 19 nt, Homo sapiens
  misc_RNA (1)...(19): siRNA sense strand
guaaggaaggagaagauga

SEQ ID NO: 1876412 - RNA, 19 nt, Homo sapiens
  misc_RNA (1)...(19): siRNA sense strand
gcauuuggcggcuucauuc

SEQ ID NO: 1876413 - RNA, 19 nt, Homo sapiens
  misc_RNA (1)...(19): siRNA sense strand
uaagaagccaucacucuca

SEQ ID NO: 1876414 - RNA, 19 nt, Homo sapiens
  misc_RNA (1)...(19): siRNA sense strand
ggcggcaguuccacacuuu

SEQ ID NO: 1876415 - RNA, 19 nt, Homo sapiens
  misc_RNA (1)...(19): siRNA sense strand
ucucugaugucggcuauga

SEQ ID NO: 1876416 - RNA, 19 nt, Homo sapiens
  misc_RNA (1)...(19): siRNA sense strand
acacuuuccuucugaccaa

SEQ ID NO: 1876417 - RNA, 19 nt, Homo sapiens
  misc_RNA (1)...(19): siRNA sense strand
ggaaggagaagaugaacac

SEQ ID NO: 1876418 - RNA, 19 nt, Homo sapiens
  misc_RNA (1)...(19): siRNA sense strand
ccaggaguaccgucuauau

SEQ ID NO: 1876419 - RNA, 19 nt, Homo sapiens
  misc_RNA (1)...(19): siRNA sense strand
gcccaggaguaccgucuau

SEQ ID NO: 1876420 - RNA, 19 nt, Homo sapiens
  misc_RNA (1)...(19): siRNA sense strand
gcggcuucauucuguguaa

SEQ ID NO: 1876421 - RNA, 19 nt, Homo sapiens
  misc_RNA (1)...(19): siRNA sense strand
ugacaggagccuacccaaa

SEQ ID NO: 1876422 - RNA, 19 nt, Homo sapiens
  misc_RNA (1)...(19): siRNA sense strand
ucaauacacgaauauccua

SEQ ID NO: 1876423 - RNA, 19 nt, Homo sapiens
  misc_RNA (1)...(19): siRNA sense strand
gacaggagccuacccaaaa

SEQ ID NO: 1876424 - RNA, 19 nt, Homo sapiens
  misc_RNA (1)...(19): siRNA sense strand
gcgauauggcugucaguau

SEQ ID NO: 1876425 - RNA, 19 nt, Homo sapiens
  misc_RNA (1)...(19): siRNA sense strand
caauacacgaauauccuaa

SEQ ID NO: 1876426 - RNA, 19 nt, Homo sapiens
  misc_RNA (1)...(19): siRNA sense strand
ggucccagguguuucuaag

SEQ ID NO: 1876427 - RNA, 19 nt, Homo sapiens
  misc_RNA (1)...(19): siRNA sense strand
ucuaagaucaauacacgaa

SEQ ID NO: 1876428 - RNA, 19 nt, Homo sapiens
  misc_RNA (1)...(19): siRNA sense strand
cuugaacucucccuaugug

SEQ ID NO: 1876429 - RNA, 19 nt, Homo sapiens
  misc_RNA (1)...(19): siRNA sense strand
gaaggacacacagccugaa

SEQ ID NO: 1876430 - RNA, 19 nt, Homo sapiens
  misc_RNA (1)...(19): siRNA sense strand
uaaguaccaggcugaauuc

SEQ ID NO: 1876431 - RNA, 19 nt, Homo sapiens
  misc_RNA (1)...(19): siRNA sense strand
ggaacacacagggcgauau

SEQ ID NO: 1876432 - RNA, 19 nt, Homo sapiens
  misc_RNA (1)...(19): siRNA sense strand
ccucuaugcugccgugaag

SEQ ID NO: 1876433 - RNA, 19 nt, Homo sapiens
  misc_RNA (1)...(19): siRNA sense strand
ugacuugaacucucccuau

SEQ ID NO: 1876434 - RNA, 19 nt, Homo sapiens
  misc_RNA (1)...(19): siRNA sense strand
agucacagguggcauuugg

SEQ ID NO: 1876435 - RNA, 19 nt, Homo sapiens
  misc_RNA (1)...(19): siRNA sense strand
guuccacacuuuccuucug

SEQ ID NO: 1876436 - RNA, 19 nt, Homo sapiens
  misc_RNA (1)...(19): siRNA sense strand
aagaugaacacccacaaug

SEQ ID NO: 1876437 - RNA, 19 nt, Homo sapiens
  misc_RNA (1)...(19): siRNA sense strand
uggcacacccuucaucuca

SEQ ID NO: 1876438 - RNA, 19 nt, Homo sapiens
  misc_RNA (1)...(19): siRNA sense strand
gaucaauacacgaauaucc

SEQ ID NO: 1876439 - RNA, 19 nt, Homo sapiens
  misc_RNA (1)...(19): siRNA sense strand
gcaguuccacacuuuccuu

SEQ ID NO: 1876440 - RNA, 19 nt, Homo sapiens
  misc_RNA (1)...(19): siRNA sense strand
acaguggccucaggagaga

SEQ ID NO: 1876441 - RNA, 19 nt, Homo sapiens
  misc_RNA (1)...(19): siRNA sense strand
acgaauauccuaaguacca

SEQ ID NO: 1876442 - RNA, 19 nt, Homo sapiens
  misc_RNA (1)...(19): siRNA sense strand
aggaguaccgucuauauag

SEQ ID NO: 1876443 - RNA, 19 nt, Homo sapiens
  misc_RNA (1)...(19): siRNA sense strand
aaaggcugauuuccaacau

SEQ ID NO: 1876444 - RNA, 19 nt, Homo sapiens
  misc_RNA (1)...(19): siRNA sense strand
auacacgaauauccuaagu

SEQ ID NO: 1876445 - RNA, 19 nt, Homo sapiens
  misc_RNA (1)...(19): siRNA sense strand
ggcauuuggcggcuucauu

SEQ ID NO: 1876446 - RNA, 19 nt, Homo sapiens
  misc_RNA (1)...(19): siRNA sense strand
gccugacccuccagugugu

SEQ ID NO: 1876447 - RNA, 19 nt, Homo sapiens
  misc_RNA (1)...(19): siRNA sense strand
gggaacacacagggcgaua

SEQ ID NO: 1876448 - RNA, 19 nt, Homo sapiens
  misc_RNA (1)...(19): siRNA sense strand
gcuaugguuaugacuugaa

SEQ ID NO: 1876449 - RNA, 19 nt, Homo sapiens
  misc_RNA (1)...(19): siRNA sense strand
gccuugaagcccaggagua

SEQ ID NO: 1876450 - RNA, 19 nt, Homo sapiens
  misc_RNA (1)...(19): siRNA sense strand
ucuaagaagccaucacucu

SEQ ID NO: 1876451 - RNA, 19 nt, Homo sapiens
  misc_RNA (1)...(19): siRNA sense strand
ggauacgaccagagcuugu

SEQ ID NO: 1876452 - RNA, 19 nt, Homo sapiens
  misc_RNA (1)...(19): siRNA sense strand
gauacgaccagagcuugug

SEQ ID NO: 1876453 - RNA, 19 nt, Homo sapiens
  misc_RNA (1)...(19): siRNA sense strand
ccacuccgucuaagaucaa

SEQ ID NO: 1876454 - RNA, 19 nt, Homo sapiens
  misc_RNA (1)...(19): siRNA sense strand
uuccacacuuuccuucuga

SEQ ID NO: 1876455 - RNA, 19 nt, Homo sapiens
  misc_RNA (1)...(19): siRNA sense strand
ggcgauauggcugucagua

SEQ ID NO: 1876456 - RNA, 19 nt, Homo sapiens
  misc_RNA (1)...(19): siRNA sense strand
gcacaaagcagaagaaguu

SEQ ID NO: 1876457 - RNA, 19 nt, Homo sapiens
  misc_RNA (1)...(19): siRNA sense strand
gagcagaguuucuuacuau

SEQ ID NO: 1876458 - RNA, 19 nt, Homo sapiens
  misc_RNA (1)...(19): siRNA sense strand
ggagacaucacaccaauua

SEQ ID NO: 1876459 - RNA, 19 nt, Homo sapiens
  misc_RNA (1)...(19): siRNA sense strand
cagaagaaguugaagauga

SEQ ID NO: 1876460 - RNA, 19 nt, Homo sapiens
  misc_RNA (1)...(19): siRNA sense strand
agagagaccaugccaauua

SEQ ID NO: 1876461 - RNA, 19 nt, Homo sapiens
  misc_RNA (1)...(19): siRNA sense strand
gagagaccaugccaauuau

SEQ ID NO: 1876462 - RNA, 19 nt, Homo sapiens
  misc_RNA (1)...(19): siRNA sense strand
ugccagagcuuaaagagaa

SEQ ID NO: 1876463 - RNA, 19 nt, Homo sapiens
  misc_RNA (1)...(19): siRNA sense strand
caagaaacaacuagaagaa

SEQ ID NO: 1876464 - RNA, 19 nt, Homo sapiens
  misc_RNA (1)...(19): siRNA sense strand
agagauggcuagaagauau

SEQ ID NO: 1876465 - RNA, 19 nt, Homo sapiens
  misc_RNA (1)...(19): siRNA sense strand
agaagaaguugaagaugaa

SEQ ID NO: 1876466 - RNA, 19 nt, Homo sapiens
  misc_RNA (1)...(19): siRNA sense strand
agaaacaacuagaagaaga

SEQ ID NO: 1876467 - RNA, 19 nt, Homo sapiens
  misc_RNA (1)...(19): siRNA sense strand
gaagagauggcuagaagau

SEQ ID NO: 1876468 - RNA, 19 nt, Homo sapiens
  misc_RNA (1)...(19): siRNA sense strand
gaaacaacuagaagaagaa

SEQ ID NO: 1876469 - RNA, 19 nt, Homo sapiens
  misc_RNA (1)...(19): siRNA sense strand
ucacaccaauuaaagcaaa

SEQ ID NO: 1876470 - RNA, 19 nt, Homo sapiens
  misc_RNA (1)...(19): siRNA sense strand
ggacucagaaaccaagaaa

SEQ ID NO: 1876471 - RNA, 19 nt, Homo sapiens
  misc_RNA (1)...(19): siRNA sense strand
uaauagaagagcagaguuu

SEQ ID NO: 1876472 - RNA, 19 nt, Homo sapiens
  misc_RNA (1)...(19): siRNA sense strand
caaagcagaagaaguugaa

SEQ ID NO: 1876473 - RNA, 19 nt, Homo sapiens
  misc_RNA (1)...(19): siRNA sense strand
ggacuggacucagaaacca

SEQ ID NO: 1876474 - RNA, 19 nt, Homo sapiens
  misc_RNA (1)...(19): siRNA sense strand
gaaauugaugcuucagaug

SEQ ID NO: 1876475 - RNA, 19 nt, Homo sapiens
  misc_RNA (1)...(19): siRNA sense strand
ccaauuaaagcaaagaaga

SEQ ID NO: 1876476 - RNA, 19 nt, Homo sapiens
  misc_RNA (1)...(19): siRNA sense strand
agacaucacaccaauuaaa

SEQ ID NO: 1876477 - RNA, 19 nt, Homo sapiens
  misc_RNA (1)...(19): siRNA sense strand
gagaccaugccaauuauga

SEQ ID NO: 1876478 - RNA, 19 nt, Homo sapiens
  misc_RNA (1)...(19): siRNA sense strand
agaaauugaugcuucagau

SEQ ID NO: 1876479 - RNA, 19 nt, Homo sapiens
  misc_RNA (1)...(19): siRNA sense strand
gaagauaugagaccuuggu

SEQ ID NO: 1876480 - RNA, 19 nt, Homo sapiens
  misc_RNA (1)...(19): siRNA sense strand
ccaagaaacaacuagaaga

SEQ ID NO: 1876481 - RNA, 19 nt, Homo sapiens
  misc_RNA (1)...(19): siRNA sense strand
aguugaagaugaaacagua

SEQ ID NO: 1876482 - RNA, 19 nt, Homo sapiens
  misc_RNA (1)...(19): siRNA sense strand
gagcacugguacuuggauu

SEQ ID NO: 1876483 - RNA, 19 nt, Homo sapiens
  misc_RNA (1)...(19): siRNA sense strand
ccaauuaugaagaagauga

SEQ ID NO: 1876484 - RNA, 19 nt, Homo sapiens
  misc_RNA (1)...(19): siRNA sense strand
gcacugguacuuggauuug

SEQ ID NO: 1876485 - RNA, 19 nt, Homo sapiens
  misc_RNA (1)...(19): siRNA sense strand
aaagagagaccaugccaau

SEQ ID NO: 1876486 - RNA, 19 nt, Homo sapiens
  misc_RNA (1)...(19): siRNA sense strand
cagaguuucuuacuaugug

SEQ ID NO: 1876487 - RNA, 19 nt, Homo sapiens
  misc_RNA (1)...(19): siRNA sense strand
gagcuuaaagagaaagaga

SEQ ID NO: 1876488 - RNA, 19 nt, Homo sapiens
  misc_RNA (1)...(19): siRNA sense strand
ugaagaagaugaaaaugga

SEQ ID NO: 1876489 - RNA, 19 nt, Homo sapiens
  misc_RNA (1)...(19): siRNA sense strand
ccaugccaauuaugaagaa

SEQ ID NO: 1876490 - RNA, 19 nt, Homo sapiens
  misc_RNA (1)...(19): siRNA sense strand
aaauugaugcuucagauga

SEQ ID NO: 1876491 - RNA, 19 nt, Homo sapiens
  misc_RNA (1)...(19): siRNA sense strand
auccugagguugagaaauu

SEQ ID NO: 1876492 - RNA, 19 nt, Homo sapiens
  misc_RNA (1)...(19): siRNA sense strand
agagcagaguuucuuacua

SEQ ID NO: 1876493 - RNA, 19 nt, Homo sapiens
  misc_RNA (1)...(19): siRNA sense strand
acaacuagaagaagaagaa

SEQ ID NO: 1876494 - RNA, 19 nt, Homo sapiens
  misc_RNA (1)...(19): siRNA sense strand
gcagaguuucuuacuaugu

SEQ ID NO: 1876495 - RNA, 19 nt, Homo sapiens
  misc_RNA (1)...(19): siRNA sense strand
cgagagaaagacaaaguug

SEQ ID NO: 1876496 - RNA, 19 nt, Homo sapiens
  misc_RNA (1)...(19): siRNA sense strand
gugaagagcacugguacuu

SEQ ID NO: 1876497 - RNA, 19 nt, Homo sapiens
  misc_RNA (1)...(19): siRNA sense strand
gaaaaucauuagugaagag

SEQ ID NO: 1876498 - RNA, 19 nt, Homo sapiens
  misc_RNA (1)...(19): siRNA sense strand
gagaaauugaugcuucaga

SEQ ID NO: 1876499 - RNA, 19 nt, Homo sapiens
  misc_RNA (1)...(19): siRNA sense strand
gaagaaguugaagaugaaa

SEQ ID NO: 1876500 - RNA, 19 nt, Homo sapiens
  misc_RNA (1)...(19): siRNA sense strand
ugugucagaugaagagaug

SEQ ID NO: 1876501 - RNA, 19 nt, Homo sapiens
  misc_RNA (1)...(19): siRNA sense strand
gaaacaguagagcuugaug

SEQ ID NO: 1876502 - RNA, 19 nt, Homo sapiens
  misc_RNA (1)...(19): siRNA sense strand
gccagagcuuaaagagaaa

SEQ ID NO: 1876503 - RNA, 19 nt, Homo sapiens
  misc_RNA (1)...(19): siRNA sense strand
gacaucacaccaauuaaag

SEQ ID NO: 1876504 - RNA, 19 nt, Homo sapiens
  misc_RNA (1)...(19): siRNA sense strand
augaagagauggcuagaag

SEQ ID NO: 1876505 - RNA, 19 nt, Homo sapiens
  misc_RNA (1)...(19): siRNA sense strand
gaaaccaagaaacaacuag

SEQ ID NO: 1876506 - RNA, 19 nt, Homo sapiens
  misc_RNA (1)...(19): siRNA sense strand
gcagaagaaguugaagaug

SEQ ID NO: 1876507 - RNA, 19 nt, Homo sapiens
  misc_RNA (1)...(19): siRNA sense strand
caaaguuguccaagaaucu

SEQ ID NO: 1876508 - RNA, 19 nt, Homo sapiens
  misc_RNA (1)...(19): siRNA sense strand
gagaguuucauaauagaag

SEQ ID NO: 1876509 - RNA, 19 nt, Homo sapiens
  misc_RNA (1)...(19): siRNA sense strand
ggauuugccagagcuuaaa

SEQ ID NO: 1876510 - RNA, 19 nt, Homo sapiens
  misc_RNA (1)...(19): siRNA sense strand
caacuagaagaagaagaaa

SEQ ID NO: 1876511 - RNA, 19 nt, Homo sapiens
  misc_RNA (1)...(19): siRNA sense strand
ucuuaaagccccaggauua

SEQ ID NO: 1876512 - RNA, 19 nt, Homo sapiens
  misc_RNA (1)...(19): siRNA sense strand
gagacaucacaccaauuaa

SEQ ID NO: 1876513 - RNA, 19 nt, Homo sapiens
  misc_RNA (1)...(19): siRNA sense strand
aaaguuugccagaaagaga

SEQ ID NO: 1876514 - RNA, 19 nt, Homo sapiens
  misc_RNA (1)...(19): siRNA sense strand
gaugaagagauggcuagaa

SEQ ID NO: 1876515 - RNA, 19 nt, Homo sapiens
  misc_RNA (1)...(19): siRNA sense strand
cuuacuaugugaagaucuu

SEQ ID NO: 1876516 - RNA, 19 nt, Homo sapiens
  misc_RNA (1)...(19): siRNA sense strand
acucagaaaccaagaaaca

SEQ ID NO: 1876517 - RNA, 19 nt, Homo sapiens
  misc_RNA (1)...(19): siRNA sense strand
cauaauagaagagcagagu

SEQ ID NO: 1876518 - RNA, 19 nt, Homo sapiens
  misc_RNA (1)...(19): siRNA sense strand
gagauggcuagaagauaug

SEQ ID NO: 1876519 - RNA, 19 nt, Homo sapiens
  misc_RNA (1)...(19): siRNA sense strand
aaaccaagaaacaacuaga

SEQ ID NO: 1876520 - RNA, 19 nt, Homo sapiens
  misc_RNA (1)...(19): siRNA sense strand
caucacaccaauuaaagca

SEQ ID NO: 1876521 - RNA, 19 nt, Homo sapiens
  misc_RNA (1)...(19): siRNA sense strand
gaccaugccaauuaugaag

SEQ ID NO: 1876522 - RNA, 19 nt, Homo sapiens
  misc_RNA (1)...(19): siRNA sense strand
gagcuugaugugucagaug

SEQ ID NO: 1876523 - RNA, 19 nt, Homo sapiens
  misc_RNA (1)...(19): siRNA sense strand
uaagcacaaagcagaagaa

SEQ ID NO: 1876524 - RNA, 19 nt, Homo sapiens
  misc_RNA (1)...(19): siRNA sense strand
agaaaccaagaaacaacua

SEQ ID NO: 1876525 - RNA, 19 nt, Homo sapiens
  misc_RNA (1)...(19): siRNA sense strand
ugaagagcacugguacuug

SEQ ID NO: 1876526 - RNA, 19 nt, Homo sapiens
  misc_RNA (1)...(19): siRNA sense strand
uugagaaauugaugcuuca

SEQ ID NO: 1876527 - RNA, 19 nt, Homo sapiens
  misc_RNA (1)...(19): siRNA sense strand
ugccaauuaugaagaagau

SEQ ID NO: 1876528 - RNA, 19 nt, Homo sapiens
  misc_RNA (1)...(19): siRNA sense strand
aaacaguagagcuugaugu

SEQ ID NO: 1876529 - RNA, 19 nt, Homo sapiens
  misc_RNA (1)...(19): siRNA sense strand
aaaggggacuggacucaga

SEQ ID NO: 1876530 - RNA, 19 nt, Homo sapiens
  misc_RNA (1)...(19): siRNA sense strand
agaguuucuuacuauguga

SEQ ID NO: 1876531 - RNA, 19 nt, Homo sapiens
  misc_RNA (1)...(19): siRNA sense strand
gcuuaaagagaaagagagu

SEQ ID NO: 1876532 - RNA, 19 nt, Homo sapiens
  misc_RNA (1)...(19): siRNA sense strand
ucagaaaccaagaaacaac

SEQ ID NO: 1876533 - RNA, 19 nt, Homo sapiens
  misc_RNA (1)...(19): siRNA sense strand
acaaagcagaagaaguuga

SEQ ID NO: 1876534 - RNA, 19 nt, Homo sapiens
  misc_RNA (1)...(19): siRNA sense strand
gccgagagaaagacaaagu

SEQ ID NO: 1876535 - RNA, 19 nt, Homo sapiens
  misc_RNA (1)...(19): siRNA sense strand
uggauuugccagagcuuaa

SEQ ID NO: 1876536 - RNA, 19 nt, Homo sapiens
  misc_RNA (1)...(19): siRNA sense strand
aagagauggcuagaagaua

SEQ ID NO: 1876537 - RNA, 19 nt, Homo sapiens
  misc_RNA (1)...(19): siRNA sense strand
aagcagaagaaguugaaga

SEQ ID NO: 1876538 - RNA, 19 nt, Homo sapiens
  misc_RNA (1)...(19): siRNA sense strand
gaagaagccucggcagaua

SEQ ID NO: 1876539 - RNA, 19 nt, Homo sapiens
  misc_RNA (1)...(19): siRNA sense strand
guaauaaucuccaucaugu

SEQ ID NO: 1876540 - RNA, 19 nt, Homo sapiens
  misc_RNA (1)...(19): siRNA sense strand
ggaaugaacugaaaguagu

SEQ ID NO: 1876541 - RNA, 19 nt, Homo sapiens
  misc_RNA (1)...(19): siRNA sense strand
uaaagaugcucaaagaaga

SEQ ID NO: 1876542 - RNA, 19 nt, Homo sapiens
  misc_RNA (1)...(19): siRNA sense strand
gagauuuccuggacuagaa

SEQ ID NO: 1876543 - RNA, 19 nt, Homo sapiens
  misc_RNA (1)...(19): siRNA sense strand
ggagugcaguccuggagua

SEQ ID NO: 1876544 - RNA, 19 nt, Homo sapiens
  misc_RNA (1)...(19): siRNA sense strand
caguaaagaugcucaaaga

SEQ ID NO: 1876545 - RNA, 19 nt, Homo sapiens
  misc_RNA (1)...(19): siRNA sense strand
gaacugagaaacuuccaaa

SEQ ID NO: 1876546 - RNA, 19 nt, Homo sapiens
  misc_RNA (1)...(19): siRNA sense strand
ggaguaaaccacagaaaga

SEQ ID NO: 1876547 - RNA, 19 nt, Homo sapiens
  misc_RNA (1)...(19): siRNA sense strand
ggaaggguguuucaagcaa

SEQ ID NO: 1876548 - RNA, 19 nt, Homo sapiens
  misc_RNA (1)...(19): siRNA sense strand
ucugagcucuuacuagaua

SEQ ID NO: 1876549 - RNA, 19 nt, Homo sapiens
  misc_RNA (1)...(19): siRNA sense strand
guaaaccacagaaagauaa

SEQ ID NO: 1876550 - RNA, 19 nt, Homo sapiens
  misc_RNA (1)...(19): siRNA sense strand
cacagugacuugucuauga

SEQ ID NO: 1876551 - RNA, 19 nt, Homo sapiens
  misc_RNA (1)...(19): siRNA sense strand
caaugugccugcucuuuga

SEQ ID NO: 1876552 - RNA, 19 nt, Homo sapiens
  misc_RNA (1)...(19): siRNA sense strand
gaggagcuguggagaguug

SEQ ID NO: 1876553 - RNA, 19 nt, Homo sapiens
  misc_RNA (1)...(19): siRNA sense strand
guaaugcaguccuggcaaa

SEQ ID NO: 1876554 - RNA, 19 nt, Homo sapiens
  misc_RNA (1)...(19): siRNA sense strand
gaauugcaguucuugaauc

SEQ ID NO: 1876555 - RNA, 19 nt, Homo sapiens
  misc_RNA (1)...(19): siRNA sense strand
uaccauaacuacucucuau

SEQ ID NO: 1876556 - RNA, 19 nt, Homo sapiens
  misc_RNA (1)...(19): siRNA sense strand
gcagcaagcuucccagcau

SEQ ID NO: 1876557 - RNA, 19 nt, Homo sapiens
  misc_RNA (1)...(19): siRNA sense strand
gcaaaagaauggcugguaa

SEQ ID NO: 1876558 - RNA, 19 nt, Homo sapiens
  misc_RNA (1)...(19): siRNA sense strand
ugccacaucuagauuauaa

SEQ ID NO: 1876559 - RNA, 19 nt, Homo sapiens
  misc_RNA (1)...(19): siRNA sense strand
aagaauggcugguaaugga

SEQ ID NO: 1876560 - RNA, 19 nt, Homo sapiens
  misc_RNA (1)...(19): siRNA sense strand
ccacugguacauauucuua

SEQ ID NO: 1876561 - RNA, 19 nt, Homo sapiens
  misc_RNA (1)...(19): siRNA sense strand
gcagacuacuacaaagcua

SEQ ID NO: 1876562 - RNA, 19 nt, Homo sapiens
  misc_RNA (1)...(19): siRNA sense strand
guccagcuuugcaauauuu

SEQ ID NO: 1876563 - RNA, 19 nt, Homo sapiens
  misc_RNA (1)...(19): siRNA sense strand
gcagacagacccaguuuca

SEQ ID NO: 1876564 - RNA, 19 nt, Homo sapiens
  misc_RNA (1)...(19): siRNA sense strand
gcaauauuugugcuucuua

SEQ ID NO: 1876565 - RNA, 19 nt, Homo sapiens
  misc_RNA (1)...(19): siRNA sense strand
caucaccacuccucuugaa

SEQ ID NO: 1876566 - RNA, 19 nt, Homo sapiens
  misc_RNA (1)...(19): siRNA sense strand
uggcauggcuuaccucuca

SEQ ID NO: 1876567 - RNA, 19 nt, Homo sapiens
  misc_RNA (1)...(19): siRNA sense strand
guaaagaugcucaaagaag

SEQ ID NO: 1876568 - RNA, 19 nt, Homo sapiens
  misc_RNA (1)...(19): siRNA sense strand
ucaccacacugccuucuga

SEQ ID NO: 1876569 - RNA, 19 nt, Homo sapiens
  misc_RNA (1)...(19): siRNA sense strand
ggaagaugcaggacaguau

SEQ ID NO: 1876570 - RNA, 19 nt, Homo sapiens
  misc_RNA (1)...(19): siRNA sense strand
gcgagaacaugguggugaa

SEQ ID NO: 1876571 - RNA, 19 nt, Homo sapiens
  misc_RNA (1)...(19): siRNA sense strand
cuucugagcucuuacuaga

SEQ ID NO: 1876572 - RNA, 19 nt, Homo sapiens
  misc_RNA (1)...(19): siRNA sense strand
gacagcauauuccaaagug

SEQ ID NO: 1876573 - RNA, 19 nt, Homo sapiens
  misc_RNA (1)...(19): siRNA sense strand
cagcggaacugagaaacuu

SEQ ID NO: 1876574 - RNA, 19 nt, Homo sapiens
  misc_RNA (1)...(19): siRNA sense strand
ugaaacaguggaugccuua

SEQ ID NO: 1876575 - RNA, 19 nt, Homo sapiens
  misc_RNA (1)...(19): siRNA sense strand
ggaugccgcuccuucugaa

SEQ ID NO: 1876576 - RNA, 19 nt, Homo sapiens
  misc_RNA (1)...(19): siRNA sense strand
ugaaagaccgagugauuga

SEQ ID NO: 1876577 - RNA, 19 nt, Homo sapiens
  misc_RNA (1)...(19): siRNA sense strand
aagugaagaugaaaccuaa

SEQ ID NO: 1876578 - RNA, 19 nt, Homo sapiens
  misc_RNA (1)...(19): siRNA sense strand
agacagugaugauggcauu

SEQ ID NO: 1876579 - RNA, 19 nt, Homo sapiens
  misc_RNA (1)...(19): siRNA sense strand
gggaggagcuguggagagu

SEQ ID NO: 1876580 - RNA, 19 nt, Homo sapiens
  misc_RNA (1)...(19): siRNA sense strand
ucaccuacauacuccauga

SEQ ID NO: 1876581 - RNA, 19 nt, Homo sapiens
  misc_RNA (1)...(19): siRNA sense strand
ggccuggaaugaacugaaa

SEQ ID NO: 1876582 - RNA, 19 nt, Homo sapiens
  misc_RNA (1)...(19): siRNA sense strand
ucugggagcuugaggauuc

SEQ ID NO: 1876583 - RNA, 19 nt, Homo sapiens
  misc_RNA (1)...(19): siRNA sense strand
ucacuaugguggcaguaaa

SEQ ID NO: 1876584 - RNA, 19 nt, Homo sapiens
  misc_RNA (1)...(19): siRNA sense strand
cgucaacauuccacuggua

SEQ ID NO: 1876585 - RNA, 19 nt, Homo sapiens
  misc_RNA (1)...(19): siRNA sense strand
ggagagggagcguuuggaa

SEQ ID NO: 1876586 - RNA, 19 nt, Homo sapiens
  misc_RNA (1)...(19): siRNA sense strand
gcugaggcuuuguugugua

SEQ ID NO: 1876587 - RNA, 19 nt, Homo sapiens
  misc_RNA (1)...(19): siRNA sense strand
caagugaagaugaaaccua

SEQ ID NO: 1876588 - RNA, 19 nt, Homo sapiens
  misc_RNA (1)...(19): siRNA sense strand
ccacuccucuugaaacagu

SEQ ID NO: 1876589 - RNA, 19 nt, Homo sapiens
  misc_RNA (1)...(19): siRNA sense strand
aaacgacgcuaucccuauc

SEQ ID NO: 1876590 - RNA, 19 nt, Homo sapiens
  misc_RNA (1)...(19): siRNA sense strand
ccaaugacguccucaaagc

SEQ ID NO: 1876591 - RNA, 19 nt, Homo sapiens
  misc_RNA (1)...(19): siRNA sense strand
ccauaacuacucucuauug

SEQ ID NO: 1876592 - RNA, 19 nt, Homo sapiens
  misc_RNA (1)...(19): siRNA sense strand
uaacucgcccucccauaaa

SEQ ID NO: 1876593 - RNA, 19 nt, Homo sapiens
  misc_RNA (1)...(19): siRNA sense strand
gaggauucauaacguacaa

SEQ ID NO: 1876594 - RNA, 19 nt, Homo sapiens
  misc_RNA (1)...(19): siRNA sense strand
ccaucagugucuuggauaa

SEQ ID NO: 1876595 - RNA, 19 nt, Homo sapiens
  misc_RNA (1)...(19): siRNA sense strand
gcaguccuaccauguacua

SEQ ID NO: 1876596 - RNA, 19 nt, Homo sapiens
  misc_RNA (1)...(19): siRNA sense strand
agacccaguuucaccagua

SEQ ID NO: 1876597 - RNA, 19 nt, Homo sapiens
  misc_RNA (1)...(19): siRNA sense strand
gauccgagaugcauuugcu

SEQ ID NO: 1876598 - RNA, 19 nt, Homo sapiens
  misc_RNA (1)...(19): siRNA sense strand
cuacuccuauucccauuug

SEQ ID NO: 1876599 - RNA, 19 nt, Homo sapiens
  misc_RNA (1)...(19): siRNA sense strand
uggugaagcuggaaguuga

SEQ ID NO: 1876600 - RNA, 19 nt, Homo sapiens
  misc_RNA (1)...(19): siRNA sense strand
ccugagauuuccuggacua

SEQ ID NO: 1876601 - RNA, 19 nt, Homo sapiens
  misc_RNA (1)...(19): siRNA sense strand
gugcaguccuggaguagug

SEQ ID NO: 1876602 - RNA, 19 nt, Homo sapiens
  misc_RNA (1)...(19): siRNA sense strand
gcaggacaguaucgaugug

SEQ ID NO: 1876603 - RNA, 19 nt, Homo sapiens
  misc_RNA (1)...(19): siRNA sense strand
gaagcuggaaguugagguu

SEQ ID NO: 1876604 - RNA, 19 nt, Homo sapiens
  misc_RNA (1)...(19): siRNA sense strand
ccaaugugccugcucuuug

SEQ ID NO: 1876605 - RNA, 19 nt, Homo sapiens
  misc_RNA (1)...(19): siRNA sense strand
guggagcccugcaagugaa

SEQ ID NO: 1876606 - RNA, 19 nt, Homo sapiens
  misc_RNA (1)...(19): siRNA sense strand
cuacaaagcuaaugaaaac

SEQ ID NO: 1876607 - RNA, 19 nt, Homo sapiens
  misc_RNA (1)...(19): siRNA sense strand
gcuuaccucucagaacgua

SEQ ID NO: 1876608 - RNA, 19 nt, Homo sapiens
  misc_RNA (1)...(19): siRNA sense strand
caggcuuacuucccuauga

SEQ ID NO: 1876609 - RNA, 19 nt, Homo sapiens
  misc_RNA (1)...(19): siRNA sense strand
cuccaugacuguaauaauc

SEQ ID NO: 1876610 - RNA, 19 nt, Homo sapiens
  misc_RNA (1)...(19): siRNA sense strand
ggacagcauauuccaaagu

SEQ ID NO: 1876611 - RNA, 19 nt, Homo sapiens
  misc_RNA (1)...(19): siRNA sense strand
aacaguggaugccuuaguu

SEQ ID NO: 1876612 - RNA, 19 nt, Homo sapiens
  misc_RNA (1)...(19): siRNA sense strand
ggagcuugaggauucauaa

SEQ ID NO: 1876613 - RNA, 19 nt, Homo sapiens
  misc_RNA (1)...(19): siRNA sense strand
ggugaaaauugccgacuuu

SEQ ID NO: 1876614 - RNA, 19 nt, Homo sapiens
  misc_RNA (1)...(19): siRNA sense strand
aagagaaucagcagcagua

SEQ ID NO: 1876615 - RNA, 19 nt, Homo sapiens
  misc_RNA (1)...(19): siRNA sense strand
ugaggaggcccaagagcua

SEQ ID NO: 1876616 - RNA, 19 nt, Homo sapiens
  misc_RNA (1)...(19): siRNA sense strand
ucaagacugcagcuguuua

SEQ ID NO: 1876617 - RNA, 19 nt, Homo sapiens
  misc_RNA (1)...(19): siRNA sense strand
ugugaaagaccgagugauu

SEQ ID NO: 1876618 - RNA, 19 nt, Homo sapiens
  misc_RNA (1)...(19): siRNA sense strand
gcuccugaaucccacaaug

SEQ ID NO: 1876619 - RNA, 19 nt, Homo sapiens
  misc_RNA (1)...(19): siRNA sense strand
caagacugcagcuguuuau

SEQ ID NO: 1876620 - RNA, 19 nt, Homo sapiens
  misc_RNA (1)...(19): siRNA sense strand
gagagagcucgucaacauu

SEQ ID NO: 1876621 - RNA, 19 nt, Homo sapiens
  misc_RNA (1)...(19): siRNA sense strand
caucggagagggagcguuu

SEQ ID NO: 1876622 - RNA, 19 nt, Homo sapiens
  misc_RNA (1)...(19): siRNA sense strand
aaagcaguccuaccaugua

SEQ ID NO: 1876623 - RNA, 19 nt, Homo sapiens
  misc_RNA (1)...(19): siRNA sense strand
uugaauacauggccuaugg

SEQ ID NO: 1876624 - RNA, 19 nt, Homo sapiens
  misc_RNA (1)...(19): siRNA sense strand
gaauuugacaacccuaaca

SEQ ID NO: 1876625 - RNA, 19 nt, Homo sapiens
  misc_RNA (1)...(19): siRNA sense strand
gcaguaaagaugcucaaag

SEQ ID NO: 1876626 - RNA, 19 nt, Homo sapiens
  misc_RNA (1)...(19): siRNA sense strand
acacaugcauagcuaccaa

SEQ ID NO: 1876627 - RNA, 19 nt, Homo sapiens
  misc_RNA (1)...(19): siRNA sense strand
gaagaugcaggacaguauc

SEQ ID NO: 1876628 - RNA, 19 nt, Homo sapiens
  misc_RNA (1)...(19): siRNA sense strand
auaacucgcccucccauaa

SEQ ID NO: 1876629 - RNA, 19 nt, Homo sapiens
  misc_RNA (1)...(19): siRNA sense strand
gaauggaguaaaccacaga

SEQ ID NO: 1876630 - RNA, 19 nt, Homo sapiens
  misc_RNA (1)...(19): siRNA sense strand
gcauagcuaccaauaagca

SEQ ID NO: 1876631 - RNA, 19 nt, Homo sapiens
  misc_RNA (1)...(19): siRNA sense strand
augcauagcuaccaauaag

SEQ ID NO: 1876632 - RNA, 19 nt, Homo sapiens
  misc_RNA (1)...(19): siRNA sense strand
acucaagacugcagcuguu

SEQ ID NO: 1876633 - RNA, 19 nt, Homo sapiens
  misc_RNA (1)...(19): siRNA sense strand
accaucaccuggauugaaa

SEQ ID NO: 1876634 - RNA, 19 nt, Homo sapiens
  misc_RNA (1)...(19): siRNA sense strand
gugaagcuauuaggagugu

SEQ ID NO: 1876635 - RNA, 19 nt, Homo sapiens
  misc_RNA (1)...(19): siRNA sense strand
ccucucagaacguaaguuu

SEQ ID NO: 1876636 - RNA, 19 nt, Homo sapiens
  misc_RNA (1)...(19): siRNA sense strand
gacccaguuucaccaguau

SEQ ID NO: 1876637 - RNA, 19 nt, Homo sapiens
  misc_RNA (1)...(19): siRNA sense strand
ucucagaacguaaguuugu

SEQ ID NO: 1876638 - RNA, 19 nt, Homo sapiens
  misc_RNA (1)...(19): siRNA sense strand
gagagcagguggagaacua

SEQ ID NO: 1876639 - RNA, 19 nt, Homo sapiens
  misc_RNA (1)...(19): siRNA sense strand
guuccaggcuuaucuauca

SEQ ID NO: 1876640 - RNA, 19 nt, Homo sapiens
  misc_RNA (1)...(19): siRNA sense strand
gcuucuaguuccaggcuua

SEQ ID NO: 1876641 - RNA, 19 nt, Homo sapiens
  misc_RNA (1)...(19): siRNA sense strand
gcuuaucuaucaugugcua

SEQ ID NO: 1876642 - RNA, 19 nt, Homo sapiens
  misc_RNA (1)...(19): siRNA sense strand
ugagagagcagguggagaa

SEQ ID NO: 1876643 - RNA, 19 nt, Homo sapiens
  misc_RNA (1)...(19): siRNA sense strand
ggaucuggcuucucucucu

SEQ ID NO: 1876644 - RNA, 19 nt, Homo sapiens
  misc_RNA (1)...(19): siRNA sense strand
gcuggucacugccucaugu

SEQ ID NO: 1876645 - RNA, 19 nt, Homo sapiens
  misc_RNA (1)...(19): siRNA sense strand
ggaggcgccugaagaaggu

SEQ ID NO: 1876646 - RNA, 19 nt, Homo sapiens
  misc_RNA (1)...(19): siRNA sense strand
caaccaggcuuucgaaacc

SEQ ID NO: 1876647 - RNA, 19 nt, Homo sapiens
  misc_RNA (1)...(19): siRNA sense strand
ggaaugccauccgcuacau

SEQ ID NO: 1876648 - RNA, 19 nt, Homo sapiens
  misc_RNA (1)...(19): siRNA sense strand
aaauguauaugccacagau

SEQ ID NO: 1876649 - RNA, 19 nt, Homo sapiens
  misc_RNA (1)...(19): siRNA sense strand
gaucaccuccucagagcaa

SEQ ID NO: 1876650 - RNA, 19 nt, Homo sapiens
  misc_RNA (1)...(19): siRNA sense strand
gcaaagccugcaagaggaa

SEQ ID NO: 1876651 - RNA, 19 nt, Homo sapiens
  misc_RNA (1)...(19): siRNA sense strand
cuacgacggcuccugcaua

SEQ ID NO: 1876652 - RNA, 19 nt, Homo sapiens
  misc_RNA (1)...(19): siRNA sense strand
gcuucucucucuccaguug

SEQ ID NO: 1876653 - RNA, 19 nt, Homo sapiens
  misc_RNA (1)...(19): siRNA sense strand
gcagguggagaacuacuau

SEQ ID NO: 1876654 - RNA, 19 nt, Homo sapiens
  misc_RNA (1)...(19): siRNA sense strand
ucgagagccugcaggaguu

SEQ ID NO: 1876655 - RNA, 19 nt, Homo sapiens
  misc_RNA (1)...(19): siRNA sense strand
ggucaaccaggcuuucgaa

SEQ ID NO: 1876656 - RNA, 19 nt, Homo sapiens
  misc_RNA (1)...(19): siRNA sense strand
gcggaaggcagccacuaug

SEQ ID NO: 1876657 - RNA, 19 nt, Homo sapiens
  misc_RNA (1)...(19): siRNA sense strand
ugcaggaguugcugagaga

SEQ ID NO: 1876658 - RNA, 19 nt, Homo sapiens
  misc_RNA (1)...(19): siRNA sense strand
gaaggucaaccaggcuuuc

SEQ ID NO: 1876659 - RNA, 19 nt, Homo sapiens
  misc_RNA (1)...(19): siRNA sense strand
gauggcaugcccgaaugua

SEQ ID NO: 1876660 - RNA, 19 nt, Homo sapiens
  misc_RNA (1)...(19): siRNA sense strand
ccaggcuuaucuaucaugu

SEQ ID NO: 1876661 - RNA, 19 nt, Homo sapiens
  misc_RNA (1)...(19): siRNA sense strand
uguauaugccacagauaaa

SEQ ID NO: 1876662 - RNA, 19 nt, Homo sapiens
  misc_RNA (1)...(19): siRNA sense strand
ccaguugccagcaccgauu

SEQ ID NO: 1876663 - RNA, 19 nt, Homo sapiens
  misc_RNA (1)...(19): siRNA sense strand
gauugcuuauccaacauag

SEQ ID NO: 1876664 - RNA, 19 nt, Homo sapiens
  misc_RNA (1)...(19): siRNA sense strand
uacgacggcuccugcauac

SEQ ID NO: 1876665 - RNA, 19 nt, Homo sapiens
  misc_RNA (1)...(19): siRNA sense strand
caaauguauaugccacaga

SEQ ID NO: 1876666 - RNA, 19 nt, Homo sapiens
  misc_RNA (1)...(19): siRNA sense strand
cugauggcaugcccgaaug

SEQ ID NO: 1876667 - RNA, 19 nt, Homo sapiens
  misc_RNA (1)...(19): siRNA sense strand
gcaaagaucucuguauugg

SEQ ID NO: 1876668 - RNA, 19 nt, Homo sapiens
  misc_RNA (1)...(19): siRNA sense strand
gugcaaagaucucuguauu

SEQ ID NO: 1876669 - RNA, 19 nt, Homo sapiens
  misc_RNA (1)...(19): siRNA sense strand
ggaagagacuggugcaaag

SEQ ID NO: 1876670 - RNA, 19 nt, Homo sapiens
  misc_RNA (1)...(19): siRNA sense strand
cauaagaacaugaaacuga

SEQ ID NO: 1876671 - RNA, 19 nt, Homo sapiens
  misc_RNA (1)...(19): siRNA sense strand
uggaggaagucaagaaauu

SEQ ID NO: 1876672 - RNA, 19 nt, Homo sapiens
  misc_RNA (1)...(19): siRNA sense strand
gaggagaauuacuuggauu

SEQ ID NO: 1876673 - RNA, 19 nt, Homo sapiens
  misc_RNA (1)...(19): siRNA sense strand
ccaaauaugcccacuugaa

SEQ ID NO: 1876674 - RNA, 19 nt, Homo sapiens
  misc_RNA (1)...(19): siRNA sense strand
ggagaauuacuuggauuua

SEQ ID NO: 1876675 - RNA, 19 nt, Homo sapiens
  misc_RNA (1)...(19): siRNA sense strand
gcacccauauggacguuau

SEQ ID NO: 1876676 - RNA, 19 nt, Homo sapiens
  misc_RNA (1)...(19): siRNA sense strand
cggcagaaauugagaagau

SEQ ID NO: 1876677 - RNA, 19 nt, Homo sapiens
  misc_RNA (1)...(19): siRNA sense strand
ggaggaagucaagaaauuu

SEQ ID NO: 1876678 - RNA, 19 nt, Homo sapiens
  misc_RNA (1)...(19): siRNA sense strand
caaauaugcccacuugaau

SEQ ID NO: 1876679 - RNA, 19 nt, Homo sapiens
  misc_RNA (1)...(19): siRNA sense strand
gaaagagcgagugcugaua

SEQ ID NO: 1876680 - RNA, 19 nt, Homo sapiens
  misc_RNA (1)...(19): siRNA sense strand
uaugauggaugauaucugu

SEQ ID NO: 1876681 - RNA, 19 nt, Homo sapiens
  misc_RNA (1)...(19): siRNA sense strand
gaauauggaucugcauguc

SEQ ID NO: 1876682 - RNA, 19 nt, Homo sapiens
  misc_RNA (1)...(19): siRNA sense strand
ggaucugcaugucuucauu

SEQ ID NO: 1876683 - RNA, 19 nt, Homo sapiens
  misc_RNA (1)...(19): siRNA sense strand
gaaauugagaagauucaga

SEQ ID NO: 1876684 - RNA, 19 nt, Homo sapiens
  misc_RNA (1)...(19): siRNA sense strand
uaccggauaugauggauga

SEQ ID NO: 1876685 - RNA, 19 nt, Homo sapiens
  misc_RNA (1)...(19): siRNA sense strand
gagcuguccuacuugaaug

SEQ ID NO: 1876686 - RNA, 19 nt, Homo sapiens
  misc_RNA (1)...(19): siRNA sense strand
acaagggaauacaaucaaa

SEQ ID NO: 1876687 - RNA, 19 nt, Homo sapiens
  misc_RNA (1)...(19): siRNA sense strand
aaauaugcccacuugaaua

SEQ ID NO: 1876688 - RNA, 19 nt, Homo sapiens
  misc_RNA (1)...(19): siRNA sense strand
ccagaaacauaugaagaau

SEQ ID NO: 1876689 - RNA, 19 nt, Homo sapiens
  misc_RNA (1)...(19): siRNA sense strand
caagcaguaucccaaguuc

SEQ ID NO: 1876690 - RNA, 19 nt, Homo sapiens
  misc_RNA (1)...(19): siRNA sense strand
cuagagcuguccuacuuga

SEQ ID NO: 1876691 - RNA, 19 nt, Homo sapiens
  misc_RNA (1)...(19): siRNA sense strand
gaagagacuggugcaaaga

SEQ ID NO: 1876692 - RNA, 19 nt, Homo sapiens
  misc_RNA (1)...(19): siRNA sense strand
aggaugaugaggagaauua

SEQ ID NO: 1876693 - RNA, 19 nt, Homo sapiens
  misc_RNA (1)...(19): siRNA sense strand
ccacaagggaauacaauca

SEQ ID NO: 1876694 - RNA, 19 nt, Homo sapiens
  misc_RNA (1)...(19): siRNA sense strand
ugauaccugucaagcagua

SEQ ID NO: 1876695 - RNA, 19 nt, Homo sapiens
  misc_RNA (1)...(19): siRNA sense strand
ggcagaaauugagaagauu

SEQ ID NO: 1876696 - RNA, 19 nt, Homo sapiens
  misc_RNA (1)...(19): siRNA sense strand
acaaguaccugcccgaacu

SEQ ID NO: 1876697 - RNA, 19 nt, Homo sapiens
  misc_RNA (1)...(19): siRNA sense strand
ucaaaagacugcaggaaga

SEQ ID NO: 1876698 - RNA, 19 nt, Homo sapiens
  misc_RNA (1)...(19): siRNA sense strand
gcagaaauugagaagauuc

SEQ ID NO: 1876699 - RNA, 19 nt, Homo sapiens
  misc_RNA (1)...(19): siRNA sense strand
gaacaugaaacugaaagag

SEQ ID NO: 1876700 - RNA, 19 nt, Homo sapiens
  misc_RNA (1)...(19): siRNA sense strand
agacaaagccaaggaggaa

SEQ ID NO: 1876701 - RNA, 19 nt, Homo sapiens
  misc_RNA (1)...(19): siRNA sense strand
acagagagcacccauaugg

SEQ ID NO: 1876702 - RNA, 19 nt, Homo sapiens
  misc_RNA (1)...(19): siRNA sense strand
gaggaagucaagaaauuuc

SEQ ID NO: 1876703 - RNA, 19 nt, Homo sapiens
  misc_RNA (1)...(19): siRNA sense strand
auacagagagcacccauau

SEQ ID NO: 1876704 - RNA, 19 nt, Homo sapiens
  misc_RNA (1)...(19): siRNA sense strand
ugaggagaauuacuuggau

SEQ ID NO: 1876705 - RNA, 19 nt, Homo sapiens
  misc_RNA (1)...(19): siRNA sense strand
ggaggaagagcugcgcaaa

SEQ ID NO: 1876706 - RNA, 19 nt, Homo sapiens
  misc_RNA (1)...(19): siRNA sense strand
guaccugcccgaacucaug

SEQ ID NO: 1876707 - RNA, 19 nt, Homo sapiens
  misc_RNA (1)...(19): siRNA sense strand
gaucugcaugucuucauug

SEQ ID NO: 1876708 - RNA, 19 nt, Homo sapiens
  misc_RNA (1)...(19): siRNA sense strand
gcuauuacagccagaguca

SEQ ID NO: 1876709 - RNA, 19 nt, Homo sapiens
  misc_RNA (1)...(19): siRNA sense strand
uugagaagauucagaaagg

SEQ ID NO: 1876710 - RNA, 19 nt, Homo sapiens
  misc_RNA (1)...(19): siRNA sense strand
ggaccacaagggaauacaa

SEQ ID NO: 1876711 - RNA, 19 nt, Homo sapiens
  misc_RNA (1)...(19): siRNA sense strand
ggacucagaauauuaugac

SEQ ID NO: 1876712 - RNA, 19 nt, Homo sapiens
  misc_RNA (1)...(19): siRNA sense strand
cagccucggucaagaugga

SEQ ID NO: 1876713 - RNA, 19 nt, Homo sapiens
  misc_RNA (1)...(19): siRNA sense strand
cagaauauuaugacuaugg

SEQ ID NO: 1876714 - RNA, 19 nt, Homo sapiens
  misc_RNA (1)...(19): siRNA sense strand
ugagaagauucagaaagga

SEQ ID NO: 1876715 - RNA, 19 nt, Homo sapiens
  misc_RNA (1)...(19): siRNA sense strand
gaugauacauacgcagaac

SEQ ID NO: 1876716 - RNA, 19 nt, Homo sapiens
  misc_RNA (1)...(19): siRNA sense strand
aggaagagcugcgcaaagg

SEQ ID NO: 1876717 - RNA, 19 nt, Homo sapiens
  misc_RNA (1)...(19): siRNA sense strand
ugaaagagcgagugcugau

SEQ ID NO: 1876718 - RNA, 19 nt, Homo sapiens
  misc_RNA (1)...(19): siRNA sense strand
uucuagagcuguccuacuu

SEQ ID NO: 1876719 - RNA, 19 nt, Homo sapiens
  misc_RNA (1)...(19): siRNA sense strand
gagcacccauauggacguu

SEQ ID NO: 1876720 - RNA, 19 nt, Homo sapiens
  misc_RNA (1)...(19): siRNA sense strand
caccagaaacauaugaaga

SEQ ID NO: 1876721 - RNA, 19 nt, Homo sapiens
  misc_RNA (1)...(19): siRNA sense strand
gaccacaagggaauacaau

SEQ ID NO: 1876722 - RNA, 19 nt, Homo sapiens
  misc_RNA (1)...(19): siRNA sense strand
caaggggacucagaauauu

SEQ ID NO: 1876723 - RNA, 19 nt, Homo sapiens
  misc_RNA (1)...(19): siRNA sense strand
cgaaggcuacgaaggcuau

SEQ ID NO: 1876724 - RNA, 19 nt, Homo sapiens
  misc_RNA (1)...(19): siRNA sense strand
ggaauacaaucaaaagacu

SEQ ID NO: 1876725 - RNA, 19 nt, Homo sapiens
  misc_RNA (1)...(19): siRNA sense strand
ucaagcaguaucccaaguu

SEQ ID NO: 1876726 - RNA, 19 nt, Homo sapiens
  misc_RNA (1)...(19): siRNA sense strand
cauggaggaagucaagaaa

SEQ ID NO: 1876727 - RNA, 19 nt, Homo sapiens
  misc_RNA (1)...(19): siRNA sense strand
aaaggaugaugaggagaau

SEQ ID NO: 1876728 - RNA, 19 nt, Homo sapiens
  misc_RNA (1)...(19): siRNA sense strand
cauacgcagaacaaaguua

SEQ ID NO: 1876729 - RNA, 19 nt, Homo sapiens
  misc_RNA (1)...(19): siRNA sense strand
ucuaguaccggauaugaug

SEQ ID NO: 1876730 - RNA, 19 nt, Homo sapiens
  misc_RNA (1)...(19): siRNA sense strand
auauggaucugcaugucuu

SEQ ID NO: 1876731 - RNA, 19 nt, Homo sapiens
  misc_RNA (1)...(19): siRNA sense strand
ccacagccucggucaagau

SEQ ID NO: 1876732 - RNA, 19 nt, Homo sapiens
  misc_RNA (1)...(19): siRNA sense strand
agauggagccagagaacaa

SEQ ID NO: 1876733 - RNA, 19 nt, Homo sapiens
  misc_RNA (1)...(19): siRNA sense strand
ugauacauacgcagaacaa

SEQ ID NO: 1876734 - RNA, 19 nt, Homo sapiens
  misc_RNA (1)...(19): siRNA sense strand
gcaccagaaacauaugaag

SEQ ID NO: 1876735 - RNA, 19 nt, Homo sapiens
  misc_RNA (1)...(19): siRNA sense strand
ccggauaugauggaugaua

SEQ ID NO: 1876736 - RNA, 19 nt, Homo sapiens
  misc_RNA (1)...(19): siRNA sense strand
aaauuucuaguaccggaua

SEQ ID NO: 1876737 - RNA, 19 nt, Homo sapiens
  misc_RNA (1)...(19): siRNA sense strand
caagauggagccagagaac

SEQ ID NO: 1876738 - RNA, 19 nt, Homo sapiens
  misc_RNA (1)...(19): siRNA sense strand
ccauggaggaagucaagaa

SEQ ID NO: 1876739 - RNA, 19 nt, Homo sapiens
  misc_RNA (1)...(19): siRNA sense strand
gaggaagagcugcgcaaag

SEQ ID NO: 1876740 - RNA, 19 nt, Homo sapiens
  misc_RNA (1)...(19): siRNA sense strand
ugugaggcuuaugcucuua

SEQ ID NO: 1876741 - RNA, 19 nt, Homo sapiens
  misc_RNA (1)...(19): siRNA sense strand
uauuaugacuauggacaug

SEQ ID NO: 1876742 - RNA, 19 nt, Homo sapiens
  misc_RNA (1)...(19): siRNA sense strand
gggacucagaauauuauga

SEQ ID NO: 1876743 - RNA, 19 nt, Homo sapiens
  misc_RNA (1)...(19): siRNA sense strand
cacaagggaauacaaucaa

SEQ ID NO: 1876744 - RNA, 19 nt, Homo sapiens
  misc_RNA (1)...(19): siRNA sense strand
accagaaacauaugaagaa

SEQ ID NO: 1876745 - RNA, 19 nt, Homo sapiens
  misc_RNA (1)...(19): siRNA sense strand
acaaagccaaggaggaaga

SEQ ID NO: 1876746 - RNA, 19 nt, Homo sapiens
  misc_RNA (1)...(19): siRNA sense strand
agagacuggugcaaagauc

SEQ ID NO: 1876747 - RNA, 19 nt, Homo sapiens
  misc_RNA (1)...(19): siRNA sense strand
ucagaaaggagacucaaaa

SEQ ID NO: 1876748 - RNA, 19 nt, Homo sapiens
  misc_RNA (1)...(19): siRNA sense strand
uacauacgcagaacaaagu

SEQ ID NO: 1876749 - RNA, 19 nt, Homo sapiens
  misc_RNA (1)...(19): siRNA sense strand
aaagagcgagugcugauac

SEQ ID NO: 1876750 - RNA, 19 nt, Homo sapiens
  misc_RNA (1)...(19): siRNA sense strand
ggugcaaagaucucuguau

SEQ ID NO: 1876751 - RNA, 19 nt, Homo sapiens
  misc_RNA (1)...(19): siRNA sense strand
gccacagccucggucaaga

SEQ ID NO: 1876752 - RNA, 19 nt, Homo sapiens
  misc_RNA (1)...(19): siRNA sense strand
gauacauacgcagaacaaa

SEQ ID NO: 1876753 - RNA, 19 nt, Homo sapiens
  misc_RNA (1)...(19): siRNA sense strand
ugauaucugucaggagcaa

SEQ ID NO: 1876754 - RNA, 19 nt, Homo sapiens
  misc_RNA (1)...(19): siRNA sense strand
uaugcccacuugaauaugg

SEQ ID NO: 1876755 - RNA, 19 nt, Homo sapiens
  misc_RNA (1)...(19): siRNA sense strand
ugagagacaaagccaagga

SEQ ID NO: 1876756 - RNA, 19 nt, Homo sapiens
  misc_RNA (1)...(19): siRNA sense strand
ccacuugaauauggaucug

SEQ ID NO: 1876757 - RNA, 19 nt, Homo sapiens
  misc_RNA (1)...(19): siRNA sense strand
cagaaauugagaagauuca

SEQ ID NO: 1876758 - RNA, 19 nt, Homo sapiens
  misc_RNA (1)...(19): siRNA sense strand
ugaagggagcauacagaga

SEQ ID NO: 1876759 - RNA, 19 nt, Homo sapiens
  misc_RNA (1)...(19): siRNA sense strand
ucaaggggacucagaauau

SEQ ID NO: 1876760 - RNA, 19 nt, Homo sapiens
  misc_RNA (1)...(19): siRNA sense strand
caguaucccaaguucaauu

SEQ ID NO: 1876761 - RNA, 19 nt, Homo sapiens
  misc_RNA (1)...(19): siRNA sense strand
gucaggagcaauuucuaga

SEQ ID NO: 1876762 - RNA, 19 nt, Homo sapiens
  misc_RNA (1)...(19): siRNA sense strand
ugaggcuuaugcucuuaug

SEQ ID NO: 1876763 - RNA, 19 nt, Homo sapiens
  misc_RNA (1)...(19): siRNA sense strand
ugaauauggaucugcaugu

SEQ ID NO: 1876764 - RNA, 19 nt, Homo sapiens
  misc_RNA (1)...(19): siRNA sense strand
ccccaaauaugcccacuug

SEQ ID NO: 1876765 - RNA, 19 nt, Homo sapiens
  misc_RNA (1)...(19): siRNA sense strand
gucaagcaguaucccaagu

SEQ ID NO: 1876766 - RNA, 19 nt, Homo sapiens
  misc_RNA (1)...(19): siRNA sense strand
aggagaauuacuuggauuu

SEQ ID NO: 1876767 - RNA, 19 nt, Homo sapiens
  misc_RNA (1)...(19): siRNA sense strand
cgaaagagaucaagauaug

SEQ ID NO: 1876768 - RNA, 19 nt, Homo sapiens
  misc_RNA (1)...(19): siRNA sense strand
ggagucaacuucccaauug

SEQ ID NO: 1876769 - RNA, 19 nt, Homo sapiens
  misc_RNA (1)...(19): siRNA sense strand
gaacauggcacgaaagaga

SEQ ID NO: 1876770 - RNA, 19 nt, Homo sapiens
  misc_RNA (1)...(19): siRNA sense strand
uuaaggagcuugauuuguu

SEQ ID NO: 1876771 - RNA, 19 nt, Homo sapiens
  misc_RNA (1)...(19): siRNA sense strand
ccaagaauccuccagguua

SEQ ID NO: 1876772 - RNA, 19 nt, Homo sapiens
  misc_RNA (1)...(19): siRNA sense strand
gcaccaccaucccggaaua

SEQ ID NO: 1876773 - RNA, 19 nt, Homo sapiens
  misc_RNA (1)...(19): siRNA sense strand
gaccagaaggguaagauua

SEQ ID NO: 1876774 - RNA, 19 nt, Homo sapiens
  misc_RNA (1)...(19): siRNA sense strand
uaucagaacuuguaagagu

SEQ ID NO: 1876775 - RNA, 19 nt, Homo sapiens
  misc_RNA (1)...(19): siRNA sense strand
ggagcaagauucuggacaa

SEQ ID NO: 1876776 - RNA, 19 nt, Homo sapiens
  misc_RNA (1)...(19): siRNA sense strand
aaagagcagucaaagauga

SEQ ID NO: 1876777 - RNA, 19 nt, Homo sapiens
  misc_RNA (1)...(19): siRNA sense strand
gucaaaggaugaagaaaga

SEQ ID NO: 1876778 - RNA, 19 nt, Homo sapiens
  misc_RNA (1)...(19): siRNA sense strand
uaaggagcuugauuuguuu

SEQ ID NO: 1876779 - RNA, 19 nt, Homo sapiens
  misc_RNA (1)...(19): siRNA sense strand
gcaauugccuauacuuggu

SEQ ID NO: 1876780 - RNA, 19 nt, Homo sapiens
  misc_RNA (1)...(19): siRNA sense strand
caauguaucagaacuugua

SEQ ID NO: 1876781 - RNA, 19 nt, Homo sapiens
  misc_RNA (1)...(19): siRNA sense strand
agaaagagcagucaaagau

SEQ ID NO: 1876782 - RNA, 19 nt, Homo sapiens
  misc_RNA (1)...(19): siRNA sense strand
acaaugauccugccaagaa

SEQ ID NO: 1876783 - RNA, 19 nt, Homo sapiens
  misc_RNA (1)...(19): siRNA sense strand
gaaagagcagucaaagaug

SEQ ID NO: 1876784 - RNA, 19 nt, Homo sapiens
  misc_RNA (1)...(19): siRNA sense strand
ugaaaagccugaaaucaaa

SEQ ID NO: 1876785 - RNA, 19 nt, Homo sapiens
  misc_RNA (1)...(19): siRNA sense strand
caaaagacccaaaacuaua

SEQ ID NO: 1876786 - RNA, 19 nt, Homo sapiens
  misc_RNA (1)...(19): siRNA sense strand
ccacauguccgugcaauug

SEQ ID NO: 1876787 - RNA, 19 nt, Homo sapiens
  misc_RNA (1)...(19): siRNA sense strand
aggauacucugaagaacua

SEQ ID NO: 1876788 - RNA, 19 nt, Homo sapiens
  misc_RNA (1)...(19): siRNA sense strand
gcacgaaagagaucaagau

SEQ ID NO: 1876789 - RNA, 19 nt, Homo sapiens
  misc_RNA (1)...(19): siRNA sense strand
cauaucacaguaucaguua

SEQ ID NO: 1876790 - RNA, 19 nt, Homo sapiens
  misc_RNA (1)...(19): siRNA sense strand
gaagaaagagcagucaaag

SEQ ID NO: 1876791 - RNA, 19 nt, Homo sapiens
  misc_RNA (1)...(19): siRNA sense strand
gcaaaagacccaaaacuau

SEQ ID NO: 1876792 - RNA, 19 nt, Homo sapiens
  misc_RNA (1)...(19): siRNA sense strand
gccaaacugcgcaaagaua

SEQ ID NO: 1876793 - RNA, 19 nt, Homo sapiens
  misc_RNA (1)...(19): siRNA sense strand
cggaauaccuggaguugca

SEQ ID NO: 1876794 - RNA, 19 nt, Homo sapiens
  misc_RNA (1)...(19): siRNA sense strand
gaaguccaagccacaauga

SEQ ID NO: 1876795 - RNA, 19 nt, Homo sapiens
  misc_RNA (1)...(19): siRNA sense strand
gauaugucuucuccgacua

SEQ ID NO: 1876796 - RNA, 19 nt, Homo sapiens
  misc_RNA (1)...(19): siRNA sense strand
caagaauccuccagguuac

SEQ ID NO: 1876797 - RNA, 19 nt, Homo sapiens
  misc_RNA (1)...(19): siRNA sense strand
gagcaagauucuggacaau

SEQ ID NO: 1876798 - RNA, 19 nt, Homo sapiens
  misc_RNA (1)...(19): siRNA sense strand
ugaagaaagagcagucaaa

SEQ ID NO: 1876799 - RNA, 19 nt, Homo sapiens
  misc_RNA (1)...(19): siRNA sense strand
gaacuauguaccuucuuau

SEQ ID NO: 1876800 - RNA, 19 nt, Homo sapiens
  misc_RNA (1)...(19): siRNA sense strand
caaugauccugccaagaau

SEQ ID NO: 1876801 - RNA, 19 nt, Homo sapiens
  misc_RNA (1)...(19): siRNA sense strand
ucuggagucuucaauguau

SEQ ID NO: 1876802 - RNA, 19 nt, Homo sapiens
  misc_RNA (1)...(19): siRNA sense strand
aaucuggagucuucaaugu

SEQ ID NO: 1876803 - RNA, 19 nt, Homo sapiens
  misc_RNA (1)...(19): siRNA sense strand
gaaaacgcaaguacuuuaa

SEQ ID NO: 1876804 - RNA, 19 nt, Homo sapiens
  misc_RNA (1)...(19): siRNA sense strand
cacgaaagagaucaagaua

SEQ ID NO: 1876805 - RNA, 19 nt, Homo sapiens
  misc_RNA (1)...(19): siRNA sense strand
caaccauacuaucaugaca

SEQ ID NO: 1876806 - RNA, 19 nt, Homo sapiens
  misc_RNA (1)...(19): siRNA sense strand
caacuucccaauuggagaa

SEQ ID NO: 1876807 - RNA, 19 nt, Homo sapiens
  misc_RNA (1)...(19): siRNA sense strand
ccaaacugcgcaaagauau

SEQ ID NO: 1876808 - RNA, 19 nt, Homo sapiens
  misc_RNA (1)...(19): siRNA sense strand
gagaagcgaaugucaaagg

SEQ ID NO: 1876809 - RNA, 19 nt, Homo sapiens
  misc_RNA (1)...(19): siRNA sense strand
ggaaguccaagccacaaug

SEQ ID NO: 1876810 - RNA, 19 nt, Homo sapiens
  misc_RNA (1)...(19): siRNA sense strand
gaaugucaaaggaugaaga

SEQ ID NO: 1876811 - RNA, 19 nt, Homo sapiens
  misc_RNA (1)...(19): siRNA sense strand
cgaaaacgcaaguacuuua

SEQ ID NO: 1876812 - RNA, 19 nt, Homo sapiens
  misc_RNA (1)...(19): siRNA sense strand
gaaagagaucaagauaugu

SEQ ID NO: 1876813 - RNA, 19 nt, Homo sapiens
  misc_RNA (1)...(19): siRNA sense strand
caguuaaggagcuugauuu

SEQ ID NO: 1876814 - RNA, 19 nt, Homo sapiens
  misc_RNA (1)...(19): siRNA sense strand
agaagcgaaugucaaagga

SEQ ID NO: 1876815 - RNA, 19 nt, Homo sapiens
  misc_RNA (1)...(19): siRNA sense strand
caaacugcgcaaagauauu

SEQ ID NO: 1876816 - RNA, 19 nt, Homo sapiens
  misc_RNA (1)...(19): siRNA sense strand
agucgaacauggcacgaaa

SEQ ID NO: 1876817 - RNA, 19 nt, Homo sapiens
  misc_RNA (1)...(19): siRNA sense strand
caagccaaccauacuauca

SEQ ID NO: 1876818 - RNA, 19 nt, Homo sapiens
  misc_RNA (1)...(19): siRNA sense strand
uguaaaaucuggagucuuc

SEQ ID NO: 1876819 - RNA, 19 nt, Homo sapiens
  misc_RNA (1)...(19): siRNA sense strand
ccacaucauaucacaguau

SEQ ID NO: 1876820 - RNA, 19 nt, Homo sapiens
  misc_RNA (1)...(19): siRNA sense strand
agucuucaauguaucagaa

SEQ ID NO: 1876821 - RNA, 19 nt, Homo sapiens
  misc_RNA (1)...(19): siRNA sense strand
aaacagaagugggcaucca

SEQ ID NO: 1876822 - RNA, 19 nt, Homo sapiens
  misc_RNA (1)...(19): siRNA sense strand
agccugaaaucaaacagaa

SEQ ID NO: 1876823 - RNA, 19 nt, Homo sapiens
  misc_RNA (1)...(19): siRNA sense strand
agugucaucucaacucgaa

SEQ ID NO: 1876824 - RNA, 19 nt, Homo sapiens
  misc_RNA (1)...(19): siRNA sense strand
uauccaaucccgaccagaa

SEQ ID NO: 1876825 - RNA, 19 nt, Homo sapiens
  misc_RNA (1)...(19): siRNA sense strand
aaacugcgcaaagauauuc

SEQ ID NO: 1876826 - RNA, 19 nt, Homo sapiens
  misc_RNA (1)...(19): siRNA sense strand
cugaagaacuauguaccuu

SEQ ID NO: 1876827 - RNA, 19 nt, Homo sapiens
  misc_RNA (1)...(19): siRNA sense strand
ucauaucacaguaucaguu

SEQ ID NO: 1876828 - RNA, 19 nt, Homo sapiens
  misc_RNA (1)...(19): siRNA sense strand
gcgucuggaucuagucaug

SEQ ID NO: 1876829 - RNA, 19 nt, Homo sapiens
  misc_RNA (1)...(19): siRNA sense strand
caccgugacuggcaagaag

SEQ ID NO: 1876830 - RNA, 19 nt, Homo sapiens
  misc_RNA (1)...(19): siRNA sense strand
gugaaaagccugaaaucaa

SEQ ID NO: 1876831 - RNA, 19 nt, Homo sapiens
  misc_RNA (1)...(19): siRNA sense strand
cuauguaccuucuuaugac

SEQ ID NO: 1876832 - RNA, 19 nt, Homo sapiens
  misc_RNA (1)...(19): siRNA sense strand
gccaagaauccuccagguu

SEQ ID NO: 1876833 - RNA, 19 nt, Homo sapiens
  misc_RNA (1)...(19): siRNA sense strand
ccagccacaucauaucaca

SEQ ID NO: 1876834 - RNA, 19 nt, Homo sapiens
  misc_RNA (1)...(19): siRNA sense strand
aagcacuucuuccacaugu

SEQ ID NO: 1876835 - RNA, 19 nt, Homo sapiens
  misc_RNA (1)...(19): siRNA sense strand
gugcaauugccuauacuug

SEQ ID NO: 1876836 - RNA, 19 nt, Homo sapiens
  misc_RNA (1)...(19): siRNA sense strand
ugucuucuccgacuacuau

SEQ ID NO: 1876837 - RNA, 19 nt, Homo sapiens
  misc_RNA (1)...(19): siRNA sense strand
aaagagaucaagauauguc

SEQ ID NO: 1876838 - RNA, 19 nt, Homo sapiens
  misc_RNA (1)...(19): siRNA sense strand
gaaaauauggaaccaaguc

SEQ ID NO: 1876839 - RNA, 19 nt, Homo sapiens
  misc_RNA (1)...(19): siRNA sense strand
gaagcgaaugucaaaggau

SEQ ID NO: 1876840 - RNA, 19 nt, Homo sapiens
  misc_RNA (1)...(19): siRNA sense strand
acuauguaccuucuuauga

SEQ ID NO: 1876841 - RNA, 19 nt, Homo sapiens
  misc_RNA (1)...(19): siRNA sense strand
uguaucagaacuuguaaga

SEQ ID NO: 1876842 - RNA, 19 nt, Homo sapiens
  misc_RNA (1)...(19): siRNA sense strand
cacaucauaucacaguauc

SEQ ID NO: 1876843 - RNA, 19 nt, Homo sapiens
  misc_RNA (1)...(19): siRNA sense strand
caugagaagcgaaugucaa

SEQ ID NO: 1876844 - RNA, 19 nt, Homo sapiens
  misc_RNA (1)...(19): siRNA sense strand
guauccagaacgcccauaa

SEQ ID NO: 1876845 - RNA, 19 nt, Homo sapiens
  misc_RNA (1)...(19): siRNA sense strand
ugucaaaggaugaagaaag

SEQ ID NO: 1876846 - RNA, 19 nt, Homo sapiens
  misc_RNA (1)...(19): siRNA sense strand
ucaguuaaggagcuugauu

SEQ ID NO: 1876847 - RNA, 19 nt, Homo sapiens
  misc_RNA (1)...(19): siRNA sense strand
cgaccagaaggguaagauu

SEQ ID NO: 1876848 - RNA, 19 nt, Homo sapiens
  misc_RNA (1)...(19): siRNA sense strand
caccuucaccguugccauu

SEQ ID NO: 1876849 - RNA, 19 nt, Homo sapiens
  misc_RNA (1)...(19): siRNA sense strand
ucagaacuuguaagaguau

SEQ ID NO: 1876850 - RNA, 19 nt, Homo sapiens
  misc_RNA (1)...(19): siRNA sense strand
aucagaacuuguaagagua

SEQ ID NO: 1876851 - RNA, 19 nt, Homo sapiens
  misc_RNA (1)...(19): siRNA sense strand
gcaugagaagcgaauguca

SEQ ID NO: 1876852 - RNA, 19 nt, Homo sapiens
  misc_RNA (1)...(19): siRNA sense strand
gccacaucauaucacagua

SEQ ID NO: 1876853 - RNA, 19 nt, Homo sapiens
  misc_RNA (1)...(19): siRNA sense strand
aagaaagagcagucaaaga

SEQ ID NO: 1876854 - RNA, 19 nt, Homo sapiens
  misc_RNA (1)...(19): siRNA sense strand
ccagaaggguaagauuagg

SEQ ID NO: 1876855 - RNA, 19 nt, Homo sapiens
  misc_RNA (1)...(19): siRNA sense strand
aauauggaaccaaguccua

SEQ ID NO: 1876856 - RNA, 19 nt, Homo sapiens
  misc_RNA (1)...(19): siRNA sense strand
acccaaaacuauauccaua

SEQ ID NO: 1876857 - RNA, 19 nt, Homo sapiens
  misc_RNA (1)...(19): siRNA sense strand
gaaaucccaagccaaccau

SEQ ID NO: 1876858 - RNA, 19 nt, Homo sapiens
  misc_RNA (1)...(19): siRNA sense strand
gagucaacuucccaauugg

SEQ ID NO: 1876859 - RNA, 19 nt, Homo sapiens
  misc_RNA (1)...(19): siRNA sense strand
ucauggugauccuguucaa

SEQ ID NO: 1876860 - RNA, 19 nt, Homo sapiens
  misc_RNA (1)...(19): siRNA sense strand
caaagucuggcgucuggau

SEQ ID NO: 1876861 - RNA, 19 nt, Homo sapiens
  misc_RNA (1)...(19): siRNA sense strand
aggguaagauuaggagaau

SEQ ID NO: 1876862 - RNA, 19 nt, Homo sapiens
  misc_RNA (1)...(19): siRNA sense strand
gcgaaugucaaaggaugaa

SEQ ID NO: 1876863 - RNA, 19 nt, Homo sapiens
  misc_RNA (1)...(19): siRNA sense strand
ggaguaucgagaggacuuu

SEQ ID NO: 1876864 - RNA, 19 nt, Homo sapiens
  misc_RNA (1)...(19): siRNA sense strand
gcgacaggcagacaaaguc

SEQ ID NO: 1876865 - RNA, 19 nt, Homo sapiens
  misc_RNA (1)...(19): siRNA sense strand
gaacuuguaagaguaucca

SEQ ID NO: 1876866 - RNA, 19 nt, Homo sapiens
  misc_RNA (1)...(19): siRNA sense strand
uggagucaacuucccaauu

SEQ ID NO: 1876867 - RNA, 19 nt, Homo sapiens
  misc_RNA (1)...(19): siRNA sense strand
acaagaagcucuccaagau

SEQ ID NO: 1876868 - RNA, 19 nt, Homo sapiens
  misc_RNA (1)...(19): siRNA sense strand
gacaagaagcucuccaaga

SEQ ID NO: 1876869 - RNA, 19 nt, Homo sapiens
  misc_RNA (1)...(19): siRNA sense strand
ucgccgagcuccgcaaauu

SEQ ID NO: 1876870 - RNA, 19 nt, Homo sapiens
  misc_RNA (1)...(19): siRNA sense strand
ggaccaagcagcagauucg

SEQ ID NO: 1876871 - RNA, 19 nt, Homo sapiens
  misc_RNA (1)...(19): siRNA sense strand
cuacaucuccuaucucaac

SEQ ID NO: 1876872 - RNA, 19 nt, Homo sapiens
  misc_RNA (1)...(19): siRNA sense strand
caagaagcucuccaagauc

SEQ ID NO: 1876873 - RNA, 19 nt, Homo sapiens
  misc_RNA (1)...(19): siRNA sense strand
ugcuacaucuccuaucuca

SEQ ID NO: 1876874 - RNA, 19 nt, Homo sapiens
  misc_RNA (1)...(19): siRNA sense strand
ucugcuacaucuccuaucu

SEQ ID NO: 1876875 - RNA, 19 nt, Homo sapiens
  misc_RNA (1)...(19): siRNA sense strand
gaucaucgauuccucauug

SEQ ID NO: 1876876 - RNA, 19 nt, Homo sapiens
  misc_RNA (1)...(19): siRNA sense strand
gagaauacuugucugaaga

SEQ ID NO: 1876877 - RNA, 19 nt, Homo sapiens
  misc_RNA (1)...(19): siRNA sense strand
caaguugccuccauaucua

SEQ ID NO: 1876878 - RNA, 19 nt, Homo sapiens
  misc_RNA (1)...(19): siRNA sense strand
ucacugagaaggaauauaa

SEQ ID NO: 1876879 - RNA, 19 nt, Homo sapiens
  misc_RNA (1)...(19): siRNA sense strand
acauaaaggccaaugauua

SEQ ID NO: 1876880 - RNA, 19 nt, Homo sapiens
  misc_RNA (1)...(19): siRNA sense strand
ggaacuacuuucuggaaga

SEQ ID NO: 1876881 - RNA, 19 nt, Homo sapiens
  misc_RNA (1)...(19): siRNA sense strand
ggauaucacguauguguuu

SEQ ID NO: 1876882 - RNA, 19 nt, Homo sapiens
  misc_RNA (1)...(19): siRNA sense strand
guugucaauuucccuauua

SEQ ID NO: 1876883 - RNA, 19 nt, Homo sapiens
  misc_RNA (1)...(19): siRNA sense strand
ccaugaggaucuucacuaa

SEQ ID NO: 1876884 - RNA, 19 nt, Homo sapiens
  misc_RNA (1)...(19): siRNA sense strand
ggacaagcaagccaaauug

SEQ ID NO: 1876885 - RNA, 19 nt, Homo sapiens
  misc_RNA (1)...(19): siRNA sense strand
gagaagaauccaacuaguu

SEQ ID NO: 1876886 - RNA, 19 nt, Homo sapiens
  misc_RNA (1)...(19): siRNA sense strand
gagaaggaauauaagacuu

SEQ ID NO: 1876887 - RNA, 19 nt, Homo sapiens
  misc_RNA (1)...(19): siRNA sense strand
uuggagagcugaugagaaa

SEQ ID NO: 1876888 - RNA, 19 nt, Homo sapiens
  misc_RNA (1)...(19): siRNA sense strand
cauaugaugguaccacuua

SEQ ID NO: 1876889 - RNA, 19 nt, Homo sapiens
  misc_RNA (1)...(19): siRNA sense strand
ggaagaagacaauuauaag

SEQ ID NO: 1876890 - RNA, 19 nt, Homo sapiens
  misc_RNA (1)...(19): siRNA sense strand
agaagacuauugugacuga

SEQ ID NO: 1876891 - RNA, 19 nt, Homo sapiens
  misc_RNA (1)...(19): siRNA sense strand
gaggauaucacguaugugu

SEQ ID NO: 1876892 - RNA, 19 nt, Homo sapiens
  misc_RNA (1)...(19): siRNA sense strand
ucaauggcaucacugagaa

SEQ ID NO: 1876893 - RNA, 19 nt, Homo sapiens
  misc_RNA (1)...(19): siRNA sense strand
uuaccaaguugccuccaua

SEQ ID NO: 1876894 - RNA, 19 nt, Homo sapiens
  misc_RNA (1)...(19): siRNA sense strand
gcuuccagcuuaccaaguu

SEQ ID NO: 1876895 - RNA, 19 nt, Homo sapiens
  misc_RNA (1)...(19): siRNA sense strand
gagauggcguugacuuucu

SEQ ID NO: 1876896 - RNA, 19 nt, Homo sapiens
  misc_RNA (1)...(19): siRNA sense strand
uggaggauaucacguaugu

SEQ ID NO: 1876897 - RNA, 19 nt, Homo sapiens
  misc_RNA (1)...(19): siRNA sense strand
ucaacauccuggcuaaguu

SEQ ID NO: 1876898 - RNA, 19 nt, Homo sapiens
  misc_RNA (1)...(19): siRNA sense strand
uaacauaaaggccaaugau

SEQ ID NO: 1876899 - RNA, 19 nt, Homo sapiens
  misc_RNA (1)...(19): siRNA sense strand
gggauaucauguucuuguu

SEQ ID NO: 1876900 - RNA, 19 nt, Homo sapiens
  misc_RNA (1)...(19): siRNA sense strand
ccagacaacuaugagauca

SEQ ID NO: 1876901 - RNA, 19 nt, Homo sapiens
  misc_RNA (1)...(19): siRNA sense strand
gauaucacguauguguuug

SEQ ID NO: 1876902 - RNA, 19 nt, Homo sapiens
  misc_RNA (1)...(19): siRNA sense strand
gcguugacuuucugucuug

SEQ ID NO: 1876903 - RNA, 19 nt, Homo sapiens
  misc_RNA (1)...(19): siRNA sense strand
gaaauuucaaggcacaugu

SEQ ID NO: 1876904 - RNA, 19 nt, Homo sapiens
  misc_RNA (1)...(19): siRNA sense strand
aaagaagacuauugugacu

SEQ ID NO: 1876905 - RNA, 19 nt, Homo sapiens
  misc_RNA (1)...(19): siRNA sense strand
uaagaagacuuuucagauc

SEQ ID NO: 1876906 - RNA, 19 nt, Homo sapiens
  misc_RNA (1)...(19): siRNA sense strand
ggagauggcguugacuuuc

SEQ ID NO: 1876907 - RNA, 19 nt, Homo sapiens
  misc_RNA (1)...(19): siRNA sense strand
ccaaguugccuccauaucu

SEQ ID NO: 1876908 - RNA, 19 nt, Homo sapiens
  misc_RNA (1)...(19): siRNA sense strand
gaucugagagaauacuugu

SEQ ID NO: 1876909 - RNA, 19 nt, Homo sapiens
  misc_RNA (1)...(19): siRNA sense strand
ggauaucauguucuuguug

SEQ ID NO: 1876910 - RNA, 19 nt, Homo sapiens
  misc_RNA (1)...(19): siRNA sense strand
agagaauacuugucugaag

SEQ ID NO: 1876911 - RNA, 19 nt, Homo sapiens
  misc_RNA (1)...(19): siRNA sense strand
gagagaauacuugucugaa

SEQ ID NO: 1876912 - RNA, 19 nt, Homo sapiens
  misc_RNA (1)...(19): siRNA sense strand
ugagaagaauccaacuagu

SEQ ID NO: 1876913 - RNA, 19 nt, Homo sapiens
  misc_RNA (1)...(19): siRNA sense strand
cuggaacccucgaaauuuc

SEQ ID NO: 1876914 - RNA, 19 nt, Homo sapiens
  misc_RNA (1)...(19): siRNA sense strand
caaauguggaucugagaga

SEQ ID NO: 1876915 - RNA, 19 nt, Homo sapiens
  misc_RNA (1)...(19): siRNA sense strand
uggcaucacugagaaggaa

SEQ ID NO: 1876916 - RNA, 19 nt, Homo sapiens
  misc_RNA (1)...(19): siRNA sense strand
caacauccuggcuaaguuc

SEQ ID NO: 1876917 - RNA, 19 nt, Homo sapiens
  misc_RNA (1)...(19): siRNA sense strand
ugagagaauacuugucuga

SEQ ID NO: 1876918 - RNA, 19 nt, Homo sapiens
  misc_RNA (1)...(19): siRNA sense strand
uaaguucaauggcaucacu

SEQ ID NO: 1876919 - RNA, 19 nt, Homo sapiens
  misc_RNA (1)...(19): siRNA sense strand
gggacugaauaacauaaag

SEQ ID NO: 1876920 - RNA, 19 nt, Homo sapiens
  misc_RNA (1)...(19): siRNA sense strand
aaauguggaucugagagaa

SEQ ID NO: 1876921 - RNA, 19 nt, Homo sapiens
  misc_RNA (1)...(19): siRNA sense strand
gcaucacugagaaggaaua

SEQ ID NO: 1876922 - RNA, 19 nt, Homo sapiens
  misc_RNA (1)...(19): siRNA sense strand
acaaggagauggcguugac

SEQ ID NO: 1876923 - RNA, 19 nt, Homo sapiens
  misc_RNA (1)...(19): siRNA sense strand
ucagaucaccaaacaagga

SEQ ID NO: 1876924 - RNA, 19 nt, Homo sapiens
  misc_RNA (1)...(19): siRNA sense strand
agacuauugugacugaugu

SEQ ID NO: 1876925 - RNA, 19 nt, Homo sapiens
  misc_RNA (1)...(19): siRNA sense strand
gccuccauaucuaaucuuu

SEQ ID NO: 1876926 - RNA, 19 nt, Homo sapiens
  misc_RNA (1)...(19): siRNA sense strand
ucuggaacccucgaaauuu

SEQ ID NO: 1876927 - RNA, 19 nt, Homo sapiens
  misc_RNA (1)...(19): siRNA sense strand
cauuggaggauaucacgua

SEQ ID NO: 1876928 - RNA, 19 nt, Homo sapiens
  misc_RNA (1)...(19): siRNA sense strand
ggcguugacuuucugucuu

SEQ ID NO: 1876929 - RNA, 19 nt, Homo sapiens
  misc_RNA (1)...(19): siRNA sense strand
uaucacguauguguuugaa

SEQ ID NO: 1876930 - RNA, 19 nt, Homo sapiens
  misc_RNA (1)...(19): siRNA sense strand
caggcucuaucuaauguuc

SEQ ID NO: 1876931 - RNA, 19 nt, Homo sapiens
  misc_RNA (1)...(19): siRNA sense strand
cauccuggcuaaguucaau

SEQ ID NO: 1876932 - RNA, 19 nt, Homo sapiens
  misc_RNA (1)...(19): siRNA sense strand
ggacugaauaacauaaagg

SEQ ID NO: 1876933 - RNA, 19 nt, Homo sapiens
  misc_RNA (1)...(19): siRNA sense strand
agacuuacaaggagaacuu

SEQ ID NO: 1876934 - RNA, 19 nt, Homo sapiens
  misc_RNA (1)...(19): siRNA sense strand
ccuccacacccucaaguuu

SEQ ID NO: 1876935 - RNA, 19 nt, Homo sapiens
  misc_RNA (1)...(19): siRNA sense strand
guaagaagacuuuucagau

SEQ ID NO: 1876936 - RNA, 19 nt, Homo sapiens
  misc_RNA (1)...(19): siRNA sense strand
gucaauuucccuauuacaa

SEQ ID NO: 1876937 - RNA, 19 nt, Homo sapiens
  misc_RNA (1)...(19): siRNA sense strand
gacuuucugucuugguuuc

SEQ ID NO: 1876938 - RNA, 19 nt, Homo sapiens
  misc_RNA (1)...(19): siRNA sense strand
gcaguaagaagacuuuuca

SEQ ID NO: 1876939 - RNA, 19 nt, Homo sapiens
  misc_RNA (1)...(19): siRNA sense strand
uggacaagcaagccaaauu

SEQ ID NO: 1876940 - RNA, 19 nt, Homo sapiens
  misc_RNA (1)...(19): siRNA sense strand
gcucuggaacccucgaaau

SEQ ID NO: 1876941 - RNA, 19 nt, Homo sapiens
  misc_RNA (1)...(19): siRNA sense strand
ggaguccacuuuuauguac

SEQ ID NO: 1876942 - RNA, 19 nt, Homo sapiens
  misc_RNA (1)...(19): siRNA sense strand
augaggaucuucacuaaaa

SEQ ID NO: 1876943 - RNA, 19 nt, Homo sapiens
  misc_RNA (1)...(19): siRNA sense strand
ugagaugcuucaggcaguu

SEQ ID NO: 1876944 - RNA, 19 nt, Homo sapiens
  misc_RNA (1)...(19): siRNA sense strand
auguggaucugagagaaua

SEQ ID NO: 1876945 - RNA, 19 nt, Homo sapiens
  misc_RNA (1)...(19): siRNA sense strand
ucuggaagaagacaauuau

SEQ ID NO: 1876946 - RNA, 19 nt, Homo sapiens
  misc_RNA (1)...(19): siRNA sense strand
ggaucugagagaauacuug

SEQ ID NO: 1876947 - RNA, 19 nt, Homo sapiens
  misc_RNA (1)...(19): siRNA sense strand
uaaaggccaaugauuaugc

SEQ ID NO: 1876948 - RNA, 19 nt, Homo sapiens
  misc_RNA (1)...(19): siRNA sense strand
ucaggcaguuguacuuugc

SEQ ID NO: 1876949 - RNA, 19 nt, Homo sapiens
  misc_RNA (1)...(19): siRNA sense strand
ucuucaacauccuggcuaa

SEQ ID NO: 1876950 - RNA, 19 nt, Homo sapiens
  misc_RNA (1)...(19): siRNA sense strand
caugaggaucuucacuaaa

SEQ ID NO: 1876951 - RNA, 19 nt, Homo sapiens
  misc_RNA (1)...(19): siRNA sense strand
ucugaaugcucugcacuca

SEQ ID NO: 1876952 - RNA, 19 nt, Homo sapiens
  misc_RNA (1)...(19): siRNA sense strand
ugucuugguuucugaaugc

SEQ ID NO: 1876953 - RNA, 19 nt, Homo sapiens
  misc_RNA (1)...(19): siRNA sense strand
gaucaccaaacaaggagau

SEQ ID NO: 1876954 - RNA, 19 nt, Homo sapiens
  misc_RNA (1)...(19): siRNA sense strand
ggagagcugaugagaaagc

SEQ ID NO: 1876955 - RNA, 19 nt, Homo sapiens
  misc_RNA (1)...(19): siRNA sense strand
gaagacuauugugacugau

SEQ ID NO: 1876956 - RNA, 19 nt, Homo sapiens
  misc_RNA (1)...(19): siRNA sense strand
ccuucaggcucuaucuaau

SEQ ID NO: 1876957 - RNA, 19 nt, Homo sapiens
  misc_RNA (1)...(19): siRNA sense strand
aacauaaaggccaaugauu

SEQ ID NO: 1876958 - RNA, 19 nt, Homo sapiens
  misc_RNA (1)...(19): siRNA sense strand
cuccauaucuaaucuuuug

SEQ ID NO: 1876959 - RNA, 19 nt, Homo sapiens
  misc_RNA (1)...(19): siRNA sense strand
gcuccauaaugacgaguac

SEQ ID NO: 1876960 - RNA, 19 nt, Homo sapiens
  misc_RNA (1)...(19): siRNA sense strand
gcauaugaugguaccacuu

SEQ ID NO: 1876961 - RNA, 19 nt, Homo sapiens
  misc_RNA (1)...(19): siRNA sense strand
ggaacccucgaaauuucaa

SEQ ID NO: 1876962 - RNA, 19 nt, Homo sapiens
  misc_RNA (1)...(19): siRNA sense strand
ccggaacuacuuucuggaa

SEQ ID NO: 1876963 - RNA, 19 nt, Homo sapiens
  misc_RNA (1)...(19): siRNA sense strand
ugagaaggaauauaagacu

SEQ ID NO: 1876964 - RNA, 19 nt, Homo sapiens
  misc_RNA (1)...(19): siRNA sense strand
uucaggcucuaucuaaugu

SEQ ID NO: 1876965 - RNA, 19 nt, Homo sapiens
  misc_RNA (1)...(19): siRNA sense strand
aagaagacuuuucagauca

SEQ ID NO: 1876966 - RNA, 19 nt, Homo sapiens
  misc_RNA (1)...(19): siRNA sense strand
ccaagaagaagaagaagaa

SEQ ID NO: 1876967 - RNA, 19 nt, Homo sapiens
  misc_RNA (1)...(19): siRNA sense strand
aggaacagauuaacacuga

SEQ ID NO: 1876968 - RNA, 19 nt, Homo sapiens
  misc_RNA (1)...(19): siRNA sense strand
acacugagccucuagaaga

SEQ ID NO: 1876969 - RNA, 19 nt, Homo sapiens
  misc_RNA (1)...(19): siRNA sense strand
ccacauccaccaagaagaa

SEQ ID NO: 1876970 - RNA, 19 nt, Homo sapiens
  misc_RNA (1)...(19): siRNA sense strand
agaagaagaagaagaagaa

SEQ ID NO: 1876971 - RNA, 19 nt, Homo sapiens
  misc_RNA (1)...(19): siRNA sense strand
agaagaagaagaagaaaga

SEQ ID NO: 1876972 - RNA, 19 nt, Homo sapiens
  misc_RNA (1)...(19): siRNA sense strand
gaagaagaagaaagagaga

SEQ ID NO: 1876973 - RNA, 19 nt, Homo sapiens
  misc_RNA (1)...(19): siRNA sense strand
gauuaacacugagccucua

SEQ ID NO: 1876974 - RNA, 19 nt, Homo sapiens
  misc_RNA (1)...(19): siRNA sense strand
gauacggagcuguggcuua

SEQ ID NO: 1876975 - RNA, 19 nt, Homo sapiens
  misc_RNA (1)...(19): siRNA sense strand
ccaccaagaagaagaagaa

SEQ ID NO: 1876976 - RNA, 19 nt, Homo sapiens
  misc_RNA (1)...(19): siRNA sense strand
gaucgucaagggcaaauug

SEQ ID NO: 1876977 - RNA, 19 nt, Homo sapiens
  misc_RNA (1)...(19): siRNA sense strand
gaaagccggaugccagaga

SEQ ID NO: 1876978 - RNA, 19 nt, Homo sapiens
  misc_RNA (1)...(19): siRNA sense strand
gcgcugacggguccagaua

SEQ ID NO: 1876979 - RNA, 19 nt, Homo sapiens
  misc_RNA (1)...(19): siRNA sense strand
gaagaagaagaagaagaaa

SEQ ID NO: 1876980 - RNA, 19 nt, Homo sapiens
  misc_RNA (1)...(19): siRNA sense strand
gaaauggaugugcggaaga

SEQ ID NO: 1876981 - RNA, 19 nt, Homo sapiens
  misc_RNA (1)...(19): siRNA sense strand
auacggagcuguggcuuau

SEQ ID NO: 1876982 - RNA, 19 nt, Homo sapiens
  misc_RNA (1)...(19): siRNA sense strand
gaaagagagaggucacaca

SEQ ID NO: 1876983 - RNA, 19 nt, Homo sapiens
  misc_RNA (1)...(19): siRNA sense strand
gaagaagcagagucaggaa

SEQ ID NO: 1876984 - RNA, 19 nt, Homo sapiens
  misc_RNA (1)...(19): siRNA sense strand
gugaagcaggaacagauua

SEQ ID NO: 1876985 - RNA, 19 nt, Homo sapiens
  misc_RNA (1)...(19): siRNA sense strand
ccaagaagaggaagaagca

SEQ ID NO: 1876986 - RNA, 19 nt, Homo sapiens
  misc_RNA (1)...(19): siRNA sense strand
aaauggaugugcggaagaa

SEQ ID NO: 1876987 - RNA, 19 nt, Homo sapiens
  misc_RNA (1)...(19): siRNA sense strand
ugaagcaggaacagauuaa

SEQ ID NO: 1876988 - RNA, 19 nt, Homo sapiens
  misc_RNA (1)...(19): siRNA sense strand
gcucccacauccaccaaga

SEQ ID NO: 1876989 - RNA, 19 nt, Homo sapiens
  misc_RNA (1)...(19): siRNA sense strand
ccagaagacaagacaguga

SEQ ID NO: 1876990 - RNA, 19 nt, Homo sapiens
  misc_RNA (1)...(19): siRNA sense strand
aaaagaagacgaagaaaga

SEQ ID NO: 1876991 - RNA, 19 nt, Homo sapiens
  misc_RNA (1)...(19): siRNA sense strand
uaacacugagccucuagaa

SEQ ID NO: 1876992 - RNA, 19 nt, Homo sapiens
  misc_RNA (1)...(19): siRNA sense strand
cagaagacaagacagugaa

SEQ ID NO: 1876993 - RNA, 19 nt, Homo sapiens
  misc_RNA (1)...(19): siRNA sense strand
caguggagccggagaugaa

SEQ ID NO: 1876994 - RNA, 19 nt, Homo sapiens
  misc_RNA (1)...(19): siRNA sense strand
ccaccaagaagaggaagaa

SEQ ID NO: 1876995 - RNA, 19 nt, Homo sapiens
  misc_RNA (1)...(19): siRNA sense strand
ccaccaagaagaggaagaa

SEQ ID NO: 1876996 - RNA, 19 nt, Homo sapiens
  misc_RNA (1)...(19): siRNA sense strand
gaagaggaagaagcccaaa

SEQ ID NO: 1876997 - RNA, 19 nt, Homo sapiens
  misc_RNA (1)...(19): siRNA sense strand
aagaagacgaagaaagaaa

SEQ ID NO: 1876998 - RNA, 19 nt, Homo sapiens
  misc_RNA (1)...(19): siRNA sense strand
acggagcuguggcuuauuc

SEQ ID NO: 1876999 - RNA, 19 nt, Homo sapiens
  misc_RNA (1)...(19): siRNA sense strand
gggcaacccaccagucaca

SEQ ID NO: 1877000 - RNA, 19 nt, Homo sapiens
  misc_RNA (1)...(19): siRNA sense strand
gaagcagagucaggaaagc

SEQ ID NO: 1877001 - RNA, 19 nt, Homo sapiens
  misc_RNA (1)...(19): siRNA sense strand
aaagaagacgaagaaagaa

SEQ ID NO: 1877002 - RNA, 19 nt, Homo sapiens
  misc_RNA (1)...(19): siRNA sense strand
gaccauggcgccucaacag

SEQ ID NO: 1877003 - RNA, 19 nt, Homo sapiens
  misc_RNA (1)...(19): siRNA sense strand
gaugugcggaagaagaaga

SEQ ID NO: 1877004 - RNA, 19 nt, Homo sapiens
  misc_RNA (1)...(19): siRNA sense strand
agaggaagaagcagaguca

SEQ ID NO: 1877005 - RNA, 19 nt, Homo sapiens
  misc_RNA (1)...(19): siRNA sense strand
caguggagccagagacaga

SEQ ID NO: 1877006 - RNA, 19 nt, Homo sapiens
  misc_RNA (1)...(19): siRNA sense strand
gauccaccaagaagaggaa

SEQ ID NO: 1877007 - RNA, 19 nt, Homo sapiens
  misc_RNA (1)...(19): siRNA sense strand
gcugcucgguucucuuguc

SEQ ID NO: 1877008 - RNA, 19 nt, Homo sapiens
  misc_RNA (1)...(19): siRNA sense strand
gaagaagaagaagaaagag

SEQ ID NO: 1877009 - RNA, 19 nt, Homo sapiens
  misc_RNA (1)...(19): siRNA sense strand
ccugaggccucgguucugu

SEQ ID NO: 1877010 - RNA, 19 nt, Homo sapiens
  misc_RNA (1)...(19): siRNA sense strand
aagaagaagaagaaagaga

SEQ ID NO: 1877011 - RNA, 19 nt, Homo sapiens
  misc_RNA (1)...(19): siRNA sense strand
aagaagaagaagaagaaga

SEQ ID NO: 1877012 - RNA, 19 nt, Homo sapiens
  misc_RNA (1)...(19): siRNA sense strand
agggacagauggcaaugau

SEQ ID NO: 1877013 - RNA, 19 nt, Homo sapiens
  misc_RNA (1)...(19): siRNA sense strand
ggagguggacauggcuuug

SEQ ID NO: 1877014 - RNA, 19 nt, Homo sapiens
  misc_RNA (1)...(19): siRNA sense strand
ggaccauggcgccucaaca

SEQ ID NO: 1877015 - RNA, 19 nt, Homo sapiens
  misc_RNA (1)...(19): siRNA sense strand
cagugaagcaggaacagau

SEQ ID NO: 1877016 - RNA, 19 nt, Homo sapiens
  misc_RNA (1)...(19): siRNA sense strand
gcaggaacagauuaacacu

SEQ ID NO: 1877017 - RNA, 19 nt, Homo sapiens
  misc_RNA (1)...(19): siRNA sense strand
gagcagagauacuuaccua

SEQ ID NO: 1877018 - RNA, 19 nt, Homo sapiens
  misc_RNA (1)...(19): siRNA sense strand
gagaagagagcaaguuaug

SEQ ID NO: 1877019 - RNA, 19 nt, Homo sapiens
  misc_RNA (1)...(19): siRNA sense strand
ccucaacucucaguacuuu

SEQ ID NO: 1877020 - RNA, 19 nt, Homo sapiens
  misc_RNA (1)...(19): siRNA sense strand
gaaacccagugcuauguag

SEQ ID NO: 1877021 - RNA, 19 nt, Homo sapiens
  misc_RNA (1)...(19): siRNA sense strand
ccggauaccucaacucuca

SEQ ID NO: 1877022 - RNA, 19 nt, Homo sapiens
  misc_RNA (1)...(19): siRNA sense strand
gacaagcaacagaacuuua

SEQ ID NO: 1877023 - RNA, 19 nt, Homo sapiens
  misc_RNA (1)...(19): siRNA sense strand
uaacaucgacgccagacaa

SEQ ID NO: 1877024 - RNA, 19 nt, Homo sapiens
  misc_RNA (1)...(19): siRNA sense strand
acaagcaacagaacuuuaa

SEQ ID NO: 1877025 - RNA, 19 nt, Homo sapiens
  misc_RNA (1)...(19): siRNA sense strand
caccaggccuccucacaga

SEQ ID NO: 1877026 - RNA, 19 nt, Homo sapiens
  misc_RNA (1)...(19): siRNA sense strand
ggaagaauacacccagcuu

SEQ ID NO: 1877027 - RNA, 19 nt, Homo sapiens
  misc_RNA (1)...(19): siRNA sense strand
ugaggcauuugacuucauu

SEQ ID NO: 1877028 - RNA, 19 nt, Homo sapiens
  misc_RNA (1)...(19): siRNA sense strand
ggaaacuuuuggaagaaua

SEQ ID NO: 1877029 - RNA, 19 nt, Homo sapiens
  misc_RNA (1)...(19): siRNA sense strand
ugaacucucucuggcauug

SEQ ID NO: 1877030 - RNA, 19 nt, Homo sapiens
  misc_RNA (1)...(19): siRNA sense strand
uuaccuauccuucagcuuu

SEQ ID NO: 1877031 - RNA, 19 nt, Homo sapiens
  misc_RNA (1)...(19): siRNA sense strand
ccucugccuugcccgaaua

SEQ ID NO: 1877032 - RNA, 19 nt, Homo sapiens
  misc_RNA (1)...(19): siRNA sense strand
cgaaacccagugcuaugua

SEQ ID NO: 1877033 - RNA, 19 nt, Homo sapiens
  misc_RNA (1)...(19): siRNA sense strand
ccauggcuaucuccucuuc

SEQ ID NO: 1877034 - RNA, 19 nt, Homo sapiens
  misc_RNA (1)...(19): siRNA sense strand
caagcaacagaacuuuaaa

SEQ ID NO: 1877035 - RNA, 19 nt, Homo sapiens
  misc_RNA (1)...(19): siRNA sense strand
gcuggagcagagauacuua

SEQ ID NO: 1877036 - RNA, 19 nt, Homo sapiens
  misc_RNA (1)...(19): siRNA sense strand
ccacuuacaggaagacaca

SEQ ID NO: 1877037 - RNA, 19 nt, Homo sapiens
  misc_RNA (1)...(19): siRNA sense strand
cagacaagcaacagaacuu

SEQ ID NO: 1877038 - RNA, 19 nt, Homo sapiens
  misc_RNA (1)...(19): siRNA sense strand
ccaggccuccucacagauu

SEQ ID NO: 1877039 - RNA, 19 nt, Homo sapiens
  misc_RNA (1)...(19): siRNA sense strand
cagaaaaucuacaauuguc

SEQ ID NO: 1877040 - RNA, 19 nt, Homo sapiens
  misc_RNA (1)...(19): siRNA sense strand
gugggaaacuuuuggaaga

SEQ ID NO: 1877041 - RNA, 19 nt, Homo sapiens
  misc_RNA (1)...(19): siRNA sense strand
agacaagcaacagaacuuu

SEQ ID NO: 1877042 - RNA, 19 nt, Homo sapiens
  misc_RNA (1)...(19): siRNA sense strand
gggccuaugugugaaagca

SEQ ID NO: 1877043 - RNA, 19 nt, Homo sapiens
  misc_RNA (1)...(19): siRNA sense strand
uaucgaaacccagugcuau

SEQ ID NO: 1877044 - RNA, 19 nt, Homo sapiens
  misc_RNA (1)...(19): siRNA sense strand
augagaagagagcaaguua

SEQ ID NO: 1877045 - RNA, 19 nt, Homo sapiens
  misc_RNA (1)...(19): siRNA sense strand
ucaagcuggagcagagaua

SEQ ID NO: 1877046 - RNA, 19 nt, Homo sapiens
  misc_RNA (1)...(19): siRNA sense strand
auacuuaccuauccuucag

SEQ ID NO: 1877047 - RNA, 19 nt, Homo sapiens
  misc_RNA (1)...(19): siRNA sense strand
ucaacucucaguacuuugu

SEQ ID NO: 1877048 - RNA, 19 nt, Homo sapiens
  misc_RNA (1)...(19): siRNA sense strand
ggacgccaccaugagaaga

SEQ ID NO: 1877049 - RNA, 19 nt, Homo sapiens
  misc_RNA (1)...(19): siRNA sense strand
agucuugagucaccuguca

SEQ ID NO: 1877050 - RNA, 19 nt, Homo sapiens
  misc_RNA (1)...(19): siRNA sense strand
caucgacgccagacaagca

SEQ ID NO: 1877051 - RNA, 19 nt, Homo sapiens
  misc_RNA (1)...(19): siRNA sense strand
ugagaagagagcaaguuau

SEQ ID NO: 1877052 - RNA, 19 nt, Homo sapiens
  misc_RNA (1)...(19): siRNA sense strand
caugagaagagagcaaguu

SEQ ID NO: 1877053 - RNA, 19 nt, Homo sapiens
  misc_RNA (1)...(19): siRNA sense strand
gaacagcaaaggggcagua

SEQ ID NO: 1877054 - RNA, 19 nt, Homo sapiens
  misc_RNA (1)...(19): siRNA sense strand
caaguuauggccacagcau

SEQ ID NO: 1877055 - RNA, 19 nt, Homo sapiens
  misc_RNA (1)...(19): siRNA sense strand
guccuugggugguuuccau

SEQ ID NO: 1877056 - RNA, 19 nt, Homo sapiens
  misc_RNA (1)...(19): siRNA sense strand
ugacaugcgguucccugaa

SEQ ID NO: 1877057 - RNA, 19 nt, Homo sapiens
  misc_RNA (1)...(19): siRNA sense strand
cacaccagcaggcaagauu

SEQ ID NO: 1877058 - RNA, 19 nt, Homo sapiens
  misc_RNA (1)...(19): siRNA sense strand
uaacauaccuaccaacgua

SEQ ID NO: 1877059 - RNA, 19 nt, Homo sapiens
  misc_RNA (1)...(19): siRNA sense strand
gcugcaagcuguacaauuu

SEQ ID NO: 1877060 - RNA, 19 nt, Homo sapiens
  misc_RNA (1)...(19): siRNA sense strand
gaggucagcuggcagauuu

SEQ ID NO: 1877061 - RNA, 19 nt, Homo sapiens
  misc_RNA (1)...(19): siRNA sense strand
gcauauccaucaaggaauu

SEQ ID NO: 1877062 - RNA, 19 nt, Homo sapiens
  misc_RNA (1)...(19): siRNA sense strand
gcagaugccuucaauaacu

SEQ ID NO: 1877063 - RNA, 19 nt, Homo sapiens
  misc_RNA (1)...(19): siRNA sense strand
caucaacuaugggauaaua

SEQ ID NO: 1877064 - RNA, 19 nt, Homo sapiens
  misc_RNA (1)...(19): siRNA sense strand
gaagcaagcucaccaccau

SEQ ID NO: 1877065 - RNA, 19 nt, Homo sapiens
  misc_RNA (1)...(19): siRNA sense strand
gcaccaucauccuaacaua

SEQ ID NO: 1877066 - RNA, 19 nt, Homo sapiens
  misc_RNA (1)...(19): siRNA sense strand
ggacaggucaguuuacuau

SEQ ID NO: 1877067 - RNA, 19 nt, Homo sapiens
  misc_RNA (1)...(19): siRNA sense strand
guacucugcuccauguuaa

SEQ ID NO: 1877068 - RNA, 19 nt, Homo sapiens
  misc_RNA (1)...(19): siRNA sense strand
uaaaggcgauggucacaug

SEQ ID NO: 1877069 - RNA, 19 nt, Homo sapiens
  misc_RNA (1)...(19): siRNA sense strand
caucagagauaguggaguu

SEQ ID NO: 1877070 - RNA, 19 nt, Homo sapiens
  misc_RNA (1)...(19): siRNA sense strand
gcuaugggcuggcucuuau

SEQ ID NO: 1877071 - RNA, 19 nt, Homo sapiens
  misc_RNA (1)...(19): siRNA sense strand
gaacaccacucagcagcaa

SEQ ID NO: 1877072 - RNA, 19 nt, Homo sapiens
  misc_RNA (1)...(19): siRNA sense strand
gcagcaaggucuaucuaau

SEQ ID NO: 1877073 - RNA, 19 nt, Homo sapiens
  misc_RNA (1)...(19): siRNA sense strand
gcauuuggauccuucauca

SEQ ID NO: 1877074 - RNA, 19 nt, Homo sapiens
  misc_RNA (1)...(19): siRNA sense strand
acaggucaguuuacuauuu

SEQ ID NO: 1877075 - RNA, 19 nt, Homo sapiens
  misc_RNA (1)...(19): siRNA sense strand
ucacaugccuaccacuuug

SEQ ID NO: 1877076 - RNA, 19 nt, Homo sapiens
  misc_RNA (1)...(19): siRNA sense strand
gggauaauacugacucuga

SEQ ID NO: 1877077 - RNA, 19 nt, Homo sapiens
  misc_RNA (1)...(19): siRNA sense strand
caacguauaucaguacucu

SEQ ID NO: 1877078 - RNA, 19 nt, Homo sapiens
  misc_RNA (1)...(19): siRNA sense strand
gcagggauauuuggagcaa

SEQ ID NO: 1877079 - RNA, 19 nt, Homo sapiens
  misc_RNA (1)...(19): siRNA sense strand
gcauggacaggucaguuua

SEQ ID NO: 1877080 - RNA, 19 nt, Homo sapiens
  misc_RNA (1)...(19): siRNA sense strand
uuucagccauuucugguua

SEQ ID NO: 1877081 - RNA, 19 nt, Homo sapiens
  misc_RNA (1)...(19): siRNA sense strand
cuaccaacguauaucagua

SEQ ID NO: 1877082 - RNA, 19 nt, Homo sapiens
  misc_RNA (1)...(19): siRNA sense strand
uucaauaacuccagcauau

SEQ ID NO: 1877083 - RNA, 19 nt, Homo sapiens
  misc_RNA (1)...(19): siRNA sense strand
cagcauauccaucaaggaa

SEQ ID NO: 1877084 - RNA, 19 nt, Homo sapiens
  misc_RNA (1)...(19): siRNA sense strand
caggucaguuuacuauuug

SEQ ID NO: 1877085 - RNA, 19 nt, Homo sapiens
  misc_RNA (1)...(19): siRNA sense strand
ggauaauacugacucugau

SEQ ID NO: 1877086 - RNA, 19 nt, Homo sapiens
  misc_RNA (1)...(19): siRNA sense strand
ucaguacucugcuccaugu

SEQ ID NO: 1877087 - RNA, 19 nt, Homo sapiens
  misc_RNA (1)...(19): siRNA sense strand
uugcagaugccuucaauaa

SEQ ID NO: 1877088 - RNA, 19 nt, Homo sapiens
  misc_RNA (1)...(19): siRNA sense strand
gccuugagcuggccuuuua

SEQ ID NO: 1877089 - RNA, 19 nt, Homo sapiens
  misc_RNA (1)...(19): siRNA sense strand
cagcaaggucuaucuaaug

SEQ ID NO: 1877090 - RNA, 19 nt, Homo sapiens
  misc_RNA (1)...(19): siRNA sense strand
ccaggaaagguccagauuu

SEQ ID NO: 1877091 - RNA, 19 nt, Homo sapiens
  misc_RNA (1)...(19): siRNA sense strand
gcucaucgcaggaaucauc

SEQ ID NO: 1877092 - RNA, 19 nt, Homo sapiens
  misc_RNA (1)...(19): siRNA sense strand
gagcuggccuuuuaucuuc

SEQ ID NO: 1877093 - RNA, 19 nt, Homo sapiens
  misc_RNA (1)...(19): siRNA sense strand
uaucuaaugccuccacuga

SEQ ID NO: 1877094 - RNA, 19 nt, Homo sapiens
  misc_RNA (1)...(19): siRNA sense strand
guccaggaaucuucucaga

SEQ ID NO: 1877095 - RNA, 19 nt, Homo sapiens
  misc_RNA (1)...(19): siRNA sense strand
ucaaacuucaccaugauaa

SEQ ID NO: 1877096 - RNA, 19 nt, Homo sapiens
  misc_RNA (1)...(19): siRNA sense strand
caucacccgugcauaagug

SEQ ID NO: 1877097 - RNA, 19 nt, Homo sapiens
  misc_RNA (1)...(19): siRNA sense strand
ggaucagggucagcauuug

SEQ ID NO: 1877098 - RNA, 19 nt, Homo sapiens
  misc_RNA (1)...(19): siRNA sense strand
caaaggccucuguguauca

SEQ ID NO: 1877099 - RNA, 19 nt, Homo sapiens
  misc_RNA (1)...(19): siRNA sense strand
gcugaucucuucccuucuc

SEQ ID NO: 1877100 - RNA, 19 nt, Homo sapiens
  misc_RNA (1)...(19): siRNA sense strand
ucgcaggaaucaucucuuc

SEQ ID NO: 1877101 - RNA, 19 nt, Homo sapiens
  misc_RNA (1)...(19): siRNA sense strand
gaggacauaaaguuacaaa

SEQ ID NO: 1877102 - RNA, 19 nt, Homo sapiens
  misc_RNA (1)...(19): siRNA sense strand
gccacuggauuccucauca

SEQ ID NO: 1877103 - RNA, 19 nt, Homo sapiens
  misc_RNA (1)...(19): siRNA sense strand
gccaaagagaggacccuua

SEQ ID NO: 1877104 - RNA, 19 nt, Homo sapiens
  misc_RNA (1)...(19): siRNA sense strand
gcccagaaacucaggguau

SEQ ID NO: 1877105 - RNA, 19 nt, Homo sapiens
  misc_RNA (1)...(19): siRNA sense strand
ccaaagagaggacccuuac

SEQ ID NO: 1877106 - RNA, 19 nt, Homo sapiens
  misc_RNA (1)...(19): siRNA sense strand
ggcauggacaggucaguuu

SEQ ID NO: 1877107 - RNA, 19 nt, Homo sapiens
  misc_RNA (1)...(19): siRNA sense strand
ucucaaacuucaccaugau

SEQ ID NO: 1877108 - RNA, 19 nt, Homo sapiens
  misc_RNA (1)...(19): siRNA sense strand
acaaaggccucuguguauc

SEQ ID NO: 1877109 - RNA, 19 nt, Homo sapiens
  misc_RNA (1)...(19): siRNA sense strand
gcugcugacuucggaguga

SEQ ID NO: 1877110 - RNA, 19 nt, Homo sapiens
  misc_RNA (1)...(19): siRNA sense strand
gaaacucaggguaucaucu

SEQ ID NO: 1877111 - RNA, 19 nt, Homo sapiens
  misc_RNA (1)...(19): siRNA sense strand
uuucaucucuugauaugca

SEQ ID NO: 1877112 - RNA, 19 nt, Homo sapiens
  misc_RNA (1)...(19): siRNA sense strand
gauaauacugacucugauc

SEQ ID NO: 1877113 - RNA, 19 nt, Homo sapiens
  misc_RNA (1)...(19): siRNA sense strand
ggacaagcagaacuucaag

SEQ ID NO: 1877114 - RNA, 19 nt, Homo sapiens
  misc_RNA (1)...(19): siRNA sense strand
ggucacaugccuaccacuu

SEQ ID NO: 1877115 - RNA, 19 nt, Homo sapiens
  misc_RNA (1)...(19): siRNA sense strand
gauacaaaggccucugugu

SEQ ID NO: 1877116 - RNA, 19 nt, Homo sapiens
  misc_RNA (1)...(19): siRNA sense strand
guuaugcaccaucauccua

SEQ ID NO: 1877117 - RNA, 19 nt, Homo sapiens
  misc_RNA (1)...(19): siRNA sense strand
ggucagcauuuggauccuu

SEQ ID NO: 1877118 - RNA, 19 nt, Homo sapiens
  misc_RNA (1)...(19): siRNA sense strand
aaacucaggguaucaucuu

SEQ ID NO: 1877119 - RNA, 19 nt, Homo sapiens
  misc_RNA (1)...(19): siRNA sense strand
cagcagcaaggucuaucua

SEQ ID NO: 1877120 - RNA, 19 nt, Homo sapiens
  misc_RNA (1)...(19): siRNA sense strand
gagucugguuggaggaaug

SEQ ID NO: 1877121 - RNA, 19 nt, Homo sapiens
  misc_RNA (1)...(19): siRNA sense strand
gcuggcagauuuccuuuug

SEQ ID NO: 1877122 - RNA, 19 nt, Homo sapiens
  misc_RNA (1)...(19): siRNA sense strand
ggaggucagcuggcagauu

SEQ ID NO: 1877123 - RNA, 19 nt, Homo sapiens
  misc_RNA (1)...(19): siRNA sense strand
ugggcuggcucuuaucaug

SEQ ID NO: 1877124 - RNA, 19 nt, Homo sapiens
  misc_RNA (1)...(19): siRNA sense strand
gcauaaguguuagggaaaa

SEQ ID NO: 1877125 - RNA, 19 nt, Homo sapiens
  misc_RNA (1)...(19): siRNA sense strand
cacccgugcauaaguguua

SEQ ID NO: 1877126 - RNA, 19 nt, Homo sapiens
  misc_RNA (1)...(19): siRNA sense strand
gcucuuaucaugcacuucu

SEQ ID NO: 1877127 - RNA, 19 nt, Homo sapiens
  misc_RNA (1)...(19): siRNA sense strand
acucaggguaucaucuuua

SEQ ID NO: 1877128 - RNA, 19 nt, Homo sapiens
  misc_RNA (1)...(19): siRNA sense strand
cugguuugcugaucucuuc

SEQ ID NO: 1877129 - RNA, 19 nt, Homo sapiens
  misc_RNA (1)...(19): siRNA sense strand
ucaugcacuucucaaacuu

SEQ ID NO: 1877130 - RNA, 19 nt, Homo sapiens
  misc_RNA (1)...(19): siRNA sense strand
gaucagggucagcauuugg

SEQ ID NO: 1877131 - RNA, 19 nt, Homo sapiens
  misc_RNA (1)...(19): siRNA sense strand
aaaggccucuguguaucaa

SEQ ID NO: 1877132 - RNA, 19 nt, Homo sapiens
  misc_RNA (1)...(19): siRNA sense strand
cagaugccuucaauaacuc

SEQ ID NO: 1877133 - RNA, 19 nt, Homo sapiens
  misc_RNA (1)...(19): siRNA sense strand
gaucaucgccauggugaac

SEQ ID NO: 1877134 - RNA, 19 nt, Homo sapiens
  misc_RNA (1)...(19): siRNA sense strand
caauggagcccagaaacuc

SEQ ID NO: 1877135 - RNA, 19 nt, Homo sapiens
  misc_RNA (1)...(19): siRNA sense strand
uaucaauggagcccagaaa

SEQ ID NO: 1877136 - RNA, 19 nt, Homo sapiens
  misc_RNA (1)...(19): siRNA sense strand
ugucugcugucuccuaugg

SEQ ID NO: 1877137 - RNA, 19 nt, Homo sapiens
  misc_RNA (1)...(19): siRNA sense strand
gacaagcagaacuucaaga

SEQ ID NO: 1877138 - RNA, 19 nt, Homo sapiens
  misc_RNA (1)...(19): siRNA sense strand
cuggauuccucaucaguca

SEQ ID NO: 1877139 - RNA, 19 nt, Homo sapiens
  misc_RNA (1)...(19): siRNA sense strand
cgugugagucugagcauug

SEQ ID NO: 1877140 - RNA, 19 nt, Homo sapiens
  misc_RNA (1)...(19): siRNA sense strand
guuaacaucagagauagug

SEQ ID NO: 1877141 - RNA, 19 nt, Homo sapiens
  misc_RNA (1)...(19): siRNA sense strand
cuaccacuuugggccauuu

SEQ ID NO: 1877142 - RNA, 19 nt, Homo sapiens
  misc_RNA (1)...(19): siRNA sense strand
ucugcugucuccuaugguu

SEQ ID NO: 1877143 - RNA, 19 nt, Homo sapiens
  misc_RNA (1)...(19): siRNA sense strand
cugaggacauaaaguuaca

SEQ ID NO: 1877144 - RNA, 19 nt, Homo sapiens
  misc_RNA (1)...(19): siRNA sense strand
gucacaugccuaccacuuu

SEQ ID NO: 1877145 - RNA, 19 nt, Homo sapiens
  misc_RNA (1)...(19): siRNA sense strand
gacgagcuguccccauaaa

SEQ ID NO: 1877146 - RNA, 19 nt, Homo sapiens
  misc_RNA (1)...(19): siRNA sense strand
caacuaugggauaauacug

SEQ ID NO: 1877147 - RNA, 19 nt, Homo sapiens
  misc_RNA (1)...(19): siRNA sense strand
aguacucugcuccauguua

SEQ ID NO: 1877148 - RNA, 19 nt, Homo sapiens
  misc_RNA (1)...(19): siRNA sense strand
gggcucaucgcaggaauca

SEQ ID NO: 1877149 - RNA, 19 nt, Homo sapiens
  misc_RNA (1)...(19): siRNA sense strand
caagacugggccaaagaga

SEQ ID NO: 1877150 - RNA, 19 nt, Homo sapiens
  misc_RNA (1)...(19): siRNA sense strand
ucccuucucacccucuuua

SEQ ID NO: 1877151 - RNA, 19 nt, Homo sapiens
  misc_RNA (1)...(19): siRNA sense strand
uguugcagaugccuucaau

SEQ ID NO: 1877152 - RNA, 19 nt, Homo sapiens
  misc_RNA (1)...(19): siRNA sense strand
ugcaagcuguacaauuuua

SEQ ID NO: 1877153 - RNA, 19 nt, Homo sapiens
  misc_RNA (1)...(19): siRNA sense strand
cuucaauaacuccagcaua

SEQ ID NO: 1877154 - RNA, 19 nt, Homo sapiens
  misc_RNA (1)...(19): siRNA sense strand
uguccucacuggcucaaca

SEQ ID NO: 1877155 - RNA, 19 nt, Homo sapiens
  misc_RNA (1)...(19): siRNA sense strand
caccaccauugcaggauca

SEQ ID NO: 1877156 - RNA, 19 nt, Homo sapiens
  misc_RNA (1)...(19): siRNA sense strand
uguuuggccuggucuuuua

SEQ ID NO: 1877157 - RNA, 19 nt, Homo sapiens
  misc_RNA (1)...(19): siRNA sense strand
gacccuuacccgccucuga

SEQ ID NO: 1877158 - RNA, 19 nt, Homo sapiens
  misc_RNA (1)...(19): siRNA sense strand
ggagaaaucugcugaaaga

SEQ ID NO: 1877159 - RNA, 19 nt, Homo sapiens
  misc_RNA (1)...(19): siRNA sense strand
gaaagaacuucaugaacuu

SEQ ID NO: 1877160 - RNA, 19 nt, Homo sapiens
  misc_RNA (1)...(19): siRNA sense strand
gaauucauccgaagaaaua

SEQ ID NO: 1877161 - RNA, 19 nt, Homo sapiens
  misc_RNA (1)...(19): siRNA sense strand
gcucaacagucccuaguua

SEQ ID NO: 1877162 - RNA, 19 nt, Homo sapiens
  misc_RNA (1)...(19): siRNA sense strand
ugaaauaccuggaacaaau

SEQ ID NO: 1877163 - RNA, 19 nt, Homo sapiens
  misc_RNA (1)...(19): siRNA sense strand
gaacaucuuucuuuacaag

SEQ ID NO: 1877164 - RNA, 19 nt, Homo sapiens
  misc_RNA (1)...(19): siRNA sense strand
gaacauuggugcauuggau

SEQ ID NO: 1877165 - RNA, 19 nt, Homo sapiens
  misc_RNA (1)...(19): siRNA sense strand
gaagcuaguuuaucuguca

SEQ ID NO: 1877166 - RNA, 19 nt, Homo sapiens
  misc_RNA (1)...(19): siRNA sense strand
gaaauaccuggaacaaaua

SEQ ID NO: 1877167 - RNA, 19 nt, Homo sapiens
  misc_RNA (1)...(19): siRNA sense strand
gcaacagaaucaacacaaa

SEQ ID NO: 1877168 - RNA, 19 nt, Homo sapiens
  misc_RNA (1)...(19): siRNA sense strand
gaaguaaucugucaaucag

SEQ ID NO: 1877169 - RNA, 19 nt, Homo sapiens
  misc_RNA (1)...(19): siRNA sense strand
gaaaaugucuguccugaug

SEQ ID NO: 1877170 - RNA, 19 nt, Homo sapiens
  misc_RNA (1)...(19): siRNA sense strand
gaaauuucacccaaacuuu

SEQ ID NO: 1877171 - RNA, 19 nt, Homo sapiens
  misc_RNA (1)...(19): siRNA sense strand
ggccauuacuugaauauga

SEQ ID NO: 1877172 - RNA, 19 nt, Homo sapiens
  misc_RNA (1)...(19): siRNA sense strand
ggaaaucgauacagcucaa

SEQ ID NO: 1877173 - RNA, 19 nt, Homo sapiens
  misc_RNA (1)...(19): siRNA sense strand
ccacaagucuccuuucauc

SEQ ID NO: 1877174 - RNA, 19 nt, Homo sapiens
  misc_RNA (1)...(19): siRNA sense strand
gggaauccauaaauaagaa

SEQ ID NO: 1877175 - RNA, 19 nt, Homo sapiens
  misc_RNA (1)...(19): siRNA sense strand
gaagaaaggcaacagaauc

SEQ ID NO: 1877176 - RNA, 19 nt, Homo sapiens
  misc_RNA (1)...(19): siRNA sense strand
uaaagaauauggccauuac

SEQ ID NO: 1877177 - RNA, 19 nt, Homo sapiens
  misc_RNA (1)...(19): siRNA sense strand
caagaacauuggugcauug

SEQ ID NO: 1877178 - RNA, 19 nt, Homo sapiens
  misc_RNA (1)...(19): siRNA sense strand
gaaucuugcccgucuauaa

SEQ ID NO: 1877179 - RNA, 19 nt, Homo sapiens
  misc_RNA (1)...(19): siRNA sense strand
ucuagggaauccauaaaua

SEQ ID NO: 1877180 - RNA, 19 nt, Homo sapiens
  misc_RNA (1)...(19): siRNA sense strand
ugacucagaucgcauugaa

SEQ ID NO: 1877181 - RNA, 19 nt, Homo sapiens
  misc_RNA (1)...(19): siRNA sense strand
cagguaaucuggagaaauc

SEQ ID NO: 1877182 - RNA, 19 nt, Homo sapiens
  misc_RNA (1)...(19): siRNA sense strand
uaacagguacuucaucuga

SEQ ID NO: 1877183 - RNA, 19 nt, Homo sapiens
  misc_RNA (1)...(19): siRNA sense strand
gaaccugagucaagugagu

SEQ ID NO: 1877184 - RNA, 19 nt, Homo sapiens
  misc_RNA (1)...(19): siRNA sense strand
ggucagggcauacagaauu

SEQ ID NO: 1877185 - RNA, 19 nt, Homo sapiens
  misc_RNA (1)...(19): siRNA sense strand
agacuuaggucagggcaua

SEQ ID NO: 1877186 - RNA, 19 nt, Homo sapiens
  misc_RNA (1)...(19): siRNA sense strand
gcuaaacucugaaaagaaa

SEQ ID NO: 1877187 - RNA, 19 nt, Homo sapiens
  misc_RNA (1)...(19): siRNA sense strand
aaauaacuguugcagguaa

SEQ ID NO: 1877188 - RNA, 19 nt, Homo sapiens
  misc_RNA (1)...(19): siRNA sense strand
gaaauaacuguugcaggua

SEQ ID NO: 1877189 - RNA, 19 nt, Homo sapiens
  misc_RNA (1)...(19): siRNA sense strand
gaagaaguaaucugucaau

SEQ ID NO: 1877190 - RNA, 19 nt, Homo sapiens
  misc_RNA (1)...(19): siRNA sense strand
gcaguaaaccagcuucaga

SEQ ID NO: 1877191 - RNA, 19 nt, Homo sapiens
  misc_RNA (1)...(19): siRNA sense strand
acaggaagcuaguuuaucu

SEQ ID NO: 1877192 - RNA, 19 nt, Homo sapiens
  misc_RNA (1)...(19): siRNA sense strand
cauuggaucucacuuuaga

SEQ ID NO: 1877193 - RNA, 19 nt, Homo sapiens
  misc_RNA (1)...(19): siRNA sense strand
ucugaaagauggacccaaa

SEQ ID NO: 1877194 - RNA, 19 nt, Homo sapiens
  misc_RNA (1)...(19): siRNA sense strand
ugcauuggaucucacuuua

SEQ ID NO: 1877195 - RNA, 19 nt, Homo sapiens
  misc_RNA (1)...(19): siRNA sense strand
gccauuacuugaauaugaa

SEQ ID NO: 1877196 - RNA, 19 nt, Homo sapiens
  misc_RNA (1)...(19): siRNA sense strand
gaagagaagcuguagaaaa

SEQ ID NO: 1877197 - RNA, 19 nt, Homo sapiens
  misc_RNA (1)...(19): siRNA sense strand
gcagaauucauccgaagaa

SEQ ID NO: 1877198 - RNA, 19 nt, Homo sapiens
  misc_RNA (1)...(19): siRNA sense strand
gaaaauacaucugaagaag

SEQ ID NO: 1877199 - RNA, 19 nt, Homo sapiens
  misc_RNA (1)...(19): siRNA sense strand
caaauuucaucuccauaca

SEQ ID NO: 1877200 - RNA, 19 nt, Homo sapiens
  misc_RNA (1)...(19): siRNA sense strand
caagacaggaagcuaguuu

SEQ ID NO: 1877201 - RNA, 19 nt, Homo sapiens
  misc_RNA (1)...(19): siRNA sense strand
gauggccugucaaccgaua

SEQ ID NO: 1877202 - RNA, 19 nt, Homo sapiens
  misc_RNA (1)...(19): siRNA sense strand
ucaagaacauuggugcauu

SEQ ID NO: 1877203 - RNA, 19 nt, Homo sapiens
  misc_RNA (1)...(19): siRNA sense strand
gaaugaacaguaugagguu

SEQ ID NO: 1877204 - RNA, 19 nt, Homo sapiens
  misc_RNA (1)...(19): siRNA sense strand
guagaaauuucacccaaac

SEQ ID NO: 1877205 - RNA, 19 nt, Homo sapiens
  misc_RNA (1)...(19): siRNA sense strand
ccaagucucuguggcaguu

SEQ ID NO: 1877206 - RNA, 19 nt, Homo sapiens
  misc_RNA (1)...(19): siRNA sense strand
gcacccagggccucaaauu

SEQ ID NO: 1877207 - RNA, 19 nt, Homo sapiens
  misc_RNA (1)...(19): siRNA sense strand
gcugagggccaaaccagua

SEQ ID NO: 1877208 - RNA, 19 nt, Homo sapiens
  misc_RNA (1)...(19): siRNA sense strand
ggagucagcagaagaaucu

SEQ ID NO: 1877209 - RNA, 19 nt, Homo sapiens
  misc_RNA (1)...(19): siRNA sense strand
aagcuacgaugaaaggaaa

SEQ ID NO: 1877210 - RNA, 19 nt, Homo sapiens
  misc_RNA (1)...(19): siRNA sense strand
gcacgaagaaccagggaau

SEQ ID NO: 1877211 - RNA, 19 nt, Homo sapiens
  misc_RNA (1)...(19): siRNA sense strand
gcaugaaccacagauguuu

SEQ ID NO: 1877212 - RNA, 19 nt, Homo sapiens
  misc_RNA (1)...(19): siRNA sense strand
gaccuugcacuucuuguuu

SEQ ID NO: 1877213 - RNA, 19 nt, Homo sapiens
  misc_RNA (1)...(19): siRNA sense strand
gggcauacagaauucagua

SEQ ID NO: 1877214 - RNA, 19 nt, Homo sapiens
  misc_RNA (1)...(19): siRNA sense strand
cuagggaauccauaaauaa

SEQ ID NO: 1877215 - RNA, 19 nt, Homo sapiens
  misc_RNA (1)...(19): siRNA sense strand
uaaaccagcuucagaaaau

SEQ ID NO: 1877216 - RNA, 19 nt, Homo sapiens
  misc_RNA (1)...(19): siRNA sense strand
gcucaaauucagaaacauu

SEQ ID NO: 1877217 - RNA, 19 nt, Homo sapiens
  misc_RNA (1)...(19): siRNA sense strand
gaagcuacgaugaaaggaa

SEQ ID NO: 1877218 - RNA, 19 nt, Homo sapiens
  misc_RNA (1)...(19): siRNA sense strand
cagaucgcauugaaccuaa

SEQ ID NO: 1877219 - RNA, 19 nt, Homo sapiens
  misc_RNA (1)...(19): siRNA sense strand
gaagaaaaguauuccaucu

SEQ ID NO: 1877220 - RNA, 19 nt, Homo sapiens
  misc_RNA (1)...(19): siRNA sense strand
cccagaaacuaauguugaa

SEQ ID NO: 1877221 - RNA, 19 nt, Homo sapiens
  misc_RNA (1)...(19): siRNA sense strand
gagggccaaaccaguauua

SEQ ID NO: 1877222 - RNA, 19 nt, Homo sapiens
  misc_RNA (1)...(19): siRNA sense strand
uaacggcagccuugaaaga

SEQ ID NO: 1877223 - RNA, 19 nt, Homo sapiens
  misc_RNA (1)...(19): siRNA sense strand
cauuuccacucaggauuua

SEQ ID NO: 1877224 - RNA, 19 nt, Homo sapiens
  misc_RNA (1)...(19): siRNA sense strand
aaacuaagucuuugucauc

SEQ ID NO: 1877225 - RNA, 19 nt, Homo sapiens
  misc_RNA (1)...(19): siRNA sense strand
aagagaagcuguagaaaau

SEQ ID NO: 1877226 - RNA, 19 nt, Homo sapiens
  misc_RNA (1)...(19): siRNA sense strand
gaacaguguccacaagucu

SEQ ID NO: 1877227 - RNA, 19 nt, Homo sapiens
  misc_RNA (1)...(19): siRNA sense strand
gggccaaaccaguauuaaa

SEQ ID NO: 1877228 - RNA, 19 nt, Homo sapiens
  misc_RNA (1)...(19): siRNA sense strand
aacagucccuaguuacuuu

SEQ ID NO: 1877229 - RNA, 19 nt, Homo sapiens
  misc_RNA (1)...(19): siRNA sense strand
cauacagaauucaguaaca

SEQ ID NO: 1877230 - RNA, 19 nt, Homo sapiens
  misc_RNA (1)...(19): siRNA sense strand
gaggaugcacucaaucaga

SEQ ID NO: 1877231 - RNA, 19 nt, Homo sapiens
  misc_RNA (1)...(19): siRNA sense strand
caucaggccauaucuguau

SEQ ID NO: 1877232 - RNA, 19 nt, Homo sapiens
  misc_RNA (1)...(19): siRNA sense strand
ggccaaaccaguauuaaag

SEQ ID NO: 1877233 - RNA, 19 nt, Homo sapiens
  misc_RNA (1)...(19): siRNA sense strand
uguagaaauuucacccaaa

SEQ ID NO: 1877234 - RNA, 19 nt, Homo sapiens
  misc_RNA (1)...(19): siRNA sense strand
cagaauucauccgaagaaa

SEQ ID NO: 1877235 - RNA, 19 nt, Homo sapiens
  misc_RNA (1)...(19): siRNA sense strand
gaaugaacaguguccacaa

SEQ ID NO: 1877236 - RNA, 19 nt, Homo sapiens
  misc_RNA (1)...(19): siRNA sense strand
ggccauuacuccucuccaa

SEQ ID NO: 1877237 - RNA, 19 nt, Homo sapiens
  misc_RNA (1)...(19): siRNA sense strand
aauguaacccuucaucuga

SEQ ID NO: 1877238 - RNA, 19 nt, Homo sapiens
  misc_RNA (1)...(19): siRNA sense strand
uagauaaucccuugaugga

SEQ ID NO: 1877239 - RNA, 19 nt, Homo sapiens
  misc_RNA (1)...(19): siRNA sense strand
gaaccacagauguuucuag

SEQ ID NO: 1877240 - RNA, 19 nt, Homo sapiens
  misc_RNA (1)...(19): siRNA sense strand
caacuucagauggguuuaa

SEQ ID NO: 1877241 - RNA, 19 nt, Homo sapiens
  misc_RNA (1)...(19): siRNA sense strand
caacagucccuaguuacuu

SEQ ID NO: 1877242 - RNA, 19 nt, Homo sapiens
  misc_RNA (1)...(19): siRNA sense strand
gcaucgaguuggugggaau

SEQ ID NO: 1877243 - RNA, 19 nt, Homo sapiens
  misc_RNA (1)...(19): siRNA sense strand
guaacagacaggccugaaa

SEQ ID NO: 1877244 - RNA, 19 nt, Homo sapiens
  misc_RNA (1)...(19): siRNA sense strand
ggaagagaagcuguagaaa

SEQ ID NO: 1877245 - RNA, 19 nt, Homo sapiens
  misc_RNA (1)...(19): siRNA sense strand
uggaagagaagcuguagaa

SEQ ID NO: 1877246 - RNA, 19 nt, Homo sapiens
  misc_RNA (1)...(19): siRNA sense strand
cugaagaaguaaucuguca

SEQ ID NO: 1877247 - RNA, 19 nt, Homo sapiens
  misc_RNA (1)...(19): siRNA sense strand
gcaguugucagccuucugu

SEQ ID NO: 1877248 - RNA, 19 nt, Homo sapiens
  misc_RNA (1)...(19): siRNA sense strand
gcagaaugccaaugucaag

SEQ ID NO: 1877249 - RNA, 19 nt, Homo sapiens
  misc_RNA (1)...(19): siRNA sense strand
uaguuuaucugucacaucu

SEQ ID NO: 1877250 - RNA, 19 nt, Homo sapiens
  misc_RNA (1)...(19): siRNA sense strand
cgaggccauuacuugaaua

SEQ ID NO: 1877251 - RNA, 19 nt, Homo sapiens
  misc_RNA (1)...(19): siRNA sense strand
uaaggaagguguccccaaa

SEQ ID NO: 1877252 - RNA, 19 nt, Homo sapiens
  misc_RNA (1)...(19): siRNA sense strand
agaaguaaucugucaauca

SEQ ID NO: 1877253 - RNA, 19 nt, Homo sapiens
  misc_RNA (1)...(19): siRNA sense strand
uauaacggcagccuugaaa

SEQ ID NO: 1877254 - RNA, 19 nt, Homo sapiens
  misc_RNA (1)...(19): siRNA sense strand
ggaaguagaaacaucaaaa

SEQ ID NO: 1877255 - RNA, 19 nt, Homo sapiens
  misc_RNA (1)...(19): siRNA sense strand
gaauaugaaccaccuacca

SEQ ID NO: 1877256 - RNA, 19 nt, Homo sapiens
  misc_RNA (1)...(19): siRNA sense strand
gagaagcuguagaaaaugu

SEQ ID NO: 1877257 - RNA, 19 nt, Homo sapiens
  misc_RNA (1)...(19): siRNA sense strand
guccacaagucuccuuuca

SEQ ID NO: 1877258 - RNA, 19 nt, Homo sapiens
  misc_RNA (1)...(19): siRNA sense strand
caaggcagcuguucugaag

SEQ ID NO: 1877259 - RNA, 19 nt, Homo sapiens
  misc_RNA (1)...(19): siRNA sense strand
gagaagcauuccacuuugu

SEQ ID NO: 1877260 - RNA, 19 nt, Homo sapiens
  misc_RNA (1)...(19): siRNA sense strand
cgagaagcauuccacuuug

SEQ ID NO: 1877261 - RNA, 19 nt, Homo sapiens
  misc_RNA (1)...(19): siRNA sense strand
ggucacaccugcucacucu

SEQ ID NO: 1877262 - RNA, 19 nt, Homo sapiens
  misc_RNA (1)...(19): siRNA sense strand
gauuguggcucccaucagu

SEQ ID NO: 1877263 - RNA, 19 nt, Homo sapiens
  misc_RNA (1)...(19): siRNA sense strand
ucgagaagcauuccacuuu

SEQ ID NO: 1877264 - RNA, 19 nt, Homo sapiens
  misc_RNA (1)...(19): siRNA sense strand
gcacgaacugucaucuuug

SEQ ID NO: 1877265 - RNA, 19 nt, Homo sapiens
  misc_RNA (1)...(19): siRNA sense strand
gcaaggcagcuguucugaa

SEQ ID NO: 1877266 - RNA, 19 nt, Homo sapiens
  misc_RNA (1)...(19): siRNA sense strand
gaaacugugcugguucuug

SEQ ID NO: 1877267 - RNA, 19 nt, Homo sapiens
  misc_RNA (1)...(19): siRNA sense strand
agcacgaacugucaucuuu

SEQ ID NO: 1877268 - RNA, 19 nt, Homo sapiens
  misc_RNA (1)...(19): siRNA sense strand
ccagaaagccaggugauca

SEQ ID NO: 1877269 - RNA, 19 nt, Homo sapiens
  misc_RNA (1)...(19): siRNA sense strand
gggaaacugugcugguucu

SEQ ID NO: 1877270 - RNA, 19 nt, Homo sapiens
  misc_RNA (1)...(19): siRNA sense strand
gcugaggacuacgccaaga

SEQ ID NO: 1877271 - RNA, 19 nt, Homo sapiens
  misc_RNA (1)...(19): siRNA sense strand
cacgaacugucaucuuugu

SEQ ID NO: 1877272 - RNA, 19 nt, Homo sapiens
  misc_RNA (1)...(19): siRNA sense strand
ccgggaaacugugcugguu

SEQ ID NO: 1877273 - RNA, 19 nt, Homo sapiens
  misc_RNA (1)...(19): siRNA sense strand
gaagcauuccacuuuguag

SEQ ID NO: 1877274 - RNA, 19 nt, Homo sapiens
  misc_RNA (1)...(19): siRNA sense strand
agaagcauuccacuuugua

SEQ ID NO: 1877275 - RNA, 19 nt, Homo sapiens
  misc_RNA (1)...(19): siRNA sense strand
gcugagacaggcauuccaa

SEQ ID NO: 1877276 - RNA, 19 nt, Homo sapiens
  misc_RNA (1)...(19): siRNA sense strand
ucacaccugcucacucuuc

SEQ ID NO: 1877277 - RNA, 19 nt, Homo sapiens
  misc_RNA (1)...(19): siRNA sense strand
uacaggagcgggagaagau

SEQ ID NO: 1877278 - RNA, 19 nt, Homo sapiens
  misc_RNA (1)...(19): siRNA sense strand
gaaggcaaggcagcuguuc

SEQ ID NO: 1877279 - RNA, 19 nt, Homo sapiens
  misc_RNA (1)...(19): siRNA sense strand
ugaccgugcccuucgagaa

SEQ ID NO: 1877280 - RNA, 19 nt, Homo sapiens
  misc_RNA (1)...(19): siRNA sense strand
gagcacguacggccucuac

SEQ ID NO: 1877281 - RNA, 19 nt, Homo sapiens
  misc_RNA (1)...(19): siRNA sense strand
gcuguucugaagcgcauuu

SEQ ID NO: 1877282 - RNA, 19 nt, Homo sapiens
  misc_RNA (1)...(19): siRNA sense strand
uaaaucagcuggagaagga

SEQ ID NO: 1877283 - RNA, 19 nt, Homo sapiens
  misc_RNA (1)...(19): siRNA sense strand
gcagaugaacuuaacaaua

SEQ ID NO: 1877284 - RNA, 19 nt, Homo sapiens
  misc_RNA (1)...(19): siRNA sense strand
ggaaguaaaucgaguuagu

SEQ ID NO: 1877285 - RNA, 19 nt, Homo sapiens
  misc_RNA (1)...(19): siRNA sense strand
aaacagaaguagaagauga

SEQ ID NO: 1877286 - RNA, 19 nt, Homo sapiens
  misc_RNA (1)...(19): siRNA sense strand
uaaacucacucaagcaauu

SEQ ID NO: 1877287 - RNA, 19 nt, Homo sapiens
  misc_RNA (1)...(19): siRNA sense strand
gcaagacucagauacauuu

SEQ ID NO: 1877288 - RNA, 19 nt, Homo sapiens
  misc_RNA (1)...(19): siRNA sense strand
gugcagagcaugaugaaua

SEQ ID NO: 1877289 - RNA, 19 nt, Homo sapiens
  misc_RNA (1)...(19): siRNA sense strand
ggaagaagaagaggaagua

SEQ ID NO: 1877290 - RNA, 19 nt, Homo sapiens
  misc_RNA (1)...(19): siRNA sense strand
caauaagcauaccaucuuu

SEQ ID NO: 1877291 - RNA, 19 nt, Homo sapiens
  misc_RNA (1)...(19): siRNA sense strand
ggacacaagugcgaauguu

SEQ ID NO: 1877292 - RNA, 19 nt, Homo sapiens
  misc_RNA (1)...(19): siRNA sense strand
ggaagcaacagucaaagaa

SEQ ID NO: 1877293 - RNA, 19 nt, Homo sapiens
  misc_RNA (1)...(19): siRNA sense strand
ugacauuccugaaacagaa

SEQ ID NO: 1877294 - RNA, 19 nt, Homo sapiens
  misc_RNA (1)...(19): siRNA sense strand
guacuucaguuugaggaua

SEQ ID NO: 1877295 - RNA, 19 nt, Homo sapiens
  misc_RNA (1)...(19): siRNA sense strand
agaggaagcugaggaagaa

SEQ ID NO: 1877296 - RNA, 19 nt, Homo sapiens
  misc_RNA (1)...(19): siRNA sense strand
gauaaaagcagaaaaguga

SEQ ID NO: 1877297 - RNA, 19 nt, Homo sapiens
  misc_RNA (1)...(19): siRNA sense strand
guaaaucgaguuagucaga

SEQ ID NO: 1877298 - RNA, 19 nt, Homo sapiens
  misc_RNA (1)...(19): siRNA sense strand
gaagagaaaagcaaaagua

SEQ ID NO: 1877299 - RNA, 19 nt, Homo sapiens
  misc_RNA (1)...(19): siRNA sense strand
agacauugaugaugacgaa

SEQ ID NO: 1877300 - RNA, 19 nt, Homo sapiens
  misc_RNA (1)...(19): siRNA sense strand
gaaaccagaggaggaagua

SEQ ID NO: 1877301 - RNA, 19 nt, Homo sapiens
  misc_RNA (1)...(19): siRNA sense strand
gagaaaagcaaaaguauga

SEQ ID NO: 1877302 - RNA, 19 nt, Homo sapiens
  misc_RNA (1)...(19): siRNA sense strand
gacgaaagaccacauaauc

SEQ ID NO: 1877303 - RNA, 19 nt, Homo sapiens
  misc_RNA (1)...(19): siRNA sense strand
aaggagaaguggagaagaa

SEQ ID NO: 1877304 - RNA, 19 nt, Homo sapiens
  misc_RNA (1)...(19): siRNA sense strand
gaggaaguaaaucgaguua

SEQ ID NO: 1877305 - RNA, 19 nt, Homo sapiens
  misc_RNA (1)...(19): siRNA sense strand
gcugugagguuuuguuuaa

SEQ ID NO: 1877306 - RNA, 19 nt, Homo sapiens
  misc_RNA (1)...(19): siRNA sense strand
gcagugaagagcucagaaa

SEQ ID NO: 1877307 - RNA, 19 nt, Homo sapiens
  misc_RNA (1)...(19): siRNA sense strand
gacacaagugcgaauguua

SEQ ID NO: 1877308 - RNA, 19 nt, Homo sapiens
  misc_RNA (1)...(19): siRNA sense strand
agacucagauacauuugaa

SEQ ID NO: 1877309 - RNA, 19 nt, Homo sapiens
  misc_RNA (1)...(19): siRNA sense strand
aguagaagaugaugaagga

SEQ ID NO: 1877310 - RNA, 19 nt, Homo sapiens
  misc_RNA (1)...(19): siRNA sense strand
uauaacauguugcgacugu

SEQ ID NO: 1877311 - RNA, 19 nt, Homo sapiens
  misc_RNA (1)...(19): siRNA sense strand
gagaggaagcugaggaaga

SEQ ID NO: 1877312 - RNA, 19 nt, Homo sapiens
  misc_RNA (1)...(19): siRNA sense strand
aaguagacauugaugauga

SEQ ID NO: 1877313 - RNA, 19 nt, Homo sapiens
  misc_RNA (1)...(19): siRNA sense strand
caccagauuuaguugauga

SEQ ID NO: 1877314 - RNA, 19 nt, Homo sapiens
  misc_RNA (1)...(19): siRNA sense strand
aaaagaaccugaugagaga

SEQ ID NO: 1877315 - RNA, 19 nt, Homo sapiens
  misc_RNA (1)...(19): siRNA sense strand
gaagaagaagaggaaguaa

SEQ ID NO: 1877316 - RNA, 19 nt, Homo sapiens
  misc_RNA (1)...(19): siRNA sense strand
cacauguacuucaguuuga

SEQ ID NO: 1877317 - RNA, 19 nt, Homo sapiens
  misc_RNA (1)...(19): siRNA sense strand
caaaugcugguucucauga

SEQ ID NO: 1877318 - RNA, 19 nt, Homo sapiens
  misc_RNA (1)...(19): siRNA sense strand
gagcagaugaacuuaacaa

SEQ ID NO: 1877319 - RNA, 19 nt, Homo sapiens
  misc_RNA (1)...(19): siRNA sense strand
ccacaucucaguucuguuc

SEQ ID NO: 1877320 - RNA, 19 nt, Homo sapiens
  misc_RNA (1)...(19): siRNA sense strand
gaaguagacauugaugaug

SEQ ID NO: 1877321 - RNA, 19 nt, Homo sapiens
  misc_RNA (1)...(19): siRNA sense strand
gugaagagcucagaaaaga

SEQ ID NO: 1877322 - RNA, 19 nt, Homo sapiens
  misc_RNA (1)...(19): siRNA sense strand
acaauaagcauaccaucuu

SEQ ID NO: 1877323 - RNA, 19 nt, Homo sapiens
  misc_RNA (1)...(19): siRNA sense strand
agaagaagaggaaguaaau

SEQ ID NO: 1877324 - RNA, 19 nt, Homo sapiens
  misc_RNA (1)...(19): siRNA sense strand
aggaggaaguaaagaaauu

SEQ ID NO: 1877325 - RNA, 19 nt, Homo sapiens
  misc_RNA (1)...(19): siRNA sense strand
gagcaugaugaauauauug

SEQ ID NO: 1877326 - RNA, 19 nt, Homo sapiens
  misc_RNA (1)...(19): siRNA sense strand
acacaagugcgaauguuaa

SEQ ID NO: 1877327 - RNA, 19 nt, Homo sapiens
  misc_RNA (1)...(19): siRNA sense strand
ucacauguacuucaguuug

SEQ ID NO: 1877328 - RNA, 19 nt, Homo sapiens
  misc_RNA (1)...(19): siRNA sense strand
gaugacgaaagaccacaua

SEQ ID NO: 1877329 - RNA, 19 nt, Homo sapiens
  misc_RNA (1)...(19): siRNA sense strand
gcaaaugcugguucucaug

SEQ ID NO: 1877330 - RNA, 19 nt, Homo sapiens
  misc_RNA (1)...(19): siRNA sense strand
agaaguagaagaugaugaa

SEQ ID NO: 1877331 - RNA, 19 nt, Homo sapiens
  misc_RNA (1)...(19): siRNA sense strand
ugaaacagaaguagaagau

SEQ ID NO: 1877332 - RNA, 19 nt, Homo sapiens
  misc_RNA (1)...(19): siRNA sense strand
ugaggaagcaacagucaaa

SEQ ID NO: 1877333 - RNA, 19 nt, Homo sapiens
  misc_RNA (1)...(19): siRNA sense strand
gaaagugcagagcaugaug

SEQ ID NO: 1877334 - RNA, 19 nt, Homo sapiens
  misc_RNA (1)...(19): siRNA sense strand
caagugcgaauguuaaauc

SEQ ID NO: 1877335 - RNA, 19 nt, Homo sapiens
  misc_RNA (1)...(19): siRNA sense strand
ucucaguucuguuccaguu

SEQ ID NO: 1877336 - RNA, 19 nt, Homo sapiens
  misc_RNA (1)...(19): siRNA sense strand
aagcauaccaucuuuggaa

SEQ ID NO: 1877337 - RNA, 19 nt, Homo sapiens
  misc_RNA (1)...(19): siRNA sense strand
gcaccagauuuaguugaug

SEQ ID NO: 1877338 - RNA, 19 nt, Homo sapiens
  misc_RNA (1)...(19): siRNA sense strand
ggaggaaguaaagaaauug

SEQ ID NO: 1877339 - RNA, 19 nt, Homo sapiens
  misc_RNA (1)...(19): siRNA sense strand
gauaauggcacccacuuuu

SEQ ID NO: 1877340 - RNA, 19 nt, Homo sapiens
  misc_RNA (1)...(19): siRNA sense strand
gagaaguggagaagaaauc

SEQ ID NO: 1877341 - RNA, 19 nt, Homo sapiens
  misc_RNA (1)...(19): siRNA sense strand
gagagaaagaauugccaaa

SEQ ID NO: 1877342 - RNA, 19 nt, Homo sapiens
  misc_RNA (1)...(19): siRNA sense strand
gaggaaguaaagaaauuga

SEQ ID NO: 1877343 - RNA, 19 nt, Homo sapiens
  misc_RNA (1)...(19): siRNA sense strand
gaaaagaagcaagacaauu

SEQ ID NO: 1877344 - RNA, 19 nt, Homo sapiens
  misc_RNA (1)...(19): siRNA sense strand
cgaaagaccacauaaucca

SEQ ID NO: 1877345 - RNA, 19 nt, Homo sapiens
  misc_RNA (1)...(19): siRNA sense strand
aaugcugguucucaugaua

SEQ ID NO: 1877346 - RNA, 19 nt, Homo sapiens
  misc_RNA (1)...(19): siRNA sense strand
cauugaugaugacgaaaga

SEQ ID NO: 1877347 - RNA, 19 nt, Homo sapiens
  misc_RNA (1)...(19): siRNA sense strand
agauuuaguugaugaugga

SEQ ID NO: 1877348 - RNA, 19 nt, Homo sapiens
  misc_RNA (1)...(19): siRNA sense strand
gaaguaaaucgaguuaguc

SEQ ID NO: 1877349 - RNA, 19 nt, Homo sapiens
  misc_RNA (1)...(19): siRNA sense strand
ggaagcugaggaagaagaa

SEQ ID NO: 1877350 - RNA, 19 nt, Homo sapiens
  misc_RNA (1)...(19): siRNA sense strand
cagaggaggaaguaaagaa

SEQ ID NO: 1877351 - RNA, 19 nt, Homo sapiens
  misc_RNA (1)...(19): siRNA sense strand
cugaaccaguuuaaaucua

SEQ ID NO: 1877352 - RNA, 19 nt, Homo sapiens
  misc_RNA (1)...(19): siRNA sense strand
gaagcaacagucaaagaag

SEQ ID NO: 1877353 - RNA, 19 nt, Homo sapiens
  misc_RNA (1)...(19): siRNA sense strand
gucaugacuugcuuaagga

SEQ ID NO: 1877354 - RNA, 19 nt, Homo sapiens
  misc_RNA (1)...(19): siRNA sense strand
cgaguuagucagagcauga

SEQ ID NO: 1877355 - RNA, 19 nt, Homo sapiens
  misc_RNA (1)...(19): siRNA sense strand
gaggaggaaguaaagaaau

SEQ ID NO: 1877356 - RNA, 19 nt, Homo sapiens
  misc_RNA (1)...(19): siRNA sense strand
gaaggagggaagaaagcaa

SEQ ID NO: 1877357 - RNA, 19 nt, Homo sapiens
  misc_RNA (1)...(19): siRNA sense strand
ggaagaagccccuccagau

SEQ ID NO: 1877358 - RNA, 19 nt, Homo sapiens
  misc_RNA (1)...(19): siRNA sense strand
cagagcaugaugaauauau

SEQ ID NO: 1877359 - RNA, 19 nt, Homo sapiens
  misc_RNA (1)...(19): siRNA sense strand
ugcagagcaugaugaauau

SEQ ID NO: 1877360 - RNA, 19 nt, Homo sapiens
  misc_RNA (1)...(19): siRNA sense strand
ugaggaagaagaagaggaa

SEQ ID NO: 1877361 - RNA, 19 nt, Homo sapiens
  misc_RNA (1)...(19): siRNA sense strand
ggcaaaugcugguucucau

SEQ ID NO: 1877362 - RNA, 19 nt, Homo sapiens
  misc_RNA (1)...(19): siRNA sense strand
ugucacauguacuucaguu

SEQ ID NO: 1877363 - RNA, 19 nt, Homo sapiens
  misc_RNA (1)...(19): siRNA sense strand
gaagaagccccuccagaug

SEQ ID NO: 1877364 - RNA, 19 nt, Homo sapiens
  misc_RNA (1)...(19): siRNA sense strand
ucaguucuguuccaguugu

SEQ ID NO: 1877365 - RNA, 19 nt, Homo sapiens
  misc_RNA (1)...(19): siRNA sense strand
uacuucaguuugaggauaa

SEQ ID NO: 1877366 - RNA, 19 nt, Homo sapiens
  misc_RNA (1)...(19): siRNA sense strand
gaugaugaaggauggaugu

SEQ ID NO: 1877367 - RNA, 19 nt, Homo sapiens
  misc_RNA (1)...(19): siRNA sense strand
gaaacagaaguagaagaug

SEQ ID NO: 1877368 - RNA, 19 nt, Homo sapiens
  misc_RNA (1)...(19): siRNA sense strand
gaagaagaggaaguaaauc

SEQ ID NO: 1877369 - RNA, 19 nt, Homo sapiens
  misc_RNA (1)...(19): siRNA sense strand
ggaauccagugaauaaaag

SEQ ID NO: 1877370 - RNA, 19 nt, Homo sapiens
  misc_RNA (1)...(19): siRNA sense strand
ggagaaguggagaagaaau

SEQ ID NO: 1877371 - RNA, 19 nt, Homo sapiens
  misc_RNA (1)...(19): siRNA sense strand
gaaccugaugagagaaaga

SEQ ID NO: 1877372 - RNA, 19 nt, Homo sapiens
  misc_RNA (1)...(19): siRNA sense strand
gcagagcaugaugaauaua

SEQ ID NO: 1877373 - RNA, 19 nt, Homo sapiens
  misc_RNA (1)...(19): siRNA sense strand
aagaagaagaggaaguaaa

SEQ ID NO: 1877374 - RNA, 19 nt, Homo sapiens
  misc_RNA (1)...(19): siRNA sense strand
gagaaggagaaguggagaa

SEQ ID NO: 1877375 - RNA, 19 nt, Homo sapiens
  misc_RNA (1)...(19): siRNA sense strand
gaugauggagaagaugaaa

SEQ ID NO: 1877376 - RNA, 19 nt, Homo sapiens
  misc_RNA (1)...(19): siRNA sense strand
ugacgaaagaccacauaau

SEQ ID NO: 1877377 - RNA, 19 nt, Homo sapiens
  misc_RNA (1)...(19): siRNA sense strand
uaacauguugcgacuguca

SEQ ID NO: 1877378 - RNA, 19 nt, Homo sapiens
  misc_RNA (1)...(19): siRNA sense strand
gaaggagaaguggagaaga

SEQ ID NO: 1877379 - RNA, 19 nt, Homo sapiens
  misc_RNA (1)...(19): siRNA sense strand
agaaguagacauugaugau

SEQ ID NO: 1877380 - RNA, 19 nt, Homo sapiens
  misc_RNA (1)...(19): siRNA sense strand
ccacauaauccacacaaaa

SEQ ID NO: 1877381 - RNA, 19 nt, Homo sapiens
  misc_RNA (1)...(19): siRNA sense strand
agaggaggaaguaaagaaa

SEQ ID NO: 1877382 - RNA, 19 nt, Homo sapiens
  misc_RNA (1)...(19): siRNA sense strand
gcagggcaaucgucuguuc

SEQ ID NO: 1877383 - RNA, 19 nt, Homo sapiens
  misc_RNA (1)...(19): siRNA sense strand
agagcgagcugcacuccua

SEQ ID NO: 1877384 - RNA, 19 nt, Homo sapiens
  misc_RNA (1)...(19): siRNA sense strand
gagcagggcaaucgucugu

SEQ ID NO: 1877385 - RNA, 19 nt, Homo sapiens
  misc_RNA (1)...(19): siRNA sense strand
ggagguuauugacgcauuc

SEQ ID NO: 1877386 - RNA, 19 nt, Homo sapiens
  misc_RNA (1)...(19): siRNA sense strand
acaaguacauggcggacau

SEQ ID NO: 1877387 - RNA, 19 nt, Homo sapiens
  misc_RNA (1)...(19): siRNA sense strand
ccaguggcaucaccuacga

SEQ ID NO: 1877388 - RNA, 19 nt, Homo sapiens
  misc_RNA (1)...(19): siRNA sense strand
guggcaagaucagcuuuga

SEQ ID NO: 1877389 - RNA, 19 nt, Homo sapiens
  misc_RNA (1)...(19): siRNA sense strand
gagauggagagcuaugaug

SEQ ID NO: 1877390 - RNA, 19 nt, Homo sapiens
  misc_RNA (1)...(19): siRNA sense strand
ggagauggagagcuaugau

SEQ ID NO: 1877391 - RNA, 19 nt, Homo sapiens
  misc_RNA (1)...(19): siRNA sense strand
gaaaccacgagggugauga

SEQ ID NO: 1877392 - RNA, 19 nt, Homo sapiens
  misc_RNA (1)...(19): siRNA sense strand
cgaagaagaagcgcuggaa

SEQ ID NO: 1877393 - RNA, 19 nt, Homo sapiens
  misc_RNA (1)...(19): siRNA sense strand
cuaugaaggagguuauuga

SEQ ID NO: 1877394 - RNA, 19 nt, Homo sapiens
  misc_RNA (1)...(19): siRNA sense strand
aggccaagcacgacaagua

SEQ ID NO: 1877395 - RNA, 19 nt, Homo sapiens
  misc_RNA (1)...(19): siRNA sense strand
agauggagagcuaugauga

SEQ ID NO: 1877396 - RNA, 19 nt, Homo sapiens
  misc_RNA (1)...(19): siRNA sense strand
gcuaugaaggagguuauug

SEQ ID NO: 1877397 - RNA, 19 nt, Homo sapiens
  misc_RNA (1)...(19): siRNA sense strand
ccaaucugcagcgagcuua

SEQ ID NO: 1877398 - RNA, 19 nt, Homo sapiens
  misc_RNA (1)...(19): siRNA sense strand
gaagagugccagcgaaacc

SEQ ID NO: 1877399 - RNA, 19 nt, Homo sapiens
  misc_RNA (1)...(19): siRNA sense strand
ggacgggcagucugugaag

SEQ ID NO: 1877400 - RNA, 19 nt, Homo sapiens
  misc_RNA (1)...(19): siRNA sense strand
cuaccuguguggcaagauc

SEQ ID NO: 1877401 - RNA, 19 nt, Homo sapiens
  misc_RNA (1)...(19): siRNA sense strand
aagaagaagcgcuggaaca

SEQ ID NO: 1877402 - RNA, 19 nt, Homo sapiens
  misc_RNA (1)...(19): siRNA sense strand
gaggaagaagcgagacauc

SEQ ID NO: 1877403 - RNA, 19 nt, Homo sapiens
  misc_RNA (1)...(19): siRNA sense strand
cuuacagccuggccaagga

SEQ ID NO: 1877404 - RNA, 19 nt, Homo sapiens
  misc_RNA (1)...(19): siRNA sense strand
gccuugugcuaccugaaga

SEQ ID NO: 1877405 - RNA, 19 nt, Homo sapiens
  misc_RNA (1)...(19): siRNA sense strand
uggaagagugccagcgaaa

SEQ ID NO: 1877406 - RNA, 19 nt, Homo sapiens
  misc_RNA (1)...(19): siRNA sense strand
guuauugacgcauucaucu

SEQ ID NO: 1877407 - RNA, 19 nt, Homo sapiens
  misc_RNA (1)...(19): siRNA sense strand
caacaucccuccagauauu

SEQ ID NO: 1877408 - RNA, 19 nt, Homo sapiens
  misc_RNA (1)...(19): siRNA sense strand
gcacuguacuugugagaua

SEQ ID NO: 1877409 - RNA, 19 nt, Homo sapiens
  misc_RNA (1)...(19): siRNA sense strand
gaaacaagauccgcacauu

SEQ ID NO: 1877410 - RNA, 19 nt, Homo sapiens
  misc_RNA (1)...(19): siRNA sense strand
gauaaaaucugaacaguug

SEQ ID NO: 1877411 - RNA, 19 nt, Homo sapiens
  misc_RNA (1)...(19): siRNA sense strand
cggaggaaguguucauuua

SEQ ID NO: 1877412 - RNA, 19 nt, Homo sapiens
  misc_RNA (1)...(19): siRNA sense strand
gaacaguuguguaaugaag

SEQ ID NO: 1877413 - RNA, 19 nt, Homo sapiens
  misc_RNA (1)...(19): siRNA sense strand
caaggaauuugaagauguu

SEQ ID NO: 1877414 - RNA, 19 nt, Homo sapiens
  misc_RNA (1)...(19): siRNA sense strand
gagauagaaacgcuuauuu

SEQ ID NO: 1877415 - RNA, 19 nt, Homo sapiens
  misc_RNA (1)...(19): siRNA sense strand
caaacucaccacccucuua

SEQ ID NO: 1877416 - RNA, 19 nt, Homo sapiens
  misc_RNA (1)...(19): siRNA sense strand
ccaaggaauuugaagaugu

SEQ ID NO: 1877417 - RNA, 19 nt, Homo sapiens
  misc_RNA (1)...(19): siRNA sense strand
gaggaaguguucauuuaca

SEQ ID NO: 1877418 - RNA, 19 nt, Homo sapiens
  misc_RNA (1)...(19): siRNA sense strand
acacaccucucuugagcua

SEQ ID NO: 1877419 - RNA, 19 nt, Homo sapiens
  misc_RNA (1)...(19): siRNA sense strand
caacauguuuuccaaguuu

SEQ ID NO: 1877420 - RNA, 19 nt, Homo sapiens
  misc_RNA (1)...(19): siRNA sense strand
ugagcuaccugcgucuuua

SEQ ID NO: 1877421 - RNA, 19 nt, Homo sapiens
  misc_RNA (1)...(19): siRNA sense strand
guacacauaucuccaugag

SEQ ID NO: 1877422 - RNA, 19 nt, Homo sapiens
  misc_RNA (1)...(19): siRNA sense strand
gaacuacgccaagugugaa

SEQ ID NO: 1877423 - RNA, 19 nt, Homo sapiens
  misc_RNA (1)...(19): siRNA sense strand
gauccugggucuuugagau

SEQ ID NO: 1877424 - RNA, 19 nt, Homo sapiens
  misc_RNA (1)...(19): siRNA sense strand
gagaaauacuuagauuguc

SEQ ID NO: 1877425 - RNA, 19 nt, Homo sapiens
  misc_RNA (1)...(19): siRNA sense strand
aaucugaacaguuguguaa

SEQ ID NO: 1877426 - RNA, 19 nt, Homo sapiens
  misc_RNA (1)...(19): siRNA sense strand
gaaaguccacaagaacaaa

SEQ ID NO: 1877427 - RNA, 19 nt, Homo sapiens
  misc_RNA (1)...(19): siRNA sense strand
gugaggcguucuuugguuu

SEQ ID NO: 1877428 - RNA, 19 nt, Homo sapiens
  misc_RNA (1)...(19): siRNA sense strand
ccagauauuguuaaacuug

SEQ ID NO: 1877429 - RNA, 19 nt, Homo sapiens
  misc_RNA (1)...(19): siRNA sense strand
uacaaacacuggacugcaa

SEQ ID NO: 1877430 - RNA, 19 nt, Homo sapiens
  misc_RNA (1)...(19): siRNA sense strand
gaggcguucuuugguuuaa

SEQ ID NO: 1877431 - RNA, 19 nt, Homo sapiens
  misc_RNA (1)...(19): siRNA sense strand
caacuucgacccaaggaau

SEQ ID NO: 1877432 - RNA, 19 nt, Homo sapiens
  misc_RNA (1)...(19): siRNA sense strand
aacaagauccgcacauuga

SEQ ID NO: 1877433 - RNA, 19 nt, Homo sapiens
  misc_RNA (1)...(19): siRNA sense strand
aacaacaucccuccagaua

SEQ ID NO: 1877434 - RNA, 19 nt, Homo sapiens
  misc_RNA (1)...(19): siRNA sense strand
ucugaacaguuguguaaug

SEQ ID NO: 1877435 - RNA, 19 nt, Homo sapiens
  misc_RNA (1)...(19): siRNA sense strand
gcacauugaagaacaacau

SEQ ID NO: 1877436 - RNA, 19 nt, Homo sapiens
  misc_RNA (1)...(19): siRNA sense strand
aaacaagauccgcacauug

SEQ ID NO: 1877437 - RNA, 19 nt, Homo sapiens
  misc_RNA (1)...(19): siRNA sense strand
acaguuguguaaugaagaa

SEQ ID NO: 1877438 - RNA, 19 nt, Homo sapiens
  misc_RNA (1)...(19): siRNA sense strand
cugaacaguuguguaauga

SEQ ID NO: 1877439 - RNA, 19 nt, Homo sapiens
  misc_RNA (1)...(19): siRNA sense strand
ggaggaaguguucauuuac

SEQ ID NO: 1877440 - RNA, 19 nt, Homo sapiens
  misc_RNA (1)...(19): siRNA sense strand
guuguguaaugaagaagaa

SEQ ID NO: 1877441 - RNA, 19 nt, Homo sapiens
  misc_RNA (1)...(19): siRNA sense strand
gcagaaugagaucucuaaa

SEQ ID NO: 1877442 - RNA, 19 nt, Homo sapiens
  misc_RNA (1)...(19): siRNA sense strand
ggaacaauuggacccgaaa

SEQ ID NO: 1877443 - RNA, 19 nt, Homo sapiens
  misc_RNA (1)...(19): siRNA sense strand
gcacaaccagaucaaaguc

SEQ ID NO: 1877444 - RNA, 19 nt, Homo sapiens
  misc_RNA (1)...(19): siRNA sense strand
acaaccagaucaaagucuu

SEQ ID NO: 1877445 - RNA, 19 nt, Homo sapiens
  misc_RNA (1)...(19): siRNA sense strand
ugaaaguccacaagaacaa

SEQ ID NO: 1877446 - RNA, 19 nt, Homo sapiens
  misc_RNA (1)...(19): siRNA sense strand
gcaagcccaggcaguguga

SEQ ID NO: 1877447 - RNA, 19 nt, Homo sapiens
  misc_RNA (1)...(19): siRNA sense strand
gagagugaggcguucuuug

SEQ ID NO: 1877448 - RNA, 19 nt, Homo sapiens
  misc_RNA (1)...(19): siRNA sense strand
cuccagauauuguuaaacu

SEQ ID NO: 1877449 - RNA, 19 nt, Homo sapiens
  misc_RNA (1)...(19): siRNA sense strand
cuuagauugucaagaaaga

SEQ ID NO: 1877450 - RNA, 19 nt, Homo sapiens
  misc_RNA (1)...(19): siRNA sense strand
ugagauagaaacgcuuauu

SEQ ID NO: 1877451 - RNA, 19 nt, Homo sapiens
  misc_RNA (1)...(19): siRNA sense strand
aauuaaaccucagcagcaa

SEQ ID NO: 1877452 - RNA, 19 nt, Homo sapiens
  misc_RNA (1)...(19): siRNA sense strand
caugagcugaagaaauuaa

SEQ ID NO: 1877453 - RNA, 19 nt, Homo sapiens
  misc_RNA (1)...(19): siRNA sense strand
cugguuggccucaggauuu

SEQ ID NO: 1877454 - RNA, 19 nt, Homo sapiens
  misc_RNA (1)...(19): siRNA sense strand
gugagaagccgagugaauc

SEQ ID NO: 1877455 - RNA, 19 nt, Homo sapiens
  misc_RNA (1)...(19): siRNA sense strand
gcuaccugcgucuuuauga

SEQ ID NO: 1877456 - RNA, 19 nt, Homo sapiens
  misc_RNA (1)...(19): siRNA sense strand
caucgauccugggucuuug

SEQ ID NO: 1877457 - RNA, 19 nt, Homo sapiens
  misc_RNA (1)...(19): siRNA sense strand
ugagaagccgagugaauca

SEQ ID NO: 1877458 - RNA, 19 nt, Homo sapiens
  misc_RNA (1)...(19): siRNA sense strand
ugugagauagaaacgcuua

SEQ ID NO: 1877459 - RNA, 19 nt, Homo sapiens
  misc_RNA (1)...(19): siRNA sense strand
gacaaccccuggcacugua

SEQ ID NO: 1877460 - RNA, 19 nt, Homo sapiens
  misc_RNA (1)...(19): siRNA sense strand
gcagcagaaugagaucucu

SEQ ID NO: 1877461 - RNA, 19 nt, Homo sapiens
  misc_RNA (1)...(19): siRNA sense strand
gugaaaguccacaagaaca

SEQ ID NO: 1877462 - RNA, 19 nt, Homo sapiens
  misc_RNA (1)...(19): siRNA sense strand
gagcuaccugcgucuuuau

SEQ ID NO: 1877463 - RNA, 19 nt, Homo sapiens
  misc_RNA (1)...(19): siRNA sense strand
gcagcacaaccagaucaaa

SEQ ID NO: 1877464 - RNA, 19 nt, Homo sapiens
  misc_RNA (1)...(19): siRNA sense strand
cagcacaaccagaucaaag

SEQ ID NO: 1877465 - RNA, 19 nt, Homo sapiens
  misc_RNA (1)...(19): siRNA sense strand
gacccaaggaauuugaaga

SEQ ID NO: 1877466 - RNA, 19 nt, Homo sapiens
  misc_RNA (1)...(19): siRNA sense strand
gcaaaaggaaagaguugaa

SEQ ID NO: 1877467 - RNA, 19 nt, Homo sapiens
  misc_RNA (1)...(19): siRNA sense strand
caaccagaucaaagucuug

SEQ ID NO: 1877468 - RNA, 19 nt, Homo sapiens
  misc_RNA (1)...(19): siRNA sense strand
agugaggcguucuuugguu

SEQ ID NO: 1877469 - RNA, 19 nt, Homo sapiens
  misc_RNA (1)...(19): siRNA sense strand
cccaaggaauuugaagaug

SEQ ID NO: 1877470 - RNA, 19 nt, Homo sapiens
  misc_RNA (1)...(19): siRNA sense strand
caagauccgcacauugaag

SEQ ID NO: 1877471 - RNA, 19 nt, Homo sapiens
  misc_RNA (1)...(19): siRNA sense strand
acacuggacugcaaaagga

SEQ ID NO: 1877472 - RNA, 19 nt, Homo sapiens
  misc_RNA (1)...(19): siRNA sense strand
aaacaacaucccuccagau

SEQ ID NO: 1877473 - RNA, 19 nt, Homo sapiens
  misc_RNA (1)...(19): siRNA sense strand
ugaggcguucuuugguuua

SEQ ID NO: 1877474 - RNA, 19 nt, Homo sapiens
  misc_RNA (1)...(19): siRNA sense strand
agagugaggcguucuuugg

SEQ ID NO: 1877475 - RNA, 19 nt, Homo sapiens
  misc_RNA (1)...(19): siRNA sense strand
ucaucgauccugggucuuu

SEQ ID NO: 1877476 - RNA, 19 nt, Homo sapiens
  misc_RNA (1)...(19): siRNA sense strand
uuaaaccucagcagcaaug

SEQ ID NO: 1877477 - RNA, 19 nt, Homo sapiens
  misc_RNA (1)...(19): siRNA sense strand
gcugagcugcgcaaagcaa

SEQ ID NO: 1877478 - RNA, 19 nt, Homo sapiens
  misc_RNA (1)...(19): siRNA sense strand
cauuuacacaccucucuug

SEQ ID NO: 1877479 - RNA, 19 nt, Homo sapiens
  misc_RNA (1)...(19): siRNA sense strand
gaacaauuggacccgaaac

SEQ ID NO: 1877480 - RNA, 19 nt, Homo sapiens
  misc_RNA (1)...(19): siRNA sense strand
guacuugugagauagaaac

SEQ ID NO: 1877481 - RNA, 19 nt, Homo sapiens
  misc_RNA (1)...(19): siRNA sense strand
gaagugauaguucaaguaa

SEQ ID NO: 1877482 - RNA, 19 nt, Homo sapiens
  misc_RNA (1)...(19): siRNA sense strand
aaacaaggcagaagugaua

SEQ ID NO: 1877483 - RNA, 19 nt, Homo sapiens
  misc_RNA (1)...(19): siRNA sense strand
cgaauuaacuccaucgaau

SEQ ID NO: 1877484 - RNA, 19 nt, Homo sapiens
  misc_RNA (1)...(19): siRNA sense strand
gaugaaauuugcucugcua

SEQ ID NO: 1877485 - RNA, 19 nt, Homo sapiens
  misc_RNA (1)...(19): siRNA sense strand
gagaaguuauucagaguga

SEQ ID NO: 1877486 - RNA, 19 nt, Homo sapiens
  misc_RNA (1)...(19): siRNA sense strand
gaaguuauucagagugaua

SEQ ID NO: 1877487 - RNA, 19 nt, Homo sapiens
  misc_RNA (1)...(19): siRNA sense strand
gacgacagcuuugauaaga

SEQ ID NO: 1877488 - RNA, 19 nt, Homo sapiens
  misc_RNA (1)...(19): siRNA sense strand
gcgagucuccuguggauua

SEQ ID NO: 1877489 - RNA, 19 nt, Homo sapiens
  misc_RNA (1)...(19): siRNA sense strand
gaaauuugcucugcuaaaa

SEQ ID NO: 1877490 - RNA, 19 nt, Homo sapiens
  misc_RNA (1)...(19): siRNA sense strand
gugaugaugugaucgaauu

SEQ ID NO: 1877491 - RNA, 19 nt, Homo sapiens
  misc_RNA (1)...(19): siRNA sense strand
guaagaaggaugugauuga

SEQ ID NO: 1877492 - RNA, 19 nt, Homo sapiens
  misc_RNA (1)...(19): siRNA sense strand
gaaguuggcagacaaauac

SEQ ID NO: 1877493 - RNA, 19 nt, Homo sapiens
  misc_RNA (1)...(19): siRNA sense strand
cgacagcuuugauaagaau

SEQ ID NO: 1877494 - RNA, 19 nt, Homo sapiens
  misc_RNA (1)...(19): siRNA sense strand
guuuguggcuuguagaauu

SEQ ID NO: 1877495 - RNA, 19 nt, Homo sapiens
  misc_RNA (1)...(19): siRNA sense strand
ggugagcuguaccuucuuu

SEQ ID NO: 1877496 - RNA, 19 nt, Homo sapiens
  misc_RNA (1)...(19): siRNA sense strand
gaauuucaaccgagaaguu

SEQ ID NO: 1877497 - RNA, 19 nt, Homo sapiens
  misc_RNA (1)...(19): siRNA sense strand
caaaguuggugcaguugau

SEQ ID NO: 1877498 - RNA, 19 nt, Homo sapiens
  misc_RNA (1)...(19): siRNA sense strand
ugucaaaguuggugcaguu

SEQ ID NO: 1877499 - RNA, 19 nt, Homo sapiens
  misc_RNA (1)...(19): siRNA sense strand
ucagugauguggagcuuga

SEQ ID NO: 1877500 - RNA, 19 nt, Homo sapiens
  misc_RNA (1)...(19): siRNA sense strand
gcacgcaagaugaaauuug

SEQ ID NO: 1877501 - RNA, 19 nt, Homo sapiens
  misc_RNA (1)...(19): siRNA sense strand
agugauaguucaaguaaga

SEQ ID NO: 1877502 - RNA, 19 nt, Homo sapiens
  misc_RNA (1)...(19): siRNA sense strand
gauaguuuguggcuuguag

SEQ ID NO: 1877503 - RNA, 19 nt, Homo sapiens
  misc_RNA (1)...(19): siRNA sense strand
gauacgggauuagaggauu

SEQ ID NO: 1877504 - RNA, 19 nt, Homo sapiens
  misc_RNA (1)...(19): siRNA sense strand
gaggauacaguucuggaaa

SEQ ID NO: 1877505 - RNA, 19 nt, Homo sapiens
  misc_RNA (1)...(19): siRNA sense strand
gaaacuggcagcuguggau

SEQ ID NO: 1877506 - RNA, 19 nt, Homo sapiens
  misc_RNA (1)...(19): siRNA sense strand
aaacagaccagaagauuac

SEQ ID NO: 1877507 - RNA, 19 nt, Homo sapiens
  misc_RNA (1)...(19): siRNA sense strand
ugaaguuggcagacaaaua

SEQ ID NO: 1877508 - RNA, 19 nt, Homo sapiens
  misc_RNA (1)...(19): siRNA sense strand
gcaaggcaucaacgaguuu

SEQ ID NO: 1877509 - RNA, 19 nt, Homo sapiens
  misc_RNA (1)...(19): siRNA sense strand
ggcagugaauggucuguau

SEQ ID NO: 1877510 - RNA, 19 nt, Homo sapiens
  misc_RNA (1)...(19): siRNA sense strand
ucagggauuuccuaccauu

SEQ ID NO: 1877511 - RNA, 19 nt, Homo sapiens
  misc_RNA (1)...(19): siRNA sense strand
guucagggauuuccuacca

SEQ ID NO: 1877512 - RNA, 19 nt, Homo sapiens
  misc_RNA (1)...(19): siRNA sense strand
gacauugaccucagugaug

SEQ ID NO: 1877513 - RNA, 19 nt, Homo sapiens
  misc_RNA (1)...(19): siRNA sense strand
ggacggagcggaggauaca

SEQ ID NO: 1877514 - RNA, 19 nt, Homo sapiens
  misc_RNA (1)...(19): siRNA sense strand
gaugaugugaucgaauuaa

SEQ ID NO: 1877515 - RNA, 19 nt, Homo sapiens
  misc_RNA (1)...(19): siRNA sense strand
agggaaagaugaguuguga

SEQ ID NO: 1877516 - RNA, 19 nt, Homo sapiens
  misc_RNA (1)...(19): siRNA sense strand
uguggagcuugaugacuua

SEQ ID NO: 1877517 - RNA, 19 nt, Homo sapiens
  misc_RNA (1)...(19): siRNA sense strand
gaaauucuuaucuggaagu

SEQ ID NO: 1877518 - RNA, 19 nt, Homo sapiens
  misc_RNA (1)...(19): siRNA sense strand
uaagaaggaugugauugag

SEQ ID NO: 1877519 - RNA, 19 nt, Homo sapiens
  misc_RNA (1)...(19): siRNA sense strand
cagaacuggugaagccauu

SEQ ID NO: 1877520 - RNA, 19 nt, Homo sapiens
  misc_RNA (1)...(19): siRNA sense strand
gauuaacaccagaauggaa

SEQ ID NO: 1877521 - RNA, 19 nt, Homo sapiens
  misc_RNA (1)...(19): siRNA sense strand
gcagugaauggucuguauu

SEQ ID NO: 1877522 - RNA, 19 nt, Homo sapiens
  misc_RNA (1)...(19): siRNA sense strand
aggcagaagugauaguuca

SEQ ID NO: 1877523 - RNA, 19 nt, Homo sapiens
  misc_RNA (1)...(19): siRNA sense strand
ggacagugaagauguuugg

SEQ ID NO: 1877524 - RNA, 19 nt, Homo sapiens
  misc_RNA (1)...(19): siRNA sense strand
gcaacugcauuaaaagaug

SEQ ID NO: 1877525 - RNA, 19 nt, Homo sapiens
  misc_RNA (1)...(19): siRNA sense strand
cagaagugauaguucaagu

SEQ ID NO: 1877526 - RNA, 19 nt, Homo sapiens
  misc_RNA (1)...(19): siRNA sense strand
gaacuggugaagccauugu

SEQ ID NO: 1877527 - RNA, 19 nt, Homo sapiens
  misc_RNA (1)...(19): siRNA sense strand
ggaggucaguaugguguuc

SEQ ID NO: 1877528 - RNA, 19 nt, Homo sapiens
  misc_RNA (1)...(19): siRNA sense strand
ucaaugcacgcaagaugaa

SEQ ID NO: 1877529 - RNA, 19 nt, Homo sapiens
  misc_RNA (1)...(19): siRNA sense strand
cagacgacagcuuugauaa

SEQ ID NO: 1877530 - RNA, 19 nt, Homo sapiens
  misc_RNA (1)...(19): siRNA sense strand
acagacgacagcuuugaua

SEQ ID NO: 1877531 - RNA, 19 nt, Homo sapiens
  misc_RNA (1)...(19): siRNA sense strand
caaguaagaaggaugugau

SEQ ID NO: 1877532 - RNA, 19 nt, Homo sapiens
  misc_RNA (1)...(19): siRNA sense strand
ggaggauacaguucuggaa

SEQ ID NO: 1877533 - RNA, 19 nt, Homo sapiens
  misc_RNA (1)...(19): siRNA sense strand
ugaaauuugcucugcuaaa

SEQ ID NO: 1877534 - RNA, 19 nt, Homo sapiens
  misc_RNA (1)...(19): siRNA sense strand
uuaacuccaucgaauuuca

SEQ ID NO: 1877535 - RNA, 19 nt, Homo sapiens
  misc_RNA (1)...(19): siRNA sense strand
gggauuuccuaccauuaag

SEQ ID NO: 1877536 - RNA, 19 nt, Homo sapiens
  misc_RNA (1)...(19): siRNA sense strand
ggaugacauugaccucagu

SEQ ID NO: 1877537 - RNA, 19 nt, Homo sapiens
  misc_RNA (1)...(19): siRNA sense strand
cuccugagcugcuugagau

SEQ ID NO: 1877538 - RNA, 19 nt, Homo sapiens
  misc_RNA (1)...(19): siRNA sense strand
uguggucacugucaaagau

SEQ ID NO: 1877539 - RNA, 19 nt, Homo sapiens
  misc_RNA (1)...(19): siRNA sense strand
uggucacugucaaagauua

SEQ ID NO: 1877540 - RNA, 19 nt, Homo sapiens
  misc_RNA (1)...(19): siRNA sense strand
guaugguguucagggauuu

SEQ ID NO: 1877541 - RNA, 19 nt, Homo sapiens
  misc_RNA (1)...(19): siRNA sense strand
agucuccuguggauuauga

SEQ ID NO: 1877542 - RNA, 19 nt, Homo sapiens
  misc_RNA (1)...(19): siRNA sense strand
auacgggauuagaggauuu

SEQ ID NO: 1877543 - RNA, 19 nt, Homo sapiens
  misc_RNA (1)...(19): siRNA sense strand
ggucuguauuccucuagug

SEQ ID NO: 1877544 - RNA, 19 nt, Homo sapiens
  misc_RNA (1)...(19): siRNA sense strand
gugaagauguuuggauggu

SEQ ID NO: 1877545 - RNA, 19 nt, Homo sapiens
  misc_RNA (1)...(19): siRNA sense strand
ugacagacgacagcuuuga

SEQ ID NO: 1877546 - RNA, 19 nt, Homo sapiens
  misc_RNA (1)...(19): siRNA sense strand
agaagugauaguucaagua

SEQ ID NO: 1877547 - RNA, 19 nt, Homo sapiens
  misc_RNA (1)...(19): siRNA sense strand
caaggcagaagugauaguu

SEQ ID NO: 1877548 - RNA, 19 nt, Homo sapiens
  misc_RNA (1)...(19): siRNA sense strand
aaagauguugucaaaguug

SEQ ID NO: 1877549 - RNA, 19 nt, Homo sapiens
  misc_RNA (1)...(19): siRNA sense strand
ccgagaaguuauucagagu

SEQ ID NO: 1877550 - RNA, 19 nt, Homo sapiens
  misc_RNA (1)...(19): siRNA sense strand
uaagcaucauucccuagga

SEQ ID NO: 1877551 - RNA, 19 nt, Homo sapiens
  misc_RNA (1)...(19): siRNA sense strand
ucaaagauuaacaccagaa

SEQ ID NO: 1877552 - RNA, 19 nt, Homo sapiens
  misc_RNA (1)...(19): siRNA sense strand
gagcccagucugaacuuga

SEQ ID NO: 1877553 - RNA, 19 nt, Homo sapiens
  misc_RNA (1)...(19): siRNA sense strand
ggagcccagucugaacuug

SEQ ID NO: 1877554 - RNA, 19 nt, Homo sapiens
  misc_RNA (1)...(19): siRNA sense strand
gauuaucaacgaggacauu

SEQ ID NO: 1877555 - RNA, 19 nt, Homo sapiens
  misc_RNA (1)...(19): siRNA sense strand
cugagcugcuugagauuau

SEQ ID NO: 1877556 - RNA, 19 nt, Homo sapiens
  misc_RNA (1)...(19): siRNA sense strand
uaaaagagcagacgaaagg

SEQ ID NO: 1877557 - RNA, 19 nt, Homo sapiens
  misc_RNA (1)...(19): siRNA sense strand
gagcggaggauacaguucu

SEQ ID NO: 1877558 - RNA, 19 nt, Homo sapiens
  misc_RNA (1)...(19): siRNA sense strand
ggucacugucaaagauuaa

SEQ ID NO: 1877559 - RNA, 19 nt, Homo sapiens
  misc_RNA (1)...(19): siRNA sense strand
ccugagcugcuugagauua

SEQ ID NO: 1877560 - RNA, 19 nt, Homo sapiens
  misc_RNA (1)...(19): siRNA sense strand
ugaagauguuuggaugguu

SEQ ID NO: 1877561 - RNA, 19 nt, Homo sapiens
  misc_RNA (1)...(19): siRNA sense strand
gaugugaucgaauuaacuc

SEQ ID NO: 1877562 - RNA, 19 nt, Homo sapiens
  misc_RNA (1)...(19): siRNA sense strand
ggauuuccuaccauuaaga

SEQ ID NO: 1877563 - RNA, 19 nt, Homo sapiens
  misc_RNA (1)...(19): siRNA sense strand
aagauuaacaccagaaugg

SEQ ID NO: 1877564 - RNA, 19 nt, Homo sapiens
  misc_RNA (1)...(19): siRNA sense strand
caaagauuaacaccagaau

SEQ ID NO: 1877565 - RNA, 19 nt, Homo sapiens
  misc_RNA (1)...(19): siRNA sense strand
aguaugguguucagggauu

SEQ ID NO: 1877566 - RNA, 19 nt, Homo sapiens
  misc_RNA (1)...(19): siRNA sense strand
ucagggagcucucuuuugg

SEQ ID NO: 1877567 - RNA, 19 nt, Homo sapiens
  misc_RNA (1)...(19): siRNA sense strand
guauuccucuagugaugau

SEQ ID NO: 1877568 - RNA, 19 nt, Homo sapiens
  misc_RNA (1)...(19): siRNA sense strand
uuaccaagguggcagaacu

SEQ ID NO: 1877569 - RNA, 19 nt, Homo sapiens
  misc_RNA (1)...(19): siRNA sense strand
accagaagauuaccaaggu

SEQ ID NO: 1877570 - RNA, 19 nt, Homo sapiens
  misc_RNA (1)...(19): siRNA sense strand
guuggcagacaaauacaaa

SEQ ID NO: 1877571 - RNA, 19 nt, Homo sapiens
  misc_RNA (1)...(19): siRNA sense strand
aagagcagacgaaaggaaa

SEQ ID NO: 1877572 - RNA, 19 nt, Homo sapiens
  misc_RNA (1)...(19): siRNA sense strand
aaagagcagacgaaaggaa

SEQ ID NO: 1877573 - RNA, 19 nt, Homo sapiens
  misc_RNA (1)...(19): siRNA sense strand
cuggugagcuguaccuucu

SEQ ID NO: 1877574 - RNA, 19 nt, Homo sapiens
  misc_RNA (1)...(19): siRNA sense strand
cagcuuugauaagaauguu

SEQ ID NO: 1877575 - RNA, 19 nt, Homo sapiens
  misc_RNA (1)...(19): siRNA sense strand
gagcuguaccuucuuucug

SEQ ID NO: 1877576 - RNA, 19 nt, Homo sapiens
  misc_RNA (1)...(19): siRNA sense strand
gaaaacaaggcagaaguga

SEQ ID NO: 1877577 - RNA, 19 nt, Homo sapiens
  misc_RNA (1)...(19): siRNA sense strand
acaccagaauggaagaaag

SEQ ID NO: 1877578 - RNA, 19 nt, Homo sapiens
  misc_RNA (1)...(19): siRNA sense strand
aauuucaaccgagaaguua

SEQ ID NO: 1877579 - RNA, 19 nt, Homo sapiens
  misc_RNA (1)...(19): siRNA sense strand
aaaacagaccagaagauua

SEQ ID NO: 1877580 - RNA, 19 nt, Homo sapiens
  misc_RNA (1)...(19): siRNA sense strand
auucuuaucuggaaguucu

SEQ ID NO: 1877581 - RNA, 19 nt, Homo sapiens
  misc_RNA (1)...(19): siRNA sense strand
gcgcauagcuccgacuaca

SEQ ID NO: 1877582 - RNA, 19 nt, Homo sapiens
  misc_RNA (1)...(19): siRNA sense strand
guagacagcgccucaguuc

SEQ ID NO: 1877583 - RNA, 19 nt, Homo sapiens
  misc_RNA (1)...(19): siRNA sense strand
gcugagugcgucccugaua

SEQ ID NO: 1877584 - RNA, 19 nt, Homo sapiens
  misc_RNA (1)...(19): siRNA sense strand
ggcacucgcuggucucguu

SEQ ID NO: 1877585 - RNA, 19 nt, Homo sapiens
  misc_RNA (1)...(19): siRNA sense strand
ccaaauacagcaucaccuu

SEQ ID NO: 1877586 - RNA, 19 nt, Homo sapiens
  misc_RNA (1)...(19): siRNA sense strand
gaagaaccaguacgucagu

SEQ ID NO: 1877587 - RNA, 19 nt, Homo sapiens
  misc_RNA (1)...(19): siRNA sense strand
ccugggcgcugaugaagga

SEQ ID NO: 1877588 - RNA, 19 nt, Homo sapiens
  misc_RNA (1)...(19): siRNA sense strand
guaacgggcugcgcgacuu

SEQ ID NO: 1877589 - RNA, 19 nt, Homo sapiens
  misc_RNA (1)...(19): siRNA sense strand
cagcagggacaaugagauu

SEQ ID NO: 1877590 - RNA, 19 nt, Homo sapiens
  misc_RNA (1)...(19): siRNA sense strand
cugagugcgucccugauaa

SEQ ID NO: 1877591 - RNA, 19 nt, Homo sapiens
  misc_RNA (1)...(19): siRNA sense strand
gacagcggcuucaccuucu

SEQ ID NO: 1877592 - RNA, 19 nt, Homo sapiens
  misc_RNA (1)...(19): siRNA sense strand
ggaggaagaaccaguacgu

SEQ ID NO: 1877593 - RNA, 19 nt, Homo sapiens
  misc_RNA (1)...(19): siRNA sense strand
aaauacagcaucaccuuca

SEQ ID NO: 1877594 - RNA, 19 nt, Homo sapiens
  misc_RNA (1)...(19): siRNA sense strand
uacagcauguggaggaaga

SEQ ID NO: 1877595 - RNA, 19 nt, Homo sapiens
  misc_RNA (1)...(19): siRNA sense strand
ggccaacuccuucuacuac

SEQ ID NO: 1877596 - RNA, 19 nt, Homo sapiens
  misc_RNA (1)...(19): siRNA sense strand
uaacgggcugcgcgacuuu

SEQ ID NO: 1877597 - RNA, 19 nt, Homo sapiens
  misc_RNA (1)...(19): siRNA sense strand
gaaccaguacgucaguaac

SEQ ID NO: 1877598 - RNA, 19 nt, Homo sapiens
  misc_RNA (1)...(19): siRNA sense strand
gcacucgcuggucucguuu

SEQ ID NO: 1877599 - RNA, 19 nt, Homo sapiens
  misc_RNA (1)...(19): siRNA sense strand
gccccgagcucgaagaaga

SEQ ID NO: 1877600 - RNA, 19 nt, Homo sapiens
  misc_RNA (1)...(19): siRNA sense strand
gggcgcugaugaaggagau

SEQ ID NO: 1877601 - RNA, 19 nt, Homo sapiens
  misc_RNA (1)...(19): siRNA sense strand
agacagcgccucaguucca

SEQ ID NO: 1877602 - RNA, 19 nt, Homo sapiens
  misc_RNA (1)...(19): siRNA sense strand
agaaccaguacgucaguaa

SEQ ID NO: 1877603 - RNA, 19 nt, Homo sapiens
  misc_RNA (1)...(19): siRNA sense strand
aagaaccaguacgucagua

SEQ ID NO: 1877604 - RNA, 19 nt, Homo sapiens
  misc_RNA (1)...(19): siRNA sense strand
gcgccucaguuccagaaac

SEQ ID NO: 1877605 - RNA, 19 nt, Homo sapiens
  misc_RNA (1)...(19): siRNA sense strand
gguaagaaguuuccuguua

SEQ ID NO: 1877606 - RNA, 19 nt, Homo sapiens
  misc_RNA (1)...(19): siRNA sense strand
uaaggaaggugaaauauga

SEQ ID NO: 1877607 - RNA, 19 nt, Homo sapiens
  misc_RNA (1)...(19): siRNA sense strand
ccaaagaugucuacaaaga

SEQ ID NO: 1877608 - RNA, 19 nt, Homo sapiens
  misc_RNA (1)...(19): siRNA sense strand
caaauuggauugagacuau

SEQ ID NO: 1877609 - RNA, 19 nt, Homo sapiens
  misc_RNA (1)...(19): siRNA sense strand
uaacuuagauggucuggaa

SEQ ID NO: 1877610 - RNA, 19 nt, Homo sapiens
  misc_RNA (1)...(19): siRNA sense strand
caaagaacauuuccaagau

SEQ ID NO: 1877611 - RNA, 19 nt, Homo sapiens
  misc_RNA (1)...(19): siRNA sense strand
ccaagagacugcuggcaua

SEQ ID NO: 1877612 - RNA, 19 nt, Homo sapiens
  misc_RNA (1)...(19): siRNA sense strand
ggauggaacuacauucuug

SEQ ID NO: 1877613 - RNA, 19 nt, Homo sapiens
  misc_RNA (1)...(19): siRNA sense strand
caaaggaacagauacagua

SEQ ID NO: 1877614 - RNA, 19 nt, Homo sapiens
  misc_RNA (1)...(19): siRNA sense strand
guuacuggcuuacaaauug

SEQ ID NO: 1877615 - RNA, 19 nt, Homo sapiens
  misc_RNA (1)...(19): siRNA sense strand
gcagaacacaguaccauaa

SEQ ID NO: 1877616 - RNA, 19 nt, Homo sapiens
  misc_RNA (1)...(19): siRNA sense strand
caagguuacucacuauaaa

SEQ ID NO: 1877617 - RNA, 19 nt, Homo sapiens
  misc_RNA (1)...(19): siRNA sense strand
caagcaaaguuuauuccua

SEQ ID NO: 1877618 - RNA, 19 nt, Homo sapiens
  misc_RNA (1)...(19): siRNA sense strand
acaaguugcugccaccuua

SEQ ID NO: 1877619 - RNA, 19 nt, Homo sapiens
  misc_RNA (1)...(19): siRNA sense strand
gugaagaucuaagacauuu

SEQ ID NO: 1877620 - RNA, 19 nt, Homo sapiens
  misc_RNA (1)...(19): siRNA sense strand
gaaauaugaggaaacagua

SEQ ID NO: 1877621 - RNA, 19 nt, Homo sapiens
  misc_RNA (1)...(19): siRNA sense strand
gaaacccucuugacacugu

SEQ ID NO: 1877622 - RNA, 19 nt, Homo sapiens
  misc_RNA (1)...(19): siRNA sense strand
guaaaguaguaaccaaaga

SEQ ID NO: 1877623 - RNA, 19 nt, Homo sapiens
  misc_RNA (1)...(19): siRNA sense strand
gggauggaguagauauuaa

SEQ ID NO: 1877624 - RNA, 19 nt, Homo sapiens
  misc_RNA (1)...(19): siRNA sense strand
gcaggacuugcucuaauua

SEQ ID NO: 1877625 - RNA, 19 nt, Homo sapiens
  misc_RNA (1)...(19): siRNA sense strand
gaacauauuguaacacagu

SEQ ID NO: 1877626 - RNA, 19 nt, Homo sapiens
  misc_RNA (1)...(19): siRNA sense strand
cgauagcuaugacauuuau

SEQ ID NO: 1877627 - RNA, 19 nt, Homo sapiens
  misc_RNA (1)...(19): siRNA sense strand
uagauggucuggaauacaa

SEQ ID NO: 1877628 - RNA, 19 nt, Homo sapiens
  misc_RNA (1)...(19): siRNA sense strand
agccaaagaugucuacaaa

SEQ ID NO: 1877629 - RNA, 19 nt, Homo sapiens
  misc_RNA (1)...(19): siRNA sense strand
acacaggcaccacuaauaa

SEQ ID NO: 1877630 - RNA, 19 nt, Homo sapiens
  misc_RNA (1)...(19): siRNA sense strand
ucacuugguuaacuucaaa

SEQ ID NO: 1877631 - RNA, 19 nt, Homo sapiens
  misc_RNA (1)...(19): siRNA sense strand
caacacaagcaaaguuuau

SEQ ID NO: 1877632 - RNA, 19 nt, Homo sapiens
  misc_RNA (1)...(19): siRNA sense strand
ccuacaagguuacucacua

SEQ ID NO: 1877633 - RNA, 19 nt, Homo sapiens
  misc_RNA (1)...(19): siRNA sense strand
gaaaagggauggaacuaca

SEQ ID NO: 1877634 - RNA, 19 nt, Homo sapiens
  misc_RNA (1)...(19): siRNA sense strand
acaaagaacauuuccaaga

SEQ ID NO: 1877635 - RNA, 19 nt, Homo sapiens
  misc_RNA (1)...(19): siRNA sense strand
ggugaaauaugaggaaaca

SEQ ID NO: 1877636 - RNA, 19 nt, Homo sapiens
  misc_RNA (1)...(19): siRNA sense strand
ggguugcaguacauucuua

SEQ ID NO: 1877637 - RNA, 19 nt, Homo sapiens
  misc_RNA (1)...(19): siRNA sense strand
gauugagacuauucuuguu

SEQ ID NO: 1877638 - RNA, 19 nt, Homo sapiens
  misc_RNA (1)...(19): siRNA sense strand
cuacaagguuacucacuau

SEQ ID NO: 1877639 - RNA, 19 nt, Homo sapiens
  misc_RNA (1)...(19): siRNA sense strand
gacagaaaacuccaaauua

SEQ ID NO: 1877640 - RNA, 19 nt, Homo sapiens
  misc_RNA (1)...(19): siRNA sense strand
aaagaacauuuccaagaug

SEQ ID NO: 1877641 - RNA, 19 nt, Homo sapiens
  misc_RNA (1)...(19): siRNA sense strand
gaaggugaaauaugaggaa

SEQ ID NO: 1877642 - RNA, 19 nt, Homo sapiens
  misc_RNA (1)...(19): siRNA sense strand
caaagaugucuacaaagaa

SEQ ID NO: 1877643 - RNA, 19 nt, Homo sapiens
  misc_RNA (1)...(19): siRNA sense strand
ggauugagacuauucuugu

SEQ ID NO: 1877644 - RNA, 19 nt, Homo sapiens
  misc_RNA (1)...(19): siRNA sense strand
gaacauuuccaagaugaug

SEQ ID NO: 1877645 - RNA, 19 nt, Homo sapiens
  misc_RNA (1)...(19): siRNA sense strand
aagaacauuuccaagauga

SEQ ID NO: 1877646 - RNA, 19 nt, Homo sapiens
  misc_RNA (1)...(19): siRNA sense strand
caccuuaucuuagaguuau

SEQ ID NO: 1877647 - RNA, 19 nt, Homo sapiens
  misc_RNA (1)...(19): siRNA sense strand
cuacaaagaacauuuccaa

SEQ ID NO: 1877648 - RNA, 19 nt, Homo sapiens
  misc_RNA (1)...(19): siRNA sense strand
gcugccaccuuaucuuaga

SEQ ID NO: 1877649 - RNA, 19 nt, Homo sapiens
  misc_RNA (1)...(19): siRNA sense strand
gaguguuacuggcuuacaa

SEQ ID NO: 1877650 - RNA, 19 nt, Homo sapiens
  misc_RNA (1)...(19): siRNA sense strand
gaacucaaaggguuacaag

SEQ ID NO: 1877651 - RNA, 19 nt, Homo sapiens
  misc_RNA (1)...(19): siRNA sense strand
gcgauagcuaugacauuua

SEQ ID NO: 1877652 - RNA, 19 nt, Homo sapiens
  misc_RNA (1)...(19): siRNA sense strand
gaacacaguaccauaacag

SEQ ID NO: 1877653 - RNA, 19 nt, Homo sapiens
  misc_RNA (1)...(19): siRNA sense strand
aaagaugucuacaaagaac

SEQ ID NO: 1877654 - RNA, 19 nt, Homo sapiens
  misc_RNA (1)...(19): siRNA sense strand
cucaaaggguuacaaguug

SEQ ID NO: 1877655 - RNA, 19 nt, Homo sapiens
  misc_RNA (1)...(19): siRNA sense strand
gggcaucuuccaauagaaa

SEQ ID NO: 1877656 - RNA, 19 nt, Homo sapiens
  misc_RNA (1)...(19): siRNA sense strand
uugguuaacuucaaaggaa

SEQ ID NO: 1877657 - RNA, 19 nt, Homo sapiens
  misc_RNA (1)...(19): siRNA sense strand
caaucacaguggccacaaa

SEQ ID NO: 1877658 - RNA, 19 nt, Homo sapiens
  misc_RNA (1)...(19): siRNA sense strand
guucaguccugguauccaa

SEQ ID NO: 1877659 - RNA, 19 nt, Homo sapiens
  misc_RNA (1)...(19): siRNA sense strand
gaggaaauguucucuucac

SEQ ID NO: 1877660 - RNA, 19 nt, Homo sapiens
  misc_RNA (1)...(19): siRNA sense strand
ccaacacaagcaaaguuua

SEQ ID NO: 1877661 - RNA, 19 nt, Homo sapiens
  misc_RNA (1)...(19): siRNA sense strand
gaaaauauggggugaagau

SEQ ID NO: 1877662 - RNA, 19 nt, Homo sapiens
  misc_RNA (1)...(19): siRNA sense strand
guuccaggcuauucuguuc

SEQ ID NO: 1877663 - RNA, 19 nt, Homo sapiens
  misc_RNA (1)...(19): siRNA sense strand
ggaauacaaguuacaugau

SEQ ID NO: 1877664 - RNA, 19 nt, Homo sapiens
  misc_RNA (1)...(19): siRNA sense strand
ccugagggcuuugucauuc

SEQ ID NO: 1877665 - RNA, 19 nt, Homo sapiens
  misc_RNA (1)...(19): siRNA sense strand
acaagguuacucacuauaa

SEQ ID NO: 1877666 - RNA, 19 nt, Homo sapiens
  misc_RNA (1)...(19): siRNA sense strand
ucacaguggccacaaauuc

SEQ ID NO: 1877667 - RNA, 19 nt, Homo sapiens
  misc_RNA (1)...(19): siRNA sense strand
caucagugccuguaucugu

SEQ ID NO: 1877668 - RNA, 19 nt, Homo sapiens
  misc_RNA (1)...(19): siRNA sense strand
gggugaagaucuaagacau

SEQ ID NO: 1877669 - RNA, 19 nt, Homo sapiens
  misc_RNA (1)...(19): siRNA sense strand
agcgauagcuaugacauuu

SEQ ID NO: 1877670 - RNA, 19 nt, Homo sapiens
  misc_RNA (1)...(19): siRNA sense strand
caaauuaaggaaggugaaa

SEQ ID NO: 1877671 - RNA, 19 nt, Homo sapiens
  misc_RNA (1)...(19): siRNA sense strand
ggauggaguagauauuaau

SEQ ID NO: 1877672 - RNA, 19 nt, Homo sapiens
  misc_RNA (1)...(19): siRNA sense strand
caucugcucacuugguuaa

SEQ ID NO: 1877673 - RNA, 19 nt, Homo sapiens
  misc_RNA (1)...(19): siRNA sense strand
agagacugcuggcauagga

SEQ ID NO: 1877674 - RNA, 19 nt, Homo sapiens
  misc_RNA (1)...(19): siRNA sense strand
ugaaauaugaggaaacagu

SEQ ID NO: 1877675 - RNA, 19 nt, Homo sapiens
  misc_RNA (1)...(19): siRNA sense strand
aggacuugcucuaauuaaa

SEQ ID NO: 1877676 - RNA, 19 nt, Homo sapiens
  misc_RNA (1)...(19): siRNA sense strand
uggaauacaaguuacauga

SEQ ID NO: 1877677 - RNA, 19 nt, Homo sapiens
  misc_RNA (1)...(19): siRNA sense strand
ggugaagaucuaagacauu

SEQ ID NO: 1877678 - RNA, 19 nt, Homo sapiens
  misc_RNA (1)...(19): siRNA sense strand
acucaaaggguuacaaguu

SEQ ID NO: 1877679 - RNA, 19 nt, Homo sapiens
  misc_RNA (1)...(19): siRNA sense strand
agaaguuuccuguuacuga

SEQ ID NO: 1877680 - RNA, 19 nt, Homo sapiens
  misc_RNA (1)...(19): siRNA sense strand
uaagaaguuuccuguuacu

SEQ ID NO: 1877681 - RNA, 19 nt, Homo sapiens
  misc_RNA (1)...(19): siRNA sense strand
uacacaggcaccacuaaua

SEQ ID NO: 1877682 - RNA, 19 nt, Homo sapiens
  misc_RNA (1)...(19): siRNA sense strand
guacacaggcaccacuaau

SEQ ID NO: 1877683 - RNA, 19 nt, Homo sapiens
  misc_RNA (1)...(19): siRNA sense strand
gcaucuuccaauagaaaua

SEQ ID NO: 1877684 - RNA, 19 nt, Homo sapiens
  misc_RNA (1)...(19): siRNA sense strand
ccaccuuaucuuagaguua

SEQ ID NO: 1877685 - RNA, 19 nt, Homo sapiens
  misc_RNA (1)...(19): siRNA sense strand
ggacuugcucuaauuaaaa

SEQ ID NO: 1877686 - RNA, 19 nt, Homo sapiens
  misc_RNA (1)...(19): siRNA sense strand
gaaaauccaggaagccaaa

SEQ ID NO: 1877687 - RNA, 19 nt, Homo sapiens
  misc_RNA (1)...(19): siRNA sense strand
gcagaagccgaguucaaca

SEQ ID NO: 1877688 - RNA, 19 nt, Homo sapiens
  misc_RNA (1)...(19): siRNA sense strand
uaacacaguuuucaucagu

SEQ ID NO: 1877689 - RNA, 19 nt, Homo sapiens
  misc_RNA (1)...(19): siRNA sense strand
aguaguaaccaaagagaaa

SEQ ID NO: 1877690 - RNA, 19 nt, Homo sapiens
  misc_RNA (1)...(19): siRNA sense strand
aaacuucugguaacuuaga

SEQ ID NO: 1877691 - RNA, 19 nt, Homo sapiens
  misc_RNA (1)...(19): siRNA sense strand
gauggaacuacauucuuga

SEQ ID NO: 1877692 - RNA, 19 nt, Homo sapiens
  misc_RNA (1)...(19): siRNA sense strand
ccaggaagccaaagauguc

SEQ ID NO: 1877693 - RNA, 19 nt, Homo sapiens
  misc_RNA (1)...(19): siRNA sense strand
caauauccacccaacacaa

SEQ ID NO: 1877694 - RNA, 19 nt, Homo sapiens
  misc_RNA (1)...(19): siRNA sense strand
uggaaacccucuugacacu

SEQ ID NO: 1877695 - RNA, 19 nt, Homo sapiens
  misc_RNA (1)...(19): siRNA sense strand
gguaaaguaguaaccaaag

SEQ ID NO: 1877696 - RNA, 19 nt, Homo sapiens
  misc_RNA (1)...(19): siRNA sense strand
gggauggaacuacauucuu

SEQ ID NO: 1877697 - RNA, 19 nt, Homo sapiens
  misc_RNA (1)...(19): siRNA sense strand
uuaaggaaggugaaauaug

SEQ ID NO: 1877698 - RNA, 19 nt, Homo sapiens
  misc_RNA (1)...(19): siRNA sense strand
ggucuggaauacaaguuac

SEQ ID NO: 1877699 - RNA, 19 nt, Homo sapiens
  misc_RNA (1)...(19): siRNA sense strand
aagguaaaguaguaaccaa

SEQ ID NO: 1877700 - RNA, 19 nt, Homo sapiens
  misc_RNA (1)...(19): siRNA sense strand
uugcugccaccuuaucuua

SEQ ID NO: 1877701 - RNA, 19 nt, Homo sapiens
  misc_RNA (1)...(19): siRNA sense strand
gagaaaauauggggugaag

SEQ ID NO: 1877702 - RNA, 19 nt, Homo sapiens
  misc_RNA (1)...(19): siRNA sense strand
uaacuucaaaggaacagau

SEQ ID NO: 1877703 - RNA, 19 nt, Homo sapiens
  misc_RNA (1)...(19): siRNA sense strand
cuuacaaauuggauugaga

SEQ ID NO: 1877704 - RNA, 19 nt, Homo sapiens
  misc_RNA (1)...(19): siRNA sense strand
aaagggauggaacuacauu

SEQ ID NO: 1877705 - RNA, 19 nt, Homo sapiens
  misc_RNA (1)...(19): siRNA sense strand
gguaagaaguuuccuguua

SEQ ID NO: 1877706 - RNA, 19 nt, Homo sapiens
  misc_RNA (1)...(19): siRNA sense strand
uaaggaaggugaaauauga

SEQ ID NO: 1877707 - RNA, 19 nt, Homo sapiens
  misc_RNA (1)...(19): siRNA sense strand
ccaaagaugucuacaaaga

SEQ ID NO: 1877708 - RNA, 19 nt, Homo sapiens
  misc_RNA (1)...(19): siRNA sense strand
caaauuggauugagacuau

SEQ ID NO: 1877709 - RNA, 19 nt, Homo sapiens
  misc_RNA (1)...(19): siRNA sense strand
uaacuuagauggucuggaa

SEQ ID NO: 1877710 - RNA, 19 nt, Homo sapiens
  misc_RNA (1)...(19): siRNA sense strand
caaagaacauuuccaagau

SEQ ID NO: 1877711 - RNA, 19 nt, Homo sapiens
  misc_RNA (1)...(19): siRNA sense strand
ccaagagacugcuggcaua

SEQ ID NO: 1877712 - RNA, 19 nt, Homo sapiens
  misc_RNA (1)...(19): siRNA sense strand
ggauggaacuacauucuug

SEQ ID NO: 1877713 - RNA, 19 nt, Homo sapiens
  misc_RNA (1)...(19): siRNA sense strand
caaaggaacagauacagua

SEQ ID NO: 1877714 - RNA, 19 nt, Homo sapiens
  misc_RNA (1)...(19): siRNA sense strand
guuacuggcuuacaaauug

SEQ ID NO: 1877715 - RNA, 19 nt, Homo sapiens
  misc_RNA (1)...(19): siRNA sense strand
gcagaacacaguaccauaa

SEQ ID NO: 1877716 - RNA, 19 nt, Homo sapiens
  misc_RNA (1)...(19): siRNA sense strand
caagguuacucacuauaaa

SEQ ID NO: 1877717 - RNA, 19 nt, Homo sapiens
  misc_RNA (1)...(19): siRNA sense strand
caagcaaaguuuauuccua

SEQ ID NO: 1877718 - RNA, 19 nt, Homo sapiens
  misc_RNA (1)...(19): siRNA sense strand
acaaguugcugccaccuua

SEQ ID NO: 1877719 - RNA, 19 nt, Homo sapiens
  misc_RNA (1)...(19): siRNA sense strand
gugaagaucuaagacauuu

SEQ ID NO: 1877720 - RNA, 19 nt, Homo sapiens
  misc_RNA (1)...(19): siRNA sense strand
gaaauaugaggaaacagua

SEQ ID NO: 1877721 - RNA, 19 nt, Homo sapiens
  misc_RNA (1)...(19): siRNA sense strand
gaaacccucuugacacugu

SEQ ID NO: 1877722 - RNA, 19 nt, Homo sapiens
  misc_RNA (1)...(19): siRNA sense strand
guaaaguaguaaccaaaga

SEQ ID NO: 1877723 - RNA, 19 nt, Homo sapiens
  misc_RNA (1)...(19): siRNA sense strand
gggauggaguagauauuaa

SEQ ID NO: 1877724 - RNA, 19 nt, Homo sapiens
  misc_RNA (1)...(19): siRNA sense strand
gcaggacuugcucuaauua

SEQ ID NO: 1877725 - RNA, 19 nt, Homo sapiens
  misc_RNA (1)...(19): siRNA sense strand
gaacauauuguaacacagu

SEQ ID NO: 1877726 - RNA, 19 nt, Homo sapiens
  misc_RNA (1)...(19): siRNA sense strand
cgauagcuaugacauuuau

SEQ ID NO: 1877727 - RNA, 19 nt, Homo sapiens
  misc_RNA (1)...(19): siRNA sense strand
uagauggucuggaauacaa

SEQ ID NO: 1877728 - RNA, 19 nt, Homo sapiens
  misc_RNA (1)...(19): siRNA sense strand
agccaaagaugucuacaaa

SEQ ID NO: 1877729 - RNA, 19 nt, Homo sapiens
  misc_RNA (1)...(19): siRNA sense strand
acacaggcaccacuaauaa

SEQ ID NO: 1877730 - RNA, 19 nt, Homo sapiens
  misc_RNA (1)...(19): siRNA sense strand
ucacuugguuaacuucaaa

SEQ ID NO: 1877731 - RNA, 19 nt, Homo sapiens
  misc_RNA (1)...(19): siRNA sense strand
caacacaagcaaaguuuau

SEQ ID NO: 1877732 - RNA, 19 nt, Homo sapiens
  misc_RNA (1)...(19): siRNA sense strand
ccuacaagguuacucacua

SEQ ID NO: 1877733 - RNA, 19 nt, Homo sapiens
  misc_RNA (1)...(19): siRNA sense strand
gaaaagggauggaacuaca

SEQ ID NO: 1877734 - RNA, 19 nt, Homo sapiens
  misc_RNA (1)...(19): siRNA sense strand
acaaagaacauuuccaaga

SEQ ID NO: 1877735 - RNA, 19 nt, Homo sapiens
  misc_RNA (1)...(19): siRNA sense strand
ggugaaauaugaggaaaca

SEQ ID NO: 1877736 - RNA, 19 nt, Homo sapiens
  misc_RNA (1)...(19): siRNA sense strand
ggguugcaguacauucuua

SEQ ID NO: 1877737 - RNA, 19 nt, Homo sapiens
  misc_RNA (1)...(19): siRNA sense strand
gauugagacuauucuuguu

SEQ ID NO: 1877738 - RNA, 19 nt, Homo sapiens
  misc_RNA (1)...(19): siRNA sense strand
cuacaagguuacucacuau

SEQ ID NO: 1877739 - RNA, 19 nt, Homo sapiens
  misc_RNA (1)...(19): siRNA sense strand
gacagaaaacuccaaauua

SEQ ID NO: 1877740 - RNA, 19 nt, Homo sapiens
  misc_RNA (1)...(19): siRNA sense strand
aaagaacauuuccaagaug

SEQ ID NO: 1877741 - RNA, 19 nt, Homo sapiens
  misc_RNA (1)...(19): siRNA sense strand
gaaggugaaauaugaggaa

SEQ ID NO: 1877742 - RNA, 19 nt, Homo sapiens
  misc_RNA (1)...(19): siRNA sense strand
caaagaugucuacaaagaa

SEQ ID NO: 1877743 - RNA, 19 nt, Homo sapiens
  misc_RNA (1)...(19): siRNA sense strand
ggauugagacuauucuugu

SEQ ID NO: 1877744 - RNA, 19 nt, Homo sapiens
  misc_RNA (1)...(19): siRNA sense strand
gaacauuuccaagaugaug

SEQ ID NO: 1877745 - RNA, 19 nt, Homo sapiens
  misc_RNA (1)...(19): siRNA sense strand
aagaacauuuccaagauga

SEQ ID NO: 1877746 - RNA, 19 nt, Homo sapiens
  misc_RNA (1)...(19): siRNA sense strand
caccuuaucuuagaguuau

SEQ ID NO: 1877747 - RNA, 19 nt, Homo sapiens
  misc_RNA (1)...(19): siRNA sense strand
cuacaaagaacauuuccaa

SEQ ID NO: 1877748 - RNA, 19 nt, Homo sapiens
  misc_RNA (1)...(19): siRNA sense strand
gcugccaccuuaucuuaga

SEQ ID NO: 1877749 - RNA, 19 nt, Homo sapiens
  misc_RNA (1)...(19): siRNA sense strand
gaguguuacuggcuuacaa

SEQ ID NO: 1877750 - RNA, 19 nt, Homo sapiens
  misc_RNA (1)...(19): siRNA sense strand
gaacucaaaggguuacaag

SEQ ID NO: 1877751 - RNA, 19 nt, Homo sapiens
  misc_RNA (1)...(19): siRNA sense strand
gcgauagcuaugacauuua

SEQ ID NO: 1877752 - RNA, 19 nt, Homo sapiens
  misc_RNA (1)...(19): siRNA sense strand
gaacacaguaccauaacag

SEQ ID NO: 1877753 - RNA, 19 nt, Homo sapiens
  misc_RNA (1)...(19): siRNA sense strand
aaagaugucuacaaagaac

SEQ ID NO: 1877754 - RNA, 19 nt, Homo sapiens
  misc_RNA (1)...(19): siRNA sense strand
cucaaaggguuacaaguug

SEQ ID NO: 1877755 - RNA, 19 nt, Homo sapiens
  misc_RNA (1)...(19): siRNA sense strand
gggcaucuuccaauagaaa

SEQ ID NO: 1877756 - RNA, 19 nt, Homo sapiens
  misc_RNA (1)...(19): siRNA sense strand
uugguuaacuucaaaggaa

SEQ ID NO: 1877757 - RNA, 19 nt, Homo sapiens
  misc_RNA (1)...(19): siRNA sense strand
caaucacaguggccacaaa

SEQ ID NO: 1877758 - RNA, 19 nt, Homo sapiens
  misc_RNA (1)...(19): siRNA sense strand
guucaguccugguauccaa

SEQ ID NO: 1877759 - RNA, 19 nt, Homo sapiens
  misc_RNA (1)...(19): siRNA sense strand
gaggaaauguucucuucac

SEQ ID NO: 1877760 - RNA, 19 nt, Homo sapiens
  misc_RNA (1)...(19): siRNA sense strand
ccaacacaagcaaaguuua

SEQ ID NO: 1877761 - RNA, 19 nt, Homo sapiens
  misc_RNA (1)...(19): siRNA sense strand
gaaaauauggggugaagau

SEQ ID NO: 1877762 - RNA, 19 nt, Homo sapiens
  misc_RNA (1)...(19): siRNA sense strand
guuccaggcuauucuguuc

SEQ ID NO: 1877763 - RNA, 19 nt, Homo sapiens
  misc_RNA (1)...(19): siRNA sense strand
ggaauacaaguuacaugau

SEQ ID NO: 1877764 - RNA, 19 nt, Homo sapiens
  misc_RNA (1)...(19): siRNA sense strand
ccugagggcuuugucauuc

SEQ ID NO: 1877765 - RNA, 19 nt, Homo sapiens
  misc_RNA (1)...(19): siRNA sense strand
acaagguuacucacuauaa

SEQ ID NO: 1877766 - RNA, 19 nt, Homo sapiens
  misc_RNA (1)...(19): siRNA sense strand
ucacaguggccacaaauuc

SEQ ID NO: 1877767 - RNA, 19 nt, Homo sapiens
  misc_RNA (1)...(19): siRNA sense strand
caucagugccuguaucugu

SEQ ID NO: 1877768 - RNA, 19 nt, Homo sapiens
  misc_RNA (1)...(19): siRNA sense strand
gggugaagaucuaagacau

SEQ ID NO: 1877769 - RNA, 19 nt, Homo sapiens
  misc_RNA (1)...(19): siRNA sense strand
agcgauagcuaugacauuu

SEQ ID NO: 1877770 - RNA, 19 nt, Homo sapiens
  misc_RNA (1)...(19): siRNA sense strand
caaauuaaggaaggugaaa

SEQ ID NO: 1877771 - RNA, 19 nt, Homo sapiens
  misc_RNA (1)...(19): siRNA sense strand
ggauggaguagauauuaau

SEQ ID NO: 1877772 - RNA, 19 nt, Homo sapiens
  misc_RNA (1)...(19): siRNA sense strand
caucugcucacuugguuaa

SEQ ID NO: 1877773 - RNA, 19 nt, Homo sapiens
  misc_RNA (1)...(19): siRNA sense strand
agagacugcuggcauagga

SEQ ID NO: 1877774 - RNA, 19 nt, Homo sapiens
  misc_RNA (1)...(19): siRNA sense strand
ugaaauaugaggaaacagu

SEQ ID NO: 1877775 - RNA, 19 nt, Homo sapiens
  misc_RNA (1)...(19): siRNA sense strand
aggacuugcucuaauuaaa

SEQ ID NO: 1877776 - RNA, 19 nt, Homo sapiens
  misc_RNA (1)...(19): siRNA sense strand
uggaauacaaguuacauga

SEQ ID NO: 1877777 - RNA, 19 nt, Homo sapiens
  misc_RNA (1)...(19): siRNA sense strand
ggugaagaucuaagacauu

SEQ ID NO: 1877778 - RNA, 19 nt, Homo sapiens
  misc_RNA (1)...(19): siRNA sense strand
acucaaaggguuacaaguu

SEQ ID NO: 1877779 - RNA, 19 nt, Homo sapiens
  misc_RNA (1)...(19): siRNA sense strand
agaaguuuccuguuacuga

SEQ ID NO: 1877780 - RNA, 19 nt, Homo sapiens
  misc_RNA (1)...(19): siRNA sense strand
uaagaaguuuccuguuacu

SEQ ID NO: 1877781 - RNA, 19 nt, Homo sapiens
  misc_RNA (1)...(19): siRNA sense strand
uacacaggcaccacuaaua

SEQ ID NO: 1877782 - RNA, 19 nt, Homo sapiens
  misc_RNA (1)...(19): siRNA sense strand
guacacaggcaccacuaau

SEQ ID NO: 1877783 - RNA, 19 nt, Homo sapiens
  misc_RNA (1)...(19): siRNA sense strand
gcaucuuccaauagaaaua

SEQ ID NO: 1877784 - RNA, 19 nt, Homo sapiens
  misc_RNA (1)...(19): siRNA sense strand
ccaccuuaucuuagaguua

SEQ ID NO: 1877785 - RNA, 19 nt, Homo sapiens
  misc_RNA (1)...(19): siRNA sense strand
ggacuugcucuaauuaaaa

SEQ ID NO: 1877786 - RNA, 19 nt, Homo sapiens
  misc_RNA (1)...(19): siRNA sense strand
gaaaauccaggaagccaaa

SEQ ID NO: 1877787 - RNA, 19 nt, Homo sapiens
  misc_RNA (1)...(19): siRNA sense strand
gcagaagccgaguucaaca

SEQ ID NO: 1877788 - RNA, 19 nt, Homo sapiens
  misc_RNA (1)...(19): siRNA sense strand
uaacacaguuuucaucagu

SEQ ID NO: 1877789 - RNA, 19 nt, Homo sapiens
  misc_RNA (1)...(19): siRNA sense strand
aguaguaaccaaagagaaa

SEQ ID NO: 1877790 - RNA, 19 nt, Homo sapiens
  misc_RNA (1)...(19): siRNA sense strand
aaacuucugguaacuuaga

SEQ ID NO: 1877791 - RNA, 19 nt, Homo sapiens
  misc_RNA (1)...(19): siRNA sense strand
gauggaacuacauucuuga

SEQ ID NO: 1877792 - RNA, 19 nt, Homo sapiens
  misc_RNA (1)...(19): siRNA sense strand
ccaggaagccaaagauguc

SEQ ID NO: 1877793 - RNA, 19 nt, Homo sapiens
  misc_RNA (1)...(19): siRNA sense strand
caauauccacccaacacaa

SEQ ID NO: 1877794 - RNA, 19 nt, Homo sapiens
  misc_RNA (1)...(19): siRNA sense strand
uggaaacccucuugacacu

SEQ ID NO: 1877795 - RNA, 19 nt, Homo sapiens
  misc_RNA (1)...(19): siRNA sense strand
gguaaaguaguaaccaaag

SEQ ID NO: 1877796 - RNA, 19 nt, Homo sapiens
  misc_RNA (1)...(19): siRNA sense strand
gggauggaacuacauucuu

SEQ ID NO: 1877797 - RNA, 19 nt, Homo sapiens
  misc_RNA (1)...(19): siRNA sense strand
uuaaggaaggugaaauaug

SEQ ID NO: 1877798 - RNA, 19 nt, Homo sapiens
  misc_RNA (1)...(19): siRNA sense strand
ggucuggaauacaaguuac

SEQ ID NO: 1877799 - RNA, 19 nt, Homo sapiens
  misc_RNA (1)...(19): siRNA sense strand
aagguaaaguaguaaccaa

SEQ ID NO: 1877800 - RNA, 19 nt, Homo sapiens
  misc_RNA (1)...(19): siRNA sense strand
uugcugccaccuuaucuua

SEQ ID NO: 1877801 - RNA, 19 nt, Homo sapiens
  misc_RNA (1)...(19): siRNA sense strand
gagaaaauauggggugaag

SEQ ID NO: 1877802 - RNA, 19 nt, Homo sapiens
  misc_RNA (1)...(19): siRNA sense strand
uaacuucaaaggaacagau

SEQ ID NO: 1877803 - RNA, 19 nt, Homo sapiens
  misc_RNA (1)...(19): siRNA sense strand
cuuacaaauuggauugaga

SEQ ID NO: 1877804 - RNA, 19 nt, Homo sapiens
  misc_RNA (1)...(19): siRNA sense strand
aaagggauggaacuacauu

SEQ ID NO: 1877805 - RNA, 19 nt, Homo sapiens
  misc_RNA (1)...(19): siRNA sense strand
ggaaggagauggaacagau

SEQ ID NO: 1877806 - RNA, 19 nt, Homo sapiens
  misc_RNA (1)...(19): siRNA sense strand
gaacagcucgggccacuuu

SEQ ID NO: 1877807 - RNA, 19 nt, Homo sapiens
  misc_RNA (1)...(19): siRNA sense strand
gaaaagaaauugcccagaa

SEQ ID NO: 1877808 - RNA, 19 nt, Homo sapiens
  misc_RNA (1)...(19): siRNA sense strand
ggccuuggcugcagcauuu

SEQ ID NO: 1877809 - RNA, 19 nt, Homo sapiens
  misc_RNA (1)...(19): siRNA sense strand
caaggaggcuguaaaugug

SEQ ID NO: 1877810 - RNA, 19 nt, Homo sapiens
  misc_RNA (1)...(19): siRNA sense strand
gaaggacuaucucuaugau

SEQ ID NO: 1877811 - RNA, 19 nt, Homo sapiens
  misc_RNA (1)...(19): siRNA sense strand
aaaccaaauucacgcguua

SEQ ID NO: 1877812 - RNA, 19 nt, Homo sapiens
  misc_RNA (1)...(19): siRNA sense strand
gcaagauugugacagacua

SEQ ID NO: 1877813 - RNA, 19 nt, Homo sapiens
  misc_RNA (1)...(19): siRNA sense strand
gaaauaugaggaaggcuuu

SEQ ID NO: 1877814 - RNA, 19 nt, Homo sapiens
  misc_RNA (1)...(19): siRNA sense strand
caaaggaguaugacgauga

SEQ ID NO: 1877815 - RNA, 19 nt, Homo sapiens
  misc_RNA (1)...(19): siRNA sense strand
ggucguuucugcuguguau

SEQ ID NO: 1877816 - RNA, 19 nt, Homo sapiens
  misc_RNA (1)...(19): siRNA sense strand
ggcaguauguggaucaguu

SEQ ID NO: 1877817 - RNA, 19 nt, Homo sapiens
  misc_RNA (1)...(19): siRNA sense strand
aaccaucacugcugaggua

SEQ ID NO: 1877818 - RNA, 19 nt, Homo sapiens
  misc_RNA (1)...(19): siRNA sense strand
ggcaggagcuucucaugca

SEQ ID NO: 1877819 - RNA, 19 nt, Homo sapiens
  misc_RNA (1)...(19): siRNA sense strand
caaauucacgcguuaggaa

SEQ ID NO: 1877820 - RNA, 19 nt, Homo sapiens
  misc_RNA (1)...(19): siRNA sense strand
gaaaagcucuccugaugag

SEQ ID NO: 1877821 - RNA, 19 nt, Homo sapiens
  misc_RNA (1)...(19): siRNA sense strand
ggagauggaacagauugua

SEQ ID NO: 1877822 - RNA, 19 nt, Homo sapiens
  misc_RNA (1)...(19): siRNA sense strand
gugaaaagcucuccugaug

SEQ ID NO: 1877823 - RNA, 19 nt, Homo sapiens
  misc_RNA (1)...(19): siRNA sense strand
ucucuaaccuggaucacaa

SEQ ID NO: 1877824 - RNA, 19 nt, Homo sapiens
  misc_RNA (1)...(19): siRNA sense strand
gggacgagaucauggcaau

SEQ ID NO: 1877825 - RNA, 19 nt, Homo sapiens
  misc_RNA (1)...(19): siRNA sense strand
acaaggaggcuguaaaugu

SEQ ID NO: 1877826 - RNA, 19 nt, Homo sapiens
  misc_RNA (1)...(19): siRNA sense strand
gcccgagaauuccggcaua

SEQ ID NO: 1877827 - RNA, 19 nt, Homo sapiens
  misc_RNA (1)...(19): siRNA sense strand
cgacuucucuaaccuggau

SEQ ID NO: 1877828 - RNA, 19 nt, Homo sapiens
  misc_RNA (1)...(19): siRNA sense strand
acgaugagcugaccuucuu

SEQ ID NO: 1877829 - RNA, 19 nt, Homo sapiens
  misc_RNA (1)...(19): siRNA sense strand
caaaggaacagcuacucuu

SEQ ID NO: 1877830 - RNA, 19 nt, Homo sapiens
  misc_RNA (1)...(19): siRNA sense strand
ucacaaggaggcuguaaau

SEQ ID NO: 1877831 - RNA, 19 nt, Homo sapiens
  misc_RNA (1)...(19): siRNA sense strand
aagagaaguuuaagaagca

SEQ ID NO: 1877832 - RNA, 19 nt, Homo sapiens
  misc_RNA (1)...(19): siRNA sense strand
gaggaggaagagaaguuua

SEQ ID NO: 1877833 - RNA, 19 nt, Homo sapiens
  misc_RNA (1)...(19): siRNA sense strand
gaaggagauggaacagauu

SEQ ID NO: 1877834 - RNA, 19 nt, Homo sapiens
  misc_RNA (1)...(19): siRNA sense strand
uaagguggauuuucugauu

SEQ ID NO: 1877835 - RNA, 19 nt, Homo sapiens
  misc_RNA (1)...(19): siRNA sense strand
cagcuacucuugccuaaaa

SEQ ID NO: 1877836 - RNA, 19 nt, Homo sapiens
  misc_RNA (1)...(19): siRNA sense strand
ccagaaggcagcagaggaa

SEQ ID NO: 1877837 - RNA, 19 nt, Homo sapiens
  misc_RNA (1)...(19): siRNA sense strand
gaggugggauuggagauag

SEQ ID NO: 1877838 - RNA, 19 nt, Homo sapiens
  misc_RNA (1)...(19): siRNA sense strand
uccagacucucauuccuuu

SEQ ID NO: 1877839 - RNA, 19 nt, Homo sapiens
  misc_RNA (1)...(19): siRNA sense strand
ggaccagauugucgaaguc

SEQ ID NO: 1877840 - RNA, 19 nt, Homo sapiens
  misc_RNA (1)...(19): siRNA sense strand
gcaguauguggaucaguuu

SEQ ID NO: 1877841 - RNA, 19 nt, Homo sapiens
  misc_RNA (1)...(19): siRNA sense strand
ucaaggauccagacucuca

SEQ ID NO: 1877842 - RNA, 19 nt, Homo sapiens
  misc_RNA (1)...(19): siRNA sense strand
ggaagagaaguuuaagaag

SEQ ID NO: 1877843 - RNA, 19 nt, Homo sapiens
  misc_RNA (1)...(19): siRNA sense strand
aggaagagaaguuuaagaa

SEQ ID NO: 1877844 - RNA, 19 nt, Homo sapiens
  misc_RNA (1)...(19): siRNA sense strand
gggaccagauugucgaagu

SEQ ID NO: 1877845 - RNA, 19 nt, Homo sapiens
  misc_RNA (1)...(19): siRNA sense strand
aggacuaucucuaugaugu

SEQ ID NO: 1877846 - RNA, 19 nt, Homo sapiens
  misc_RNA (1)...(19): siRNA sense strand
gcugugggcucuucaucuc

SEQ ID NO: 1877847 - RNA, 19 nt, Homo sapiens
  misc_RNA (1)...(19): siRNA sense strand
ugagagaggccacaugaca

SEQ ID NO: 1877848 - RNA, 19 nt, Homo sapiens
  misc_RNA (1)...(19): siRNA sense strand
agaagcggcuggcgaugga

SEQ ID NO: 1877849 - RNA, 19 nt, Homo sapiens
  misc_RNA (1)...(19): siRNA sense strand
gaauguaccaccagaccau

SEQ ID NO: 1877850 - RNA, 19 nt, Homo sapiens
  misc_RNA (1)...(19): siRNA sense strand
gaaucuaucacccaggaau

SEQ ID NO: 1877851 - RNA, 19 nt, Homo sapiens
  misc_RNA (1)...(19): siRNA sense strand
gagauggagcggcaaagga

SEQ ID NO: 1877852 - RNA, 19 nt, Homo sapiens
  misc_RNA (1)...(19): siRNA sense strand
ggagauaggggaccagauu

SEQ ID NO: 1877853 - RNA, 19 nt, Homo sapiens
  misc_RNA (1)...(19): siRNA sense strand
agaaggacuaucucuauga

SEQ ID NO: 1877854 - RNA, 19 nt, Homo sapiens
  misc_RNA (1)...(19): siRNA sense strand
ucucaaggauccagacucu

SEQ ID NO: 1877855 - RNA, 19 nt, Homo sapiens
  misc_RNA (1)...(19): siRNA sense strand
gggacuggaucgaccuugu

SEQ ID NO: 1877856 - RNA, 19 nt, Homo sapiens
  misc_RNA (1)...(19): siRNA sense strand
aaaggaacagcuacucuug

SEQ ID NO: 1877857 - RNA, 19 nt, Homo sapiens
  misc_RNA (1)...(19): siRNA sense strand
gaggaagagaaguuuaaga

SEQ ID NO: 1877858 - RNA, 19 nt, Homo sapiens
  misc_RNA (1)...(19): siRNA sense strand
cagaagccuggcaucuuua

SEQ ID NO: 1877859 - RNA, 19 nt, Homo sapiens
  misc_RNA (1)...(19): siRNA sense strand
gacgagaucauggcaauca

SEQ ID NO: 1877860 - RNA, 19 nt, Homo sapiens
  misc_RNA (1)...(19): siRNA sense strand
gagcagggagagcaggauu

SEQ ID NO: 1877861 - RNA, 19 nt, Homo sapiens
  misc_RNA (1)...(19): siRNA sense strand
gcaagccaaaguaugauca

SEQ ID NO: 1877862 - RNA, 19 nt, Homo sapiens
  misc_RNA (1)...(19): siRNA sense strand
ucuaugaugugcugcgaau

SEQ ID NO: 1877863 - RNA, 19 nt, Homo sapiens
  misc_RNA (1)...(19): siRNA sense strand
gcagggagagcaggauuuc

SEQ ID NO: 1877864 - RNA, 19 nt, Homo sapiens
  misc_RNA (1)...(19): siRNA sense strand
guauguggaucaguuugug

SEQ ID NO: 1877865 - RNA, 19 nt, Homo sapiens
  misc_RNA (1)...(19): siRNA sense strand
gcccgcagaugaccuggau

SEQ ID NO: 1877866 - RNA, 19 nt, Homo sapiens
  misc_RNA (1)...(19): siRNA sense strand
gaucacaaggaggcuguaa

SEQ ID NO: 1877867 - RNA, 19 nt, Homo sapiens
  misc_RNA (1)...(19): siRNA sense strand
gagauggaacagauuguag

SEQ ID NO: 1877868 - RNA, 19 nt, Homo sapiens
  misc_RNA (1)...(19): siRNA sense strand
gcaaaggagaaaagaaauu

SEQ ID NO: 1877869 - RNA, 19 nt, Homo sapiens
  misc_RNA (1)...(19): siRNA sense strand
gccgggagcuguucaugac

SEQ ID NO: 1877870 - RNA, 19 nt, Homo sapiens
  misc_RNA (1)...(19): siRNA sense strand
ggcuguaaaugugcugaaa

SEQ ID NO: 1877871 - RNA, 19 nt, Homo sapiens
  misc_RNA (1)...(19): siRNA sense strand
caaaaggggaaaccaaauu

SEQ ID NO: 1877872 - RNA, 19 nt, Homo sapiens
  misc_RNA (1)...(19): siRNA sense strand
gagaauuccggcauaaggu

SEQ ID NO: 1877873 - RNA, 19 nt, Homo sapiens
  misc_RNA (1)...(19): siRNA sense strand
gaagaagacuggggcucaa

SEQ ID NO: 1877874 - RNA, 19 nt, Homo sapiens
  misc_RNA (1)...(19): siRNA sense strand
ggacuggaucgaccuugug

SEQ ID NO: 1877875 - RNA, 19 nt, Homo sapiens
  misc_RNA (1)...(19): siRNA sense strand
uauuccaucuccuccugua

SEQ ID NO: 1877876 - RNA, 19 nt, Homo sapiens
  misc_RNA (1)...(19): siRNA sense strand
gauccagacucucauuccu

SEQ ID NO: 1877877 - RNA, 19 nt, Homo sapiens
  misc_RNA (1)...(19): siRNA sense strand
gaaccagggccagauaagg

SEQ ID NO: 1877878 - RNA, 19 nt, Homo sapiens
  misc_RNA (1)...(19): siRNA sense strand
aaaggaguaugacgaugag

SEQ ID NO: 1877879 - RNA, 19 nt, Homo sapiens
  misc_RNA (1)...(19): siRNA sense strand
uagaggaggaagagaaguu

SEQ ID NO: 1877880 - RNA, 19 nt, Homo sapiens
  misc_RNA (1)...(19): siRNA sense strand
ggucaucaaccucauucga

SEQ ID NO: 1877881 - RNA, 19 nt, Homo sapiens
  misc_RNA (1)...(19): siRNA sense strand
gucaucaaccucauucgaa

SEQ ID NO: 1877882 - RNA, 19 nt, Homo sapiens
  misc_RNA (1)...(19): siRNA sense strand
gcagaaggccuggaaucag

SEQ ID NO: 1877883 - RNA, 19 nt, Homo sapiens
  misc_RNA (1)...(19): siRNA sense strand
gcaugguggcauugugaaa

SEQ ID NO: 1877884 - RNA, 19 nt, Homo sapiens
  misc_RNA (1)...(19): siRNA sense strand
uaagaagcaaugggaagaa

SEQ ID NO: 1877885 - RNA, 19 nt, Homo sapiens
  misc_RNA (1)...(19): siRNA sense strand
aaaaguggcccgagaauuc

SEQ ID NO: 1877886 - RNA, 19 nt, Homo sapiens
  misc_RNA (1)...(19): siRNA sense strand
gaaaaguggcccgagaauu

SEQ ID NO: 1877887 - RNA, 19 nt, Homo sapiens
  misc_RNA (1)...(19): siRNA sense strand
acggcaagauugugacaga

SEQ ID NO: 1877888 - RNA, 19 nt, Homo sapiens
  misc_RNA (1)...(19): siRNA sense strand
gggcucaaaggaacagcua

SEQ ID NO: 1877889 - RNA, 19 nt, Homo sapiens
  misc_RNA (1)...(19): siRNA sense strand
gaagcaaugggaagaagac

SEQ ID NO: 1877890 - RNA, 19 nt, Homo sapiens
  misc_RNA (1)...(19): siRNA sense strand
ggacuaucucuaugaugug

SEQ ID NO: 1877891 - RNA, 19 nt, Homo sapiens
  misc_RNA (1)...(19): siRNA sense strand
agagauaccggaaggagau

SEQ ID NO: 1877892 - RNA, 19 nt, Homo sapiens
  misc_RNA (1)...(19): siRNA sense strand
aggaggaagagaaguuuaa

SEQ ID NO: 1877893 - RNA, 19 nt, Homo sapiens
  misc_RNA (1)...(19): siRNA sense strand
uaugaugugcugcgaaugu

SEQ ID NO: 1877894 - RNA, 19 nt, Homo sapiens
  misc_RNA (1)...(19): siRNA sense strand
gugguggccuggaguuugg

SEQ ID NO: 1877895 - RNA, 19 nt, Homo sapiens
  misc_RNA (1)...(19): siRNA sense strand
cuugggaccugaaucuauc

SEQ ID NO: 1877896 - RNA, 19 nt, Homo sapiens
  misc_RNA (1)...(19): siRNA sense strand
cccgagaauuccggcauaa

SEQ ID NO: 1877897 - RNA, 19 nt, Homo sapiens
  misc_RNA (1)...(19): siRNA sense strand
ugaggugggauuggagaua

SEQ ID NO: 1877898 - RNA, 19 nt, Homo sapiens
  misc_RNA (1)...(19): siRNA sense strand
ugagcggcaugguggcauu

SEQ ID NO: 1877899 - RNA, 19 nt, Homo sapiens
  misc_RNA (1)...(19): siRNA sense strand
cugaccaucuccauuguag

SEQ ID NO: 1877900 - RNA, 19 nt, Homo sapiens
  misc_RNA (1)...(19): siRNA sense strand
ucaauggcgucgacuucuc

SEQ ID NO: 1877901 - RNA, 19 nt, Homo sapiens
  misc_RNA (1)...(19): siRNA sense strand
caucucccaccucaucaaa

SEQ ID NO: 1877902 - RNA, 19 nt, Homo sapiens
  misc_RNA (1)...(19): siRNA sense strand
cuugagagaggccacauga

SEQ ID NO: 1877903 - RNA, 19 nt, Homo sapiens
  misc_RNA (1)...(19): siRNA sense strand
cgagaauuccggcauaagg

SEQ ID NO: 1877904 - RNA, 19 nt, Homo sapiens
  misc_RNA (1)...(19): siRNA sense strand
ccucggaccagccuugaga

SEQ ID NO: 1877905 - RNA, 19 nt, Homo sapiens
  misc_RNA (1)...(19): siRNA sense strand
caucauagcuccacuguuu

SEQ ID NO: 1877906 - RNA, 19 nt, Homo sapiens
  misc_RNA (1)...(19): siRNA sense strand
gcagguaugauaaguauua

SEQ ID NO: 1877907 - RNA, 19 nt, Homo sapiens
  misc_RNA (1)...(19): siRNA sense strand
gcauuuaugugguugcuaa

SEQ ID NO: 1877908 - RNA, 19 nt, Homo sapiens
  misc_RNA (1)...(19): siRNA sense strand
uaacaaagaugucugugau

SEQ ID NO: 1877909 - RNA, 19 nt, Homo sapiens
  misc_RNA (1)...(19): siRNA sense strand
gaaugaccaccaacacuua

SEQ ID NO: 1877910 - RNA, 19 nt, Homo sapiens
  misc_RNA (1)...(19): siRNA sense strand
ucagauagauguaacaaag

SEQ ID NO: 1877911 - RNA, 19 nt, Homo sapiens
  misc_RNA (1)...(19): siRNA sense strand
gauuauggcagguaugaua

SEQ ID NO: 1877912 - RNA, 19 nt, Homo sapiens
  misc_RNA (1)...(19): siRNA sense strand
guauggaaguuggaaauuu

SEQ ID NO: 1877913 - RNA, 19 nt, Homo sapiens
  misc_RNA (1)...(19): siRNA sense strand
ggagaagaaugaccaccaa

SEQ ID NO: 1877914 - RNA, 19 nt, Homo sapiens
  misc_RNA (1)...(19): siRNA sense strand
gcaacuuacuugauuaugg

SEQ ID NO: 1877915 - RNA, 19 nt, Homo sapiens
  misc_RNA (1)...(19): siRNA sense strand
gaaguuggaaauuuggaua

SEQ ID NO: 1877916 - RNA, 19 nt, Homo sapiens
  misc_RNA (1)...(19): siRNA sense strand
guucugggcaucuucauua

SEQ ID NO: 1877917 - RNA, 19 nt, Homo sapiens
  misc_RNA (1)...(19): siRNA sense strand
ggugcuacguguaccauaa

SEQ ID NO: 1877918 - RNA, 19 nt, Homo sapiens
  misc_RNA (1)...(19): siRNA sense strand
uauggaaguuggaaauuug

SEQ ID NO: 1877919 - RNA, 19 nt, Homo sapiens
  misc_RNA (1)...(19): siRNA sense strand
ggucagaucagauagaugu

SEQ ID NO: 1877920 - RNA, 19 nt, Homo sapiens
  misc_RNA (1)...(19): siRNA sense strand
aaagaugucugugaucaug

SEQ ID NO: 1877921 - RNA, 19 nt, Homo sapiens
  misc_RNA (1)...(19): siRNA sense strand
caugacaguuauugcgaua

SEQ ID NO: 1877922 - RNA, 19 nt, Homo sapiens
  misc_RNA (1)...(19): siRNA sense strand
acaaagaugucugugauca

SEQ ID NO: 1877923 - RNA, 19 nt, Homo sapiens
  misc_RNA (1)...(19): siRNA sense strand
gaacuucggacacccacaa

SEQ ID NO: 1877924 - RNA, 19 nt, Homo sapiens
  misc_RNA (1)...(19): siRNA sense strand
caacaguucagacucuaaa

SEQ ID NO: 1877925 - RNA, 19 nt, Homo sapiens
  misc_RNA (1)...(19): siRNA sense strand
guugcaacuuacuugauua

SEQ ID NO: 1877926 - RNA, 19 nt, Homo sapiens
  misc_RNA (1)...(19): siRNA sense strand
caacagagacuggucagau

SEQ ID NO: 1877927 - RNA, 19 nt, Homo sapiens
  misc_RNA (1)...(19): siRNA sense strand
uggcagguaugauaaguau

SEQ ID NO: 1877928 - RNA, 19 nt, Homo sapiens
  misc_RNA (1)...(19): siRNA sense strand
caugucacgcuauccauua

SEQ ID NO: 1877929 - RNA, 19 nt, Homo sapiens
  misc_RNA (1)...(19): siRNA sense strand
guaacaaagaugucuguga

SEQ ID NO: 1877930 - RNA, 19 nt, Homo sapiens
  misc_RNA (1)...(19): siRNA sense strand
agacuggucagaucagaua

SEQ ID NO: 1877931 - RNA, 19 nt, Homo sapiens
  misc_RNA (1)...(19): siRNA sense strand
gguuuaugcuggauugaau

SEQ ID NO: 1877932 - RNA, 19 nt, Homo sapiens
  misc_RNA (1)...(19): siRNA sense strand
caucugccuuccugacgua

SEQ ID NO: 1877933 - RNA, 19 nt, Homo sapiens
  misc_RNA (1)...(19): siRNA sense strand
ucacagacugaacacaaua

SEQ ID NO: 1877934 - RNA, 19 nt, Homo sapiens
  misc_RNA (1)...(19): siRNA sense strand
uagcuccacuguuugcaaa

SEQ ID NO: 1877935 - RNA, 19 nt, Homo sapiens
  misc_RNA (1)...(19): siRNA sense strand
caaugccugugacaaguau

SEQ ID NO: 1877936 - RNA, 19 nt, Homo sapiens
  misc_RNA (1)...(19): siRNA sense strand
aaacaaugccugugacaag

SEQ ID NO: 1877937 - RNA, 19 nt, Homo sapiens
  misc_RNA (1)...(19): siRNA sense strand
gcaucuucauuaaguacaa

SEQ ID NO: 1877938 - RNA, 19 nt, Homo sapiens
  misc_RNA (1)...(19): siRNA sense strand
gcaacaguucagacucuaa

SEQ ID NO: 1877939 - RNA, 19 nt, Homo sapiens
  misc_RNA (1)...(19): siRNA sense strand
cuggaucaauggccuguuu

SEQ ID NO: 1877940 - RNA, 19 nt, Homo sapiens
  misc_RNA (1)...(19): siRNA sense strand
ucagguuuaugcuggauug

SEQ ID NO: 1877941 - RNA, 19 nt, Homo sapiens
  misc_RNA (1)...(19): siRNA sense strand
uguugcaacuuacuugauu

SEQ ID NO: 1877942 - RNA, 19 nt, Homo sapiens
  misc_RNA (1)...(19): siRNA sense strand
gacguagggagaagaauga

SEQ ID NO: 1877943 - RNA, 19 nt, Homo sapiens
  misc_RNA (1)...(19): siRNA sense strand
acccacaaaugcaauuauu

SEQ ID NO: 1877944 - RNA, 19 nt, Homo sapiens
  misc_RNA (1)...(19): siRNA sense strand
gaucagauagauguaacaa

SEQ ID NO: 1877945 - RNA, 19 nt, Homo sapiens
  misc_RNA (1)...(19): siRNA sense strand
gcaagcauuggauuacuca

SEQ ID NO: 1877946 - RNA, 19 nt, Homo sapiens
  misc_RNA (1)...(19): siRNA sense strand
ucagaucuguauggaaguu

SEQ ID NO: 1877947 - RNA, 19 nt, Homo sapiens
  misc_RNA (1)...(19): siRNA sense strand
ucauagggugggcuaguua

SEQ ID NO: 1877948 - RNA, 19 nt, Homo sapiens
  misc_RNA (1)...(19): siRNA sense strand
uacgcaggcugucagguuu

SEQ ID NO: 1877949 - RNA, 19 nt, Homo sapiens
  misc_RNA (1)...(19): siRNA sense strand
caauauuguugcaacuuac

SEQ ID NO: 1877950 - RNA, 19 nt, Homo sapiens
  misc_RNA (1)...(19): siRNA sense strand
caccaaacaaugccuguga

SEQ ID NO: 1877951 - RNA, 19 nt, Homo sapiens
  misc_RNA (1)...(19): siRNA sense strand
ucuuacaccaugacaguua

SEQ ID NO: 1877952 - RNA, 19 nt, Homo sapiens
  misc_RNA (1)...(19): siRNA sense strand
ggcaacaguucagacucua

SEQ ID NO: 1877953 - RNA, 19 nt, Homo sapiens
  misc_RNA (1)...(19): siRNA sense strand
gaagaaugaccaccaacac

SEQ ID NO: 1877954 - RNA, 19 nt, Homo sapiens
  misc_RNA (1)...(19): siRNA sense strand
agaaugaccaccaacacuu

SEQ ID NO: 1877955 - RNA, 19 nt, Homo sapiens
  misc_RNA (1)...(19): siRNA sense strand
cccacaaaugcaauuauua

SEQ ID NO: 1877956 - RNA, 19 nt, Homo sapiens
  misc_RNA (1)...(19): siRNA sense strand
acacuuacaucggcuugau

SEQ ID NO: 1877957 - RNA, 19 nt, Homo sapiens
  misc_RNA (1)...(19): siRNA sense strand
ugacguagggagaagaaug

SEQ ID NO: 1877958 - RNA, 19 nt, Homo sapiens
  misc_RNA (1)...(19): siRNA sense strand
ggacacccacaaaugcaau

SEQ ID NO: 1877959 - RNA, 19 nt, Homo sapiens
  misc_RNA (1)...(19): siRNA sense strand
ucagaucagauagauguaa

SEQ ID NO: 1877960 - RNA, 19 nt, Homo sapiens
  misc_RNA (1)...(19): siRNA sense strand
uuacugcuauuaccauguc

SEQ ID NO: 1877961 - RNA, 19 nt, Homo sapiens
  misc_RNA (1)...(19): siRNA sense strand
uaauuuaggcaacaguuca

SEQ ID NO: 1877962 - RNA, 19 nt, Homo sapiens
  misc_RNA (1)...(19): siRNA sense strand
uaauaguucugggcaucuu

SEQ ID NO: 1877963 - RNA, 19 nt, Homo sapiens
  misc_RNA (1)...(19): siRNA sense strand
cugggcaucuucauuaagu

SEQ ID NO: 1877964 - RNA, 19 nt, Homo sapiens
  misc_RNA (1)...(19): siRNA sense strand
ugcaaaaucuucuacauuc

SEQ ID NO: 1877965 - RNA, 19 nt, Homo sapiens
  misc_RNA (1)...(19): siRNA sense strand
ggcaagcauuggauuacuc

SEQ ID NO: 1877966 - RNA, 19 nt, Homo sapiens
  misc_RNA (1)...(19): siRNA sense strand
caaacaaugccugugacaa

SEQ ID NO: 1877967 - RNA, 19 nt, Homo sapiens
  misc_RNA (1)...(19): siRNA sense strand
ugauagaucuuuugugucu

SEQ ID NO: 1877968 - RNA, 19 nt, Homo sapiens
  misc_RNA (1)...(19): siRNA sense strand
acaaugccugugacaagua

SEQ ID NO: 1877969 - RNA, 19 nt, Homo sapiens
  misc_RNA (1)...(19): siRNA sense strand
cagaucagauagauguaac

SEQ ID NO: 1877970 - RNA, 19 nt, Homo sapiens
  misc_RNA (1)...(19): siRNA sense strand
aacagagacuggucagauc

SEQ ID NO: 1877971 - RNA, 19 nt, Homo sapiens
  misc_RNA (1)...(19): siRNA sense strand
ccauuaaacaucacacuac

SEQ ID NO: 1877972 - RNA, 19 nt, Homo sapiens
  misc_RNA (1)...(19): siRNA sense strand
ggaaguuggaaauuuggau

SEQ ID NO: 1877973 - RNA, 19 nt, Homo sapiens
  misc_RNA (1)...(19): siRNA sense strand
cagacugaacacaauauug

SEQ ID NO: 1877974 - RNA, 19 nt, Homo sapiens
  misc_RNA (1)...(19): siRNA sense strand
cagauagauguaacaaaga

SEQ ID NO: 1877975 - RNA, 19 nt, Homo sapiens
  misc_RNA (1)...(19): siRNA sense strand
auugugcccuugacaguga

SEQ ID NO: 1877976 - RNA, 19 nt, Homo sapiens
  misc_RNA (1)...(19): siRNA sense strand
gcccuugacagugauguuu

SEQ ID NO: 1877977 - RNA, 19 nt, Homo sapiens
  misc_RNA (1)...(19): siRNA sense strand
cugggagccuggaucaaug

SEQ ID NO: 1877978 - RNA, 19 nt, Homo sapiens
  misc_RNA (1)...(19): siRNA sense strand
gcaaaaucuucuacauucu

SEQ ID NO: 1877979 - RNA, 19 nt, Homo sapiens
  misc_RNA (1)...(19): siRNA sense strand
gugcuacguguaccauaaa

SEQ ID NO: 1877980 - RNA, 19 nt, Homo sapiens
  misc_RNA (1)...(19): siRNA sense strand
cgcuauccauuaaacauca

SEQ ID NO: 1877981 - RNA, 19 nt, Homo sapiens
  misc_RNA (1)...(19): siRNA sense strand
cuuauuccaucgugugcuu

SEQ ID NO: 1877982 - RNA, 19 nt, Homo sapiens
  misc_RNA (1)...(19): siRNA sense strand
agcauuggcuaucccaugu

SEQ ID NO: 1877983 - RNA, 19 nt, Homo sapiens
  misc_RNA (1)...(19): siRNA sense strand
acccauggauguaucucaa

SEQ ID NO: 1877984 - RNA, 19 nt, Homo sapiens
  misc_RNA (1)...(19): siRNA sense strand
ccaugucacgcuauccauu

SEQ ID NO: 1877985 - RNA, 19 nt, Homo sapiens
  misc_RNA (1)...(19): siRNA sense strand
cuacguguaccauaaacug

SEQ ID NO: 1877986 - RNA, 19 nt, Homo sapiens
  misc_RNA (1)...(19): siRNA sense strand
guuuaugcuggauugaaua

SEQ ID NO: 1877987 - RNA, 19 nt, Homo sapiens
  misc_RNA (1)...(19): siRNA sense strand
cuucggacacccacaaaug

SEQ ID NO: 1877988 - RNA, 19 nt, Homo sapiens
  misc_RNA (1)...(19): siRNA sense strand
ccauggauguaucucaaaa

SEQ ID NO: 1877989 - RNA, 19 nt, Homo sapiens
  misc_RNA (1)...(19): siRNA sense strand
aacaaugccugugacaagu

SEQ ID NO: 1877990 - RNA, 19 nt, Homo sapiens
  misc_RNA (1)...(19): siRNA sense strand
caaagaugucugugaucau

SEQ ID NO: 1877991 - RNA, 19 nt, Homo sapiens
  misc_RNA (1)...(19): siRNA sense strand
aggcaacaguucagacucu

SEQ ID NO: 1877992 - RNA, 19 nt, Homo sapiens
  misc_RNA (1)...(19): siRNA sense strand
ucagcaacauaauaguucu

SEQ ID NO: 1877993 - RNA, 19 nt, Homo sapiens
  misc_RNA (1)...(19): siRNA sense strand
uaccauaaacuggaggaaa

SEQ ID NO: 1877994 - RNA, 19 nt, Homo sapiens
  misc_RNA (1)...(19): siRNA sense strand
agaagaaugaccaccaaca

SEQ ID NO: 1877995 - RNA, 19 nt, Homo sapiens
  misc_RNA (1)...(19): siRNA sense strand
ccaaacaaugccugugaca

SEQ ID NO: 1877996 - RNA, 19 nt, Homo sapiens
  misc_RNA (1)...(19): siRNA sense strand
agaugucugugaucaugau

SEQ ID NO: 1877997 - RNA, 19 nt, Homo sapiens
  misc_RNA (1)...(19): siRNA sense strand
gauagauguaacaaagaug

SEQ ID NO: 1877998 - RNA, 19 nt, Homo sapiens
  misc_RNA (1)...(19): siRNA sense strand
caauaaggcuguagaagaa

SEQ ID NO: 1877999 - RNA, 19 nt, Homo sapiens
  misc_RNA (1)...(19): siRNA sense strand
cagaagauguugcuaaauu

SEQ ID NO: 1878000 - RNA, 19 nt, Homo sapiens
  misc_RNA (1)...(19): siRNA sense strand
gaacaagucuauaucucuu

SEQ ID NO: 1878001 - RNA, 19 nt, Homo sapiens
  misc_RNA (1)...(19): siRNA sense strand
ggacuaaacagacauuauu

SEQ ID NO: 1878002 - RNA, 19 nt, Homo sapiens
  misc_RNA (1)...(19): siRNA sense strand
ggacagacuucuuagacuu

SEQ ID NO: 1878003 - RNA, 19 nt, Homo sapiens
  misc_RNA (1)...(19): siRNA sense strand
guacuuaugaccucaaaua

SEQ ID NO: 1878004 - RNA, 19 nt, Homo sapiens
  misc_RNA (1)...(19): siRNA sense strand
caaauauuguccaguguuu

SEQ ID NO: 1878005 - RNA, 19 nt, Homo sapiens
  misc_RNA (1)...(19): siRNA sense strand
ggacaugaaccaagacaaa

SEQ ID NO: 1878006 - RNA, 19 nt, Homo sapiens
  misc_RNA (1)...(19): siRNA sense strand
cuuaugaccucaaauauug

SEQ ID NO: 1878007 - RNA, 19 nt, Homo sapiens
  misc_RNA (1)...(19): siRNA sense strand
gaacagcuggcaauaaaga

SEQ ID NO: 1878008 - RNA, 19 nt, Homo sapiens
  misc_RNA (1)...(19): siRNA sense strand
ggacuacagugaacauugu

SEQ ID NO: 1878009 - RNA, 19 nt, Homo sapiens
  misc_RNA (1)...(19): siRNA sense strand
caauggaaguuauggguuu

SEQ ID NO: 1878010 - RNA, 19 nt, Homo sapiens
  misc_RNA (1)...(19): siRNA sense strand
aaggaaagguuguuauuga

SEQ ID NO: 1878011 - RNA, 19 nt, Homo sapiens
  misc_RNA (1)...(19): siRNA sense strand
gaaccaagacaaacaacuu

SEQ ID NO: 1878012 - RNA, 19 nt, Homo sapiens
  misc_RNA (1)...(19): siRNA sense strand
cugaacagcuggcaauaaa

SEQ ID NO: 1878013 - RNA, 19 nt, Homo sapiens
  misc_RNA (1)...(19): siRNA sense strand
ggacacagcagaacaaguc

SEQ ID NO: 1878014 - RNA, 19 nt, Homo sapiens
  misc_RNA (1)...(19): siRNA sense strand
gaagaagaagauaagauga

SEQ ID NO: 1878015 - RNA, 19 nt, Homo sapiens
  misc_RNA (1)...(19): siRNA sense strand
gaagauguugcuaaauuug

SEQ ID NO: 1878016 - RNA, 19 nt, Homo sapiens
  misc_RNA (1)...(19): siRNA sense strand
gauuauaccgucagaguga

SEQ ID NO: 1878017 - RNA, 19 nt, Homo sapiens
  misc_RNA (1)...(19): siRNA sense strand
cagagugauugauguguuu

SEQ ID NO: 1878018 - RNA, 19 nt, Homo sapiens
  misc_RNA (1)...(19): siRNA sense strand
gauccaguguuccaagcua

SEQ ID NO: 1878019 - RNA, 19 nt, Homo sapiens
  misc_RNA (1)...(19): siRNA sense strand
ggcauuaauucauggacua

SEQ ID NO: 1878020 - RNA, 19 nt, Homo sapiens
  misc_RNA (1)...(19): siRNA sense strand
gauggaagguuugacacuu

SEQ ID NO: 1878021 - RNA, 19 nt, Homo sapiens
  misc_RNA (1)...(19): siRNA sense strand
agaguuggauggaagguuu

SEQ ID NO: 1878022 - RNA, 19 nt, Homo sapiens
  misc_RNA (1)...(19): siRNA sense strand
gaaucugggucacuuaaac

SEQ ID NO: 1878023 - RNA, 19 nt, Homo sapiens
  misc_RNA (1)...(19): siRNA sense strand
aaagagauguuggaauuag

SEQ ID NO: 1878024 - RNA, 19 nt, Homo sapiens
  misc_RNA (1)...(19): siRNA sense strand
cagcagaacaagucuauau

SEQ ID NO: 1878025 - RNA, 19 nt, Homo sapiens
  misc_RNA (1)...(19): siRNA sense strand
aaaaugaacuggaacagaa

SEQ ID NO: 1878026 - RNA, 19 nt, Homo sapiens
  misc_RNA (1)...(19): siRNA sense strand
uaaagaauguuggcaagca

SEQ ID NO: 1878027 - RNA, 19 nt, Homo sapiens
  misc_RNA (1)...(19): siRNA sense strand
gaacuggaacagaagaugu

SEQ ID NO: 1878028 - RNA, 19 nt, Homo sapiens
  misc_RNA (1)...(19): siRNA sense strand
acaauaaggcuguagaaga

SEQ ID NO: 1878029 - RNA, 19 nt, Homo sapiens
  misc_RNA (1)...(19): siRNA sense strand
uaagaagaguuggauggaa

SEQ ID NO: 1878030 - RNA, 19 nt, Homo sapiens
  misc_RNA (1)...(19): siRNA sense strand
ggaaagguuguuauugaug

SEQ ID NO: 1878031 - RNA, 19 nt, Homo sapiens
  misc_RNA (1)...(19): siRNA sense strand
ugauugauguguuugcuau

SEQ ID NO: 1878032 - RNA, 19 nt, Homo sapiens
  misc_RNA (1)...(19): siRNA sense strand
uauguuggauacugucgua

SEQ ID NO: 1878033 - RNA, 19 nt, Homo sapiens
  misc_RNA (1)...(19): siRNA sense strand
ucagagugauugauguguu

SEQ ID NO: 1878034 - RNA, 19 nt, Homo sapiens
  misc_RNA (1)...(19): siRNA sense strand
cacaaugaaucagugguaa

SEQ ID NO: 1878035 - RNA, 19 nt, Homo sapiens
  misc_RNA (1)...(19): siRNA sense strand
gcagaacaagucuauaucu

SEQ ID NO: 1878036 - RNA, 19 nt, Homo sapiens
  misc_RNA (1)...(19): siRNA sense strand
agaagaagaagauaagaug

SEQ ID NO: 1878037 - RNA, 19 nt, Homo sapiens
  misc_RNA (1)...(19): siRNA sense strand
caagacaaacaacuucgaa

SEQ ID NO: 1878038 - RNA, 19 nt, Homo sapiens
  misc_RNA (1)...(19): siRNA sense strand
gcagcuauguuggauacug

SEQ ID NO: 1878039 - RNA, 19 nt, Homo sapiens
  misc_RNA (1)...(19): siRNA sense strand
guuugacacuucaggacua

SEQ ID NO: 1878040 - RNA, 19 nt, Homo sapiens
  misc_RNA (1)...(19): siRNA sense strand
gaugguuguugguugguau

SEQ ID NO: 1878041 - RNA, 19 nt, Homo sapiens
  misc_RNA (1)...(19): siRNA sense strand
cuuaggacaugaaccaaga

SEQ ID NO: 1878042 - RNA, 19 nt, Homo sapiens
  misc_RNA (1)...(19): siRNA sense strand
gacaaacaacuucgaaucu

SEQ ID NO: 1878043 - RNA, 19 nt, Homo sapiens
  misc_RNA (1)...(19): siRNA sense strand
acaaacaacuucgaaucug

SEQ ID NO: 1878044 - RNA, 19 nt, Homo sapiens
  misc_RNA (1)...(19): siRNA sense strand
gcuaaaauguuggauaugu

SEQ ID NO: 1878045 - RNA, 19 nt, Homo sapiens
  misc_RNA (1)...(19): siRNA sense strand
agaagaagauaagaugaca

SEQ ID NO: 1878046 - RNA, 19 nt, Homo sapiens
  misc_RNA (1)...(19): siRNA sense strand
guaaacacaaugaaucagu

SEQ ID NO: 1878047 - RNA, 19 nt, Homo sapiens
  misc_RNA (1)...(19): siRNA sense strand
cagaacaagucuauaucuc

SEQ ID NO: 1878048 - RNA, 19 nt, Homo sapiens
  misc_RNA (1)...(19): siRNA sense strand
uuugaugcuuggagaauuu

SEQ ID NO: 1878049 - RNA, 19 nt, Homo sapiens
  misc_RNA (1)...(19): siRNA sense strand
uuggagaauuuguugauga

SEQ ID NO: 1878050 - RNA, 19 nt, Homo sapiens
  misc_RNA (1)...(19): siRNA sense strand
gccaagaauuacaauaagg

SEQ ID NO: 1878051 - RNA, 19 nt, Homo sapiens
  misc_RNA (1)...(19): siRNA sense strand
auugaugccuucagauuga

SEQ ID NO: 1878052 - RNA, 19 nt, Homo sapiens
  misc_RNA (1)...(19): siRNA sense strand
ggcaguugauccaguguuc

SEQ ID NO: 1878053 - RNA, 19 nt, Homo sapiens
  misc_RNA (1)...(19): siRNA sense strand
gauaagaugacaccugaac

SEQ ID NO: 1878054 - RNA, 19 nt, Homo sapiens
  misc_RNA (1)...(19): siRNA sense strand
acacaaugaaucaguggua

SEQ ID NO: 1878055 - RNA, 19 nt, Homo sapiens
  misc_RNA (1)...(19): siRNA sense strand
guuccaagcuaaaauguug

SEQ ID NO: 1878056 - RNA, 19 nt, Homo sapiens
  misc_RNA (1)...(19): siRNA sense strand
ccauuacuauuaacuaucg

SEQ ID NO: 1878057 - RNA, 19 nt, Homo sapiens
  misc_RNA (1)...(19): siRNA sense strand
aaaggaaagguuguuauug

SEQ ID NO: 1878058 - RNA, 19 nt, Homo sapiens
  misc_RNA (1)...(19): siRNA sense strand
cagcuauguuggauacugu

SEQ ID NO: 1878059 - RNA, 19 nt, Homo sapiens
  misc_RNA (1)...(19): siRNA sense strand
gcauuaauucauggacuaa

SEQ ID NO: 1878060 - RNA, 19 nt, Homo sapiens
  misc_RNA (1)...(19): siRNA sense strand
cagacauuauuacuccauu

SEQ ID NO: 1878061 - RNA, 19 nt, Homo sapiens
  misc_RNA (1)...(19): siRNA sense strand
ucaaauauuguccaguguu

SEQ ID NO: 1878062 - RNA, 19 nt, Homo sapiens
  misc_RNA (1)...(19): siRNA sense strand
gacagacuucuuagacuug

SEQ ID NO: 1878063 - RNA, 19 nt, Homo sapiens
  misc_RNA (1)...(19): siRNA sense strand
ggcuuugguuguuggcuuu

SEQ ID NO: 1878064 - RNA, 19 nt, Homo sapiens
  misc_RNA (1)...(19): siRNA sense strand
ucucuucccuggcacuguu

SEQ ID NO: 1878065 - RNA, 19 nt, Homo sapiens
  misc_RNA (1)...(19): siRNA sense strand
uaaacaagccaucuaucca

SEQ ID NO: 1878066 - RNA, 19 nt, Homo sapiens
  misc_RNA (1)...(19): siRNA sense strand
agacaaacaacuucgaauc

SEQ ID NO: 1878067 - RNA, 19 nt, Homo sapiens
  misc_RNA (1)...(19): siRNA sense strand
aggaaagguuguuauugau

SEQ ID NO: 1878068 - RNA, 19 nt, Homo sapiens
  misc_RNA (1)...(19): siRNA sense strand
ucacagucacccuggcuuu

SEQ ID NO: 1878069 - RNA, 19 nt, Homo sapiens
  misc_RNA (1)...(19): siRNA sense strand
guuugaugcuuggagaauu

SEQ ID NO: 1878070 - RNA, 19 nt, Homo sapiens
  misc_RNA (1)...(19): siRNA sense strand
uggagaauuuguugaugau

SEQ ID NO: 1878071 - RNA, 19 nt, Homo sapiens
  misc_RNA (1)...(19): siRNA sense strand
gaucccauucagaguguaa

SEQ ID NO: 1878072 - RNA, 19 nt, Homo sapiens
  misc_RNA (1)...(19): siRNA sense strand
guuguugguugguaucaca

SEQ ID NO: 1878073 - RNA, 19 nt, Homo sapiens
  misc_RNA (1)...(19): siRNA sense strand
auaaggcuguagaagaaga

SEQ ID NO: 1878074 - RNA, 19 nt, Homo sapiens
  misc_RNA (1)...(19): siRNA sense strand
ggucuuaggacaugaacca

SEQ ID NO: 1878075 - RNA, 19 nt, Homo sapiens
  misc_RNA (1)...(19): siRNA sense strand
cacccuggcuuugguuguu

SEQ ID NO: 1878076 - RNA, 19 nt, Homo sapiens
  misc_RNA (1)...(19): siRNA sense strand
guaaaaggaaagguuguua

SEQ ID NO: 1878077 - RNA, 19 nt, Homo sapiens
  misc_RNA (1)...(19): siRNA sense strand
acacucagcagagcuuuga

SEQ ID NO: 1878078 - RNA, 19 nt, Homo sapiens
  misc_RNA (1)...(19): siRNA sense strand
cuucgaaucugggucacuu

SEQ ID NO: 1878079 - RNA, 19 nt, Homo sapiens
  misc_RNA (1)...(19): siRNA sense strand
gaaggccggagaugguugu

SEQ ID NO: 1878080 - RNA, 19 nt, Homo sapiens
  misc_RNA (1)...(19): siRNA sense strand
uaagaugacaccugaacag

SEQ ID NO: 1878081 - RNA, 19 nt, Homo sapiens
  misc_RNA (1)...(19): siRNA sense strand
ggaaguuauggguuugaug

SEQ ID NO: 1878082 - RNA, 19 nt, Homo sapiens
  misc_RNA (1)...(19): siRNA sense strand
uuauugaugccuucagauu

SEQ ID NO: 1878083 - RNA, 19 nt, Homo sapiens
  misc_RNA (1)...(19): siRNA sense strand
uguuauugaugccuucaga

SEQ ID NO: 1878084 - RNA, 19 nt, Homo sapiens
  misc_RNA (1)...(19): siRNA sense strand
ccugaacagcuggcaauaa

SEQ ID NO: 1878085 - RNA, 19 nt, Homo sapiens
  misc_RNA (1)...(19): siRNA sense strand
guagaagaagaagauaaga

SEQ ID NO: 1878086 - RNA, 19 nt, Homo sapiens
  misc_RNA (1)...(19): siRNA sense strand
cgaaucugggucacuuaaa

SEQ ID NO: 1878087 - RNA, 19 nt, Homo sapiens
  misc_RNA (1)...(19): siRNA sense strand
ggagaauuuguugaugauu

SEQ ID NO: 1878088 - RNA, 19 nt, Homo sapiens
  misc_RNA (1)...(19): siRNA sense strand
acaaugaaucagugguaaa

SEQ ID NO: 1878089 - RNA, 19 nt, Homo sapiens
  misc_RNA (1)...(19): siRNA sense strand
caugaaccaagacaaacaa

SEQ ID NO: 1878090 - RNA, 19 nt, Homo sapiens
  misc_RNA (1)...(19): siRNA sense strand
cacagcagaacaagucuau

SEQ ID NO: 1878091 - RNA, 19 nt, Homo sapiens
  misc_RNA (1)...(19): siRNA sense strand
agccaucuauccaggcauu

SEQ ID NO: 1878092 - RNA, 19 nt, Homo sapiens
  misc_RNA (1)...(19): siRNA sense strand
uauugaugccuucagauug

SEQ ID NO: 1878093 - RNA, 19 nt, Homo sapiens
  misc_RNA (1)...(19): siRNA sense strand
gcuaugccacagucaggaa

SEQ ID NO: 1878094 - RNA, 19 nt, Homo sapiens
  misc_RNA (1)...(19): siRNA sense strand
cauguggauguacuuauga

SEQ ID NO: 1878095 - RNA, 19 nt, Homo sapiens
  misc_RNA (1)...(19): siRNA sense strand
gacauuauuacuccauuac

SEQ ID NO: 1878096 - RNA, 19 nt, Homo sapiens
  misc_RNA (1)...(19): siRNA sense strand
ccaucuauccaggcauuaa

SEQ ID NO: 1878097 - RNA, 19 nt, Homo sapiens
  misc_RNA (1)...(19): siRNA sense strand
ucgaaucugggucacuuaa

SEQ ID NO: 1878098 - RNA, 19 nt, Homo sapiens
  misc_RNA (1)...(19): siRNA sense strand
ggagagccauuuccucaaa

SEQ ID NO: 1878099 - RNA, 19 nt, Homo sapiens
  misc_RNA (1)...(19): siRNA sense strand
gcuuacagcuggagaagga

SEQ ID NO: 1878100 - RNA, 19 nt, Homo sapiens
  misc_RNA (1)...(19): siRNA sense strand
ugugcaagcugaagccuuu

SEQ ID NO: 1878101 - RNA, 19 nt, Homo sapiens
  misc_RNA (1)...(19): siRNA sense strand
agaaggagguggugagagu

SEQ ID NO: 1878102 - RNA, 19 nt, Homo sapiens
  misc_RNA (1)...(19): siRNA sense strand
ggaucaaacugggauuuac

SEQ ID NO: 1878103 - RNA, 19 nt, Homo sapiens
  misc_RNA (1)...(19): siRNA sense strand
ccacgagcauagacaagau

SEQ ID NO: 1878104 - RNA, 19 nt, Homo sapiens
  misc_RNA (1)...(19): siRNA sense strand
cggacgaccuggagcaguu

SEQ ID NO: 1878105 - RNA, 19 nt, Homo sapiens
  misc_RNA (1)...(19): siRNA sense strand
gcaguucgccaagcaguuc

SEQ ID NO: 1878106 - RNA, 19 nt, Homo sapiens
  misc_RNA (1)...(19): siRNA sense strand
ggagaaggagguggugaga

SEQ ID NO: 1878107 - RNA, 19 nt, Homo sapiens
  misc_RNA (1)...(19): siRNA sense strand
gaacaugugcaagcugaag

SEQ ID NO: 1878108 - RNA, 19 nt, Homo sapiens
  misc_RNA (1)...(19): siRNA sense strand
gcugaagccuuuguugaac

SEQ ID NO: 1878109 - RNA, 19 nt, Homo sapiens
  misc_RNA (1)...(19): siRNA sense strand
guaacaggagacagaaaga

SEQ ID NO: 1878110 - RNA, 19 nt, Homo sapiens
  misc_RNA (1)...(19): siRNA sense strand
cggaucaaacugggauuua

SEQ ID NO: 1878111 - RNA, 19 nt, Homo sapiens
  misc_RNA (1)...(19): siRNA sense strand
gcucugggcacccuguaug

SEQ ID NO: 1878112 - RNA, 19 nt, Homo sapiens
  misc_RNA (1)...(19): siRNA sense strand
caggagacagaaagagaaa

SEQ ID NO: 1878113 - RNA, 19 nt, Homo sapiens
  misc_RNA (1)...(19): siRNA sense strand
gcaagcugaagccuuuguu

SEQ ID NO: 1878114 - RNA, 19 nt, Homo sapiens
  misc_RNA (1)...(19): siRNA sense strand
ucaagaacaugugcaagcu

SEQ ID NO: 1878115 - RNA, 19 nt, Homo sapiens
  misc_RNA (1)...(19): siRNA sense strand
aagcugaagccuuuguuga

SEQ ID NO: 1878116 - RNA, 19 nt, Homo sapiens
  misc_RNA (1)...(19): siRNA sense strand
gcacgacgagccacaccau

SEQ ID NO: 1878117 - RNA, 19 nt, Homo sapiens
  misc_RNA (1)...(19): siRNA sense strand
gaaggagguggugagaguu

SEQ ID NO: 1878118 - RNA, 19 nt, Homo sapiens
  misc_RNA (1)...(19): siRNA sense strand
caagcugaagccuuuguug

SEQ ID NO: 1878119 - RNA, 19 nt, Homo sapiens
  misc_RNA (1)...(19): siRNA sense strand
gaccaccaucugcagguuu

SEQ ID NO: 1878120 - RNA, 19 nt, Homo sapiens
  misc_RNA (1)...(19): siRNA sense strand
ccgcagcgucuaaccacua

SEQ ID NO: 1878121 - RNA, 19 nt, Homo sapiens
  misc_RNA (1)...(19): siRNA sense strand
gcggaucaaacugggauuu

SEQ ID NO: 1878122 - RNA, 19 nt, Homo sapiens
  misc_RNA (1)...(19): siRNA sense strand
gguggugagaguuugguuu

SEQ ID NO: 1878123 - RNA, 19 nt, Homo sapiens
  misc_RNA (1)...(19): siRNA sense strand
acaggagacagaaagagaa

SEQ ID NO: 1878124 - RNA, 19 nt, Homo sapiens
  misc_RNA (1)...(19): siRNA sense strand
gcaagggcgcaagcggaaa

SEQ ID NO: 1878125 - RNA, 19 nt, Homo sapiens
  misc_RNA (1)...(19): siRNA sense strand
gaacgugacugagcugaaa

SEQ ID NO: 1878126 - RNA, 19 nt, Homo sapiens
  misc_RNA (1)...(19): siRNA sense strand
gaaguuugcugccuaccua

SEQ ID NO: 1878127 - RNA, 19 nt, Homo sapiens
  misc_RNA (1)...(19): siRNA sense strand
ccucauaaguuccagaaua

SEQ ID NO: 1878128 - RNA, 19 nt, Homo sapiens
  misc_RNA (1)...(19): siRNA sense strand
ggaaggagcugcggcugaa

SEQ ID NO: 1878129 - RNA, 19 nt, Homo sapiens
  misc_RNA (1)...(19): siRNA sense strand
gcacgcagcagcacuacua

SEQ ID NO: 1878130 - RNA, 19 nt, Homo sapiens
  misc_RNA (1)...(19): siRNA sense strand
gaaccuggccuuagagaau

SEQ ID NO: 1878131 - RNA, 19 nt, Homo sapiens
  misc_RNA (1)...(19): siRNA sense strand
ggauaagcuugaccaaaga

SEQ ID NO: 1878132 - RNA, 19 nt, Homo sapiens
  misc_RNA (1)...(19): siRNA sense strand
gggaggacuucaucucuga

SEQ ID NO: 1878133 - RNA, 19 nt, Homo sapiens
  misc_RNA (1)...(19): siRNA sense strand
uuaaagucuucgcagauua

SEQ ID NO: 1878134 - RNA, 19 nt, Homo sapiens
  misc_RNA (1)...(19): siRNA sense strand
ccacgagacuacuacuuug

SEQ ID NO: 1878135 - RNA, 19 nt, Homo sapiens
  misc_RNA (1)...(19): siRNA sense strand
cagcagcacuacuaugaga

SEQ ID NO: 1878136 - RNA, 19 nt, Homo sapiens
  misc_RNA (1)...(19): siRNA sense strand
cucauaaguuccagaauaa

SEQ ID NO: 1878137 - RNA, 19 nt, Homo sapiens
  misc_RNA (1)...(19): siRNA sense strand
gaaaacuucuucaucuuug

SEQ ID NO: 1878138 - RNA, 19 nt, Homo sapiens
  misc_RNA (1)...(19): siRNA sense strand
uggaggagcuggaggaaau

SEQ ID NO: 1878139 - RNA, 19 nt, Homo sapiens
  misc_RNA (1)...(19): siRNA sense strand
uggauaagcuugaccaaag

SEQ ID NO: 1878140 - RNA, 19 nt, Homo sapiens
  misc_RNA (1)...(19): siRNA sense strand
gcuggagccucauaaguuc

SEQ ID NO: 1878141 - RNA, 19 nt, Homo sapiens
  misc_RNA (1)...(19): siRNA sense strand
agagggagcccaauaaguu

SEQ ID NO: 1878142 - RNA, 19 nt, Homo sapiens
  misc_RNA (1)...(19): siRNA sense strand
gaucuacuaccugucuuua

SEQ ID NO: 1878143 - RNA, 19 nt, Homo sapiens
  misc_RNA (1)...(19): siRNA sense strand
gaccaaagaggguacaaug

SEQ ID NO: 1878144 - RNA, 19 nt, Homo sapiens
  misc_RNA (1)...(19): siRNA sense strand
ccaaguggguggacacaca

SEQ ID NO: 1878145 - RNA, 19 nt, Homo sapiens
  misc_RNA (1)...(19): siRNA sense strand
ucaagagggagcccaauaa

SEQ ID NO: 1878146 - RNA, 19 nt, Homo sapiens
  misc_RNA (1)...(19): siRNA sense strand
aaagaaagcaaaucagugu

SEQ ID NO: 1878147 - RNA, 19 nt, Homo sapiens
  misc_RNA (1)...(19): siRNA sense strand
cuucaagucuuccaaguuc

SEQ ID NO: 1878148 - RNA, 19 nt, Homo sapiens
  misc_RNA (1)...(19): siRNA sense strand
gggauucgcuaugaguuug

SEQ ID NO: 1878149 - RNA, 19 nt, Homo sapiens
  misc_RNA (1)...(19): siRNA sense strand
gcuacgggauucgcuauga

SEQ ID NO: 1878150 - RNA, 19 nt, Homo sapiens
  misc_RNA (1)...(19): siRNA sense strand
cuaccugucuuuagaguuc

SEQ ID NO: 1878151 - RNA, 19 nt, Homo sapiens
  misc_RNA (1)...(19): siRNA sense strand
ggacggacgcuacagaaca

SEQ ID NO: 1878152 - RNA, 19 nt, Homo sapiens
  misc_RNA (1)...(19): siRNA sense strand
gagggagcccaauaaguuu

SEQ ID NO: 1878153 - RNA, 19 nt, Homo sapiens
  misc_RNA (1)...(19): siRNA sense strand
ccaaugacuucaaccucaa

SEQ ID NO: 1878154 - RNA, 19 nt, Homo sapiens
  misc_RNA (1)...(19): siRNA sense strand
gaaagucagcgccuuguac

SEQ ID NO: 1878155 - RNA, 19 nt, Homo sapiens
  misc_RNA (1)...(19): siRNA sense strand
gcugagcaguggcuucuuc

SEQ ID NO: 1878156 - RNA, 19 nt, Homo sapiens
  misc_RNA (1)...(19): siRNA sense strand
gaauacaaaguccacauca

SEQ ID NO: 1878157 - RNA, 19 nt, Homo sapiens
  misc_RNA (1)...(19): siRNA sense strand
gacaaggcgugggauguga

SEQ ID NO: 1878158 - RNA, 19 nt, Homo sapiens
  misc_RNA (1)...(19): siRNA sense strand
ggcugaagcaggaguauuu

SEQ ID NO: 1878159 - RNA, 19 nt, Homo sapiens
  misc_RNA (1)...(19): siRNA sense strand
gaggaaaacuucuucaucu

SEQ ID NO: 1878160 - RNA, 19 nt, Homo sapiens
  misc_RNA (1)...(19): siRNA sense strand
ggaguacuacgaucgcauu

SEQ ID NO: 1878161 - RNA, 19 nt, Homo sapiens
  misc_RNA (1)...(19): siRNA sense strand
gcagugaagcgcaucaaca

SEQ ID NO: 1878162 - RNA, 19 nt, Homo sapiens
  misc_RNA (1)...(19): siRNA sense strand
ggaaaacuucuucaucuuu

SEQ ID NO: 1878163 - RNA, 19 nt, Homo sapiens
  misc_RNA (1)...(19): siRNA sense strand
gcuggcugguucuguguaa

SEQ ID NO: 1878164 - RNA, 19 nt, Homo sapiens
  misc_RNA (1)...(19): siRNA sense strand
ggacaaggcgugggaugug

SEQ ID NO: 1878165 - RNA, 19 nt, Homo sapiens
  misc_RNA (1)...(19): siRNA sense strand
gguacaaugcccaggagua

SEQ ID NO: 1878166 - RNA, 19 nt, Homo sapiens
  misc_RNA (1)...(19): siRNA sense strand
caucauccgucgcuucaag

SEQ ID NO: 1878167 - RNA, 19 nt, Homo sapiens
  misc_RNA (1)...(19): siRNA sense strand
acuccgagauccucaagaa

SEQ ID NO: 1878168 - RNA, 19 nt, Homo sapiens
  misc_RNA (1)...(19): siRNA sense strand
ggaggaaauugaggaggau

SEQ ID NO: 1878169 - RNA, 19 nt, Homo sapiens
  misc_RNA (1)...(19): siRNA sense strand
uaaagucuucgcagauuau

SEQ ID NO: 1878170 - RNA, 19 nt, Homo sapiens
  misc_RNA (1)...(19): siRNA sense strand
uuuaaagucuucgcagauu

SEQ ID NO: 1878171 - RNA, 19 nt, Homo sapiens
  misc_RNA (1)...(19): siRNA sense strand
gcaugcggguggaggaugu

SEQ ID NO: 1878172 - RNA, 19 nt, Homo sapiens
  misc_RNA (1)...(19): siRNA sense strand
ccaacucacucuucgacau

SEQ ID NO: 1878173 - RNA, 19 nt, Homo sapiens
  misc_RNA (1)...(19): siRNA sense strand
cauaaguuccagaauaaga

SEQ ID NO: 1878174 - RNA, 19 nt, Homo sapiens
  misc_RNA (1)...(19): siRNA sense strand
cagauaagguggccaucca

SEQ ID NO: 1878175 - RNA, 19 nt, Homo sapiens
  misc_RNA (1)...(19): siRNA sense strand
ccaagaggaucuacuaccu

SEQ ID NO: 1878176 - RNA, 19 nt, Homo sapiens
  misc_RNA (1)...(19): siRNA sense strand
ggaauacaaaguccacauc

SEQ ID NO: 1878177 - RNA, 19 nt, Homo sapiens
  misc_RNA (1)...(19): siRNA sense strand
gcgcaaacugcucuccuuu

SEQ ID NO: 1878178 - RNA, 19 nt, Homo sapiens
  misc_RNA (1)...(19): siRNA sense strand
gaaaagaaagcaaaucagu

SEQ ID NO: 1878179 - RNA, 19 nt, Homo sapiens
  misc_RNA (1)...(19): siRNA sense strand
gcacuucuacggccaugug

SEQ ID NO: 1878180 - RNA, 19 nt, Homo sapiens
  misc_RNA (1)...(19): siRNA sense strand
ccaaggcucccaaugacuu

SEQ ID NO: 1878181 - RNA, 19 nt, Homo sapiens
  misc_RNA (1)...(19): siRNA sense strand
uucgaugccuucccagaua

SEQ ID NO: 1878182 - RNA, 19 nt, Homo sapiens
  misc_RNA (1)...(19): siRNA sense strand
gcuaugaguuugggauuuu

SEQ ID NO: 1878183 - RNA, 19 nt, Homo sapiens
  misc_RNA (1)...(19): siRNA sense strand
ggguggaggauguggauaa

SEQ ID NO: 1878184 - RNA, 19 nt, Homo sapiens
  misc_RNA (1)...(19): siRNA sense strand
ucgaugccuucccagauaa

SEQ ID NO: 1878185 - RNA, 19 nt, Homo sapiens
  misc_RNA (1)...(19): siRNA sense strand
caugaccgguuuaaagucu

SEQ ID NO: 1878186 - RNA, 19 nt, Homo sapiens
  misc_RNA (1)...(19): siRNA sense strand
guacuacgaucgcauuccu

SEQ ID NO: 1878187 - RNA, 19 nt, Homo sapiens
  misc_RNA (1)...(19): siRNA sense strand
acaaugcccaggaguacua

SEQ ID NO: 1878188 - RNA, 19 nt, Homo sapiens
  misc_RNA (1)...(19): siRNA sense strand
gcaccggcaacaugaaguu

SEQ ID NO: 1878189 - RNA, 19 nt, Homo sapiens
  misc_RNA (1)...(19): siRNA sense strand
gguaccacauggccaagau

SEQ ID NO: 1878190 - RNA, 19 nt, Homo sapiens
  misc_RNA (1)...(19): siRNA sense strand
gagcuggagccucauaagu

SEQ ID NO: 1878191 - RNA, 19 nt, Homo sapiens
  misc_RNA (1)...(19): siRNA sense strand
gcauuucacacucguaaag

SEQ ID NO: 1878192 - RNA, 19 nt, Homo sapiens
  misc_RNA (1)...(19): siRNA sense strand
aauacaaaguccacaucaa

SEQ ID NO: 1878193 - RNA, 19 nt, Homo sapiens
  misc_RNA (1)...(19): siRNA sense strand
ccaaugauaauuucuucga

SEQ ID NO: 1878194 - RNA, 19 nt, Homo sapiens
  misc_RNA (1)...(19): siRNA sense strand
caacggggcucugaccauu

SEQ ID NO: 1878195 - RNA, 19 nt, Homo sapiens
  misc_RNA (1)...(19): siRNA sense strand
gagaaaagaaagcaaauca

SEQ ID NO: 1878196 - RNA, 19 nt, Homo sapiens
  misc_RNA (1)...(19): siRNA sense strand
aacgacagcuccucaacug

SEQ ID NO: 1878197 - RNA, 19 nt, Homo sapiens
  misc_RNA (1)...(19): siRNA sense strand
gaagaggcgggagaggaaa

SEQ ID NO: 1878198 - RNA, 19 nt, Homo sapiens
  misc_RNA (1)...(19): siRNA sense strand
ucaucuuccuggagaacua

SEQ ID NO: 1878199 - RNA, 19 nt, Homo sapiens
  misc_RNA (1)...(19): siRNA sense strand
gaucaucagacucgucaca

SEQ ID NO: 1878200 - RNA, 19 nt, Homo sapiens
  misc_RNA (1)...(19): siRNA sense strand
ggaucuacuaccugucuuu

SEQ ID NO: 1878201 - RNA, 19 nt, Homo sapiens
  misc_RNA (1)...(19): siRNA sense strand
uacaagaacccaagagagu

SEQ ID NO: 1878202 - RNA, 19 nt, Homo sapiens
  misc_RNA (1)...(19): siRNA sense strand
caccaugaccgguuuaaag

SEQ ID NO: 1878203 - RNA, 19 nt, Homo sapiens
  misc_RNA (1)...(19): siRNA sense strand
caagagggagcccaauaag

SEQ ID NO: 1878204 - RNA, 19 nt, Homo sapiens
  misc_RNA (1)...(19): siRNA sense strand
gacaucauccgucgcuuca

SEQ ID NO: 1878205 - RNA, 19 nt, Homo sapiens
  misc_RNA (1)...(19): siRNA sense strand
ucaaccggcaccugcauuu

SEQ ID NO: 1878206 - RNA, 19 nt, Homo sapiens
  misc_RNA (1)...(19): siRNA sense strand
uuaaaugccaggagaaagu

SEQ ID NO: 1878207 - RNA, 19 nt, Homo sapiens
  misc_RNA (1)...(19): siRNA sense strand
gcaccaugaccgguuuaaa

SEQ ID NO: 1878208 - RNA, 19 nt, Homo sapiens
  misc_RNA (1)...(19): siRNA sense strand
cgcagcagcacuacuauga

SEQ ID NO: 1878209 - RNA, 19 nt, Homo sapiens
  misc_RNA (1)...(19): siRNA sense strand
agaagaggcgggagaggaa

SEQ ID NO: 1878210 - RNA, 19 nt, Homo sapiens
  misc_RNA (1)...(19): siRNA sense strand
ccacauggccaagaugauc

SEQ ID NO: 1878211 - RNA, 19 nt, Homo sapiens
  misc_RNA (1)...(19): siRNA sense strand
ggauguggccaaagugaag

SEQ ID NO: 1878212 - RNA, 19 nt, Homo sapiens
  misc_RNA (1)...(19): siRNA sense strand
accgaaaccuggcggagaa

SEQ ID NO: 1878213 - RNA, 19 nt, Homo sapiens
  misc_RNA (1)...(19): siRNA sense strand
cccacgagacuacuacuuu

SEQ ID NO: 1878214 - RNA, 19 nt, Homo sapiens
  misc_RNA (1)...(19): siRNA sense strand
uggugaaccuggccuuaga

SEQ ID NO: 1878215 - RNA, 19 nt, Homo sapiens
  misc_RNA (1)...(19): siRNA sense strand
cuacauccaggcuguguug

SEQ ID NO: 1878216 - RNA, 19 nt, Homo sapiens
  misc_RNA (1)...(19): siRNA sense strand
gaggaucuacuaccugucu

SEQ ID NO: 1878217 - RNA, 19 nt, Homo sapiens
  misc_RNA (1)...(19): siRNA sense strand
ggaccugugccuacaccaa

SEQ ID NO: 1878218 - RNA, 19 nt, Homo sapiens
  misc_RNA (1)...(19): siRNA sense strand
caacucacucuucgacauc

SEQ ID NO: 1878219 - RNA, 19 nt, Homo sapiens
  misc_RNA (1)...(19): siRNA sense strand
gugccuggcuaucgcaaca

SEQ ID NO: 1878220 - RNA, 19 nt, Homo sapiens
  misc_RNA (1)...(19): siRNA sense strand
gauggugauccggaacaua

SEQ ID NO: 1878221 - RNA, 19 nt, Homo sapiens
  misc_RNA (1)...(19): siRNA sense strand
gagcuucggcaggucauug

SEQ ID NO: 1878222 - RNA, 19 nt, Homo sapiens
  misc_RNA (1)...(19): siRNA sense strand
gugaggaccugugccuaca

SEQ ID NO: 1878223 - RNA, 19 nt, Homo sapiens
  misc_RNA (1)...(19): siRNA sense strand
gcguggagaacgugacuga

SEQ ID NO: 1878224 - RNA, 19 nt, Homo sapiens
  misc_RNA (1)...(19): siRNA sense strand
ccugucagaccaagagaaa

SEQ ID NO: 1878225 - RNA, 19 nt, Homo sapiens
  misc_RNA (1)...(19): siRNA sense strand
ggacagagcuucagaaacu

SEQ ID NO: 1878226 - RNA, 19 nt, Homo sapiens
  misc_RNA (1)...(19): siRNA sense strand
gcaagaaccugcuaucaga

SEQ ID NO: 1878227 - RNA, 19 nt, Homo sapiens
  misc_RNA (1)...(19): siRNA sense strand
gaagagggccagaagaaua

SEQ ID NO: 1878228 - RNA, 19 nt, Homo sapiens
  misc_RNA (1)...(19): siRNA sense strand
gcaaugagaugguagaaca

SEQ ID NO: 1878229 - RNA, 19 nt, Homo sapiens
  misc_RNA (1)...(19): siRNA sense strand
gguaaaggauguacucaaa

SEQ ID NO: 1878230 - RNA, 19 nt, Homo sapiens
  misc_RNA (1)...(19): siRNA sense strand
gaaggaagcaggaaacauu

SEQ ID NO: 1878231 - RNA, 19 nt, Homo sapiens
  misc_RNA (1)...(19): siRNA sense strand
gaacauagucuucagguau

SEQ ID NO: 1878232 - RNA, 19 nt, Homo sapiens
  misc_RNA (1)...(19): siRNA sense strand
gagaugaaauuugcaauga

SEQ ID NO: 1878233 - RNA, 19 nt, Homo sapiens
  misc_RNA (1)...(19): siRNA sense strand
gaucucaacuggauucaug

SEQ ID NO: 1878234 - RNA, 19 nt, Homo sapiens
  misc_RNA (1)...(19): siRNA sense strand
acaacgaacugcuuuauga

SEQ ID NO: 1878235 - RNA, 19 nt, Homo sapiens
  misc_RNA (1)...(19): siRNA sense strand
ugaaagaucucaacuggau

SEQ ID NO: 1878236 - RNA, 19 nt, Homo sapiens
  misc_RNA (1)...(19): siRNA sense strand
gaagaaggcagcauguauu

SEQ ID NO: 1878237 - RNA, 19 nt, Homo sapiens
  misc_RNA (1)...(19): siRNA sense strand
ugaaggagaugguaaagga

SEQ ID NO: 1878238 - RNA, 19 nt, Homo sapiens
  misc_RNA (1)...(19): siRNA sense strand
gaugaaauuugcaaugaga

SEQ ID NO: 1878239 - RNA, 19 nt, Homo sapiens
  misc_RNA (1)...(19): siRNA sense strand
gaagaggagugucuacauc

SEQ ID NO: 1878240 - RNA, 19 nt, Homo sapiens
  misc_RNA (1)...(19): siRNA sense strand
acacaggccuugaugauga

SEQ ID NO: 1878241 - RNA, 19 nt, Homo sapiens
  misc_RNA (1)...(19): siRNA sense strand
ggacaggcauccuucuuca

SEQ ID NO: 1878242 - RNA, 19 nt, Homo sapiens
  misc_RNA (1)...(19): siRNA sense strand
cugaagaguugcauaagua

SEQ ID NO: 1878243 - RNA, 19 nt, Homo sapiens
  misc_RNA (1)...(19): siRNA sense strand
gcacccaccucaaccagaa

SEQ ID NO: 1878244 - RNA, 19 nt, Homo sapiens
  misc_RNA (1)...(19): siRNA sense strand
caaguugacucgaguguuc

SEQ ID NO: 1878245 - RNA, 19 nt, Homo sapiens
  misc_RNA (1)...(19): siRNA sense strand
uggagaaggugaaaguaua

SEQ ID NO: 1878246 - RNA, 19 nt, Homo sapiens
  misc_RNA (1)...(19): siRNA sense strand
gagguaaucuggcuagaca

SEQ ID NO: 1878247 - RNA, 19 nt, Homo sapiens
  misc_RNA (1)...(19): siRNA sense strand
gggcagaacuggcucaucu

SEQ ID NO: 1878248 - RNA, 19 nt, Homo sapiens
  misc_RNA (1)...(19): siRNA sense strand
ggaagaaggcagcauguau

SEQ ID NO: 1878249 - RNA, 19 nt, Homo sapiens
  misc_RNA (1)...(19): siRNA sense strand
gaacaguggugcagugaac

SEQ ID NO: 1878250 - RNA, 19 nt, Homo sapiens
  misc_RNA (1)...(19): siRNA sense strand
ggaacauagucuucaggua

SEQ ID NO: 1878251 - RNA, 19 nt, Homo sapiens
  misc_RNA (1)...(19): siRNA sense strand
gccaagcccuucaccauug

SEQ ID NO: 1878252 - RNA, 19 nt, Homo sapiens
  misc_RNA (1)...(19): siRNA sense strand
gaggaaauguaugaagaaa

SEQ ID NO: 1878253 - RNA, 19 nt, Homo sapiens
  misc_RNA (1)...(19): siRNA sense strand
guccacagcugcagauuug

SEQ ID NO: 1878254 - RNA, 19 nt, Homo sapiens
  misc_RNA (1)...(19): siRNA sense strand
ggagguuaaagcuaaauua

SEQ ID NO: 1878255 - RNA, 19 nt, Homo sapiens
  misc_RNA (1)...(19): siRNA sense strand
ucagagcgcugcaaagauc

SEQ ID NO: 1878256 - RNA, 19 nt, Homo sapiens
  misc_RNA (1)...(19): siRNA sense strand
gcuaaacucuaccacugaa

SEQ ID NO: 1878257 - RNA, 19 nt, Homo sapiens
  misc_RNA (1)...(19): siRNA sense strand
gcugggcucucuucuauca

SEQ ID NO: 1878258 - RNA, 19 nt, Homo sapiens
  misc_RNA (1)...(19): siRNA sense strand
ccauugauguggacaagaa

SEQ ID NO: 1878259 - RNA, 19 nt, Homo sapiens
  misc_RNA (1)...(19): siRNA sense strand
cacagcaucuucucaauca

SEQ ID NO: 1878260 - RNA, 19 nt, Homo sapiens
  misc_RNA (1)...(19): siRNA sense strand
caacauggugcuagugaaa

SEQ ID NO: 1878261 - RNA, 19 nt, Homo sapiens
  misc_RNA (1)...(19): siRNA sense strand
ccacugaagaguugcauaa

SEQ ID NO: 1878262 - RNA, 19 nt, Homo sapiens
  misc_RNA (1)...(19): siRNA sense strand
gguuaaagcuaaauuacag

SEQ ID NO: 1878263 - RNA, 19 nt, Homo sapiens
  misc_RNA (1)...(19): siRNA sense strand
ucacaaagguuggcagcuu

SEQ ID NO: 1878264 - RNA, 19 nt, Homo sapiens
  misc_RNA (1)...(19): siRNA sense strand
uaaaggauguacucaaagg

SEQ ID NO: 1878265 - RNA, 19 nt, Homo sapiens
  misc_RNA (1)...(19): siRNA sense strand
cguaguuucucccauguuu

SEQ ID NO: 1878266 - RNA, 19 nt, Homo sapiens
  misc_RNA (1)...(19): siRNA sense strand
agaacuggcucaucuauac

SEQ ID NO: 1878267 - RNA, 19 nt, Homo sapiens
  misc_RNA (1)...(19): siRNA sense strand
uggcugaacugcagaacaa

SEQ ID NO: 1878268 - RNA, 19 nt, Homo sapiens
  misc_RNA (1)...(19): siRNA sense strand
caacuggauucaugugcaa

SEQ ID NO: 1878269 - RNA, 19 nt, Homo sapiens
  misc_RNA (1)...(19): siRNA sense strand
gcucaucuauacauaugga

SEQ ID NO: 1878270 - RNA, 19 nt, Homo sapiens
  misc_RNA (1)...(19): siRNA sense strand
cuuguuaccuucagaguug

SEQ ID NO: 1878271 - RNA, 19 nt, Homo sapiens
  misc_RNA (1)...(19): siRNA sense strand
ggaggaaauguaugaagaa

SEQ ID NO: 1878272 - RNA, 19 nt, Homo sapiens
  misc_RNA (1)...(19): siRNA sense strand
gugaaucccugugcaucua

SEQ ID NO: 1878273 - RNA, 19 nt, Homo sapiens
  misc_RNA (1)...(19): siRNA sense strand
aagaagcugucccugcuaa

SEQ ID NO: 1878274 - RNA, 19 nt, Homo sapiens
  misc_RNA (1)...(19): siRNA sense strand
gaacugcuuuaugaccuau

SEQ ID NO: 1878275 - RNA, 19 nt, Homo sapiens
  misc_RNA (1)...(19): siRNA sense strand
aggaggagcuguccacuuc

SEQ ID NO: 1878276 - RNA, 19 nt, Homo sapiens
  misc_RNA (1)...(19): siRNA sense strand
gaucuucaauagccuccaa

SEQ ID NO: 1878277 - RNA, 19 nt, Homo sapiens
  misc_RNA (1)...(19): siRNA sense strand
aagaaaccauuccuucgaa

SEQ ID NO: 1878278 - RNA, 19 nt, Homo sapiens
  misc_RNA (1)...(19): siRNA sense strand
uggaggaaauguaugaaga

SEQ ID NO: 1878279 - RNA, 19 nt, Homo sapiens
  misc_RNA (1)...(19): siRNA sense strand
gcaguagccagcuggauga

SEQ ID NO: 1878280 - RNA, 19 nt, Homo sapiens
  misc_RNA (1)...(19): siRNA sense strand
gcagaacuggcucaucuau

SEQ ID NO: 1878281 - RNA, 19 nt, Homo sapiens
  misc_RNA (1)...(19): siRNA sense strand
caacagacugcagcccuua

SEQ ID NO: 1878282 - RNA, 19 nt, Homo sapiens
  misc_RNA (1)...(19): siRNA sense strand
guuaggcccuuguuaccuu

SEQ ID NO: 1878283 - RNA, 19 nt, Homo sapiens
  misc_RNA (1)...(19): siRNA sense strand
uagaagagggccagaagaa

SEQ ID NO: 1878284 - RNA, 19 nt, Homo sapiens
  misc_RNA (1)...(19): siRNA sense strand
guuccaagguuucuucaca

SEQ ID NO: 1878285 - RNA, 19 nt, Homo sapiens
  misc_RNA (1)...(19): siRNA sense strand
ggacaagaaguuagaagag

SEQ ID NO: 1878286 - RNA, 19 nt, Homo sapiens
  misc_RNA (1)...(19): siRNA sense strand
gaagaagcugucccugcua

SEQ ID NO: 1878287 - RNA, 19 nt, Homo sapiens
  misc_RNA (1)...(19): siRNA sense strand
aaccauuccuucgaaauuu

SEQ ID NO: 1878288 - RNA, 19 nt, Homo sapiens
  misc_RNA (1)...(19): siRNA sense strand
cgaacugcuuuaugaccua

SEQ ID NO: 1878289 - RNA, 19 nt, Homo sapiens
  misc_RNA (1)...(19): siRNA sense strand
gcauccuucuucaaccuaa

SEQ ID NO: 1878290 - RNA, 19 nt, Homo sapiens
  misc_RNA (1)...(19): siRNA sense strand
gaaaccauuccuucgaaau

SEQ ID NO: 1878291 - RNA, 19 nt, Homo sapiens
  misc_RNA (1)...(19): siRNA sense strand
uucaggagguuaaagcuaa

SEQ ID NO: 1878292 - RNA, 19 nt, Homo sapiens
  misc_RNA (1)...(19): siRNA sense strand
ggccguuccugcaugauug

SEQ ID NO: 1878293 - RNA, 19 nt, Homo sapiens
  misc_RNA (1)...(19): siRNA sense strand
uugcugggcucucuucuau

SEQ ID NO: 1878294 - RNA, 19 nt, Homo sapiens
  misc_RNA (1)...(19): siRNA sense strand
gacaggaggaaaugaagaa

SEQ ID NO: 1878295 - RNA, 19 nt, Homo sapiens
  misc_RNA (1)...(19): siRNA sense strand
aaaccauuccuucgaaauu

SEQ ID NO: 1878296 - RNA, 19 nt, Homo sapiens
  misc_RNA (1)...(19): siRNA sense strand
guagccagcuggaugaaac

SEQ ID NO: 1878297 - RNA, 19 nt, Homo sapiens
  misc_RNA (1)...(19): siRNA sense strand
gaagcugucccugcuaaau

SEQ ID NO: 1878298 - RNA, 19 nt, Homo sapiens
  misc_RNA (1)...(19): siRNA sense strand
ucagaaacuuggugagucu

SEQ ID NO: 1878299 - RNA, 19 nt, Homo sapiens
  misc_RNA (1)...(19): siRNA sense strand
ccaagcccuucaccauuga

SEQ ID NO: 1878300 - RNA, 19 nt, Homo sapiens
  misc_RNA (1)...(19): siRNA sense strand
gcaggaagccagacaacag

SEQ ID NO: 1878301 - RNA, 19 nt, Homo sapiens
  misc_RNA (1)...(19): siRNA sense strand
gccaaguucucagccauug

SEQ ID NO: 1878302 - RNA, 19 nt, Homo sapiens
  misc_RNA (1)...(19): siRNA sense strand
ugccaaagcucaacagacu

SEQ ID NO: 1878303 - RNA, 19 nt, Homo sapiens
  misc_RNA (1)...(19): siRNA sense strand
cagcagagagagcuuguug

SEQ ID NO: 1878304 - RNA, 19 nt, Homo sapiens
  misc_RNA (1)...(19): siRNA sense strand
guggugcagugaacauuug

SEQ ID NO: 1878305 - RNA, 19 nt, Homo sapiens
  misc_RNA (1)...(19): siRNA sense strand
gcggacagagcuucagaaa

SEQ ID NO: 1878306 - RNA, 19 nt, Homo sapiens
  misc_RNA (1)...(19): siRNA sense strand
agaaaccauuccuucgaaa

SEQ ID NO: 1878307 - RNA, 19 nt, Homo sapiens
  misc_RNA (1)...(19): siRNA sense strand
cuacaucgaaagucggaua

SEQ ID NO: 1878308 - RNA, 19 nt, Homo sapiens
  misc_RNA (1)...(19): siRNA sense strand
accauuccuucgaaauuua

SEQ ID NO: 1878309 - RNA, 19 nt, Homo sapiens
  misc_RNA (1)...(19): siRNA sense strand
gaaacuccaaggccagguu

SEQ ID NO: 1878310 - RNA, 19 nt, Homo sapiens
  misc_RNA (1)...(19): siRNA sense strand
cuacggcggucacaaaggu

SEQ ID NO: 1878311 - RNA, 19 nt, Homo sapiens
  misc_RNA (1)...(19): siRNA sense strand
ggagcgggaugaaaagauu

SEQ ID NO: 1878312 - RNA, 19 nt, Homo sapiens
  misc_RNA (1)...(19): siRNA sense strand
gcagacacaggccuugaug

SEQ ID NO: 1878313 - RNA, 19 nt, Homo sapiens
  misc_RNA (1)...(19): siRNA sense strand
cguaagaaccagagcuuug

SEQ ID NO: 1878314 - RNA, 19 nt, Homo sapiens
  misc_RNA (1)...(19): siRNA sense strand
gaucuacaacgaacugcuu

SEQ ID NO: 1878315 - RNA, 19 nt, Homo sapiens
  misc_RNA (1)...(19): siRNA sense strand
uggcucaucuauacauaug

SEQ ID NO: 1878316 - RNA, 19 nt, Homo sapiens
  misc_RNA (1)...(19): siRNA sense strand
caacaaccaccagggaaga

SEQ ID NO: 1878317 - RNA, 19 nt, Homo sapiens
  misc_RNA (1)...(19): siRNA sense strand
gaacaacauggugcuagug

SEQ ID NO: 1878318 - RNA, 19 nt, Homo sapiens
  misc_RNA (1)...(19): siRNA sense strand
gcaaagcagagcuaaacuc

SEQ ID NO: 1878319 - RNA, 19 nt, Homo sapiens
  misc_RNA (1)...(19): siRNA sense strand
ucaggagguuaaagcuaaa

SEQ ID NO: 1878320 - RNA, 19 nt, Homo sapiens
  misc_RNA (1)...(19): siRNA sense strand
cgaggccguuccugcauga

SEQ ID NO: 1878321 - RNA, 19 nt, Homo sapiens
  misc_RNA (1)...(19): siRNA sense strand
caucuggaucucauucuuu

SEQ ID NO: 1878322 - RNA, 19 nt, Homo sapiens
  misc_RNA (1)...(19): siRNA sense strand
ccagcuggaugaaacaagu

SEQ ID NO: 1878323 - RNA, 19 nt, Homo sapiens
  misc_RNA (1)...(19): siRNA sense strand
uaaauuacagcagugcaaa

SEQ ID NO: 1878324 - RNA, 19 nt, Homo sapiens
  misc_RNA (1)...(19): siRNA sense strand
gcagugcaaagcagagcua

SEQ ID NO: 1878325 - RNA, 19 nt, Homo sapiens
  misc_RNA (1)...(19): siRNA sense strand
gaagaucugucuccuauug

SEQ ID NO: 1878326 - RNA, 19 nt, Homo sapiens
  misc_RNA (1)...(19): siRNA sense strand
gaauuuaccucuucaugaa

SEQ ID NO: 1878327 - RNA, 19 nt, Homo sapiens
  misc_RNA (1)...(19): siRNA sense strand
ggaauuauccuuaaacuug

SEQ ID NO: 1878328 - RNA, 19 nt, Homo sapiens
  misc_RNA (1)...(19): siRNA sense strand
gaacaucucugucacuacu

SEQ ID NO: 1878329 - RNA, 19 nt, Homo sapiens
  misc_RNA (1)...(19): siRNA sense strand
uacaaucacuggcuucaua

SEQ ID NO: 1878330 - RNA, 19 nt, Homo sapiens
  misc_RNA (1)...(19): siRNA sense strand
gaauucaucaguaccuuua

SEQ ID NO: 1878331 - RNA, 19 nt, Homo sapiens
  misc_RNA (1)...(19): siRNA sense strand
ucagaagaaucgacaauga

SEQ ID NO: 1878332 - RNA, 19 nt, Homo sapiens
  misc_RNA (1)...(19): siRNA sense strand
gaaagguucuugcuaugca

SEQ ID NO: 1878333 - RNA, 19 nt, Homo sapiens
  misc_RNA (1)...(19): siRNA sense strand
gcuaccaaaugggaaauua

SEQ ID NO: 1878334 - RNA, 19 nt, Homo sapiens
  misc_RNA (1)...(19): siRNA sense strand
uaaaacagguucagaagaa

SEQ ID NO: 1878335 - RNA, 19 nt, Homo sapiens
  misc_RNA (1)...(19): siRNA sense strand
ggaggagaacauuuauaua

SEQ ID NO: 1878336 - RNA, 19 nt, Homo sapiens
  misc_RNA (1)...(19): siRNA sense strand
ucaguaaugucgaccuaaa

SEQ ID NO: 1878337 - RNA, 19 nt, Homo sapiens
  misc_RNA (1)...(19): siRNA sense strand
aagaagccauugaaauuug

SEQ ID NO: 1878338 - RNA, 19 nt, Homo sapiens
  misc_RNA (1)...(19): siRNA sense strand
ccuauuacuuugugaagaa

SEQ ID NO: 1878339 - RNA, 19 nt, Homo sapiens
  misc_RNA (1)...(19): siRNA sense strand
gcacuaacauacaauacac

SEQ ID NO: 1878340 - RNA, 19 nt, Homo sapiens
  misc_RNA (1)...(19): siRNA sense strand
gaaaagaagccauugaaau

SEQ ID NO: 1878341 - RNA, 19 nt, Homo sapiens
  misc_RNA (1)...(19): siRNA sense strand
ccuuaaacuuggauucuaa

SEQ ID NO: 1878342 - RNA, 19 nt, Homo sapiens
  misc_RNA (1)...(19): siRNA sense strand
gaaccgaaguuagcuccau

SEQ ID NO: 1878343 - RNA, 19 nt, Homo sapiens
  misc_RNA (1)...(19): siRNA sense strand
guucaaggcuuugcagaca

SEQ ID NO: 1878344 - RNA, 19 nt, Homo sapiens
  misc_RNA (1)...(19): siRNA sense strand
gaccuaaaugagccuaaua

SEQ ID NO: 1878345 - RNA, 19 nt, Homo sapiens
  misc_RNA (1)...(19): siRNA sense strand
aaaaggaggagaacauuua

SEQ ID NO: 1878346 - RNA, 19 nt, Homo sapiens
  misc_RNA (1)...(19): siRNA sense strand
caagcacagugguggcaaa

SEQ ID NO: 1878347 - RNA, 19 nt, Homo sapiens
  misc_RNA (1)...(19): siRNA sense strand
uggaacaucucugucacua

SEQ ID NO: 1878348 - RNA, 19 nt, Homo sapiens
  misc_RNA (1)...(19): siRNA sense strand
gaagaaucgacaaugaugu

SEQ ID NO: 1878349 - RNA, 19 nt, Homo sapiens
  misc_RNA (1)...(19): siRNA sense strand
ggucauccaucucaguuuu

SEQ ID NO: 1878350 - RNA, 19 nt, Homo sapiens
  misc_RNA (1)...(19): siRNA sense strand
guaaugucgaccuaaauga

SEQ ID NO: 1878351 - RNA, 19 nt, Homo sapiens
  misc_RNA (1)...(19): siRNA sense strand
agaagccauugaaauuuga

SEQ ID NO: 1878352 - RNA, 19 nt, Homo sapiens
  misc_RNA (1)...(19): siRNA sense strand
agaauuuaccucuucauga

SEQ ID NO: 1878353 - RNA, 19 nt, Homo sapiens
  misc_RNA (1)...(19): siRNA sense strand
gaaaaggaggagaacauuu

SEQ ID NO: 1878354 - RNA, 19 nt, Homo sapiens
  misc_RNA (1)...(19): siRNA sense strand
ugaucacuguccaccauaa

SEQ ID NO: 1878355 - RNA, 19 nt, Homo sapiens
  misc_RNA (1)...(19): siRNA sense strand
acacuggacccuauuacuu

SEQ ID NO: 1878356 - RNA, 19 nt, Homo sapiens
  misc_RNA (1)...(19): siRNA sense strand
cacuggacccuauuacuuu

SEQ ID NO: 1878357 - RNA, 19 nt, Homo sapiens
  misc_RNA (1)...(19): siRNA sense strand
gaauaucuuggucuuucaa

SEQ ID NO: 1878358 - RNA, 19 nt, Homo sapiens
  misc_RNA (1)...(19): siRNA sense strand
ggguuacacuguccguuca

SEQ ID NO: 1878359 - RNA, 19 nt, Homo sapiens
  misc_RNA (1)...(19): siRNA sense strand
gaacacuggacccuauuac

SEQ ID NO: 1878360 - RNA, 19 nt, Homo sapiens
  misc_RNA (1)...(19): siRNA sense strand
cgaccuaaaugagccuaau

SEQ ID NO: 1878361 - RNA, 19 nt, Homo sapiens
  misc_RNA (1)...(19): siRNA sense strand
aggaggagaacauuuauau

SEQ ID NO: 1878362 - RNA, 19 nt, Homo sapiens
  misc_RNA (1)...(19): siRNA sense strand
acaucucugucacuacuuu

SEQ ID NO: 1878363 - RNA, 19 nt, Homo sapiens
  misc_RNA (1)...(19): siRNA sense strand
agaagaaucgacaaugaug

SEQ ID NO: 1878364 - RNA, 19 nt, Homo sapiens
  misc_RNA (1)...(19): siRNA sense strand
uaauacuguugcccugcua

SEQ ID NO: 1878365 - RNA, 19 nt, Homo sapiens
  misc_RNA (1)...(19): siRNA sense strand
ggacuauuggcuucagaug

SEQ ID NO: 1878366 - RNA, 19 nt, Homo sapiens
  misc_RNA (1)...(19): siRNA sense strand
gcauaaaacagguucagaa

SEQ ID NO: 1878367 - RNA, 19 nt, Homo sapiens
  misc_RNA (1)...(19): siRNA sense strand
ggacccuauuacuuuguga

SEQ ID NO: 1878368 - RNA, 19 nt, Homo sapiens
  misc_RNA (1)...(19): siRNA sense strand
cuaccaaaugggaaauuaa

SEQ ID NO: 1878369 - RNA, 19 nt, Homo sapiens
  misc_RNA (1)...(19): siRNA sense strand
cagaagaaucgacaaugau

SEQ ID NO: 1878370 - RNA, 19 nt, Homo sapiens
  misc_RNA (1)...(19): siRNA sense strand
cuucaguaaugucgaccua

SEQ ID NO: 1878371 - RNA, 19 nt, Homo sapiens
  misc_RNA (1)...(19): siRNA sense strand
gaugaagauaauacuguug

SEQ ID NO: 1878372 - RNA, 19 nt, Homo sapiens
  misc_RNA (1)...(19): siRNA sense strand
aaugaucacuguccaccau

SEQ ID NO: 1878373 - RNA, 19 nt, Homo sapiens
  misc_RNA (1)...(19): siRNA sense strand
agaauaucuuggucuuuca

SEQ ID NO: 1878374 - RNA, 19 nt, Homo sapiens
  misc_RNA (1)...(19): siRNA sense strand
gcuucauacuuccagagaa

SEQ ID NO: 1878375 - RNA, 19 nt, Homo sapiens
  misc_RNA (1)...(19): siRNA sense strand
ugaauucaucaguaccuuu

SEQ ID NO: 1878376 - RNA, 19 nt, Homo sapiens
  misc_RNA (1)...(19): siRNA sense strand
gguucuugcuaugcacuaa

SEQ ID NO: 1878377 - RNA, 19 nt, Homo sapiens
  misc_RNA (1)...(19): siRNA sense strand
aaaggaggagaacauuuau

SEQ ID NO: 1878378 - RNA, 19 nt, Homo sapiens
  misc_RNA (1)...(19): siRNA sense strand
agacacuuaugaagaaacu

SEQ ID NO: 1878379 - RNA, 19 nt, Homo sapiens
  misc_RNA (1)...(19): siRNA sense strand
gaucugucuccuauuggaa

SEQ ID NO: 1878380 - RNA, 19 nt, Homo sapiens
  misc_RNA (1)...(19): siRNA sense strand
gauggaauuauccuuaaac

SEQ ID NO: 1878381 - RNA, 19 nt, Homo sapiens
  misc_RNA (1)...(19): siRNA sense strand
ggacuucagggucauccau

SEQ ID NO: 1878382 - RNA, 19 nt, Homo sapiens
  misc_RNA (1)...(19): siRNA sense strand
guucagaagaaucgacaau

SEQ ID NO: 1878383 - RNA, 19 nt, Homo sapiens
  misc_RNA (1)...(19): siRNA sense strand
gcacagugguggcaaaagc

SEQ ID NO: 1878384 - RNA, 19 nt, Homo sapiens
  misc_RNA (1)...(19): siRNA sense strand
agaucugucuccuauugga

SEQ ID NO: 1878385 - RNA, 19 nt, Homo sapiens
  misc_RNA (1)...(19): siRNA sense strand
uccuuaaacuuggauucua

SEQ ID NO: 1878386 - RNA, 19 nt, Homo sapiens
  misc_RNA (1)...(19): siRNA sense strand
acuggacccuauuacuuug

SEQ ID NO: 1878387 - RNA, 19 nt, Homo sapiens
  misc_RNA (1)...(19): siRNA sense strand
aaacagguucagaagaauc

SEQ ID NO: 1878388 - RNA, 19 nt, Homo sapiens
  misc_RNA (1)...(19): siRNA sense strand
aaggaggagaacauuuaua

SEQ ID NO: 1878389 - RNA, 19 nt, Homo sapiens
  misc_RNA (1)...(19): siRNA sense strand
ccuaaaugagccuaauaau

SEQ ID NO: 1878390 - RNA, 19 nt, Homo sapiens
  misc_RNA (1)...(19): siRNA sense strand
cacuggauaaagacacuua

SEQ ID NO: 1878391 - RNA, 19 nt, Homo sapiens
  misc_RNA (1)...(19): siRNA sense strand
aaguagcacugagcacguu

SEQ ID NO: 1878392 - RNA, 19 nt, Homo sapiens
  misc_RNA (1)...(19): siRNA sense strand
ccaagaggcuggagcugua

SEQ ID NO: 1878393 - RNA, 19 nt, Homo sapiens
  misc_RNA (1)...(19): siRNA sense strand
gcagauguucuaccaguua

SEQ ID NO: 1878394 - RNA, 19 nt, Homo sapiens
  misc_RNA (1)...(19): siRNA sense strand
gaaaagagcagcugacgua

SEQ ID NO: 1878395 - RNA, 19 nt, Homo sapiens
  misc_RNA (1)...(19): siRNA sense strand
ggcaucaucuccaccauuu

SEQ ID NO: 1878396 - RNA, 19 nt, Homo sapiens
  misc_RNA (1)...(19): siRNA sense strand
gaagaucauucaccgcaau

SEQ ID NO: 1878397 - RNA, 19 nt, Homo sapiens
  misc_RNA (1)...(19): siRNA sense strand
ggucuugcuucccuucaua

SEQ ID NO: 1878398 - RNA, 19 nt, Homo sapiens
  misc_RNA (1)...(19): siRNA sense strand
ggaggagagucugcacuaa

SEQ ID NO: 1878399 - RNA, 19 nt, Homo sapiens
  misc_RNA (1)...(19): siRNA sense strand
caaggacucugucuacauc

SEQ ID NO: 1878400 - RNA, 19 nt, Homo sapiens
  misc_RNA (1)...(19): siRNA sense strand
gaagcaggcggcaagcaua

SEQ ID NO: 1878401 - RNA, 19 nt, Homo sapiens
  misc_RNA (1)...(19): siRNA sense strand
aaacccagaugccaagauu

SEQ ID NO: 1878402 - RNA, 19 nt, Homo sapiens
  misc_RNA (1)...(19): siRNA sense strand
ugaggaagcuguuugacau

SEQ ID NO: 1878403 - RNA, 19 nt, Homo sapiens
  misc_RNA (1)...(19): siRNA sense strand
gcaaguacaagcucaagga

SEQ ID NO: 1878404 - RNA, 19 nt, Homo sapiens
  misc_RNA (1)...(19): siRNA sense strand
gaacgaggcggcagaaagg

SEQ ID NO: 1878405 - RNA, 19 nt, Homo sapiens
  misc_RNA (1)...(19): siRNA sense strand
ggagauccuuggcaucauc

SEQ ID NO: 1878406 - RNA, 19 nt, Homo sapiens
  misc_RNA (1)...(19): siRNA sense strand
gaaggcgucucccggaucu

SEQ ID NO: 1878407 - RNA, 19 nt, Homo sapiens
  misc_RNA (1)...(19): siRNA sense strand
gagaauuccugcacagaac

SEQ ID NO: 1878408 - RNA, 19 nt, Homo sapiens
  misc_RNA (1)...(19): siRNA sense strand
gaagacauccagccagcuu

SEQ ID NO: 1878409 - RNA, 19 nt, Homo sapiens
  misc_RNA (1)...(19): siRNA sense strand
gcaaagcgcagcaccuaca

SEQ ID NO: 1878410 - RNA, 19 nt, Homo sapiens
  misc_RNA (1)...(19): siRNA sense strand
uggaagaguugcagaagau

SEQ ID NO: 1878411 - RNA, 19 nt, Homo sapiens
  misc_RNA (1)...(19): siRNA sense strand
cgaauccguuguggaauga

SEQ ID NO: 1878412 - RNA, 19 nt, Homo sapiens
  misc_RNA (1)...(19): siRNA sense strand
gggaagacgaggaggauga

SEQ ID NO: 1878413 - RNA, 19 nt, Homo sapiens
  misc_RNA (1)...(19): siRNA sense strand
cgaaauggagacagagauu

SEQ ID NO: 1878414 - RNA, 19 nt, Homo sapiens
  misc_RNA (1)...(19): siRNA sense strand
aagagcagcugacguacga

SEQ ID NO: 1878415 - RNA, 19 nt, Homo sapiens
  misc_RNA (1)...(19): siRNA sense strand
ccgaauccguuguggaaug

SEQ ID NO: 1878416 - RNA, 19 nt, Homo sapiens
  misc_RNA (1)...(19): siRNA sense strand
guggaagaguugcagaaga

SEQ ID NO: 1878417 - RNA, 19 nt, Homo sapiens
  misc_RNA (1)...(19): siRNA sense strand
uuuaucaaguccucgauuu

SEQ ID NO: 1878418 - RNA, 19 nt, Homo sapiens
  misc_RNA (1)...(19): siRNA sense strand
acuccgaggucacauuuga

SEQ ID NO: 1878419 - RNA, 19 nt, Homo sapiens
  misc_RNA (1)...(19): siRNA sense strand
gccaaccgcuucaguacca

SEQ ID NO: 1878420 - RNA, 19 nt, Homo sapiens
  misc_RNA (1)...(19): siRNA sense strand
gaaauggagacagagauuc

SEQ ID NO: 1878421 - RNA, 19 nt, Homo sapiens
  misc_RNA (1)...(19): siRNA sense strand
gaagaguugcagaagauca

SEQ ID NO: 1878422 - RNA, 19 nt, Homo sapiens
  misc_RNA (1)...(19): siRNA sense strand
acccagaugccaagauuua

SEQ ID NO: 1878423 - RNA, 19 nt, Homo sapiens
  misc_RNA (1)...(19): siRNA sense strand
ugccaucuuugucaacuuu

SEQ ID NO: 1878424 - RNA, 19 nt, Homo sapiens
  misc_RNA (1)...(19): siRNA sense strand
ccacuccgaggucacauuu

SEQ ID NO: 1878425 - RNA, 19 nt, Homo sapiens
  misc_RNA (1)...(19): siRNA sense strand
ccaguuaugcgacuugaau

SEQ ID NO: 1878426 - RNA, 19 nt, Homo sapiens
  misc_RNA (1)...(19): siRNA sense strand
gcucaaggacucugucuac

SEQ ID NO: 1878427 - RNA, 19 nt, Homo sapiens
  misc_RNA (1)...(19): siRNA sense strand
cuaagaugcugccgacucu

SEQ ID NO: 1878428 - RNA, 19 nt, Homo sapiens
  misc_RNA (1)...(19): siRNA sense strand
cgggaaggcuacaacaauc

SEQ ID NO: 1878429 - RNA, 19 nt, Homo sapiens
  misc_RNA (1)...(19): siRNA sense strand
guacuuggcugugcauacg

SEQ ID NO: 1878430 - RNA, 19 nt, Homo sapiens
  misc_RNA (1)...(19): siRNA sense strand
cagauguucuaccaguuau

SEQ ID NO: 1878431 - RNA, 19 nt, Homo sapiens
  misc_RNA (1)...(19): siRNA sense strand
gcgcagcaccuacaacuac

SEQ ID NO: 1878432 - RNA, 19 nt, Homo sapiens
  misc_RNA (1)...(19): siRNA sense strand
ggauucgauuuggguauga

SEQ ID NO: 1878433 - RNA, 19 nt, Homo sapiens
  misc_RNA (1)...(19): siRNA sense strand
ggaugucugacuuccagua

SEQ ID NO: 1878434 - RNA, 19 nt, Homo sapiens
  misc_RNA (1)...(19): siRNA sense strand
ggaagcaggcggcaagcau

SEQ ID NO: 1878435 - RNA, 19 nt, Homo sapiens
  misc_RNA (1)...(19): siRNA sense strand
ccagccagcuugucaccau

SEQ ID NO: 1878436 - RNA, 19 nt, Homo sapiens
  misc_RNA (1)...(19): siRNA sense strand
ugucugacuuccaguacuu

SEQ ID NO: 1878437 - RNA, 19 nt, Homo sapiens
  misc_RNA (1)...(19): siRNA sense strand
cgacuugaauguggaagag

SEQ ID NO: 1878438 - RNA, 19 nt, Homo sapiens
  misc_RNA (1)...(19): siRNA sense strand
caucuccaccauuuacaaa

SEQ ID NO: 1878439 - RNA, 19 nt, Homo sapiens
  misc_RNA (1)...(19): siRNA sense strand
gauucuggacuacguguga

SEQ ID NO: 1878440 - RNA, 19 nt, Homo sapiens
  misc_RNA (1)...(19): siRNA sense strand
ggcagauguucuaccaguu

SEQ ID NO: 1878441 - RNA, 19 nt, Homo sapiens
  misc_RNA (1)...(19): siRNA sense strand
caccaugcaugaccugaag

SEQ ID NO: 1878442 - RNA, 19 nt, Homo sapiens
  misc_RNA (1)...(19): siRNA sense strand
aagcaaagcgcagcaccua

SEQ ID NO: 1878443 - RNA, 19 nt, Homo sapiens
  misc_RNA (1)...(19): siRNA sense strand
ggacucugucuacaucuuc

SEQ ID NO: 1878444 - RNA, 19 nt, Homo sapiens
  misc_RNA (1)...(19): siRNA sense strand
gcaucaucuccaccauuua

SEQ ID NO: 1878445 - RNA, 19 nt, Homo sapiens
  misc_RNA (1)...(19): siRNA sense strand
ggaggaggaggacuucaag

SEQ ID NO: 1878446 - RNA, 19 nt, Homo sapiens
  misc_RNA (1)...(19): siRNA sense strand
cagaugccaagauuuauca

SEQ ID NO: 1878447 - RNA, 19 nt, Homo sapiens
  misc_RNA (1)...(19): siRNA sense strand
caucaucuccaccauuuac

SEQ ID NO: 1878448 - RNA, 19 nt, Homo sapiens
  misc_RNA (1)...(19): siRNA sense strand
aaaacgaaauggagacaga

SEQ ID NO: 1878449 - RNA, 19 nt, Homo sapiens
  misc_RNA (1)...(19): siRNA sense strand
agagaauuccugcacagaa

SEQ ID NO: 1878450 - RNA, 19 nt, Homo sapiens
  misc_RNA (1)...(19): siRNA sense strand
uggcgcagccuauggauuc

SEQ ID NO: 1878451 - RNA, 19 nt, Homo sapiens
  misc_RNA (1)...(19): siRNA sense strand
gaggagagucugcacuaac

SEQ ID NO: 1878452 - RNA, 19 nt, Homo sapiens
  misc_RNA (1)...(19): siRNA sense strand
cagccuauggauucgauuu

SEQ ID NO: 1878453 - RNA, 19 nt, Homo sapiens
  misc_RNA (1)...(19): siRNA sense strand
uggaggagagucugcacua

SEQ ID NO: 1878454 - RNA, 19 nt, Homo sapiens
  misc_RNA (1)...(19): siRNA sense strand
cgacggcagugaaaacgaa

SEQ ID NO: 1878455 - RNA, 19 nt, Homo sapiens
  misc_RNA (1)...(19): siRNA sense strand
gagcucagggacaccaugu

SEQ ID NO: 1878456 - RNA, 19 nt, Homo sapiens
  misc_RNA (1)...(19): siRNA sense strand
caaagcgcagcaccuacaa

SEQ ID NO: 1878457 - RNA, 19 nt, Homo sapiens
  misc_RNA (1)...(19): siRNA sense strand
aauccguuguggaaugaaa

SEQ ID NO: 1878458 - RNA, 19 nt, Homo sapiens
  misc_RNA (1)...(19): siRNA sense strand
ccagaugccaagauuuauc

SEQ ID NO: 1878459 - RNA, 19 nt, Homo sapiens
  misc_RNA (1)...(19): siRNA sense strand
ccgggaaggcuacaacaau

SEQ ID NO: 1878460 - RNA, 19 nt, Homo sapiens
  misc_RNA (1)...(19): siRNA sense strand
cagaccauccgcuccaaga

SEQ ID NO: 1878461 - RNA, 19 nt, Homo sapiens
  misc_RNA (1)...(19): siRNA sense strand
acuugaauguggaagaguu

SEQ ID NO: 1878462 - RNA, 19 nt, Homo sapiens
  misc_RNA (1)...(19): siRNA sense strand
ccuaucggcagauguucua

SEQ ID NO: 1878463 - RNA, 19 nt, Homo sapiens
  misc_RNA (1)...(19): siRNA sense strand
ucaaggacucugucuacau

SEQ ID NO: 1878464 - RNA, 19 nt, Homo sapiens
  misc_RNA (1)...(19): siRNA sense strand
uggauucgauuuggguaug

SEQ ID NO: 1878465 - RNA, 19 nt, Homo sapiens
  misc_RNA (1)...(19): siRNA sense strand
aaaccagcuuccagcaagu

SEQ ID NO: 1878466 - RNA, 19 nt, Homo sapiens
  misc_RNA (1)...(19): siRNA sense strand
guggaaugaaacacgguua

SEQ ID NO: 1878467 - RNA, 19 nt, Homo sapiens
  misc_RNA (1)...(19): siRNA sense strand
augccaagauuuaucaagu

SEQ ID NO: 1878468 - RNA, 19 nt, Homo sapiens
  misc_RNA (1)...(19): siRNA sense strand
caacagggcucuauuauga

SEQ ID NO: 1878469 - RNA, 19 nt, Homo sapiens
  misc_RNA (1)...(19): siRNA sense strand
gaacagaggcuucgcauuu

SEQ ID NO: 1878470 - RNA, 19 nt, Homo sapiens
  misc_RNA (1)...(19): siRNA sense strand
gaacaaagaugcccuaguc

SEQ ID NO: 1878471 - RNA, 19 nt, Homo sapiens
  misc_RNA (1)...(19): siRNA sense strand
gaacauagcuccgcacacu

SEQ ID NO: 1878472 - RNA, 19 nt, Homo sapiens
  misc_RNA (1)...(19): siRNA sense strand
ggaagaagauggccugucu

SEQ ID NO: 1878473 - RNA, 19 nt, Homo sapiens
  misc_RNA (1)...(19): siRNA sense strand
gaccuaaguuugaagauug

SEQ ID NO: 1878474 - RNA, 19 nt, Homo sapiens
  misc_RNA (1)...(19): siRNA sense strand
ggaaagagaagaaggagaa

SEQ ID NO: 1878475 - RNA, 19 nt, Homo sapiens
  misc_RNA (1)...(19): siRNA sense strand
caaagaugcuguccggaaa

SEQ ID NO: 1878476 - RNA, 19 nt, Homo sapiens
  misc_RNA (1)...(19): siRNA sense strand
gggcuaagaguuugaauaa

SEQ ID NO: 1878477 - RNA, 19 nt, Homo sapiens
  misc_RNA (1)...(19): siRNA sense strand
acaacaagcuggaggauug

SEQ ID NO: 1878478 - RNA, 19 nt, Homo sapiens
  misc_RNA (1)...(19): siRNA sense strand
aaagggagcuggccuagga

SEQ ID NO: 1878479 - RNA, 19 nt, Homo sapiens
  misc_RNA (1)...(19): siRNA sense strand
cgacaacagggcucuauua

SEQ ID NO: 1878480 - RNA, 19 nt, Homo sapiens
  misc_RNA (1)...(19): siRNA sense strand
agaccgagcugcagaaaga

SEQ ID NO: 1878481 - RNA, 19 nt, Homo sapiens
  misc_RNA (1)...(19): siRNA sense strand
aagauacgguuccaucaua

SEQ ID NO: 1878482 - RNA, 19 nt, Homo sapiens
  misc_RNA (1)...(19): siRNA sense strand
gauggaagccaaucagaaa

SEQ ID NO: 1878483 - RNA, 19 nt, Homo sapiens
  misc_RNA (1)...(19): siRNA sense strand
ggacucagauuacaaaaga

SEQ ID NO: 1878484 - RNA, 19 nt, Homo sapiens
  misc_RNA (1)...(19): siRNA sense strand
gagaaaugauggaguccuu

SEQ ID NO: 1878485 - RNA, 19 nt, Homo sapiens
  misc_RNA (1)...(19): siRNA sense strand
gaagauuggcuuuguaaca

SEQ ID NO: 1878486 - RNA, 19 nt, Homo sapiens
  misc_RNA (1)...(19): siRNA sense strand
uguaacaagugcugccuua

SEQ ID NO: 1878487 - RNA, 19 nt, Homo sapiens
  misc_RNA (1)...(19): siRNA sense strand
gcuaagaguuugaauaagc

SEQ ID NO: 1878488 - RNA, 19 nt, Homo sapiens
  misc_RNA (1)...(19): siRNA sense strand
ccacuuaccaguaugauga

SEQ ID NO: 1878489 - RNA, 19 nt, Homo sapiens
  misc_RNA (1)...(19): siRNA sense strand
guccucagcuguauaauca

SEQ ID NO: 1878490 - RNA, 19 nt, Homo sapiens
  misc_RNA (1)...(19): siRNA sense strand
gaucauucuucggaacaua

SEQ ID NO: 1878491 - RNA, 19 nt, Homo sapiens
  misc_RNA (1)...(19): siRNA sense strand
gaaauggagaugaggagaa

SEQ ID NO: 1878492 - RNA, 19 nt, Homo sapiens
  misc_RNA (1)...(19): siRNA sense strand
cagaaagacgggagaagua

SEQ ID NO: 1878493 - RNA, 19 nt, Homo sapiens
  misc_RNA (1)...(19): siRNA sense strand
gaugugaggcugaugaaga

SEQ ID NO: 1878494 - RNA, 19 nt, Homo sapiens
  misc_RNA (1)...(19): siRNA sense strand
guggauuacuacugugaua

SEQ ID NO: 1878495 - RNA, 19 nt, Homo sapiens
  misc_RNA (1)...(19): siRNA sense strand
aauaacauccgccucauaa

SEQ ID NO: 1878496 - RNA, 19 nt, Homo sapiens
  misc_RNA (1)...(19): siRNA sense strand
gaagaagaaaggagagaau

SEQ ID NO: 1878497 - RNA, 19 nt, Homo sapiens
  misc_RNA (1)...(19): siRNA sense strand
ggaaaagacuaaaaugcuu

SEQ ID NO: 1878498 - RNA, 19 nt, Homo sapiens
  misc_RNA (1)...(19): siRNA sense strand
gaaguacggcauuccagaa

SEQ ID NO: 1878499 - RNA, 19 nt, Homo sapiens
  misc_RNA (1)...(19): siRNA sense strand
ucucagaccuucacaagca

SEQ ID NO: 1878500 - RNA, 19 nt, Homo sapiens
  misc_RNA (1)...(19): siRNA sense strand
caaaagaucuagugaugau

SEQ ID NO: 1878501 - RNA, 19 nt, Homo sapiens
  misc_RNA (1)...(19): siRNA sense strand
gggagagagagaugaaaua

SEQ ID NO: 1878502 - RNA, 19 nt, Homo sapiens
  misc_RNA (1)...(19): siRNA sense strand
gcaaugcauuauagcaauc

SEQ ID NO: 1878503 - RNA, 19 nt, Homo sapiens
  misc_RNA (1)...(19): siRNA sense strand
gaaaauugauggcaaaacu

SEQ ID NO: 1878504 - RNA, 19 nt, Homo sapiens
  misc_RNA (1)...(19): siRNA sense strand
uggagagacuugagaguga

SEQ ID NO: 1878505 - RNA, 19 nt, Homo sapiens
  misc_RNA (1)...(19): siRNA sense strand
gcagauugccaaagacaug

SEQ ID NO: 1878506 - RNA, 19 nt, Homo sapiens
  misc_RNA (1)...(19): siRNA sense strand
ggagaaacccaagagcaaa

SEQ ID NO: 1878507 - RNA, 19 nt, Homo sapiens
  misc_RNA (1)...(19): siRNA sense strand
caagauggcuaugcccaau

SEQ ID NO: 1878508 - RNA, 19 nt, Homo sapiens
  misc_RNA (1)...(19): siRNA sense strand
gcaguguugacuacaguua

SEQ ID NO: 1878509 - RNA, 19 nt, Homo sapiens
  misc_RNA (1)...(19): siRNA sense strand
gagcgauauucgagaaaug

SEQ ID NO: 1878510 - RNA, 19 nt, Homo sapiens
  misc_RNA (1)...(19): siRNA sense strand
gagcaacccaccaaagaug

SEQ ID NO: 1878511 - RNA, 19 nt, Homo sapiens
  misc_RNA (1)...(19): siRNA sense strand
ccucagcuguauaaucaaa

SEQ ID NO: 1878512 - RNA, 19 nt, Homo sapiens
  misc_RNA (1)...(19): siRNA sense strand
ugacuacaguuaucugcaa

SEQ ID NO: 1878513 - RNA, 19 nt, Homo sapiens
  misc_RNA (1)...(19): siRNA sense strand
ugauagauaugaugacuac

SEQ ID NO: 1878514 - RNA, 19 nt, Homo sapiens
  misc_RNA (1)...(19): siRNA sense strand
ugacccagcaguaccuuua

SEQ ID NO: 1878515 - RNA, 19 nt, Homo sapiens
  misc_RNA (1)...(19): siRNA sense strand
gaagauacgguuccaucau

SEQ ID NO: 1878516 - RNA, 19 nt, Homo sapiens
  misc_RNA (1)...(19): siRNA sense strand
gcauuacggcucccauuga

SEQ ID NO: 1878517 - RNA, 19 nt, Homo sapiens
  misc_RNA (1)...(19): siRNA sense strand
gagcgugaaucccgaagca

SEQ ID NO: 1878518 - RNA, 19 nt, Homo sapiens
  misc_RNA (1)...(19): siRNA sense strand
agagagcgauauucgagaa

SEQ ID NO: 1878519 - RNA, 19 nt, Homo sapiens
  misc_RNA (1)...(19): siRNA sense strand
gacaacagggcucuauuau

SEQ ID NO: 1878520 - RNA, 19 nt, Homo sapiens
  misc_RNA (1)...(19): siRNA sense strand
gagggacucagauuacaaa

SEQ ID NO: 1878521 - RNA, 19 nt, Homo sapiens
  misc_RNA (1)...(19): siRNA sense strand
caauaacauccgccucaua

SEQ ID NO: 1878522 - RNA, 19 nt, Homo sapiens
  misc_RNA (1)...(19): siRNA sense strand
ggauggaagccaaucagaa

SEQ ID NO: 1878523 - RNA, 19 nt, Homo sapiens
  misc_RNA (1)...(19): siRNA sense strand
gaagaaaggagagaaucug

SEQ ID NO: 1878524 - RNA, 19 nt, Homo sapiens
  misc_RNA (1)...(19): siRNA sense strand
cgucagcgccuucucugua

SEQ ID NO: 1878525 - RNA, 19 nt, Homo sapiens
  misc_RNA (1)...(19): siRNA sense strand
agaccuaaguuugaagauu

SEQ ID NO: 1878526 - RNA, 19 nt, Homo sapiens
  misc_RNA (1)...(19): siRNA sense strand
gcagaaagacgggagaagu

SEQ ID NO: 1878527 - RNA, 19 nt, Homo sapiens
  misc_RNA (1)...(19): siRNA sense strand
uaccugacacguccacuua

SEQ ID NO: 1878528 - RNA, 19 nt, Homo sapiens
  misc_RNA (1)...(19): siRNA sense strand
ucagcugcuucagauauua

SEQ ID NO: 1878529 - RNA, 19 nt, Homo sapiens
  misc_RNA (1)...(19): siRNA sense strand
agugcugccuuaacaauuu

SEQ ID NO: 1878530 - RNA, 19 nt, Homo sapiens
  misc_RNA (1)...(19): siRNA sense strand
gaagcacagccuagcacua

SEQ ID NO: 1878531 - RNA, 19 nt, Homo sapiens
  misc_RNA (1)...(19): siRNA sense strand
gcucaguauucacaggauu

SEQ ID NO: 1878532 - RNA, 19 nt, Homo sapiens
  misc_RNA (1)...(19): siRNA sense strand
aaacagacccagcagaaca

SEQ ID NO: 1878533 - RNA, 19 nt, Homo sapiens
  misc_RNA (1)...(19): siRNA sense strand
ccagagagagagcgugaaa

SEQ ID NO: 1878534 - RNA, 19 nt, Homo sapiens
  misc_RNA (1)...(19): siRNA sense strand
ggaagaagaaaggagagaa

SEQ ID NO: 1878535 - RNA, 19 nt, Homo sapiens
  misc_RNA (1)...(19): siRNA sense strand
gcuuucagccugucaauuc

SEQ ID NO: 1878536 - RNA, 19 nt, Homo sapiens
  misc_RNA (1)...(19): siRNA sense strand
acaaacagacccagcagaa

SEQ ID NO: 1878537 - RNA, 19 nt, Homo sapiens
  misc_RNA (1)...(19): siRNA sense strand
agacaaguuugacucugaa

SEQ ID NO: 1878538 - RNA, 19 nt, Homo sapiens
  misc_RNA (1)...(19): siRNA sense strand
agagagagagcgugaaaga

SEQ ID NO: 1878539 - RNA, 19 nt, Homo sapiens
  misc_RNA (1)...(19): siRNA sense strand
ccagaguccucagcuguau

SEQ ID NO: 1878540 - RNA, 19 nt, Homo sapiens
  misc_RNA (1)...(19): siRNA sense strand
gagcuaagggagagagaga

SEQ ID NO: 1878541 - RNA, 19 nt, Homo sapiens
  misc_RNA (1)...(19): siRNA sense strand
cccagcagauugccaaaga

SEQ ID NO: 1878542 - RNA, 19 nt, Homo sapiens
  misc_RNA (1)...(19): siRNA sense strand
gaaagagaagaaggagaaa

SEQ ID NO: 1878543 - RNA, 19 nt, Homo sapiens
  misc_RNA (1)...(19): siRNA sense strand
ccaacucgcaauacuacua

SEQ ID NO: 1878544 - RNA, 19 nt, Homo sapiens
  misc_RNA (1)...(19): siRNA sense strand
aacaagugcugccuuaaca

SEQ ID NO: 1878545 - RNA, 19 nt, Homo sapiens
  misc_RNA (1)...(19): siRNA sense strand
agacagggaugaccgugau

SEQ ID NO: 1878546 - RNA, 19 nt, Homo sapiens
  misc_RNA (1)...(19): siRNA sense strand
gcuggaagccuuggagcua

SEQ ID NO: 1878547 - RNA, 19 nt, Homo sapiens
  misc_RNA (1)...(19): siRNA sense strand
aaauggagaugaggagaau

SEQ ID NO: 1878548 - RNA, 19 nt, Homo sapiens
  misc_RNA (1)...(19): siRNA sense strand
guuugacucugaacaggaa

SEQ ID NO: 1878549 - RNA, 19 nt, Homo sapiens
  misc_RNA (1)...(19): siRNA sense strand
uaacauuggcaacaagaug

SEQ ID NO: 1878550 - RNA, 19 nt, Homo sapiens
  misc_RNA (1)...(19): siRNA sense strand
caccaaagauggcauugac

SEQ ID NO: 1878551 - RNA, 19 nt, Homo sapiens
  misc_RNA (1)...(19): siRNA sense strand
cuagcugacuggaagaaga

SEQ ID NO: 1878552 - RNA, 19 nt, Homo sapiens
  misc_RNA (1)...(19): siRNA sense strand
gcaaaacuauugggguuga

SEQ ID NO: 1878553 - RNA, 19 nt, Homo sapiens
  misc_RNA (1)...(19): siRNA sense strand
caaaagaggggaaagagaa

SEQ ID NO: 1878554 - RNA, 19 nt, Homo sapiens
  misc_RNA (1)...(19): siRNA sense strand
ggagagagagaugaaauac

SEQ ID NO: 1878555 - RNA, 19 nt, Homo sapiens
  misc_RNA (1)...(19): siRNA sense strand
cuucucagcugcuucagau

SEQ ID NO: 1878556 - RNA, 19 nt, Homo sapiens
  misc_RNA (1)...(19): siRNA sense strand
acaguaacauuggcaacaa

SEQ ID NO: 1878557 - RNA, 19 nt, Homo sapiens
  misc_RNA (1)...(19): siRNA sense strand
gaagagaagcuagcugacu

SEQ ID NO: 1878558 - RNA, 19 nt, Homo sapiens
  misc_RNA (1)...(19): siRNA sense strand
cuaagaguuugaauaagca

SEQ ID NO: 1878559 - RNA, 19 nt, Homo sapiens
  misc_RNA (1)...(19): siRNA sense strand
agauggcuaugcccaauau

SEQ ID NO: 1878560 - RNA, 19 nt, Homo sapiens
  misc_RNA (1)...(19): siRNA sense strand
caagugcugccuuaacaau

SEQ ID NO: 1878561 - RNA, 19 nt, Homo sapiens
  misc_RNA (1)...(19): siRNA sense strand
aaaggcagcgcauaugguu

SEQ ID NO: 1878562 - RNA, 19 nt, Homo sapiens
  misc_RNA (1)...(19): siRNA sense strand
cgaaagugucaaggcauua

SEQ ID NO: 1878563 - RNA, 19 nt, Homo sapiens
  misc_RNA (1)...(19): siRNA sense strand
acgaaagugucaaggcauu

SEQ ID NO: 1878564 - RNA, 19 nt, Homo sapiens
  misc_RNA (1)...(19): siRNA sense strand
agagagagcgugaaagaag

SEQ ID NO: 1878565 - RNA, 19 nt, Homo sapiens
  misc_RNA (1)...(19): siRNA sense strand
gaacgcugggcuaagaguu

SEQ ID NO: 1878566 - RNA, 19 nt, Homo sapiens
  misc_RNA (1)...(19): siRNA sense strand
ggugaaggaggcaguguug

SEQ ID NO: 1878567 - RNA, 19 nt, Homo sapiens
  misc_RNA (1)...(19): siRNA sense strand
gcagcucaucccagaauug

SEQ ID NO: 1878568 - RNA, 19 nt, Homo sapiens
  misc_RNA (1)...(19): siRNA sense strand
gaaggcaguuucccaauaa

SEQ ID NO: 1878569 - RNA, 19 nt, Homo sapiens
  misc_RNA (1)...(19): siRNA sense strand
caagauaagucacagcuuu

SEQ ID NO: 1878570 - RNA, 19 nt, Homo sapiens
  misc_RNA (1)...(19): siRNA sense strand
gaagggauuuaucagauuu

SEQ ID NO: 1878571 - RNA, 19 nt, Homo sapiens
  misc_RNA (1)...(19): siRNA sense strand
gagauucacuucccuuuga

SEQ ID NO: 1878572 - RNA, 19 nt, Homo sapiens
  misc_RNA (1)...(19): siRNA sense strand
gaugggaucuuguauggaa

SEQ ID NO: 1878573 - RNA, 19 nt, Homo sapiens
  misc_RNA (1)...(19): siRNA sense strand
gaaauccaccggaagauaa

SEQ ID NO: 1878574 - RNA, 19 nt, Homo sapiens
  misc_RNA (1)...(19): siRNA sense strand
gagacacucuggcaacuuu

SEQ ID NO: 1878575 - RNA, 19 nt, Homo sapiens
  misc_RNA (1)...(19): siRNA sense strand
ggaagggauuuaucagauu

SEQ ID NO: 1878576 - RNA, 19 nt, Homo sapiens
  misc_RNA (1)...(19): siRNA sense strand
gcaagaaggaaaugucuaa

SEQ ID NO: 1878577 - RNA, 19 nt, Homo sapiens
  misc_RNA (1)...(19): siRNA sense strand
gaaaggaaacggauuaagu

SEQ ID NO: 1878578 - RNA, 19 nt, Homo sapiens
  misc_RNA (1)...(19): siRNA sense strand
gaacgagagggaaaguuua

SEQ ID NO: 1878579 - RNA, 19 nt, Homo sapiens
  misc_RNA (1)...(19): siRNA sense strand
gcaccgaucuuccuguuca

SEQ ID NO: 1878580 - RNA, 19 nt, Homo sapiens
  misc_RNA (1)...(19): siRNA sense strand
gaacagaacaggcccuaug

SEQ ID NO: 1878581 - RNA, 19 nt, Homo sapiens
  misc_RNA (1)...(19): siRNA sense strand
gagggaaaguuuaaaggaa

SEQ ID NO: 1878582 - RNA, 19 nt, Homo sapiens
  misc_RNA (1)...(19): siRNA sense strand
uaacagaacuggaccuuuu

SEQ ID NO: 1878583 - RNA, 19 nt, Homo sapiens
  misc_RNA (1)...(19): siRNA sense strand
ggagggaccuggacaugau

SEQ ID NO: 1878584 - RNA, 19 nt, Homo sapiens
  misc_RNA (1)...(19): siRNA sense strand
ggaaacggauuaaguacuc

SEQ ID NO: 1878585 - RNA, 19 nt, Homo sapiens
  misc_RNA (1)...(19): siRNA sense strand
ggaagaaggccaagaguca

SEQ ID NO: 1878586 - RNA, 19 nt, Homo sapiens
  misc_RNA (1)...(19): siRNA sense strand
gagaaacccagcaggcuua

SEQ ID NO: 1878587 - RNA, 19 nt, Homo sapiens
  misc_RNA (1)...(19): siRNA sense strand
gaucauaggcugccaggaa

SEQ ID NO: 1878588 - RNA, 19 nt, Homo sapiens
  misc_RNA (1)...(19): siRNA sense strand
gcuguugacuucagaggua

SEQ ID NO: 1878589 - RNA, 19 nt, Homo sapiens
  misc_RNA (1)...(19): siRNA sense strand
gaaccuugauccgccauuu

SEQ ID NO: 1878590 - RNA, 19 nt, Homo sapiens
  misc_RNA (1)...(19): siRNA sense strand
ggacaacagucaucaucug

SEQ ID NO: 1878591 - RNA, 19 nt, Homo sapiens
  misc_RNA (1)...(19): siRNA sense strand
gcaagacaccgauuacaga

SEQ ID NO: 1878592 - RNA, 19 nt, Homo sapiens
  misc_RNA (1)...(19): siRNA sense strand
ggacaggccugggauaugg

SEQ ID NO: 1878593 - RNA, 19 nt, Homo sapiens
  misc_RNA (1)...(19): siRNA sense strand
gaucguaaacuuguugaua

SEQ ID NO: 1878594 - RNA, 19 nt, Homo sapiens
  misc_RNA (1)...(19): siRNA sense strand
ccagaaaggaaacggauua

SEQ ID NO: 1878595 - RNA, 19 nt, Homo sapiens
  misc_RNA (1)...(19): siRNA sense strand
gaagggaagggccaacuuu

SEQ ID NO: 1878596 - RNA, 19 nt, Homo sapiens
  misc_RNA (1)...(19): siRNA sense strand
gggaagggauuuaucagau

SEQ ID NO: 1878597 - RNA, 19 nt, Homo sapiens
  misc_RNA (1)...(19): siRNA sense strand
aaaggaaacggauuaagua

SEQ ID NO: 1878598 - RNA, 19 nt, Homo sapiens
  misc_RNA (1)...(19): siRNA sense strand
gagcuagccuaucuggaaa

SEQ ID NO: 1878599 - RNA, 19 nt, Homo sapiens
  misc_RNA (1)...(19): siRNA sense strand
ggaaauccaccggaagaua

SEQ ID NO: 1878600 - RNA, 19 nt, Homo sapiens
  misc_RNA (1)...(19): siRNA sense strand
agaaggcaguuucccaaua

SEQ ID NO: 1878601 - RNA, 19 nt, Homo sapiens
  misc_RNA (1)...(19): siRNA sense strand
gagagaagcagaaagguau

SEQ ID NO: 1878602 - RNA, 19 nt, Homo sapiens
  misc_RNA (1)...(19): siRNA sense strand
gagaagaauccacacauga

SEQ ID NO: 1878603 - RNA, 19 nt, Homo sapiens
  misc_RNA (1)...(19): siRNA sense strand
ggagcuagccuaucuggaa

SEQ ID NO: 1878604 - RNA, 19 nt, Homo sapiens
  misc_RNA (1)...(19): siRNA sense strand
ccagggaacucuaaugauc

SEQ ID NO: 1878605 - RNA, 19 nt, Homo sapiens
  misc_RNA (1)...(19): siRNA sense strand
cagcaggcuuauucgauua

SEQ ID NO: 1878606 - RNA, 19 nt, Homo sapiens
  misc_RNA (1)...(19): siRNA sense strand
ggaagaugguagcuguaaa

SEQ ID NO: 1878607 - RNA, 19 nt, Homo sapiens
  misc_RNA (1)...(19): siRNA sense strand
cauguuugcucgauauaaa

SEQ ID NO: 1878608 - RNA, 19 nt, Homo sapiens
  misc_RNA (1)...(19): siRNA sense strand
caaggaaagucaaguagca

SEQ ID NO: 1878609 - RNA, 19 nt, Homo sapiens
  misc_RNA (1)...(19): siRNA sense strand
gaugguacuucuauggauu

SEQ ID NO: 1878610 - RNA, 19 nt, Homo sapiens
  misc_RNA (1)...(19): siRNA sense strand
gagaggagcaaaccaagaa

SEQ ID NO: 1878611 - RNA, 19 nt, Homo sapiens
  misc_RNA (1)...(19): siRNA sense strand
ugacagugaucguaaacuu

SEQ ID NO: 1878612 - RNA, 19 nt, Homo sapiens
  misc_RNA (1)...(19): siRNA sense strand
cuacugaucuagacuuuag

SEQ ID NO: 1878613 - RNA, 19 nt, Homo sapiens
  misc_RNA (1)...(19): siRNA sense strand
gaagauaucgacacuagca

SEQ ID NO: 1878614 - RNA, 19 nt, Homo sapiens
  misc_RNA (1)...(19): siRNA sense strand
caaacucacugacuggaau

SEQ ID NO: 1878615 - RNA, 19 nt, Homo sapiens
  misc_RNA (1)...(19): siRNA sense strand
gaggagacagugacuauga

SEQ ID NO: 1878616 - RNA, 19 nt, Homo sapiens
  misc_RNA (1)...(19): siRNA sense strand
gauccgccauuuagcauug

SEQ ID NO: 1878617 - RNA, 19 nt, Homo sapiens
  misc_RNA (1)...(19): siRNA sense strand
gcaaaacuaucaugcuaaa

SEQ ID NO: 1878618 - RNA, 19 nt, Homo sapiens
  misc_RNA (1)...(19): siRNA sense strand
ccagcaggcuuauucgauu

SEQ ID NO: 1878619 - RNA, 19 nt, Homo sapiens
  misc_RNA (1)...(19): siRNA sense strand
ggaccauucugaccacaug

SEQ ID NO: 1878620 - RNA, 19 nt, Homo sapiens
  misc_RNA (1)...(19): siRNA sense strand
gaaggagaaugaagaagac

SEQ ID NO: 1878621 - RNA, 19 nt, Homo sapiens
  misc_RNA (1)...(19): siRNA sense strand
uaaagaagauaucgacacu

SEQ ID NO: 1878622 - RNA, 19 nt, Homo sapiens
  misc_RNA (1)...(19): siRNA sense strand
cauaugaacuacagagaca

SEQ ID NO: 1878623 - RNA, 19 nt, Homo sapiens
  misc_RNA (1)...(19): siRNA sense strand
gcuacuggcuacuauuaug

SEQ ID NO: 1878624 - RNA, 19 nt, Homo sapiens
  misc_RNA (1)...(19): siRNA sense strand
ugacagaggccaagcaaga

SEQ ID NO: 1878625 - RNA, 19 nt, Homo sapiens
  misc_RNA (1)...(19): siRNA sense strand
caaagacggaacacaagua

SEQ ID NO: 1878626 - RNA, 19 nt, Homo sapiens
  misc_RNA (1)...(19): siRNA sense strand
aagaagauaucgacacuag

SEQ ID NO: 1878627 - RNA, 19 nt, Homo sapiens
  misc_RNA (1)...(19): siRNA sense strand
caacuuuccuggcagagau

SEQ ID NO: 1878628 - RNA, 19 nt, Homo sapiens
  misc_RNA (1)...(19): siRNA sense strand
ggagagaacgagagggaaa

SEQ ID NO: 1878629 - RNA, 19 nt, Homo sapiens
  misc_RNA (1)...(19): siRNA sense strand
ggagaaugaagaagacaaa

SEQ ID NO: 1878630 - RNA, 19 nt, Homo sapiens
  misc_RNA (1)...(19): siRNA sense strand
ggagcauucuuucagcuau

SEQ ID NO: 1878631 - RNA, 19 nt, Homo sapiens
  misc_RNA (1)...(19): siRNA sense strand
ggaaaugaucgcagggaaa

SEQ ID NO: 1878632 - RNA, 19 nt, Homo sapiens
  misc_RNA (1)...(19): siRNA sense strand
aaaccaagaaggagaauga

SEQ ID NO: 1878633 - RNA, 19 nt, Homo sapiens
  misc_RNA (1)...(19): siRNA sense strand
gagccaagaagaaagguuu

SEQ ID NO: 1878634 - RNA, 19 nt, Homo sapiens
  misc_RNA (1)...(19): siRNA sense strand
ggccaagcaagaauuaaua

SEQ ID NO: 1878635 - RNA, 19 nt, Homo sapiens
  misc_RNA (1)...(19): siRNA sense strand
gaaguuacccuggaguaug

SEQ ID NO: 1878636 - RNA, 19 nt, Homo sapiens
  misc_RNA (1)...(19): siRNA sense strand
gauuuggacuuuagagaca

SEQ ID NO: 1878637 - RNA, 19 nt, Homo sapiens
  misc_RNA (1)...(19): siRNA sense strand
gaagagcagaguucagaug

SEQ ID NO: 1878638 - RNA, 19 nt, Homo sapiens
  misc_RNA (1)...(19): siRNA sense strand
ccaagaaggagaaugaaga

SEQ ID NO: 1878639 - RNA, 19 nt, Homo sapiens
  misc_RNA (1)...(19): siRNA sense strand
gaaagucaaguagcaagaa

SEQ ID NO: 1878640 - RNA, 19 nt, Homo sapiens
  misc_RNA (1)...(19): siRNA sense strand
gaaacaagagaaggagaaa

SEQ ID NO: 1878641 - RNA, 19 nt, Homo sapiens
  misc_RNA (1)...(19): siRNA sense strand
ggaguaccgugauguggau

SEQ ID NO: 1878642 - RNA, 19 nt, Homo sapiens
  misc_RNA (1)...(19): siRNA sense strand
gaacagccaaaguccaguu

SEQ ID NO: 1878643 - RNA, 19 nt, Homo sapiens
  misc_RNA (1)...(19): siRNA sense strand
gggaaaguuuaaaggaaga

SEQ ID NO: 1878644 - RNA, 19 nt, Homo sapiens
  misc_RNA (1)...(19): siRNA sense strand
ugucagaccugcacaagca

SEQ ID NO: 1878645 - RNA, 19 nt, Homo sapiens
  misc_RNA (1)...(19): siRNA sense strand
caagaaggagaaugaagaa

SEQ ID NO: 1878646 - RNA, 19 nt, Homo sapiens
  misc_RNA (1)...(19): siRNA sense strand
ggaaaugucuaaaagagau

SEQ ID NO: 1878647 - RNA, 19 nt, Homo sapiens
  misc_RNA (1)...(19): siRNA sense strand
agacaaagacggaacacaa

SEQ ID NO: 1878648 - RNA, 19 nt, Homo sapiens
  misc_RNA (1)...(19): siRNA sense strand
ucaaguagcaagaaggaaa

SEQ ID NO: 1878649 - RNA, 19 nt, Homo sapiens
  misc_RNA (1)...(19): siRNA sense strand
uggauuaccugaggaagaa

SEQ ID NO: 1878650 - RNA, 19 nt, Homo sapiens
  misc_RNA (1)...(19): siRNA sense strand
agaaggcggucuggacuuu

SEQ ID NO: 1878651 - RNA, 19 nt, Homo sapiens
  misc_RNA (1)...(19): siRNA sense strand
gaagggagaauuugagcau

SEQ ID NO: 1878652 - RNA, 19 nt, Homo sapiens
  misc_RNA (1)...(19): siRNA sense strand
gggcaccgaucuuccuguu

SEQ ID NO: 1878653 - RNA, 19 nt, Homo sapiens
  misc_RNA (1)...(19): siRNA sense strand
gcuacuggcuggaggaaag

SEQ ID NO: 1878654 - RNA, 19 nt, Homo sapiens
  misc_RNA (1)...(19): siRNA sense strand
aagaccagcugauaaggaa

SEQ ID NO: 1878655 - RNA, 19 nt, Homo sapiens
  misc_RNA (1)...(19): siRNA sense strand
gcagagauucaucacaguu

SEQ ID NO: 1878656 - RNA, 19 nt, Homo sapiens
  misc_RNA (1)...(19): siRNA sense strand
gcaguuucccaauaaagaa

SEQ ID NO: 1878657 - RNA, 19 nt, Homo sapiens
  misc_RNA (1)...(19): siRNA sense strand
ccaggaagccagauguuug

SEQ ID NO: 1878658 - RNA, 19 nt, Homo sapiens
  misc_RNA (1)...(19): siRNA sense strand
agagaagaauccacacaug

SEQ ID NO: 1878659 - RNA, 19 nt, Homo sapiens
  misc_RNA (1)...(19): siRNA sense strand
ggauuuaucagauuuggau

SEQ ID NO: 1878660 - RNA, 19 nt, Homo sapiens
  misc_RNA (1)...(19): siRNA sense strand
ggaaaacgaagaaaugauu

SEQ ID NO: 1878661 - RNA, 19 nt, Homo sapiens
  misc_RNA (1)...(19): siRNA sense strand
uaucugauuuggacuuuag

SEQ ID NO: 1878662 - RNA, 19 nt, Homo sapiens
  misc_RNA (1)...(19): siRNA sense strand
caacguccguaucaucaag

SEQ ID NO: 1878663 - RNA, 19 nt, Homo sapiens
  misc_RNA (1)...(19): siRNA sense strand
uaucgacacuagcagcaaa

SEQ ID NO: 1878664 - RNA, 19 nt, Homo sapiens
  misc_RNA (1)...(19): siRNA sense strand
gagcauucuuucagcuaug

SEQ ID NO: 1878665 - RNA, 19 nt, Homo sapiens
  misc_RNA (1)...(19): siRNA sense strand
gaagacaaacucacugacu

SEQ ID NO: 1878666 - RNA, 19 nt, Homo sapiens
  misc_RNA (1)...(19): siRNA sense strand
gaaugaagaagacaaacuc

SEQ ID NO: 1878667 - RNA, 19 nt, Homo sapiens
  misc_RNA (1)...(19): siRNA sense strand
gggaagaugguagcuguaa

SEQ ID NO: 1878668 - RNA, 19 nt, Homo sapiens
  misc_RNA (1)...(19): siRNA sense strand
gaagugggcucaucacaca

SEQ ID NO: 1878669 - RNA, 19 nt, Homo sapiens
  misc_RNA (1)...(19): siRNA sense strand
ucaauucgcugcagaagga

SEQ ID NO: 1878670 - RNA, 19 nt, Homo sapiens
  misc_RNA (1)...(19): siRNA sense strand
gaaagugguucccaugucu

SEQ ID NO: 1878671 - RNA, 19 nt, Homo sapiens
  misc_RNA (1)...(19): siRNA sense strand
gagaaucuguucacugcaa

SEQ ID NO: 1878672 - RNA, 19 nt, Homo sapiens
  misc_RNA (1)...(19): siRNA sense strand
gccgcugacuuuccucuua

SEQ ID NO: 1878673 - RNA, 19 nt, Homo sapiens
  misc_RNA (1)...(19): siRNA sense strand
cuuaguagaccgcaaguua

SEQ ID NO: 1878674 - RNA, 19 nt, Homo sapiens
  misc_RNA (1)...(19): siRNA sense strand
caacaacuuccuccucauu

SEQ ID NO: 1878675 - RNA, 19 nt, Homo sapiens
  misc_RNA (1)...(19): siRNA sense strand
gauuugacguguccguuug

SEQ ID NO: 1878676 - RNA, 19 nt, Homo sapiens
  misc_RNA (1)...(19): siRNA sense strand
cgacacagccaacaacuuc

SEQ ID NO: 1878677 - RNA, 19 nt, Homo sapiens
  misc_RNA (1)...(19): siRNA sense strand
ugacuuuccucuuaguaga

SEQ ID NO: 1878678 - RNA, 19 nt, Homo sapiens
  misc_RNA (1)...(19): siRNA sense strand
gaccuuggaugccgacaca

SEQ ID NO: 1878679 - RNA, 19 nt, Homo sapiens
  misc_RNA (1)...(19): siRNA sense strand
gcuguuccauggucucuca

SEQ ID NO: 1878680 - RNA, 19 nt, Homo sapiens
  misc_RNA (1)...(19): siRNA sense strand
uugagcaucuguccuuuga

SEQ ID NO: 1878681 - RNA, 19 nt, Homo sapiens
  misc_RNA (1)...(19): siRNA sense strand
ugaaagugguucccauguc

SEQ ID NO: 1878682 - RNA, 19 nt, Homo sapiens
  misc_RNA (1)...(19): siRNA sense strand
gauucuggacugugaguuu

SEQ ID NO: 1878683 - RNA, 19 nt, Homo sapiens
  misc_RNA (1)...(19): siRNA sense strand
gaccacagagcuuggauuc

SEQ ID NO: 1878684 - RNA, 19 nt, Homo sapiens
  misc_RNA (1)...(19): siRNA sense strand
gaggaucugcuuugcuguu

SEQ ID NO: 1878685 - RNA, 19 nt, Homo sapiens
  misc_RNA (1)...(19): siRNA sense strand
acaacuuccuccucauuuc

SEQ ID NO: 1878686 - RNA, 19 nt, Homo sapiens
  misc_RNA (1)...(19): siRNA sense strand
uugaugaacucaggcacua

SEQ ID NO: 1878687 - RNA, 19 nt, Homo sapiens
  misc_RNA (1)...(19): siRNA sense strand
agauccagcugaccacaga

SEQ ID NO: 1878688 - RNA, 19 nt, Homo sapiens
  misc_RNA (1)...(19): siRNA sense strand
agcccaagcugaagaagau

SEQ ID NO: 1878689 - RNA, 19 nt, Homo sapiens
  misc_RNA (1)...(19): siRNA sense strand
gaggcugguuucccacauc

SEQ ID NO: 1878690 - RNA, 19 nt, Homo sapiens
  misc_RNA (1)...(19): siRNA sense strand
ugccucaagugcaucaauu

SEQ ID NO: 1878691 - RNA, 19 nt, Homo sapiens
  misc_RNA (1)...(19): siRNA sense strand
gagcccaagcugaagaaga

SEQ ID NO: 1878692 - RNA, 19 nt, Homo sapiens
  misc_RNA (1)...(19): siRNA sense strand
gaccuugccgagagauuug

SEQ ID NO: 1878693 - RNA, 19 nt, Homo sapiens
  misc_RNA (1)...(19): siRNA sense strand
cuccuucaauuccaccuaa

SEQ ID NO: 1878694 - RNA, 19 nt, Homo sapiens
  misc_RNA (1)...(19): siRNA sense strand
agaaucuguucacugcaaa

SEQ ID NO: 1878695 - RNA, 19 nt, Homo sapiens
  misc_RNA (1)...(19): siRNA sense strand
cugcuuugcuguugcuguu

SEQ ID NO: 1878696 - RNA, 19 nt, Homo sapiens
  misc_RNA (1)...(19): siRNA sense strand
gcaugcagaacguuuccuu

SEQ ID NO: 1878697 - RNA, 19 nt, Homo sapiens
  misc_RNA (1)...(19): siRNA sense strand
cuacagaugaacccaagga

SEQ ID NO: 1878698 - RNA, 19 nt, Homo sapiens
  misc_RNA (1)...(19): siRNA sense strand
gaucugcuuugcuguugcu

SEQ ID NO: 1878699 - RNA, 19 nt, Homo sapiens
  misc_RNA (1)...(19): siRNA sense strand
ccgcugacuuuccucuuag

SEQ ID NO: 1878700 - RNA, 19 nt, Homo sapiens
  misc_RNA (1)...(19): siRNA sense strand
gcaucaauucgcugcagaa

SEQ ID NO: 1878701 - RNA, 19 nt, Homo sapiens
  misc_RNA (1)...(19): siRNA sense strand
cuuggauucuggacuguga

SEQ ID NO: 1878702 - RNA, 19 nt, Homo sapiens
  misc_RNA (1)...(19): siRNA sense strand
gggaacaagcacagaaugg

SEQ ID NO: 1878703 - RNA, 19 nt, Homo sapiens
  misc_RNA (1)...(19): siRNA sense strand
gggcucaucacacagaauc

SEQ ID NO: 1878704 - RNA, 19 nt, Homo sapiens
  misc_RNA (1)...(19): siRNA sense strand
caacuuccuccucauuucu

SEQ ID NO: 1878705 - RNA, 19 nt, Homo sapiens
  misc_RNA (1)...(19): siRNA sense strand
ucacacagaaucggcaaga

SEQ ID NO: 1878706 - RNA, 19 nt, Homo sapiens
  misc_RNA (1)...(19): siRNA sense strand
ccaacaacuuccuccucau

SEQ ID NO: 1878707 - RNA, 19 nt, Homo sapiens
  misc_RNA (1)...(19): siRNA sense strand
gcugacuuuccucuuagua

SEQ ID NO: 1878708 - RNA, 19 nt, Homo sapiens
  misc_RNA (1)...(19): siRNA sense strand
ggauggaagccgccucucu

SEQ ID NO: 1878709 - RNA, 19 nt, Homo sapiens
  misc_RNA (1)...(19): siRNA sense strand
cugggagucugcagagaau

SEQ ID NO: 1878710 - RNA, 19 nt, Homo sapiens
  misc_RNA (1)...(19): siRNA sense strand
aaguggauaugaccuugga

SEQ ID NO: 1878711 - RNA, 19 nt, Homo sapiens
  misc_RNA (1)...(19): siRNA sense strand
ggagguggacgugggaaca

SEQ ID NO: 1878712 - RNA, 19 nt, Homo sapiens
  misc_RNA (1)...(19): siRNA sense strand
acccaaggaugcggaaguu

SEQ ID NO: 1878713 - RNA, 19 nt, Homo sapiens
  misc_RNA (1)...(19): siRNA sense strand
ggagccacugcgcccauuu

SEQ ID NO: 1878714 - RNA, 19 nt, Homo sapiens
  misc_RNA (1)...(19): siRNA sense strand
gaaugggaccugggagucu

SEQ ID NO: 1878715 - RNA, 19 nt, Homo sapiens
  misc_RNA (1)...(19): siRNA sense strand
agaccuugccgagagauuu

SEQ ID NO: 1878716 - RNA, 19 nt, Homo sapiens
  misc_RNA (1)...(19): siRNA sense strand
aacaacuuccuccucauuu

SEQ ID NO: 1878717 - RNA, 19 nt, Homo sapiens
  misc_RNA (1)...(19): siRNA sense strand
gcucugagaucuacauuca

SEQ ID NO: 1878718 - RNA, 19 nt, Homo sapiens
  misc_RNA (1)...(19): siRNA sense strand
ggaauacacccuuaggaaa

SEQ ID NO: 1878719 - RNA, 19 nt, Homo sapiens
  misc_RNA (1)...(19): siRNA sense strand
ccaguggaauacacccuua

SEQ ID NO: 1878720 - RNA, 19 nt, Homo sapiens
  misc_RNA (1)...(19): siRNA sense strand
ccguggagcuuguugauga

SEQ ID NO: 1878721 - RNA, 19 nt, Homo sapiens
  misc_RNA (1)...(19): siRNA sense strand
caacucagccauccacauc

SEQ ID NO: 1878722 - RNA, 19 nt, Homo sapiens
  misc_RNA (1)...(19): siRNA sense strand
gaauacacccuuaggaaaa

SEQ ID NO: 1878723 - RNA, 19 nt, Homo sapiens
  misc_RNA (1)...(19): siRNA sense strand
acaugaagacggacuuuaa

SEQ ID NO: 1878724 - RNA, 19 nt, Homo sapiens
  misc_RNA (1)...(19): siRNA sense strand
caacaugaagacggacuuu

SEQ ID NO: 1878725 - RNA, 19 nt, Homo sapiens
  misc_RNA (1)...(19): siRNA sense strand
gaacgcgugcucugagauc

SEQ ID NO: 1878726 - RNA, 19 nt, Homo sapiens
  misc_RNA (1)...(19): siRNA sense strand
caaccacgccaucaacauc

SEQ ID NO: 1878727 - RNA, 19 nt, Homo sapiens
  misc_RNA (1)...(19): siRNA sense strand
uggaauacacccuuaggaa

SEQ ID NO: 1878728 - RNA, 19 nt, Homo sapiens
  misc_RNA (1)...(19): siRNA sense strand
ugacucggauccgcaacaa

SEQ ID NO: 1878729 - RNA, 19 nt, Homo sapiens
  misc_RNA (1)...(19): siRNA sense strand
uguggaggcugaacuggau

SEQ ID NO: 1878730 - RNA, 19 nt, Homo sapiens
  misc_RNA (1)...(19): siRNA sense strand
caugaagacggacuuuaag

SEQ ID NO: 1878731 - RNA, 19 nt, Homo sapiens
  misc_RNA (1)...(19): siRNA sense strand
gaauagagauguuucgaaa

SEQ ID NO: 1878732 - RNA, 19 nt, Homo sapiens
  misc_RNA (1)...(19): siRNA sense strand
gcauagaguuugcauuuaa

SEQ ID NO: 1878733 - RNA, 19 nt, Homo sapiens
  misc_RNA (1)...(19): siRNA sense strand
gcaaagagcugcaagaaaa

SEQ ID NO: 1878734 - RNA, 19 nt, Homo sapiens
  misc_RNA (1)...(19): siRNA sense strand
gcacgucgcuuugcccuua

SEQ ID NO: 1878735 - RNA, 19 nt, Homo sapiens
  misc_RNA (1)...(19): siRNA sense strand
gaagccagcugauugauga

SEQ ID NO: 1878736 - RNA, 19 nt, Homo sapiens
  misc_RNA (1)...(19): siRNA sense strand
aaacagaggucaaaggaaa

SEQ ID NO: 1878737 - RNA, 19 nt, Homo sapiens
  misc_RNA (1)...(19): siRNA sense strand
gaacaggaaugaacuacau

SEQ ID NO: 1878738 - RNA, 19 nt, Homo sapiens
  misc_RNA (1)...(19): siRNA sense strand
gaacagaguugacauagcu

SEQ ID NO: 1878739 - RNA, 19 nt, Homo sapiens
  misc_RNA (1)...(19): siRNA sense strand
gaagaagcauuagcaaaga

SEQ ID NO: 1878740 - RNA, 19 nt, Homo sapiens
  misc_RNA (1)...(19): siRNA sense strand
ggaaugaacuacaugaaag

SEQ ID NO: 1878741 - RNA, 19 nt, Homo sapiens
  misc_RNA (1)...(19): siRNA sense strand
ccacucaucuccuauagaa

SEQ ID NO: 1878742 - RNA, 19 nt, Homo sapiens
  misc_RNA (1)...(19): siRNA sense strand
gcuaaugguuuguacaauu

SEQ ID NO: 1878743 - RNA, 19 nt, Homo sapiens
  misc_RNA (1)...(19): siRNA sense strand
gaaauuggaguauggauga

SEQ ID NO: 1878744 - RNA, 19 nt, Homo sapiens
  misc_RNA (1)...(19): siRNA sense strand
caaugacacuugauaaaga

SEQ ID NO: 1878745 - RNA, 19 nt, Homo sapiens
  misc_RNA (1)...(19): siRNA sense strand
gauaacacauggcuaaaca

SEQ ID NO: 1878746 - RNA, 19 nt, Homo sapiens
  misc_RNA (1)...(19): siRNA sense strand
gagagggccuucagccuuu

SEQ ID NO: 1878747 - RNA, 19 nt, Homo sapiens
  misc_RNA (1)...(19): siRNA sense strand
ugacagaguugcuauuaga

SEQ ID NO: 1878748 - RNA, 19 nt, Homo sapiens
  misc_RNA (1)...(19): siRNA sense strand
gaaacaaauugacugaaca

SEQ ID NO: 1878749 - RNA, 19 nt, Homo sapiens
  misc_RNA (1)...(19): siRNA sense strand
gagaagaagcugaugauga

SEQ ID NO: 1878750 - RNA, 19 nt, Homo sapiens
  misc_RNA (1)...(19): siRNA sense strand
gaagagagccaaugaaagg

SEQ ID NO: 1878751 - RNA, 19 nt, Homo sapiens
  misc_RNA (1)...(19): siRNA sense strand
ggaaucuacuugcugcuuu

SEQ ID NO: 1878752 - RNA, 19 nt, Homo sapiens
  misc_RNA (1)...(19): siRNA sense strand
ggagaaacacguagaauca

SEQ ID NO: 1878753 - RNA, 19 nt, Homo sapiens
  misc_RNA (1)...(19): siRNA sense strand
gagauuagagccauuugua

SEQ ID NO: 1878754 - RNA, 19 nt, Homo sapiens
  misc_RNA (1)...(19): siRNA sense strand
gaaagugaguuacaugaac

SEQ ID NO: 1878755 - RNA, 19 nt, Homo sapiens
  misc_RNA (1)...(19): siRNA sense strand
gaagaugauucaggauuug

SEQ ID NO: 1878756 - RNA, 19 nt, Homo sapiens
  misc_RNA (1)...(19): siRNA sense strand
agaagaagcugaugaugau

SEQ ID NO: 1878757 - RNA, 19 nt, Homo sapiens
  misc_RNA (1)...(19): siRNA sense strand
gaagcuauucgauugguua

SEQ ID NO: 1878758 - RNA, 19 nt, Homo sapiens
  misc_RNA (1)...(19): siRNA sense strand
ugaagaagaugaagcuaau

SEQ ID NO: 1878759 - RNA, 19 nt, Homo sapiens
  misc_RNA (1)...(19): siRNA sense strand
gaugauagaaugucuguga

SEQ ID NO: 1878760 - RNA, 19 nt, Homo sapiens
  misc_RNA (1)...(19): siRNA sense strand
gcagacaucuucaaacacu

SEQ ID NO: 1878761 - RNA, 19 nt, Homo sapiens
  misc_RNA (1)...(19): siRNA sense strand
gaagaugagagucuggaua

SEQ ID NO: 1878762 - RNA, 19 nt, Homo sapiens
  misc_RNA (1)...(19): siRNA sense strand
gagaagagcagaauugaag

SEQ ID NO: 1878763 - RNA, 19 nt, Homo sapiens
  misc_RNA (1)...(19): siRNA sense strand
gggaauguaugacagaguu

SEQ ID NO: 1878764 - RNA, 19 nt, Homo sapiens
  misc_RNA (1)...(19): siRNA sense strand
ugacugcucuggugaaugu

SEQ ID NO: 1878765 - RNA, 19 nt, Homo sapiens
  misc_RNA (1)...(19): siRNA sense strand
gcagcgagcuugaagaaac

SEQ ID NO: 1878766 - RNA, 19 nt, Homo sapiens
  misc_RNA (1)...(19): siRNA sense strand
gauaauacccagagacaau

SEQ ID NO: 1878767 - RNA, 19 nt, Homo sapiens
  misc_RNA (1)...(19): siRNA sense strand
guucauagauaccgugaug

SEQ ID NO: 1878768 - RNA, 19 nt, Homo sapiens
  misc_RNA (1)...(19): siRNA sense strand
agaagaugauucaggauuu

SEQ ID NO: 1878769 - RNA, 19 nt, Homo sapiens
  misc_RNA (1)...(19): siRNA sense strand
gaaacagcccgaauggaaa

SEQ ID NO: 1878770 - RNA, 19 nt, Homo sapiens
  misc_RNA (1)...(19): siRNA sense strand
cagagucuauauaccaaua

SEQ ID NO: 1878771 - RNA, 19 nt, Homo sapiens
  misc_RNA (1)...(19): siRNA sense strand
ggaagaaacagcccgaaug

SEQ ID NO: 1878772 - RNA, 19 nt, Homo sapiens
  misc_RNA (1)...(19): siRNA sense strand
gggaagagagccaaugaaa

SEQ ID NO: 1878773 - RNA, 19 nt, Homo sapiens
  misc_RNA (1)...(19): siRNA sense strand
gaagccaguuagaagauau

SEQ ID NO: 1878774 - RNA, 19 nt, Homo sapiens
  misc_RNA (1)...(19): siRNA sense strand
ggacugacaccaugauuca

SEQ ID NO: 1878775 - RNA, 19 nt, Homo sapiens
  misc_RNA (1)...(19): siRNA sense strand
caaugacuauggugauauu

SEQ ID NO: 1878776 - RNA, 19 nt, Homo sapiens
  misc_RNA (1)...(19): siRNA sense strand
aaugggaucucuuugguaa

SEQ ID NO: 1878777 - RNA, 19 nt, Homo sapiens
  misc_RNA (1)...(19): siRNA sense strand
gaauauaccauccagaaca

SEQ ID NO: 1878778 - RNA, 19 nt, Homo sapiens
  misc_RNA (1)...(19): siRNA sense strand
cuacaaaucccacaguauu

SEQ ID NO: 1878779 - RNA, 19 nt, Homo sapiens
  misc_RNA (1)...(19): siRNA sense strand
gauuagagccauuuguauu

SEQ ID NO: 1878780 - RNA, 19 nt, Homo sapiens
  misc_RNA (1)...(19): siRNA sense strand
ggacaucgcacuucuggau

SEQ ID NO: 1878781 - RNA, 19 nt, Homo sapiens
  misc_RNA (1)...(19): siRNA sense strand
ggcauagaguuugcauuua

SEQ ID NO: 1878782 - RNA, 19 nt, Homo sapiens
  misc_RNA (1)...(19): siRNA sense strand
uuauagagcuaaugguuug

SEQ ID NO: 1878783 - RNA, 19 nt, Homo sapiens
  misc_RNA (1)...(19): siRNA sense strand
gcuaaggccagacuucuuu

SEQ ID NO: 1878784 - RNA, 19 nt, Homo sapiens
  misc_RNA (1)...(19): siRNA sense strand
ggacgaccuccacuucaua

SEQ ID NO: 1878785 - RNA, 19 nt, Homo sapiens
  misc_RNA (1)...(19): siRNA sense strand
gggugaagaugauagaaug

SEQ ID NO: 1878786 - RNA, 19 nt, Homo sapiens
  misc_RNA (1)...(19): siRNA sense strand
cagagaagguagcaaacuu

SEQ ID NO: 1878787 - RNA, 19 nt, Homo sapiens
  misc_RNA (1)...(19): siRNA sense strand
gaagaaacagcccgaaugg

SEQ ID NO: 1878788 - RNA, 19 nt, Homo sapiens
  misc_RNA (1)...(19): siRNA sense strand
ucacaaggauggcauagag

SEQ ID NO: 1878789 - RNA, 19 nt, Homo sapiens
  misc_RNA (1)...(19): siRNA sense strand
aaauugaggccuuacauaa

SEQ ID NO: 1878790 - RNA, 19 nt, Homo sapiens
  misc_RNA (1)...(19): siRNA sense strand
ggagggugaugaagaagau

SEQ ID NO: 1878791 - RNA, 19 nt, Homo sapiens
  misc_RNA (1)...(19): siRNA sense strand
gaaugcacaugaucucaca

SEQ ID NO: 1878792 - RNA, 19 nt, Homo sapiens
  misc_RNA (1)...(19): siRNA sense strand
caaauaagaaaccucgaaa

SEQ ID NO: 1878793 - RNA, 19 nt, Homo sapiens
  misc_RNA (1)...(19): siRNA sense strand
ggacagaacaggaaugaac

SEQ ID NO: 1878794 - RNA, 19 nt, Homo sapiens
  misc_RNA (1)...(19): siRNA sense strand
gaaccugagucugaacaug

SEQ ID NO: 1878795 - RNA, 19 nt, Homo sapiens
  misc_RNA (1)...(19): siRNA sense strand
gauagaaugucugugaaca

SEQ ID NO: 1878796 - RNA, 19 nt, Homo sapiens
  misc_RNA (1)...(19): siRNA sense strand
gcucgaagccagcugauug

SEQ ID NO: 1878797 - RNA, 19 nt, Homo sapiens
  misc_RNA (1)...(19): siRNA sense strand
guauagugaugccuuccua

SEQ ID NO: 1878798 - RNA, 19 nt, Homo sapiens
  misc_RNA (1)...(19): siRNA sense strand
caacucacauccacuguac

SEQ ID NO: 1878799 - RNA, 19 nt, Homo sapiens
  misc_RNA (1)...(19): siRNA sense strand
gaacuggcacgucgcuuug

SEQ ID NO: 1878800 - RNA, 19 nt, Homo sapiens
  misc_RNA (1)...(19): siRNA sense strand
cauggagggugaugaagaa

SEQ ID NO: 1878801 - RNA, 19 nt, Homo sapiens
  misc_RNA (1)...(19): siRNA sense strand
ggaaaacggugaaauccuu

SEQ ID NO: 1878802 - RNA, 19 nt, Homo sapiens
  misc_RNA (1)...(19): siRNA sense strand
uggaagaccuauugcaaga

SEQ ID NO: 1878803 - RNA, 19 nt, Homo sapiens
  misc_RNA (1)...(19): siRNA sense strand
cagcacagguagaauggaa

SEQ ID NO: 1878804 - RNA, 19 nt, Homo sapiens
  misc_RNA (1)...(19): siRNA sense strand
gaaaucuacagcacaggua

SEQ ID NO: 1878805 - RNA, 19 nt, Homo sapiens
  misc_RNA (1)...(19): siRNA sense strand
acaagcagaagaagcauua

SEQ ID NO: 1878806 - RNA, 19 nt, Homo sapiens
  misc_RNA (1)...(19): siRNA sense strand
ggguauauuuguucauaga

SEQ ID NO: 1878807 - RNA, 19 nt, Homo sapiens
  misc_RNA (1)...(19): siRNA sense strand
ucaagaaccugagucugaa

SEQ ID NO: 1878808 - RNA, 19 nt, Homo sapiens
  misc_RNA (1)...(19): siRNA sense strand
aaaccaggcagauugauaa

SEQ ID NO: 1878809 - RNA, 19 nt, Homo sapiens
  misc_RNA (1)...(19): siRNA sense strand
gaaaggaaaacucaaauug

SEQ ID NO: 1878810 - RNA, 19 nt, Homo sapiens
  misc_RNA (1)...(19): siRNA sense strand
agaaacagcccgaauggaa

SEQ ID NO: 1878811 - RNA, 19 nt, Homo sapiens
  misc_RNA (1)...(19): siRNA sense strand
uguggaagcuauucgauug

SEQ ID NO: 1878812 - RNA, 19 nt, Homo sapiens
  misc_RNA (1)...(19): siRNA sense strand
cuaaaugacaguuaccuaa

SEQ ID NO: 1878813 - RNA, 19 nt, Homo sapiens
  misc_RNA (1)...(19): siRNA sense strand
ugaagaaauuggaguaugg

SEQ ID NO: 1878814 - RNA, 19 nt, Homo sapiens
  misc_RNA (1)...(19): siRNA sense strand
guggaugacuggauugaau

SEQ ID NO: 1878815 - RNA, 19 nt, Homo sapiens
  misc_RNA (1)...(19): siRNA sense strand
cgaagccaguuagaagaua

SEQ ID NO: 1878816 - RNA, 19 nt, Homo sapiens
  misc_RNA (1)...(19): siRNA sense strand
uuacaggauucaacuaaug

SEQ ID NO: 1878817 - RNA, 19 nt, Homo sapiens
  misc_RNA (1)...(19): siRNA sense strand
gcugauugaugaguuugua

SEQ ID NO: 1878818 - RNA, 19 nt, Homo sapiens
  misc_RNA (1)...(19): siRNA sense strand
uaagaaaccucgaaaaucu

SEQ ID NO: 1878819 - RNA, 19 nt, Homo sapiens
  misc_RNA (1)...(19): siRNA sense strand
gaaaggacgaccuccacuu

SEQ ID NO: 1878820 - RNA, 19 nt, Homo sapiens
  misc_RNA (1)...(19): siRNA sense strand
gaagaagaugaagcuaaua

SEQ ID NO: 1878821 - RNA, 19 nt, Homo sapiens
  misc_RNA (1)...(19): siRNA sense strand
cuaaugguuuguacaauuc

SEQ ID NO: 1878822 - RNA, 19 nt, Homo sapiens
  misc_RNA (1)...(19): siRNA sense strand
cagaguugcuauuagaaga

SEQ ID NO: 1878823 - RNA, 19 nt, Homo sapiens
  misc_RNA (1)...(19): siRNA sense strand
caagaacuguugaaagacu

SEQ ID NO: 1878824 - RNA, 19 nt, Homo sapiens
  misc_RNA (1)...(19): siRNA sense strand
uagcagacaugacccacaa

SEQ ID NO: 1878825 - RNA, 19 nt, Homo sapiens
  misc_RNA (1)...(19): siRNA sense strand
cggccuccaucuacaaaua

SEQ ID NO: 1878826 - RNA, 19 nt, Homo sapiens
  misc_RNA (1)...(19): siRNA sense strand
uauguuggcuggacucuuc

SEQ ID NO: 1878827 - RNA, 19 nt, Homo sapiens
  misc_RNA (1)...(19): siRNA sense strand
uggcauagaguuugcauuu

SEQ ID NO: 1878828 - RNA, 19 nt, Homo sapiens
  misc_RNA (1)...(19): siRNA sense strand
ggaaguagcagcagcaaaa

SEQ ID NO: 1878829 - RNA, 19 nt, Homo sapiens
  misc_RNA (1)...(19): siRNA sense strand
gaaaggagggaggauguau

SEQ ID NO: 1878830 - RNA, 19 nt, Homo sapiens
  misc_RNA (1)...(19): siRNA sense strand
aaagacaguucauucauac

SEQ ID NO: 1878831 - RNA, 19 nt, Homo sapiens
  misc_RNA (1)...(19): siRNA sense strand
ggaaaaggcuggaaagaaa

SEQ ID NO: 1878832 - RNA, 19 nt, Homo sapiens
  misc_RNA (1)...(19): siRNA sense strand
gaucauggccauauucuuu

SEQ ID NO: 1878833 - RNA, 19 nt, Homo sapiens
  misc_RNA (1)...(19): siRNA sense strand
gaaagacauucucuacaga

SEQ ID NO: 1878834 - RNA, 19 nt, Homo sapiens
  misc_RNA (1)...(19): siRNA sense strand
ggaagguucuggcuagauu

SEQ ID NO: 1878835 - RNA, 19 nt, Homo sapiens
  misc_RNA (1)...(19): siRNA sense strand
ggaaagaaaccuucaaauc

SEQ ID NO: 1878836 - RNA, 19 nt, Homo sapiens
  misc_RNA (1)...(19): siRNA sense strand
caacagaaauggagaagag

SEQ ID NO: 1878837 - RNA, 19 nt, Homo sapiens
  misc_RNA (1)...(19): siRNA sense strand
ccaauggacugauaaggaa

SEQ ID NO: 1878838 - RNA, 19 nt, Homo sapiens
  misc_RNA (1)...(19): siRNA sense strand
ccacucagcugacccagaa

SEQ ID NO: 1878839 - RNA, 19 nt, Homo sapiens
  misc_RNA (1)...(19): siRNA sense strand
gaagagaugcgauggaguu

SEQ ID NO: 1878840 - RNA, 19 nt, Homo sapiens
  misc_RNA (1)...(19): siRNA sense strand
gaaagaaaccuucaaaucc

SEQ ID NO: 1878841 - RNA, 19 nt, Homo sapiens
  misc_RNA (1)...(19): siRNA sense strand
aaagcaaacugcauuauca

SEQ ID NO: 1878842 - RNA, 19 nt, Homo sapiens
  misc_RNA (1)...(19): siRNA sense strand
gguuuaggauuaucuguaa

SEQ ID NO: 1878843 - RNA, 19 nt, Homo sapiens
  misc_RNA (1)...(19): siRNA sense strand
gugcuaaucuguggaaauu

SEQ ID NO: 1878844 - RNA, 19 nt, Homo sapiens
  misc_RNA (1)...(19): siRNA sense strand
ggagaucggguaauucuga

SEQ ID NO: 1878845 - RNA, 19 nt, Homo sapiens
  misc_RNA (1)...(19): siRNA sense strand
ugcaaacacucuccaagua

SEQ ID NO: 1878846 - RNA, 19 nt, Homo sapiens
  misc_RNA (1)...(19): siRNA sense strand
ugagggcacugcauaaaga

SEQ ID NO: 1878847 - RNA, 19 nt, Homo sapiens
  misc_RNA (1)...(19): siRNA sense strand
aaagaaaccuucaaaucca

SEQ ID NO: 1878848 - RNA, 19 nt, Homo sapiens
  misc_RNA (1)...(19): siRNA sense strand
ccucagaugugauguggaa

SEQ ID NO: 1878849 - RNA, 19 nt, Homo sapiens
  misc_RNA (1)...(19): siRNA sense strand
agaaugauauaaccagcua

SEQ ID NO: 1878850 - RNA, 19 nt, Homo sapiens
  misc_RNA (1)...(19): siRNA sense strand
gaaacaggacuucaaacug

SEQ ID NO: 1878851 - RNA, 19 nt, Homo sapiens
  misc_RNA (1)...(19): siRNA sense strand
gcacacacccacagcaguu

SEQ ID NO: 1878852 - RNA, 19 nt, Homo sapiens
  misc_RNA (1)...(19): siRNA sense strand
caaacugcauuaucaccaa

SEQ ID NO: 1878853 - RNA, 19 nt, Homo sapiens
  misc_RNA (1)...(19): siRNA sense strand
ccacagcaguuuugguuua

SEQ ID NO: 1878854 - RNA, 19 nt, Homo sapiens
  misc_RNA (1)...(19): siRNA sense strand
aagaggagaucggguaauu

SEQ ID NO: 1878855 - RNA, 19 nt, Homo sapiens
  misc_RNA (1)...(19): siRNA sense strand
ccagggagcauguguauuc

SEQ ID NO: 1878856 - RNA, 19 nt, Homo sapiens
  misc_RNA (1)...(19): siRNA sense strand
gaauuucuccaacuaugaa

SEQ ID NO: 1878857 - RNA, 19 nt, Homo sapiens
  misc_RNA (1)...(19): siRNA sense strand
gcuaaucuguggaaauuuu

SEQ ID NO: 1878858 - RNA, 19 nt, Homo sapiens
  misc_RNA (1)...(19): siRNA sense strand
ggauauggacagacugaaa

SEQ ID NO: 1878859 - RNA, 19 nt, Homo sapiens
  misc_RNA (1)...(19): siRNA sense strand
aauuaaaccuggcucaaug

SEQ ID NO: 1878860 - RNA, 19 nt, Homo sapiens
  misc_RNA (1)...(19): siRNA sense strand
caacuaugaauccaugaaa

SEQ ID NO: 1878861 - RNA, 19 nt, Homo sapiens
  misc_RNA (1)...(19): siRNA sense strand
gaaugcuuguacagaauga

SEQ ID NO: 1878862 - RNA, 19 nt, Homo sapiens
  misc_RNA (1)...(19): siRNA sense strand
aggauuaucuguaaaugga

SEQ ID NO: 1878863 - RNA, 19 nt, Homo sapiens
  misc_RNA (1)...(19): siRNA sense strand
gggcacugcauaaagauaa

SEQ ID NO: 1878864 - RNA, 19 nt, Homo sapiens
  misc_RNA (1)...(19): siRNA sense strand
gauacgggcugggcaaagu

SEQ ID NO: 1878865 - RNA, 19 nt, Homo sapiens
  misc_RNA (1)...(19): siRNA sense strand
cgaaggauauggacagacu

SEQ ID NO: 1878866 - RNA, 19 nt, Homo sapiens
  misc_RNA (1)...(19): siRNA sense strand
gagaugcgauggaguuuug

SEQ ID NO: 1878867 - RNA, 19 nt, Homo sapiens
  misc_RNA (1)...(19): siRNA sense strand
uguauucacacaccauuua

SEQ ID NO: 1878868 - RNA, 19 nt, Homo sapiens
  misc_RNA (1)...(19): siRNA sense strand
gaagccuguucccuacaaa

SEQ ID NO: 1878869 - RNA, 19 nt, Homo sapiens
  misc_RNA (1)...(19): siRNA sense strand
ccagaaaauuugccaauau

SEQ ID NO: 1878870 - RNA, 19 nt, Homo sapiens
  misc_RNA (1)...(19): siRNA sense strand
guucagcaccaacuguaua

SEQ ID NO: 1878871 - RNA, 19 nt, Homo sapiens
  misc_RNA (1)...(19): siRNA sense strand
gacauucucuacagacuac

SEQ ID NO: 1878872 - RNA, 19 nt, Homo sapiens
  misc_RNA (1)...(19): siRNA sense strand
caaagaggagaucggguaa

SEQ ID NO: 1878873 - RNA, 19 nt, Homo sapiens
  misc_RNA (1)...(19): siRNA sense strand
ucagaugugauguggaaua

SEQ ID NO: 1878874 - RNA, 19 nt, Homo sapiens
  misc_RNA (1)...(19): siRNA sense strand
uccagaguauuucaacuuu

SEQ ID NO: 1878875 - RNA, 19 nt, Homo sapiens
  misc_RNA (1)...(19): siRNA sense strand
gaggagaucggguaauucu

SEQ ID NO: 1878876 - RNA, 19 nt, Homo sapiens
  misc_RNA (1)...(19): siRNA sense strand
cgacuucuaucuugcaaac

SEQ ID NO: 1878877 - RNA, 19 nt, Homo sapiens
  misc_RNA (1)...(19): siRNA sense strand
gcacugcauaaagauaaua

SEQ ID NO: 1878878 - RNA, 19 nt, Homo sapiens
  misc_RNA (1)...(19): siRNA sense strand
gcaaagucugcauggagua

SEQ ID NO: 1878879 - RNA, 19 nt, Homo sapiens
  misc_RNA (1)...(19): siRNA sense strand
uaucagagaacuccagaga

SEQ ID NO: 1878880 - RNA, 19 nt, Homo sapiens
  misc_RNA (1)...(19): siRNA sense strand
ccagaguauuucaacuuug

SEQ ID NO: 1878881 - RNA, 19 nt, Homo sapiens
  misc_RNA (1)...(19): siRNA sense strand
gcaaacacucuccaaguac

SEQ ID NO: 1878882 - RNA, 19 nt, Homo sapiens
  misc_RNA (1)...(19): siRNA sense strand
ccagagugguggcuugcaa

SEQ ID NO: 1878883 - RNA, 19 nt, Homo sapiens
  misc_RNA (1)...(19): siRNA sense strand
agugguggcuugcaaaugu

SEQ ID NO: 1878884 - RNA, 19 nt, Homo sapiens
  misc_RNA (1)...(19): siRNA sense strand
gggccuggauaucuacgaa

SEQ ID NO: 1878885 - RNA, 19 nt, Homo sapiens
  misc_RNA (1)...(19): siRNA sense strand
gaugugauguggaauaccu

SEQ ID NO: 1878886 - RNA, 19 nt, Homo sapiens
  misc_RNA (1)...(19): siRNA sense strand
gaagguucuggcuagauuu

SEQ ID NO: 1878887 - RNA, 19 nt, Homo sapiens
  misc_RNA (1)...(19): siRNA sense strand
ugagccgacuucuaucuug

SEQ ID NO: 1878888 - RNA, 19 nt, Homo sapiens
  misc_RNA (1)...(19): siRNA sense strand
gaucaacagaaauggagaa

SEQ ID NO: 1878889 - RNA, 19 nt, Homo sapiens
  misc_RNA (1)...(19): siRNA sense strand
gugaaaaucugcacuccaa

SEQ ID NO: 1878890 - RNA, 19 nt, Homo sapiens
  misc_RNA (1)...(19): siRNA sense strand
gcuguugcauccaaaugug

SEQ ID NO: 1878891 - RNA, 19 nt, Homo sapiens
  misc_RNA (1)...(19): siRNA sense strand
gaacagggacaguuuuaau

SEQ ID NO: 1878892 - RNA, 19 nt, Homo sapiens
  misc_RNA (1)...(19): siRNA sense strand
gccaauauacuuucagaag

SEQ ID NO: 1878893 - RNA, 19 nt, Homo sapiens
  misc_RNA (1)...(19): siRNA sense strand
uuucagcgccuagcaauuu

SEQ ID NO: 1878894 - RNA, 19 nt, Homo sapiens
  misc_RNA (1)...(19): siRNA sense strand
gagaucggguaauucugau

SEQ ID NO: 1878895 - RNA, 19 nt, Homo sapiens
  misc_RNA (1)...(19): siRNA sense strand
ccgaaugcuuguacagaau

SEQ ID NO: 1878896 - RNA, 19 nt, Homo sapiens
  misc_RNA (1)...(19): siRNA sense strand
gaacagcaaccccucagaa

SEQ ID NO: 1878897 - RNA, 19 nt, Homo sapiens
  misc_RNA (1)...(19): siRNA sense strand
gauguggaauaccucagau

SEQ ID NO: 1878898 - RNA, 19 nt, Homo sapiens
  misc_RNA (1)...(19): siRNA sense strand
cagaguauuucaacuuugc

SEQ ID NO: 1878899 - RNA, 19 nt, Homo sapiens
  misc_RNA (1)...(19): siRNA sense strand
gaucggguaauucugauuc

SEQ ID NO: 1878900 - RNA, 19 nt, Homo sapiens
  misc_RNA (1)...(19): siRNA sense strand
ugaugaaacaugccaguga

SEQ ID NO: 1878901 - RNA, 19 nt, Homo sapiens
  misc_RNA (1)...(19): siRNA sense strand
cagcaaccccucagaauuu

SEQ ID NO: 1878902 - RNA, 19 nt, Homo sapiens
  misc_RNA (1)...(19): siRNA sense strand
ggagaagagaugcgaugga

SEQ ID NO: 1878903 - RNA, 19 nt, Homo sapiens
  misc_RNA (1)...(19): siRNA sense strand
cuggaccaauggacugaua

SEQ ID NO: 1878904 - RNA, 19 nt, Homo sapiens
  misc_RNA (1)...(19): siRNA sense strand
gauuugacacccucagaug

SEQ ID NO: 1878905 - RNA, 19 nt, Homo sapiens
  misc_RNA (1)...(19): siRNA sense strand
agaagccuguucccuacaa

SEQ ID NO: 1878906 - RNA, 19 nt, Homo sapiens
  misc_RNA (1)...(19): siRNA sense strand
caacccaaucuguacacua

SEQ ID NO: 1878907 - RNA, 19 nt, Homo sapiens
  misc_RNA (1)...(19): siRNA sense strand
uuuaacaacccaaucugua

SEQ ID NO: 1878908 - RNA, 19 nt, Homo sapiens
  misc_RNA (1)...(19): siRNA sense strand
ggaaaaccuucuccugcuu

SEQ ID NO: 1878909 - RNA, 19 nt, Homo sapiens
  misc_RNA (1)...(19): siRNA sense strand
gcuuguacagaaugauaua

SEQ ID NO: 1878910 - RNA, 19 nt, Homo sapiens
  misc_RNA (1)...(19): siRNA sense strand
gauccagggagcaugugua

SEQ ID NO: 1878911 - RNA, 19 nt, Homo sapiens
  misc_RNA (1)...(19): siRNA sense strand
aaacugcauuaucaccaau

SEQ ID NO: 1878912 - RNA, 19 nt, Homo sapiens
  misc_RNA (1)...(19): siRNA sense strand
ucuguacacuaccuaccua

SEQ ID NO: 1878913 - RNA, 19 nt, Homo sapiens
  misc_RNA (1)...(19): siRNA sense strand
gauauggacagacugaaac

SEQ ID NO: 1878914 - RNA, 19 nt, Homo sapiens
  misc_RNA (1)...(19): siRNA sense strand
cugaaacggugcuaaucug

SEQ ID NO: 1878915 - RNA, 19 nt, Homo sapiens
  misc_RNA (1)...(19): siRNA sense strand
gaaaaccuucuccugcuuu

SEQ ID NO: 1878916 - RNA, 19 nt, Homo sapiens
  misc_RNA (1)...(19): siRNA sense strand
uaacaacccaaucuguaca

SEQ ID NO: 1878917 - RNA, 19 nt, Homo sapiens
  misc_RNA (1)...(19): siRNA sense strand
ucuacagacuacaaucuuc

SEQ ID NO: 1878918 - RNA, 19 nt, Homo sapiens
  misc_RNA (1)...(19): siRNA sense strand
cagaugugauguggaauac

SEQ ID NO: 1878919 - RNA, 19 nt, Homo sapiens
  misc_RNA (1)...(19): siRNA sense strand
caguuuugguuuaggauua

SEQ ID NO: 1878920 - RNA, 19 nt, Homo sapiens
  misc_RNA (1)...(19): siRNA sense strand
cagcugacccagaaagaca

SEQ ID NO: 1878921 - RNA, 19 nt, Homo sapiens
  misc_RNA (1)...(19): siRNA sense strand
aacccaaucuguacacuac

SEQ ID NO: 1878922 - RNA, 19 nt, Homo sapiens
  misc_RNA (1)...(19): siRNA sense strand
accgaaugcuuguacagaa

SEQ ID NO: 1878923 - RNA, 19 nt, Homo sapiens
  misc_RNA (1)...(19): siRNA sense strand
caccaacuguauaccgaau

SEQ ID NO: 1878924 - RNA, 19 nt, Homo sapiens
  misc_RNA (1)...(19): siRNA sense strand
uugcaaauguggccugucu

SEQ ID NO: 1878925 - RNA, 19 nt, Homo sapiens
  misc_RNA (1)...(19): siRNA sense strand
cuaccuaccuaccgcuuac

SEQ ID NO: 1878926 - RNA, 19 nt, Homo sapiens
  misc_RNA (1)...(19): siRNA sense strand
aaauuaaaccuggcucaau

SEQ ID NO: 1878927 - RNA, 19 nt, Homo sapiens
  misc_RNA (1)...(19): siRNA sense strand
agacugaaacggugcuaau

SEQ ID NO: 1878928 - RNA, 19 nt, Homo sapiens
  misc_RNA (1)...(19): siRNA sense strand
guacagaaugauauaacca

SEQ ID NO: 1878929 - RNA, 19 nt, Homo sapiens
  misc_RNA (1)...(19): siRNA sense strand
ccaacuguauaccgaaugc

SEQ ID NO: 1878930 - RNA, 19 nt, Homo sapiens
  misc_RNA (1)...(19): siRNA sense strand
gcgaacagggacaguuuua

SEQ ID NO: 1878931 - RNA, 19 nt, Homo sapiens
  misc_RNA (1)...(19): siRNA sense strand
gaacauaacaucugugaaa

SEQ ID NO: 1878932 - RNA, 19 nt, Homo sapiens
  misc_RNA (1)...(19): siRNA sense strand
gcaagaccuuccaguauaa

SEQ ID NO: 1878933 - RNA, 19 nt, Homo sapiens
  misc_RNA (1)...(19): siRNA sense strand
gaagguagacaaaguaauu

SEQ ID NO: 1878934 - RNA, 19 nt, Homo sapiens
  misc_RNA (1)...(19): siRNA sense strand
ggauagcacuggacauguu

SEQ ID NO: 1878935 - RNA, 19 nt, Homo sapiens
  misc_RNA (1)...(19): siRNA sense strand
uaacauccauagugaaaga

SEQ ID NO: 1878936 - RNA, 19 nt, Homo sapiens
  misc_RNA (1)...(19): siRNA sense strand
gaaggacucucaaauugca

SEQ ID NO: 1878937 - RNA, 19 nt, Homo sapiens
  misc_RNA (1)...(19): siRNA sense strand
ggauggagcucugauaaag

SEQ ID NO: 1878938 - RNA, 19 nt, Homo sapiens
  misc_RNA (1)...(19): siRNA sense strand
cauaacaucugugaaauca

SEQ ID NO: 1878939 - RNA, 19 nt, Homo sapiens
  misc_RNA (1)...(19): siRNA sense strand
ggagagaagauuaccauga

SEQ ID NO: 1878940 - RNA, 19 nt, Homo sapiens
  misc_RNA (1)...(19): siRNA sense strand
ugaaaucaauggacagaau

SEQ ID NO: 1878941 - RNA, 19 nt, Homo sapiens
  misc_RNA (1)...(19): siRNA sense strand
gcacuggacauguugguuu

SEQ ID NO: 1878942 - RNA, 19 nt, Homo sapiens
  misc_RNA (1)...(19): siRNA sense strand
gagagaagauuaccaugac

SEQ ID NO: 1878943 - RNA, 19 nt, Homo sapiens
  misc_RNA (1)...(19): siRNA sense strand
agcaagaccuuccaguaua

SEQ ID NO: 1878944 - RNA, 19 nt, Homo sapiens
  misc_RNA (1)...(19): siRNA sense strand
ggacgauuaccaugcauaa

SEQ ID NO: 1878945 - RNA, 19 nt, Homo sapiens
  misc_RNA (1)...(19): siRNA sense strand
ggacucaggcuuaaaucaa

SEQ ID NO: 1878946 - RNA, 19 nt, Homo sapiens
  misc_RNA (1)...(19): siRNA sense strand
gggcugaguuuaaaugaag

SEQ ID NO: 1878947 - RNA, 19 nt, Homo sapiens
  misc_RNA (1)...(19): siRNA sense strand
guagcaagaccuuccagua

SEQ ID NO: 1878948 - RNA, 19 nt, Homo sapiens
  misc_RNA (1)...(19): siRNA sense strand
gaaauuaagcaagggauuc

SEQ ID NO: 1878949 - RNA, 19 nt, Homo sapiens
  misc_RNA (1)...(19): siRNA sense strand
gcaagggauucgugaaguc

SEQ ID NO: 1878950 - RNA, 19 nt, Homo sapiens
  misc_RNA (1)...(19): siRNA sense strand
gaagaagaaauacgugcaa

SEQ ID NO: 1878951 - RNA, 19 nt, Homo sapiens
  misc_RNA (1)...(19): siRNA sense strand
guaaggaucaagauggaaa

SEQ ID NO: 1878952 - RNA, 19 nt, Homo sapiens
  misc_RNA (1)...(19): siRNA sense strand
gaaaucaauggacagaaug

SEQ ID NO: 1878953 - RNA, 19 nt, Homo sapiens
  misc_RNA (1)...(19): siRNA sense strand
uuacaaucaugccugcuuu

SEQ ID NO: 1878954 - RNA, 19 nt, Homo sapiens
  misc_RNA (1)...(19): siRNA sense strand
gcaggauggagcucugaua

SEQ ID NO: 1878955 - RNA, 19 nt, Homo sapiens
  misc_RNA (1)...(19): siRNA sense strand
gcaccaagcauuaugaaaa

SEQ ID NO: 1878956 - RNA, 19 nt, Homo sapiens
  misc_RNA (1)...(19): siRNA sense strand
uagcaagaccuuccaguau

SEQ ID NO: 1878957 - RNA, 19 nt, Homo sapiens
  misc_RNA (1)...(19): siRNA sense strand
caccauuccugagguuuaa

SEQ ID NO: 1878958 - RNA, 19 nt, Homo sapiens
  misc_RNA (1)...(19): siRNA sense strand
ccaaguacuucagaucaau

SEQ ID NO: 1878959 - RNA, 19 nt, Homo sapiens
  misc_RNA (1)...(19): siRNA sense strand
gacucaggcuuaaaucaau

SEQ ID NO: 1878960 - RNA, 19 nt, Homo sapiens
  misc_RNA (1)...(19): siRNA sense strand
caaaguaauucaggcucaa

SEQ ID NO: 1878961 - RNA, 19 nt, Homo sapiens
  misc_RNA (1)...(19): siRNA sense strand
guaaugauguuggaauucg

SEQ ID NO: 1878962 - RNA, 19 nt, Homo sapiens
  misc_RNA (1)...(19): siRNA sense strand
aaauuggacucaggcuuaa

SEQ ID NO: 1878963 - RNA, 19 nt, Homo sapiens
  misc_RNA (1)...(19): siRNA sense strand
gaccaaguacuucagauca

SEQ ID NO: 1878964 - RNA, 19 nt, Homo sapiens
  misc_RNA (1)...(19): siRNA sense strand
ccacaccauuccugagguu

SEQ ID NO: 1878965 - RNA, 19 nt, Homo sapiens
  misc_RNA (1)...(19): siRNA sense strand
cgauuaccaugcauaagga

SEQ ID NO: 1878966 - RNA, 19 nt, Homo sapiens
  misc_RNA (1)...(19): siRNA sense strand
caggauggagcucugauaa

SEQ ID NO: 1878967 - RNA, 19 nt, Homo sapiens
  misc_RNA (1)...(19): siRNA sense strand
gaagauuaccaugaccauu

SEQ ID NO: 1878968 - RNA, 19 nt, Homo sapiens
  misc_RNA (1)...(19): siRNA sense strand
gaccuuccaguauaaacua

SEQ ID NO: 1878969 - RNA, 19 nt, Homo sapiens
  misc_RNA (1)...(19): siRNA sense strand
cggauggcaccaagcauua

SEQ ID NO: 1878970 - RNA, 19 nt, Homo sapiens
  misc_RNA (1)...(19): siRNA sense strand
acucaggcuuaaaucaaua

SEQ ID NO: 1878971 - RNA, 19 nt, Homo sapiens
  misc_RNA (1)...(19): siRNA sense strand
ggaauucguagagcagaaa

SEQ ID NO: 1878972 - RNA, 19 nt, Homo sapiens
  misc_RNA (1)...(19): siRNA sense strand
gcggauggcaccaagcauu

SEQ ID NO: 1878973 - RNA, 19 nt, Homo sapiens
  misc_RNA (1)...(19): siRNA sense strand
ggucuucucacggaacaua

SEQ ID NO: 1878974 - RNA, 19 nt, Homo sapiens
  misc_RNA (1)...(19): siRNA sense strand
gaucaauggugaaaacugu

SEQ ID NO: 1878975 - RNA, 19 nt, Homo sapiens
  misc_RNA (1)...(19): siRNA sense strand
uaugguggcuccuguaacu

SEQ ID NO: 1878976 - RNA, 19 nt, Homo sapiens
  misc_RNA (1)...(19): siRNA sense strand
guguaaggaucaagaugga

SEQ ID NO: 1878977 - RNA, 19 nt, Homo sapiens
  misc_RNA (1)...(19): siRNA sense strand
ucgaagacuugaagguaga

SEQ ID NO: 1878978 - RNA, 19 nt, Homo sapiens
  misc_RNA (1)...(19): siRNA sense strand
cuaauucuccagccucauu

SEQ ID NO: 1878979 - RNA, 19 nt, Homo sapiens
  misc_RNA (1)...(19): siRNA sense strand
ucaaauugcagacauacug

SEQ ID NO: 1878980 - RNA, 19 nt, Homo sapiens
  misc_RNA (1)...(19): siRNA sense strand
ggaccaaguacuucagauc

SEQ ID NO: 1878981 - RNA, 19 nt, Homo sapiens
  misc_RNA (1)...(19): siRNA sense strand
aaaauuggacucaggcuua

SEQ ID NO: 1878982 - RNA, 19 nt, Homo sapiens
  misc_RNA (1)...(19): siRNA sense strand
ugguauauuuguucagcua

SEQ ID NO: 1878983 - RNA, 19 nt, Homo sapiens
  misc_RNA (1)...(19): siRNA sense strand
ugguaaugauguuggaauu

SEQ ID NO: 1878984 - RNA, 19 nt, Homo sapiens
  misc_RNA (1)...(19): siRNA sense strand
acaccauuccugagguuua

SEQ ID NO: 1878985 - RNA, 19 nt, Homo sapiens
  misc_RNA (1)...(19): siRNA sense strand
aagauuaccaugaccauuc

SEQ ID NO: 1878986 - RNA, 19 nt, Homo sapiens
  misc_RNA (1)...(19): siRNA sense strand
gauagcacuggacauguug

SEQ ID NO: 1878987 - RNA, 19 nt, Homo sapiens
  misc_RNA (1)...(19): siRNA sense strand
auucguagagcagaaauua

SEQ ID NO: 1878988 - RNA, 19 nt, Homo sapiens
  misc_RNA (1)...(19): siRNA sense strand
ucacggaacauaacaucug

SEQ ID NO: 1878989 - RNA, 19 nt, Homo sapiens
  misc_RNA (1)...(19): siRNA sense strand
ucucgaagacuugaaggua

SEQ ID NO: 1878990 - RNA, 19 nt, Homo sapiens
  misc_RNA (1)...(19): siRNA sense strand
gugaagucauuuuguguaa

SEQ ID NO: 1878991 - RNA, 19 nt, Homo sapiens
  misc_RNA (1)...(19): siRNA sense strand
guauauuuguucagcuagu

SEQ ID NO: 1878992 - RNA, 19 nt, Homo sapiens
  misc_RNA (1)...(19): siRNA sense strand
caaauugcagacauacugu

SEQ ID NO: 1878993 - RNA, 19 nt, Homo sapiens
  misc_RNA (1)...(19): siRNA sense strand
agacuugaagguagacaaa

SEQ ID NO: 1878994 - RNA, 19 nt, Homo sapiens
  misc_RNA (1)...(19): siRNA sense strand
cggaacauaacaucuguga

SEQ ID NO: 1878995 - RNA, 19 nt, Homo sapiens
  misc_RNA (1)...(19): siRNA sense strand
uauaugguggcuccuguaa

SEQ ID NO: 1878996 - RNA, 19 nt, Homo sapiens
  misc_RNA (1)...(19): siRNA sense strand
guaauucaggcucaaacug

SEQ ID NO: 1878997 - RNA, 19 nt, Homo sapiens
  misc_RNA (1)...(19): siRNA sense strand
gaagucauuuuguguaagg

SEQ ID NO: 1878998 - RNA, 19 nt, Homo sapiens
  misc_RNA (1)...(19): siRNA sense strand
cacggaacauaacaucugu

SEQ ID NO: 1878999 - RNA, 19 nt, Homo sapiens
  misc_RNA (1)...(19): siRNA sense strand
gauguuggaauucguagag

SEQ ID NO: 1879000 - RNA, 19 nt, Homo sapiens
  misc_RNA (1)...(19): siRNA sense strand
cauccauagugaaagauag

SEQ ID NO: 1879001 - RNA, 19 nt, Homo sapiens
  misc_RNA (1)...(19): siRNA sense strand
cagcuaguccaggcuaauu

SEQ ID NO: 1879002 - RNA, 19 nt, Homo sapiens
  misc_RNA (1)...(19): siRNA sense strand
gauggcaccaagcauuaug

SEQ ID NO: 1879003 - RNA, 19 nt, Homo sapiens
  misc_RNA (1)...(19): siRNA sense strand
caagaccuuccaguauaaa

SEQ ID NO: 1879004 - RNA, 19 nt, Homo sapiens
  misc_RNA (1)...(19): siRNA sense strand
caaguacuucagaucaaug

SEQ ID NO: 1879005 - RNA, 19 nt, Homo sapiens
  misc_RNA (1)...(19): siRNA sense strand
uguaacugguaaugauguu

SEQ ID NO: 1879006 - RNA, 19 nt, Homo sapiens
  misc_RNA (1)...(19): siRNA sense strand
gguaaugauguuggaauuc

SEQ ID NO: 1879007 - RNA, 19 nt, Homo sapiens
  misc_RNA (1)...(19): siRNA sense strand
ggauggcaccaagcauuau

SEQ ID NO: 1879008 - RNA, 19 nt, Homo sapiens
  misc_RNA (1)...(19): siRNA sense strand
gggaccaaguacuucagau

SEQ ID NO: 1879009 - RNA, 19 nt, Homo sapiens
  misc_RNA (1)...(19): siRNA sense strand
caagggauucgugaaguca

SEQ ID NO: 1879010 - RNA, 19 nt, Homo sapiens
  misc_RNA (1)...(19): siRNA sense strand
cuugaagguagacaaagua

SEQ ID NO: 1879011 - RNA, 19 nt, Homo sapiens
  misc_RNA (1)...(19): siRNA sense strand
agggauucgugaagucauu

SEQ ID NO: 1879012 - RNA, 19 nt, Homo sapiens
  misc_RNA (1)...(19): siRNA sense strand
uggaauucguagagcagaa

SEQ ID NO: 1879013 - RNA, 19 nt, Homo sapiens
  misc_RNA (1)...(19): siRNA sense strand
aaggauagcacuggacaug

SEQ ID NO: 1879014 - RNA, 19 nt, Homo sapiens
  misc_RNA (1)...(19): siRNA sense strand
accaaguacuucagaucaa

SEQ ID NO: 1879015 - RNA, 19 nt, Homo sapiens
  misc_RNA (1)...(19): siRNA sense strand
agaaauuaagcaagggauu

SEQ ID NO: 1879016 - RNA, 19 nt, Homo sapiens
  misc_RNA (1)...(19): siRNA sense strand
guagagcagaaauuaagca

SEQ ID NO: 1879017 - RNA, 19 nt, Homo sapiens
  misc_RNA (1)...(19): siRNA sense strand
aaucaugccugcuuuuauc

SEQ ID NO: 1879018 - RNA, 19 nt, Homo sapiens
  misc_RNA (1)...(19): siRNA sense strand
ggaacauaacaucugugaa

SEQ ID NO: 1879019 - RNA, 19 nt, Homo sapiens
  misc_RNA (1)...(19): siRNA sense strand
ggugaaaacugugcaggau

SEQ ID NO: 1879020 - RNA, 19 nt, Homo sapiens
  misc_RNA (1)...(19): siRNA sense strand
caacacagccaacaacuuc

SEQ ID NO: 1879021 - RNA, 19 nt, Homo sapiens
  misc_RNA (1)...(19): siRNA sense strand
ggauccagcugaccacaga

SEQ ID NO: 1879022 - RNA, 19 nt, Homo sapiens
  misc_RNA (1)...(19): siRNA sense strand
uuaauucacugcagaagga

SEQ ID NO: 1879023 - RNA, 19 nt, Homo sapiens
  misc_RNA (1)...(19): siRNA sense strand
gaaggugguucccaugucu

SEQ ID NO: 1879024 - RNA, 19 nt, Homo sapiens
  misc_RNA (1)...(19): siRNA sense strand
caacaacuuccuccucauu

SEQ ID NO: 1879025 - RNA, 19 nt, Homo sapiens
  misc_RNA (1)...(19): siRNA sense strand
gauuugacguguccguuug

SEQ ID NO: 1879026 - RNA, 19 nt, Homo sapiens
  misc_RNA (1)...(19): siRNA sense strand
cuucguagaccgcaaguua

SEQ ID NO: 1879027 - RNA, 19 nt, Homo sapiens
  misc_RNA (1)...(19): siRNA sense strand
gaagugggcgcaucagaca

SEQ ID NO: 1879028 - RNA, 19 nt, Homo sapiens
  misc_RNA (1)...(19): siRNA sense strand
gaggcuggcuucccacauc

SEQ ID NO: 1879029 - RNA, 19 nt, Homo sapiens
  misc_RNA (1)...(19): siRNA sense strand
ugacuuuccucuucguaga

SEQ ID NO: 1879030 - RNA, 19 nt, Homo sapiens
  misc_RNA (1)...(19): siRNA sense strand
uugagcaucuguccuuuga

SEQ ID NO: 1879031 - RNA, 19 nt, Homo sapiens
  misc_RNA (1)...(19): siRNA sense strand
gauucuggacugugaguuu

SEQ ID NO: 1879032 - RNA, 19 nt, Homo sapiens
  misc_RNA (1)...(19): siRNA sense strand
ugccucaagugcauuaauu

SEQ ID NO: 1879033 - RNA, 19 nt, Homo sapiens
  misc_RNA (1)...(19): siRNA sense strand
gaccacagagcuuggauuc

SEQ ID NO: 1879034 - RNA, 19 nt, Homo sapiens
  misc_RNA (1)...(19): siRNA sense strand
aggaucugcuuugcuguua

SEQ ID NO: 1879035 - RNA, 19 nt, Homo sapiens
  misc_RNA (1)...(19): siRNA sense strand
gaggaucugcuuugcuguu

SEQ ID NO: 1879036 - RNA, 19 nt, Homo sapiens
  misc_RNA (1)...(19): siRNA sense strand
gaucugcuuugcuguuacu

SEQ ID NO: 1879037 - RNA, 19 nt, Homo sapiens
  misc_RNA (1)...(19): siRNA sense strand
acaacuuccuccucauuuc

SEQ ID NO: 1879038 - RNA, 19 nt, Homo sapiens
  misc_RNA (1)...(19): siRNA sense strand
uugaugaacucaggcacua

SEQ ID NO: 1879039 - RNA, 19 nt, Homo sapiens
  misc_RNA (1)...(19): siRNA sense strand
gcauuaauucacugcagaa

SEQ ID NO: 1879040 - RNA, 19 nt, Homo sapiens
  misc_RNA (1)...(19): siRNA sense strand
agcccaagcugaagaagau

SEQ ID NO: 1879041 - RNA, 19 nt, Homo sapiens
  misc_RNA (1)...(19): siRNA sense strand
uccauggucucucggaaga

SEQ ID NO: 1879042 - RNA, 19 nt, Homo sapiens
  misc_RNA (1)...(19): siRNA sense strand
gagccacugugcccauuuu

SEQ ID NO: 1879043 - RNA, 19 nt, Homo sapiens
  misc_RNA (1)...(19): siRNA sense strand
gccgcugacuuuccucuuc

SEQ ID NO: 1879044 - RNA, 19 nt, Homo sapiens
  misc_RNA (1)...(19): siRNA sense strand
gagcccaagcugaagaaga

SEQ ID NO: 1879045 - RNA, 19 nt, Homo sapiens
  misc_RNA (1)...(19): siRNA sense strand
ugaaggugguucccauguc

SEQ ID NO: 1879046 - RNA, 19 nt, Homo sapiens
  misc_RNA (1)...(19): siRNA sense strand
gaccuugccgagagauuug

SEQ ID NO: 1879047 - RNA, 19 nt, Homo sapiens
  misc_RNA (1)...(19): siRNA sense strand
cuccuucaauuccaccuaa

SEQ ID NO: 1879048 - RNA, 19 nt, Homo sapiens
  misc_RNA (1)...(19): siRNA sense strand
gcaugcagaacguuuccuu

SEQ ID NO: 1879049 - RNA, 19 nt, Homo sapiens
  misc_RNA (1)...(19): siRNA sense strand
ccaacacagccaacaacuu

SEQ ID NO: 1879050 - RNA, 19 nt, Homo sapiens
  misc_RNA (1)...(19): siRNA sense strand
cuuggauucuggacuguga

SEQ ID NO: 1879051 - RNA, 19 nt, Homo sapiens
  misc_RNA (1)...(19): siRNA sense strand
gggaacaagcacagaaugg

SEQ ID NO: 1879052 - RNA, 19 nt, Homo sapiens
  misc_RNA (1)...(19): siRNA sense strand
caacuuccuccucauuucu

SEQ ID NO: 1879053 - RNA, 19 nt, Homo sapiens
  misc_RNA (1)...(19): siRNA sense strand
agaaucuguucaccgcaaa

SEQ ID NO: 1879054 - RNA, 19 nt, Homo sapiens
  misc_RNA (1)...(19): siRNA sense strand
cugcuuugcuguuacucuu

SEQ ID NO: 1879055 - RNA, 19 nt, Homo sapiens
  misc_RNA (1)...(19): siRNA sense strand
ggagccacugugcccauuu

SEQ ID NO: 1879056 - RNA, 19 nt, Homo sapiens
  misc_RNA (1)...(19): siRNA sense strand
ccaacaacuuccuccucau

SEQ ID NO: 1879057 - RNA, 19 nt, Homo sapiens
  misc_RNA (1)...(19): siRNA sense strand
cugggagucugcagagaau

SEQ ID NO: 1879058 - RNA, 19 nt, Homo sapiens
  misc_RNA (1)...(19): siRNA sense strand
gggcgcaucagacagaauc

SEQ ID NO: 1879059 - RNA, 19 nt, Homo sapiens
  misc_RNA (1)...(19): siRNA sense strand
aaguggauaugaccuugga

SEQ ID NO: 1879060 - RNA, 19 nt, Homo sapiens
  misc_RNA (1)...(19): siRNA sense strand
ggagguggacgugggaaca

SEQ ID NO: 1879061 - RNA, 19 nt, Homo sapiens
  misc_RNA (1)...(19): siRNA sense strand
acccaaggaugcggaaguu

SEQ ID NO: 1879062 - RNA, 19 nt, Homo sapiens
  misc_RNA (1)...(19): siRNA sense strand
ccucaagugcauuaauuca

SEQ ID NO: 1879063 - RNA, 19 nt, Homo sapiens
  misc_RNA (1)...(19): siRNA sense strand
gaaugggaccugggagucu

SEQ ID NO: 1879064 - RNA, 19 nt, Homo sapiens
  misc_RNA (1)...(19): siRNA sense strand
agaccuugccgagagauuu

SEQ ID NO: 1879065 - RNA, 19 nt, Homo sapiens
  misc_RNA (1)...(19): siRNA sense strand
aacaacuuccuccucauuu

SEQ ID NO: 1879066 - RNA, 19 nt, Homo sapiens
  misc_RNA (1)...(19): siRNA sense strand
gaauaaagcuccugagaau

SEQ ID NO: 1879067 - RNA, 19 nt, Homo sapiens
  misc_RNA (1)...(19): siRNA sense strand
gcaaagaacuagaauacuu

SEQ ID NO: 1879068 - RNA, 19 nt, Homo sapiens
  misc_RNA (1)...(19): siRNA sense strand
ggaauuaacucuaccaaau

SEQ ID NO: 1879069 - RNA, 19 nt, Homo sapiens
  misc_RNA (1)...(19): siRNA sense strand
gaagagauauugccuacaa

SEQ ID NO: 1879070 - RNA, 19 nt, Homo sapiens
  misc_RNA (1)...(19): siRNA sense strand
ggccuaaccuuuauucaua

SEQ ID NO: 1879071 - RNA, 19 nt, Homo sapiens
  misc_RNA (1)...(19): siRNA sense strand
caacuugucucucaucuau

SEQ ID NO: 1879072 - RNA, 19 nt, Homo sapiens
  misc_RNA (1)...(19): siRNA sense strand
uaacauagcagcugaacua

SEQ ID NO: 1879073 - RNA, 19 nt, Homo sapiens
  misc_RNA (1)...(19): siRNA sense strand
gcaaggauuucacuuucua

SEQ ID NO: 1879074 - RNA, 19 nt, Homo sapiens
  misc_RNA (1)...(19): siRNA sense strand
gauguuacuucugcuauua

SEQ ID NO: 1879075 - RNA, 19 nt, Homo sapiens
  misc_RNA (1)...(19): siRNA sense strand
guggauaccuuacuuacua

SEQ ID NO: 1879076 - RNA, 19 nt, Homo sapiens
  misc_RNA (1)...(19): siRNA sense strand
ggaccaaggugacauggaa

SEQ ID NO: 1879077 - RNA, 19 nt, Homo sapiens
  misc_RNA (1)...(19): siRNA sense strand
gaacagaauccugaagaua

SEQ ID NO: 1879078 - RNA, 19 nt, Homo sapiens
  misc_RNA (1)...(19): siRNA sense strand
gaucaagccuuuaugaaca

SEQ ID NO: 1879079 - RNA, 19 nt, Homo sapiens
  misc_RNA (1)...(19): siRNA sense strand
gaacagaugggugaucaua

SEQ ID NO: 1879080 - RNA, 19 nt, Homo sapiens
  misc_RNA (1)...(19): siRNA sense strand
gcaaagaguuacuaugaag

SEQ ID NO: 1879081 - RNA, 19 nt, Homo sapiens
  misc_RNA (1)...(19): siRNA sense strand
gagacaugcucuuauugua

SEQ ID NO: 1879082 - RNA, 19 nt, Homo sapiens
  misc_RNA (1)...(19): siRNA sense strand
gguggaaucuucuguugaa

SEQ ID NO: 1879083 - RNA, 19 nt, Homo sapiens
  misc_RNA (1)...(19): siRNA sense strand
gcaauccacuauuaucaga

SEQ ID NO: 1879084 - RNA, 19 nt, Homo sapiens
  misc_RNA (1)...(19): siRNA sense strand
gaaggcaccucagaagaga

SEQ ID NO: 1879085 - RNA, 19 nt, Homo sapiens
  misc_RNA (1)...(19): siRNA sense strand
cagcugaacuauauauuuc

SEQ ID NO: 1879086 - RNA, 19 nt, Homo sapiens
  misc_RNA (1)...(19): siRNA sense strand
acagaugggugaucauaaa

SEQ ID NO: 1879087 - RNA, 19 nt, Homo sapiens
  misc_RNA (1)...(19): siRNA sense strand
gcuuguagauuccucauug

SEQ ID NO: 1879088 - RNA, 19 nt, Homo sapiens
  misc_RNA (1)...(19): siRNA sense strand
gagaggcaucuuuaucuua

SEQ ID NO: 1879089 - RNA, 19 nt, Homo sapiens
  misc_RNA (1)...(19): siRNA sense strand
caaguuaucagcugaagaa

SEQ ID NO: 1879090 - RNA, 19 nt, Homo sapiens
  misc_RNA (1)...(19): siRNA sense strand
gcagcugaacuauauauuu

SEQ ID NO: 1879091 - RNA, 19 nt, Homo sapiens
  misc_RNA (1)...(19): siRNA sense strand
guugauugcugcgcauuua

SEQ ID NO: 1879092 - RNA, 19 nt, Homo sapiens
  misc_RNA (1)...(19): siRNA sense strand
ggaagucaguucacaaggu

SEQ ID NO: 1879093 - RNA, 19 nt, Homo sapiens
  misc_RNA (1)...(19): siRNA sense strand
gcauggaaaucauaagaca

SEQ ID NO: 1879094 - RNA, 19 nt, Homo sapiens
  misc_RNA (1)...(19): siRNA sense strand
gaccaagagucagcaaauu

SEQ ID NO: 1879095 - RNA, 19 nt, Homo sapiens
  misc_RNA (1)...(19): siRNA sense strand
gaaaggcauacaacuauau

SEQ ID NO: 1879096 - RNA, 19 nt, Homo sapiens
  misc_RNA (1)...(19): siRNA sense strand
agaaaggcauacaacuaua

SEQ ID NO: 1879097 - RNA, 19 nt, Homo sapiens
  misc_RNA (1)...(19): siRNA sense strand
gcagcuggcuagagauaug

SEQ ID NO: 1879098 - RNA, 19 nt, Homo sapiens
  misc_RNA (1)...(19): siRNA sense strand
guauaggccuaaccuuuau

SEQ ID NO: 1879099 - RNA, 19 nt, Homo sapiens
  misc_RNA (1)...(19): siRNA sense strand
gagauauggcaaagaguua

SEQ ID NO: 1879100 - RNA, 19 nt, Homo sapiens
  misc_RNA (1)...(19): siRNA sense strand
ggaagaaacaccugagcaa

SEQ ID NO: 1879101 - RNA, 19 nt, Homo sapiens
  misc_RNA (1)...(19): siRNA sense strand
gaaucgagcccaaguuugu

SEQ ID NO: 1879102 - RNA, 19 nt, Homo sapiens
  misc_RNA (1)...(19): siRNA sense strand
gauacaaccuugcaguagu

SEQ ID NO: 1879103 - RNA, 19 nt, Homo sapiens
  misc_RNA (1)...(19): siRNA sense strand
gaagaaggcaccucagaag

SEQ ID NO: 1879104 - RNA, 19 nt, Homo sapiens
  misc_RNA (1)...(19): siRNA sense strand
ggcaaagaguuacuaugaa

SEQ ID NO: 1879105 - RNA, 19 nt, Homo sapiens
  misc_RNA (1)...(19): siRNA sense strand
uaaaguaucgagagacaaa

SEQ ID NO: 1879106 - RNA, 19 nt, Homo sapiens
  misc_RNA (1)...(19): siRNA sense strand
ggagcgagcugcugaaagc

SEQ ID NO: 1879107 - RNA, 19 nt, Homo sapiens
  misc_RNA (1)...(19): siRNA sense strand
gaauguuaccugcacuaua

SEQ ID NO: 1879108 - RNA, 19 nt, Homo sapiens
  misc_RNA (1)...(19): siRNA sense strand
gagaauaaagcuccugaga

SEQ ID NO: 1879109 - RNA, 19 nt, Homo sapiens
  misc_RNA (1)...(19): siRNA sense strand
ugacaacacuaguagaaca

SEQ ID NO: 1879110 - RNA, 19 nt, Homo sapiens
  misc_RNA (1)...(19): siRNA sense strand
ucagaaaggcauacaacua

SEQ ID NO: 1879111 - RNA, 19 nt, Homo sapiens
  misc_RNA (1)...(19): siRNA sense strand
uaucagagcagugggaaua

SEQ ID NO: 1879112 - RNA, 19 nt, Homo sapiens
  misc_RNA (1)...(19): siRNA sense strand
uguauaggccuaaccuuua

SEQ ID NO: 1879113 - RNA, 19 nt, Homo sapiens
  misc_RNA (1)...(19): siRNA sense strand
cagaaaggcauacaacuau

SEQ ID NO: 1879114 - RNA, 19 nt, Homo sapiens
  misc_RNA (1)...(19): siRNA sense strand
ggucuuugcuuccaugcuu

SEQ ID NO: 1879115 - RNA, 19 nt, Homo sapiens
  misc_RNA (1)...(19): siRNA sense strand
gguagaggguauagaacuu

SEQ ID NO: 1879116 - RNA, 19 nt, Homo sapiens
  misc_RNA (1)...(19): siRNA sense strand
gaaccucucuauagcuucu

SEQ ID NO: 1879117 - RNA, 19 nt, Homo sapiens
  misc_RNA (1)...(19): siRNA sense strand
guccggaacucaucgacua

SEQ ID NO: 1879118 - RNA, 19 nt, Homo sapiens
  misc_RNA (1)...(19): siRNA sense strand
gcucuuguuugcucugaaa

SEQ ID NO: 1879119 - RNA, 19 nt, Homo sapiens
  misc_RNA (1)...(19): siRNA sense strand
ggauguuggugaauauaau

SEQ ID NO: 1879120 - RNA, 19 nt, Homo sapiens
  misc_RNA (1)...(19): siRNA sense strand
guacaucucaacauucuug

SEQ ID NO: 1879121 - RNA, 19 nt, Homo sapiens
  misc_RNA (1)...(19): siRNA sense strand
agaaaugucucuggaacaa

SEQ ID NO: 1879122 - RNA, 19 nt, Homo sapiens
  misc_RNA (1)...(19): siRNA sense strand
gaaaaggccucggaguaaa

SEQ ID NO: 1879123 - RNA, 19 nt, Homo sapiens
  misc_RNA (1)...(19): siRNA sense strand
cauaauugaugaagcuuuc

SEQ ID NO: 1879124 - RNA, 19 nt, Homo sapiens
  misc_RNA (1)...(19): siRNA sense strand
gacaugcucuuauuguaca

SEQ ID NO: 1879125 - RNA, 19 nt, Homo sapiens
  misc_RNA (1)...(19): siRNA sense strand
ggagagaggcaucuuuauc

SEQ ID NO: 1879126 - RNA, 19 nt, Homo sapiens
  misc_RNA (1)...(19): siRNA sense strand
gaugcaaggauuucacuuu

SEQ ID NO: 1879127 - RNA, 19 nt, Homo sapiens
  misc_RNA (1)...(19): siRNA sense strand
uaccaaaucccaagacaaa

SEQ ID NO: 1879128 - RNA, 19 nt, Homo sapiens
  misc_RNA (1)...(19): siRNA sense strand
ccaguuagacuuacgaaga

SEQ ID NO: 1879129 - RNA, 19 nt, Homo sapiens
  misc_RNA (1)...(19): siRNA sense strand
gcucuuaaauaugaaccua

SEQ ID NO: 1879130 - RNA, 19 nt, Homo sapiens
  misc_RNA (1)...(19): siRNA sense strand
gaacaagacaauauuaagc

SEQ ID NO: 1879131 - RNA, 19 nt, Homo sapiens
  misc_RNA (1)...(19): siRNA sense strand
ccaagaaaaugaugaaaga

SEQ ID NO: 1879132 - RNA, 19 nt, Homo sapiens
  misc_RNA (1)...(19): siRNA sense strand
gaagaggcgauauugaugu

SEQ ID NO: 1879133 - RNA, 19 nt, Homo sapiens
  misc_RNA (1)...(19): siRNA sense strand
guacagggcuuuuccuuuc

SEQ ID NO: 1879134 - RNA, 19 nt, Homo sapiens
  misc_RNA (1)...(19): siRNA sense strand
ggagacaugcucuuauugu

SEQ ID NO: 1879135 - RNA, 19 nt, Homo sapiens
  misc_RNA (1)...(19): siRNA sense strand
gcauuuguaucugguaguu

SEQ ID NO: 1879136 - RNA, 19 nt, Homo sapiens
  misc_RNA (1)...(19): siRNA sense strand
agaggcaucuuuaucuuau

SEQ ID NO: 1879137 - RNA, 19 nt, Homo sapiens
  misc_RNA (1)...(19): siRNA sense strand
gcccaaguuuguuugauau

SEQ ID NO: 1879138 - RNA, 19 nt, Homo sapiens
  misc_RNA (1)...(19): siRNA sense strand
ggagaccuauaccuagaug

SEQ ID NO: 1879139 - RNA, 19 nt, Homo sapiens
  misc_RNA (1)...(19): siRNA sense strand
uggcaaagaguuacuauga

SEQ ID NO: 1879140 - RNA, 19 nt, Homo sapiens
  misc_RNA (1)...(19): siRNA sense strand
aaaugucucuggaacaaga

SEQ ID NO: 1879141 - RNA, 19 nt, Homo sapiens
  misc_RNA (1)...(19): siRNA sense strand
gaauuaacucuaccaaauc

SEQ ID NO: 1879142 - RNA, 19 nt, Homo sapiens
  misc_RNA (1)...(19): siRNA sense strand
caacauucuugaaccacuu

SEQ ID NO: 1879143 - RNA, 19 nt, Homo sapiens
  misc_RNA (1)...(19): siRNA sense strand
caucaggaauuaacucuac

SEQ ID NO: 1879144 - RNA, 19 nt, Homo sapiens
  misc_RNA (1)...(19): siRNA sense strand
gagagaggcaucuuuaucu

SEQ ID NO: 1879145 - RNA, 19 nt, Homo sapiens
  misc_RNA (1)...(19): siRNA sense strand
gaaguuccaucaucaucag

SEQ ID NO: 1879146 - RNA, 19 nt, Homo sapiens
  misc_RNA (1)...(19): siRNA sense strand
ccauuuggaugcaaggauu

SEQ ID NO: 1879147 - RNA, 19 nt, Homo sapiens
  misc_RNA (1)...(19): siRNA sense strand
ggaacaagacaauauuaag

SEQ ID NO: 1879148 - RNA, 19 nt, Homo sapiens
  misc_RNA (1)...(19): siRNA sense strand
cuagagauauggcaaagag

SEQ ID NO: 1879149 - RNA, 19 nt, Homo sapiens
  misc_RNA (1)...(19): siRNA sense strand
ucaagaggcugaguugcuu

SEQ ID NO: 1879150 - RNA, 19 nt, Homo sapiens
  misc_RNA (1)...(19): siRNA sense strand
gaugacugguggaaucuuc

SEQ ID NO: 1879151 - RNA, 19 nt, Homo sapiens
  misc_RNA (1)...(19): siRNA sense strand
agaaaagucuucaggaaaa

SEQ ID NO: 1879152 - RNA, 19 nt, Homo sapiens
  misc_RNA (1)...(19): siRNA sense strand
gaagauaugggagaccuau

SEQ ID NO: 1879153 - RNA, 19 nt, Homo sapiens
  misc_RNA (1)...(19): siRNA sense strand
aauguuaccugcacuauac

SEQ ID NO: 1879154 - RNA, 19 nt, Homo sapiens
  misc_RNA (1)...(19): siRNA sense strand
gagagaaugaagaugauga

SEQ ID NO: 1879155 - RNA, 19 nt, Homo sapiens
  misc_RNA (1)...(19): siRNA sense strand
acagaauccugaagauaug

SEQ ID NO: 1879156 - RNA, 19 nt, Homo sapiens
  misc_RNA (1)...(19): siRNA sense strand
caacacuaguagaacagaa

SEQ ID NO: 1879157 - RNA, 19 nt, Homo sapiens
  misc_RNA (1)...(19): siRNA sense strand
ccaaaucccaagacaaaga

SEQ ID NO: 1879158 - RNA, 19 nt, Homo sapiens
  misc_RNA (1)...(19): siRNA sense strand
gagccauucucuacucuag

SEQ ID NO: 1879159 - RNA, 19 nt, Homo sapiens
  misc_RNA (1)...(19): siRNA sense strand
gagaaaaggccucggagua

SEQ ID NO: 1879160 - RNA, 19 nt, Homo sapiens
  misc_RNA (1)...(19): siRNA sense strand
gcaccucagaagagaauaa

SEQ ID NO: 1879161 - RNA, 19 nt, Homo sapiens
  misc_RNA (1)...(19): siRNA sense strand
uaaucgauaccucaguuua

SEQ ID NO: 1879162 - RNA, 19 nt, Homo sapiens
  misc_RNA (1)...(19): siRNA sense strand
ugacgaaccucucuauagc

SEQ ID NO: 1879163 - RNA, 19 nt, Homo sapiens
  misc_RNA (1)...(19): siRNA sense strand
uaugugaccuaucccgauu

SEQ ID NO: 1879164 - RNA, 19 nt, Homo sapiens
  misc_RNA (1)...(19): siRNA sense strand
ugggagcgaucaagccuuu

SEQ ID NO: 1879165 - RNA, 19 nt, Homo sapiens
  misc_RNA (1)...(19): siRNA sense strand
caaaauguaugguuaugug

SEQ ID NO: 1879166 - RNA, 19 nt, Homo sapiens
  misc_RNA (1)...(19): siRNA sense strand
gcaaggaggugcucgauuc

SEQ ID NO: 1879167 - RNA, 19 nt, Homo sapiens
  misc_RNA (1)...(19): siRNA sense strand
gaaggaaucagucauguaa

SEQ ID NO: 1879168 - RNA, 19 nt, Homo sapiens
  misc_RNA (1)...(19): siRNA sense strand
ggauguggguuuacucuuu

SEQ ID NO: 1879169 - RNA, 19 nt, Homo sapiens
  misc_RNA (1)...(19): siRNA sense strand
gcacagagccugaguugau

SEQ ID NO: 1879170 - RNA, 19 nt, Homo sapiens
  misc_RNA (1)...(19): siRNA sense strand
gauggaggauguggguuua

SEQ ID NO: 1879171 - RNA, 19 nt, Homo sapiens
  misc_RNA (1)...(19): siRNA sense strand
gaacauccugggcuuggua

SEQ ID NO: 1879172 - RNA, 19 nt, Homo sapiens
  misc_RNA (1)...(19): siRNA sense strand
gaaauaucuucccuuccaa

SEQ ID NO: 1879173 - RNA, 19 nt, Homo sapiens
  misc_RNA (1)...(19): siRNA sense strand
agaaauaucuucccuucca

SEQ ID NO: 1879174 - RNA, 19 nt, Homo sapiens
  misc_RNA (1)...(19): siRNA sense strand
gauguggguuuacucuuug

SEQ ID NO: 1879175 - RNA, 19 nt, Homo sapiens
  misc_RNA (1)...(19): siRNA sense strand
gagaaggaaucagucaugu

SEQ ID NO: 1879176 - RNA, 19 nt, Homo sapiens
  misc_RNA (1)...(19): siRNA sense strand
ugauacaagugaagaguga

SEQ ID NO: 1879177 - RNA, 19 nt, Homo sapiens
  misc_RNA (1)...(19): siRNA sense strand
gcaagaucguggagaugga

SEQ ID NO: 1879178 - RNA, 19 nt, Homo sapiens
  misc_RNA (1)...(19): siRNA sense strand
cacagagccugaguugaua

SEQ ID NO: 1879179 - RNA, 19 nt, Homo sapiens
  misc_RNA (1)...(19): siRNA sense strand
gcacaucagccguuucauc

SEQ ID NO: 1879180 - RNA, 19 nt, Homo sapiens
  misc_RNA (1)...(19): siRNA sense strand
guucuggucuccuggauca

SEQ ID NO: 1879181 - RNA, 19 nt, Homo sapiens
  misc_RNA (1)...(19): siRNA sense strand
gcucauacucuaccaccua

SEQ ID NO: 1879182 - RNA, 19 nt, Homo sapiens
  misc_RNA (1)...(19): siRNA sense strand
ugaagugcguggaggagaa

SEQ ID NO: 1879183 - RNA, 19 nt, Homo sapiens
  misc_RNA (1)...(19): siRNA sense strand
ccaagcacaucagccguuu

SEQ ID NO: 1879184 - RNA, 19 nt, Homo sapiens
  misc_RNA (1)...(19): siRNA sense strand
cagcagccuuucgcucaua

SEQ ID NO: 1879185 - RNA, 19 nt, Homo sapiens
  misc_RNA (1)...(19): siRNA sense strand
guaccguccucaauguaga

SEQ ID NO: 1879186 - RNA, 19 nt, Homo sapiens
  misc_RNA (1)...(19): siRNA sense strand
gccuuucgcucauacucua

SEQ ID NO: 1879187 - RNA, 19 nt, Homo sapiens
  misc_RNA (1)...(19): siRNA sense strand
ucuccuggaucauguggua

SEQ ID NO: 1879188 - RNA, 19 nt, Homo sapiens
  misc_RNA (1)...(19): siRNA sense strand
gagccugaguugauacaag

SEQ ID NO: 1879189 - RNA, 19 nt, Homo sapiens
  misc_RNA (1)...(19): siRNA sense strand
ggucgccucugagaaggaa

SEQ ID NO: 1879190 - RNA, 19 nt, Homo sapiens
  misc_RNA (1)...(19): siRNA sense strand
caaugaggccaccaugguu

SEQ ID NO: 1879191 - RNA, 19 nt, Homo sapiens
  misc_RNA (1)...(19): siRNA sense strand
ccugguggcuggcaagauc

SEQ ID NO: 1879192 - RNA, 19 nt, Homo sapiens
  misc_RNA (1)...(19): siRNA sense strand
gaucuugcgagaaauaucu

SEQ ID NO: 1879193 - RNA, 19 nt, Homo sapiens
  misc_RNA (1)...(19): siRNA sense strand
ugagaaggaaucagucaug

SEQ ID NO: 1879194 - RNA, 19 nt, Homo sapiens
  misc_RNA (1)...(19): siRNA sense strand
uuugggaccucuuccaguu

SEQ ID NO: 1879195 - RNA, 19 nt, Homo sapiens
  misc_RNA (1)...(19): siRNA sense strand
uccuggaucuugcgagaaa

SEQ ID NO: 1879196 - RNA, 19 nt, Homo sapiens
  misc_RNA (1)...(19): siRNA sense strand
agaaggaaucagucaugua

SEQ ID NO: 1879197 - RNA, 19 nt, Homo sapiens
  misc_RNA (1)...(19): siRNA sense strand
aggaggugcucgauucguu

SEQ ID NO: 1879198 - RNA, 19 nt, Homo sapiens
  misc_RNA (1)...(19): siRNA sense strand
gaagcacagagccugaguu

SEQ ID NO: 1879199 - RNA, 19 nt, Homo sapiens
  misc_RNA (1)...(19): siRNA sense strand
ccuguaccguccucaaugu

SEQ ID NO: 1879200 - RNA, 19 nt, Homo sapiens
  misc_RNA (1)...(19): siRNA sense strand
ucaaugaggccaccauggu

SEQ ID NO: 1879201 - RNA, 19 nt, Homo sapiens
  misc_RNA (1)...(19): siRNA sense strand
ucguaaagaucaucaccau

SEQ ID NO: 1879202 - RNA, 19 nt, Homo sapiens
  misc_RNA (1)...(19): siRNA sense strand
gcgccaccgucaacaugga

SEQ ID NO: 1879203 - RNA, 19 nt, Homo sapiens
  misc_RNA (1)...(19): siRNA sense strand
ccucaucuacuuccucuuc

SEQ ID NO: 1879204 - RNA, 19 nt, Homo sapiens
  misc_RNA (1)...(19): siRNA sense strand
aagcacagagccugaguug

SEQ ID NO: 1879205 - RNA, 19 nt, Homo sapiens
  misc_RNA (1)...(19): siRNA sense strand
ucguggagauggaggaugu

SEQ ID NO: 1879206 - RNA, 19 nt, Homo sapiens
  misc_RNA (1)...(19): siRNA sense strand
uaugaagagaggaauauca

SEQ ID NO: 1879207 - RNA, 19 nt, Homo sapiens
  misc_RNA (1)...(19): siRNA sense strand
agauggaggauguggguuu

SEQ ID NO: 1879208 - RNA, 19 nt, Homo sapiens
  misc_RNA (1)...(19): siRNA sense strand
gaagugcguggaggagaau

SEQ ID NO: 1879209 - RNA, 19 nt, Homo sapiens
  misc_RNA (1)...(19): siRNA sense strand
gaggauguggguuuacucu

SEQ ID NO: 1879210 - RNA, 19 nt, Homo sapiens
  misc_RNA (1)...(19): siRNA sense strand
cuugagcgccuucgucuuc

SEQ ID NO: 1879211 - RNA, 19 nt, Homo sapiens
  misc_RNA (1)...(19): siRNA sense strand
aagcacaucagccguuuca

SEQ ID NO: 1879212 - RNA, 19 nt, Homo sapiens
  misc_RNA (1)...(19): siRNA sense strand
ccuaugaagagaggaauau

SEQ ID NO: 1879213 - RNA, 19 nt, Homo sapiens
  misc_RNA (1)...(19): siRNA sense strand
cuuauccgcuucuucaacu

SEQ ID NO: 1879214 - RNA, 19 nt, Homo sapiens
  misc_RNA (1)...(19): siRNA sense strand
cugcuuauccgcuucuuca

SEQ ID NO: 1879215 - RNA, 19 nt, Homo sapiens
  misc_RNA (1)...(19): siRNA sense strand
gcguggaggagaauaaugg

SEQ ID NO: 1879216 - RNA, 19 nt, Homo sapiens
  misc_RNA (1)...(19): siRNA sense strand
ccuuggacuucguaaagau

SEQ ID NO: 1879217 - RNA, 19 nt, Homo sapiens
  misc_RNA (1)...(19): siRNA sense strand
ccaagcaacugaucuauuu

SEQ ID NO: 1879218 - RNA, 19 nt, Homo sapiens
  misc_RNA (1)...(19): siRNA sense strand
gcucauuucuucagcuuua

SEQ ID NO: 1879219 - RNA, 19 nt, Homo sapiens
  misc_RNA (1)...(19): siRNA sense strand
guacaucuccaucuuauuu

SEQ ID NO: 1879220 - RNA, 19 nt, Homo sapiens
  misc_RNA (1)...(19): siRNA sense strand
caacacagcugcaguuaac

SEQ ID NO: 1879221 - RNA, 19 nt, Homo sapiens
  misc_RNA (1)...(19): siRNA sense strand
caacugaucuauuugaacu

SEQ ID NO: 1879222 - RNA, 19 nt, Homo sapiens
  misc_RNA (1)...(19): siRNA sense strand
gaggcucccugguggauuu

SEQ ID NO: 1879223 - RNA, 19 nt, Homo sapiens
  misc_RNA (1)...(19): siRNA sense strand
gcuggagggugaagaagaa

SEQ ID NO: 1879224 - RNA, 19 nt, Homo sapiens
  misc_RNA (1)...(19): siRNA sense strand
ugaagaagaacaaggagua

SEQ ID NO: 1879225 - RNA, 19 nt, Homo sapiens
  misc_RNA (1)...(19): siRNA sense strand
guacagcgccuacuucaag

SEQ ID NO: 1879226 - RNA, 19 nt, Homo sapiens
  misc_RNA (1)...(19): siRNA sense strand
gcagaucuuuguggacuau

SEQ ID NO: 1879227 - RNA, 19 nt, Homo sapiens
  misc_RNA (1)...(19): siRNA sense strand
gcaaugccauccucaucau

SEQ ID NO: 1879228 - RNA, 19 nt, Homo sapiens
  misc_RNA (1)...(19): siRNA sense strand
ucaacaaguuccuggagaa

SEQ ID NO: 1879229 - RNA, 19 nt, Homo sapiens
  misc_RNA (1)...(19): siRNA sense strand
ccugguggauuucauuaaa

SEQ ID NO: 1879230 - RNA, 19 nt, Homo sapiens
  misc_RNA (1)...(19): siRNA sense strand
ccaccuuccucaacaaguu

SEQ ID NO: 1879231 - RNA, 19 nt, Homo sapiens
  misc_RNA (1)...(19): siRNA sense strand
gcuuugggcucuccaguuc

SEQ ID NO: 1879232 - RNA, 19 nt, Homo sapiens
  misc_RNA (1)...(19): siRNA sense strand
gcacaucaaguucuauaca

SEQ ID NO: 1879233 - RNA, 19 nt, Homo sapiens
  misc_RNA (1)...(19): siRNA sense strand
ugaaugagaucagcaaugc

SEQ ID NO: 1879234 - RNA, 19 nt, Homo sapiens
  misc_RNA (1)...(19): siRNA sense strand
gggauccgcuucagcaaag

SEQ ID NO: 1879235 - RNA, 19 nt, Homo sapiens
  misc_RNA (1)...(19): siRNA sense strand
ggaccugccucccaguaag

SEQ ID NO: 1879236 - RNA, 19 nt, Homo sapiens
  misc_RNA (1)...(19): siRNA sense strand
gcagcaacaucaacaugag

SEQ ID NO: 1879237 - RNA, 19 nt, Homo sapiens
  misc_RNA (1)...(19): siRNA sense strand
ggucucauuuccagcuuga

SEQ ID NO: 1879238 - RNA, 19 nt, Homo sapiens
  misc_RNA (1)...(19): siRNA sense strand
ccuagcacaucaaguucua

SEQ ID NO: 1879239 - RNA, 19 nt, Homo sapiens
  misc_RNA (1)...(19): siRNA sense strand
cauuugggaucuccuaugu

SEQ ID NO: 1879240 - RNA, 19 nt, Homo sapiens
  misc_RNA (1)...(19): siRNA sense strand
uggcuaggccugcucauuu

SEQ ID NO: 1879241 - RNA, 19 nt, Homo sapiens
  misc_RNA (1)...(19): siRNA sense strand
gauccuuuguguuccuuug

SEQ ID NO: 1879242 - RNA, 19 nt, Homo sapiens
  misc_RNA (1)...(19): siRNA sense strand
uaugccaacuuccucauug

SEQ ID NO: 1879243 - RNA, 19 nt, Homo sapiens
  misc_RNA (1)...(19): siRNA sense strand
caucuuauuugccaucucu

SEQ ID NO: 1879244 - RNA, 19 nt, Homo sapiens
  misc_RNA (1)...(19): siRNA sense strand
gcaugcugcugcuuugcuu

SEQ ID NO: 1879245 - RNA, 19 nt, Homo sapiens
  misc_RNA (1)...(19): siRNA sense strand
ggucaacacagcugcaguu

SEQ ID NO: 1879246 - RNA, 19 nt, Homo sapiens
  misc_RNA (1)...(19): siRNA sense strand
uauugguucucaccucuuu

SEQ ID NO: 1879247 - RNA, 19 nt, Homo sapiens
  misc_RNA (1)...(19): siRNA sense strand
uagcacaucaaguucuaua

SEQ ID NO: 1879248 - RNA, 19 nt, Homo sapiens
  misc_RNA (1)...(19): siRNA sense strand
cuauguggaugacuucuca

SEQ ID NO: 1879249 - RNA, 19 nt, Homo sapiens
  misc_RNA (1)...(19): siRNA sense strand
gagacaauggaaucgagua

SEQ ID NO: 1879250 - RNA, 19 nt, Homo sapiens
  misc_RNA (1)...(19): siRNA sense strand
ucuccgagcccuaccagua

SEQ ID NO: 1879251 - RNA, 19 nt, Homo sapiens
  misc_RNA (1)...(19): siRNA sense strand
gggaugcuguuuggaggaa

SEQ ID NO: 1879252 - RNA, 19 nt, Homo sapiens
  misc_RNA (1)...(19): siRNA sense strand
ggcuaggccugcucauuuc

SEQ ID NO: 1879253 - RNA, 19 nt, Homo sapiens
  misc_RNA (1)...(19): siRNA sense strand
ugccaucucuguauuugga

SEQ ID NO: 1879254 - RNA, 19 nt, Homo sapiens
  misc_RNA (1)...(19): siRNA sense strand
caacuguggccgaagucua

SEQ ID NO: 1879255 - RNA, 19 nt, Homo sapiens
  misc_RNA (1)...(19): siRNA sense strand
ggacugcucgugcccagau

SEQ ID NO: 1879256 - RNA, 19 nt, Homo sapiens
  misc_RNA (1)...(19): siRNA sense strand
ggaggaggccaagucaaga

SEQ ID NO: 1879257 - RNA, 19 nt, Homo sapiens
  misc_RNA (1)...(19): siRNA sense strand
gcagcgacaccucuacuag

SEQ ID NO: 1879258 - RNA, 19 nt, Homo sapiens
  misc_RNA (1)...(19): siRNA sense strand
gcucgugcccagauucuau

SEQ ID NO: 1879259 - RNA, 19 nt, Homo sapiens
  misc_RNA (1)...(19): siRNA sense strand
gcagaugaagcaaggaagu

SEQ ID NO: 1879260 - RNA, 19 nt, Homo sapiens
  misc_RNA (1)...(19): siRNA sense strand
cacaucaaguucuauacau

SEQ ID NO: 1879261 - RNA, 19 nt, Homo sapiens
  misc_RNA (1)...(19): siRNA sense strand
acaaguuccuggagaagca

SEQ ID NO: 1879262 - RNA, 19 nt, Homo sapiens
  misc_RNA (1)...(19): siRNA sense strand
gcaccguccacgucugauu

SEQ ID NO: 1879263 - RNA, 19 nt, Homo sapiens
  misc_RNA (1)...(19): siRNA sense strand
ggagggugaagaagaacaa

SEQ ID NO: 1879264 - RNA, 19 nt, Homo sapiens
  misc_RNA (1)...(19): siRNA sense strand
gcucuaucaugcugcagau

SEQ ID NO: 1879265 - RNA, 19 nt, Homo sapiens
  misc_RNA (1)...(19): siRNA sense strand
agaagaacaaggaguacaa

SEQ ID NO: 1879266 - RNA, 19 nt, Homo sapiens
  misc_RNA (1)...(19): siRNA sense strand
caccuucuccuccgucauu

SEQ ID NO: 1879267 - RNA, 19 nt, Homo sapiens
  misc_RNA (1)...(19): siRNA sense strand
gcaaugcccauaggagcaa

SEQ ID NO: 1879268 - RNA, 19 nt, Homo sapiens
  misc_RNA (1)...(19): siRNA sense strand
uuucuucccucgagcaaug

SEQ ID NO: 1879269 - RNA, 19 nt, Homo sapiens
  misc_RNA (1)...(19): siRNA sense strand
cuguacaucuccaucuuau

SEQ ID NO: 1879270 - RNA, 19 nt, Homo sapiens
  misc_RNA (1)...(19): siRNA sense strand
ucaacacagcugcaguuaa

SEQ ID NO: 1879271 - RNA, 19 nt, Homo sapiens
  misc_RNA (1)...(19): siRNA sense strand
ccuguacaucuccaucuua

SEQ ID NO: 1879272 - RNA, 19 nt, Homo sapiens
  misc_RNA (1)...(19): siRNA sense strand
gaagaagaacaaggaguac

SEQ ID NO: 1879273 - RNA, 19 nt, Homo sapiens
  misc_RNA (1)...(19): siRNA sense strand
gggccugcgccuacuauga

SEQ ID NO: 1879274 - RNA, 19 nt, Homo sapiens
  misc_RNA (1)...(19): siRNA sense strand
aagcaacugaucuauuuga

SEQ ID NO: 1879275 - RNA, 19 nt, Homo sapiens
  misc_RNA (1)...(19): siRNA sense strand
cagcugcaguuaacuuggu

SEQ ID NO: 1879276 - RNA, 19 nt, Homo sapiens
  misc_RNA (1)...(19): siRNA sense strand
uauuugccaucucuguauu

SEQ ID NO: 1879277 - RNA, 19 nt, Homo sapiens
  misc_RNA (1)...(19): siRNA sense strand
uuucugaggcuccugauga

SEQ ID NO: 1879278 - RNA, 19 nt, Homo sapiens
  misc_RNA (1)...(19): siRNA sense strand
ccaucuccaugauccuuug

SEQ ID NO: 1879279 - RNA, 19 nt, Homo sapiens
  misc_RNA (1)...(19): siRNA sense strand
ucuccuauguggaugacuu

SEQ ID NO: 1879280 - RNA, 19 nt, Homo sapiens
  misc_RNA (1)...(19): siRNA sense strand
gggugaagaagaacaagga

SEQ ID NO: 1879281 - RNA, 19 nt, Homo sapiens
  misc_RNA (1)...(19): siRNA sense strand
acaucaaguucuauacauc

SEQ ID NO: 1879282 - RNA, 19 nt, Homo sapiens
  misc_RNA (1)...(19): siRNA sense strand
gaugcuguuuggaggaauc

SEQ ID NO: 1879283 - RNA, 19 nt, Homo sapiens
  misc_RNA (1)...(19): siRNA sense strand
cagcagaugaagcaaggaa

SEQ ID NO: 1879284 - RNA, 19 nt, Homo sapiens
  misc_RNA (1)...(19): siRNA sense strand
uccaugauccuuuguguuc

SEQ ID NO: 1879285 - RNA, 19 nt, Homo sapiens
  misc_RNA (1)...(19): siRNA sense strand
gagcagccucaccaccauu

SEQ ID NO: 1879286 - RNA, 19 nt, Homo sapiens
  misc_RNA (1)...(19): siRNA sense strand
caucuuugucagcuacuuu

SEQ ID NO: 1879287 - RNA, 19 nt, Homo sapiens
  misc_RNA (1)...(19): siRNA sense strand
gaagaacaaggaguacaac

SEQ ID NO: 1879288 - RNA, 19 nt, Homo sapiens
  misc_RNA (1)...(19): siRNA sense strand
gggugcaguucuuguugau

SEQ ID NO: 1879289 - RNA, 19 nt, Homo sapiens
  misc_RNA (1)...(19): siRNA sense strand
gcauagcuaccaccaucau

SEQ ID NO: 1879290 - RNA, 19 nt, Homo sapiens
  misc_RNA (1)...(19): siRNA sense strand
cucaugaagcgcuuuguuu

SEQ ID NO: 1879291 - RNA, 19 nt, Homo sapiens
  misc_RNA (1)...(19): siRNA sense strand
acacagcugcaguuaacuu

SEQ ID NO: 1879292 - RNA, 19 nt, Homo sapiens
  misc_RNA (1)...(19): siRNA sense strand
gguaccugcugggcucuau

SEQ ID NO: 1879293 - RNA, 19 nt, Homo sapiens
  misc_RNA (1)...(19): siRNA sense strand
gucaacacagcugcaguua

SEQ ID NO: 1879294 - RNA, 19 nt, Homo sapiens
  misc_RNA (1)...(19): siRNA sense strand
cagcaaugccauccucauc

SEQ ID NO: 1879295 - RNA, 19 nt, Homo sapiens
  misc_RNA (1)...(19): siRNA sense strand
ccuccaagcaacugaucua

SEQ ID NO: 1879296 - RNA, 19 nt, Homo sapiens
  misc_RNA (1)...(19): siRNA sense strand
ccucauuggugcugugaac

SEQ ID NO: 1879297 - RNA, 19 nt, Homo sapiens
  misc_RNA (1)...(19): siRNA sense strand
cagaugaagcaaggaaguu

SEQ ID NO: 1879298 - RNA, 19 nt, Homo sapiens
  misc_RNA (1)...(19): siRNA sense strand
gcaacugaucuauuugaac

SEQ ID NO: 1879299 - RNA, 19 nt, Homo sapiens
  misc_RNA (1)...(19): siRNA sense strand
caagcaacugaucuauuug

SEQ ID NO: 1879300 - RNA, 19 nt, Homo sapiens
  misc_RNA (1)...(19): siRNA sense strand
ggucuucggcaacauuaag

SEQ ID NO: 1879301 - RNA, 19 nt, Homo sapiens
  misc_RNA (1)...(19): siRNA sense strand
uucuucagcuuuauugguu

SEQ ID NO: 1879302 - RNA, 19 nt, Homo sapiens
  misc_RNA (1)...(19): siRNA sense strand
caugccggcugcagcaaca

SEQ ID NO: 1879303 - RNA, 19 nt, Homo sapiens
  misc_RNA (1)...(19): siRNA sense strand
uacagcgccuacuucaaga

SEQ ID NO: 1879304 - RNA, 19 nt, Homo sapiens
  misc_RNA (1)...(19): siRNA sense strand
ccacagcaccacccagaac

SEQ ID NO: 1879305 - RNA, 19 nt, Homo sapiens
  misc_RNA (1)...(19): siRNA sense strand
gaaccaggaggaaaaguca

SEQ ID NO: 1879306 - RNA, 19 nt, Homo sapiens
  misc_RNA (1)...(19): siRNA sense strand
uagccugcaucucccacaa

SEQ ID NO: 1879307 - RNA, 19 nt, Homo sapiens
  misc_RNA (1)...(19): siRNA sense strand
ccaucuuccucaucuccuu

SEQ ID NO: 1879308 - RNA, 19 nt, Homo sapiens
  misc_RNA (1)...(19): siRNA sense strand
gcucugcaaccuccaagca

SEQ ID NO: 1879309 - RNA, 19 nt, Homo sapiens
  misc_RNA (1)...(19): siRNA sense strand
acaauggaaucgaguaccu

SEQ ID NO: 1879310 - RNA, 19 nt, Homo sapiens
  misc_RNA (1)...(19): siRNA sense strand
caacaaguuccuggagaag

SEQ ID NO: 1879311 - RNA, 19 nt, Homo sapiens
  misc_RNA (1)...(19): siRNA sense strand
ggcagcgacaccucuacua

SEQ ID NO: 1879312 - RNA, 19 nt, Homo sapiens
  misc_RNA (1)...(19): siRNA sense strand
gugcaccguccacgucuga

SEQ ID NO: 1879313 - RNA, 19 nt, Homo sapiens
  misc_RNA (1)...(19): siRNA sense strand
cuaucaugcugcagaucuu

SEQ ID NO: 1879314 - RNA, 19 nt, Homo sapiens
  misc_RNA (1)...(19): siRNA sense strand
aaggagaccagcagcaugu

SEQ ID NO: 1879315 - RNA, 19 nt, Homo sapiens
  misc_RNA (1)...(19): siRNA sense strand
ccaaggcacucugggagaa

SEQ ID NO: 1879316 - RNA, 19 nt, Homo sapiens
  misc_RNA (1)...(19): siRNA sense strand
ccaaaaugcugaguucuaa

SEQ ID NO: 1879317 - RNA, 19 nt, Homo sapiens
  misc_RNA (1)...(19): siRNA sense strand
ugagugugcuggaggaaga

SEQ ID NO: 1879318 - RNA, 19 nt, Homo sapiens
  misc_RNA (1)...(19): siRNA sense strand
gcucgaggcuggucauggu

SEQ ID NO: 1879319 - RNA, 19 nt, Homo sapiens
  misc_RNA (1)...(19): siRNA sense strand
gaucaacugcuccgucuuc

SEQ ID NO: 1879320 - RNA, 19 nt, Homo sapiens
  misc_RNA (1)...(19): siRNA sense strand
gcacaagcccgaccucaac

SEQ ID NO: 1879321 - RNA, 19 nt, Homo sapiens
  misc_RNA (1)...(19): siRNA sense strand
acaugaagguggacgauuc

SEQ ID NO: 1879322 - RNA, 19 nt, Homo sapiens
  misc_RNA (1)...(19): siRNA sense strand
gauggaguacggcgacuuu

SEQ ID NO: 1879323 - RNA, 19 nt, Homo sapiens
  misc_RNA (1)...(19): siRNA sense strand
ccaagugcacgcucagaaa

SEQ ID NO: 1879324 - RNA, 19 nt, Homo sapiens
  misc_RNA (1)...(19): siRNA sense strand
ggagacaccgugcguuaca

SEQ ID NO: 1879325 - RNA, 19 nt, Homo sapiens
  misc_RNA (1)...(19): siRNA sense strand
gugagggcaugaccugcua

SEQ ID NO: 1879326 - RNA, 19 nt, Homo sapiens
  misc_RNA (1)...(19): siRNA sense strand
cugcacggcuccuacuuug

SEQ ID NO: 1879327 - RNA, 19 nt, Homo sapiens
  misc_RNA (1)...(19): siRNA sense strand
ccggagacaccgugcguua

SEQ ID NO: 1879328 - RNA, 19 nt, Homo sapiens
  misc_RNA (1)...(19): siRNA sense strand
ggguggcccucaucgagaa

SEQ ID NO: 1879329 - RNA, 19 nt, Homo sapiens
  misc_RNA (1)...(19): siRNA sense strand
gggcaugaccugcuacuac

SEQ ID NO: 1879330 - RNA, 19 nt, Homo sapiens
  misc_RNA (1)...(19): siRNA sense strand
gaggaagcagguccaguga

SEQ ID NO: 1879331 - RNA, 19 nt, Homo sapiens
  misc_RNA (1)...(19): siRNA sense strand
agaaggcgcuggccaagcu

SEQ ID NO: 1879332 - RNA, 19 nt, Homo sapiens
  misc_RNA (1)...(19): siRNA sense strand
gcagugagggugucuucug

SEQ ID NO: 1879333 - RNA, 19 nt, Homo sapiens
  misc_RNA (1)...(19): siRNA sense strand
cguccacccugcagaacaa

SEQ ID NO: 1879334 - RNA, 19 nt, Homo sapiens
  misc_RNA (1)...(19): siRNA sense strand
ggaguacggcgacuuuguc

SEQ ID NO: 1879335 - RNA, 19 nt, Homo sapiens
  misc_RNA (1)...(19): siRNA sense strand
gcugcacggcuccuacuuu

SEQ ID NO: 1879336 - RNA, 19 nt, Homo sapiens
  misc_RNA (1)...(19): siRNA sense strand
gugagggugucuucuggau

SEQ ID NO: 1879337 - RNA, 19 nt, Homo sapiens
  misc_RNA (1)...(19): siRNA sense strand
gggagaacaaugugagcuu

SEQ ID NO: 1879338 - RNA, 19 nt, Homo sapiens
  misc_RNA (1)...(19): siRNA sense strand
gccaagugcacgcucagaa

SEQ ID NO: 1879339 - RNA, 19 nt, Homo sapiens
  misc_RNA (1)...(19): siRNA sense strand
gaucuugucccagcuagag

SEQ ID NO: 1879340 - RNA, 19 nt, Homo sapiens
  misc_RNA (1)...(19): siRNA sense strand
gcguggaggagcagaaaug

SEQ ID NO: 1879341 - RNA, 19 nt, Homo sapiens
  misc_RNA (1)...(19): siRNA sense strand
gacaugcugcccugugaug

SEQ ID NO: 1879342 - RNA, 19 nt, Homo sapiens
  misc_RNA (1)...(19): siRNA sense strand
acgacaugcugcccuguga

SEQ ID NO: 1879343 - RNA, 19 nt, Homo sapiens
  misc_RNA (1)...(19): siRNA sense strand
acaaggacgaggaggagaa

SEQ ID NO: 1879344 - RNA, 19 nt, Homo sapiens
  misc_RNA (1)...(19): siRNA sense strand
gaccucaucugggccaaaa

SEQ ID NO: 1879345 - RNA, 19 nt, Homo sapiens
  misc_RNA (1)...(19): siRNA sense strand
ggcacaagcccgaccucaa

SEQ ID NO: 1879346 - RNA, 19 nt, Homo sapiens
  misc_RNA (1)...(19): siRNA sense strand
cguugacacugaccucauc

SEQ ID NO: 1879347 - RNA, 19 nt, Homo sapiens
  misc_RNA (1)...(19): siRNA sense strand
gcaccgacagcuucaacgu

SEQ ID NO: 1879348 - RNA, 19 nt, Homo sapiens
  misc_RNA (1)...(19): siRNA sense strand
gaccugcuacuaccugaca

SEQ ID NO: 1879349 - RNA, 19 nt, Homo sapiens
  misc_RNA (1)...(19): siRNA sense strand
caacaugaagguggacgau

SEQ ID NO: 1879350 - RNA, 19 nt, Homo sapiens
  misc_RNA (1)...(19): siRNA sense strand
caagugcacgcucagaaac

SEQ ID NO: 1879351 - RNA, 19 nt, Homo sapiens
  misc_RNA (1)...(19): siRNA sense strand
gaguacggcgacuuuguca

SEQ ID NO: 1879352 - RNA, 19 nt, Homo sapiens
  misc_RNA (1)...(19): siRNA sense strand
gggccaaaaugcugaguuc

SEQ ID NO: 1879353 - RNA, 19 nt, Homo sapiens
  misc_RNA (1)...(19): siRNA sense strand
caaccgaaauuugaaagaa

SEQ ID NO: 1879354 - RNA, 19 nt, Homo sapiens
  misc_RNA (1)...(19): siRNA sense strand
ggcagcaccuggagaagua

SEQ ID NO: 1879355 - RNA, 19 nt, Homo sapiens
  misc_RNA (1)...(19): siRNA sense strand
gaaguauccugacuacaag

SEQ ID NO: 1879356 - RNA, 19 nt, Homo sapiens
  misc_RNA (1)...(19): siRNA sense strand
ggacuucaaccgaaauuug

SEQ ID NO: 1879357 - RNA, 19 nt, Homo sapiens
  misc_RNA (1)...(19): siRNA sense strand
ggagaaguauccugacuac

SEQ ID NO: 1879358 - RNA, 19 nt, Homo sapiens
  misc_RNA (1)...(19): siRNA sense strand
cagcagauccagcagguua

SEQ ID NO: 1879359 - RNA, 19 nt, Homo sapiens
  misc_RNA (1)...(19): siRNA sense strand
gaacugcaccaucaaguca

SEQ ID NO: 1879360 - RNA, 19 nt, Homo sapiens
  misc_RNA (1)...(19): siRNA sense strand
caagagagccuagcagaga

SEQ ID NO: 1879361 - RNA, 19 nt, Homo sapiens
  misc_RNA (1)...(19): siRNA sense strand
agaagcagcccuacuauga

SEQ ID NO: 1879362 - RNA, 19 nt, Homo sapiens
  misc_RNA (1)...(19): siRNA sense strand
aaggagagguuucuaggaa

SEQ ID NO: 1879363 - RNA, 19 nt, Homo sapiens
  misc_RNA (1)...(19): siRNA sense strand
ggaaguccaugaccaacca

SEQ ID NO: 1879364 - RNA, 19 nt, Homo sapiens
  misc_RNA (1)...(19): siRNA sense strand
cgaaacagcagccacauca

SEQ ID NO: 1879365 - RNA, 19 nt, Homo sapiens
  misc_RNA (1)...(19): siRNA sense strand
cagcuggccuuacccauuc

SEQ ID NO: 1879366 - RNA, 19 nt, Homo sapiens
  misc_RNA (1)...(19): siRNA sense strand
agaaguauccugacuacaa

SEQ ID NO: 1879367 - RNA, 19 nt, Homo sapiens
  misc_RNA (1)...(19): siRNA sense strand
gcaaaccaguggaguaucc

SEQ ID NO: 1879368 - RNA, 19 nt, Homo sapiens
  misc_RNA (1)...(19): siRNA sense strand
gaaggagagguuucuagga

SEQ ID NO: 1879369 - RNA, 19 nt, Homo sapiens
  misc_RNA (1)...(19): siRNA sense strand
gaagagcgauggggaguug

SEQ ID NO: 1879370 - RNA, 19 nt, Homo sapiens
  misc_RNA (1)...(19): siRNA sense strand
ggagaagcagcccuacuau

SEQ ID NO: 1879371 - RNA, 19 nt, Homo sapiens
  misc_RNA (1)...(19): siRNA sense strand
ggaagccaaagaugucaaa

SEQ ID NO: 1879372 - RNA, 19 nt, Homo sapiens
  misc_RNA (1)...(19): siRNA sense strand
ugauucagcagcagcauaa

SEQ ID NO: 1879373 - RNA, 19 nt, Homo sapiens
  misc_RNA (1)...(19): siRNA sense strand
gagaagcagcccuacuaug

SEQ ID NO: 1879374 - RNA, 19 nt, Homo sapiens
  misc_RNA (1)...(19): siRNA sense strand
aagagagccuagcagagaa

SEQ ID NO: 1879375 - RNA, 19 nt, Homo sapiens
  misc_RNA (1)...(19): siRNA sense strand
gaaacagcagccacaucaa

SEQ ID NO: 1879376 - RNA, 19 nt, Homo sapiens
  misc_RNA (1)...(19): siRNA sense strand
agucagaggagaagaaaga

SEQ ID NO: 1879377 - RNA, 19 nt, Homo sapiens
  misc_RNA (1)...(19): siRNA sense strand
aggagaagcagcccuacua

SEQ ID NO: 1879378 - RNA, 19 nt, Homo sapiens
  misc_RNA (1)...(19): siRNA sense strand
caagucagaggagaagaaa

SEQ ID NO: 1879379 - RNA, 19 nt, Homo sapiens
  misc_RNA (1)...(19): siRNA sense strand
cagguuaacaugccuuaug

SEQ ID NO: 1879380 - RNA, 19 nt, Homo sapiens
  misc_RNA (1)...(19): siRNA sense strand
gaagcagcccuacuaugag

SEQ ID NO: 1879381 - RNA, 19 nt, Homo sapiens
  misc_RNA (1)...(19): siRNA sense strand
ccagcuggccuuacccauu

SEQ ID NO: 1879382 - RNA, 19 nt, Homo sapiens
  misc_RNA (1)...(19): siRNA sense strand
cugcaagccuucccagaca

SEQ ID NO: 1879383 - RNA, 19 nt, Homo sapiens
  misc_RNA (1)...(19): siRNA sense strand
ucaagucagaggagaagaa

SEQ ID NO: 1879384 - RNA, 19 nt, Homo sapiens
  misc_RNA (1)...(19): siRNA sense strand
aaacagcagccacaucaag

SEQ ID NO: 1879385 - RNA, 19 nt, Homo sapiens
  misc_RNA (1)...(19): siRNA sense strand
gaaguggugccagccauag

SEQ ID NO: 1879386 - RNA, 19 nt, Homo sapiens
  misc_RNA (1)...(19): siRNA sense strand
gaguacaaggcccugauga

SEQ ID NO: 1879387 - RNA, 19 nt, Homo sapiens
  misc_RNA (1)...(19): siRNA sense strand
agaagcuguuguccaguga

SEQ ID NO: 1879388 - RNA, 19 nt, Homo sapiens
  misc_RNA (1)...(19): siRNA sense strand
caacaccugcagccucaga

SEQ ID NO: 1879389 - RNA, 19 nt, Homo sapiens
  misc_RNA (1)...(19): siRNA sense strand
gcaagccuucccagacaug

SEQ ID NO: 1879390 - RNA, 19 nt, Homo sapiens
  misc_RNA (1)...(19): siRNA sense strand
cugccaugcuguuugagaa

SEQ ID NO: 1879391 - RNA, 19 nt, Homo sapiens
  misc_RNA (1)...(19): siRNA sense strand
aggagcagauugcaaagca

SEQ ID NO: 1879392 - RNA, 19 nt, Homo sapiens
  misc_RNA (1)...(19): siRNA sense strand
gaacucuauggaagccaaa

SEQ ID NO: 1879393 - RNA, 19 nt, Homo sapiens
  misc_RNA (1)...(19): siRNA sense strand
cagcagcagcauaagauca

SEQ ID NO: 1879394 - RNA, 19 nt, Homo sapiens
  misc_RNA (1)...(19): siRNA sense strand
agaaguggugccagccaua

SEQ ID NO: 1879395 - RNA, 19 nt, Homo sapiens
  misc_RNA (1)...(19): siRNA sense strand
gauccagcagguuaacaug

SEQ ID NO: 1879396 - RNA, 19 nt, Homo sapiens
  misc_RNA (1)...(19): siRNA sense strand
ccauagagaagcuguuguc

SEQ ID NO: 1879397 - RNA, 19 nt, Homo sapiens
  misc_RNA (1)...(19): siRNA sense strand
gguggcugauggcgagaug

SEQ ID NO: 1879398 - RNA, 19 nt, Homo sapiens
  misc_RNA (1)...(19): siRNA sense strand
aaccgaaauuugaaagaag

SEQ ID NO: 1879399 - RNA, 19 nt, Homo sapiens
  misc_RNA (1)...(19): siRNA sense strand
gagaguacaaggcccugau

SEQ ID NO: 1879400 - RNA, 19 nt, Homo sapiens
  misc_RNA (1)...(19): siRNA sense strand
agaagcagcagcagcagau

SEQ ID NO: 1879401 - RNA, 19 nt, Homo sapiens
  misc_RNA (1)...(19): siRNA sense strand
gcagcccuacuaugaggaa

SEQ ID NO: 1879402 - RNA, 19 nt, Homo sapiens
  misc_RNA (1)...(19): siRNA sense strand
ucccagacaugcacaacuc

SEQ ID NO: 1879403 - RNA, 19 nt, Homo sapiens
  misc_RNA (1)...(19): siRNA sense strand
ucaucagccuggacucauc

SEQ ID NO: 1879404 - RNA, 19 nt, Homo sapiens
  misc_RNA (1)...(19): siRNA sense strand
uauggaagccaaagauguc

SEQ ID NO: 1879405 - RNA, 19 nt, Homo sapiens
  misc_RNA (1)...(19): siRNA sense strand
uggcugauggcgagaugua

SEQ ID NO: 1879406 - RNA, 19 nt, Homo sapiens
  misc_RNA (1)...(19): siRNA sense strand
uauccugacuacaaguaca

SEQ ID NO: 1879407 - RNA, 19 nt, Homo sapiens
  misc_RNA (1)...(19): siRNA sense strand
ugaccaaccaggagaagca

SEQ ID NO: 1879408 - RNA, 19 nt, Homo sapiens
  misc_RNA (1)...(19): siRNA sense strand
ccugcaaaccaguggagua

SEQ ID NO: 1879409 - RNA, 19 nt, Homo sapiens
  misc_RNA (1)...(19): siRNA sense strand
uggagaaguauccugacua

SEQ ID NO: 1879410 - RNA, 19 nt, Homo sapiens
  misc_RNA (1)...(19): siRNA sense strand
cagaccaacucaugcuuca

SEQ ID NO: 1879411 - RNA, 19 nt, Homo sapiens
  misc_RNA (1)...(19): siRNA sense strand
gauguaaagucccugguua

SEQ ID NO: 1879412 - RNA, 19 nt, Homo sapiens
  misc_RNA (1)...(19): siRNA sense strand
gaagaaagccaaacgaagu

SEQ ID NO: 1879413 - RNA, 19 nt, Homo sapiens
  misc_RNA (1)...(19): siRNA sense strand
gccgagaucugacaacaaa

SEQ ID NO: 1879414 - RNA, 19 nt, Homo sapiens
  misc_RNA (1)...(19): siRNA sense strand
ggagaagugccuugucuuu

SEQ ID NO: 1879415 - RNA, 19 nt, Homo sapiens
  misc_RNA (1)...(19): siRNA sense strand
gaagugccuugucuuugaa

SEQ ID NO: 1879416 - RNA, 19 nt, Homo sapiens
  misc_RNA (1)...(19): siRNA sense strand
agaagugccuugucuuuga

SEQ ID NO: 1879417 - RNA, 19 nt, Homo sapiens
  misc_RNA (1)...(19): siRNA sense strand
cggcacagauuauaauaga

SEQ ID NO: 1879418 - RNA, 19 nt, Homo sapiens
  misc_RNA (1)...(19): siRNA sense strand
aagaggagcugguggaaga

SEQ ID NO: 1879419 - RNA, 19 nt, Homo sapiens
  misc_RNA (1)...(19): siRNA sense strand
gaaguuaaaggaaguguuc

SEQ ID NO: 1879420 - RNA, 19 nt, Homo sapiens
  misc_RNA (1)...(19): siRNA sense strand
ccagacaucuuccuagcuu

SEQ ID NO: 1879421 - RNA, 19 nt, Homo sapiens
  misc_RNA (1)...(19): siRNA sense strand
ggacggacuucuucuggau

SEQ ID NO: 1879422 - RNA, 19 nt, Homo sapiens
  misc_RNA (1)...(19): siRNA sense strand
gaaagccaaacgaaguuaa

SEQ ID NO: 1879423 - RNA, 19 nt, Homo sapiens
  misc_RNA (1)...(19): siRNA sense strand
ugaauucccugcaggacuu

SEQ ID NO: 1879424 - RNA, 19 nt, Homo sapiens
  misc_RNA (1)...(19): siRNA sense strand
aaacgaaguuaaaggaagu

SEQ ID NO: 1879425 - RNA, 19 nt, Homo sapiens
  misc_RNA (1)...(19): siRNA sense strand
acaaggaguucuucagcuu

SEQ ID NO: 1879426 - RNA, 19 nt, Homo sapiens
  misc_RNA (1)...(19): siRNA sense strand
uaaucgcuaugacaagaaa

SEQ ID NO: 1879427 - RNA, 19 nt, Homo sapiens
  misc_RNA (1)...(19): siRNA sense strand
gagccgagaucugacaaca

SEQ ID NO: 1879428 - RNA, 19 nt, Homo sapiens
  misc_RNA (1)...(19): siRNA sense strand
gaagacaagccgccacaag

SEQ ID NO: 1879429 - RNA, 19 nt, Homo sapiens
  misc_RNA (1)...(19): siRNA sense strand
gagaagugccuugucuuug

SEQ ID NO: 1879430 - RNA, 19 nt, Homo sapiens
  misc_RNA (1)...(19): siRNA sense strand
uguaaucgcuaugacaaga

SEQ ID NO: 1879431 - RNA, 19 nt, Homo sapiens
  misc_RNA (1)...(19): siRNA sense strand
gauuauaauagacgucuug

SEQ ID NO: 1879432 - RNA, 19 nt, Homo sapiens
  misc_RNA (1)...(19): siRNA sense strand
agcccgagcuguuugguuu

SEQ ID NO: 1879433 - RNA, 19 nt, Homo sapiens
  misc_RNA (1)...(19): siRNA sense strand
cggagaaacucaucaucca

SEQ ID NO: 1879434 - RNA, 19 nt, Homo sapiens
  misc_RNA (1)...(19): siRNA sense strand
ggauguaaagucccugguu

SEQ ID NO: 1879435 - RNA, 19 nt, Homo sapiens
  misc_RNA (1)...(19): siRNA sense strand
gccaaacgaaguuaaagga

SEQ ID NO: 1879436 - RNA, 19 nt, Homo sapiens
  misc_RNA (1)...(19): siRNA sense strand
uuagaggcggcacagauua

SEQ ID NO: 1879437 - RNA, 19 nt, Homo sapiens
  misc_RNA (1)...(19): siRNA sense strand
uguauucagugguguuuca

SEQ ID NO: 1879438 - RNA, 19 nt, Homo sapiens
  misc_RNA (1)...(19): siRNA sense strand
ccgcgucguucgauaugaa

SEQ ID NO: 1879439 - RNA, 19 nt, Homo sapiens
  misc_RNA (1)...(19): siRNA sense strand
gaggcggcacagauuauaa

SEQ ID NO: 1879440 - RNA, 19 nt, Homo sapiens
  misc_RNA (1)...(19): siRNA sense strand
ccaaacgaaguuaaaggaa

SEQ ID NO: 1879441 - RNA, 19 nt, Homo sapiens
  misc_RNA (1)...(19): siRNA sense strand
gacuucuucuggauacuga

SEQ ID NO: 1879442 - RNA, 19 nt, Homo sapiens
  misc_RNA (1)...(19): siRNA sense strand
gguuugcccuccuaugagu

SEQ ID NO: 1879443 - RNA, 19 nt, Homo sapiens
  misc_RNA (1)...(19): siRNA sense strand
guaaagucccugguuaugg

SEQ ID NO: 1879444 - RNA, 19 nt, Homo sapiens
  misc_RNA (1)...(19): siRNA sense strand
gaaauauguaaucgcuaug

SEQ ID NO: 1879445 - RNA, 19 nt, Homo sapiens
  misc_RNA (1)...(19): siRNA sense strand
caaagaggagcugguggaa

SEQ ID NO: 1879446 - RNA, 19 nt, Homo sapiens
  misc_RNA (1)...(19): siRNA sense strand
gaugcaggcggucaugguu

SEQ ID NO: 1879447 - RNA, 19 nt, Homo sapiens
  misc_RNA (1)...(19): siRNA sense strand
agacaagccgccacaagga

SEQ ID NO: 1879448 - RNA, 19 nt, Homo sapiens
  misc_RNA (1)...(19): siRNA sense strand
agaaagccaaacgaaguua

SEQ ID NO: 1879449 - RNA, 19 nt, Homo sapiens
  misc_RNA (1)...(19): siRNA sense strand
aaagccaaacgaaguuaaa

SEQ ID NO: 1879450 - RNA, 19 nt, Homo sapiens
  misc_RNA (1)...(19): siRNA sense strand
uauguaaucgcuaugacaa

SEQ ID NO: 1879451 - RNA, 19 nt, Homo sapiens
  misc_RNA (1)...(19): siRNA sense strand
acauugugcugggagauga

SEQ ID NO: 1879452 - RNA, 19 nt, Homo sapiens
  misc_RNA (1)...(19): siRNA sense strand
uggaagaaagccaaacgaa

SEQ ID NO: 1879453 - RNA, 19 nt, Homo sapiens
  misc_RNA (1)...(19): siRNA sense strand
auucagugguguuucaaga

SEQ ID NO: 1879454 - RNA, 19 nt, Homo sapiens
  misc_RNA (1)...(19): siRNA sense strand
guaaucgcuaugacaagaa

SEQ ID NO: 1879455 - RNA, 19 nt, Homo sapiens
  misc_RNA (1)...(19): siRNA sense strand
aagaaagccaaacgaaguu

SEQ ID NO: 1879456 - RNA, 19 nt, Homo sapiens
  misc_RNA (1)...(19): siRNA sense strand
gacggacuucuucuggaua

SEQ ID NO: 1879457 - RNA, 19 nt, Homo sapiens
  misc_RNA (1)...(19): siRNA sense strand
gcuaugacaagaaauacag

SEQ ID NO: 1879458 - RNA, 19 nt, Homo sapiens
  misc_RNA (1)...(19): siRNA sense strand
gaggagcugguggaagaaa

SEQ ID NO: 1879459 - RNA, 19 nt, Homo sapiens
  misc_RNA (1)...(19): siRNA sense strand
ggcggcacagauuauaaua

SEQ ID NO: 1879460 - RNA, 19 nt, Homo sapiens
  misc_RNA (1)...(19): siRNA sense strand
cauuagaggcggcacagau

SEQ ID NO: 1879461 - RNA, 19 nt, Homo sapiens
  misc_RNA (1)...(19): siRNA sense strand
caagccagacccagacauc

SEQ ID NO: 1879462 - RNA, 19 nt, Homo sapiens
  misc_RNA (1)...(19): siRNA sense strand
ggacuucuucuggauacug

SEQ ID NO: 1879463 - RNA, 19 nt, Homo sapiens
  misc_RNA (1)...(19): siRNA sense strand
aaacauggcauccccuuug

SEQ ID NO: 1879464 - RNA, 19 nt, Homo sapiens
  misc_RNA (1)...(19): siRNA sense strand
cuuugaagaugcucccaau

SEQ ID NO: 1879465 - RNA, 19 nt, Homo sapiens
  misc_RNA (1)...(19): siRNA sense strand
uagaggcggcacagauuau

SEQ ID NO: 1879466 - RNA, 19 nt, Homo sapiens
  misc_RNA (1)...(19): siRNA sense strand
gguccgcgucguucgauau

SEQ ID NO: 1879467 - RNA, 19 nt, Homo sapiens
  misc_RNA (1)...(19): siRNA sense strand
gccagacccagacaucuuc

SEQ ID NO: 1879468 - RNA, 19 nt, Homo sapiens
  misc_RNA (1)...(19): siRNA sense strand
agaaauacagcugggaugu

SEQ ID NO: 1879469 - RNA, 19 nt, Homo sapiens
  misc_RNA (1)...(19): siRNA sense strand
ggaaggagguggaaagaaa

SEQ ID NO: 1879470 - RNA, 19 nt, Homo sapiens
  misc_RNA (1)...(19): siRNA sense strand
gauaagauguauucaccua

SEQ ID NO: 1879471 - RNA, 19 nt, Homo sapiens
  misc_RNA (1)...(19): siRNA sense strand
gaguagaucuccaguaaga

SEQ ID NO: 1879472 - RNA, 19 nt, Homo sapiens
  misc_RNA (1)...(19): siRNA sense strand
gauaaucgguucagcaaca

SEQ ID NO: 1879473 - RNA, 19 nt, Homo sapiens
  misc_RNA (1)...(19): siRNA sense strand
aaagacagauugaacaaga

SEQ ID NO: 1879474 - RNA, 19 nt, Homo sapiens
  misc_RNA (1)...(19): siRNA sense strand
aaagcaagaugaagacaaa

SEQ ID NO: 1879475 - RNA, 19 nt, Homo sapiens
  misc_RNA (1)...(19): siRNA sense strand
aagauacucuccuccaaua

SEQ ID NO: 1879476 - RNA, 19 nt, Homo sapiens
  misc_RNA (1)...(19): siRNA sense strand
aaagaaagcagcagagaaa

SEQ ID NO: 1879477 - RNA, 19 nt, Homo sapiens
  misc_RNA (1)...(19): siRNA sense strand
caagagacguucaccuuca

SEQ ID NO: 1879478 - RNA, 19 nt, Homo sapiens
  misc_RNA (1)...(19): siRNA sense strand
ucccaaaccugaaccuaua

SEQ ID NO: 1879479 - RNA, 19 nt, Homo sapiens
  misc_RNA (1)...(19): siRNA sense strand
caaagaagccucccaagag

SEQ ID NO: 1879480 - RNA, 19 nt, Homo sapiens
  misc_RNA (1)...(19): siRNA sense strand
ugaagaugauguugugauu

SEQ ID NO: 1879481 - RNA, 19 nt, Homo sapiens
  misc_RNA (1)...(19): siRNA sense strand
gaagaugaacgacccaaga

SEQ ID NO: 1879482 - RNA, 19 nt, Homo sapiens
  misc_RNA (1)...(19): siRNA sense strand
uaagauguauucaccuaga

SEQ ID NO: 1879483 - RNA, 19 nt, Homo sapiens
  misc_RNA (1)...(19): siRNA sense strand
caaagaagcuccccaguca

SEQ ID NO: 1879484 - RNA, 19 nt, Homo sapiens
  misc_RNA (1)...(19): siRNA sense strand
cccaagagaucccauguga

SEQ ID NO: 1879485 - RNA, 19 nt, Homo sapiens
  misc_RNA (1)...(19): siRNA sense strand
gcagagacgccaauacaga

SEQ ID NO: 1879486 - RNA, 19 nt, Homo sapiens
  misc_RNA (1)...(19): siRNA sense strand
ggaaauccuuggguuugaa

SEQ ID NO: 1879487 - RNA, 19 nt, Homo sapiens
  misc_RNA (1)...(19): siRNA sense strand
aagaugauguugugauuga

SEQ ID NO: 1879488 - RNA, 19 nt, Homo sapiens
  misc_RNA (1)...(19): siRNA sense strand
ggacaugagcaaaguaaau

SEQ ID NO: 1879489 - RNA, 19 nt, Homo sapiens
  misc_RNA (1)...(19): siRNA sense strand
acauaaagguacugagaaa

SEQ ID NO: 1879490 - RNA, 19 nt, Homo sapiens
  misc_RNA (1)...(19): siRNA sense strand
gaagaacuccgccaagaag

SEQ ID NO: 1879491 - RNA, 19 nt, Homo sapiens
  misc_RNA (1)...(19): siRNA sense strand
gagagaaagcgcagucauu

SEQ ID NO: 1879492 - RNA, 19 nt, Homo sapiens
  misc_RNA (1)...(19): siRNA sense strand
caagagaucccaugugaag

SEQ ID NO: 1879493 - RNA, 19 nt, Homo sapiens
  misc_RNA (1)...(19): siRNA sense strand
ugaagcagcugaaauuugc

SEQ ID NO: 1879494 - RNA, 19 nt, Homo sapiens
  misc_RNA (1)...(19): siRNA sense strand
gagaagacccgaccacgau

SEQ ID NO: 1879495 - RNA, 19 nt, Homo sapiens
  misc_RNA (1)...(19): siRNA sense strand
gaagaauccagacuccaaa

SEQ ID NO: 1879496 - RNA, 19 nt, Homo sapiens
  misc_RNA (1)...(19): siRNA sense strand
ccucagaccuccucaaguc

SEQ ID NO: 1879497 - RNA, 19 nt, Homo sapiens
  misc_RNA (1)...(19): siRNA sense strand
gaagauacucuccuccaau

SEQ ID NO: 1879498 - RNA, 19 nt, Homo sapiens
  misc_RNA (1)...(19): siRNA sense strand
ucaaccagcuggaagugaa

SEQ ID NO: 1879499 - RNA, 19 nt, Homo sapiens
  misc_RNA (1)...(19): siRNA sense strand
ccaaguacuaggcccauua

SEQ ID NO: 1879500 - RNA, 19 nt, Homo sapiens
  misc_RNA (1)...(19): siRNA sense strand
ccaaagaagccucccaaga

SEQ ID NO: 1879501 - RNA, 19 nt, Homo sapiens
  misc_RNA (1)...(19): siRNA sense strand
caagaugaagacaaagaua

SEQ ID NO: 1879502 - RNA, 19 nt, Homo sapiens
  misc_RNA (1)...(19): siRNA sense strand
gaacugaagaaagaagaaa

SEQ ID NO: 1879503 - RNA, 19 nt, Homo sapiens
  misc_RNA (1)...(19): siRNA sense strand
agaagaaacuacugaagca

SEQ ID NO: 1879504 - RNA, 19 nt, Homo sapiens
  misc_RNA (1)...(19): siRNA sense strand
gcgcucaccuucuccuaga

SEQ ID NO: 1879505 - RNA, 19 nt, Homo sapiens
  misc_RNA (1)...(19): siRNA sense strand
aaacauaaagguacugaga

SEQ ID NO: 1879506 - RNA, 19 nt, Homo sapiens
  misc_RNA (1)...(19): siRNA sense strand
gcugcuaagugcacaagaa

SEQ ID NO: 1879507 - RNA, 19 nt, Homo sapiens
  misc_RNA (1)...(19): siRNA sense strand
uauaaagccuuggauaaca

SEQ ID NO: 1879508 - RNA, 19 nt, Homo sapiens
  misc_RNA (1)...(19): siRNA sense strand
ccauagauccgauaagaug

SEQ ID NO: 1879509 - RNA, 19 nt, Homo sapiens
  misc_RNA (1)...(19): siRNA sense strand
aaaagaaccuucaguacaa

SEQ ID NO: 1879510 - RNA, 19 nt, Homo sapiens
  misc_RNA (1)...(19): siRNA sense strand
gacaugagcaaaguaaauu

SEQ ID NO: 1879511 - RNA, 19 nt, Homo sapiens
  misc_RNA (1)...(19): siRNA sense strand
caacaaacagaagaaacua

SEQ ID NO: 1879512 - RNA, 19 nt, Homo sapiens
  misc_RNA (1)...(19): siRNA sense strand
caaaucaaccugacuggau

SEQ ID NO: 1879513 - RNA, 19 nt, Homo sapiens
  misc_RNA (1)...(19): siRNA sense strand
gagacguucaccuucauua

SEQ ID NO: 1879514 - RNA, 19 nt, Homo sapiens
  misc_RNA (1)...(19): siRNA sense strand
agggagaacuucagguaaa

SEQ ID NO: 1879515 - RNA, 19 nt, Homo sapiens
  misc_RNA (1)...(19): siRNA sense strand
aagaagaacuccgccaaga

SEQ ID NO: 1879516 - RNA, 19 nt, Homo sapiens
  misc_RNA (1)...(19): siRNA sense strand
cuagugacauucugaaagu

SEQ ID NO: 1879517 - RNA, 19 nt, Homo sapiens
  misc_RNA (1)...(19): siRNA sense strand
cgccauagauccgauaaga

SEQ ID NO: 1879518 - RNA, 19 nt, Homo sapiens
  misc_RNA (1)...(19): siRNA sense strand
aaacagaagaaacuacuga

SEQ ID NO: 1879519 - RNA, 19 nt, Homo sapiens
  misc_RNA (1)...(19): siRNA sense strand
gcaacaaacagaagaaacu

SEQ ID NO: 1879520 - RNA, 19 nt, Homo sapiens
  misc_RNA (1)...(19): siRNA sense strand
gaaggacaagaaacacaaa

SEQ ID NO: 1879521 - RNA, 19 nt, Homo sapiens
  misc_RNA (1)...(19): siRNA sense strand
gaagaggagcgucgucauc

SEQ ID NO: 1879522 - RNA, 19 nt, Homo sapiens
  misc_RNA (1)...(19): siRNA sense strand
ccagggagaacuucaggua

SEQ ID NO: 1879523 - RNA, 19 nt, Homo sapiens
  misc_RNA (1)...(19): siRNA sense strand
gggaguagcucaucauccu

SEQ ID NO: 1879524 - RNA, 19 nt, Homo sapiens
  misc_RNA (1)...(19): siRNA sense strand
gcugaaauuugcagaaugc

SEQ ID NO: 1879525 - RNA, 19 nt, Homo sapiens
  misc_RNA (1)...(19): siRNA sense strand
guacaagaggcuacuucua

SEQ ID NO: 1879526 - RNA, 19 nt, Homo sapiens
  misc_RNA (1)...(19): siRNA sense strand
gaaaguucccaaaccugaa

SEQ ID NO: 1879527 - RNA, 19 nt, Homo sapiens
  misc_RNA (1)...(19): siRNA sense strand
uccuagaacugaagaaaga

SEQ ID NO: 1879528 - RNA, 19 nt, Homo sapiens
  misc_RNA (1)...(19): siRNA sense strand
gcagucaaaccguacaaga

SEQ ID NO: 1879529 - RNA, 19 nt, Homo sapiens
  misc_RNA (1)...(19): siRNA sense strand
gauccgauaagauguauuc

SEQ ID NO: 1879530 - RNA, 19 nt, Homo sapiens
  misc_RNA (1)...(19): siRNA sense strand
gaggcuacuucuacuagug

SEQ ID NO: 1879531 - RNA, 19 nt, Homo sapiens
  misc_RNA (1)...(19): siRNA sense strand
gcccaucaccgccaagaaa

SEQ ID NO: 1879532 - RNA, 19 nt, Homo sapiens
  misc_RNA (1)...(19): siRNA sense strand
cagcugaaauuugcagaau

SEQ ID NO: 1879533 - RNA, 19 nt, Homo sapiens
  misc_RNA (1)...(19): siRNA sense strand
guaagacgaagaagacguu

SEQ ID NO: 1879534 - RNA, 19 nt, Homo sapiens
  misc_RNA (1)...(19): siRNA sense strand
ucggaaaacucguagguua

SEQ ID NO: 1879535 - RNA, 19 nt, Homo sapiens
  misc_RNA (1)...(19): siRNA sense strand
gguuauaaagccuuggaua

SEQ ID NO: 1879536 - RNA, 19 nt, Homo sapiens
  misc_RNA (1)...(19): siRNA sense strand
gaaaagagaauccccuuca

SEQ ID NO: 1879537 - RNA, 19 nt, Homo sapiens
  misc_RNA (1)...(19): siRNA sense strand
guuugaagaugauguugug

SEQ ID NO: 1879538 - RNA, 19 nt, Homo sapiens
  misc_RNA (1)...(19): siRNA sense strand
ccaggacuccggaaccuaa

SEQ ID NO: 1879539 - RNA, 19 nt, Homo sapiens
  misc_RNA (1)...(19): siRNA sense strand
cagcagagacgccaauaca

SEQ ID NO: 1879540 - RNA, 19 nt, Homo sapiens
  misc_RNA (1)...(19): siRNA sense strand
gaacuccgccaagaagaau

SEQ ID NO: 1879541 - RNA, 19 nt, Homo sapiens
  misc_RNA (1)...(19): siRNA sense strand
gcaagaugaagacaaagau

SEQ ID NO: 1879542 - RNA, 19 nt, Homo sapiens
  misc_RNA (1)...(19): siRNA sense strand
gaagaugauguugugauug

SEQ ID NO: 1879543 - RNA, 19 nt, Homo sapiens
  misc_RNA (1)...(19): siRNA sense strand
aaacaaagacagauugaac

SEQ ID NO: 1879544 - RNA, 19 nt, Homo sapiens
  misc_RNA (1)...(19): siRNA sense strand
gaugaacgacccaagagau

SEQ ID NO: 1879545 - RNA, 19 nt, Homo sapiens
  misc_RNA (1)...(19): siRNA sense strand
caagaggcuacuucuacua

SEQ ID NO: 1879546 - RNA, 19 nt, Homo sapiens
  misc_RNA (1)...(19): siRNA sense strand
gccaagaaauucagaucag

SEQ ID NO: 1879547 - RNA, 19 nt, Homo sapiens
  misc_RNA (1)...(19): siRNA sense strand
caaccaaacaaacggcauu

SEQ ID NO: 1879548 - RNA, 19 nt, Homo sapiens
  misc_RNA (1)...(19): siRNA sense strand
agucaaaccguacaagaaa

SEQ ID NO: 1879549 - RNA, 19 nt, Homo sapiens
  misc_RNA (1)...(19): siRNA sense strand
gccaucaccuccugcaaca

SEQ ID NO: 1879550 - RNA, 19 nt, Homo sapiens
  misc_RNA (1)...(19): siRNA sense strand
acucguagguuaucuccuu

SEQ ID NO: 1879551 - RNA, 19 nt, Homo sapiens
  misc_RNA (1)...(19): siRNA sense strand
auaaagccuuggauaacaa

SEQ ID NO: 1879552 - RNA, 19 nt, Homo sapiens
  misc_RNA (1)...(19): siRNA sense strand
agaagauacucuccuccaa

SEQ ID NO: 1879553 - RNA, 19 nt, Homo sapiens
  misc_RNA (1)...(19): siRNA sense strand
ucauuaucauccaagcaua

SEQ ID NO: 1879554 - RNA, 19 nt, Homo sapiens
  misc_RNA (1)...(19): siRNA sense strand
cggaaauccuuggguuuga

SEQ ID NO: 1879555 - RNA, 19 nt, Homo sapiens
  misc_RNA (1)...(19): siRNA sense strand
gcggccaucuccucgaaga

SEQ ID NO: 1879556 - RNA, 19 nt, Homo sapiens
  misc_RNA (1)...(19): siRNA sense strand
ugaagaauccagacuccaa

SEQ ID NO: 1879557 - RNA, 19 nt, Homo sapiens
  misc_RNA (1)...(19): siRNA sense strand
gauguugugauugaguuua

SEQ ID NO: 1879558 - RNA, 19 nt, Homo sapiens
  misc_RNA (1)...(19): siRNA sense strand
gauacucuccuccaauaca

SEQ ID NO: 1879559 - RNA, 19 nt, Homo sapiens
  misc_RNA (1)...(19): siRNA sense strand
aaacuggcaucuaugaaaa

SEQ ID NO: 1879560 - RNA, 19 nt, Homo sapiens
  misc_RNA (1)...(19): siRNA sense strand
gaacaggagaaggagaaga

SEQ ID NO: 1879561 - RNA, 19 nt, Homo sapiens
  misc_RNA (1)...(19): siRNA sense strand
gagaucccaugugaagaau

SEQ ID NO: 1879562 - RNA, 19 nt, Homo sapiens
  misc_RNA (1)...(19): siRNA sense strand
agagaucccaugugaagaa

SEQ ID NO: 1879563 - RNA, 19 nt, Homo sapiens
  misc_RNA (1)...(19): siRNA sense strand
gggagaacuucagguaaag

SEQ ID NO: 1879564 - RNA, 19 nt, Homo sapiens
  misc_RNA (1)...(19): siRNA sense strand
ugaaucggaagaagauaaa

SEQ ID NO: 1879565 - RNA, 19 nt, Homo sapiens
  misc_RNA (1)...(19): siRNA sense strand
aaauucagaucaggaagga

SEQ ID NO: 1879566 - RNA, 19 nt, Homo sapiens
  misc_RNA (1)...(19): siRNA sense strand
gaucaccacaaccaaacaa

SEQ ID NO: 1879567 - RNA, 19 nt, Homo sapiens
  misc_RNA (1)...(19): siRNA sense strand
caagugcagaacaggauaa

SEQ ID NO: 1879568 - RNA, 19 nt, Homo sapiens
  misc_RNA (1)...(19): siRNA sense strand
ugugaagaauggugagguu

SEQ ID NO: 1879569 - RNA, 19 nt, Homo sapiens
  misc_RNA (1)...(19): siRNA sense strand
gcagaggccuuauggauau

SEQ ID NO: 1879570 - RNA, 19 nt, Homo sapiens
  misc_RNA (1)...(19): siRNA sense strand
gcaugaaccagcaauauua

SEQ ID NO: 1879571 - RNA, 19 nt, Homo sapiens
  misc_RNA (1)...(19): siRNA sense strand
ggaaugaugggucaaguua

SEQ ID NO: 1879572 - RNA, 19 nt, Homo sapiens
  misc_RNA (1)...(19): siRNA sense strand
ggaaagaccucagaguguu

SEQ ID NO: 1879573 - RNA, 19 nt, Homo sapiens
  misc_RNA (1)...(19): siRNA sense strand
caacaugccuucagaugga

SEQ ID NO: 1879574 - RNA, 19 nt, Homo sapiens
  misc_RNA (1)...(19): siRNA sense strand
acaaacaguuccaugaaua

SEQ ID NO: 1879575 - RNA, 19 nt, Homo sapiens
  misc_RNA (1)...(19): siRNA sense strand
auaauggacucucagaaua

SEQ ID NO: 1879576 - RNA, 19 nt, Homo sapiens
  misc_RNA (1)...(19): siRNA sense strand
gguauaccuugcuacaaua

SEQ ID NO: 1879577 - RNA, 19 nt, Homo sapiens
  misc_RNA (1)...(19): siRNA sense strand
aaaccaagguccaaugaug

SEQ ID NO: 1879578 - RNA, 19 nt, Homo sapiens
  misc_RNA (1)...(19): siRNA sense strand
caacaugucuguggcuuuc

SEQ ID NO: 1879579 - RNA, 19 nt, Homo sapiens
  misc_RNA (1)...(19): siRNA sense strand
gacaaacaguuccaugaau

SEQ ID NO: 1879580 - RNA, 19 nt, Homo sapiens
  misc_RNA (1)...(19): siRNA sense strand
cagcagauguugcacacaa

SEQ ID NO: 1879581 - RNA, 19 nt, Homo sapiens
  misc_RNA (1)...(19): siRNA sense strand
gcaccacccacacagaaua

SEQ ID NO: 1879582 - RNA, 19 nt, Homo sapiens
  misc_RNA (1)...(19): siRNA sense strand
ugauggaaauucacaguau

SEQ ID NO: 1879583 - RNA, 19 nt, Homo sapiens
  misc_RNA (1)...(19): siRNA sense strand
gauggaaauucacaguaug

SEQ ID NO: 1879584 - RNA, 19 nt, Homo sapiens
  misc_RNA (1)...(19): siRNA sense strand
gauaugaccagggacagua

SEQ ID NO: 1879585 - RNA, 19 nt, Homo sapiens
  misc_RNA (1)...(19): siRNA sense strand
gauguuggaugacaauaac

SEQ ID NO: 1879586 - RNA, 19 nt, Homo sapiens
  misc_RNA (1)...(19): siRNA sense strand
uaauggacucucagaauaa

SEQ ID NO: 1879587 - RNA, 19 nt, Homo sapiens
  misc_RNA (1)...(19): siRNA sense strand
ccaaucaacucaauaugac

SEQ ID NO: 1879588 - RNA, 19 nt, Homo sapiens
  misc_RNA (1)...(19): siRNA sense strand
gagcaugccaguacagaau

SEQ ID NO: 1879589 - RNA, 19 nt, Homo sapiens
  misc_RNA (1)...(19): siRNA sense strand
gggacaaggucagcaguau

SEQ ID NO: 1879590 - RNA, 19 nt, Homo sapiens
  misc_RNA (1)...(19): siRNA sense strand
ggacagcagccaccuaugg

SEQ ID NO: 1879591 - RNA, 19 nt, Homo sapiens
  misc_RNA (1)...(19): siRNA sense strand
gacaaccaaugggaaacua

SEQ ID NO: 1879592 - RNA, 19 nt, Homo sapiens
  misc_RNA (1)...(19): siRNA sense strand
ugacaaacaguuccaugaa

SEQ ID NO: 1879593 - RNA, 19 nt, Homo sapiens
  misc_RNA (1)...(19): siRNA sense strand
agacagauuccucccuaua

SEQ ID NO: 1879594 - RNA, 19 nt, Homo sapiens
  misc_RNA (1)...(19): siRNA sense strand
gaccaaauaugaguaugca

SEQ ID NO: 1879595 - RNA, 19 nt, Homo sapiens
  misc_RNA (1)...(19): siRNA sense strand
cagaaucagaugacaauga

SEQ ID NO: 1879596 - RNA, 19 nt, Homo sapiens
  misc_RNA (1)...(19): siRNA sense strand
ucacagagcaugccaguac

SEQ ID NO: 1879597 - RNA, 19 nt, Homo sapiens
  misc_RNA (1)...(19): siRNA sense strand
gcacacaaacuugguauac

SEQ ID NO: 1879598 - RNA, 19 nt, Homo sapiens
  misc_RNA (1)...(19): siRNA sense strand
aauauuacccugauggaaa

SEQ ID NO: 1879599 - RNA, 19 nt, Homo sapiens
  misc_RNA (1)...(19): siRNA sense strand
acagauuccucccuauaga

SEQ ID NO: 1879600 - RNA, 19 nt, Homo sapiens
  misc_RNA (1)...(19): siRNA sense strand
cagaagauguuggaugaca

SEQ ID NO: 1879601 - RNA, 19 nt, Homo sapiens
  misc_RNA (1)...(19): siRNA sense strand
gaagauguuggaugacaau

SEQ ID NO: 1879602 - RNA, 19 nt, Homo sapiens
  misc_RNA (1)...(19): siRNA sense strand
gccuucagauggaauggua

SEQ ID NO: 1879603 - RNA, 19 nt, Homo sapiens
  misc_RNA (1)...(19): siRNA sense strand
ccacacagaauaugccuau

SEQ ID NO: 1879604 - RNA, 19 nt, Homo sapiens
  misc_RNA (1)...(19): siRNA sense strand
caaaauaugcagucucuuu

SEQ ID NO: 1879605 - RNA, 19 nt, Homo sapiens
  misc_RNA (1)...(19): siRNA sense strand
ugguauaccuugcuacaau

SEQ ID NO: 1879606 - RNA, 19 nt, Homo sapiens
  misc_RNA (1)...(19): siRNA sense strand
gccaacagcaagaugcaua

SEQ ID NO: 1879607 - RNA, 19 nt, Homo sapiens
  misc_RNA (1)...(19): siRNA sense strand
gaaugaugggucaaguuaa

SEQ ID NO: 1879608 - RNA, 19 nt, Homo sapiens
  misc_RNA (1)...(19): siRNA sense strand
caaacaguuccaugaauau

SEQ ID NO: 1879609 - RNA, 19 nt, Homo sapiens
  misc_RNA (1)...(19): siRNA sense strand
ggacccaaucaacucaaua

SEQ ID NO: 1879610 - RNA, 19 nt, Homo sapiens
  misc_RNA (1)...(19): siRNA sense strand
ggcaugaaccagcaauauu

SEQ ID NO: 1879611 - RNA, 19 nt, Homo sapiens
  misc_RNA (1)...(19): siRNA sense strand
uucagaagauguuggauga

SEQ ID NO: 1879612 - RNA, 19 nt, Homo sapiens
  misc_RNA (1)...(19): siRNA sense strand
uauaauggacucucagaau

SEQ ID NO: 1879613 - RNA, 19 nt, Homo sapiens
  misc_RNA (1)...(19): siRNA sense strand
uaaccaaggcaaucauaug

SEQ ID NO: 1879614 - RNA, 19 nt, Homo sapiens
  misc_RNA (1)...(19): siRNA sense strand
gaaagaccucagaguguuc

SEQ ID NO: 1879615 - RNA, 19 nt, Homo sapiens
  misc_RNA (1)...(19): siRNA sense strand
cagcagaggccuuauggau

SEQ ID NO: 1879616 - RNA, 19 nt, Homo sapiens
  misc_RNA (1)...(19): siRNA sense strand
gcaguacucaggccaggaa

SEQ ID NO: 1879617 - RNA, 19 nt, Homo sapiens
  misc_RNA (1)...(19): siRNA sense strand
ccaaaccaagguccaauga

SEQ ID NO: 1879618 - RNA, 19 nt, Homo sapiens
  misc_RNA (1)...(19): siRNA sense strand
agaaucagaugacaaugag

SEQ ID NO: 1879619 - RNA, 19 nt, Homo sapiens
  misc_RNA (1)...(19): siRNA sense strand
ccucagaguguucucagua

SEQ ID NO: 1879620 - RNA, 19 nt, Homo sapiens
  misc_RNA (1)...(19): siRNA sense strand
ggacaaggucagcaguaug

SEQ ID NO: 1879621 - RNA, 19 nt, Homo sapiens
  misc_RNA (1)...(19): siRNA sense strand
guacagaaucagaugacaa

SEQ ID NO: 1879622 - RNA, 19 nt, Homo sapiens
  misc_RNA (1)...(19): siRNA sense strand
ccgcugcgauucagaagau

SEQ ID NO: 1879623 - RNA, 19 nt, Homo sapiens
  misc_RNA (1)...(19): siRNA sense strand
gcacaugcagaaccagaug

SEQ ID NO: 1879624 - RNA, 19 nt, Homo sapiens
  misc_RNA (1)...(19): siRNA sense strand
cuauagaccuccucaacag

SEQ ID NO: 1879625 - RNA, 19 nt, Homo sapiens
  misc_RNA (1)...(19): siRNA sense strand
gagacagauuccucccuau

SEQ ID NO: 1879626 - RNA, 19 nt, Homo sapiens
  misc_RNA (1)...(19): siRNA sense strand
gacaaugagucagggacaa

SEQ ID NO: 1879627 - RNA, 19 nt, Homo sapiens
  misc_RNA (1)...(19): siRNA sense strand
gacccaaucaacucaauau

SEQ ID NO: 1879628 - RNA, 19 nt, Homo sapiens
  misc_RNA (1)...(19): siRNA sense strand
caaccauucugugccauca

SEQ ID NO: 1879629 - RNA, 19 nt, Homo sapiens
  misc_RNA (1)...(19): siRNA sense strand
gcaugccaguacagaauca

SEQ ID NO: 1879630 - RNA, 19 nt, Homo sapiens
  misc_RNA (1)...(19): siRNA sense strand
cccaaucaacucaauauga

SEQ ID NO: 1879631 - RNA, 19 nt, Homo sapiens
  misc_RNA (1)...(19): siRNA sense strand
gaccagggacaguauggaa

SEQ ID NO: 1879632 - RNA, 19 nt, Homo sapiens
  misc_RNA (1)...(19): siRNA sense strand
gcaacaugucuguggcuuu

SEQ ID NO: 1879633 - RNA, 19 nt, Homo sapiens
  misc_RNA (1)...(19): siRNA sense strand
ucagcaguauggaggauau

SEQ ID NO: 1879634 - RNA, 19 nt, Homo sapiens
  misc_RNA (1)...(19): siRNA sense strand
gcaauauuacccugaugga

SEQ ID NO: 1879635 - RNA, 19 nt, Homo sapiens
  misc_RNA (1)...(19): siRNA sense strand
aauggacucucagaauaaa

SEQ ID NO: 1879636 - RNA, 19 nt, Homo sapiens
  misc_RNA (1)...(19): siRNA sense strand
guuaaccaaggcaaucaua

SEQ ID NO: 1879637 - RNA, 19 nt, Homo sapiens
  misc_RNA (1)...(19): siRNA sense strand
gacaaggucagcaguaugg

SEQ ID NO: 1879638 - RNA, 19 nt, Homo sapiens
  misc_RNA (1)...(19): siRNA sense strand
cuacaauagcagauucuaa

SEQ ID NO: 1879639 - RNA, 19 nt, Homo sapiens
  misc_RNA (1)...(19): siRNA sense strand
gggacaguauggaaauuac

SEQ ID NO: 1879640 - RNA, 19 nt, Homo sapiens
  misc_RNA (1)...(19): siRNA sense strand
gcaguauggaggauauaga

SEQ ID NO: 1879641 - RNA, 19 nt, Homo sapiens
  misc_RNA (1)...(19): siRNA sense strand
ccuccacgcucucacaaca

SEQ ID NO: 1879642 - RNA, 19 nt, Homo sapiens
  misc_RNA (1)...(19): siRNA sense strand
cagcagggcuacgguccuu

SEQ ID NO: 1879643 - RNA, 19 nt, Homo sapiens
  misc_RNA (1)...(19): siRNA sense strand
ccagcaauauuacccugau

SEQ ID NO: 1879644 - RNA, 19 nt, Homo sapiens
  misc_RNA (1)...(19): siRNA sense strand
gacagauuccucccuauag

SEQ ID NO: 1879645 - RNA, 19 nt, Homo sapiens
  misc_RNA (1)...(19): siRNA sense strand
gcagccaccuaugggaaug

SEQ ID NO: 1879646 - RNA, 19 nt, Homo sapiens
  misc_RNA (1)...(19): siRNA sense strand
gauguugcacacaaacuug

SEQ ID NO: 1879647 - RNA, 19 nt, Homo sapiens
  misc_RNA (1)...(19): siRNA sense strand
caacucaauaugacaaaca

SEQ ID NO: 1879648 - RNA, 19 nt, Homo sapiens
  misc_RNA (1)...(19): siRNA sense strand
gaucacucccgcugcgauu

SEQ ID NO: 1879649 - RNA, 19 nt, Homo sapiens
  misc_RNA (1)...(19): siRNA sense strand
aaccaaggcaaucauauga

SEQ ID NO: 1879650 - RNA, 19 nt, Homo sapiens
  misc_RNA (1)...(19): siRNA sense strand
caaccaaugggaaacuaug

SEQ ID NO: 1879651 - RNA, 19 nt, Homo sapiens
  misc_RNA (1)...(19): siRNA sense strand
ggccuaaccauaugccuau

SEQ ID NO: 1879652 - RNA, 19 nt, Homo sapiens
  misc_RNA (1)...(19): siRNA sense strand
acacaaacuugguauaccu

SEQ ID NO: 1879653 - RNA, 19 nt, Homo sapiens
  misc_RNA (1)...(19): siRNA sense strand
cagcaccacccacacagaa

SEQ ID NO: 1879654 - RNA, 19 nt, Homo sapiens
  misc_RNA (1)...(19): siRNA sense strand
gggaaugaugggucaaguu

SEQ ID NO: 1879655 - RNA, 19 nt, Homo sapiens
  misc_RNA (1)...(19): siRNA sense strand
agaagauguuggaugacaa

SEQ ID NO: 1879656 - RNA, 19 nt, Homo sapiens
  misc_RNA (1)...(19): siRNA sense strand
ccagaugaacggccagaug

SEQ ID NO: 1879657 - RNA, 19 nt, Homo sapiens
  misc_RNA (1)...(19): siRNA sense strand
gcagccuccuucucagcaa

SEQ ID NO: 1879658 - RNA, 19 nt, Homo sapiens
  misc_RNA (1)...(19): siRNA sense strand
uauggaggauauagaccaa

SEQ ID NO: 1879659 - RNA, 19 nt, Homo sapiens
  misc_RNA (1)...(19): siRNA sense strand
auauuacccugauggaaau

SEQ ID NO: 1879660 - RNA, 19 nt, Homo sapiens
  misc_RNA (1)...(19): siRNA sense strand
caaguuaaccaaggcaauc

SEQ ID NO: 1879661 - RNA, 19 nt, Homo sapiens
  misc_RNA (1)...(19): siRNA sense strand
aaugaugggucaaguuaac

SEQ ID NO: 1879662 - RNA, 19 nt, Homo sapiens
  misc_RNA (1)...(19): siRNA sense strand
caggccaggaagacuauua

SEQ ID NO: 1879663 - RNA, 19 nt, Homo sapiens
  misc_RNA (1)...(19): siRNA sense strand
cagggacaguauggaaauu

SEQ ID NO: 1879664 - RNA, 19 nt, Homo sapiens
  misc_RNA (1)...(19): siRNA sense strand
gaggauauagaccaacaca

SEQ ID NO: 1879665 - RNA, 19 nt, Homo sapiens
  misc_RNA (1)...(19): siRNA sense strand
ggaccuggacccaaucaac

SEQ ID NO: 1879666 - RNA, 19 nt, Homo sapiens
  misc_RNA (1)...(19): siRNA sense strand
gggaccaccuccacaacag

SEQ ID NO: 1879667 - RNA, 19 nt, Homo sapiens
  misc_RNA (1)...(19): siRNA sense strand
agcagaggccuuauggaua

SEQ ID NO: 1879668 - RNA, 19 nt, Homo sapiens
  misc_RNA (1)...(19): siRNA sense strand
ccagggacaguauggaaau

SEQ ID NO: 1879669 - RNA, 19 nt, Homo sapiens
  misc_RNA (1)...(19): siRNA sense strand
gaagauggcaccaaaguga

SEQ ID NO: 1879670 - RNA, 19 nt, Homo sapiens
  misc_RNA (1)...(19): siRNA sense strand
gcuccuagaugacaacuuu

SEQ ID NO: 1879671 - RNA, 19 nt, Homo sapiens
  misc_RNA (1)...(19): siRNA sense strand
gaucuaaacacaagacuuu

SEQ ID NO: 1879672 - RNA, 19 nt, Homo sapiens
  misc_RNA (1)...(19): siRNA sense strand
ggaggagucuacauauauu

SEQ ID NO: 1879673 - RNA, 19 nt, Homo sapiens
  misc_RNA (1)...(19): siRNA sense strand
uaagauacaucgaggaaga

SEQ ID NO: 1879674 - RNA, 19 nt, Homo sapiens
  misc_RNA (1)...(19): siRNA sense strand
ccacauggcauagaaauaa

SEQ ID NO: 1879675 - RNA, 19 nt, Homo sapiens
  misc_RNA (1)...(19): siRNA sense strand
gaaagggaguuccugaucu

SEQ ID NO: 1879676 - RNA, 19 nt, Homo sapiens
  misc_RNA (1)...(19): siRNA sense strand
cgaggaagauggcaccaaa

SEQ ID NO: 1879677 - RNA, 19 nt, Homo sapiens
  misc_RNA (1)...(19): siRNA sense strand
gcaccaaagugaauuguac

SEQ ID NO: 1879678 - RNA, 19 nt, Homo sapiens
  misc_RNA (1)...(19): siRNA sense strand
guacagagcaacacuuaug

SEQ ID NO: 1879679 - RNA, 19 nt, Homo sapiens
  misc_RNA (1)...(19): siRNA sense strand
gaaacugugggauacauuu

SEQ ID NO: 1879680 - RNA, 19 nt, Homo sapiens
  misc_RNA (1)...(19): siRNA sense strand
caaaugaaacuugacagua

SEQ ID NO: 1879681 - RNA, 19 nt, Homo sapiens
  misc_RNA (1)...(19): siRNA sense strand
acagucaacucuuugguaa

SEQ ID NO: 1879682 - RNA, 19 nt, Homo sapiens
  misc_RNA (1)...(19): siRNA sense strand
ucaaggaggagucuacaua

SEQ ID NO: 1879683 - RNA, 19 nt, Homo sapiens
  misc_RNA (1)...(19): siRNA sense strand
ccagaaagaucaaaaguga

SEQ ID NO: 1879684 - RNA, 19 nt, Homo sapiens
  misc_RNA (1)...(19): siRNA sense strand
aaagggaguuccugaucua

SEQ ID NO: 1879685 - RNA, 19 nt, Homo sapiens
  misc_RNA (1)...(19): siRNA sense strand
caacacuuaugcaaccaaa

SEQ ID NO: 1879686 - RNA, 19 nt, Homo sapiens
  misc_RNA (1)...(19): siRNA sense strand
aggcagaaauucaagcuuu

SEQ ID NO: 1879687 - RNA, 19 nt, Homo sapiens
  misc_RNA (1)...(19): siRNA sense strand
aaggaggagucuacauaua

SEQ ID NO: 1879688 - RNA, 19 nt, Homo sapiens
  misc_RNA (1)...(19): siRNA sense strand
gaauuuaguuacagaugca

SEQ ID NO: 1879689 - RNA, 19 nt, Homo sapiens
  misc_RNA (1)...(19): siRNA sense strand
ccaaaagggacauauauua

SEQ ID NO: 1879690 - RNA, 19 nt, Homo sapiens
  misc_RNA (1)...(19): siRNA sense strand
cugaggagaccuuauguua

SEQ ID NO: 1879691 - RNA, 19 nt, Homo sapiens
  misc_RNA (1)...(19): siRNA sense strand
gcauagaaauaaugugcau

SEQ ID NO: 1879692 - RNA, 19 nt, Homo sapiens
  misc_RNA (1)...(19): siRNA sense strand
gaucuaugucuaugucuuu

SEQ ID NO: 1879693 - RNA, 19 nt, Homo sapiens
  misc_RNA (1)...(19): siRNA sense strand
gaggagucuacauauauua

SEQ ID NO: 1879694 - RNA, 19 nt, Homo sapiens
  misc_RNA (1)...(19): siRNA sense strand
gaaauaauggcagacucua

SEQ ID NO: 1879695 - RNA, 19 nt, Homo sapiens
  misc_RNA (1)...(19): siRNA sense strand
gcugugccaucgaauauuc

SEQ ID NO: 1879696 - RNA, 19 nt, Homo sapiens
  misc_RNA (1)...(19): siRNA sense strand
gcuggcaacuuaagauaca

SEQ ID NO: 1879697 - RNA, 19 nt, Homo sapiens
  misc_RNA (1)...(19): siRNA sense strand
ucaagaaacugugggauac

SEQ ID NO: 1879698 - RNA, 19 nt, Homo sapiens
  misc_RNA (1)...(19): siRNA sense strand
gaggagaccuuauguuacc

SEQ ID NO: 1879699 - RNA, 19 nt, Homo sapiens
  misc_RNA (1)...(19): siRNA sense strand
gggaccaaaugaaacuuga

SEQ ID NO: 1879700 - RNA, 19 nt, Homo sapiens
  misc_RNA (1)...(19): siRNA sense strand
ggcagaaauucaagcuuug

SEQ ID NO: 1879701 - RNA, 19 nt, Homo sapiens
  misc_RNA (1)...(19): siRNA sense strand
gacagucaacucuuuggua

SEQ ID NO: 1879702 - RNA, 19 nt, Homo sapiens
  misc_RNA (1)...(19): siRNA sense strand
aguuacagaugcaaaguuu

SEQ ID NO: 1879703 - RNA, 19 nt, Homo sapiens
  misc_RNA (1)...(19): siRNA sense strand
gucaagaaacugugggaua

SEQ ID NO: 1879704 - RNA, 19 nt, Homo sapiens
  misc_RNA (1)...(19): siRNA sense strand
gauuaucuuuccagagugu

SEQ ID NO: 1879705 - RNA, 19 nt, Homo sapiens
  misc_RNA (1)...(19): siRNA sense strand
ugacuuuccuaucaucaga

SEQ ID NO: 1879706 - RNA, 19 nt, Homo sapiens
  misc_RNA (1)...(19): siRNA sense strand
ggaucuaugucuaugucuu

SEQ ID NO: 1879707 - RNA, 19 nt, Homo sapiens
  misc_RNA (1)...(19): siRNA sense strand
caaggaggagucuacauau

SEQ ID NO: 1879708 - RNA, 19 nt, Homo sapiens
  misc_RNA (1)...(19): siRNA sense strand
ggaaauaauggcagacucu

SEQ ID NO: 1879709 - RNA, 19 nt, Homo sapiens
  misc_RNA (1)...(19): siRNA sense strand
gcaucaugauuacgggaaa

SEQ ID NO: 1879710 - RNA, 19 nt, Homo sapiens
  misc_RNA (1)...(19): siRNA sense strand
aauaauggcagacucuaaa

SEQ ID NO: 1879711 - RNA, 19 nt, Homo sapiens
  misc_RNA (1)...(19): siRNA sense strand
gggaguuccugaucuaaac

SEQ ID NO: 1879712 - RNA, 19 nt, Homo sapiens
  misc_RNA (1)...(19): siRNA sense strand
uaguacagagcaacacuua

SEQ ID NO: 1879713 - RNA, 19 nt, Homo sapiens
  misc_RNA (1)...(19): siRNA sense strand
ucucacaguuccagcuauu

SEQ ID NO: 1879714 - RNA, 19 nt, Homo sapiens
  misc_RNA (1)...(19): siRNA sense strand
gaugacaacuuuugcaaca

SEQ ID NO: 1879715 - RNA, 19 nt, Homo sapiens
  misc_RNA (1)...(19): siRNA sense strand
gaguguacuuaccuaacaa

SEQ ID NO: 1879716 - RNA, 19 nt, Homo sapiens
  misc_RNA (1)...(19): siRNA sense strand
guaccuaaagauaguuuga

SEQ ID NO: 1879717 - RNA, 19 nt, Homo sapiens
  misc_RNA (1)...(19): siRNA sense strand
aaguauggaucuaugucua

SEQ ID NO: 1879718 - RNA, 19 nt, Homo sapiens
  misc_RNA (1)...(19): siRNA sense strand
agaguguacuuaccuaaca

SEQ ID NO: 1879719 - RNA, 19 nt, Homo sapiens
  misc_RNA (1)...(19): siRNA sense strand
uauguuaccugccaaccau

SEQ ID NO: 1879720 - RNA, 19 nt, Homo sapiens
  misc_RNA (1)...(19): siRNA sense strand
guauggaucuaugucuaug

SEQ ID NO: 1879721 - RNA, 19 nt, Homo sapiens
  misc_RNA (1)...(19): siRNA sense strand
cuauaaguauggaucuaug

SEQ ID NO: 1879722 - RNA, 19 nt, Homo sapiens
  misc_RNA (1)...(19): siRNA sense strand
ggaagauggcaccaaagug

SEQ ID NO: 1879723 - RNA, 19 nt, Homo sapiens
  misc_RNA (1)...(19): siRNA sense strand
ggucuucucccuucugauc

SEQ ID NO: 1879724 - RNA, 19 nt, Homo sapiens
  misc_RNA (1)...(19): siRNA sense strand
gauaguuugauuccacuga

SEQ ID NO: 1879725 - RNA, 19 nt, Homo sapiens
  misc_RNA (1)...(19): siRNA sense strand
cgucgacaauauuaucaau

SEQ ID NO: 1879726 - RNA, 19 nt, Homo sapiens
  misc_RNA (1)...(19): siRNA sense strand
gcucaucaucucacaguuc

SEQ ID NO: 1879727 - RNA, 19 nt, Homo sapiens
  misc_RNA (1)...(19): siRNA sense strand
ccaaaugaaacuugacagu

SEQ ID NO: 1879728 - RNA, 19 nt, Homo sapiens
  misc_RNA (1)...(19): siRNA sense strand
aaauaauggcagacucuaa

SEQ ID NO: 1879729 - RNA, 19 nt, Homo sapiens
  misc_RNA (1)...(19): siRNA sense strand
aggaggagucuacauauau

SEQ ID NO: 1879730 - RNA, 19 nt, Homo sapiens
  misc_RNA (1)...(19): siRNA sense strand
ugauccacauggcauagaa

SEQ ID NO: 1879731 - RNA, 19 nt, Homo sapiens
  misc_RNA (1)...(19): siRNA sense strand
ucuccuugcaucaugauua

SEQ ID NO: 1879732 - RNA, 19 nt, Homo sapiens
  misc_RNA (1)...(19): siRNA sense strand
cacauggcauagaaauaau

SEQ ID NO: 1879733 - RNA, 19 nt, Homo sapiens
  misc_RNA (1)...(19): siRNA sense strand
gaccaaaugaaacuugaca

SEQ ID NO: 1879734 - RNA, 19 nt, Homo sapiens
  misc_RNA (1)...(19): siRNA sense strand
caaccaaaagggacauaua

SEQ ID NO: 1879735 - RNA, 19 nt, Homo sapiens
  misc_RNA (1)...(19): siRNA sense strand
aaugaaacuugacaguauc

SEQ ID NO: 1879736 - RNA, 19 nt, Homo sapiens
  misc_RNA (1)...(19): siRNA sense strand
uuagauggcuuggucuucu

SEQ ID NO: 1879737 - RNA, 19 nt, Homo sapiens
  misc_RNA (1)...(19): siRNA sense strand
aaagggacauauauuacac

SEQ ID NO: 1879738 - RNA, 19 nt, Homo sapiens
  misc_RNA (1)...(19): siRNA sense strand
gccaucgaauauucaagga

SEQ ID NO: 1879739 - RNA, 19 nt, Homo sapiens
  misc_RNA (1)...(19): siRNA sense strand
aaauuuggaggauggauau

SEQ ID NO: 1879740 - RNA, 19 nt, Homo sapiens
  misc_RNA (1)...(19): siRNA sense strand
ccagaguguacuuaccuaa

SEQ ID NO: 1879741 - RNA, 19 nt, Homo sapiens
  misc_RNA (1)...(19): siRNA sense strand
cagagcaacacuuaugcaa

SEQ ID NO: 1879742 - RNA, 19 nt, Homo sapiens
  misc_RNA (1)...(19): siRNA sense strand
gaaggcagaaauucaagcu

SEQ ID NO: 1879743 - RNA, 19 nt, Homo sapiens
  misc_RNA (1)...(19): siRNA sense strand
ucacaguuccagcuauuag

SEQ ID NO: 1879744 - RNA, 19 nt, Homo sapiens
  misc_RNA (1)...(19): siRNA sense strand
gugcaucuauaaguaugga

SEQ ID NO: 1879745 - RNA, 19 nt, Homo sapiens
  misc_RNA (1)...(19): siRNA sense strand
ggagucuacauauauuauc

SEQ ID NO: 1879746 - RNA, 19 nt, Homo sapiens
  misc_RNA (1)...(19): siRNA sense strand
gauccacauggcauagaaa

SEQ ID NO: 1879747 - RNA, 19 nt, Homo sapiens
  misc_RNA (1)...(19): siRNA sense strand
uguagaugcugauccacau

SEQ ID NO: 1879748 - RNA, 19 nt, Homo sapiens
  misc_RNA (1)...(19): siRNA sense strand
uucagcggcuccuagauga

SEQ ID NO: 1879749 - RNA, 19 nt, Homo sapiens
  misc_RNA (1)...(19): siRNA sense strand
gcuuugacuuuccuaucau

SEQ ID NO: 1879750 - RNA, 19 nt, Homo sapiens
  misc_RNA (1)...(19): siRNA sense strand
cuuaagauacaucgaggaa

SEQ ID NO: 1879751 - RNA, 19 nt, Homo sapiens
  misc_RNA (1)...(19): siRNA sense strand
caucucacaguuccagcua

SEQ ID NO: 1879752 - RNA, 19 nt, Homo sapiens
  misc_RNA (1)...(19): siRNA sense strand
guugcugugccaucgaaua

SEQ ID NO: 1879753 - RNA, 19 nt, Homo sapiens
  misc_RNA (1)...(19): siRNA sense strand
ucucccuucugaucuuaaa

SEQ ID NO: 1879754 - RNA, 19 nt, Homo sapiens
  misc_RNA (1)...(19): siRNA sense strand
ugaagcucaucaucucaca

SEQ ID NO: 1879755 - RNA, 19 nt, Homo sapiens
  misc_RNA (1)...(19): siRNA sense strand
aagaaacugugggauacau

SEQ ID NO: 1879756 - RNA, 19 nt, Homo sapiens
  misc_RNA (1)...(19): siRNA sense strand
gauggcaccaaagugaauu

SEQ ID NO: 1879757 - RNA, 19 nt, Homo sapiens
  misc_RNA (1)...(19): siRNA sense strand
gcaacacuuaugcaaccaa

SEQ ID NO: 1879758 - RNA, 19 nt, Homo sapiens
  misc_RNA (1)...(19): siRNA sense strand
cuucucccuucugaucuua

SEQ ID NO: 1879759 - RNA, 19 nt, Homo sapiens
  misc_RNA (1)...(19): siRNA sense strand
gacauauauuacacugaca

SEQ ID NO: 1879760 - RNA, 19 nt, Homo sapiens
  misc_RNA (1)...(19): siRNA sense strand
caaaagggacauauauuac

SEQ ID NO: 1879761 - RNA, 19 nt, Homo sapiens
  misc_RNA (1)...(19): siRNA sense strand
gaagauggcaccaaaguga

SEQ ID NO: 1879762 - RNA, 19 nt, Homo sapiens
  misc_RNA (1)...(19): siRNA sense strand
gcuccuagaugacaacuuu

SEQ ID NO: 1879763 - RNA, 19 nt, Homo sapiens
  misc_RNA (1)...(19): siRNA sense strand
gaucuaaacacaagacuuu

SEQ ID NO: 1879764 - RNA, 19 nt, Homo sapiens
  misc_RNA (1)...(19): siRNA sense strand
ggaggagucuacauauauu

SEQ ID NO: 1879765 - RNA, 19 nt, Homo sapiens
  misc_RNA (1)...(19): siRNA sense strand
uaagauacaucgaggaaga

SEQ ID NO: 1879766 - RNA, 19 nt, Homo sapiens
  misc_RNA (1)...(19): siRNA sense strand
ccacauggcauagaaauaa

SEQ ID NO: 1879767 - RNA, 19 nt, Homo sapiens
  misc_RNA (1)...(19): siRNA sense strand
gaaagggaguuccugaucu

SEQ ID NO: 1879768 - RNA, 19 nt, Homo sapiens
  misc_RNA (1)...(19): siRNA sense strand
cgaggaagauggcaccaaa

SEQ ID NO: 1879769 - RNA, 19 nt, Homo sapiens
  misc_RNA (1)...(19): siRNA sense strand
gcaccaaagugaauuguac

SEQ ID NO: 1879770 - RNA, 19 nt, Homo sapiens
  misc_RNA (1)...(19): siRNA sense strand
guacagagcaacacuuaug

SEQ ID NO: 1879771 - RNA, 19 nt, Homo sapiens
  misc_RNA (1)...(19): siRNA sense strand
gaaacugugggauacauuu

SEQ ID NO: 1879772 - RNA, 19 nt, Homo sapiens
  misc_RNA (1)...(19): siRNA sense strand
caaaugaaacuugacagua

SEQ ID NO: 1879773 - RNA, 19 nt, Homo sapiens
  misc_RNA (1)...(19): siRNA sense strand
acagucaacucuuugguaa

SEQ ID NO: 1879774 - RNA, 19 nt, Homo sapiens
  misc_RNA (1)...(19): siRNA sense strand
ucaaggaggagucuacaua

SEQ ID NO: 1879775 - RNA, 19 nt, Homo sapiens
  misc_RNA (1)...(19): siRNA sense strand
ccagaaagaucaaaaguga

SEQ ID NO: 1879776 - RNA, 19 nt, Homo sapiens
  misc_RNA (1)...(19): siRNA sense strand
aaagggaguuccugaucua

SEQ ID NO: 1879777 - RNA, 19 nt, Homo sapiens
  misc_RNA (1)...(19): siRNA sense strand
caacacuuaugcaaccaaa

SEQ ID NO: 1879778 - RNA, 19 nt, Homo sapiens
  misc_RNA (1)...(19): siRNA sense strand
aggcagaaauucaagcuuu

SEQ ID NO: 1879779 - RNA, 19 nt, Homo sapiens
  misc_RNA (1)...(19): siRNA sense strand
aaggaggagucuacauaua

SEQ ID NO: 1879780 - RNA, 19 nt, Homo sapiens
  misc_RNA (1)...(19): siRNA sense strand
gaauuuaguuacagaugca

SEQ ID NO: 1879781 - RNA, 19 nt, Homo sapiens
  misc_RNA (1)...(19): siRNA sense strand
ccaaaagggacauauauua

SEQ ID NO: 1879782 - RNA, 19 nt, Homo sapiens
  misc_RNA (1)...(19): siRNA sense strand
cugaggagaccuuauguua

SEQ ID NO: 1879783 - RNA, 19 nt, Homo sapiens
  misc_RNA (1)...(19): siRNA sense strand
gcauagaaauaaugugcau

SEQ ID NO: 1879784 - RNA, 19 nt, Homo sapiens
  misc_RNA (1)...(19): siRNA sense strand
gaucuaugucuaugucuuu

SEQ ID NO: 1879785 - RNA, 19 nt, Homo sapiens
  misc_RNA (1)...(19): siRNA sense strand
gaggagucuacauauauua

SEQ ID NO: 1879786 - RNA, 19 nt, Homo sapiens
  misc_RNA (1)...(19): siRNA sense strand
gaaauaauggcagacucua

SEQ ID NO: 1879787 - RNA, 19 nt, Homo sapiens
  misc_RNA (1)...(19): siRNA sense strand
gcugugccaucgaauauuc

SEQ ID NO: 1879788 - RNA, 19 nt, Homo sapiens
  misc_RNA (1)...(19): siRNA sense strand
gcuggcaacuuaagauaca

SEQ ID NO: 1879789 - RNA, 19 nt, Homo sapiens
  misc_RNA (1)...(19): siRNA sense strand
ucaagaaacugugggauac

SEQ ID NO: 1879790 - RNA, 19 nt, Homo sapiens
  misc_RNA (1)...(19): siRNA sense strand
gaggagaccuuauguuacc

SEQ ID NO: 1879791 - RNA, 19 nt, Homo sapiens
  misc_RNA (1)...(19): siRNA sense strand
gggaccaaaugaaacuuga

SEQ ID NO: 1879792 - RNA, 19 nt, Homo sapiens
  misc_RNA (1)...(19): siRNA sense strand
ggcagaaauucaagcuuug

SEQ ID NO: 1879793 - RNA, 19 nt, Homo sapiens
  misc_RNA (1)...(19): siRNA sense strand
gacagucaacucuuuggua

SEQ ID NO: 1879794 - RNA, 19 nt, Homo sapiens
  misc_RNA (1)...(19): siRNA sense strand
aguuacagaugcaaaguuu

SEQ ID NO: 1879795 - RNA, 19 nt, Homo sapiens
  misc_RNA (1)...(19): siRNA sense strand
gucaagaaacugugggaua

SEQ ID NO: 1879796 - RNA, 19 nt, Homo sapiens
  misc_RNA (1)...(19): siRNA sense strand
gauuaucuuuccagagugu

SEQ ID NO: 1879797 - RNA, 19 nt, Homo sapiens
  misc_RNA (1)...(19): siRNA sense strand
ugacuuuccuaucaucaga

SEQ ID NO: 1879798 - RNA, 19 nt, Homo sapiens
  misc_RNA (1)...(19): siRNA sense strand
ggaucuaugucuaugucuu

SEQ ID NO: 1879799 - RNA, 19 nt, Homo sapiens
  misc_RNA (1)...(19): siRNA sense strand
caaggaggagucuacauau

SEQ ID NO: 1879800 - RNA, 19 nt, Homo sapiens
  misc_RNA (1)...(19): siRNA sense strand
ggaaauaauggcagacucu

SEQ ID NO: 1879801 - RNA, 19 nt, Homo sapiens
  misc_RNA (1)...(19): siRNA sense strand
gcaucaugauuacgggaaa

SEQ ID NO: 1879802 - RNA, 19 nt, Homo sapiens
  misc_RNA (1)...(19): siRNA sense strand
aauaauggcagacucuaaa

SEQ ID NO: 1879803 - RNA, 19 nt, Homo sapiens
  misc_RNA (1)...(19): siRNA sense strand
gggaguuccugaucuaaac

SEQ ID NO: 1879804 - RNA, 19 nt, Homo sapiens
  misc_RNA (1)...(19): siRNA sense strand
uaguacagagcaacacuua

SEQ ID NO: 1879805 - RNA, 19 nt, Homo sapiens
  misc_RNA (1)...(19): siRNA sense strand
ucucacaguuccagcuauu

SEQ ID NO: 1879806 - RNA, 19 nt, Homo sapiens
  misc_RNA (1)...(19): siRNA sense strand
gaugacaacuuuugcaaca

SEQ ID NO: 1879807 - RNA, 19 nt, Homo sapiens
  misc_RNA (1)...(19): siRNA sense strand
gaguguacuuaccuaacaa

SEQ ID NO: 1879808 - RNA, 19 nt, Homo sapiens
  misc_RNA (1)...(19): siRNA sense strand
guaccuaaagauaguuuga

SEQ ID NO: 1879809 - RNA, 19 nt, Homo sapiens
  misc_RNA (1)...(19): siRNA sense strand
aaguauggaucuaugucua

SEQ ID NO: 1879810 - RNA, 19 nt, Homo sapiens
  misc_RNA (1)...(19): siRNA sense strand
agaguguacuuaccuaaca

SEQ ID NO: 1879811 - RNA, 19 nt, Homo sapiens
  misc_RNA (1)...(19): siRNA sense strand
uauguuaccugccaaccau

SEQ ID NO: 1879812 - RNA, 19 nt, Homo sapiens
  misc_RNA (1)...(19): siRNA sense strand
guauggaucuaugucuaug

SEQ ID NO: 1879813 - RNA, 19 nt, Homo sapiens
  misc_RNA (1)...(19): siRNA sense strand
cuauaaguauggaucuaug

SEQ ID NO: 1879814 - RNA, 19 nt, Homo sapiens
  misc_RNA (1)...(19): siRNA sense strand
ggaagauggcaccaaagug

SEQ ID NO: 1879815 - RNA, 19 nt, Homo sapiens
  misc_RNA (1)...(19): siRNA sense strand
ggucuucucccuucugauc

SEQ ID NO: 1879816 - RNA, 19 nt, Homo sapiens
  misc_RNA (1)...(19): siRNA sense strand
gauaguuugauuccacuga

SEQ ID NO: 1879817 - RNA, 19 nt, Homo sapiens
  misc_RNA (1)...(19): siRNA sense strand
cgucgacaauauuaucaau

SEQ ID NO: 1879818 - RNA, 19 nt, Homo sapiens
  misc_RNA (1)...(19): siRNA sense strand
gcucaucaucucacaguuc

SEQ ID NO: 1879819 - RNA, 19 nt, Homo sapiens
  misc_RNA (1)...(19): siRNA sense strand
ccaaaugaaacuugacagu

SEQ ID NO: 1879820 - RNA, 19 nt, Homo sapiens
  misc_RNA (1)...(19): siRNA sense strand
aaauaauggcagacucuaa

SEQ ID NO: 1879821 - RNA, 19 nt, Homo sapiens
  misc_RNA (1)...(19): siRNA sense strand
aggaggagucuacauauau

SEQ ID NO: 1879822 - RNA, 19 nt, Homo sapiens
  misc_RNA (1)...(19): siRNA sense strand
ugauccacauggcauagaa

SEQ ID NO: 1879823 - RNA, 19 nt, Homo sapiens
  misc_RNA (1)...(19): siRNA sense strand
ucuccuugcaucaugauua

SEQ ID NO: 1879824 - RNA, 19 nt, Homo sapiens
  misc_RNA (1)...(19): siRNA sense strand
cacauggcauagaaauaau

SEQ ID NO: 1879825 - RNA, 19 nt, Homo sapiens
  misc_RNA (1)...(19): siRNA sense strand
gaccaaaugaaacuugaca

SEQ ID NO: 1879826 - RNA, 19 nt, Homo sapiens
  misc_RNA (1)...(19): siRNA sense strand
caaccaaaagggacauaua

SEQ ID NO: 1879827 - RNA, 19 nt, Homo sapiens
  misc_RNA (1)...(19): siRNA sense strand
aaugaaacuugacaguauc

SEQ ID NO: 1879828 - RNA, 19 nt, Homo sapiens
  misc_RNA (1)...(19): siRNA sense strand
uuagauggcuuggucuucu

SEQ ID NO: 1879829 - RNA, 19 nt, Homo sapiens
  misc_RNA (1)...(19): siRNA sense strand
aaagggacauauauuacac

SEQ ID NO: 1879830 - RNA, 19 nt, Homo sapiens
  misc_RNA (1)...(19): siRNA sense strand
gccaucgaauauucaagga

SEQ ID NO: 1879831 - RNA, 19 nt, Homo sapiens
  misc_RNA (1)...(19): siRNA sense strand
aaauuuggaggauggauau

SEQ ID NO: 1879832 - RNA, 19 nt, Homo sapiens
  misc_RNA (1)...(19): siRNA sense strand
ccagaguguacuuaccuaa

SEQ ID NO: 1879833 - RNA, 19 nt, Homo sapiens
  misc_RNA (1)...(19): siRNA sense strand
cagagcaacacuuaugcaa

SEQ ID NO: 1879834 - RNA, 19 nt, Homo sapiens
  misc_RNA (1)...(19): siRNA sense strand
gaaggcagaaauucaagcu

SEQ ID NO: 1879835 - RNA, 19 nt, Homo sapiens
  misc_RNA (1)...(19): siRNA sense strand
ucacaguuccagcuauuag

SEQ ID NO: 1879836 - RNA, 19 nt, Homo sapiens
  misc_RNA (1)...(19): siRNA sense strand
gugcaucuauaaguaugga

SEQ ID NO: 1879837 - RNA, 19 nt, Homo sapiens
  misc_RNA (1)...(19): siRNA sense strand
ggagucuacauauauuauc

SEQ ID NO: 1879838 - RNA, 19 nt, Homo sapiens
  misc_RNA (1)...(19): siRNA sense strand
gauccacauggcauagaaa

SEQ ID NO: 1879839 - RNA, 19 nt, Homo sapiens
  misc_RNA (1)...(19): siRNA sense strand
uguagaugcugauccacau

SEQ ID NO: 1879840 - RNA, 19 nt, Homo sapiens
  misc_RNA (1)...(19): siRNA sense strand
uucagcggcuccuagauga

SEQ ID NO: 1879841 - RNA, 19 nt, Homo sapiens
  misc_RNA (1)...(19): siRNA sense strand
gcuuugacuuuccuaucau

SEQ ID NO: 1879842 - RNA, 19 nt, Homo sapiens
  misc_RNA (1)...(19): siRNA sense strand
cuuaagauacaucgaggaa

SEQ ID NO: 1879843 - RNA, 19 nt, Homo sapiens
  misc_RNA (1)...(19): siRNA sense strand
caucucacaguuccagcua

SEQ ID NO: 1879844 - RNA, 19 nt, Homo sapiens
  misc_RNA (1)...(19): siRNA sense strand
guugcugugccaucgaaua

SEQ ID NO: 1879845 - RNA, 19 nt, Homo sapiens
  misc_RNA (1)...(19): siRNA sense strand
ucucccuucugaucuuaaa

SEQ ID NO: 1879846 - RNA, 19 nt, Homo sapiens
  misc_RNA (1)...(19): siRNA sense strand
ugaagcucaucaucucaca

SEQ ID NO: 1879847 - RNA, 19 nt, Homo sapiens
  misc_RNA (1)...(19): siRNA sense strand
aagaaacugugggauacau

SEQ ID NO: 1879848 - RNA, 19 nt, Homo sapiens
  misc_RNA (1)...(19): siRNA sense strand
gauggcaccaaagugaauu

SEQ ID NO: 1879849 - RNA, 19 nt, Homo sapiens
  misc_RNA (1)...(19): siRNA sense strand
gcaacacuuaugcaaccaa

SEQ ID NO: 1879850 - RNA, 19 nt, Homo sapiens
  misc_RNA (1)...(19): siRNA sense strand
cuucucccuucugaucuua

SEQ ID NO: 1879851 - RNA, 19 nt, Homo sapiens
  misc_RNA (1)...(19): siRNA sense strand
gacauauauuacacugaca

SEQ ID NO: 1879852 - RNA, 19 nt, Homo sapiens
  misc_RNA (1)...(19): siRNA sense strand
caaaagggacauauauuac

SEQ ID NO: 1879853 - RNA, 19 nt, Homo sapiens
  misc_RNA (1)...(19): siRNA sense strand
gcaauuuacuuucaaggua

SEQ ID NO: 1879854 - RNA, 19 nt, Homo sapiens
  misc_RNA (1)...(19): siRNA sense strand
guaagaggcugaagaagaa

SEQ ID NO: 1879855 - RNA, 19 nt, Homo sapiens
  misc_RNA (1)...(19): siRNA sense strand
caaagaaccugaagaagau

SEQ ID NO: 1879856 - RNA, 19 nt, Homo sapiens
  misc_RNA (1)...(19): siRNA sense strand
gcaaagaaccugaagaaga

SEQ ID NO: 1879857 - RNA, 19 nt, Homo sapiens
  misc_RNA (1)...(19): siRNA sense strand
caagagaaauugggugaua

SEQ ID NO: 1879858 - RNA, 19 nt, Homo sapiens
  misc_RNA (1)...(19): siRNA sense strand
ggaagacgaugaaagauca

SEQ ID NO: 1879859 - RNA, 19 nt, Homo sapiens
  misc_RNA (1)...(19): siRNA sense strand
gaaacuggauugacagaug

SEQ ID NO: 1879860 - RNA, 19 nt, Homo sapiens
  misc_RNA (1)...(19): siRNA sense strand
ugacaucauuggagaauuu

SEQ ID NO: 1879861 - RNA, 19 nt, Homo sapiens
  misc_RNA (1)...(19): siRNA sense strand
gcaaagugcugagaaggaa

SEQ ID NO: 1879862 - RNA, 19 nt, Homo sapiens
  misc_RNA (1)...(19): siRNA sense strand
gaaggaagagcaagagaaa

SEQ ID NO: 1879863 - RNA, 19 nt, Homo sapiens
  misc_RNA (1)...(19): siRNA sense strand
gaauuuaaagucccuauga

SEQ ID NO: 1879864 - RNA, 19 nt, Homo sapiens
  misc_RNA (1)...(19): siRNA sense strand
gguaagaggcugaagaaga

SEQ ID NO: 1879865 - RNA, 19 nt, Homo sapiens
  misc_RNA (1)...(19): siRNA sense strand
aguauucacuggauuauga

SEQ ID NO: 1879866 - RNA, 19 nt, Homo sapiens
  misc_RNA (1)...(19): siRNA sense strand
ggaauggcgugaccugcaa

SEQ ID NO: 1879867 - RNA, 19 nt, Homo sapiens
  misc_RNA (1)...(19): siRNA sense strand
aggagaaguuuaugaauga

SEQ ID NO: 1879868 - RNA, 19 nt, Homo sapiens
  misc_RNA (1)...(19): siRNA sense strand
aaggagaaguuuaugaaug

SEQ ID NO: 1879869 - RNA, 19 nt, Homo sapiens
  misc_RNA (1)...(19): siRNA sense strand
gaagaagaaauuugagaca

SEQ ID NO: 1879870 - RNA, 19 nt, Homo sapiens
  misc_RNA (1)...(19): siRNA sense strand
gggcacaucugauccuuac

SEQ ID NO: 1879871 - RNA, 19 nt, Homo sapiens
  misc_RNA (1)...(19): siRNA sense strand
uuaauccugucuucaauga

SEQ ID NO: 1879872 - RNA, 19 nt, Homo sapiens
  misc_RNA (1)...(19): siRNA sense strand
caaggaugaugaugcugaa

SEQ ID NO: 1879873 - RNA, 19 nt, Homo sapiens
  misc_RNA (1)...(19): siRNA sense strand
aagaagaacccaaagaaga

SEQ ID NO: 1879874 - RNA, 19 nt, Homo sapiens
  misc_RNA (1)...(19): siRNA sense strand
ugaaggagaaguuuaugaa

SEQ ID NO: 1879875 - RNA, 19 nt, Homo sapiens
  misc_RNA (1)...(19): siRNA sense strand
ugaaguaccuuuugaacaa

SEQ ID NO: 1879876 - RNA, 19 nt, Homo sapiens
  misc_RNA (1)...(19): siRNA sense strand
gaaggagaaguuuaugaau

SEQ ID NO: 1879877 - RNA, 19 nt, Homo sapiens
  misc_RNA (1)...(19): siRNA sense strand
cgacuguucugccaagcaa

SEQ ID NO: 1879878 - RNA, 19 nt, Homo sapiens
  misc_RNA (1)...(19): siRNA sense strand
gaaagugcaggugguggua

SEQ ID NO: 1879879 - RNA, 19 nt, Homo sapiens
  misc_RNA (1)...(19): siRNA sense strand
caucugauccuuacgugaa

SEQ ID NO: 1879880 - RNA, 19 nt, Homo sapiens
  misc_RNA (1)...(19): siRNA sense strand
ggaagagcaagagaaauug

SEQ ID NO: 1879881 - RNA, 19 nt, Homo sapiens
  misc_RNA (1)...(19): siRNA sense strand
ugucuucaaugagcaauuu

SEQ ID NO: 1879882 - RNA, 19 nt, Homo sapiens
  misc_RNA (1)...(19): siRNA sense strand
gcagguagaggaggaaguu

SEQ ID NO: 1879883 - RNA, 19 nt, Homo sapiens
  misc_RNA (1)...(19): siRNA sense strand
ugauggcuguauaugauuu

SEQ ID NO: 1879884 - RNA, 19 nt, Homo sapiens
  misc_RNA (1)...(19): siRNA sense strand
aggaagagcaagagaaauu

SEQ ID NO: 1879885 - RNA, 19 nt, Homo sapiens
  misc_RNA (1)...(19): siRNA sense strand
gccauuaacaugaaagaug

SEQ ID NO: 1879886 - RNA, 19 nt, Homo sapiens
  misc_RNA (1)...(19): siRNA sense strand
uaaagucccuaugaacaca

SEQ ID NO: 1879887 - RNA, 19 nt, Homo sapiens
  misc_RNA (1)...(19): siRNA sense strand
guaaaagacuuagggaaga

SEQ ID NO: 1879888 - RNA, 19 nt, Homo sapiens
  misc_RNA (1)...(19): siRNA sense strand
caagaagaagggaaaggaa

SEQ ID NO: 1879889 - RNA, 19 nt, Homo sapiens
  misc_RNA (1)...(19): siRNA sense strand
uagggaagacgaugaaaga

SEQ ID NO: 1879890 - RNA, 19 nt, Homo sapiens
  misc_RNA (1)...(19): siRNA sense strand
ggaugaugaugcugaaacu

SEQ ID NO: 1879891 - RNA, 19 nt, Homo sapiens
  misc_RNA (1)...(19): siRNA sense strand
gcugguaagcugacuguug

SEQ ID NO: 1879892 - RNA, 19 nt, Homo sapiens
  misc_RNA (1)...(19): siRNA sense strand
agugauggcuguauaugau

SEQ ID NO: 1879893 - RNA, 19 nt, Homo sapiens
  misc_RNA (1)...(19): siRNA sense strand
cugguaagcugacuguugu

SEQ ID NO: 1879894 - RNA, 19 nt, Homo sapiens
  misc_RNA (1)...(19): siRNA sense strand
caaagaagaggagaaacug

SEQ ID NO: 1879895 - RNA, 19 nt, Homo sapiens
  misc_RNA (1)...(19): siRNA sense strand
gaagaugcauuuucuaagc

SEQ ID NO: 1879896 - RNA, 19 nt, Homo sapiens
  misc_RNA (1)...(19): siRNA sense strand
gagcgagagucaccaugag

SEQ ID NO: 1879897 - RNA, 19 nt, Homo sapiens
  misc_RNA (1)...(19): siRNA sense strand
ugaaagaucaggcccucaa

SEQ ID NO: 1879898 - RNA, 19 nt, Homo sapiens
  misc_RNA (1)...(19): siRNA sense strand
gggaagacgaugaaagauc

SEQ ID NO: 1879899 - RNA, 19 nt, Homo sapiens
  misc_RNA (1)...(19): siRNA sense strand
ccaaagaagaggagaaacu

SEQ ID NO: 1879900 - RNA, 19 nt, Homo sapiens
  misc_RNA (1)...(19): siRNA sense strand
auugacagauggagaagaa

SEQ ID NO: 1879901 - RNA, 19 nt, Homo sapiens
  misc_RNA (1)...(19): siRNA sense strand
agacaaaaguccaccgaaa

SEQ ID NO: 1879902 - RNA, 19 nt, Homo sapiens
  misc_RNA (1)...(19): siRNA sense strand
gaagagcaagagaaauugg

SEQ ID NO: 1879903 - RNA, 19 nt, Homo sapiens
  misc_RNA (1)...(19): siRNA sense strand
cauagucgcaguccuuuua

SEQ ID NO: 1879904 - RNA, 19 nt, Homo sapiens
  misc_RNA (1)...(19): siRNA sense strand
ugacaagauuggcaagaac

SEQ ID NO: 1879905 - RNA, 19 nt, Homo sapiens
  misc_RNA (1)...(19): siRNA sense strand
aggcaaagaaccugaagaa

SEQ ID NO: 1879906 - RNA, 19 nt, Homo sapiens
  misc_RNA (1)...(19): siRNA sense strand
gcacaucugauccuuacgu

SEQ ID NO: 1879907 - RNA, 19 nt, Homo sapiens
  misc_RNA (1)...(19): siRNA sense strand
ugggaaaacuucaguauuc

SEQ ID NO: 1879908 - RNA, 19 nt, Homo sapiens
  misc_RNA (1)...(19): siRNA sense strand
aggaaaggaagaugcauuu

SEQ ID NO: 1879909 - RNA, 19 nt, Homo sapiens
  misc_RNA (1)...(19): siRNA sense strand
uugaacaaauccagaaagu

SEQ ID NO: 1879910 - RNA, 19 nt, Homo sapiens
  misc_RNA (1)...(19): siRNA sense strand
gagaaggaagagcaagaga

SEQ ID NO: 1879911 - RNA, 19 nt, Homo sapiens
  misc_RNA (1)...(19): siRNA sense strand
gacaucauuggagaauuua

SEQ ID NO: 1879912 - RNA, 19 nt, Homo sapiens
  misc_RNA (1)...(19): siRNA sense strand
aagagaaauugggugauau

SEQ ID NO: 1879913 - RNA, 19 nt, Homo sapiens
  misc_RNA (1)...(19): siRNA sense strand
uggcuuauccgauccuuau

SEQ ID NO: 1879914 - RNA, 19 nt, Homo sapiens
  misc_RNA (1)...(19): siRNA sense strand
aagaagaagggaaaggaaa

SEQ ID NO: 1879915 - RNA, 19 nt, Homo sapiens
  misc_RNA (1)...(19): siRNA sense strand
uauccgauccuuaugugaa

SEQ ID NO: 1879916 - RNA, 19 nt, Homo sapiens
  misc_RNA (1)...(19): siRNA sense strand
gacaaaaguccaccgaaaa

SEQ ID NO: 1879917 - RNA, 19 nt, Homo sapiens
  misc_RNA (1)...(19): siRNA sense strand
ucaccacugucgcgacugu

SEQ ID NO: 1879918 - RNA, 19 nt, Homo sapiens
  misc_RNA (1)...(19): siRNA sense strand
aagcugaaggagaaguuua

SEQ ID NO: 1879919 - RNA, 19 nt, Homo sapiens
  misc_RNA (1)...(19): siRNA sense strand
ggcacacccugcagguaga

SEQ ID NO: 1879920 - RNA, 19 nt, Homo sapiens
  misc_RNA (1)...(19): siRNA sense strand
uaacuguuuuggacuauga

SEQ ID NO: 1879921 - RNA, 19 nt, Homo sapiens
  misc_RNA (1)...(19): siRNA sense strand
gauggauguggguggcuua

SEQ ID NO: 1879922 - RNA, 19 nt, Homo sapiens
  misc_RNA (1)...(19): siRNA sense strand
agaaggaagagcaagagaa

SEQ ID NO: 1879923 - RNA, 19 nt, Homo sapiens
  misc_RNA (1)...(19): siRNA sense strand
ccuuaauccugucuucaau

SEQ ID NO: 1879924 - RNA, 19 nt, Homo sapiens
  misc_RNA (1)...(19): siRNA sense strand
gaaguuuaugaaugaguug

SEQ ID NO: 1879925 - RNA, 19 nt, Homo sapiens
  misc_RNA (1)...(19): siRNA sense strand
ccucaaggaugaugaugcu

SEQ ID NO: 1879926 - RNA, 19 nt, Homo sapiens
  misc_RNA (1)...(19): siRNA sense strand
aaaagaagaacccaaagaa

SEQ ID NO: 1879927 - RNA, 19 nt, Homo sapiens
  misc_RNA (1)...(19): siRNA sense strand
aaaggaagaugcauuuucu

SEQ ID NO: 1879928 - RNA, 19 nt, Homo sapiens
  misc_RNA (1)...(19): siRNA sense strand
ugagcgagagucaccauga

SEQ ID NO: 1879929 - RNA, 19 nt, Homo sapiens
  misc_RNA (1)...(19): siRNA sense strand
ggagaaggaaaggaagaug

SEQ ID NO: 1879930 - RNA, 19 nt, Homo sapiens
  misc_RNA (1)...(19): siRNA sense strand
agaagaacccaaagaagag

SEQ ID NO: 1879931 - RNA, 19 nt, Homo sapiens
  misc_RNA (1)...(19): siRNA sense strand
aaagaagaacccaaagaag

SEQ ID NO: 1879932 - RNA, 19 nt, Homo sapiens
  misc_RNA (1)...(19): siRNA sense strand
caugaaagauguaaaagac

SEQ ID NO: 1879933 - RNA, 19 nt, Homo sapiens
  misc_RNA (1)...(19): siRNA sense strand
uuuggacuaugacaagauu

SEQ ID NO: 1879934 - RNA, 19 nt, Homo sapiens
  misc_RNA (1)...(19): siRNA sense strand
uaauugcaauagccauagu

SEQ ID NO: 1879935 - RNA, 19 nt, Homo sapiens
  misc_RNA (1)...(19): siRNA sense strand
ggagaaguuuaugaaugag

SEQ ID NO: 1879936 - RNA, 19 nt, Homo sapiens
  misc_RNA (1)...(19): siRNA sense strand
cuaugaacacaguggauuu

SEQ ID NO: 1879937 - RNA, 19 nt, Homo sapiens
  misc_RNA (1)...(19): siRNA sense strand
uaccugauaagaagaagaa

SEQ ID NO: 1879938 - RNA, 19 nt, Homo sapiens
  misc_RNA (1)...(19): siRNA sense strand
ucugcuaccugauaagaag

SEQ ID NO: 1879939 - RNA, 19 nt, Homo sapiens
  misc_RNA (1)...(19): siRNA sense strand
gaaagaucaggcccucaag

SEQ ID NO: 1879940 - RNA, 19 nt, Homo sapiens
  misc_RNA (1)...(19): siRNA sense strand
guccugaccugcugcuuuu

SEQ ID NO: 1879941 - RNA, 19 nt, Homo sapiens
  misc_RNA (1)...(19): siRNA sense strand
gcagguggugguaacuguu

SEQ ID NO: 1879942 - RNA, 19 nt, Homo sapiens
  misc_RNA (1)...(19): siRNA sense strand
cuuaauugcaauagccaua

SEQ ID NO: 1879943 - RNA, 19 nt, Homo sapiens
  misc_RNA (1)...(19): siRNA sense strand
gagaauuuaaagucccuau

SEQ ID NO: 1879944 - RNA, 19 nt, Homo sapiens
  misc_RNA (1)...(19): siRNA sense strand
cccuagugauggcuguaua

SEQ ID NO: 1879945 - RNA, 19 nt, Homo sapiens
  misc_RNA (1)...(19): siRNA sense strand
guaccauacucggaauugg

SEQ ID NO: 1879946 - RNA, 19 nt, Homo sapiens
  misc_RNA (1)...(19): siRNA sense strand
guguuucugcuaccugaua

SEQ ID NO: 1879947 - RNA, 19 nt, Homo sapiens
  misc_RNA (1)...(19): siRNA sense strand
acaagaagaagggaaagga

SEQ ID NO: 1879948 - RNA, 19 nt, Homo sapiens
  misc_RNA (1)...(19): siRNA sense strand
gguagaggaggaaguugau

SEQ ID NO: 1879949 - RNA, 19 nt, Homo sapiens
  misc_RNA (1)...(19): siRNA sense strand
cugcgacacuggucagaca

SEQ ID NO: 1879950 - RNA, 19 nt, Homo sapiens
  misc_RNA (1)...(19): siRNA sense strand
cagguggugguaacuguuu

SEQ ID NO: 1879951 - RNA, 19 nt, Homo sapiens
  misc_RNA (1)...(19): siRNA sense strand
gauccuuacgugaaagugu

SEQ ID NO: 1879952 - RNA, 19 nt, Homo sapiens
  misc_RNA (1)...(19): siRNA sense strand
gguaccauacucggaauug

SEQ ID NO: 1879953 - RNA, 19 nt, Homo sapiens
  misc_RNA (1)...(19): siRNA sense strand
gcaaauaucacaugguuua

SEQ ID NO: 1879954 - RNA, 19 nt, Homo sapiens
  misc_RNA (1)...(19): siRNA sense strand
gaaguucucuugccacauu

SEQ ID NO: 1879955 - RNA, 19 nt, Homo sapiens
  misc_RNA (1)...(19): siRNA sense strand
gaaauacugugcugucuau

SEQ ID NO: 1879956 - RNA, 19 nt, Homo sapiens
  misc_RNA (1)...(19): siRNA sense strand
uaacaaggguacauaguaa

SEQ ID NO: 1879957 - RNA, 19 nt, Homo sapiens
  misc_RNA (1)...(19): siRNA sense strand
caucagcaauuccacauua

SEQ ID NO: 1879958 - RNA, 19 nt, Homo sapiens
  misc_RNA (1)...(19): siRNA sense strand
gagaagauuuaccugcuua

SEQ ID NO: 1879959 - RNA, 19 nt, Homo sapiens
  misc_RNA (1)...(19): siRNA sense strand
gguccaaggucaccaauaa

SEQ ID NO: 1879960 - RNA, 19 nt, Homo sapiens
  misc_RNA (1)...(19): siRNA sense strand
gaacagcaaccauacgaua

SEQ ID NO: 1879961 - RNA, 19 nt, Homo sapiens
  misc_RNA (1)...(19): siRNA sense strand
ucagacaacuugaccauuu

SEQ ID NO: 1879962 - RNA, 19 nt, Homo sapiens
  misc_RNA (1)...(19): siRNA sense strand
gaaauaaaguguggaacau

SEQ ID NO: 1879963 - RNA, 19 nt, Homo sapiens
  misc_RNA (1)...(19): siRNA sense strand
ggaauguccuggccaguga

SEQ ID NO: 1879964 - RNA, 19 nt, Homo sapiens
  misc_RNA (1)...(19): siRNA sense strand
ucucuuagguucugaaauu

SEQ ID NO: 1879965 - RNA, 19 nt, Homo sapiens
  misc_RNA (1)...(19): siRNA sense strand
uguagcagcuuuacucuuu

SEQ ID NO: 1879966 - RNA, 19 nt, Homo sapiens
  misc_RNA (1)...(19): siRNA sense strand
ccacauuacuuaaagauag

SEQ ID NO: 1879967 - RNA, 19 nt, Homo sapiens
  misc_RNA (1)...(19): siRNA sense strand
gcucaacacuucaugacaa

SEQ ID NO: 1879968 - RNA, 19 nt, Homo sapiens
  misc_RNA (1)...(19): siRNA sense strand
agauuuaccugcuuacuaa

SEQ ID NO: 1879969 - RNA, 19 nt, Homo sapiens
  misc_RNA (1)...(19): siRNA sense strand
uaaggaauaugucuuguuc

SEQ ID NO: 1879970 - RNA, 19 nt, Homo sapiens
  misc_RNA (1)...(19): siRNA sense strand
gaacugaagucuguuuuaa

SEQ ID NO: 1879971 - RNA, 19 nt, Homo sapiens
  misc_RNA (1)...(19): siRNA sense strand
uggaacaucucaucagaaa

SEQ ID NO: 1879972 - RNA, 19 nt, Homo sapiens
  misc_RNA (1)...(19): siRNA sense strand
caaggucaccaauaagaua

SEQ ID NO: 1879973 - RNA, 19 nt, Homo sapiens
  misc_RNA (1)...(19): siRNA sense strand
cagagggcauucagacuaa

SEQ ID NO: 1879974 - RNA, 19 nt, Homo sapiens
  misc_RNA (1)...(19): siRNA sense strand
ggaaauaaaguguggaaca

SEQ ID NO: 1879975 - RNA, 19 nt, Homo sapiens
  misc_RNA (1)...(19): siRNA sense strand
aagcaaauaucacaugguu

SEQ ID NO: 1879976 - RNA, 19 nt, Homo sapiens
  misc_RNA (1)...(19): siRNA sense strand
gaauguauuucccaaagca

SEQ ID NO: 1879977 - RNA, 19 nt, Homo sapiens
  misc_RNA (1)...(19): siRNA sense strand
acucugcacuuaaggaaua

SEQ ID NO: 1879978 - RNA, 19 nt, Homo sapiens
  misc_RNA (1)...(19): siRNA sense strand
gcaauuccacauuacuuaa

SEQ ID NO: 1879979 - RNA, 19 nt, Homo sapiens
  misc_RNA (1)...(19): siRNA sense strand
uagagucgguccuaacaaa

SEQ ID NO: 1879980 - RNA, 19 nt, Homo sapiens
  misc_RNA (1)...(19): siRNA sense strand
gauaauggaacucaggaaa

SEQ ID NO: 1879981 - RNA, 19 nt, Homo sapiens
  misc_RNA (1)...(19): siRNA sense strand
ccacggaugucuugguaga

SEQ ID NO: 1879982 - RNA, 19 nt, Homo sapiens
  misc_RNA (1)...(19): siRNA sense strand
cacagaaacuccugagaau

SEQ ID NO: 1879983 - RNA, 19 nt, Homo sapiens
  misc_RNA (1)...(19): siRNA sense strand
aaacuaaucacguccauau

SEQ ID NO: 1879984 - RNA, 19 nt, Homo sapiens
  misc_RNA (1)...(19): siRNA sense strand
ccagcuacaucuucaguga

SEQ ID NO: 1879985 - RNA, 19 nt, Homo sapiens
  misc_RNA (1)...(19): siRNA sense strand
cagcacagccagagcauuu

SEQ ID NO: 1879986 - RNA, 19 nt, Homo sapiens
  misc_RNA (1)...(19): siRNA sense strand
ccaauaagauagaccugau

SEQ ID NO: 1879987 - RNA, 19 nt, Homo sapiens
  misc_RNA (1)...(19): siRNA sense strand
ggaaauacugugcugucua

SEQ ID NO: 1879988 - RNA, 19 nt, Homo sapiens
  misc_RNA (1)...(19): siRNA sense strand
ccauaucacugguauugug

SEQ ID NO: 1879989 - RNA, 19 nt, Homo sapiens
  misc_RNA (1)...(19): siRNA sense strand
ucacagaaacuccugagaa

SEQ ID NO: 1879990 - RNA, 19 nt, Homo sapiens
  misc_RNA (1)...(19): siRNA sense strand
gauauuguuuggucuugga

SEQ ID NO: 1879991 - RNA, 19 nt, Homo sapiens
  misc_RNA (1)...(19): siRNA sense strand
caagauauccagcuacauc

SEQ ID NO: 1879992 - RNA, 19 nt, Homo sapiens
  misc_RNA (1)...(19): siRNA sense strand
gaacucaggaaacacuuau

SEQ ID NO: 1879993 - RNA, 19 nt, Homo sapiens
  misc_RNA (1)...(19): siRNA sense strand
ggaacucaggaaacacuua

SEQ ID NO: 1879994 - RNA, 19 nt, Homo sapiens
  misc_RNA (1)...(19): siRNA sense strand
uaauaaaccagcccaauca

SEQ ID NO: 1879995 - RNA, 19 nt, Homo sapiens
  misc_RNA (1)...(19): siRNA sense strand
uaauggaacucaggaaaca

SEQ ID NO: 1879996 - RNA, 19 nt, Homo sapiens
  misc_RNA (1)...(19): siRNA sense strand
caguguaucuccugcaaga

SEQ ID NO: 1879997 - RNA, 19 nt, Homo sapiens
  misc_RNA (1)...(19): siRNA sense strand
guccaaaucuucgaugaug

SEQ ID NO: 1879998 - RNA, 19 nt, Homo sapiens
  misc_RNA (1)...(19): siRNA sense strand
gagucaagcuugguacaga

SEQ ID NO: 1879999 - RNA, 19 nt, Homo sapiens
  misc_RNA (1)...(19): siRNA sense strand
ccagagggcauucagacua

SEQ ID NO: 1880000 - RNA, 19 nt, Homo sapiens
  misc_RNA (1)...(19): siRNA sense strand
ggugcaggcucaacacuuc

SEQ ID NO: 1880001 - RNA, 19 nt, Homo sapiens
  misc_RNA (1)...(19): siRNA sense strand
aaaauggacucugcacuua

SEQ ID NO: 1880002 - RNA, 19 nt, Homo sapiens
  misc_RNA (1)...(19): siRNA sense strand
guaauaaaccagcccaauc

SEQ ID NO: 1880003 - RNA, 19 nt, Homo sapiens
  misc_RNA (1)...(19): siRNA sense strand
gauagagucaagcuuggua

SEQ ID NO: 1880004 - RNA, 19 nt, Homo sapiens
  misc_RNA (1)...(19): siRNA sense strand
caaccauacgauagaaaua

SEQ ID NO: 1880005 - RNA, 19 nt, Homo sapiens
  misc_RNA (1)...(19): siRNA sense strand
acacuuggcucugauguca

SEQ ID NO: 1880006 - RNA, 19 nt, Homo sapiens
  misc_RNA (1)...(19): siRNA sense strand
caacccagcaauuccagua

SEQ ID NO: 1880007 - RNA, 19 nt, Homo sapiens
  misc_RNA (1)...(19): siRNA sense strand
ggauaccuagugaaacaua

SEQ ID NO: 1880008 - RNA, 19 nt, Homo sapiens
  misc_RNA (1)...(19): siRNA sense strand
ucuacaaccuucucauuca

SEQ ID NO: 1880009 - RNA, 19 nt, Homo sapiens
  misc_RNA (1)...(19): siRNA sense strand
gaucugccuuaucaugaga

SEQ ID NO: 1880010 - RNA, 19 nt, Homo sapiens
  misc_RNA (1)...(19): siRNA sense strand
gaaagugaucugccuuauc

SEQ ID NO: 1880011 - RNA, 19 nt, Homo sapiens
  misc_RNA (1)...(19): siRNA sense strand
cgaaagugaucugccuuau

SEQ ID NO: 1880012 - RNA, 19 nt, Homo sapiens
  misc_RNA (1)...(19): siRNA sense strand
cagacaacuugaccauuug

SEQ ID NO: 1880013 - RNA, 19 nt, Homo sapiens
  misc_RNA (1)...(19): siRNA sense strand
acaaggguacauaguaaua

SEQ ID NO: 1880014 - RNA, 19 nt, Homo sapiens
  misc_RNA (1)...(19): siRNA sense strand
uuaacaaggguacauagua

SEQ ID NO: 1880015 - RNA, 19 nt, Homo sapiens
  misc_RNA (1)...(19): siRNA sense strand
caucugaguucaccuaugc

SEQ ID NO: 1880016 - RNA, 19 nt, Homo sapiens
  misc_RNA (1)...(19): siRNA sense strand
gagaaugggucaaaaugga

SEQ ID NO: 1880017 - RNA, 19 nt, Homo sapiens
  misc_RNA (1)...(19): siRNA sense strand
ccaccucucuccaguccaa

SEQ ID NO: 1880018 - RNA, 19 nt, Homo sapiens
  misc_RNA (1)...(19): siRNA sense strand
gcaaccauacgauagaaau

SEQ ID NO: 1880019 - RNA, 19 nt, Homo sapiens
  misc_RNA (1)...(19): siRNA sense strand
ccaauacggcuucuacugu

SEQ ID NO: 1880020 - RNA, 19 nt, Homo sapiens
  misc_RNA (1)...(19): siRNA sense strand
cagaaacuccugagaaugg

SEQ ID NO: 1880021 - RNA, 19 nt, Homo sapiens
  misc_RNA (1)...(19): siRNA sense strand
ggacucugcacuuaaggaa

SEQ ID NO: 1880022 - RNA, 19 nt, Homo sapiens
  misc_RNA (1)...(19): siRNA sense strand
caacacuucaugacaaugu

SEQ ID NO: 1880023 - RNA, 19 nt, Homo sapiens
  misc_RNA (1)...(19): siRNA sense strand
gaacaucucaucagaaaag

SEQ ID NO: 1880024 - RNA, 19 nt, Homo sapiens
  misc_RNA (1)...(19): siRNA sense strand
caaggguacauaguaauaa

SEQ ID NO: 1880025 - RNA, 19 nt, Homo sapiens
  misc_RNA (1)...(19): siRNA sense strand
ccaaagcaaauaucacaug

SEQ ID NO: 1880026 - RNA, 19 nt, Homo sapiens
  misc_RNA (1)...(19): siRNA sense strand
caaccugaccugccaaaca

SEQ ID NO: 1880027 - RNA, 19 nt, Homo sapiens
  misc_RNA (1)...(19): siRNA sense strand
aaaaucaguuucacggaua

SEQ ID NO: 1880028 - RNA, 19 nt, Homo sapiens
  misc_RNA (1)...(19): siRNA sense strand
guucugaaauuuccucaac

SEQ ID NO: 1880029 - RNA, 19 nt, Homo sapiens
  misc_RNA (1)...(19): siRNA sense strand
cagcaaccauacgauagaa

SEQ ID NO: 1880030 - RNA, 19 nt, Homo sapiens
  misc_RNA (1)...(19): siRNA sense strand
caccaccucccaucaagua

SEQ ID NO: 1880031 - RNA, 19 nt, Homo sapiens
  misc_RNA (1)...(19): siRNA sense strand
gccaauggaucuacgaaaa

SEQ ID NO: 1880032 - RNA, 19 nt, Homo sapiens
  misc_RNA (1)...(19): siRNA sense strand
ucuauuacaucauccagau

SEQ ID NO: 1880033 - RNA, 19 nt, Homo sapiens
  misc_RNA (1)...(19): siRNA sense strand
aagaauguauuucccaaag

SEQ ID NO: 1880034 - RNA, 19 nt, Homo sapiens
  misc_RNA (1)...(19): siRNA sense strand
gaaacacuuaucucccaaa

SEQ ID NO: 1880035 - RNA, 19 nt, Homo sapiens
  misc_RNA (1)...(19): siRNA sense strand
ucacugguauuguggucaa

SEQ ID NO: 1880036 - RNA, 19 nt, Homo sapiens
  misc_RNA (1)...(19): siRNA sense strand
acacuuaucucccaaaauc

SEQ ID NO: 1880037 - RNA, 19 nt, Homo sapiens
  misc_RNA (1)...(19): siRNA sense strand
gcacuuaaggaauaugucu

SEQ ID NO: 1880038 - RNA, 19 nt, Homo sapiens
  misc_RNA (1)...(19): siRNA sense strand
aauaaaguguggaacaucu

SEQ ID NO: 1880039 - RNA, 19 nt, Homo sapiens
  misc_RNA (1)...(19): siRNA sense strand
uaacuccacggaugucuug

SEQ ID NO: 1880040 - RNA, 19 nt, Homo sapiens
  misc_RNA (1)...(19): siRNA sense strand
guacgaguguaugcuuguu

SEQ ID NO: 1880041 - RNA, 19 nt, Homo sapiens
  misc_RNA (1)...(19): siRNA sense strand
uguggaacaucucaucaga

SEQ ID NO: 1880042 - RNA, 19 nt, Homo sapiens
  misc_RNA (1)...(19): siRNA sense strand
acggauaccuagugaaaca

SEQ ID NO: 1880043 - RNA, 19 nt, Homo sapiens
  misc_RNA (1)...(19): siRNA sense strand
gcaauuccaguaugacuac

SEQ ID NO: 1880044 - RNA, 19 nt, Homo sapiens
  misc_RNA (1)...(19): siRNA sense strand
ucaacagacccuccacuga

SEQ ID NO: 1880045 - RNA, 19 nt, Homo sapiens
  misc_RNA (1)...(19): siRNA sense strand
cagugacccuuguagaugu

SEQ ID NO: 1880046 - RNA, 19 nt, Homo sapiens
  misc_RNA (1)...(19): siRNA sense strand
caucuucagugacccuugu

SEQ ID NO: 1880047 - RNA, 19 nt, Homo sapiens
  misc_RNA (1)...(19): siRNA sense strand
aguguaugcuuguucugua

SEQ ID NO: 1880048 - RNA, 19 nt, Homo sapiens
  misc_RNA (1)...(19): siRNA sense strand
guccauaucacugguauug

SEQ ID NO: 1880049 - RNA, 19 nt, Homo sapiens
  misc_RNA (1)...(19): siRNA sense strand
gauauccagcuacaucuuc

SEQ ID NO: 1880050 - RNA, 19 nt, Homo sapiens
  misc_RNA (1)...(19): siRNA sense strand
uuacagaaucuacccuuga

SEQ ID NO: 1880051 - RNA, 19 nt, Homo sapiens
  misc_RNA (1)...(19): siRNA sense strand
auacugugcugucuauuac

SEQ ID NO: 1880052 - RNA, 19 nt, Homo sapiens
  misc_RNA (1)...(19): siRNA sense strand
gauuguagcagcuuuacuc

SEQ ID NO: 1880053 - RNA, 19 nt, Homo sapiens
  misc_RNA (1)...(19): siRNA sense strand
gcaaauaucacaugguuua

SEQ ID NO: 1880054 - RNA, 19 nt, Homo sapiens
  misc_RNA (1)...(19): siRNA sense strand
gaaguucucuugccacauu

SEQ ID NO: 1880055 - RNA, 19 nt, Homo sapiens
  misc_RNA (1)...(19): siRNA sense strand
gaaauacugugcugucuau

SEQ ID NO: 1880056 - RNA, 19 nt, Homo sapiens
  misc_RNA (1)...(19): siRNA sense strand
uaacaaggguacauaguaa

SEQ ID NO: 1880057 - RNA, 19 nt, Homo sapiens
  misc_RNA (1)...(19): siRNA sense strand
caucagcaauuccacauua

SEQ ID NO: 1880058 - RNA, 19 nt, Homo sapiens
  misc_RNA (1)...(19): siRNA sense strand
gagaagauuuaccugcuua

SEQ ID NO: 1880059 - RNA, 19 nt, Homo sapiens
  misc_RNA (1)...(19): siRNA sense strand
gguccaaggucaccaauaa

SEQ ID NO: 1880060 - RNA, 19 nt, Homo sapiens
  misc_RNA (1)...(19): siRNA sense strand
gaacagcaaccauacgaua

SEQ ID NO: 1880061 - RNA, 19 nt, Homo sapiens
  misc_RNA (1)...(19): siRNA sense strand
ucagacaacuugaccauuu

SEQ ID NO: 1880062 - RNA, 19 nt, Homo sapiens
  misc_RNA (1)...(19): siRNA sense strand
gaaauaaaguguggaacau

SEQ ID NO: 1880063 - RNA, 19 nt, Homo sapiens
  misc_RNA (1)...(19): siRNA sense strand
ggaauguccuggccaguga

SEQ ID NO: 1880064 - RNA, 19 nt, Homo sapiens
  misc_RNA (1)...(19): siRNA sense strand
ucucuuagguucugaaauu

SEQ ID NO: 1880065 - RNA, 19 nt, Homo sapiens
  misc_RNA (1)...(19): siRNA sense strand
uguagcagcuuuacucuuu

SEQ ID NO: 1880066 - RNA, 19 nt, Homo sapiens
  misc_RNA (1)...(19): siRNA sense strand
ccacauuacuuaaagauag

SEQ ID NO: 1880067 - RNA, 19 nt, Homo sapiens
  misc_RNA (1)...(19): siRNA sense strand
gcucaacacuucaugacaa

SEQ ID NO: 1880068 - RNA, 19 nt, Homo sapiens
  misc_RNA (1)...(19): siRNA sense strand
agauuuaccugcuuacuaa

SEQ ID NO: 1880069 - RNA, 19 nt, Homo sapiens
  misc_RNA (1)...(19): siRNA sense strand
uaaggaauaugucuuguuc

SEQ ID NO: 1880070 - RNA, 19 nt, Homo sapiens
  misc_RNA (1)...(19): siRNA sense strand
gaacugaagucuguuuuaa

SEQ ID NO: 1880071 - RNA, 19 nt, Homo sapiens
  misc_RNA (1)...(19): siRNA sense strand
uggaacaucucaucagaaa

SEQ ID NO: 1880072 - RNA, 19 nt, Homo sapiens
  misc_RNA (1)...(19): siRNA sense strand
caaggucaccaauaagaua

SEQ ID NO: 1880073 - RNA, 19 nt, Homo sapiens
  misc_RNA (1)...(19): siRNA sense strand
cagagggcauucagacuaa

SEQ ID NO: 1880074 - RNA, 19 nt, Homo sapiens
  misc_RNA (1)...(19): siRNA sense strand
ggaaauaaaguguggaaca

SEQ ID NO: 1880075 - RNA, 19 nt, Homo sapiens
  misc_RNA (1)...(19): siRNA sense strand
aagcaaauaucacaugguu

SEQ ID NO: 1880076 - RNA, 19 nt, Homo sapiens
  misc_RNA (1)...(19): siRNA sense strand
gaauguauuucccaaagca

SEQ ID NO: 1880077 - RNA, 19 nt, Homo sapiens
  misc_RNA (1)...(19): siRNA sense strand
acucugcacuuaaggaaua

SEQ ID NO: 1880078 - RNA, 19 nt, Homo sapiens
  misc_RNA (1)...(19): siRNA sense strand
gcaauuccacauuacuuaa

SEQ ID NO: 1880079 - RNA, 19 nt, Homo sapiens
  misc_RNA (1)...(19): siRNA sense strand
uagagucgguccuaacaaa

SEQ ID NO: 1880080 - RNA, 19 nt, Homo sapiens
  misc_RNA (1)...(19): siRNA sense strand
gauaauggaacucaggaaa

SEQ ID NO: 1880081 - RNA, 19 nt, Homo sapiens
  misc_RNA (1)...(19): siRNA sense strand
ccacggaugucuugguaga

SEQ ID NO: 1880082 - RNA, 19 nt, Homo sapiens
  misc_RNA (1)...(19): siRNA sense strand
cacagaaacuccugagaau

SEQ ID NO: 1880083 - RNA, 19 nt, Homo sapiens
  misc_RNA (1)...(19): siRNA sense strand
aaacuaaucacguccauau

SEQ ID NO: 1880084 - RNA, 19 nt, Homo sapiens
  misc_RNA (1)...(19): siRNA sense strand
ccagcuacaucuucaguga

SEQ ID NO: 1880085 - RNA, 19 nt, Homo sapiens
  misc_RNA (1)...(19): siRNA sense strand
cagcacagccagagcauuu

SEQ ID NO: 1880086 - RNA, 19 nt, Homo sapiens
  misc_RNA (1)...(19): siRNA sense strand
ccaauaagauagaccugau

SEQ ID NO: 1880087 - RNA, 19 nt, Homo sapiens
  misc_RNA (1)...(19): siRNA sense strand
ggaaauacugugcugucua

SEQ ID NO: 1880088 - RNA, 19 nt, Homo sapiens
  misc_RNA (1)...(19): siRNA sense strand
ccauaucacugguauugug

SEQ ID NO: 1880089 - RNA, 19 nt, Homo sapiens
  misc_RNA (1)...(19): siRNA sense strand
ucacagaaacuccugagaa

SEQ ID NO: 1880090 - RNA, 19 nt, Homo sapiens
  misc_RNA (1)...(19): siRNA sense strand
gauauuguuuggucuugga

SEQ ID NO: 1880091 - RNA, 19 nt, Homo sapiens
  misc_RNA (1)...(19): siRNA sense strand
caagauauccagcuacauc

SEQ ID NO: 1880092 - RNA, 19 nt, Homo sapiens
  misc_RNA (1)...(19): siRNA sense strand
gaacucaggaaacacuuau

SEQ ID NO: 1880093 - RNA, 19 nt, Homo sapiens
  misc_RNA (1)...(19): siRNA sense strand
ggaacucaggaaacacuua

SEQ ID NO: 1880094 - RNA, 19 nt, Homo sapiens
  misc_RNA (1)...(19): siRNA sense strand
uaauaaaccagcccaauca

SEQ ID NO: 1880095 - RNA, 19 nt, Homo sapiens
  misc_RNA (1)...(19): siRNA sense strand
uaauggaacucaggaaaca

SEQ ID NO: 1880096 - RNA, 19 nt, Homo sapiens
  misc_RNA (1)...(19): siRNA sense strand
caguguaucuccugcaaga

SEQ ID NO: 1880097 - RNA, 19 nt, Homo sapiens
  misc_RNA (1)...(19): siRNA sense strand
guccaaaucuucgaugaug

SEQ ID NO: 1880098 - RNA, 19 nt, Homo sapiens
  misc_RNA (1)...(19): siRNA sense strand
gagucaagcuugguacaga

SEQ ID NO: 1880099 - RNA, 19 nt, Homo sapiens
  misc_RNA (1)...(19): siRNA sense strand
ccagagggcauucagacua

SEQ ID NO: 1880100 - RNA, 19 nt, Homo sapiens
  misc_RNA (1)...(19): siRNA sense strand
ggugcaggcucaacacuuc

SEQ ID NO: 1880101 - RNA, 19 nt, Homo sapiens
  misc_RNA (1)...(19): siRNA sense strand
aaaauggacucugcacuua

SEQ ID NO: 1880102 - RNA, 19 nt, Homo sapiens
  misc_RNA (1)...(19): siRNA sense strand
guaauaaaccagcccaauc

SEQ ID NO: 1880103 - RNA, 19 nt, Homo sapiens
  misc_RNA (1)...(19): siRNA sense strand
gauagagucaagcuuggua

SEQ ID NO: 1880104 - RNA, 19 nt, Homo sapiens
  misc_RNA (1)...(19): siRNA sense strand
caaccauacgauagaaaua

SEQ ID NO: 1880105 - RNA, 19 nt, Homo sapiens
  misc_RNA (1)...(19): siRNA sense strand
acacuuggcucugauguca

SEQ ID NO: 1880106 - RNA, 19 nt, Homo sapiens
  misc_RNA (1)...(19): siRNA sense strand
caacccagcaauuccagua

SEQ ID NO: 1880107 - RNA, 19 nt, Homo sapiens
  misc_RNA (1)...(19): siRNA sense strand
ggauaccuagugaaacaua

SEQ ID NO: 1880108 - RNA, 19 nt, Homo sapiens
  misc_RNA (1)...(19): siRNA sense strand
ucuacaaccuucucauuca

SEQ ID NO: 1880109 - RNA, 19 nt, Homo sapiens
  misc_RNA (1)...(19): siRNA sense strand
gaucugccuuaucaugaga

SEQ ID NO: 1880110 - RNA, 19 nt, Homo sapiens
  misc_RNA (1)...(19): siRNA sense strand
gaaagugaucugccuuauc

SEQ ID NO: 1880111 - RNA, 19 nt, Homo sapiens
  misc_RNA (1)...(19): siRNA sense strand
cgaaagugaucugccuuau

SEQ ID NO: 1880112 - RNA, 19 nt, Homo sapiens
  misc_RNA (1)...(19): siRNA sense strand
cagacaacuugaccauuug

SEQ ID NO: 1880113 - RNA, 19 nt, Homo sapiens
  misc_RNA (1)...(19): siRNA sense strand
acaaggguacauaguaaua

SEQ ID NO: 1880114 - RNA, 19 nt, Homo sapiens
  misc_RNA (1)...(19): siRNA sense strand
uuaacaaggguacauagua

SEQ ID NO: 1880115 - RNA, 19 nt, Homo sapiens
  misc_RNA (1)...(19): siRNA sense strand
caucugaguucaccuaugc

SEQ ID NO: 1880116 - RNA, 19 nt, Homo sapiens
  misc_RNA (1)...(19): siRNA sense strand
gagaaugggucaaaaugga

SEQ ID NO: 1880117 - RNA, 19 nt, Homo sapiens
  misc_RNA (1)...(19): siRNA sense strand
ccaccucucuccaguccaa

SEQ ID NO: 1880118 - RNA, 19 nt, Homo sapiens
  misc_RNA (1)...(19): siRNA sense strand
gcaaccauacgauagaaau

SEQ ID NO: 1880119 - RNA, 19 nt, Homo sapiens
  misc_RNA (1)...(19): siRNA sense strand
ccaauacggcuucuacugu

SEQ ID NO: 1880120 - RNA, 19 nt, Homo sapiens
  misc_RNA (1)...(19): siRNA sense strand
cagaaacuccugagaaugg

SEQ ID NO: 1880121 - RNA, 19 nt, Homo sapiens
  misc_RNA (1)...(19): siRNA sense strand
ggacucugcacuuaaggaa

SEQ ID NO: 1880122 - RNA, 19 nt, Homo sapiens
  misc_RNA (1)...(19): siRNA sense strand
caacacuucaugacaaugu

SEQ ID NO: 1880123 - RNA, 19 nt, Homo sapiens
  misc_RNA (1)...(19): siRNA sense strand
gaacaucucaucagaaaag

SEQ ID NO: 1880124 - RNA, 19 nt, Homo sapiens
  misc_RNA (1)...(19): siRNA sense strand
caaggguacauaguaauaa

SEQ ID NO: 1880125 - RNA, 19 nt, Homo sapiens
  misc_RNA (1)...(19): siRNA sense strand
ccaaagcaaauaucacaug

SEQ ID NO: 1880126 - RNA, 19 nt, Homo sapiens
  misc_RNA (1)...(19): siRNA sense strand
caaccugaccugccaaaca

SEQ ID NO: 1880127 - RNA, 19 nt, Homo sapiens
  misc_RNA (1)...(19): siRNA sense strand
aaaaucaguuucacggaua

SEQ ID NO: 1880128 - RNA, 19 nt, Homo sapiens
  misc_RNA (1)...(19): siRNA sense strand
guucugaaauuuccucaac

SEQ ID NO: 1880129 - RNA, 19 nt, Homo sapiens
  misc_RNA (1)...(19): siRNA sense strand
cagcaaccauacgauagaa

SEQ ID NO: 1880130 - RNA, 19 nt, Homo sapiens
  misc_RNA (1)...(19): siRNA sense strand
caccaccucccaucaagua

SEQ ID NO: 1880131 - RNA, 19 nt, Homo sapiens
  misc_RNA (1)...(19): siRNA sense strand
gccaauggaucuacgaaaa

SEQ ID NO: 1880132 - RNA, 19 nt, Homo sapiens
  misc_RNA (1)...(19): siRNA sense strand
ucuauuacaucauccagau

SEQ ID NO: 1880133 - RNA, 19 nt, Homo sapiens
  misc_RNA (1)...(19): siRNA sense strand
aagaauguauuucccaaag

SEQ ID NO: 1880134 - RNA, 19 nt, Homo sapiens
  misc_RNA (1)...(19): siRNA sense strand
gaaacacuuaucucccaaa

SEQ ID NO: 1880135 - RNA, 19 nt, Homo sapiens
  misc_RNA (1)...(19): siRNA sense strand
ucacugguauuguggucaa

SEQ ID NO: 1880136 - RNA, 19 nt, Homo sapiens
  misc_RNA (1)...(19): siRNA sense strand
acacuuaucucccaaaauc

SEQ ID NO: 1880137 - RNA, 19 nt, Homo sapiens
  misc_RNA (1)...(19): siRNA sense strand
gcacuuaaggaauaugucu

SEQ ID NO: 1880138 - RNA, 19 nt, Homo sapiens
  misc_RNA (1)...(19): siRNA sense strand
aauaaaguguggaacaucu

SEQ ID NO: 1880139 - RNA, 19 nt, Homo sapiens
  misc_RNA (1)...(19): siRNA sense strand
uaacuccacggaugucuug

SEQ ID NO: 1880140 - RNA, 19 nt, Homo sapiens
  misc_RNA (1)...(19): siRNA sense strand
guacgaguguaugcuuguu

SEQ ID NO: 1880141 - RNA, 19 nt, Homo sapiens
  misc_RNA (1)...(19): siRNA sense strand
uguggaacaucucaucaga

SEQ ID NO: 1880142 - RNA, 19 nt, Homo sapiens
  misc_RNA (1)...(19): siRNA sense strand
acggauaccuagugaaaca

SEQ ID NO: 1880143 - RNA, 19 nt, Homo sapiens
  misc_RNA (1)...(19): siRNA sense strand
gcaauuccaguaugacuac

SEQ ID NO: 1880144 - RNA, 19 nt, Homo sapiens
  misc_RNA (1)...(19): siRNA sense strand
ucaacagacccuccacuga

SEQ ID NO: 1880145 - RNA, 19 nt, Homo sapiens
  misc_RNA (1)...(19): siRNA sense strand
cagugacccuuguagaugu

SEQ ID NO: 1880146 - RNA, 19 nt, Homo sapiens
  misc_RNA (1)...(19): siRNA sense strand
caucuucagugacccuugu

SEQ ID NO: 1880147 - RNA, 19 nt, Homo sapiens
  misc_RNA (1)...(19): siRNA sense strand
aguguaugcuuguucugua

SEQ ID NO: 1880148 - RNA, 19 nt, Homo sapiens
  misc_RNA (1)...(19): siRNA sense strand
guccauaucacugguauug

SEQ ID NO: 1880149 - RNA, 19 nt, Homo sapiens
  misc_RNA (1)...(19): siRNA sense strand
gauauccagcuacaucuuc

SEQ ID NO: 1880150 - RNA, 19 nt, Homo sapiens
  misc_RNA (1)...(19): siRNA sense strand
uuacagaaucuacccuuga

SEQ ID NO: 1880151 - RNA, 19 nt, Homo sapiens
  misc_RNA (1)...(19): siRNA sense strand
auacugugcugucuauuac

SEQ ID NO: 1880152 - RNA, 19 nt, Homo sapiens
  misc_RNA (1)...(19): siRNA sense strand
gauuguagcagcuuuacuc

SEQ ID NO: 1880153 - RNA, 19 nt, Homo sapiens
  misc_RNA (1)...(19): siRNA sense strand
gaagaccgccugaaaguua

SEQ ID NO: 1880154 - RNA, 19 nt, Homo sapiens
  misc_RNA (1)...(19): siRNA sense strand
gcaaggagaagaagaagaa

SEQ ID NO: 1880155 - RNA, 19 nt, Homo sapiens
  misc_RNA (1)...(19): siRNA sense strand
caaagaagaccgccugaaa

SEQ ID NO: 1880156 - RNA, 19 nt, Homo sapiens
  misc_RNA (1)...(19): siRNA sense strand
cagcagagauacagccuuu

SEQ ID NO: 1880157 - RNA, 19 nt, Homo sapiens
  misc_RNA (1)...(19): siRNA sense strand
gaucuaccaugcauugucu

SEQ ID NO: 1880158 - RNA, 19 nt, Homo sapiens
  misc_RNA (1)...(19): siRNA sense strand
aaccagagcagcagagaua

SEQ ID NO: 1880159 - RNA, 19 nt, Homo sapiens
  misc_RNA (1)...(19): siRNA sense strand
caugaacucuggaaacagu

SEQ ID NO: 1880160 - RNA, 19 nt, Homo sapiens
  misc_RNA (1)...(19): siRNA sense strand
gaagaagaagaaagccaaa

SEQ ID NO: 1880161 - RNA, 19 nt, Homo sapiens
  misc_RNA (1)...(19): siRNA sense strand
cugcggcucuuugacauua

SEQ ID NO: 1880162 - RNA, 19 nt, Homo sapiens
  misc_RNA (1)...(19): siRNA sense strand
ggcuuuauuuccuacauuu

SEQ ID NO: 1880163 - RNA, 19 nt, Homo sapiens
  misc_RNA (1)...(19): siRNA sense strand
uaaacugcguguucacugu

SEQ ID NO: 1880164 - RNA, 19 nt, Homo sapiens
  misc_RNA (1)...(19): siRNA sense strand
gggaacgauugaccuguga

SEQ ID NO: 1880165 - RNA, 19 nt, Homo sapiens
  misc_RNA (1)...(19): siRNA sense strand
gcuauuauuucagugacaa

SEQ ID NO: 1880166 - RNA, 19 nt, Homo sapiens
  misc_RNA (1)...(19): siRNA sense strand
uaccaugcauugucucaga

SEQ ID NO: 1880167 - RNA, 19 nt, Homo sapiens
  misc_RNA (1)...(19): siRNA sense strand
caggaaacaaagcacauuu

SEQ ID NO: 1880168 - RNA, 19 nt, Homo sapiens
  misc_RNA (1)...(19): siRNA sense strand
caagcuaaacugcguguuc

SEQ ID NO: 1880169 - RNA, 19 nt, Homo sapiens
  misc_RNA (1)...(19): siRNA sense strand
guacuucacccgccacaag

SEQ ID NO: 1880170 - RNA, 19 nt, Homo sapiens
  misc_RNA (1)...(19): siRNA sense strand
gcggcucuuugacauuaaa

SEQ ID NO: 1880171 - RNA, 19 nt, Homo sapiens
  misc_RNA (1)...(19): siRNA sense strand
cagcuucggucaagugaac

SEQ ID NO: 1880172 - RNA, 19 nt, Homo sapiens
  misc_RNA (1)...(19): siRNA sense strand
aagcuaaacugcguguuca

SEQ ID NO: 1880173 - RNA, 19 nt, Homo sapiens
  misc_RNA (1)...(19): siRNA sense strand
gauucaggccaagcucuua

SEQ ID NO: 1880174 - RNA, 19 nt, Homo sapiens
  misc_RNA (1)...(19): siRNA sense strand
aaagaagaccgccugaaag

SEQ ID NO: 1880175 - RNA, 19 nt, Homo sapiens
  misc_RNA (1)...(19): siRNA sense strand
gccacaagcgcaaggagaa

SEQ ID NO: 1880176 - RNA, 19 nt, Homo sapiens
  misc_RNA (1)...(19): siRNA sense strand
aagaagaccgccugaaagu

SEQ ID NO: 1880177 - RNA, 19 nt, Homo sapiens
  misc_RNA (1)...(19): siRNA sense strand
gaucuucacggggcuauua

SEQ ID NO: 1880178 - RNA, 19 nt, Homo sapiens
  misc_RNA (1)...(19): siRNA sense strand
gcucuuaaaggcagaucuu

SEQ ID NO: 1880179 - RNA, 19 nt, Homo sapiens
  misc_RNA (1)...(19): siRNA sense strand
ucacggggcuauuauuuca

SEQ ID NO: 1880180 - RNA, 19 nt, Homo sapiens
  misc_RNA (1)...(19): siRNA sense strand
ccaaaugccccucuuaugu

SEQ ID NO: 1880181 - RNA, 19 nt, Homo sapiens
  misc_RNA (1)...(19): siRNA sense strand
aaaguuauccccaagcuaa

SEQ ID NO: 1880182 - RNA, 19 nt, Homo sapiens
  misc_RNA (1)...(19): siRNA sense strand
ggucugcgaagaaguucaa

SEQ ID NO: 1880183 - RNA, 19 nt, Homo sapiens
  misc_RNA (1)...(19): siRNA sense strand
caaagcgaagggaacgauu

SEQ ID NO: 1880184 - RNA, 19 nt, Homo sapiens
  misc_RNA (1)...(19): siRNA sense strand
gaaagccaaaggccucucu

SEQ ID NO: 1880185 - RNA, 19 nt, Homo sapiens
  misc_RNA (1)...(19): siRNA sense strand
ccucuuauguggguauuac

SEQ ID NO: 1880186 - RNA, 19 nt, Homo sapiens
  misc_RNA (1)...(19): siRNA sense strand
uggcuuuauuuccuacauu

SEQ ID NO: 1880187 - RNA, 19 nt, Homo sapiens
  misc_RNA (1)...(19): siRNA sense strand
gugaacggucugcgaagaa

SEQ ID NO: 1880188 - RNA, 19 nt, Homo sapiens
  misc_RNA (1)...(19): siRNA sense strand
gacacgcagccacagauga

SEQ ID NO: 1880189 - RNA, 19 nt, Homo sapiens
  misc_RNA (1)...(19): siRNA sense strand
aggcggugguccuggagua

SEQ ID NO: 1880190 - RNA, 19 nt, Homo sapiens
  misc_RNA (1)...(19): siRNA sense strand
ccaaagaagaccgccugaa

SEQ ID NO: 1880191 - RNA, 19 nt, Homo sapiens
  misc_RNA (1)...(19): siRNA sense strand
aaagcgaagggaacgauug

SEQ ID NO: 1880192 - RNA, 19 nt, Homo sapiens
  misc_RNA (1)...(19): siRNA sense strand
ugaacggucugcgaagaag

SEQ ID NO: 1880193 - RNA, 19 nt, Homo sapiens
  misc_RNA (1)...(19): siRNA sense strand
aagaccgccugaaaguuau

SEQ ID NO: 1880194 - RNA, 19 nt, Homo sapiens
  misc_RNA (1)...(19): siRNA sense strand
ugugaucuaccaugcauug

SEQ ID NO: 1880195 - RNA, 19 nt, Homo sapiens
  misc_RNA (1)...(19): siRNA sense strand
aagcgaagggaacgauuga

SEQ ID NO: 1880196 - RNA, 19 nt, Homo sapiens
  misc_RNA (1)...(19): siRNA sense strand
gcagagauacagccuuuuc

SEQ ID NO: 1880197 - RNA, 19 nt, Homo sapiens
  misc_RNA (1)...(19): siRNA sense strand
uuuccucccucuccaugaa

SEQ ID NO: 1880198 - RNA, 19 nt, Homo sapiens
  misc_RNA (1)...(19): siRNA sense strand
acacgcagccacagaugau

SEQ ID NO: 1880199 - RNA, 19 nt, Homo sapiens
  misc_RNA (1)...(19): siRNA sense strand
ggaaagaacuccagguuua

SEQ ID NO: 1880200 - RNA, 19 nt, Homo sapiens
  misc_RNA (1)...(19): siRNA sense strand
ggaaacaacuuuggauaua

SEQ ID NO: 1880201 - RNA, 19 nt, Homo sapiens
  misc_RNA (1)...(19): siRNA sense strand
ggacauagauucacugaug

SEQ ID NO: 1880202 - RNA, 19 nt, Homo sapiens
  misc_RNA (1)...(19): siRNA sense strand
caaaggaggucuuaucuau

SEQ ID NO: 1880203 - RNA, 19 nt, Homo sapiens
  misc_RNA (1)...(19): siRNA sense strand
gaagaggaauucauaagga

SEQ ID NO: 1880204 - RNA, 19 nt, Homo sapiens
  misc_RNA (1)...(19): siRNA sense strand
guacuuaucuccagcauca

SEQ ID NO: 1880205 - RNA, 19 nt, Homo sapiens
  misc_RNA (1)...(19): siRNA sense strand
gaacaucuccuuaguaaag

SEQ ID NO: 1880206 - RNA, 19 nt, Homo sapiens
  misc_RNA (1)...(19): siRNA sense strand
cgagagaucuuucagaaug

SEQ ID NO: 1880207 - RNA, 19 nt, Homo sapiens
  misc_RNA (1)...(19): siRNA sense strand
gaagacaaaucacaaacug

SEQ ID NO: 1880208 - RNA, 19 nt, Homo sapiens
  misc_RNA (1)...(19): siRNA sense strand
ggaacuaccugcauuugga

SEQ ID NO: 1880209 - RNA, 19 nt, Homo sapiens
  misc_RNA (1)...(19): siRNA sense strand
gagagucccuuauaacaga

SEQ ID NO: 1880210 - RNA, 19 nt, Homo sapiens
  misc_RNA (1)...(19): siRNA sense strand
cacaagaacugcaaaguga

SEQ ID NO: 1880211 - RNA, 19 nt, Homo sapiens
  misc_RNA (1)...(19): siRNA sense strand
ggacuucaaugacuucaga

SEQ ID NO: 1880212 - RNA, 19 nt, Homo sapiens
  misc_RNA (1)...(19): siRNA sense strand
gaacucugguuuaagcaaa

SEQ ID NO: 1880213 - RNA, 19 nt, Homo sapiens
  misc_RNA (1)...(19): siRNA sense strand
gaauagagccagcaaagga

SEQ ID NO: 1880214 - RNA, 19 nt, Homo sapiens
  misc_RNA (1)...(19): siRNA sense strand
gaaaaugaacugcuacuua

SEQ ID NO: 1880215 - RNA, 19 nt, Homo sapiens
  misc_RNA (1)...(19): siRNA sense strand
gaagaagacaaaucacaaa

SEQ ID NO: 1880216 - RNA, 19 nt, Homo sapiens
  misc_RNA (1)...(19): siRNA sense strand
aaagacacuucuggaauua

SEQ ID NO: 1880217 - RNA, 19 nt, Homo sapiens
  misc_RNA (1)...(19): siRNA sense strand
gaugaaaggaacaugcuua

SEQ ID NO: 1880218 - RNA, 19 nt, Homo sapiens
  misc_RNA (1)...(19): siRNA sense strand
gaaaggaacaugcuuaagg

SEQ ID NO: 1880219 - RNA, 19 nt, Homo sapiens
  misc_RNA (1)...(19): siRNA sense strand
uaaagaagagucugaagaa

SEQ ID NO: 1880220 - RNA, 19 nt, Homo sapiens
  misc_RNA (1)...(19): siRNA sense strand
gaagaugaacccaaccauu

SEQ ID NO: 1880221 - RNA, 19 nt, Homo sapiens
  misc_RNA (1)...(19): siRNA sense strand
ggaacaugcuuaagguugu

SEQ ID NO: 1880222 - RNA, 19 nt, Homo sapiens
  misc_RNA (1)...(19): siRNA sense strand
ucauaaggauucaggcuaa

SEQ ID NO: 1880223 - RNA, 19 nt, Homo sapiens
  misc_RNA (1)...(19): siRNA sense strand
gaaacaacuuuggauauac

SEQ ID NO: 1880224 - RNA, 19 nt, Homo sapiens
  misc_RNA (1)...(19): siRNA sense strand
gaacccaaccauucacaaa

SEQ ID NO: 1880225 - RNA, 19 nt, Homo sapiens
  misc_RNA (1)...(19): siRNA sense strand
gcacaagaacugcaaagug

SEQ ID NO: 1880226 - RNA, 19 nt, Homo sapiens
  misc_RNA (1)...(19): siRNA sense strand
gaaagacggcugucauaca

SEQ ID NO: 1880227 - RNA, 19 nt, Homo sapiens
  misc_RNA (1)...(19): siRNA sense strand
ccacauggauuuaacuucu

SEQ ID NO: 1880228 - RNA, 19 nt, Homo sapiens
  misc_RNA (1)...(19): siRNA sense strand
gcaucaggcuuccagaguu

SEQ ID NO: 1880229 - RNA, 19 nt, Homo sapiens
  misc_RNA (1)...(19): siRNA sense strand
ggaguuggauucuguucga

SEQ ID NO: 1880230 - RNA, 19 nt, Homo sapiens
  misc_RNA (1)...(19): siRNA sense strand
gcaaaggaggucuuaucua

SEQ ID NO: 1880231 - RNA, 19 nt, Homo sapiens
  misc_RNA (1)...(19): siRNA sense strand
gaacaugagagucccuuau

SEQ ID NO: 1880232 - RNA, 19 nt, Homo sapiens
  misc_RNA (1)...(19): siRNA sense strand
caucaggcuuccagaguuu

SEQ ID NO: 1880233 - RNA, 19 nt, Homo sapiens
  misc_RNA (1)...(19): siRNA sense strand
uaucauaacucaucaagcu

SEQ ID NO: 1880234 - RNA, 19 nt, Homo sapiens
  misc_RNA (1)...(19): siRNA sense strand
cuuaugaacucugguuuaa

SEQ ID NO: 1880235 - RNA, 19 nt, Homo sapiens
  misc_RNA (1)...(19): siRNA sense strand
ugugauagcuccuacuuca

SEQ ID NO: 1880236 - RNA, 19 nt, Homo sapiens
  misc_RNA (1)...(19): siRNA sense strand
gacauagauucacugauga

SEQ ID NO: 1880237 - RNA, 19 nt, Homo sapiens
  misc_RNA (1)...(19): siRNA sense strand
augaacaucuccuuaguaa

SEQ ID NO: 1880238 - RNA, 19 nt, Homo sapiens
  misc_RNA (1)...(19): siRNA sense strand
gcaauuccgacuauuagaa

SEQ ID NO: 1880239 - RNA, 19 nt, Homo sapiens
  misc_RNA (1)...(19): siRNA sense strand
ugagaaacgucaugaacau

SEQ ID NO: 1880240 - RNA, 19 nt, Homo sapiens
  misc_RNA (1)...(19): siRNA sense strand
ucaaugacuucagagagua

SEQ ID NO: 1880241 - RNA, 19 nt, Homo sapiens
  misc_RNA (1)...(19): siRNA sense strand
ggaacagguggcugaauuu

SEQ ID NO: 1880242 - RNA, 19 nt, Homo sapiens
  misc_RNA (1)...(19): siRNA sense strand
aaagaagagucugaagaaa

SEQ ID NO: 1880243 - RNA, 19 nt, Homo sapiens
  misc_RNA (1)...(19): siRNA sense strand
cagaagacauuaucgugau

SEQ ID NO: 1880244 - RNA, 19 nt, Homo sapiens
  misc_RNA (1)...(19): siRNA sense strand
gaacugcuacuuaaaucug

SEQ ID NO: 1880245 - RNA, 19 nt, Homo sapiens
  misc_RNA (1)...(19): siRNA sense strand
gaauggccaugucagagau

SEQ ID NO: 1880246 - RNA, 19 nt, Homo sapiens
  misc_RNA (1)...(19): siRNA sense strand
gugaaagacggcugucaua

SEQ ID NO: 1880247 - RNA, 19 nt, Homo sapiens
  misc_RNA (1)...(19): siRNA sense strand
gugcuacuguccuuauuug

SEQ ID NO: 1880248 - RNA, 19 nt, Homo sapiens
  misc_RNA (1)...(19): siRNA sense strand
acaugagagucccuuauaa

SEQ ID NO: 1880249 - RNA, 19 nt, Homo sapiens
  misc_RNA (1)...(19): siRNA sense strand
cuacuguccuuauuugaug

SEQ ID NO: 1880250 - RNA, 19 nt, Homo sapiens
  misc_RNA (1)...(19): siRNA sense strand
uagauucacugaugaccaa

SEQ ID NO: 1880251 - RNA, 19 nt, Homo sapiens
  misc_RNA (1)...(19): siRNA sense strand
ucauaacucaucaagcuua

SEQ ID NO: 1880252 - RNA, 19 nt, Homo sapiens
  misc_RNA (1)...(19): siRNA sense strand
ugacuucucuuauggacau

SEQ ID NO: 1880253 - RNA, 19 nt, Homo sapiens
  misc_RNA (1)...(19): siRNA sense strand
ucagggagcauugaugaua

SEQ ID NO: 1880254 - RNA, 19 nt, Homo sapiens
  misc_RNA (1)...(19): siRNA sense strand
guccuuauuugaugagaaa

SEQ ID NO: 1880255 - RNA, 19 nt, Homo sapiens
  misc_RNA (1)...(19): siRNA sense strand
aaaggaacaugcuuaaggu

SEQ ID NO: 1880256 - RNA, 19 nt, Homo sapiens
  misc_RNA (1)...(19): siRNA sense strand
caagaacugcaaagugaaa

SEQ ID NO: 1880257 - RNA, 19 nt, Homo sapiens
  misc_RNA (1)...(19): siRNA sense strand
caacugugagugauaggua

SEQ ID NO: 1880258 - RNA, 19 nt, Homo sapiens
  misc_RNA (1)...(19): siRNA sense strand
aggaacagguggcugaauu

SEQ ID NO: 1880259 - RNA, 19 nt, Homo sapiens
  misc_RNA (1)...(19): siRNA sense strand
gcuuaugaacucugguuua

SEQ ID NO: 1880260 - RNA, 19 nt, Homo sapiens
  misc_RNA (1)...(19): siRNA sense strand
gaacuaccugcauuuggaa

SEQ ID NO: 1880261 - RNA, 19 nt, Homo sapiens
  misc_RNA (1)...(19): siRNA sense strand
ggauucaggcuaaagaaga

SEQ ID NO: 1880262 - RNA, 19 nt, Homo sapiens
  misc_RNA (1)...(19): siRNA sense strand
aaaagacacuucuggaauu

SEQ ID NO: 1880263 - RNA, 19 nt, Homo sapiens
  misc_RNA (1)...(19): siRNA sense strand
cgaagaagacaaaucacaa

SEQ ID NO: 1880264 - RNA, 19 nt, Homo sapiens
  misc_RNA (1)...(19): siRNA sense strand
uaccugcgaucaacuguga

SEQ ID NO: 1880265 - RNA, 19 nt, Homo sapiens
  misc_RNA (1)...(19): siRNA sense strand
gaaagaacuccagguuuag

SEQ ID NO: 1880266 - RNA, 19 nt, Homo sapiens
  misc_RNA (1)...(19): siRNA sense strand
gaugacagccuuggacuuc

SEQ ID NO: 1880267 - RNA, 19 nt, Homo sapiens
  misc_RNA (1)...(19): siRNA sense strand
uaugggaacuaccugcauu

SEQ ID NO: 1880268 - RNA, 19 nt, Homo sapiens
  misc_RNA (1)...(19): siRNA sense strand
gaacagguggcugaauuuc

SEQ ID NO: 1880269 - RNA, 19 nt, Homo sapiens
  misc_RNA (1)...(19): siRNA sense strand
ggaagaggaauucauaagg

SEQ ID NO: 1880270 - RNA, 19 nt, Homo sapiens
  misc_RNA (1)...(19): siRNA sense strand
cagcgaagaagacaaauca

SEQ ID NO: 1880271 - RNA, 19 nt, Homo sapiens
  misc_RNA (1)...(19): siRNA sense strand
gaaaagacacuucuggaau

SEQ ID NO: 1880272 - RNA, 19 nt, Homo sapiens
  misc_RNA (1)...(19): siRNA sense strand
cagggagcauugaugauau

SEQ ID NO: 1880273 - RNA, 19 nt, Homo sapiens
  misc_RNA (1)...(19): siRNA sense strand
aaggaggucuuaucuaugg

SEQ ID NO: 1880274 - RNA, 19 nt, Homo sapiens
  misc_RNA (1)...(19): siRNA sense strand
gaacugcaaagugaaacaa

SEQ ID NO: 1880275 - RNA, 19 nt, Homo sapiens
  misc_RNA (1)...(19): siRNA sense strand
gauauaaccaugugugcau

SEQ ID NO: 1880276 - RNA, 19 nt, Homo sapiens
  misc_RNA (1)...(19): siRNA sense strand
caauuccgacuauuagaaa

SEQ ID NO: 1880277 - RNA, 19 nt, Homo sapiens
  misc_RNA (1)...(19): siRNA sense strand
cccaaccauucacaaauuu

SEQ ID NO: 1880278 - RNA, 19 nt, Homo sapiens
  misc_RNA (1)...(19): siRNA sense strand
cuaaagaagagucugaaga

SEQ ID NO: 1880279 - RNA, 19 nt, Homo sapiens
  misc_RNA (1)...(19): siRNA sense strand
ccuggaagaggaauucaua

SEQ ID NO: 1880280 - RNA, 19 nt, Homo sapiens
  misc_RNA (1)...(19): siRNA sense strand
gcaaauccucugggaguug

SEQ ID NO: 1880281 - RNA, 19 nt, Homo sapiens
  misc_RNA (1)...(19): siRNA sense strand
acccaaccauucacaaauu

SEQ ID NO: 1880282 - RNA, 19 nt, Homo sapiens
  misc_RNA (1)...(19): siRNA sense strand
caugaacaucuccuuagua

SEQ ID NO: 1880283 - RNA, 19 nt, Homo sapiens
  misc_RNA (1)...(19): siRNA sense strand
uaggaaacaacuuuggaua

SEQ ID NO: 1880284 - RNA, 19 nt, Homo sapiens
  misc_RNA (1)...(19): siRNA sense strand
ugacagccuuggacuucaa

SEQ ID NO: 1880285 - RNA, 19 nt, Homo sapiens
  misc_RNA (1)...(19): siRNA sense strand
gagagaucuuucagaaugg

SEQ ID NO: 1880286 - RNA, 19 nt, Homo sapiens
  misc_RNA (1)...(19): siRNA sense strand
gcagaauacugugauagcu

SEQ ID NO: 1880287 - RNA, 19 nt, Homo sapiens
  misc_RNA (1)...(19): siRNA sense strand
ggaaauaaaauccaugaug

SEQ ID NO: 1880288 - RNA, 19 nt, Homo sapiens
  misc_RNA (1)...(19): siRNA sense strand
uaugaacucugguuuaagc

SEQ ID NO: 1880289 - RNA, 19 nt, Homo sapiens
  misc_RNA (1)...(19): siRNA sense strand
gaaacgucaugaacaucuc

SEQ ID NO: 1880290 - RNA, 19 nt, Homo sapiens
  misc_RNA (1)...(19): siRNA sense strand
gcgaagaagacaaaucaca

SEQ ID NO: 1880291 - RNA, 19 nt, Homo sapiens
  misc_RNA (1)...(19): siRNA sense strand
aagaugaacccaaccauuc

SEQ ID NO: 1880292 - RNA, 19 nt, Homo sapiens
  misc_RNA (1)...(19): siRNA sense strand
agggagcauugaugauaua

SEQ ID NO: 1880293 - RNA, 19 nt, Homo sapiens
  misc_RNA (1)...(19): siRNA sense strand
cgucaugaacaucuccuua

SEQ ID NO: 1880294 - RNA, 19 nt, Homo sapiens
  misc_RNA (1)...(19): siRNA sense strand
guggaggcauggcuggaaa

SEQ ID NO: 1880295 - RNA, 19 nt, Homo sapiens
  misc_RNA (1)...(19): siRNA sense strand
cagcaaaggaggucuuauc

SEQ ID NO: 1880296 - RNA, 19 nt, Homo sapiens
  misc_RNA (1)...(19): siRNA sense strand
agugauagguacaagguau

SEQ ID NO: 1880297 - RNA, 19 nt, Homo sapiens
  misc_RNA (1)...(19): siRNA sense strand
guugcugacuucucuuaug

SEQ ID NO: 1880298 - RNA, 19 nt, Homo sapiens
  misc_RNA (1)...(19): siRNA sense strand
cauaaggauucaggcuaaa

SEQ ID NO: 1880299 - RNA, 19 nt, Homo sapiens
  misc_RNA (1)...(19): siRNA sense strand
ggagguagcuucgcagugu

SEQ ID NO: 1880300 - RNA, 19 nt, Homo sapiens
  misc_RNA (1)...(19): siRNA sense strand
gaggaucccuggaacucua

SEQ ID NO: 1880301 - RNA, 19 nt, Homo sapiens
  misc_RNA (1)...(19): siRNA sense strand
gcaaggaggaucccuggaa

SEQ ID NO: 1880302 - RNA, 19 nt, Homo sapiens
  misc_RNA (1)...(19): siRNA sense strand
caucaaggguuuccgcaau

SEQ ID NO: 1880303 - RNA, 19 nt, Homo sapiens
  misc_RNA (1)...(19): siRNA sense strand
gcccagcaguuccgaaaug

SEQ ID NO: 1880304 - RNA, 19 nt, Homo sapiens
  misc_RNA (1)...(19): siRNA sense strand
gguggagccuucacuaugg

SEQ ID NO: 1880305 - RNA, 19 nt, Homo sapiens
  misc_RNA (1)...(19): siRNA sense strand
cggcaccgguugagaggua

SEQ ID NO: 1880306 - RNA, 19 nt, Homo sapiens
  misc_RNA (1)...(19): siRNA sense strand
ggaauucggcaccgguuga

SEQ ID NO: 1880307 - RNA, 19 nt, Homo sapiens
  misc_RNA (1)...(19): siRNA sense strand
uaucaccaguggagcauug

SEQ ID NO: 1880308 - RNA, 19 nt, Homo sapiens
  misc_RNA (1)...(19): siRNA sense strand
ggccuguucuccaccauug

SEQ ID NO: 1880309 - RNA, 19 nt, Homo sapiens
  misc_RNA (1)...(19): siRNA sense strand
guugagagguagugccaau

SEQ ID NO: 1880310 - RNA, 19 nt, Homo sapiens
  misc_RNA (1)...(19): siRNA sense strand
ggcgaauuguggaugauug

SEQ ID NO: 1880311 - RNA, 19 nt, Homo sapiens
  misc_RNA (1)...(19): siRNA sense strand
cauggcgaauuguggauga

SEQ ID NO: 1880312 - RNA, 19 nt, Homo sapiens
  misc_RNA (1)...(19): siRNA sense strand
cuacacagcccagcaguuc

SEQ ID NO: 1880313 - RNA, 19 nt, Homo sapiens
  misc_RNA (1)...(19): siRNA sense strand
uccaggccaucaaggguuu

SEQ ID NO: 1880314 - RNA, 19 nt, Homo sapiens
  misc_RNA (1)...(19): siRNA sense strand
ccuccucacucgcuacaca

SEQ ID NO: 1880315 - RNA, 19 nt, Homo sapiens
  misc_RNA (1)...(19): siRNA sense strand
gcgguggagccuucacuau

SEQ ID NO: 1880316 - RNA, 19 nt, Homo sapiens
  misc_RNA (1)...(19): siRNA sense strand
cagcccagcaguuccgaaa

SEQ ID NO: 1880317 - RNA, 19 nt, Homo sapiens
  misc_RNA (1)...(19): siRNA sense strand
auggugggcucagcaauga

SEQ ID NO: 1880318 - RNA, 19 nt, Homo sapiens
  misc_RNA (1)...(19): siRNA sense strand
caaugccccuguuggaauu

SEQ ID NO: 1880319 - RNA, 19 nt, Homo sapiens
  misc_RNA (1)...(19): siRNA sense strand
cauggugggcucagcaaug

SEQ ID NO: 1880320 - RNA, 19 nt, Homo sapiens
  misc_RNA (1)...(19): siRNA sense strand
ggugggcucagcaaugaug

SEQ ID NO: 1880321 - RNA, 19 nt, Homo sapiens
  misc_RNA (1)...(19): siRNA sense strand
gcaaugccccuguuggaau

SEQ ID NO: 1880322 - RNA, 19 nt, Homo sapiens
  misc_RNA (1)...(19): siRNA sense strand
gagagguagugccaaugcu

SEQ ID NO: 1880323 - RNA, 19 nt, Homo sapiens
  misc_RNA (1)...(19): siRNA sense strand
gaagagagcaccuuuguuu

SEQ ID NO: 1880324 - RNA, 19 nt, Homo sapiens
  misc_RNA (1)...(19): siRNA sense strand
gaaacgaucuacaucauug

SEQ ID NO: 1880325 - RNA, 19 nt, Homo sapiens
  misc_RNA (1)...(19): siRNA sense strand
cccaagagcuggauauuaa

SEQ ID NO: 1880326 - RNA, 19 nt, Homo sapiens
  misc_RNA (1)...(19): siRNA sense strand
gcucauggaucuuuaguga

SEQ ID NO: 1880327 - RNA, 19 nt, Homo sapiens
  misc_RNA (1)...(19): siRNA sense strand
gagccuaaguguagagaua

SEQ ID NO: 1880328 - RNA, 19 nt, Homo sapiens
  misc_RNA (1)...(19): siRNA sense strand
caaggagccugucuaguaa

SEQ ID NO: 1880329 - RNA, 19 nt, Homo sapiens
  misc_RNA (1)...(19): siRNA sense strand
uggaaaggaugaacaaaua

SEQ ID NO: 1880330 - RNA, 19 nt, Homo sapiens
  misc_RNA (1)...(19): siRNA sense strand
caaacucugucucuaagua

SEQ ID NO: 1880331 - RNA, 19 nt, Homo sapiens
  misc_RNA (1)...(19): siRNA sense strand
ucaaggagccugucuagua

SEQ ID NO: 1880332 - RNA, 19 nt, Homo sapiens
  misc_RNA (1)...(19): siRNA sense strand
ggacuuagguucuuaugag

SEQ ID NO: 1880333 - RNA, 19 nt, Homo sapiens
  misc_RNA (1)...(19): siRNA sense strand
ugauaaggauucugaagua

SEQ ID NO: 1880334 - RNA, 19 nt, Homo sapiens
  misc_RNA (1)...(19): siRNA sense strand
gaaaguagcagaccuagag

SEQ ID NO: 1880335 - RNA, 19 nt, Homo sapiens
  misc_RNA (1)...(19): siRNA sense strand
ggacaaggaaugugauauu

SEQ ID NO: 1880336 - RNA, 19 nt, Homo sapiens
  misc_RNA (1)...(19): siRNA sense strand
ccagaaaccugaacucauc

SEQ ID NO: 1880337 - RNA, 19 nt, Homo sapiens
  misc_RNA (1)...(19): siRNA sense strand
gaaacaccauggagauaau

SEQ ID NO: 1880338 - RNA, 19 nt, Homo sapiens
  misc_RNA (1)...(19): siRNA sense strand
ggacagggauggguacgaa

SEQ ID NO: 1880339 - RNA, 19 nt, Homo sapiens
  misc_RNA (1)...(19): siRNA sense strand
gauaaggauucugaaguaa

SEQ ID NO: 1880340 - RNA, 19 nt, Homo sapiens
  misc_RNA (1)...(19): siRNA sense strand
gaaggcagccauucugauu

SEQ ID NO: 1880341 - RNA, 19 nt, Homo sapiens
  misc_RNA (1)...(19): siRNA sense strand
gcaccuuuguuucugauuu

SEQ ID NO: 1880342 - RNA, 19 nt, Homo sapiens
  misc_RNA (1)...(19): siRNA sense strand
gcagaaauagagaucguua

SEQ ID NO: 1880343 - RNA, 19 nt, Homo sapiens
  misc_RNA (1)...(19): siRNA sense strand
gauauugccacacuuagua

SEQ ID NO: 1880344 - RNA, 19 nt, Homo sapiens
  misc_RNA (1)...(19): siRNA sense strand
gagaaacgaucuacaucau

SEQ ID NO: 1880345 - RNA, 19 nt, Homo sapiens
  misc_RNA (1)...(19): siRNA sense strand
ggacugaccgggugagaaa

SEQ ID NO: 1880346 - RNA, 19 nt, Homo sapiens
  misc_RNA (1)...(19): siRNA sense strand
gaagagaaacgaucuacau

SEQ ID NO: 1880347 - RNA, 19 nt, Homo sapiens
  misc_RNA (1)...(19): siRNA sense strand
acaaaugggaguauacuua

SEQ ID NO: 1880348 - RNA, 19 nt, Homo sapiens
  misc_RNA (1)...(19): siRNA sense strand
guuacuaugucuucucuuu

SEQ ID NO: 1880349 - RNA, 19 nt, Homo sapiens
  misc_RNA (1)...(19): siRNA sense strand
gacaaggaaugugauauug

SEQ ID NO: 1880350 - RNA, 19 nt, Homo sapiens
  misc_RNA (1)...(19): siRNA sense strand
gaagaaacauaagaagaag

SEQ ID NO: 1880351 - RNA, 19 nt, Homo sapiens
  misc_RNA (1)...(19): siRNA sense strand
guguagagauaguuuauga

SEQ ID NO: 1880352 - RNA, 19 nt, Homo sapiens
  misc_RNA (1)...(19): siRNA sense strand
ucagccaucucgugaauuu

SEQ ID NO: 1880353 - RNA, 19 nt, Homo sapiens
  misc_RNA (1)...(19): siRNA sense strand
gaagugggcaugaucagaa

SEQ ID NO: 1880354 - RNA, 19 nt, Homo sapiens
  misc_RNA (1)...(19): siRNA sense strand
aaccugaacucaucuguaa

SEQ ID NO: 1880355 - RNA, 19 nt, Homo sapiens
  misc_RNA (1)...(19): siRNA sense strand
ccaaugacgaccuaaauaa

SEQ ID NO: 1880356 - RNA, 19 nt, Homo sapiens
  misc_RNA (1)...(19): siRNA sense strand
cagcuugccuucacagauu

SEQ ID NO: 1880357 - RNA, 19 nt, Homo sapiens
  misc_RNA (1)...(19): siRNA sense strand
gauacagaaugugacaaua

SEQ ID NO: 1880358 - RNA, 19 nt, Homo sapiens
  misc_RNA (1)...(19): siRNA sense strand
agagauaguuuaugaagga

SEQ ID NO: 1880359 - RNA, 19 nt, Homo sapiens
  misc_RNA (1)...(19): siRNA sense strand
gaaaggcacagaucaagga

SEQ ID NO: 1880360 - RNA, 19 nt, Homo sapiens
  misc_RNA (1)...(19): siRNA sense strand
acagugagaggaaguauua

SEQ ID NO: 1880361 - RNA, 19 nt, Homo sapiens
  misc_RNA (1)...(19): siRNA sense strand
ggaaaggaugaacaaauaa

SEQ ID NO: 1880362 - RNA, 19 nt, Homo sapiens
  misc_RNA (1)...(19): siRNA sense strand
gauagcaguugguccagaa

SEQ ID NO: 1880363 - RNA, 19 nt, Homo sapiens
  misc_RNA (1)...(19): siRNA sense strand
gcauuugugucugauuuaa

SEQ ID NO: 1880364 - RNA, 19 nt, Homo sapiens
  misc_RNA (1)...(19): siRNA sense strand
ggaaccauuugaaacuaaa

SEQ ID NO: 1880365 - RNA, 19 nt, Homo sapiens
  misc_RNA (1)...(19): siRNA sense strand
gcaguaaggaggccaacua

SEQ ID NO: 1880366 - RNA, 19 nt, Homo sapiens
  misc_RNA (1)...(19): siRNA sense strand
ggaguauacuuauuacagu

SEQ ID NO: 1880367 - RNA, 19 nt, Homo sapiens
  misc_RNA (1)...(19): siRNA sense strand
guccagagcucauuauucu

SEQ ID NO: 1880368 - RNA, 19 nt, Homo sapiens
  misc_RNA (1)...(19): siRNA sense strand
ggagcaaucuuacaguucu

SEQ ID NO: 1880369 - RNA, 19 nt, Homo sapiens
  misc_RNA (1)...(19): siRNA sense strand
gaaagcaucaugggaagaa

SEQ ID NO: 1880370 - RNA, 19 nt, Homo sapiens
  misc_RNA (1)...(19): siRNA sense strand
ucauggaucuuuagugaau

SEQ ID NO: 1880371 - RNA, 19 nt, Homo sapiens
  misc_RNA (1)...(19): siRNA sense strand
gaaccagcccaguaacauu

SEQ ID NO: 1880372 - RNA, 19 nt, Homo sapiens
  misc_RNA (1)...(19): siRNA sense strand
gagaagagagcaccuuugu

SEQ ID NO: 1880373 - RNA, 19 nt, Homo sapiens
  misc_RNA (1)...(19): siRNA sense strand
gaucagaagaaucauagaa

SEQ ID NO: 1880374 - RNA, 19 nt, Homo sapiens
  misc_RNA (1)...(19): siRNA sense strand
gaagaucacggagcagaaa

SEQ ID NO: 1880375 - RNA, 19 nt, Homo sapiens
  misc_RNA (1)...(19): siRNA sense strand
gguagagacugugauaugu

SEQ ID NO: 1880376 - RNA, 19 nt, Homo sapiens
  misc_RNA (1)...(19): siRNA sense strand
uaauuaccauugacaguga

SEQ ID NO: 1880377 - RNA, 19 nt, Homo sapiens
  misc_RNA (1)...(19): siRNA sense strand
aauagaagcugaauuuggu

SEQ ID NO: 1880378 - RNA, 19 nt, Homo sapiens
  misc_RNA (1)...(19): siRNA sense strand
gcucagccaucucgugaau

SEQ ID NO: 1880379 - RNA, 19 nt, Homo sapiens
  misc_RNA (1)...(19): siRNA sense strand
uaaaggaggauacagaaug

SEQ ID NO: 1880380 - RNA, 19 nt, Homo sapiens
  misc_RNA (1)...(19): siRNA sense strand
uaaggauucugaaguaaag

SEQ ID NO: 1880381 - RNA, 19 nt, Homo sapiens
  misc_RNA (1)...(19): siRNA sense strand
ugacagugaugauucuuca

SEQ ID NO: 1880382 - RNA, 19 nt, Homo sapiens
  misc_RNA (1)...(19): siRNA sense strand
agaagaagcauaagaaaca

SEQ ID NO: 1880383 - RNA, 19 nt, Homo sapiens
  misc_RNA (1)...(19): siRNA sense strand
ggugauagcgauguuagua

SEQ ID NO: 1880384 - RNA, 19 nt, Homo sapiens
  misc_RNA (1)...(19): siRNA sense strand
gaacaggagcaaucuuaca

SEQ ID NO: 1880385 - RNA, 19 nt, Homo sapiens
  misc_RNA (1)...(19): siRNA sense strand
ucagauaauugugucauug

SEQ ID NO: 1880386 - RNA, 19 nt, Homo sapiens
  misc_RNA (1)...(19): siRNA sense strand
gaacugagcauuuuauaca

SEQ ID NO: 1880387 - RNA, 19 nt, Homo sapiens
  misc_RNA (1)...(19): siRNA sense strand
aaaggaggauacagaaugu

SEQ ID NO: 1880388 - RNA, 19 nt, Homo sapiens
  misc_RNA (1)...(19): siRNA sense strand
aagaacaaaugcuaggaaa

SEQ ID NO: 1880389 - RNA, 19 nt, Homo sapiens
  misc_RNA (1)...(19): siRNA sense strand
caaaugggaguauacuuau

SEQ ID NO: 1880390 - RNA, 19 nt, Homo sapiens
  misc_RNA (1)...(19): siRNA sense strand
guugaacuguccucugauu

SEQ ID NO: 1880391 - RNA, 19 nt, Homo sapiens
  misc_RNA (1)...(19): siRNA sense strand
gaacuguccucugauucug

SEQ ID NO: 1880392 - RNA, 19 nt, Homo sapiens
  misc_RNA (1)...(19): siRNA sense strand
guaacaacuugaauaaugc

SEQ ID NO: 1880393 - RNA, 19 nt, Homo sapiens
  misc_RNA (1)...(19): siRNA sense strand
uagcagugaucaugguaaa

SEQ ID NO: 1880394 - RNA, 19 nt, Homo sapiens
  misc_RNA (1)...(19): siRNA sense strand
caggagcaaucuuacaguu

SEQ ID NO: 1880395 - RNA, 19 nt, Homo sapiens
  misc_RNA (1)...(19): siRNA sense strand
ccaguaacauugugucucu

SEQ ID NO: 1880396 - RNA, 19 nt, Homo sapiens
  misc_RNA (1)...(19): siRNA sense strand
aaaugagagugauaccuuu

SEQ ID NO: 1880397 - RNA, 19 nt, Homo sapiens
  misc_RNA (1)...(19): siRNA sense strand
ggaggguacuaacgaagug

SEQ ID NO: 1880398 - RNA, 19 nt, Homo sapiens
  misc_RNA (1)...(19): siRNA sense strand
gaucaaggacugcaucuac

SEQ ID NO: 1880399 - RNA, 19 nt, Homo sapiens
  misc_RNA (1)...(19): siRNA sense strand
gaagaaucauagaaagcau

SEQ ID NO: 1880400 - RNA, 19 nt, Homo sapiens
  misc_RNA (1)...(19): siRNA sense strand
acaaaccaaugacgaccua

SEQ ID NO: 1880401 - RNA, 19 nt, Homo sapiens
  misc_RNA (1)...(19): siRNA sense strand
ggagauaaugcuucacguu

SEQ ID NO: 1880402 - RNA, 19 nt, Homo sapiens
  misc_RNA (1)...(19): siRNA sense strand
aagcaaaggacagucauua

SEQ ID NO: 1880403 - RNA, 19 nt, Homo sapiens
  misc_RNA (1)...(19): siRNA sense strand
gagcagaaauagagaucgu

SEQ ID NO: 1880404 - RNA, 19 nt, Homo sapiens
  misc_RNA (1)...(19): siRNA sense strand
ucagaagaaucauagaaag

SEQ ID NO: 1880405 - RNA, 19 nt, Homo sapiens
  misc_RNA (1)...(19): siRNA sense strand
gaucaagaaguucagauuc

SEQ ID NO: 1880406 - RNA, 19 nt, Homo sapiens
  misc_RNA (1)...(19): siRNA sense strand
ugauagcgauguuaguaga

SEQ ID NO: 1880407 - RNA, 19 nt, Homo sapiens
  misc_RNA (1)...(19): siRNA sense strand
cagcauauuaucaugagua

SEQ ID NO: 1880408 - RNA, 19 nt, Homo sapiens
  misc_RNA (1)...(19): siRNA sense strand
gaaggaaaagcuacugaua

SEQ ID NO: 1880409 - RNA, 19 nt, Homo sapiens
  misc_RNA (1)...(19): siRNA sense strand
gaaagcacaagcagaucaa

SEQ ID NO: 1880410 - RNA, 19 nt, Homo sapiens
  misc_RNA (1)...(19): siRNA sense strand
gauucacguucucagagua

SEQ ID NO: 1880411 - RNA, 19 nt, Homo sapiens
  misc_RNA (1)...(19): siRNA sense strand
gugaugauucuucagauaa

SEQ ID NO: 1880412 - RNA, 19 nt, Homo sapiens
  misc_RNA (1)...(19): siRNA sense strand
gcagguacacguuacuaug

SEQ ID NO: 1880413 - RNA, 19 nt, Homo sapiens
  misc_RNA (1)...(19): siRNA sense strand
gguggccgcuacagggaua

SEQ ID NO: 1880414 - RNA, 19 nt, Homo sapiens
  misc_RNA (1)...(19): siRNA sense strand
gauaauugugucauuguug

SEQ ID NO: 1880415 - RNA, 19 nt, Homo sapiens
  misc_RNA (1)...(19): siRNA sense strand
gccaaacucugucucuaag

SEQ ID NO: 1880416 - RNA, 19 nt, Homo sapiens
  misc_RNA (1)...(19): siRNA sense strand
ccucaagacccucuacaaa

SEQ ID NO: 1880417 - RNA, 19 nt, Homo sapiens
  misc_RNA (1)...(19): siRNA sense strand
gaucaaggagccugucuag

SEQ ID NO: 1880418 - RNA, 19 nt, Homo sapiens
  misc_RNA (1)...(19): siRNA sense strand
gaaagaacaaaugcuagga

SEQ ID NO: 1880419 - RNA, 19 nt, Homo sapiens
  misc_RNA (1)...(19): siRNA sense strand
caucauuaaugucaguaug

SEQ ID NO: 1880420 - RNA, 19 nt, Homo sapiens
  misc_RNA (1)...(19): siRNA sense strand
gagagcaccuuuguuucug

SEQ ID NO: 1880421 - RNA, 19 nt, Homo sapiens
  misc_RNA (1)...(19): siRNA sense strand
ggauacagaaugugacaau

SEQ ID NO: 1880422 - RNA, 19 nt, Homo sapiens
  misc_RNA (1)...(19): siRNA sense strand
uaagaaacaccauggagau

SEQ ID NO: 1880423 - RNA, 19 nt, Homo sapiens
  misc_RNA (1)...(19): siRNA sense strand
agaaugaacuggacaaugu

SEQ ID NO: 1880424 - RNA, 19 nt, Homo sapiens
  misc_RNA (1)...(19): siRNA sense strand
gagcccagcuuucccagaa

SEQ ID NO: 1880425 - RNA, 19 nt, Homo sapiens
  misc_RNA (1)...(19): siRNA sense strand
guuggugccuucccuauuu

SEQ ID NO: 1880426 - RNA, 19 nt, Homo sapiens
  misc_RNA (1)...(19): siRNA sense strand
caagaaagaguacgagaau

SEQ ID NO: 1880427 - RNA, 19 nt, Homo sapiens
  misc_RNA (1)...(19): siRNA sense strand
gaccgugccuucucucuuc

SEQ ID NO: 1880428 - RNA, 19 nt, Homo sapiens
  misc_RNA (1)...(19): siRNA sense strand
ggagcaagaugaagaccau

SEQ ID NO: 1880429 - RNA, 19 nt, Homo sapiens
  misc_RNA (1)...(19): siRNA sense strand
gaaagaguacgagaaucua

SEQ ID NO: 1880430 - RNA, 19 nt, Homo sapiens
  misc_RNA (1)...(19): siRNA sense strand
aauaagcucuucuuugauc

SEQ ID NO: 1880431 - RNA, 19 nt, Homo sapiens
  misc_RNA (1)...(19): siRNA sense strand
ggaggagaaugucuuggau

SEQ ID NO: 1880432 - RNA, 19 nt, Homo sapiens
  misc_RNA (1)...(19): siRNA sense strand
cuaauucaguccuuugaga

SEQ ID NO: 1880433 - RNA, 19 nt, Homo sapiens
  misc_RNA (1)...(19): siRNA sense strand
acagagugcugacaaggaa

SEQ ID NO: 1880434 - RNA, 19 nt, Homo sapiens
  misc_RNA (1)...(19): siRNA sense strand
ugucuuggaucgagaauuc

SEQ ID NO: 1880435 - RNA, 19 nt, Homo sapiens
  misc_RNA (1)...(19): siRNA sense strand
cagcaaagaugugguaagg

SEQ ID NO: 1880436 - RNA, 19 nt, Homo sapiens
  misc_RNA (1)...(19): siRNA sense strand
gacagucuacucugaauug

SEQ ID NO: 1880437 - RNA, 19 nt, Homo sapiens
  misc_RNA (1)...(19): siRNA sense strand
cagcaugguuacuacgaaa

SEQ ID NO: 1880438 - RNA, 19 nt, Homo sapiens
  misc_RNA (1)...(19): siRNA sense strand
uaacgaugcugcaggaaac

SEQ ID NO: 1880439 - RNA, 19 nt, Homo sapiens
  misc_RNA (1)...(19): siRNA sense strand
gcagcaggaugagaccaaa

SEQ ID NO: 1880440 - RNA, 19 nt, Homo sapiens
  misc_RNA (1)...(19): siRNA sense strand
gugugucucucaagaaaga

SEQ ID NO: 1880441 - RNA, 19 nt, Homo sapiens
  misc_RNA (1)...(19): siRNA sense strand
ccaagaagauaugcaaagg

SEQ ID NO: 1880442 - RNA, 19 nt, Homo sapiens
  misc_RNA (1)...(19): siRNA sense strand
ggaaaucaugagccugaaa

SEQ ID NO: 1880443 - RNA, 19 nt, Homo sapiens
  misc_RNA (1)...(19): siRNA sense strand
ccagaaagacaaggagaaa

SEQ ID NO: 1880444 - RNA, 19 nt, Homo sapiens
  misc_RNA (1)...(19): siRNA sense strand
gaaggagucccagcucuca

SEQ ID NO: 1880445 - RNA, 19 nt, Homo sapiens
  misc_RNA (1)...(19): siRNA sense strand
gcugaggaaggauuuguuu

SEQ ID NO: 1880446 - RNA, 19 nt, Homo sapiens
  misc_RNA (1)...(19): siRNA sense strand
acgcaaugcuacuguggua

SEQ ID NO: 1880447 - RNA, 19 nt, Homo sapiens
  misc_RNA (1)...(19): siRNA sense strand
gcuccgacuucuucgauca

SEQ ID NO: 1880448 - RNA, 19 nt, Homo sapiens
  misc_RNA (1)...(19): siRNA sense strand
ggagaugauccgagacaug

SEQ ID NO: 1880449 - RNA, 19 nt, Homo sapiens
  misc_RNA (1)...(19): siRNA sense strand
gaagaacgcaaugcuacug

SEQ ID NO: 1880450 - RNA, 19 nt, Homo sapiens
  misc_RNA (1)...(19): siRNA sense strand
ggaggaggagaaugucuug

SEQ ID NO: 1880451 - RNA, 19 nt, Homo sapiens
  misc_RNA (1)...(19): siRNA sense strand
ugaagaccauggagcagau

SEQ ID NO: 1880452 - RNA, 19 nt, Homo sapiens
  misc_RNA (1)...(19): siRNA sense strand
gcaaugcuacugugguauc

SEQ ID NO: 1880453 - RNA, 19 nt, Homo sapiens
  misc_RNA (1)...(19): siRNA sense strand
ucaagaaagaguacgagaa

SEQ ID NO: 1880454 - RNA, 19 nt, Homo sapiens
  misc_RNA (1)...(19): siRNA sense strand
aaaagcagaugaaguacuu

SEQ ID NO: 1880455 - RNA, 19 nt, Homo sapiens
  misc_RNA (1)...(19): siRNA sense strand
gcagaugaaguacuuagag

SEQ ID NO: 1880456 - RNA, 19 nt, Homo sapiens
  misc_RNA (1)...(19): siRNA sense strand
ggaucgagaauucuuaaag

SEQ ID NO: 1880457 - RNA, 19 nt, Homo sapiens
  misc_RNA (1)...(19): siRNA sense strand
ccagcaugguuacuacgaa

SEQ ID NO: 1880458 - RNA, 19 nt, Homo sapiens
  misc_RNA (1)...(19): siRNA sense strand
ccagaaggacuuacagagu

SEQ ID NO: 1880459 - RNA, 19 nt, Homo sapiens
  misc_RNA (1)...(19): siRNA sense strand
aaagaguacgagaaucuaa

SEQ ID NO: 1880460 - RNA, 19 nt, Homo sapiens
  misc_RNA (1)...(19): siRNA sense strand
uagagcagcagcaggauga

SEQ ID NO: 1880461 - RNA, 19 nt, Homo sapiens
  misc_RNA (1)...(19): siRNA sense strand
gaaagacaaggagaaacga

SEQ ID NO: 1880462 - RNA, 19 nt, Homo sapiens
  misc_RNA (1)...(19): siRNA sense strand
gcaagaugaagaccaugga

SEQ ID NO: 1880463 - RNA, 19 nt, Homo sapiens
  misc_RNA (1)...(19): siRNA sense strand
ugaucucaaugcuaccuuu

SEQ ID NO: 1880464 - RNA, 19 nt, Homo sapiens
  misc_RNA (1)...(19): siRNA sense strand
gaaaucaugagccugaaaa

SEQ ID NO: 1880465 - RNA, 19 nt, Homo sapiens
  misc_RNA (1)...(19): siRNA sense strand
ggagcagauugagcuucua

SEQ ID NO: 1880466 - RNA, 19 nt, Homo sapiens
  misc_RNA (1)...(19): siRNA sense strand
ccagcucccagcaugguua

SEQ ID NO: 1880467 - RNA, 19 nt, Homo sapiens
  misc_RNA (1)...(19): siRNA sense strand
agaaagaguacgagaaucu

SEQ ID NO: 1880468 - RNA, 19 nt, Homo sapiens
  misc_RNA (1)...(19): siRNA sense strand
uaaagaaugaacuggacaa

SEQ ID NO: 1880469 - RNA, 19 nt, Homo sapiens
  misc_RNA (1)...(19): siRNA sense strand
aggccaagcuggacaccuu

SEQ ID NO: 1880470 - RNA, 19 nt, Homo sapiens
  misc_RNA (1)...(19): siRNA sense strand
agucuacucugaauuggau

SEQ ID NO: 1880471 - RNA, 19 nt, Homo sapiens
  misc_RNA (1)...(19): siRNA sense strand
gaggagaugauccgagaca

SEQ ID NO: 1880472 - RNA, 19 nt, Homo sapiens
  misc_RNA (1)...(19): siRNA sense strand
gcaaaagaaccauuaucaa

SEQ ID NO: 1880473 - RNA, 19 nt, Homo sapiens
  misc_RNA (1)...(19): siRNA sense strand
gaccaaacaagcacaagag

SEQ ID NO: 1880474 - RNA, 19 nt, Homo sapiens
  misc_RNA (1)...(19): siRNA sense strand
uaucugcuccgacuucuuc

SEQ ID NO: 1880475 - RNA, 19 nt, Homo sapiens
  misc_RNA (1)...(19): siRNA sense strand
gguaaggacaggcuucgau

SEQ ID NO: 1880476 - RNA, 19 nt, Homo sapiens
  misc_RNA (1)...(19): siRNA sense strand
gacaagcugaggaaggauu

SEQ ID NO: 1880477 - RNA, 19 nt, Homo sapiens
  misc_RNA (1)...(19): siRNA sense strand
cugacaagcugaggaagga

SEQ ID NO: 1880478 - RNA, 19 nt, Homo sapiens
  misc_RNA (1)...(19): siRNA sense strand
cugugugucucucaagaaa

SEQ ID NO: 1880479 - RNA, 19 nt, Homo sapiens
  misc_RNA (1)...(19): siRNA sense strand
gaaugucuuggaucgagaa

SEQ ID NO: 1880480 - RNA, 19 nt, Homo sapiens
  misc_RNA (1)...(19): siRNA sense strand
gugccuaauucaguccuuu

SEQ ID NO: 1880481 - RNA, 19 nt, Homo sapiens
  misc_RNA (1)...(19): siRNA sense strand
ugaagucagcccagaagga

SEQ ID NO: 1880482 - RNA, 19 nt, Homo sapiens
  misc_RNA (1)...(19): siRNA sense strand
gaagucacacuccccaauu

SEQ ID NO: 1880483 - RNA, 19 nt, Homo sapiens
  misc_RNA (1)...(19): siRNA sense strand
gcucccagcaugguuacua

SEQ ID NO: 1880484 - RNA, 19 nt, Homo sapiens
  misc_RNA (1)...(19): siRNA sense strand
gaucucaaugcuaccuuug

SEQ ID NO: 1880485 - RNA, 19 nt, Homo sapiens
  misc_RNA (1)...(19): siRNA sense strand
ggaugagaccaaacaagca

SEQ ID NO: 1880486 - RNA, 19 nt, Homo sapiens
  misc_RNA (1)...(19): siRNA sense strand
agucggaccugcccacagu

SEQ ID NO: 1880487 - RNA, 19 nt, Homo sapiens
  misc_RNA (1)...(19): siRNA sense strand
cuaacgaugcugcaggaaa

SEQ ID NO: 1880488 - RNA, 19 nt, Homo sapiens
  misc_RNA (1)...(19): siRNA sense strand
gcugacaaggaaaucauga

SEQ ID NO: 1880489 - RNA, 19 nt, Homo sapiens
  misc_RNA (1)...(19): siRNA sense strand
ggaucaggccaaguuagaa

SEQ ID NO: 1880490 - RNA, 19 nt, Homo sapiens
  misc_RNA (1)...(19): siRNA sense strand
gcagauugagcuucuacuc

SEQ ID NO: 1880491 - RNA, 19 nt, Homo sapiens
  misc_RNA (1)...(19): siRNA sense strand
cgagacagccaggucauca

SEQ ID NO: 1880492 - RNA, 19 nt, Homo sapiens
  misc_RNA (1)...(19): siRNA sense strand
cauccagccuacugacaca

SEQ ID NO: 1880493 - RNA, 19 nt, Homo sapiens
  misc_RNA (1)...(19): siRNA sense strand
guacgagaaucuaaaagag

SEQ ID NO: 1880494 - RNA, 19 nt, Homo sapiens
  misc_RNA (1)...(19): siRNA sense strand
ggaagaacgcaaugcuacu

SEQ ID NO: 1880495 - RNA, 19 nt, Homo sapiens
  misc_RNA (1)...(19): siRNA sense strand
gaagaccauggagcagauu

SEQ ID NO: 1880496 - RNA, 19 nt, Homo sapiens
  misc_RNA (1)...(19): siRNA sense strand
gaucaggccaaguuagaac

SEQ ID NO: 1880497 - RNA, 19 nt, Homo sapiens
  misc_RNA (1)...(19): siRNA sense strand
ucccugagguggaggagau

SEQ ID NO: 1880498 - RNA, 19 nt, Homo sapiens
  misc_RNA (1)...(19): siRNA sense strand
gugcaggagagccagauga

SEQ ID NO: 1880499 - RNA, 19 nt, Homo sapiens
  misc_RNA (1)...(19): siRNA sense strand
caauaagcucuucuuugau

SEQ ID NO: 1880500 - RNA, 19 nt, Homo sapiens
  misc_RNA (1)...(19): siRNA sense strand
aagaguacgagaaucuaaa

SEQ ID NO: 1880501 - RNA, 19 nt, Homo sapiens
  misc_RNA (1)...(19): siRNA sense strand
gcaggaugagaccaaacaa

SEQ ID NO: 1880502 - RNA, 19 nt, Homo sapiens
  misc_RNA (1)...(19): siRNA sense strand
ggcaaaagaaccauuauca

SEQ ID NO: 1880503 - RNA, 19 nt, Homo sapiens
  misc_RNA (1)...(19): siRNA sense strand
gagcagauugagcuucuac

SEQ ID NO: 1880504 - RNA, 19 nt, Homo sapiens
  misc_RNA (1)...(19): siRNA sense strand
gcccagaaggacuuacaga

SEQ ID NO: 1880505 - RNA, 19 nt, Homo sapiens
  misc_RNA (1)...(19): siRNA sense strand
uguccggaaugccauccua

SEQ ID NO: 1880506 - RNA, 19 nt, Homo sapiens
  misc_RNA (1)...(19): siRNA sense strand
cuguggaggugaaucugaa

SEQ ID NO: 1880507 - RNA, 19 nt, Homo sapiens
  misc_RNA (1)...(19): siRNA sense strand
gagcagcagcaggaugaga

SEQ ID NO: 1880508 - RNA, 19 nt, Homo sapiens
  misc_RNA (1)...(19): siRNA sense strand
aagcucuucuuugaucuug

SEQ ID NO: 1880509 - RNA, 19 nt, Homo sapiens
  misc_RNA (1)...(19): siRNA sense strand
aaaagaagcuaacgaugcu

SEQ ID NO: 1880510 - RNA, 19 nt, Homo sapiens
  misc_RNA (1)...(19): siRNA sense strand
uggaucaggccaaguuaga

SEQ ID NO: 1880511 - RNA, 19 nt, Homo sapiens
  misc_RNA (1)...(19): siRNA sense strand
uggagcagauugagcuucu

SEQ ID NO: 1880512 - RNA, 19 nt, Homo sapiens
  misc_RNA (1)...(19): siRNA sense strand
agaccaaacaagcacaaga

SEQ ID NO: 1880513 - RNA, 19 nt, Homo sapiens
  misc_RNA (1)...(19): siRNA sense strand
ccaagaccaagguuaagca

SEQ ID NO: 1880514 - RNA, 19 nt, Homo sapiens
  misc_RNA (1)...(19): siRNA sense strand
gguuggugccuucccuauu

SEQ ID NO: 1880515 - RNA, 19 nt, Homo sapiens
  misc_RNA (1)...(19): siRNA sense strand
agaauaaccuccaguaugu

SEQ ID NO: 1880516 - RNA, 19 nt, Homo sapiens
  misc_RNA (1)...(19): siRNA sense strand
caaguacgcugacaauauc

SEQ ID NO: 1880517 - RNA, 19 nt, Homo sapiens
  misc_RNA (1)...(19): siRNA sense strand
gcaggugucuacuuugaga

SEQ ID NO: 1880518 - RNA, 19 nt, Homo sapiens
  misc_RNA (1)...(19): siRNA sense strand
ccacguggacccauuauuu

SEQ ID NO: 1880519 - RNA, 19 nt, Homo sapiens
  misc_RNA (1)...(19): siRNA sense strand
caaaguugcucaccaaggu

SEQ ID NO: 1880520 - RNA, 19 nt, Homo sapiens
  misc_RNA (1)...(19): siRNA sense strand
gcagugcccucucucaucu

SEQ ID NO: 1880521 - RNA, 19 nt, Homo sapiens
  misc_RNA (1)...(19): siRNA sense strand
ucaaguacgcugacaauau

SEQ ID NO: 1880522 - RNA, 19 nt, Homo sapiens
  misc_RNA (1)...(19): siRNA sense strand
cagaauaaccuccaguaug

SEQ ID NO: 1880523 - RNA, 19 nt, Homo sapiens
  misc_RNA (1)...(19): siRNA sense strand
ugacauaccagcugaagau

SEQ ID NO: 1880524 - RNA, 19 nt, Homo sapiens
  misc_RNA (1)...(19): siRNA sense strand
cuucgcaggugucuacuuu

SEQ ID NO: 1880525 - RNA, 19 nt, Homo sapiens
  misc_RNA (1)...(19): siRNA sense strand
ccaccucccuguccauugu

SEQ ID NO: 1880526 - RNA, 19 nt, Homo sapiens
  misc_RNA (1)...(19): siRNA sense strand
ugaagcaccugguucucuu

SEQ ID NO: 1880527 - RNA, 19 nt, Homo sapiens
  misc_RNA (1)...(19): siRNA sense strand
ucgcaggugucuacuuuga

SEQ ID NO: 1880528 - RNA, 19 nt, Homo sapiens
  misc_RNA (1)...(19): siRNA sense strand
gcagaauaaccuccaguau

SEQ ID NO: 1880529 - RNA, 19 nt, Homo sapiens
  misc_RNA (1)...(19): siRNA sense strand
uggcugugguugucaagua

SEQ ID NO: 1880530 - RNA, 19 nt, Homo sapiens
  misc_RNA (1)...(19): siRNA sense strand
gcgcuggacucgucauugg

SEQ ID NO: 1880531 - RNA, 19 nt, Homo sapiens
  misc_RNA (1)...(19): siRNA sense strand
ccacuuuccaggugacaua

SEQ ID NO: 1880532 - RNA, 19 nt, Homo sapiens
  misc_RNA (1)...(19): siRNA sense strand
ccauugugcuguccacugu

SEQ ID NO: 1880533 - RNA, 19 nt, Homo sapiens
  misc_RNA (1)...(19): siRNA sense strand
ucuacaccuugcagaauaa

SEQ ID NO: 1880534 - RNA, 19 nt, Homo sapiens
  misc_RNA (1)...(19): siRNA sense strand
gaagagggguaacgugaag

SEQ ID NO: 1880535 - RNA, 19 nt, Homo sapiens
  misc_RNA (1)...(19): siRNA sense strand
ccuaccagcugccacuuuc

SEQ ID NO: 1880536 - RNA, 19 nt, Homo sapiens
  misc_RNA (1)...(19): siRNA sense strand
ugccaaaguugcucaccaa

SEQ ID NO: 1880537 - RNA, 19 nt, Homo sapiens
  misc_RNA (1)...(19): siRNA sense strand
gaauaaccuccaguauguu

SEQ ID NO: 1880538 - RNA, 19 nt, Homo sapiens
  misc_RNA (1)...(19): siRNA sense strand
ccagaaugccucccucauc

SEQ ID NO: 1880539 - RNA, 19 nt, Homo sapiens
  misc_RNA (1)...(19): siRNA sense strand
uaacgugaagcaccugguu

SEQ ID NO: 1880540 - RNA, 19 nt, Homo sapiens
  misc_RNA (1)...(19): siRNA sense strand
cgucauuggugcugucuac

SEQ ID NO: 1880541 - RNA, 19 nt, Homo sapiens
  misc_RNA (1)...(19): siRNA sense strand
aggcuguccuggugcagua

SEQ ID NO: 1880542 - RNA, 19 nt, Homo sapiens
  misc_RNA (1)...(19): siRNA sense strand
gaagugcucaaaggucuca

SEQ ID NO: 1880543 - RNA, 19 nt, Homo sapiens
  misc_RNA (1)...(19): siRNA sense strand
aucuacaccuugcagaaua

SEQ ID NO: 1880544 - RNA, 19 nt, Homo sapiens
  misc_RNA (1)...(19): siRNA sense strand
aauaaccuccaguauguug

SEQ ID NO: 1880545 - RNA, 19 nt, Homo sapiens
  misc_RNA (1)...(19): siRNA sense strand
cacguggacccauuauuug

SEQ ID NO: 1880546 - RNA, 19 nt, Homo sapiens
  misc_RNA (1)...(19): siRNA sense strand
uggcggaagugcucaaagg

SEQ ID NO: 1880547 - RNA, 19 nt, Homo sapiens
  misc_RNA (1)...(19): siRNA sense strand
ccaguauguugccaucucu

SEQ ID NO: 1880548 - RNA, 19 nt, Homo sapiens
  misc_RNA (1)...(19): siRNA sense strand
ggugucuacuuugagaaga

SEQ ID NO: 1880549 - RNA, 19 nt, Homo sapiens
  misc_RNA (1)...(19): siRNA sense strand
cacggccacuggaucagaa

SEQ ID NO: 1880550 - RNA, 19 nt, Homo sapiens
  misc_RNA (1)...(19): siRNA sense strand
caucuacaccuugcagaau

SEQ ID NO: 1880551 - RNA, 19 nt, Homo sapiens
  misc_RNA (1)...(19): siRNA sense strand
cauaccagcugaagauccu

SEQ ID NO: 1880552 - RNA, 19 nt, Homo sapiens
  misc_RNA (1)...(19): siRNA sense strand
ucuccgugcucaugcugaa

SEQ ID NO: 1880553 - RNA, 19 nt, Homo sapiens
  misc_RNA (1)...(19): siRNA sense strand
ggaaauaacuccucugaua

SEQ ID NO: 1880554 - RNA, 19 nt, Homo sapiens
  misc_RNA (1)...(19): siRNA sense strand
ggaaacagcuuuacuacuu

SEQ ID NO: 1880555 - RNA, 19 nt, Homo sapiens
  misc_RNA (1)...(19): siRNA sense strand
ggacacagaugauauuauu

SEQ ID NO: 1880556 - RNA, 19 nt, Homo sapiens
  misc_RNA (1)...(19): siRNA sense strand
ggaaauaaguggcaucauc

SEQ ID NO: 1880557 - RNA, 19 nt, Homo sapiens
  misc_RNA (1)...(19): siRNA sense strand
gaaauaacuccucugauaa

SEQ ID NO: 1880558 - RNA, 19 nt, Homo sapiens
  misc_RNA (1)...(19): siRNA sense strand
gaaacagcuuuacuacuuu

SEQ ID NO: 1880559 - RNA, 19 nt, Homo sapiens
  misc_RNA (1)...(19): siRNA sense strand
gaagagccuugaccaacua

SEQ ID NO: 1880560 - RNA, 19 nt, Homo sapiens
  misc_RNA (1)...(19): siRNA sense strand
ggacugaaacugacaauga

SEQ ID NO: 1880561 - RNA, 19 nt, Homo sapiens
  misc_RNA (1)...(19): siRNA sense strand
uaagugaucuucuaggauu

SEQ ID NO: 1880562 - RNA, 19 nt, Homo sapiens
  misc_RNA (1)...(19): siRNA sense strand
uuaagaagguggagaauau

SEQ ID NO: 1880563 - RNA, 19 nt, Homo sapiens
  misc_RNA (1)...(19): siRNA sense strand
gcaaaacucuucagccaua

SEQ ID NO: 1880564 - RNA, 19 nt, Homo sapiens
  misc_RNA (1)...(19): siRNA sense strand
ggaaaucgaagaagaagaa

SEQ ID NO: 1880565 - RNA, 19 nt, Homo sapiens
  misc_RNA (1)...(19): siRNA sense strand
ggaaagcuaggaaauauga

SEQ ID NO: 1880566 - RNA, 19 nt, Homo sapiens
  misc_RNA (1)...(19): siRNA sense strand
caaauugugucuacucaga

SEQ ID NO: 1880567 - RNA, 19 nt, Homo sapiens
  misc_RNA (1)...(19): siRNA sense strand
gagagaacauauaaacaga

SEQ ID NO: 1880568 - RNA, 19 nt, Homo sapiens
  misc_RNA (1)...(19): siRNA sense strand
gagaacauauaaacagaga

SEQ ID NO: 1880569 - RNA, 19 nt, Homo sapiens
  misc_RNA (1)...(19): siRNA sense strand
gaaauaaguggcaucauca

SEQ ID NO: 1880570 - RNA, 19 nt, Homo sapiens
  misc_RNA (1)...(19): siRNA sense strand
gagcuggacacaccauuua

SEQ ID NO: 1880571 - RNA, 19 nt, Homo sapiens
  misc_RNA (1)...(19): siRNA sense strand
caggaaagcuaggaaauau

SEQ ID NO: 1880572 - RNA, 19 nt, Homo sapiens
  misc_RNA (1)...(19): siRNA sense strand
ucacugcguuccuaucuaa

SEQ ID NO: 1880573 - RNA, 19 nt, Homo sapiens
  misc_RNA (1)...(19): siRNA sense strand
ccaccaaguuguugaaaga

SEQ ID NO: 1880574 - RNA, 19 nt, Homo sapiens
  misc_RNA (1)...(19): siRNA sense strand
agacucagauuaaggguuu

SEQ ID NO: 1880575 - RNA, 19 nt, Homo sapiens
  misc_RNA (1)...(19): siRNA sense strand
gagaugcuauaucguggua

SEQ ID NO: 1880576 - RNA, 19 nt, Homo sapiens
  misc_RNA (1)...(19): siRNA sense strand
gaaagaacagcuuacucua

SEQ ID NO: 1880577 - RNA, 19 nt, Homo sapiens
  misc_RNA (1)...(19): siRNA sense strand
gacaaugaaucccuuaauc

SEQ ID NO: 1880578 - RNA, 19 nt, Homo sapiens
  misc_RNA (1)...(19): siRNA sense strand
caauggaaaucgaagaaga

SEQ ID NO: 1880579 - RNA, 19 nt, Homo sapiens
  misc_RNA (1)...(19): siRNA sense strand
gaaauguugucacuauugg

SEQ ID NO: 1880580 - RNA, 19 nt, Homo sapiens
  misc_RNA (1)...(19): siRNA sense strand
ugaagaagauggugaagca

SEQ ID NO: 1880581 - RNA, 19 nt, Homo sapiens
  misc_RNA (1)...(19): siRNA sense strand
gaauagaaacuuuggaauc

SEQ ID NO: 1880582 - RNA, 19 nt, Homo sapiens
  misc_RNA (1)...(19): siRNA sense strand
ggaaauguugucacuauug

SEQ ID NO: 1880583 - RNA, 19 nt, Homo sapiens
  misc_RNA (1)...(19): siRNA sense strand
ggauaugucuguguuggaa

SEQ ID NO: 1880584 - RNA, 19 nt, Homo sapiens
  misc_RNA (1)...(19): siRNA sense strand
gaaauuccauggacaucuc

SEQ ID NO: 1880585 - RNA, 19 nt, Homo sapiens
  misc_RNA (1)...(19): siRNA sense strand
ucagaggaauagaaacuuu

SEQ ID NO: 1880586 - RNA, 19 nt, Homo sapiens
  misc_RNA (1)...(19): siRNA sense strand
gaccagagauuagaaugug

SEQ ID NO: 1880587 - RNA, 19 nt, Homo sapiens
  misc_RNA (1)...(19): siRNA sense strand
caaugaaucccuuaaucua

SEQ ID NO: 1880588 - RNA, 19 nt, Homo sapiens
  misc_RNA (1)...(19): siRNA sense strand
gagauuagaaugugccaaa

SEQ ID NO: 1880589 - RNA, 19 nt, Homo sapiens
  misc_RNA (1)...(19): siRNA sense strand
uauuaaagcuguccaccaa

SEQ ID NO: 1880590 - RNA, 19 nt, Homo sapiens
  misc_RNA (1)...(19): siRNA sense strand
ugagagagaugcuauaucg

SEQ ID NO: 1880591 - RNA, 19 nt, Homo sapiens
  misc_RNA (1)...(19): siRNA sense strand
gaucuugacucucuuuggu

SEQ ID NO: 1880592 - RNA, 19 nt, Homo sapiens
  misc_RNA (1)...(19): siRNA sense strand
gaagguggagaauauuaaa

SEQ ID NO: 1880593 - RNA, 19 nt, Homo sapiens
  misc_RNA (1)...(19): siRNA sense strand
uaacuccucugauaaaguc

SEQ ID NO: 1880594 - RNA, 19 nt, Homo sapiens
  misc_RNA (1)...(19): siRNA sense strand
ggucugaaaccaauaagaa

SEQ ID NO: 1880595 - RNA, 19 nt, Homo sapiens
  misc_RNA (1)...(19): siRNA sense strand
gcagagagaacauauaaac

SEQ ID NO: 1880596 - RNA, 19 nt, Homo sapiens
  misc_RNA (1)...(19): siRNA sense strand
caaguuguguccauccuau

SEQ ID NO: 1880597 - RNA, 19 nt, Homo sapiens
  misc_RNA (1)...(19): siRNA sense strand
caacuaaaguccauuucag

SEQ ID NO: 1880598 - RNA, 19 nt, Homo sapiens
  misc_RNA (1)...(19): siRNA sense strand
acaagguggugucauauug

SEQ ID NO: 1880599 - RNA, 19 nt, Homo sapiens
  misc_RNA (1)...(19): siRNA sense strand
caaggcaccuaaacucuca

SEQ ID NO: 1880600 - RNA, 19 nt, Homo sapiens
  misc_RNA (1)...(19): siRNA sense strand
guugugaaguuaagaauag

SEQ ID NO: 1880601 - RNA, 19 nt, Homo sapiens
  misc_RNA (1)...(19): siRNA sense strand
gcacggacacagaugauau

SEQ ID NO: 1880602 - RNA, 19 nt, Homo sapiens
  misc_RNA (1)...(19): siRNA sense strand
guuaucagaugcugggaaa

SEQ ID NO: 1880603 - RNA, 19 nt, Homo sapiens
  misc_RNA (1)...(19): siRNA sense strand
ggagacugaggacauguua

SEQ ID NO: 1880604 - RNA, 19 nt, Homo sapiens
  misc_RNA (1)...(19): siRNA sense strand
ccacauaaagccagacuug

SEQ ID NO: 1880605 - RNA, 19 nt, Homo sapiens
  misc_RNA (1)...(19): siRNA sense strand
uauaagugaucuucuagga

SEQ ID NO: 1880606 - RNA, 19 nt, Homo sapiens
  misc_RNA (1)...(19): siRNA sense strand
gggaaauguugucacuauu

SEQ ID NO: 1880607 - RNA, 19 nt, Homo sapiens
  misc_RNA (1)...(19): siRNA sense strand
acuacaagguggugucaua

SEQ ID NO: 1880608 - RNA, 19 nt, Homo sapiens
  misc_RNA (1)...(19): siRNA sense strand
uaacaagaccaucaggaaa

SEQ ID NO: 1880609 - RNA, 19 nt, Homo sapiens
  misc_RNA (1)...(19): siRNA sense strand
caugggaacuguccacugu

SEQ ID NO: 1880610 - RNA, 19 nt, Homo sapiens
  misc_RNA (1)...(19): siRNA sense strand
ucucagguguuauaaguga

SEQ ID NO: 1880611 - RNA, 19 nt, Homo sapiens
  misc_RNA (1)...(19): siRNA sense strand
gagacuaucuuuggcaaca

SEQ ID NO: 1880612 - RNA, 19 nt, Homo sapiens
  misc_RNA (1)...(19): siRNA sense strand
aaucagagggucaacauuu

SEQ ID NO: 1880613 - RNA, 19 nt, Homo sapiens
  misc_RNA (1)...(19): siRNA sense strand
gaucugggaaacagcuuua

SEQ ID NO: 1880614 - RNA, 19 nt, Homo sapiens
  misc_RNA (1)...(19): siRNA sense strand
gaacagacucagauuaagg

SEQ ID NO: 1880615 - RNA, 19 nt, Homo sapiens
  misc_RNA (1)...(19): siRNA sense strand
acaaagggacugaaacuga

SEQ ID NO: 1880616 - RNA, 19 nt, Homo sapiens
  misc_RNA (1)...(19): siRNA sense strand
gaaucuguacccauuauug

SEQ ID NO: 1880617 - RNA, 19 nt, Homo sapiens
  misc_RNA (1)...(19): siRNA sense strand
caagaguaguuauccuuuc

SEQ ID NO: 1880618 - RNA, 19 nt, Homo sapiens
  misc_RNA (1)...(19): siRNA sense strand
ccaggaaagcuaggaaaua

SEQ ID NO: 1880619 - RNA, 19 nt, Homo sapiens
  misc_RNA (1)...(19): siRNA sense strand
aaacucuucagccauauua

SEQ ID NO: 1880620 - RNA, 19 nt, Homo sapiens
  misc_RNA (1)...(19): siRNA sense strand
ggaacuguccacugucaaa

SEQ ID NO: 1880621 - RNA, 19 nt, Homo sapiens
  misc_RNA (1)...(19): siRNA sense strand
aagaacagcuuacucuagu

SEQ ID NO: 1880622 - RNA, 19 nt, Homo sapiens
  misc_RNA (1)...(19): siRNA sense strand
gauugugucuuacuuggau

SEQ ID NO: 1880623 - RNA, 19 nt, Homo sapiens
  misc_RNA (1)...(19): siRNA sense strand
ugggaaauguugucacuau

SEQ ID NO: 1880624 - RNA, 19 nt, Homo sapiens
  misc_RNA (1)...(19): siRNA sense strand
ggaaacaauggaaaucgaa

SEQ ID NO: 1880625 - RNA, 19 nt, Homo sapiens
  misc_RNA (1)...(19): siRNA sense strand
caaugucgaccagagauua

SEQ ID NO: 1880626 - RNA, 19 nt, Homo sapiens
  misc_RNA (1)...(19): siRNA sense strand
caaaugagagagaugcuau

SEQ ID NO: 1880627 - RNA, 19 nt, Homo sapiens
  misc_RNA (1)...(19): siRNA sense strand
cauaaagccagacuugauu

SEQ ID NO: 1880628 - RNA, 19 nt, Homo sapiens
  misc_RNA (1)...(19): siRNA sense strand
gaugaugccuauugugaac

SEQ ID NO: 1880629 - RNA, 19 nt, Homo sapiens
  misc_RNA (1)...(19): siRNA sense strand
ucuauggacugacaaugaa

SEQ ID NO: 1880630 - RNA, 19 nt, Homo sapiens
  misc_RNA (1)...(19): siRNA sense strand
ucgaacagacucagauuaa

SEQ ID NO: 1880631 - RNA, 19 nt, Homo sapiens
  misc_RNA (1)...(19): siRNA sense strand
gauaaagucagaggaauag

SEQ ID NO: 1880632 - RNA, 19 nt, Homo sapiens
  misc_RNA (1)...(19): siRNA sense strand
ccacagcguucaguugaug

SEQ ID NO: 1880633 - RNA, 19 nt, Homo sapiens
  misc_RNA (1)...(19): siRNA sense strand
uggcagagagaacauauaa

SEQ ID NO: 1880634 - RNA, 19 nt, Homo sapiens
  misc_RNA (1)...(19): siRNA sense strand
uguugucacuauuggauua

SEQ ID NO: 1880635 - RNA, 19 nt, Homo sapiens
  misc_RNA (1)...(19): siRNA sense strand
aggaguagguuaucagaug

SEQ ID NO: 1880636 - RNA, 19 nt, Homo sapiens
  misc_RNA (1)...(19): siRNA sense strand
gaagcacggacacagauga

SEQ ID NO: 1880637 - RNA, 19 nt, Homo sapiens
  misc_RNA (1)...(19): siRNA sense strand
guaauggggugucugauga

SEQ ID NO: 1880638 - RNA, 19 nt, Homo sapiens
  misc_RNA (1)...(19): siRNA sense strand
ugauaaagucagaggaaua

SEQ ID NO: 1880639 - RNA, 19 nt, Homo sapiens
  misc_RNA (1)...(19): siRNA sense strand
cuacugacacuuucgauug

SEQ ID NO: 1880640 - RNA, 19 nt, Homo sapiens
  misc_RNA (1)...(19): siRNA sense strand
auaccucauuucagacuua

SEQ ID NO: 1880641 - RNA, 19 nt, Homo sapiens
  misc_RNA (1)...(19): siRNA sense strand
gaaagcacccgccaugacu

SEQ ID NO: 1880642 - RNA, 19 nt, Homo sapiens
  misc_RNA (1)...(19): siRNA sense strand
uaaacucucagguaaagaa

SEQ ID NO: 1880643 - RNA, 19 nt, Homo sapiens
  misc_RNA (1)...(19): siRNA sense strand
cuuggacccuugugccuua

SEQ ID NO: 1880644 - RNA, 19 nt, Homo sapiens
  misc_RNA (1)...(19): siRNA sense strand
ugauugacguugacuuaau

SEQ ID NO: 1880645 - RNA, 19 nt, Homo sapiens
  misc_RNA (1)...(19): siRNA sense strand
gcuauaucgugguaccaaa

SEQ ID NO: 1880646 - RNA, 19 nt, Homo sapiens
  misc_RNA (1)...(19): siRNA sense strand
gaucagcagauaugggaaa

SEQ ID NO: 1880647 - RNA, 19 nt, Homo sapiens
  misc_RNA (1)...(19): siRNA sense strand
uaaagucagaggaauagaa

SEQ ID NO: 1880648 - RNA, 19 nt, Homo sapiens
  misc_RNA (1)...(19): siRNA sense strand
ucaagaagagacucagaaa

SEQ ID NO: 1880649 - RNA, 19 nt, Homo sapiens
  misc_RNA (1)...(19): siRNA sense strand
gguuaucacugcguuccua

SEQ ID NO: 1880650 - RNA, 19 nt, Homo sapiens
  misc_RNA (1)...(19): siRNA sense strand
gcuaggaaauaugaaauac

SEQ ID NO: 1880651 - RNA, 19 nt, Homo sapiens
  misc_RNA (1)...(19): siRNA sense strand
ggucaaugccuaucagcaa

SEQ ID NO: 1880652 - RNA, 19 nt, Homo sapiens
  misc_RNA (1)...(19): siRNA sense strand
ugaucgaguuagugcaaua

SEQ ID NO: 1880653 - RNA, 19 nt, Homo sapiens
  misc_RNA (1)...(19): siRNA sense strand
ggacggcgauuccagguuu

SEQ ID NO: 1880654 - RNA, 19 nt, Homo sapiens
  misc_RNA (1)...(19): siRNA sense strand
ggaagcaccuacuaugauu

SEQ ID NO: 1880655 - RNA, 19 nt, Homo sapiens
  misc_RNA (1)...(19): siRNA sense strand
gugauaaacugucugcaua

SEQ ID NO: 1880656 - RNA, 19 nt, Homo sapiens
  misc_RNA (1)...(19): siRNA sense strand
gcaauaagcugcuguucag

SEQ ID NO: 1880657 - RNA, 19 nt, Homo sapiens
  misc_RNA (1)...(19): siRNA sense strand
gcaaggccaucaucaucua

SEQ ID NO: 1880658 - RNA, 19 nt, Homo sapiens
  misc_RNA (1)...(19): siRNA sense strand
gauaaugugcgauuuguug

SEQ ID NO: 1880659 - RNA, 19 nt, Homo sapiens
  misc_RNA (1)...(19): siRNA sense strand
gaacugaagauugauaaug

SEQ ID NO: 1880660 - RNA, 19 nt, Homo sapiens
  misc_RNA (1)...(19): siRNA sense strand
ugggugagcuuccuauuga

SEQ ID NO: 1880661 - RNA, 19 nt, Homo sapiens
  misc_RNA (1)...(19): siRNA sense strand
gcagacccgucagugauaa

SEQ ID NO: 1880662 - RNA, 19 nt, Homo sapiens
  misc_RNA (1)...(19): siRNA sense strand
uggaggagauuauguacaa

SEQ ID NO: 1880663 - RNA, 19 nt, Homo sapiens
  misc_RNA (1)...(19): siRNA sense strand
gcaaccaagucugaaaugu

SEQ ID NO: 1880664 - RNA, 19 nt, Homo sapiens
  misc_RNA (1)...(19): siRNA sense strand
ccacugaaccagaggauga

SEQ ID NO: 1880665 - RNA, 19 nt, Homo sapiens
  misc_RNA (1)...(19): siRNA sense strand
gcaccuacuaugauucuuu

SEQ ID NO: 1880666 - RNA, 19 nt, Homo sapiens
  misc_RNA (1)...(19): siRNA sense strand
cauaaccugucccgucgua

SEQ ID NO: 1880667 - RNA, 19 nt, Homo sapiens
  misc_RNA (1)...(19): siRNA sense strand
gcccaacgcccucagcuuu

SEQ ID NO: 1880668 - RNA, 19 nt, Homo sapiens
  misc_RNA (1)...(19): siRNA sense strand
gcaguucucccaccaguuc

SEQ ID NO: 1880669 - RNA, 19 nt, Homo sapiens
  misc_RNA (1)...(19): siRNA sense strand
gcgcagccauccucagugu

SEQ ID NO: 1880670 - RNA, 19 nt, Homo sapiens
  misc_RNA (1)...(19): siRNA sense strand
cagcucaucugguguacug

SEQ ID NO: 1880671 - RNA, 19 nt, Homo sapiens
  misc_RNA (1)...(19): siRNA sense strand
ccacgaggacccugucauu

SEQ ID NO: 1880672 - RNA, 19 nt, Homo sapiens
  misc_RNA (1)...(19): siRNA sense strand
aaccaagucugaaaugugu

SEQ ID NO: 1880673 - RNA, 19 nt, Homo sapiens
  misc_RNA (1)...(19): siRNA sense strand
gagggaagcaccuacuaug

SEQ ID NO: 1880674 - RNA, 19 nt, Homo sapiens
  misc_RNA (1)...(19): siRNA sense strand
auaagcugcuguucaggua

SEQ ID NO: 1880675 - RNA, 19 nt, Homo sapiens
  misc_RNA (1)...(19): siRNA sense strand
guuauucuggcaacaauuu

SEQ ID NO: 1880676 - RNA, 19 nt, Homo sapiens
  misc_RNA (1)...(19): siRNA sense strand
gauaaacugucugcauaac

SEQ ID NO: 1880677 - RNA, 19 nt, Homo sapiens
  misc_RNA (1)...(19): siRNA sense strand
guaagccgcguagcagaua

SEQ ID NO: 1880678 - RNA, 19 nt, Homo sapiens
  misc_RNA (1)...(19): siRNA sense strand
gggaagcaccuacuaugau

SEQ ID NO: 1880679 - RNA, 19 nt, Homo sapiens
  misc_RNA (1)...(19): siRNA sense strand
ucauccagcugcacaccua

SEQ ID NO: 1880680 - RNA, 19 nt, Homo sapiens
  misc_RNA (1)...(19): siRNA sense strand
ggaaaugaagguccucagu

SEQ ID NO: 1880681 - RNA, 19 nt, Homo sapiens
  misc_RNA (1)...(19): siRNA sense strand
caaccaagucugaaaugug

SEQ ID NO: 1880682 - RNA, 19 nt, Homo sapiens
  misc_RNA (1)...(19): siRNA sense strand
guaguucggcuucacauca

SEQ ID NO: 1880683 - RNA, 19 nt, Homo sapiens
  misc_RNA (1)...(19): siRNA sense strand
agacccagcucauccagau

SEQ ID NO: 1880684 - RNA, 19 nt, Homo sapiens
  misc_RNA (1)...(19): siRNA sense strand
gauugauaaugugcgauuu

SEQ ID NO: 1880685 - RNA, 19 nt, Homo sapiens
  misc_RNA (1)...(19): siRNA sense strand
gggcaaggccaucaucauc

SEQ ID NO: 1880686 - RNA, 19 nt, Homo sapiens
  misc_RNA (1)...(19): siRNA sense strand
uaaacugucugcauaaccu

SEQ ID NO: 1880687 - RNA, 19 nt, Homo sapiens
  misc_RNA (1)...(19): siRNA sense strand
ugauaaacugucugcauaa

SEQ ID NO: 1880688 - RNA, 19 nt, Homo sapiens
  misc_RNA (1)...(19): siRNA sense strand
gaccugccguccguucuug

SEQ ID NO: 1880689 - RNA, 19 nt, Homo sapiens
  misc_RNA (1)...(19): siRNA sense strand
uaugcggccuccagucuga

SEQ ID NO: 1880690 - RNA, 19 nt, Homo sapiens
  misc_RNA (1)...(19): siRNA sense strand
ggcaauaagcugcuguuca

SEQ ID NO: 1880691 - RNA, 19 nt, Homo sapiens
  misc_RNA (1)...(19): siRNA sense strand
caucacauccugcccaagu

SEQ ID NO: 1880692 - RNA, 19 nt, Homo sapiens
  misc_RNA (1)...(19): siRNA sense strand
ccaggcuccuucacuacuu

SEQ ID NO: 1880693 - RNA, 19 nt, Homo sapiens
  misc_RNA (1)...(19): siRNA sense strand
caacuccagcgcagagcua

SEQ ID NO: 1880694 - RNA, 19 nt, Homo sapiens
  misc_RNA (1)...(19): siRNA sense strand
ugagaacaacgucuacaug

SEQ ID NO: 1880695 - RNA, 19 nt, Homo sapiens
  misc_RNA (1)...(19): siRNA sense strand
ggccagggaccucaaggaa

SEQ ID NO: 1880696 - RNA, 19 nt, Homo sapiens
  misc_RNA (1)...(19): siRNA sense strand
gggcagaucuccaaaacag

SEQ ID NO: 1880697 - RNA, 19 nt, Homo sapiens
  misc_RNA (1)...(19): siRNA sense strand
ucugaaauguguggccaaa

SEQ ID NO: 1880698 - RNA, 19 nt, Homo sapiens
  misc_RNA (1)...(19): siRNA sense strand
uugccaggcuccuucacua

SEQ ID NO: 1880699 - RNA, 19 nt, Homo sapiens
  misc_RNA (1)...(19): siRNA sense strand
gaagagggaagcaccuacu

SEQ ID NO: 1880700 - RNA, 19 nt, Homo sapiens
  misc_RNA (1)...(19): siRNA sense strand
ggaccucaaggaagcuuau

SEQ ID NO: 1880701 - RNA, 19 nt, Homo sapiens
  misc_RNA (1)...(19): siRNA sense strand
uacaugcugucucccaaug

SEQ ID NO: 1880702 - RNA, 19 nt, Homo sapiens
  misc_RNA (1)...(19): siRNA sense strand
gcagccauccucaguguac

SEQ ID NO: 1880703 - RNA, 19 nt, Homo sapiens
  misc_RNA (1)...(19): siRNA sense strand
ggucuccuugucagaauuu

SEQ ID NO: 1880704 - RNA, 19 nt, Homo sapiens
  misc_RNA (1)...(19): siRNA sense strand
cggcgucccagacaaguaa

SEQ ID NO: 1880705 - RNA, 19 nt, Homo sapiens
  misc_RNA (1)...(19): siRNA sense strand
cauggcugauggaaaugaa

SEQ ID NO: 1880706 - RNA, 19 nt, Homo sapiens
  misc_RNA (1)...(19): siRNA sense strand
gcucccagcugcucaugcu

SEQ ID NO: 1880707 - RNA, 19 nt, Homo sapiens
  misc_RNA (1)...(19): siRNA sense strand
ucaucuacccgcuguguga

SEQ ID NO: 1880708 - RNA, 19 nt, Homo sapiens
  misc_RNA (1)...(19): siRNA sense strand
gaagcaccuacuaugauuc

SEQ ID NO: 1880709 - RNA, 19 nt, Homo sapiens
  misc_RNA (1)...(19): siRNA sense strand
uaguucggcuucacaucaa

SEQ ID NO: 1880710 - RNA, 19 nt, Homo sapiens
  misc_RNA (1)...(19): siRNA sense strand
gggcgaccaugcugaugag

SEQ ID NO: 1880711 - RNA, 19 nt, Homo sapiens
  misc_RNA (1)...(19): siRNA sense strand
ugcagcagcuagcccaaga

SEQ ID NO: 1880712 - RNA, 19 nt, Homo sapiens
  misc_RNA (1)...(19): siRNA sense strand
gcaggagacccagcucauc

SEQ ID NO: 1880713 - RNA, 19 nt, Homo sapiens
  misc_RNA (1)...(19): siRNA sense strand
gccaccaccuggaggagau

SEQ ID NO: 1880714 - RNA, 19 nt, Homo sapiens
  misc_RNA (1)...(19): siRNA sense strand
cccacaagauccacuaugc

SEQ ID NO: 1880715 - RNA, 19 nt, Homo sapiens
  misc_RNA (1)...(19): siRNA sense strand
acaaguaagccgcguagca

SEQ ID NO: 1880716 - RNA, 19 nt, Homo sapiens
  misc_RNA (1)...(19): siRNA sense strand
caucgaacggagccugaaa

SEQ ID NO: 1880717 - RNA, 19 nt, Homo sapiens
  misc_RNA (1)...(19): siRNA sense strand
cgcagacccgucagugaua

SEQ ID NO: 1880718 - RNA, 19 nt, Homo sapiens
  misc_RNA (1)...(19): siRNA sense strand
aaugugguguuugcacuga

SEQ ID NO: 1880719 - RNA, 19 nt, Homo sapiens
  misc_RNA (1)...(19): siRNA sense strand
caugcuguuugacaaguuc

SEQ ID NO: 1880720 - RNA, 19 nt, Homo sapiens
  misc_RNA (1)...(19): siRNA sense strand
accagaggaugacggagaa

SEQ ID NO: 1880721 - RNA, 19 nt, Homo sapiens
  misc_RNA (1)...(19): siRNA sense strand
uaaccugucccgucguauc

SEQ ID NO: 1880722 - RNA, 19 nt, Homo sapiens
  misc_RNA (1)...(19): siRNA sense strand
caccuacuaugauucuuuu

SEQ ID NO: 1880723 - RNA, 19 nt, Homo sapiens
  misc_RNA (1)...(19): siRNA sense strand
uugauaaugugcgauuugu

SEQ ID NO: 1880724 - RNA, 19 nt, Homo sapiens
  misc_RNA (1)...(19): siRNA sense strand
ucaugcuguuugacaaguu

SEQ ID NO: 1880725 - RNA, 19 nt, Homo sapiens
  misc_RNA (1)...(19): siRNA sense strand
caccaguucccaucucaug

SEQ ID NO: 1880726 - RNA, 19 nt, Homo sapiens
  misc_RNA (1)...(19): siRNA sense strand
cagcagcuagcccaagaug

SEQ ID NO: 1880727 - RNA, 19 nt, Homo sapiens
  misc_RNA (1)...(19): siRNA sense strand
gugcacgucgggcguaguu

SEQ ID NO: 1880728 - RNA, 19 nt, Homo sapiens
  misc_RNA (1)...(19): siRNA sense strand
agggaagcaccuacuauga

SEQ ID NO: 1880729 - RNA, 19 nt, Homo sapiens
  misc_RNA (1)...(19): siRNA sense strand
agaacaacgucuacaugcu

SEQ ID NO: 1880730 - RNA, 19 nt, Homo sapiens
  misc_RNA (1)...(19): siRNA sense strand
caucugcugugaagaaccu

SEQ ID NO: 1880731 - RNA, 19 nt, Homo sapiens
  misc_RNA (1)...(19): siRNA sense strand
ggcaaccaagucugaaaug

SEQ ID NO: 1880732 - RNA, 19 nt, Homo sapiens
  misc_RNA (1)...(19): siRNA sense strand
ggucagagcuucaucuuua

SEQ ID NO: 1880733 - RNA, 19 nt, Homo sapiens
  misc_RNA (1)...(19): siRNA sense strand
caagaaaguuguugggaua

SEQ ID NO: 1880734 - RNA, 19 nt, Homo sapiens
  misc_RNA (1)...(19): siRNA sense strand
cgaaaguucuucacaauuu

SEQ ID NO: 1880735 - RNA, 19 nt, Homo sapiens
  misc_RNA (1)...(19): siRNA sense strand
caacucagguccuugguaa

SEQ ID NO: 1880736 - RNA, 19 nt, Homo sapiens
  misc_RNA (1)...(19): siRNA sense strand
gagcuacucuugcuauuau

SEQ ID NO: 1880737 - RNA, 19 nt, Homo sapiens
  misc_RNA (1)...(19): siRNA sense strand
gaaaggagcuaagaagaca

SEQ ID NO: 1880738 - RNA, 19 nt, Homo sapiens
  misc_RNA (1)...(19): siRNA sense strand
gaaaguuguugggauagaa

SEQ ID NO: 1880739 - RNA, 19 nt, Homo sapiens
  misc_RNA (1)...(19): siRNA sense strand
uaacuuuggucuucauuca

SEQ ID NO: 1880740 - RNA, 19 nt, Homo sapiens
  misc_RNA (1)...(19): siRNA sense strand
guaccugugugugcuguua

SEQ ID NO: 1880741 - RNA, 19 nt, Homo sapiens
  misc_RNA (1)...(19): siRNA sense strand
cgacauugcugcugggaau

SEQ ID NO: 1880742 - RNA, 19 nt, Homo sapiens
  misc_RNA (1)...(19): siRNA sense strand
guacaaacccaagaaaguu

SEQ ID NO: 1880743 - RNA, 19 nt, Homo sapiens
  misc_RNA (1)...(19): siRNA sense strand
gccauggucuccagcaauu

SEQ ID NO: 1880744 - RNA, 19 nt, Homo sapiens
  misc_RNA (1)...(19): siRNA sense strand
uuaugacgguuguguauuu

SEQ ID NO: 1880745 - RNA, 19 nt, Homo sapiens
  misc_RNA (1)...(19): siRNA sense strand
caauucagcacuacaguuu

SEQ ID NO: 1880746 - RNA, 19 nt, Homo sapiens
  misc_RNA (1)...(19): siRNA sense strand
gauaacaagaggaaaguau

SEQ ID NO: 1880747 - RNA, 19 nt, Homo sapiens
  misc_RNA (1)...(19): siRNA sense strand
gacguucaccuuugccuua

SEQ ID NO: 1880748 - RNA, 19 nt, Homo sapiens
  misc_RNA (1)...(19): siRNA sense strand
caggagacguucaccuuug

SEQ ID NO: 1880749 - RNA, 19 nt, Homo sapiens
  misc_RNA (1)...(19): siRNA sense strand
gcaggagacguucaccuuu

SEQ ID NO: 1880750 - RNA, 19 nt, Homo sapiens
  misc_RNA (1)...(19): siRNA sense strand
ugugaucaaugcuguguuu

SEQ ID NO: 1880751 - RNA, 19 nt, Homo sapiens
  misc_RNA (1)...(19): siRNA sense strand
gaaaagauaacaagaggaa

SEQ ID NO: 1880752 - RNA, 19 nt, Homo sapiens
  misc_RNA (1)...(19): siRNA sense strand
gagccaagcaggagacguu

SEQ ID NO: 1880753 - RNA, 19 nt, Homo sapiens
  misc_RNA (1)...(19): siRNA sense strand
gcaauucagcacuacaguu

SEQ ID NO: 1880754 - RNA, 19 nt, Homo sapiens
  misc_RNA (1)...(19): siRNA sense strand
uauaacauccugcucuuug

SEQ ID NO: 1880755 - RNA, 19 nt, Homo sapiens
  misc_RNA (1)...(19): siRNA sense strand
ggaaugggaauccuguuca

SEQ ID NO: 1880756 - RNA, 19 nt, Homo sapiens
  misc_RNA (1)...(19): siRNA sense strand
gggaaaggagcuaagaaga

SEQ ID NO: 1880757 - RNA, 19 nt, Homo sapiens
  misc_RNA (1)...(19): siRNA sense strand
ggaaaggagcuaagaagac

SEQ ID NO: 1880758 - RNA, 19 nt, Homo sapiens
  misc_RNA (1)...(19): siRNA sense strand
cuaagaagacaucccacua

SEQ ID NO: 1880759 - RNA, 19 nt, Homo sapiens
  misc_RNA (1)...(19): siRNA sense strand
gaaagguacccugccauca

SEQ ID NO: 1880760 - RNA, 19 nt, Homo sapiens
  misc_RNA (1)...(19): siRNA sense strand
ccaaccacaugaugcugaa

SEQ ID NO: 1880761 - RNA, 19 nt, Homo sapiens
  misc_RNA (1)...(19): siRNA sense strand
uaagaagacaucccacuag

SEQ ID NO: 1880762 - RNA, 19 nt, Homo sapiens
  misc_RNA (1)...(19): siRNA sense strand
gcucuaugcugccuguucu

SEQ ID NO: 1880763 - RNA, 19 nt, Homo sapiens
  misc_RNA (1)...(19): siRNA sense strand
caugcgggcucauuaccaa

SEQ ID NO: 1880764 - RNA, 19 nt, Homo sapiens
  misc_RNA (1)...(19): siRNA sense strand
acccugccaucaucuauaa

SEQ ID NO: 1880765 - RNA, 19 nt, Homo sapiens
  misc_RNA (1)...(19): siRNA sense strand
gaacacacagucggcuaug

SEQ ID NO: 1880766 - RNA, 19 nt, Homo sapiens
  misc_RNA (1)...(19): siRNA sense strand
acucgaaaguucuucacaa

SEQ ID NO: 1880767 - RNA, 19 nt, Homo sapiens
  misc_RNA (1)...(19): siRNA sense strand
gcaagccaaucccagucau

SEQ ID NO: 1880768 - RNA, 19 nt, Homo sapiens
  misc_RNA (1)...(19): siRNA sense strand
gaguggcccuuuucaugua

SEQ ID NO: 1880769 - RNA, 19 nt, Homo sapiens
  misc_RNA (1)...(19): siRNA sense strand
aaagauaacaagaggaaag

SEQ ID NO: 1880770 - RNA, 19 nt, Homo sapiens
  misc_RNA (1)...(19): siRNA sense strand
ucuauaacauccugcucuu

SEQ ID NO: 1880771 - RNA, 19 nt, Homo sapiens
  misc_RNA (1)...(19): siRNA sense strand
ugugugugcuguuaauugu

SEQ ID NO: 1880772 - RNA, 19 nt, Homo sapiens
  misc_RNA (1)...(19): siRNA sense strand
ugccuuaacuuuggucuuc

SEQ ID NO: 1880773 - RNA, 19 nt, Homo sapiens
  misc_RNA (1)...(19): siRNA sense strand
uaacaagaggaaaguaugg

SEQ ID NO: 1880774 - RNA, 19 nt, Homo sapiens
  misc_RNA (1)...(19): siRNA sense strand
gucagagcuucaucuuuau

SEQ ID NO: 1880775 - RNA, 19 nt, Homo sapiens
  misc_RNA (1)...(19): siRNA sense strand
agaaaguuguugggauaga

SEQ ID NO: 1880776 - RNA, 19 nt, Homo sapiens
  misc_RNA (1)...(19): siRNA sense strand
gaaugggaauccuguucac

SEQ ID NO: 1880777 - RNA, 19 nt, Homo sapiens
  misc_RNA (1)...(19): siRNA sense strand
ugggaguucuugagcuuug

SEQ ID NO: 1880778 - RNA, 19 nt, Homo sapiens
  misc_RNA (1)...(19): siRNA sense strand
uaugcugccuguucuaucu

SEQ ID NO: 1880779 - RNA, 19 nt, Homo sapiens
  misc_RNA (1)...(19): siRNA sense strand
cucgaaaguucuucacaau

SEQ ID NO: 1880780 - RNA, 19 nt, Homo sapiens
  misc_RNA (1)...(19): siRNA sense strand
gggaaugggaauccuguuc

SEQ ID NO: 1880781 - RNA, 19 nt, Homo sapiens
  misc_RNA (1)...(19): siRNA sense strand
cuccagcaauucagcacua

SEQ ID NO: 1880782 - RNA, 19 nt, Homo sapiens
  misc_RNA (1)...(19): siRNA sense strand
caccuuugccuuaacuuug

SEQ ID NO: 1880783 - RNA, 19 nt, Homo sapiens
  misc_RNA (1)...(19): siRNA sense strand
ccuguucuaucuccuaucu

SEQ ID NO: 1880784 - RNA, 19 nt, Homo sapiens
  misc_RNA (1)...(19): siRNA sense strand
aaagguacccugccaucau

SEQ ID NO: 1880785 - RNA, 19 nt, Homo sapiens
  misc_RNA (1)...(19): siRNA sense strand
ucaccuuugccuuaacuuu

SEQ ID NO: 1880786 - RNA, 19 nt, Homo sapiens
  misc_RNA (1)...(19): siRNA sense strand
ggauagaagaacacacagu

SEQ ID NO: 1880787 - RNA, 19 nt, Homo sapiens
  misc_RNA (1)...(19): siRNA sense strand
ucgaaaguucuucacaauu

SEQ ID NO: 1880788 - RNA, 19 nt, Homo sapiens
  misc_RNA (1)...(19): siRNA sense strand
aagguacccugccaucauc

SEQ ID NO: 1880789 - RNA, 19 nt, Homo sapiens
  misc_RNA (1)...(19): siRNA sense strand
ucugggaguucuugagcuu

SEQ ID NO: 1880790 - RNA, 19 nt, Homo sapiens
  misc_RNA (1)...(19): siRNA sense strand
gaccacaugcgggcucauu

SEQ ID NO: 1880791 - RNA, 19 nt, Homo sapiens
  misc_RNA (1)...(19): siRNA sense strand
agucggcuauggagagcua

SEQ ID NO: 1880792 - RNA, 19 nt, Homo sapiens
  misc_RNA (1)...(19): siRNA sense strand
auucagcacuacaguuugu

SEQ ID NO: 1880793 - RNA, 19 nt, Homo sapiens
  misc_RNA (1)...(19): siRNA sense strand
gacccuggauggacugacu

SEQ ID NO: 1880794 - RNA, 19 nt, Homo sapiens
  misc_RNA (1)...(19): siRNA sense strand
uguacaaacccaagaaagu

SEQ ID NO: 1880795 - RNA, 19 nt, Homo sapiens
  misc_RNA (1)...(19): siRNA sense strand
guaaauccugcaagccaau

SEQ ID NO: 1880796 - RNA, 19 nt, Homo sapiens
  misc_RNA (1)...(19): siRNA sense strand
gauggacugacugguguuu

SEQ ID NO: 1880797 - RNA, 19 nt, Homo sapiens
  misc_RNA (1)...(19): siRNA sense strand
guuccugggucuuggucuu

SEQ ID NO: 1880798 - RNA, 19 nt, Homo sapiens
  misc_RNA (1)...(19): siRNA sense strand
gggugucuuugucugcuau

SEQ ID NO: 1880799 - RNA, 19 nt, Homo sapiens
  misc_RNA (1)...(19): siRNA sense strand
acuuuggucuucauucaau

SEQ ID NO: 1880800 - RNA, 19 nt, Homo sapiens
  misc_RNA (1)...(19): siRNA sense strand
acacacagucggcuaugga

SEQ ID NO: 1880801 - RNA, 19 nt, Homo sapiens
  misc_RNA (1)...(19): siRNA sense strand
uacaaacccaagaaaguug

SEQ ID NO: 1880802 - RNA, 19 nt, Homo sapiens
  misc_RNA (1)...(19): siRNA sense strand
cauguacaaacccaagaaa

SEQ ID NO: 1880803 - RNA, 19 nt, Homo sapiens
  misc_RNA (1)...(19): siRNA sense strand
cuacccaacucagguccuu

SEQ ID NO: 1880804 - RNA, 19 nt, Homo sapiens
  misc_RNA (1)...(19): siRNA sense strand
guacccugccaucaucuau

SEQ ID NO: 1880805 - RNA, 19 nt, Homo sapiens
  misc_RNA (1)...(19): siRNA sense strand
guucaccuuugccuuaacu

SEQ ID NO: 1880806 - RNA, 19 nt, Homo sapiens
  misc_RNA (1)...(19): siRNA sense strand
uucuugagcuuugcugaaa

SEQ ID NO: 1880807 - RNA, 19 nt, Homo sapiens
  misc_RNA (1)...(19): siRNA sense strand
ccacaugcgggcucauuac

SEQ ID NO: 1880808 - RNA, 19 nt, Homo sapiens
  misc_RNA (1)...(19): siRNA sense strand
guucuugagcuuugcugaa

SEQ ID NO: 1880809 - RNA, 19 nt, Homo sapiens
  misc_RNA (1)...(19): siRNA sense strand
augcugaacaucaaccuuu

SEQ ID NO: 1880810 - RNA, 19 nt, Homo sapiens
  misc_RNA (1)...(19): siRNA sense strand
gacaacggcaucacuauaa

SEQ ID NO: 1880811 - RNA, 19 nt, Homo sapiens
  misc_RNA (1)...(19): siRNA sense strand
gacaggaccauuuacauuu

SEQ ID NO: 1880812 - RNA, 19 nt, Homo sapiens
  misc_RNA (1)...(19): siRNA sense strand
uuaccaaguugcugcuuua

SEQ ID NO: 1880813 - RNA, 19 nt, Homo sapiens
  misc_RNA (1)...(19): siRNA sense strand
aaacaugggugaaauucug

SEQ ID NO: 1880814 - RNA, 19 nt, Homo sapiens
  misc_RNA (1)...(19): siRNA sense strand
cgacaggaccauuuacauu

SEQ ID NO: 1880815 - RNA, 19 nt, Homo sapiens
  misc_RNA (1)...(19): siRNA sense strand
aaaggcagccgaauugaaa

SEQ ID NO: 1880816 - RNA, 19 nt, Homo sapiens
  misc_RNA (1)...(19): siRNA sense strand
caaacaguauuucaagagu

SEQ ID NO: 1880817 - RNA, 19 nt, Homo sapiens
  misc_RNA (1)...(19): siRNA sense strand
ugacaacggcaucacuaua

SEQ ID NO: 1880818 - RNA, 19 nt, Homo sapiens
  misc_RNA (1)...(19): siRNA sense strand
gaaauugaagcaguagcua

SEQ ID NO: 1880819 - RNA, 19 nt, Homo sapiens
  misc_RNA (1)...(19): siRNA sense strand
uagagcugcuuaccaaguu

SEQ ID NO: 1880820 - RNA, 19 nt, Homo sapiens
  misc_RNA (1)...(19): siRNA sense strand
caaaggcagccgaauugaa

SEQ ID NO: 1880821 - RNA, 19 nt, Homo sapiens
  misc_RNA (1)...(19): siRNA sense strand
cagucaagcuguauuaguc

SEQ ID NO: 1880822 - RNA, 19 nt, Homo sapiens
  misc_RNA (1)...(19): siRNA sense strand
uuacauuucaggacagaua

SEQ ID NO: 1880823 - RNA, 19 nt, Homo sapiens
  misc_RNA (1)...(19): siRNA sense strand
acaggaccauuuacauuuc

SEQ ID NO: 1880824 - RNA, 19 nt, Homo sapiens
  misc_RNA (1)...(19): siRNA sense strand
gcagaagaagcuaaacaag

SEQ ID NO: 1880825 - RNA, 19 nt, Homo sapiens
  misc_RNA (1)...(19): siRNA sense strand
agcaguagcuauccaagga

SEQ ID NO: 1880826 - RNA, 19 nt, Homo sapiens
  misc_RNA (1)...(19): siRNA sense strand
cuacaaacaguauuucaag

SEQ ID NO: 1880827 - RNA, 19 nt, Homo sapiens
  misc_RNA (1)...(19): siRNA sense strand
cccaaaggcagccgaauug

SEQ ID NO: 1880828 - RNA, 19 nt, Homo sapiens
  misc_RNA (1)...(19): siRNA sense strand
ugcuagagcugcuuaccaa

SEQ ID NO: 1880829 - RNA, 19 nt, Homo sapiens
  misc_RNA (1)...(19): siRNA sense strand
caggaccauuuacauuuca

SEQ ID NO: 1880830 - RNA, 19 nt, Homo sapiens
  misc_RNA (1)...(19): siRNA sense strand
ucuucuggcugacauaaau

SEQ ID NO: 1880831 - RNA, 19 nt, Homo sapiens
  misc_RNA (1)...(19): siRNA sense strand
uggcugacauaaaugacuu

SEQ ID NO: 1880832 - RNA, 19 nt, Homo sapiens
  misc_RNA (1)...(19): siRNA sense strand
ggcauggacccuucaagug

SEQ ID NO: 1880833 - RNA, 19 nt, Homo sapiens
  misc_RNA (1)...(19): siRNA sense strand
gcugcaggcugugacuuca

SEQ ID NO: 1880834 - RNA, 19 nt, Homo sapiens
  misc_RNA (1)...(19): siRNA sense strand
ccaaaggcagccgaauuga

SEQ ID NO: 1880835 - RNA, 19 nt, Homo sapiens
  misc_RNA (1)...(19): siRNA sense strand
cuuaccaaguugcugcuuu

SEQ ID NO: 1880836 - RNA, 19 nt, Homo sapiens
  misc_RNA (1)...(19): siRNA sense strand
gcuaaacaagcucuuaaaa

SEQ ID NO: 1880837 - RNA, 19 nt, Homo sapiens
  misc_RNA (1)...(19): siRNA sense strand
ccauuggacccuacaguca

SEQ ID NO: 1880838 - RNA, 19 nt, Homo sapiens
  misc_RNA (1)...(19): siRNA sense strand
caggacagauaggcaugga

SEQ ID NO: 1880839 - RNA, 19 nt, Homo sapiens
  misc_RNA (1)...(19): siRNA sense strand
acaaacaguauuucaagag

SEQ ID NO: 1880840 - RNA, 19 nt, Homo sapiens
  misc_RNA (1)...(19): siRNA sense strand
gcuauccaaggaccacuga

SEQ ID NO: 1880841 - RNA, 19 nt, Homo sapiens
  misc_RNA (1)...(19): siRNA sense strand
uagucgacaggaccauuua

SEQ ID NO: 1880842 - RNA, 19 nt, Homo sapiens
  misc_RNA (1)...(19): siRNA sense strand
aaauugaagcaguagcuau

SEQ ID NO: 1880843 - RNA, 19 nt, Homo sapiens
  misc_RNA (1)...(19): siRNA sense strand
caaugaaaucuacaaacag

SEQ ID NO: 1880844 - RNA, 19 nt, Homo sapiens
  misc_RNA (1)...(19): siRNA sense strand
gaacaacccuauuuauuca

SEQ ID NO: 1880845 - RNA, 19 nt, Homo sapiens
  misc_RNA (1)...(19): siRNA sense strand
gaacaaauggaacugauua

SEQ ID NO: 1880846 - RNA, 19 nt, Homo sapiens
  misc_RNA (1)...(19): siRNA sense strand
gagcaaagcugaacgugaa

SEQ ID NO: 1880847 - RNA, 19 nt, Homo sapiens
  misc_RNA (1)...(19): siRNA sense strand
gaggagcgcuaccuggaua

SEQ ID NO: 1880848 - RNA, 19 nt, Homo sapiens
  misc_RNA (1)...(19): siRNA sense strand
gagaagcacggauuuaauu

SEQ ID NO: 1880849 - RNA, 19 nt, Homo sapiens
  misc_RNA (1)...(19): siRNA sense strand
caucagacauucacaacaa

SEQ ID NO: 1880850 - RNA, 19 nt, Homo sapiens
  misc_RNA (1)...(19): siRNA sense strand
cgaacaacccuauuuauuc

SEQ ID NO: 1880851 - RNA, 19 nt, Homo sapiens
  misc_RNA (1)...(19): siRNA sense strand
gagauacgaguacgaguuu

SEQ ID NO: 1880852 - RNA, 19 nt, Homo sapiens
  misc_RNA (1)...(19): siRNA sense strand
ggauaucaaugaguguauu

SEQ ID NO: 1880853 - RNA, 19 nt, Homo sapiens
  misc_RNA (1)...(19): siRNA sense strand
gaacgugaaugaaaacuuc

SEQ ID NO: 1880854 - RNA, 19 nt, Homo sapiens
  misc_RNA (1)...(19): siRNA sense strand
gaagcacggauuuaauuug

SEQ ID NO: 1880855 - RNA, 19 nt, Homo sapiens
  misc_RNA (1)...(19): siRNA sense strand
caagccaggugguguacaa

SEQ ID NO: 1880856 - RNA, 19 nt, Homo sapiens
  misc_RNA (1)...(19): siRNA sense strand
gcuggaagauauuuauaag

SEQ ID NO: 1880857 - RNA, 19 nt, Homo sapiens
  misc_RNA (1)...(19): siRNA sense strand
uauaaguacugccgaacaa

SEQ ID NO: 1880858 - RNA, 19 nt, Homo sapiens
  misc_RNA (1)...(19): siRNA sense strand
ggagaagcacggauuuaau

SEQ ID NO: 1880859 - RNA, 19 nt, Homo sapiens
  misc_RNA (1)...(19): siRNA sense strand
aaaaguggcuggaagauau

SEQ ID NO: 1880860 - RNA, 19 nt, Homo sapiens
  misc_RNA (1)...(19): siRNA sense strand
ccgaacaacccuauuuauu

SEQ ID NO: 1880861 - RNA, 19 nt, Homo sapiens
  misc_RNA (1)...(19): siRNA sense strand
ucaagggcgugcucaguau

SEQ ID NO: 1880862 - RNA, 19 nt, Homo sapiens
  misc_RNA (1)...(19): siRNA sense strand
ugaaugggcccuugagaga

SEQ ID NO: 1880863 - RNA, 19 nt, Homo sapiens
  misc_RNA (1)...(19): siRNA sense strand
gaccauggaccaccuccua

SEQ ID NO: 1880864 - RNA, 19 nt, Homo sapiens
  misc_RNA (1)...(19): siRNA sense strand
gauuuaauuuggucacauc

SEQ ID NO: 1880865 - RNA, 19 nt, Homo sapiens
  misc_RNA (1)...(19): siRNA sense strand
uuaauuuggucacaucaga

SEQ ID NO: 1880866 - RNA, 19 nt, Homo sapiens
  misc_RNA (1)...(19): siRNA sense strand
uuacaucauuccguacuuu

SEQ ID NO: 1880867 - RNA, 19 nt, Homo sapiens
  misc_RNA (1)...(19): siRNA sense strand
caaugaguguauucuugaa

SEQ ID NO: 1880868 - RNA, 19 nt, Homo sapiens
  misc_RNA (1)...(19): siRNA sense strand
uuacuuggaugaccaugga

SEQ ID NO: 1880869 - RNA, 19 nt, Homo sapiens
  misc_RNA (1)...(19): siRNA sense strand
gaagaugugcugcuguuac

SEQ ID NO: 1880870 - RNA, 19 nt, Homo sapiens
  misc_RNA (1)...(19): siRNA sense strand
acaggaagcuuggaaacau

SEQ ID NO: 1880871 - RNA, 19 nt, Homo sapiens
  misc_RNA (1)...(19): siRNA sense strand
cggcaguacuugggaaauu

SEQ ID NO: 1880872 - RNA, 19 nt, Homo sapiens
  misc_RNA (1)...(19): siRNA sense strand
gugcugcuguuacuggaaa

SEQ ID NO: 1880873 - RNA, 19 nt, Homo sapiens
  misc_RNA (1)...(19): siRNA sense strand
uggaagaugugcugcuguu

SEQ ID NO: 1880874 - RNA, 19 nt, Homo sapiens
  misc_RNA (1)...(19): siRNA sense strand
ggaagaugugcugcuguua

SEQ ID NO: 1880875 - RNA, 19 nt, Homo sapiens
  misc_RNA (1)...(19): siRNA sense strand
ucacucgacauguucauuu

SEQ ID NO: 1880876 - RNA, 19 nt, Homo sapiens
  misc_RNA (1)...(19): siRNA sense strand
gaaaaguggcuggaagaua

SEQ ID NO: 1880877 - RNA, 19 nt, Homo sapiens
  misc_RNA (1)...(19): siRNA sense strand
gaagaacaggaugaugaaa

SEQ ID NO: 1880878 - RNA, 19 nt, Homo sapiens
  misc_RNA (1)...(19): siRNA sense strand
uugaagaguuggaagaugu

SEQ ID NO: 1880879 - RNA, 19 nt, Homo sapiens
  misc_RNA (1)...(19): siRNA sense strand
caaagcugaacgugaauga

SEQ ID NO: 1880880 - RNA, 19 nt, Homo sapiens
  misc_RNA (1)...(19): siRNA sense strand
aagcugaacgugaaugaaa

SEQ ID NO: 1880881 - RNA, 19 nt, Homo sapiens
  misc_RNA (1)...(19): siRNA sense strand
cggagaagcacggauuuaa

SEQ ID NO: 1880882 - RNA, 19 nt, Homo sapiens
  misc_RNA (1)...(19): siRNA sense strand
uuuauucacucgacauguu

SEQ ID NO: 1880883 - RNA, 19 nt, Homo sapiens
  misc_RNA (1)...(19): siRNA sense strand
guacuguggucuugcuucu

SEQ ID NO: 1880884 - RNA, 19 nt, Homo sapiens
  misc_RNA (1)...(19): siRNA sense strand
ugaagaacaggaugaugaa

SEQ ID NO: 1880885 - RNA, 19 nt, Homo sapiens
  misc_RNA (1)...(19): siRNA sense strand
gagcacaggaagcuuggaa

SEQ ID NO: 1880886 - RNA, 19 nt, Homo sapiens
  misc_RNA (1)...(19): siRNA sense strand
gcuguuacuggaaagauuu

SEQ ID NO: 1880887 - RNA, 19 nt, Homo sapiens
  misc_RNA (1)...(19): siRNA sense strand
caacaggguaggcaagugu

SEQ ID NO: 1880888 - RNA, 19 nt, Homo sapiens
  misc_RNA (1)...(19): siRNA sense strand
gagccguacuguggucuug

SEQ ID NO: 1880889 - RNA, 19 nt, Homo sapiens
  misc_RNA (1)...(19): siRNA sense strand
caggaagcuuggaaacaug

SEQ ID NO: 1880890 - RNA, 19 nt, Homo sapiens
  misc_RNA (1)...(19): siRNA sense strand
aagcacggauuuaauuugg

SEQ ID NO: 1880891 - RNA, 19 nt, Homo sapiens
  misc_RNA (1)...(19): siRNA sense strand
ggcuggaagauauuuauaa

SEQ ID NO: 1880892 - RNA, 19 nt, Homo sapiens
  misc_RNA (1)...(19): siRNA sense strand
acuguggucuugcuucuga

SEQ ID NO: 1880893 - RNA, 19 nt, Homo sapiens
  misc_RNA (1)...(19): siRNA sense strand
ggcaguacuugggaaauuc

SEQ ID NO: 1880894 - RNA, 19 nt, Homo sapiens
  misc_RNA (1)...(19): siRNA sense strand
acaucaacaucauuagaga

SEQ ID NO: 1880895 - RNA, 19 nt, Homo sapiens
  misc_RNA (1)...(19): siRNA sense strand
agaagcacggauuuaauuu

SEQ ID NO: 1880896 - RNA, 19 nt, Homo sapiens
  misc_RNA (1)...(19): siRNA sense strand
ugagauacgaguacgaguu

SEQ ID NO: 1880897 - RNA, 19 nt, Homo sapiens
  misc_RNA (1)...(19): siRNA sense strand
ugacugugacggugaagaa

SEQ ID NO: 1880898 - RNA, 19 nt, Homo sapiens
  misc_RNA (1)...(19): siRNA sense strand
cuacaucaacaucauuaga

SEQ ID NO: 1880899 - RNA, 19 nt, Homo sapiens
  misc_RNA (1)...(19): siRNA sense strand
cauggaccaccuccuagua

SEQ ID NO: 1880900 - RNA, 19 nt, Homo sapiens
  misc_RNA (1)...(19): siRNA sense strand
ggauuuaauuuggucacau

SEQ ID NO: 1880901 - RNA, 19 nt, Homo sapiens
  misc_RNA (1)...(19): siRNA sense strand
gauacgaguacgaguuuua

SEQ ID NO: 1880902 - RNA, 19 nt, Homo sapiens
  misc_RNA (1)...(19): siRNA sense strand
gcacaggaagcuuggaaac

SEQ ID NO: 1880903 - RNA, 19 nt, Homo sapiens
  misc_RNA (1)...(19): siRNA sense strand
ugagaaucuugucggagaa

SEQ ID NO: 1880904 - RNA, 19 nt, Homo sapiens
  misc_RNA (1)...(19): siRNA sense strand
ucuaccagcggaugagaua

SEQ ID NO: 1880905 - RNA, 19 nt, Homo sapiens
  misc_RNA (1)...(19): siRNA sense strand
ccugaggccacacuucuuu

SEQ ID NO: 1880906 - RNA, 19 nt, Homo sapiens
  misc_RNA (1)...(19): siRNA sense strand
gauaucaaugaguguauuc

SEQ ID NO: 1880907 - RNA, 19 nt, Homo sapiens
  misc_RNA (1)...(19): siRNA sense strand
ucacaucagacauucacaa

SEQ ID NO: 1880908 - RNA, 19 nt, Homo sapiens
  misc_RNA (1)...(19): siRNA sense strand
augaagaacaggaugauga

SEQ ID NO: 1880909 - RNA, 19 nt, Homo sapiens
  misc_RNA (1)...(19): siRNA sense strand
cagccugucuacaucaaca

SEQ ID NO: 1880910 - RNA, 19 nt, Homo sapiens
  misc_RNA (1)...(19): siRNA sense strand
gccgaacaacccuauuuau

SEQ ID NO: 1880911 - RNA, 19 nt, Homo sapiens
  misc_RNA (1)...(19): siRNA sense strand
ugccgaacaacccuauuua

SEQ ID NO: 1880912 - RNA, 19 nt, Homo sapiens
  misc_RNA (1)...(19): siRNA sense strand
ugaacaaauggaacugauu

SEQ ID NO: 1880913 - RNA, 19 nt, Homo sapiens
  misc_RNA (1)...(19): siRNA sense strand
aucaaugaguguauucuug

SEQ ID NO: 1880914 - RNA, 19 nt, Homo sapiens
  misc_RNA (1)...(19): siRNA sense strand
gucuacaucaacaucauua

SEQ ID NO: 1880915 - RNA, 19 nt, Homo sapiens
  misc_RNA (1)...(19): siRNA sense strand
ccucaacuucucaagguuu

SEQ ID NO: 1880916 - RNA, 19 nt, Homo sapiens
  misc_RNA (1)...(19): siRNA sense strand
gcaaagcugaacgugaaug

SEQ ID NO: 1880917 - RNA, 19 nt, Homo sapiens
  misc_RNA (1)...(19): siRNA sense strand
ucaaccgguucuuauccaa

SEQ ID NO: 1880918 - RNA, 19 nt, Homo sapiens
  misc_RNA (1)...(19): siRNA sense strand
ggaggagcgcuaccuggau

SEQ ID NO: 1880919 - RNA, 19 nt, Homo sapiens
  misc_RNA (1)...(19): siRNA sense strand
aagaugugcugcuguuacu

SEQ ID NO: 1880920 - RNA, 19 nt, Homo sapiens
  misc_RNA (1)...(19): siRNA sense strand
ggaaaccgaggagccaauc

SEQ ID NO: 1880921 - RNA, 19 nt, Homo sapiens
  misc_RNA (1)...(19): siRNA sense strand
aaaaccaggcuuacuaaaa

SEQ ID NO: 1880922 - RNA, 19 nt, Homo sapiens
  misc_RNA (1)...(19): siRNA sense strand
cuuggaaacaugacuguga

SEQ ID NO: 1880923 - RNA, 19 nt, Homo sapiens
  misc_RNA (1)...(19): siRNA sense strand
ugggcucccuccucuauca

SEQ ID NO: 1880924 - RNA, 19 nt, Homo sapiens
  misc_RNA (1)...(19): siRNA sense strand
gaagaagaagcagcagcau

SEQ ID NO: 1880925 - RNA, 19 nt, Homo sapiens
  misc_RNA (1)...(19): siRNA sense strand
gaugaagaacaggaugaug

SEQ ID NO: 1880926 - RNA, 19 nt, Homo sapiens
  misc_RNA (1)...(19): siRNA sense strand
ucggagaagcacggauuua

SEQ ID NO: 1880927 - RNA, 19 nt, Homo sapiens
  misc_RNA (1)...(19): siRNA sense strand
ccacccugcuggucuucug

SEQ ID NO: 1880928 - RNA, 19 nt, Homo sapiens
  misc_RNA (1)...(19): siRNA sense strand
cacucgacauguucauuuc

SEQ ID NO: 1880929 - RNA, 19 nt, Homo sapiens
  misc_RNA (1)...(19): siRNA sense strand
cgugcucaguaucuacaaa

SEQ ID NO: 1880930 - RNA, 19 nt, Homo sapiens
  misc_RNA (1)...(19): siRNA sense strand
cuaccuggauaucaaugag

SEQ ID NO: 1880931 - RNA, 19 nt, Homo sapiens
  misc_RNA (1)...(19): siRNA sense strand
caacuucucaagguuugga

SEQ ID NO: 1880932 - RNA, 19 nt, Homo sapiens
  misc_RNA (1)...(19): siRNA sense strand
gaaauucucucuuccauca

SEQ ID NO: 1880933 - RNA, 19 nt, Homo sapiens
  misc_RNA (1)...(19): siRNA sense strand
ucaaauggauccacuauaa

SEQ ID NO: 1880934 - RNA, 19 nt, Homo sapiens
  misc_RNA (1)...(19): siRNA sense strand
aaacaacucuugcauguaa

SEQ ID NO: 1880935 - RNA, 19 nt, Homo sapiens
  misc_RNA (1)...(19): siRNA sense strand
ggaaagaaaugaaggaugu

SEQ ID NO: 1880936 - RNA, 19 nt, Homo sapiens
  misc_RNA (1)...(19): siRNA sense strand
uuacaggucuucuacauua

SEQ ID NO: 1880937 - RNA, 19 nt, Homo sapiens
  misc_RNA (1)...(19): siRNA sense strand
ggaagaagcucagaaacaa

SEQ ID NO: 1880938 - RNA, 19 nt, Homo sapiens
  misc_RNA (1)...(19): siRNA sense strand
gaaguggccuugacagaaa

SEQ ID NO: 1880939 - RNA, 19 nt, Homo sapiens
  misc_RNA (1)...(19): siRNA sense strand
ggagauggccaguuacuua

SEQ ID NO: 1880940 - RNA, 19 nt, Homo sapiens
  misc_RNA (1)...(19): siRNA sense strand
ucagacagauucaacuuua

SEQ ID NO: 1880941 - RNA, 19 nt, Homo sapiens
  misc_RNA (1)...(19): siRNA sense strand
cuacaaagauguuucaguu

SEQ ID NO: 1880942 - RNA, 19 nt, Homo sapiens
  misc_RNA (1)...(19): siRNA sense strand
ggaaagaggugaggagaau

SEQ ID NO: 1880943 - RNA, 19 nt, Homo sapiens
  misc_RNA (1)...(19): siRNA sense strand
guccagagguuaucuauga

SEQ ID NO: 1880944 - RNA, 19 nt, Homo sapiens
  misc_RNA (1)...(19): siRNA sense strand
caaagugcauggugaagaa

SEQ ID NO: 1880945 - RNA, 19 nt, Homo sapiens
  misc_RNA (1)...(19): siRNA sense strand
caacuagaauugcuggaaa

SEQ ID NO: 1880946 - RNA, 19 nt, Homo sapiens
  misc_RNA (1)...(19): siRNA sense strand
cuaauaagcuucucuaugc

SEQ ID NO: 1880947 - RNA, 19 nt, Homo sapiens
  misc_RNA (1)...(19): siRNA sense strand
caaacagagucaacaacua

SEQ ID NO: 1880948 - RNA, 19 nt, Homo sapiens
  misc_RNA (1)...(19): siRNA sense strand
ccaaggauaucccaaccua

SEQ ID NO: 1880949 - RNA, 19 nt, Homo sapiens
  misc_RNA (1)...(19): siRNA sense strand
acacagaacuggaagugaa

SEQ ID NO: 1880950 - RNA, 19 nt, Homo sapiens
  misc_RNA (1)...(19): siRNA sense strand
gaugaccacugccauuuga

SEQ ID NO: 1880951 - RNA, 19 nt, Homo sapiens
  misc_RNA (1)...(19): siRNA sense strand
gcaaagcccuguacacacu

SEQ ID NO: 1880952 - RNA, 19 nt, Homo sapiens
  misc_RNA (1)...(19): siRNA sense strand
ccucagaaauggaagaauu

SEQ ID NO: 1880953 - RNA, 19 nt, Homo sapiens
  misc_RNA (1)...(19): siRNA sense strand
ccacauuguucccuuauau

SEQ ID NO: 1880954 - RNA, 19 nt, Homo sapiens
  misc_RNA (1)...(19): siRNA sense strand
gcagauggauaaauuggau

SEQ ID NO: 1880955 - RNA, 19 nt, Homo sapiens
  misc_RNA (1)...(19): siRNA sense strand
ggaaggaagcaccaacuaa

SEQ ID NO: 1880956 - RNA, 19 nt, Homo sapiens
  misc_RNA (1)...(19): siRNA sense strand
gcaaacugcaauaaacaua

SEQ ID NO: 1880957 - RNA, 19 nt, Homo sapiens
  misc_RNA (1)...(19): siRNA sense strand
agaaacaacucuugcaugu

SEQ ID NO: 1880958 - RNA, 19 nt, Homo sapiens
  misc_RNA (1)...(19): siRNA sense strand
gaaggaagcaccaacuaau

SEQ ID NO: 1880959 - RNA, 19 nt, Homo sapiens
  misc_RNA (1)...(19): siRNA sense strand
gaucuuaccaccauccuuu

SEQ ID NO: 1880960 - RNA, 19 nt, Homo sapiens
  misc_RNA (1)...(19): siRNA sense strand
aagcacaaguucaaaguaa

SEQ ID NO: 1880961 - RNA, 19 nt, Homo sapiens
  misc_RNA (1)...(19): siRNA sense strand
ucaaggagauuguguacau

SEQ ID NO: 1880962 - RNA, 19 nt, Homo sapiens
  misc_RNA (1)...(19): siRNA sense strand
ggauuugccuccauuguca

SEQ ID NO: 1880963 - RNA, 19 nt, Homo sapiens
  misc_RNA (1)...(19): siRNA sense strand
ggguaaacauccugaagaa

SEQ ID NO: 1880964 - RNA, 19 nt, Homo sapiens
  misc_RNA (1)...(19): siRNA sense strand
ccucuucgcuucuggguaa

SEQ ID NO: 1880965 - RNA, 19 nt, Homo sapiens
  misc_RNA (1)...(19): siRNA sense strand
aauauuguguggcgacuua

SEQ ID NO: 1880966 - RNA, 19 nt, Homo sapiens
  misc_RNA (1)...(19): siRNA sense strand
ggagagcccuucuauuugc

SEQ ID NO: 1880967 - RNA, 19 nt, Homo sapiens
  misc_RNA (1)...(19): siRNA sense strand
gaagaacccucaguuuguc

SEQ ID NO: 1880968 - RNA, 19 nt, Homo sapiens
  misc_RNA (1)...(19): siRNA sense strand
ucggagagcccuucuauuu

SEQ ID NO: 1880969 - RNA, 19 nt, Homo sapiens
  misc_RNA (1)...(19): siRNA sense strand
agagauacgugacggcuuu

SEQ ID NO: 1880970 - RNA, 19 nt, Homo sapiens
  misc_RNA (1)...(19): siRNA sense strand
cgaccaagguggcaauuca

SEQ ID NO: 1880971 - RNA, 19 nt, Homo sapiens
  misc_RNA (1)...(19): siRNA sense strand
ugaagaauguggacucuag

SEQ ID NO: 1880972 - RNA, 19 nt, Homo sapiens
  misc_RNA (1)...(19): siRNA sense strand
ucaauguucucgacuguga

SEQ ID NO: 1880973 - RNA, 19 nt, Homo sapiens
  misc_RNA (1)...(19): siRNA sense strand
cauuaaacgucgucuuuga

SEQ ID NO: 1880974 - RNA, 19 nt, Homo sapiens
  misc_RNA (1)...(19): siRNA sense strand
gagauuguguacauucaga

SEQ ID NO: 1880975 - RNA, 19 nt, Homo sapiens
  misc_RNA (1)...(19): siRNA sense strand
gaaaugcaaguggauguaa

SEQ ID NO: 1880976 - RNA, 19 nt, Homo sapiens
  misc_RNA (1)...(19): siRNA sense strand
gggcagaaauuuugaugua

SEQ ID NO: 1880977 - RNA, 19 nt, Homo sapiens
  misc_RNA (1)...(19): siRNA sense strand
caacagcagagcuccauuu

SEQ ID NO: 1880978 - RNA, 19 nt, Homo sapiens
  misc_RNA (1)...(19): siRNA sense strand
gaagcacaaguucaaagua

SEQ ID NO: 1880979 - RNA, 19 nt, Homo sapiens
  misc_RNA (1)...(19): siRNA sense strand
gauggaaucaccaagcuaa

SEQ ID NO: 1880980 - RNA, 19 nt, Homo sapiens
  misc_RNA (1)...(19): siRNA sense strand
cagaaaguaucgacauuag

SEQ ID NO: 1880981 - RNA, 19 nt, Homo sapiens
  misc_RNA (1)...(19): siRNA sense strand
gcccuaaucuguaauaaaa

SEQ ID NO: 1880982 - RNA, 19 nt, Homo sapiens
  misc_RNA (1)...(19): siRNA sense strand
ggaaagcgagcuccggaaa

SEQ ID NO: 1880983 - RNA, 19 nt, Homo sapiens
  misc_RNA (1)...(19): siRNA sense strand
gugggaagcuucucuccaa

SEQ ID NO: 1880984 - RNA, 19 nt, Homo sapiens
  misc_RNA (1)...(19): siRNA sense strand
caaccaaucgcaucaucua

SEQ ID NO: 1880985 - RNA, 19 nt, Homo sapiens
  misc_RNA (1)...(19): siRNA sense strand
gagcuccauuugcuauaaa

SEQ ID NO: 1880986 - RNA, 19 nt, Homo sapiens
  misc_RNA (1)...(19): siRNA sense strand
caaaugggcacacgacaga

SEQ ID NO: 1880987 - RNA, 19 nt, Homo sapiens
  misc_RNA (1)...(19): siRNA sense strand
ggaacaguguaguaacaug

SEQ ID NO: 1880988 - RNA, 19 nt, Homo sapiens
  misc_RNA (1)...(19): siRNA sense strand
ucacugaagauaugcauaa

SEQ ID NO: 1880989 - RNA, 19 nt, Homo sapiens
  misc_RNA (1)...(19): siRNA sense strand
uaaaugacacccacaugaa

SEQ ID NO: 1880990 - RNA, 19 nt, Homo sapiens
  misc_RNA (1)...(19): siRNA sense strand
gagauggccaguuacuuaa

SEQ ID NO: 1880991 - RNA, 19 nt, Homo sapiens
  misc_RNA (1)...(19): siRNA sense strand
gaaccaaccaggcuuuaca

SEQ ID NO: 1880992 - RNA, 19 nt, Homo sapiens
  misc_RNA (1)...(19): siRNA sense strand
gaaacaacucuugcaugua

SEQ ID NO: 1880993 - RNA, 19 nt, Homo sapiens
  misc_RNA (1)...(19): siRNA sense strand
caaagcugcugucgaccaa

SEQ ID NO: 1880994 - RNA, 19 nt, Homo sapiens
  misc_RNA (1)...(19): siRNA sense strand
ugaaauuggucuugagcuu

SEQ ID NO: 1880995 - RNA, 19 nt, Homo sapiens
  misc_RNA (1)...(19): siRNA sense strand
ucaguacuguggcauuaaa

SEQ ID NO: 1880996 - RNA, 19 nt, Homo sapiens
  misc_RNA (1)...(19): siRNA sense strand
aaagcgagcuccggaaaga

SEQ ID NO: 1880997 - RNA, 19 nt, Homo sapiens
  misc_RNA (1)...(19): siRNA sense strand
gaaccaguaccugugauaa

SEQ ID NO: 1880998 - RNA, 19 nt, Homo sapiens
  misc_RNA (1)...(19): siRNA sense strand
gcaucgaacaucacaauga

SEQ ID NO: 1880999 - RNA, 19 nt, Homo sapiens
  misc_RNA (1)...(19): siRNA sense strand
guaacgggagcaaacuuua

SEQ ID NO: 1881000 - RNA, 19 nt, Homo sapiens
  misc_RNA (1)...(19): siRNA sense strand
caacuaauaagcuucucua

SEQ ID NO: 1881001 - RNA, 19 nt, Homo sapiens
  misc_RNA (1)...(19): siRNA sense strand
acaaacagccuuccucuuc

SEQ ID NO: 1881002 - RNA, 19 nt, Homo sapiens
  misc_RNA (1)...(19): siRNA sense strand
cacaugaaauucucucuuc

SEQ ID NO: 1881003 - RNA, 19 nt, Homo sapiens
  misc_RNA (1)...(19): siRNA sense strand
gaggaagacccaaggagaa

SEQ ID NO: 1881004 - RNA, 19 nt, Homo sapiens
  misc_RNA (1)...(19): siRNA sense strand
caaauggauccacuauaaa

SEQ ID NO: 1881005 - RNA, 19 nt, Homo sapiens
  misc_RNA (1)...(19): siRNA sense strand
cuuauggacuucagcuuaa

SEQ ID NO: 1881006 - RNA, 19 nt, Homo sapiens
  misc_RNA (1)...(19): siRNA sense strand
ggaaccaguaccugugaua

SEQ ID NO: 1881007 - RNA, 19 nt, Homo sapiens
  misc_RNA (1)...(19): siRNA sense strand
ugaagaacccucaguuugu

SEQ ID NO: 1881008 - RNA, 19 nt, Homo sapiens
  misc_RNA (1)...(19): siRNA sense strand
gcagagcuccauuugcuau

SEQ ID NO: 1881009 - RNA, 19 nt, Homo sapiens
  misc_RNA (1)...(19): siRNA sense strand
uagaagcauuuggaguuua

SEQ ID NO: 1881010 - RNA, 19 nt, Homo sapiens
  misc_RNA (1)...(19): siRNA sense strand
ggcauuaaacgucgucuuu

SEQ ID NO: 1881011 - RNA, 19 nt, Homo sapiens
  misc_RNA (1)...(19): siRNA sense strand
uaaauuggaugugguugau

SEQ ID NO: 1881012 - RNA, 19 nt, Homo sapiens
  misc_RNA (1)...(19): siRNA sense strand
gagcugagucgcaaacaga

SEQ ID NO: 1881013 - RNA, 19 nt, Homo sapiens
  misc_RNA (1)...(19): siRNA sense strand
gagagccacugcaaagaag

SEQ ID NO: 1881014 - RNA, 19 nt, Homo sapiens
  misc_RNA (1)...(19): siRNA sense strand
uggaugcccuaaucuguaa

SEQ ID NO: 1881015 - RNA, 19 nt, Homo sapiens
  misc_RNA (1)...(19): siRNA sense strand
gaaagaguccaaccaaucg

SEQ ID NO: 1881016 - RNA, 19 nt, Homo sapiens
  misc_RNA (1)...(19): siRNA sense strand
ucaucuaccuugauccauu

SEQ ID NO: 1881017 - RNA, 19 nt, Homo sapiens
  misc_RNA (1)...(19): siRNA sense strand
gaagacaccacauauagac

SEQ ID NO: 1881018 - RNA, 19 nt, Homo sapiens
  misc_RNA (1)...(19): siRNA sense strand
gagggaagcacaaguucaa

SEQ ID NO: 1881019 - RNA, 19 nt, Homo sapiens
  misc_RNA (1)...(19): siRNA sense strand
ugaaauuacucucuuccau

SEQ ID NO: 1881020 - RNA, 19 nt, Homo sapiens
  misc_RNA (1)...(19): siRNA sense strand
gaaaugaaggaugugugua

SEQ ID NO: 1881021 - RNA, 19 nt, Homo sapiens
  misc_RNA (1)...(19): siRNA sense strand
cacagaaaguaucgacauu

SEQ ID NO: 1881022 - RNA, 19 nt, Homo sapiens
  misc_RNA (1)...(19): siRNA sense strand
uaccaacugcucaucauua

SEQ ID NO: 1881023 - RNA, 19 nt, Homo sapiens
  misc_RNA (1)...(19): siRNA sense strand
caaauuguccagagguuau

SEQ ID NO: 1881024 - RNA, 19 nt, Homo sapiens
  misc_RNA (1)...(19): siRNA sense strand
ggagaauucguguugcaaa

SEQ ID NO: 1881025 - RNA, 19 nt, Homo sapiens
  misc_RNA (1)...(19): siRNA sense strand
cgacaguuccuccgugauu

SEQ ID NO: 1881026 - RNA, 19 nt, Homo sapiens
  misc_RNA (1)...(19): siRNA sense strand
ucacccacaucuucacuga

SEQ ID NO: 1881027 - RNA, 19 nt, Homo sapiens
  misc_RNA (1)...(19): siRNA sense strand
uggaugugguugauaguuu

SEQ ID NO: 1881028 - RNA, 19 nt, Homo sapiens
  misc_RNA (1)...(19): siRNA sense strand
gaacggcagcaucuacuuc

SEQ ID NO: 1881029 - RNA, 19 nt, Homo sapiens
  misc_RNA (1)...(19): siRNA sense strand
cuaaaugacacccacauga

SEQ ID NO: 1881030 - RNA, 19 nt, Homo sapiens
  misc_RNA (1)...(19): siRNA sense strand
ucacaaugauccugaaagg

SEQ ID NO: 1881031 - RNA, 19 nt, Homo sapiens
  misc_RNA (1)...(19): siRNA sense strand
gaauucguguugcaaacug

SEQ ID NO: 1881032 - RNA, 19 nt, Homo sapiens
  misc_RNA (1)...(19): siRNA sense strand
gaacugagcagcaucauua

SEQ ID NO: 1881033 - RNA, 19 nt, Homo sapiens
  misc_RNA (1)...(19): siRNA sense strand
ccacagaccuugcuuuaua

SEQ ID NO: 1881034 - RNA, 19 nt, Homo sapiens
  misc_RNA (1)...(19): siRNA sense strand
gaacuaaacagcuauauag

SEQ ID NO: 1881035 - RNA, 19 nt, Homo sapiens
  misc_RNA (1)...(19): siRNA sense strand
gaaggcagcugcaucugaa

SEQ ID NO: 1881036 - RNA, 19 nt, Homo sapiens
  misc_RNA (1)...(19): siRNA sense strand
gagaggaaaucccaacauu

SEQ ID NO: 1881037 - RNA, 19 nt, Homo sapiens
  misc_RNA (1)...(19): siRNA sense strand
guaauugguuugaugauga

SEQ ID NO: 1881038 - RNA, 19 nt, Homo sapiens
  misc_RNA (1)...(19): siRNA sense strand
gcagggaguuguauaugaa

SEQ ID NO: 1881039 - RNA, 19 nt, Homo sapiens
  misc_RNA (1)...(19): siRNA sense strand
gaacaaggaguuauauuca

SEQ ID NO: 1881040 - RNA, 19 nt, Homo sapiens
  misc_RNA (1)...(19): siRNA sense strand
agaaauggcugaagaggaa

SEQ ID NO: 1881041 - RNA, 19 nt, Homo sapiens
  misc_RNA (1)...(19): siRNA sense strand
guagagaaauggcugaaga

SEQ ID NO: 1881042 - RNA, 19 nt, Homo sapiens
  misc_RNA (1)...(19): siRNA sense strand
gcagaggccuugccaaaca

SEQ ID NO: 1881043 - RNA, 19 nt, Homo sapiens
  misc_RNA (1)...(19): siRNA sense strand
caacaaaucagaagaugaa

SEQ ID NO: 1881044 - RNA, 19 nt, Homo sapiens
  misc_RNA (1)...(19): siRNA sense strand
gcaccaccgucucugcuua

SEQ ID NO: 1881045 - RNA, 19 nt, Homo sapiens
  misc_RNA (1)...(19): siRNA sense strand
gaagaugaaucagcuccua

SEQ ID NO: 1881046 - RNA, 19 nt, Homo sapiens
  misc_RNA (1)...(19): siRNA sense strand
ggaguuauauucagaccuu

SEQ ID NO: 1881047 - RNA, 19 nt, Homo sapiens
  misc_RNA (1)...(19): siRNA sense strand
gaaaagcuguccuaccaua

SEQ ID NO: 1881048 - RNA, 19 nt, Homo sapiens
  misc_RNA (1)...(19): siRNA sense strand
uaacagguuugacagauga

SEQ ID NO: 1881049 - RNA, 19 nt, Homo sapiens
  misc_RNA (1)...(19): siRNA sense strand
guucuuugcuuaccaauug

SEQ ID NO: 1881050 - RNA, 19 nt, Homo sapiens
  misc_RNA (1)...(19): siRNA sense strand
caagaagaccaaagagaua

SEQ ID NO: 1881051 - RNA, 19 nt, Homo sapiens
  misc_RNA (1)...(19): siRNA sense strand
ggcaaggucucaugcaauu

SEQ ID NO: 1881052 - RNA, 19 nt, Homo sapiens
  misc_RNA (1)...(19): siRNA sense strand
gaacaacaaaucagaagau

SEQ ID NO: 1881053 - RNA, 19 nt, Homo sapiens
  misc_RNA (1)...(19): siRNA sense strand
gaaggcauaucuuucucuu

SEQ ID NO: 1881054 - RNA, 19 nt, Homo sapiens
  misc_RNA (1)...(19): siRNA sense strand
agaccuugcuuuauacuuu

SEQ ID NO: 1881055 - RNA, 19 nt, Homo sapiens
  misc_RNA (1)...(19): siRNA sense strand
gaccaaagagauaagauuu

SEQ ID NO: 1881056 - RNA, 19 nt, Homo sapiens
  misc_RNA (1)...(19): siRNA sense strand
gaugaacgauuuccaagag

SEQ ID NO: 1881057 - RNA, 19 nt, Homo sapiens
  misc_RNA (1)...(19): siRNA sense strand
gcaauaauagccuguguau

SEQ ID NO: 1881058 - RNA, 19 nt, Homo sapiens
  misc_RNA (1)...(19): siRNA sense strand
ggaagcaguuggaagagau

SEQ ID NO: 1881059 - RNA, 19 nt, Homo sapiens
  misc_RNA (1)...(19): siRNA sense strand
gacggcaaaugauauauau

SEQ ID NO: 1881060 - RNA, 19 nt, Homo sapiens
  misc_RNA (1)...(19): siRNA sense strand
ggaagaacaacaaaucaga

SEQ ID NO: 1881061 - RNA, 19 nt, Homo sapiens
  misc_RNA (1)...(19): siRNA sense strand
gugcgucucugcaaagaaa

SEQ ID NO: 1881062 - RNA, 19 nt, Homo sapiens
  misc_RNA (1)...(19): siRNA sense strand
gaagaacaacaaaucagaa

SEQ ID NO: 1881063 - RNA, 19 nt, Homo sapiens
  misc_RNA (1)...(19): siRNA sense strand
caaaucagaagaugaauca

SEQ ID NO: 1881064 - RNA, 19 nt, Homo sapiens
  misc_RNA (1)...(19): siRNA sense strand
aggaauugcuggccaagua

SEQ ID NO: 1881065 - RNA, 19 nt, Homo sapiens
  misc_RNA (1)...(19): siRNA sense strand
gaaaacauguggccuggaa

SEQ ID NO: 1881066 - RNA, 19 nt, Homo sapiens
  misc_RNA (1)...(19): siRNA sense strand
gaacauuccagaugccuau

SEQ ID NO: 1881067 - RNA, 19 nt, Homo sapiens
  misc_RNA (1)...(19): siRNA sense strand
ggaaaacacugcuaguaga

SEQ ID NO: 1881068 - RNA, 19 nt, Homo sapiens
  misc_RNA (1)...(19): siRNA sense strand
agaauugaaugacuuccua

SEQ ID NO: 1881069 - RNA, 19 nt, Homo sapiens
  misc_RNA (1)...(19): siRNA sense strand
ucacauagagaccguguaa

SEQ ID NO: 1881070 - RNA, 19 nt, Homo sapiens
  misc_RNA (1)...(19): siRNA sense strand
gaauuuguaucugaaagug

SEQ ID NO: 1881071 - RNA, 19 nt, Homo sapiens
  misc_RNA (1)...(19): siRNA sense strand
gaagaggaagaacaacaaa

SEQ ID NO: 1881072 - RNA, 19 nt, Homo sapiens
  misc_RNA (1)...(19): siRNA sense strand
ccacggagccucuucugaa

SEQ ID NO: 1881073 - RNA, 19 nt, Homo sapiens
  misc_RNA (1)...(19): siRNA sense strand
cagcuuggguucuacaaug

SEQ ID NO: 1881074 - RNA, 19 nt, Homo sapiens
  misc_RNA (1)...(19): siRNA sense strand
ccuuggagaugaacgauuu

SEQ ID NO: 1881075 - RNA, 19 nt, Homo sapiens
  misc_RNA (1)...(19): siRNA sense strand
cuaaacagcuauauagaac

SEQ ID NO: 1881076 - RNA, 19 nt, Homo sapiens
  misc_RNA (1)...(19): siRNA sense strand
gaauaugcagggaguugua

SEQ ID NO: 1881077 - RNA, 19 nt, Homo sapiens
  misc_RNA (1)...(19): siRNA sense strand
aaacacugcuaguagaaga

SEQ ID NO: 1881078 - RNA, 19 nt, Homo sapiens
  misc_RNA (1)...(19): siRNA sense strand
gccauucccugcuauacaa

SEQ ID NO: 1881079 - RNA, 19 nt, Homo sapiens
  misc_RNA (1)...(19): siRNA sense strand
agacagaauugaaugacuu

SEQ ID NO: 1881080 - RNA, 19 nt, Homo sapiens
  misc_RNA (1)...(19): siRNA sense strand
gaacgauuuccaagaggua

SEQ ID NO: 1881081 - RNA, 19 nt, Homo sapiens
  misc_RNA (1)...(19): siRNA sense strand
acacugugcuaauauguau

SEQ ID NO: 1881082 - RNA, 19 nt, Homo sapiens
  misc_RNA (1)...(19): siRNA sense strand
acaaggaguuauauucaga

SEQ ID NO: 1881083 - RNA, 19 nt, Homo sapiens
  misc_RNA (1)...(19): siRNA sense strand
cuaaggaagucagcaggua

SEQ ID NO: 1881084 - RNA, 19 nt, Homo sapiens
  misc_RNA (1)...(19): siRNA sense strand
aggcauaucuuucucuuca

SEQ ID NO: 1881085 - RNA, 19 nt, Homo sapiens
  misc_RNA (1)...(19): siRNA sense strand
acagcuaccugcagaaguu

SEQ ID NO: 1881086 - RNA, 19 nt, Homo sapiens
  misc_RNA (1)...(19): siRNA sense strand
acucugagcuccagugaau

SEQ ID NO: 1881087 - RNA, 19 nt, Homo sapiens
  misc_RNA (1)...(19): siRNA sense strand
acauagagaccguguaauu

SEQ ID NO: 1881088 - RNA, 19 nt, Homo sapiens
  misc_RNA (1)...(19): siRNA sense strand
guaccaagauacgaauaug

SEQ ID NO: 1881089 - RNA, 19 nt, Homo sapiens
  misc_RNA (1)...(19): siRNA sense strand
ccaaacagacagaauugaa

SEQ ID NO: 1881090 - RNA, 19 nt, Homo sapiens
  misc_RNA (1)...(19): siRNA sense strand
ccagguauuagaugaauuu

SEQ ID NO: 1881091 - RNA, 19 nt, Homo sapiens
  misc_RNA (1)...(19): siRNA sense strand
ccggaucacuaaaccuuaa

SEQ ID NO: 1881092 - RNA, 19 nt, Homo sapiens
  misc_RNA (1)...(19): siRNA sense strand
ggagaugaacgauuuccaa

SEQ ID NO: 1881093 - RNA, 19 nt, Homo sapiens
  misc_RNA (1)...(19): siRNA sense strand
gucagcagguaccaagaua

SEQ ID NO: 1881094 - RNA, 19 nt, Homo sapiens
  misc_RNA (1)...(19): siRNA sense strand
gaccuugcuuuauacuuug

SEQ ID NO: 1881095 - RNA, 19 nt, Homo sapiens
  misc_RNA (1)...(19): siRNA sense strand
gccuuacacugugcuaaua

SEQ ID NO: 1881096 - RNA, 19 nt, Homo sapiens
  misc_RNA (1)...(19): siRNA sense strand
cuuggagagugcaauaaua

SEQ ID NO: 1881097 - RNA, 19 nt, Homo sapiens
  misc_RNA (1)...(19): siRNA sense strand
gcagguaccaagauacgaa

SEQ ID NO: 1881098 - RNA, 19 nt, Homo sapiens
  misc_RNA (1)...(19): siRNA sense strand
uaccauagcauuuguacuu

SEQ ID NO: 1881099 - RNA, 19 nt, Homo sapiens
  misc_RNA (1)...(19): siRNA sense strand
ccagucuguucuuugcuua

SEQ ID NO: 1881100 - RNA, 19 nt, Homo sapiens
  misc_RNA (1)...(19): siRNA sense strand
guagcacacugcauguaug

SEQ ID NO: 1881101 - RNA, 19 nt, Homo sapiens
  misc_RNA (1)...(19): siRNA sense strand
cugaaagcaugcagggaua

SEQ ID NO: 1881102 - RNA, 19 nt, Homo sapiens
  misc_RNA (1)...(19): siRNA sense strand
ugacggcaaaugauauaua

SEQ ID NO: 1881103 - RNA, 19 nt, Homo sapiens
  misc_RNA (1)...(19): siRNA sense strand
cgauggauuugcacuguau

SEQ ID NO: 1881104 - RNA, 19 nt, Homo sapiens
  misc_RNA (1)...(19): siRNA sense strand
ggacagagacaagaaggau

SEQ ID NO: 1881105 - RNA, 19 nt, Homo sapiens
  misc_RNA (1)...(19): siRNA sense strand
uaccagaccggaucacuaa

SEQ ID NO: 1881106 - RNA, 19 nt, Homo sapiens
  misc_RNA (1)...(19): siRNA sense strand
cagagacaguagagaaaug

SEQ ID NO: 1881107 - RNA, 19 nt, Homo sapiens
  misc_RNA (1)...(19): siRNA sense strand
ucaagaagaccaaagagau

SEQ ID NO: 1881108 - RNA, 19 nt, Homo sapiens
  misc_RNA (1)...(19): siRNA sense strand
gaaacaggaagcaguugga

SEQ ID NO: 1881109 - RNA, 19 nt, Homo sapiens
  misc_RNA (1)...(19): siRNA sense strand
gcagggauaaucucaguca

SEQ ID NO: 1881110 - RNA, 19 nt, Homo sapiens
  misc_RNA (1)...(19): siRNA sense strand
auacaacccuuacccagau

SEQ ID NO: 1881111 - RNA, 19 nt, Homo sapiens
  misc_RNA (1)...(19): siRNA sense strand
gaggaagaacaacaaauca

SEQ ID NO: 1881112 - RNA, 19 nt, Homo sapiens
  misc_RNA (1)...(19): siRNA sense strand
cacggagccucuucugaaa

SEQ ID NO: 1881113 - RNA, 19 nt, Homo sapiens
  misc_RNA (1)...(19): siRNA sense strand
guaccagaccggaucacua

SEQ ID NO: 1881114 - RNA, 19 nt, Homo sapiens
  misc_RNA (1)...(19): siRNA sense strand
gaagcaugcggucacugua

SEQ ID NO: 1881115 - RNA, 19 nt, Homo sapiens
  misc_RNA (1)...(19): siRNA sense strand
ggaagcaugcggucacugu

SEQ ID NO: 1881116 - RNA, 19 nt, Homo sapiens
  misc_RNA (1)...(19): siRNA sense strand
gaggauagaagagaggaaa

SEQ ID NO: 1881117 - RNA, 19 nt, Homo sapiens
  misc_RNA (1)...(19): siRNA sense strand
gaagaaauugggaauacag

SEQ ID NO: 1881118 - RNA, 19 nt, Homo sapiens
  misc_RNA (1)...(19): siRNA sense strand
aaauugacggcaaaugaua

SEQ ID NO: 1881119 - RNA, 19 nt, Homo sapiens
  misc_RNA (1)...(19): siRNA sense strand
ucauagaauucgccacuca

SEQ ID NO: 1881120 - RNA, 19 nt, Homo sapiens
  misc_RNA (1)...(19): siRNA sense strand
caaacagacagaauugaau

SEQ ID NO: 1881121 - RNA, 19 nt, Homo sapiens
  misc_RNA (1)...(19): siRNA sense strand
cacaaaagccgauggauuu

SEQ ID NO: 1881122 - RNA, 19 nt, Homo sapiens
  misc_RNA (1)...(19): siRNA sense strand
gugcagagacaguagagaa

SEQ ID NO: 1881123 - RNA, 19 nt, Homo sapiens
  misc_RNA (1)...(19): siRNA sense strand
gagaccguguaauugguuu

SEQ ID NO: 1881124 - RNA, 19 nt, Homo sapiens
  misc_RNA (1)...(19): siRNA sense strand
gcgcaaaggacugcugauu

SEQ ID NO: 1881125 - RNA, 19 nt, Homo sapiens
  misc_RNA (1)...(19): siRNA sense strand
aaacauguggccuggaauu

SEQ ID NO: 1881126 - RNA, 19 nt, Homo sapiens
  misc_RNA (1)...(19): siRNA sense strand
aaacagacagaauugaaug

SEQ ID NO: 1881127 - RNA, 19 nt, Homo sapiens
  misc_RNA (1)...(19): siRNA sense strand
gauaacauaguugcaauag

SEQ ID NO: 1881128 - RNA, 19 nt, Homo sapiens
  misc_RNA (1)...(19): siRNA sense strand
caaaauugacggcaaauga

SEQ ID NO: 1881129 - RNA, 19 nt, Homo sapiens
  misc_RNA (1)...(19): siRNA sense strand
cauagagaccguguaauug

SEQ ID NO: 1881130 - RNA, 19 nt, Homo sapiens
  misc_RNA (1)...(19): siRNA sense strand
caaggucucaugcaauuca

SEQ ID NO: 1881131 - RNA, 19 nt, Homo sapiens
  misc_RNA (1)...(19): siRNA sense strand
gaagaccaaagagauaaga

SEQ ID NO: 1881132 - RNA, 19 nt, Homo sapiens
  misc_RNA (1)...(19): siRNA sense strand
guacagaccugcauauuug

SEQ ID NO: 1881133 - RNA, 19 nt, Homo sapiens
  misc_RNA (1)...(19): siRNA sense strand
gcagaucucucccucauau

SEQ ID NO: 1881134 - RNA, 19 nt, Homo sapiens
  misc_RNA (1)...(19): siRNA sense strand
cuagaagacuguaaauuug

SEQ ID NO: 1881135 - RNA, 19 nt, Homo sapiens
  misc_RNA (1)...(19): siRNA sense strand
cauccagacuugaaacaua

SEQ ID NO: 1881136 - RNA, 19 nt, Homo sapiens
  misc_RNA (1)...(19): siRNA sense strand
gcagaaaggcuuccagaug

SEQ ID NO: 1881137 - RNA, 19 nt, Homo sapiens
  misc_RNA (1)...(19): siRNA sense strand
ccaaucaacuucauaggau

SEQ ID NO: 1881138 - RNA, 19 nt, Homo sapiens
  misc_RNA (1)...(19): siRNA sense strand
ugacagagagcgaauagaa

SEQ ID NO: 1881139 - RNA, 19 nt, Homo sapiens
  misc_RNA (1)...(19): siRNA sense strand
gauaaagaccaaucaacuu

SEQ ID NO: 1881140 - RNA, 19 nt, Homo sapiens
  misc_RNA (1)...(19): siRNA sense strand
ggacgaggccguguuagau

SEQ ID NO: 1881141 - RNA, 19 nt, Homo sapiens
  misc_RNA (1)...(19): siRNA sense strand
gaccuuaaguguacagaac

SEQ ID NO: 1881142 - RNA, 19 nt, Homo sapiens
  misc_RNA (1)...(19): siRNA sense strand
uaagaauucccuagaaauc

SEQ ID NO: 1881143 - RNA, 19 nt, Homo sapiens
  misc_RNA (1)...(19): siRNA sense strand
gaaagcaccgagcugacaa

SEQ ID NO: 1881144 - RNA, 19 nt, Homo sapiens
  misc_RNA (1)...(19): siRNA sense strand
acuuaaagaugcuucgaaa

SEQ ID NO: 1881145 - RNA, 19 nt, Homo sapiens
  misc_RNA (1)...(19): siRNA sense strand
ggaaagcaccgagcugaca

SEQ ID NO: 1881146 - RNA, 19 nt, Homo sapiens
  misc_RNA (1)...(19): siRNA sense strand
guuagaucauccagacuug

SEQ ID NO: 1881147 - RNA, 19 nt, Homo sapiens
  misc_RNA (1)...(19): siRNA sense strand
uguacagaccugcauauuu

SEQ ID NO: 1881148 - RNA, 19 nt, Homo sapiens
  misc_RNA (1)...(19): siRNA sense strand
cauauuuggugaccuuaag

SEQ ID NO: 1881149 - RNA, 19 nt, Homo sapiens
  misc_RNA (1)...(19): siRNA sense strand
gagagcgaauagaacuguu

SEQ ID NO: 1881150 - RNA, 19 nt, Homo sapiens
  misc_RNA (1)...(19): siRNA sense strand
ggauguacagaccugcaua

SEQ ID NO: 1881151 - RNA, 19 nt, Homo sapiens
  misc_RNA (1)...(19): siRNA sense strand
gcauauuuggugaccuuaa

SEQ ID NO: 1881152 - RNA, 19 nt, Homo sapiens
  misc_RNA (1)...(19): siRNA sense strand
gagauuaguuuuaguugca

SEQ ID NO: 1881153 - RNA, 19 nt, Homo sapiens
  misc_RNA (1)...(19): siRNA sense strand
ggaaguauaggcagaucuc

SEQ ID NO: 1881154 - RNA, 19 nt, Homo sapiens
  misc_RNA (1)...(19): siRNA sense strand
guugcagcauggaacaauu

SEQ ID NO: 1881155 - RNA, 19 nt, Homo sapiens
  misc_RNA (1)...(19): siRNA sense strand
uuucuuggcgcuuggaaua

SEQ ID NO: 1881156 - RNA, 19 nt, Homo sapiens
  misc_RNA (1)...(19): siRNA sense strand
ccucauauaacggauguuu

SEQ ID NO: 1881157 - RNA, 19 nt, Homo sapiens
  misc_RNA (1)...(19): siRNA sense strand
agaucucucccucauauaa

SEQ ID NO: 1881158 - RNA, 19 nt, Homo sapiens
  misc_RNA (1)...(19): siRNA sense strand
auaaagaccaaucaacuuc

SEQ ID NO: 1881159 - RNA, 19 nt, Homo sapiens
  misc_RNA (1)...(19): siRNA sense strand
cugcauauuuggugaccuu

SEQ ID NO: 1881160 - RNA, 19 nt, Homo sapiens
  misc_RNA (1)...(19): siRNA sense strand
aaagaccaaucaacuucau

SEQ ID NO: 1881161 - RNA, 19 nt, Homo sapiens
  misc_RNA (1)...(19): siRNA sense strand
gauguacagaccugcauau

SEQ ID NO: 1881162 - RNA, 19 nt, Homo sapiens
  misc_RNA (1)...(19): siRNA sense strand
uaaagaccaaucaacuuca

SEQ ID NO: 1881163 - RNA, 19 nt, Homo sapiens
  misc_RNA (1)...(19): siRNA sense strand
ggaacaauuacaggacuug

SEQ ID NO: 1881164 - RNA, 19 nt, Homo sapiens
  misc_RNA (1)...(19): siRNA sense strand
ucauauaacggauguuucu

SEQ ID NO: 1881165 - RNA, 19 nt, Homo sapiens
  misc_RNA (1)...(19): siRNA sense strand
uugcagcauggaacaauua

SEQ ID NO: 1881166 - RNA, 19 nt, Homo sapiens
  misc_RNA (1)...(19): siRNA sense strand
aggcagaucucucccucau

SEQ ID NO: 1881167 - RNA, 19 nt, Homo sapiens
  misc_RNA (1)...(19): siRNA sense strand
cauccuauccagagauuag

SEQ ID NO: 1881168 - RNA, 19 nt, Homo sapiens
  misc_RNA (1)...(19): siRNA sense strand
uagaucauccagacuugaa

SEQ ID NO: 1881169 - RNA, 19 nt, Homo sapiens
  misc_RNA (1)...(19): siRNA sense strand
gcugcaacuuacauacuag

SEQ ID NO: 1881170 - RNA, 19 nt, Homo sapiens
  misc_RNA (1)...(19): siRNA sense strand
uuggugaccuuaaguguac

SEQ ID NO: 1881171 - RNA, 19 nt, Homo sapiens
  misc_RNA (1)...(19): siRNA sense strand
auccagacuugaaacauau

SEQ ID NO: 1881172 - RNA, 19 nt, Homo sapiens
  misc_RNA (1)...(19): siRNA sense strand
gaauucccuagaaauccua

SEQ ID NO: 1881173 - RNA, 19 nt, Homo sapiens
  misc_RNA (1)...(19): siRNA sense strand
cccauccuauccagagauu

SEQ ID NO: 1881174 - RNA, 19 nt, Homo sapiens
  misc_RNA (1)...(19): siRNA sense strand
agcugcaacuuacauacua

SEQ ID NO: 1881175 - RNA, 19 nt, Homo sapiens
  misc_RNA (1)...(19): siRNA sense strand
ucagauaaagaccaaucaa

SEQ ID NO: 1881176 - RNA, 19 nt, Homo sapiens
  misc_RNA (1)...(19): siRNA sense strand
agauaaagaccaaucaacu

SEQ ID NO: 1881177 - RNA, 19 nt, Homo sapiens
  misc_RNA (1)...(19): siRNA sense strand
acauaucgacccagugguu

SEQ ID NO: 1881178 - RNA, 19 nt, Homo sapiens
  misc_RNA (1)...(19): siRNA sense strand
gacgaggccguguuagauc

SEQ ID NO: 1881179 - RNA, 19 nt, Homo sapiens
  misc_RNA (1)...(19): siRNA sense strand
acgaggccguguuagauca

SEQ ID NO: 1881180 - RNA, 19 nt, Homo sapiens
  misc_RNA (1)...(19): siRNA sense strand
cagcauggaacaauuacag

SEQ ID NO: 1881181 - RNA, 19 nt, Homo sapiens
  misc_RNA (1)...(19): siRNA sense strand
cauaucgacccagugguuu

SEQ ID NO: 1881182 - RNA, 19 nt, Homo sapiens
  misc_RNA (1)...(19): siRNA sense strand
gaagacuguaaauuugaca

SEQ ID NO: 1881183 - RNA, 19 nt, Homo sapiens
  misc_RNA (1)...(19): siRNA sense strand
acagagagcgaauagaacu

SEQ ID NO: 1881184 - RNA, 19 nt, Homo sapiens
  misc_RNA (1)...(19): siRNA sense strand
ggauagagcuucaugaaac

SEQ ID NO: 1881185 - RNA, 19 nt, Homo sapiens
  misc_RNA (1)...(19): siRNA sense strand
gaagaggacccaaagacuu

SEQ ID NO: 1881186 - RNA, 19 nt, Homo sapiens
  misc_RNA (1)...(19): siRNA sense strand
agagacagauggagacaaa

SEQ ID NO: 1881187 - RNA, 19 nt, Homo sapiens
  misc_RNA (1)...(19): siRNA sense strand
cguauaaacuucagcaauc

SEQ ID NO: 1881188 - RNA, 19 nt, Homo sapiens
  misc_RNA (1)...(19): siRNA sense strand
ggacuuaugaugacugugu

SEQ ID NO: 1881189 - RNA, 19 nt, Homo sapiens
  misc_RNA (1)...(19): siRNA sense strand
uuucagacguguccguaua

SEQ ID NO: 1881190 - RNA, 19 nt, Homo sapiens
  misc_RNA (1)...(19): siRNA sense strand
ccacgccaguccucaacua

SEQ ID NO: 1881191 - RNA, 19 nt, Homo sapiens
  misc_RNA (1)...(19): siRNA sense strand
ggaagaagaggacccaaag

SEQ ID NO: 1881192 - RNA, 19 nt, Homo sapiens
  misc_RNA (1)...(19): siRNA sense strand
gaagaagaggacccaaaga

SEQ ID NO: 1881193 - RNA, 19 nt, Homo sapiens
  misc_RNA (1)...(19): siRNA sense strand
caacuaugaccuccucuau

SEQ ID NO: 1881194 - RNA, 19 nt, Homo sapiens
  misc_RNA (1)...(19): siRNA sense strand
cgccaguccucaacuauga

SEQ ID NO: 1881195 - RNA, 19 nt, Homo sapiens
  misc_RNA (1)...(19): siRNA sense strand
gaccaggagagaaguauga

SEQ ID NO: 1881196 - RNA, 19 nt, Homo sapiens
  misc_RNA (1)...(19): siRNA sense strand
gcucuacuuugcacagguu

SEQ ID NO: 1881197 - RNA, 19 nt, Homo sapiens
  misc_RNA (1)...(19): siRNA sense strand
ugacauagaggaagaagag

SEQ ID NO: 1881198 - RNA, 19 nt, Homo sapiens
  misc_RNA (1)...(19): siRNA sense strand
ugacguuccagcuauuuaa

SEQ ID NO: 1881199 - RNA, 19 nt, Homo sapiens
  misc_RNA (1)...(19): siRNA sense strand
acagugacauagaggaaga

SEQ ID NO: 1881200 - RNA, 19 nt, Homo sapiens
  misc_RNA (1)...(19): siRNA sense strand
ccaaucaggagguuaagga

SEQ ID NO: 1881201 - RNA, 19 nt, Homo sapiens
  misc_RNA (1)...(19): siRNA sense strand
uaggauagagcuucaugaa

SEQ ID NO: 1881202 - RNA, 19 nt, Homo sapiens
  misc_RNA (1)...(19): siRNA sense strand
acuaugaccuccucuaugc

SEQ ID NO: 1881203 - RNA, 19 nt, Homo sapiens
  misc_RNA (1)...(19): siRNA sense strand
gucgaggucuuuaccaauc

SEQ ID NO: 1881204 - RNA, 19 nt, Homo sapiens
  misc_RNA (1)...(19): siRNA sense strand
cuucagcaauccuaaaucu

SEQ ID NO: 1881205 - RNA, 19 nt, Homo sapiens
  misc_RNA (1)...(19): siRNA sense strand
ucagacguguccguauaaa

SEQ ID NO: 1881206 - RNA, 19 nt, Homo sapiens
  misc_RNA (1)...(19): siRNA sense strand
uuaccaaucaggagguuaa

SEQ ID NO: 1881207 - RNA, 19 nt, Homo sapiens
  misc_RNA (1)...(19): siRNA sense strand
ccacucugguugccugugu

SEQ ID NO: 1881208 - RNA, 19 nt, Homo sapiens
  misc_RNA (1)...(19): siRNA sense strand
cgacagugacauagaggaa

SEQ ID NO: 1881209 - RNA, 19 nt, Homo sapiens
  misc_RNA (1)...(19): siRNA sense strand
aaacuucagcaauccuaaa

SEQ ID NO: 1881210 - RNA, 19 nt, Homo sapiens
  misc_RNA (1)...(19): siRNA sense strand
ggacuguuucggacuuaug

SEQ ID NO: 1881211 - RNA, 19 nt, Homo sapiens
  misc_RNA (1)...(19): siRNA sense strand
ccucuaugcuguggccaaa

SEQ ID NO: 1881212 - RNA, 19 nt, Homo sapiens
  misc_RNA (1)...(19): siRNA sense strand
ugugugacguuccagcuau

SEQ ID NO: 1881213 - RNA, 19 nt, Homo sapiens
  misc_RNA (1)...(19): siRNA sense strand
gauagagcuucaugaaacc

SEQ ID NO: 1881214 - RNA, 19 nt, Homo sapiens
  misc_RNA (1)...(19): siRNA sense strand
gugcgacagugacauagag

SEQ ID NO: 1881215 - RNA, 19 nt, Homo sapiens
  misc_RNA (1)...(19): siRNA sense strand
gugacguuccagcuauuua

SEQ ID NO: 1881216 - RNA, 19 nt, Homo sapiens
  misc_RNA (1)...(19): siRNA sense strand
aaacuaggaccaggagaga

SEQ ID NO: 1881217 - RNA, 19 nt, Homo sapiens
  misc_RNA (1)...(19): siRNA sense strand
uuccagcuauuuaagaguu

SEQ ID NO: 1881218 - RNA, 19 nt, Homo sapiens
  misc_RNA (1)...(19): siRNA sense strand
gcuaggauagagcuucaug

SEQ ID NO: 1881219 - RNA, 19 nt, Homo sapiens
  misc_RNA (1)...(19): siRNA sense strand
gaaguaugagcuccaugca

SEQ ID NO: 1881220 - RNA, 19 nt, Homo sapiens
  misc_RNA (1)...(19): siRNA sense strand
agacguguccguauaaacu

SEQ ID NO: 1881221 - RNA, 19 nt, Homo sapiens
  misc_RNA (1)...(19): siRNA sense strand
aagaggacccaaagacuuc

SEQ ID NO: 1881222 - RNA, 19 nt, Homo sapiens
  misc_RNA (1)...(19): siRNA sense strand
gguucagacuccagagaca

SEQ ID NO: 1881223 - RNA, 19 nt, Homo sapiens
  misc_RNA (1)...(19): siRNA sense strand
uaaacuucagcaauccuaa

SEQ ID NO: 1881224 - RNA, 19 nt, Homo sapiens
  misc_RNA (1)...(19): siRNA sense strand
guauaaacuucagcaaucc

SEQ ID NO: 1881225 - RNA, 19 nt, Homo sapiens
  misc_RNA (1)...(19): siRNA sense strand
cgugugcgacagugacaua

SEQ ID NO: 1881226 - RNA, 19 nt, Homo sapiens
  misc_RNA (1)...(19): siRNA sense strand
gugugacguuccagcuauu

SEQ ID NO: 1881227 - RNA, 19 nt, Homo sapiens
  misc_RNA (1)...(19): siRNA sense strand
ggaccaggagagaaguaug

SEQ ID NO: 1881228 - RNA, 19 nt, Homo sapiens
  misc_RNA (1)...(19): siRNA sense strand
caaucaggagguuaaggaa

SEQ ID NO: 1881229 - RNA, 19 nt, Homo sapiens
  misc_RNA (1)...(19): siRNA sense strand
gacuguuucggacuuauga

SEQ ID NO: 1881230 - RNA, 19 nt, Homo sapiens
  misc_RNA (1)...(19): siRNA sense strand
ucaacuaugaccuccucua

SEQ ID NO: 1881231 - RNA, 19 nt, Homo sapiens
  misc_RNA (1)...(19): siRNA sense strand
aaucaggagguuaaggaaa

SEQ ID NO: 1881232 - RNA, 19 nt, Homo sapiens
  misc_RNA (1)...(19): siRNA sense strand
gaagagaagcagaaacuua

SEQ ID NO: 1881233 - RNA, 19 nt, Homo sapiens
  misc_RNA (1)...(19): siRNA sense strand
gcauggagguugucuauga

SEQ ID NO: 1881234 - RNA, 19 nt, Homo sapiens
  misc_RNA (1)...(19): siRNA sense strand
auuaugagcuggaagaaua

SEQ ID NO: 1881235 - RNA, 19 nt, Homo sapiens
  misc_RNA (1)...(19): siRNA sense strand
aaccauuccuucuguauua

SEQ ID NO: 1881236 - RNA, 19 nt, Homo sapiens
  misc_RNA (1)...(19): siRNA sense strand
caacaaggccugcagguau

SEQ ID NO: 1881237 - RNA, 19 nt, Homo sapiens
  misc_RNA (1)...(19): siRNA sense strand
gcagaaacuuauucagcaa

SEQ ID NO: 1881238 - RNA, 19 nt, Homo sapiens
  misc_RNA (1)...(19): siRNA sense strand
gagaagugccagacaguuu

SEQ ID NO: 1881239 - RNA, 19 nt, Homo sapiens
  misc_RNA (1)...(19): siRNA sense strand
gaagcacacgagaaagaua

SEQ ID NO: 1881240 - RNA, 19 nt, Homo sapiens
  misc_RNA (1)...(19): siRNA sense strand
gcaacaaggccugcaggua

SEQ ID NO: 1881241 - RNA, 19 nt, Homo sapiens
  misc_RNA (1)...(19): siRNA sense strand
gaaggagcuugucgugcuu

SEQ ID NO: 1881242 - RNA, 19 nt, Homo sapiens
  misc_RNA (1)...(19): siRNA sense strand
ggagaacugucgcuauucg

SEQ ID NO: 1881243 - RNA, 19 nt, Homo sapiens
  misc_RNA (1)...(19): siRNA sense strand
uggccagucuguuguuuaa

SEQ ID NO: 1881244 - RNA, 19 nt, Homo sapiens
  misc_RNA (1)...(19): siRNA sense strand
gaacaggaucgucaagucu

SEQ ID NO: 1881245 - RNA, 19 nt, Homo sapiens
  misc_RNA (1)...(19): siRNA sense strand
gagggcaacaugcucuaua

SEQ ID NO: 1881246 - RNA, 19 nt, Homo sapiens
  misc_RNA (1)...(19): siRNA sense strand
gucggaagauggccacuga

SEQ ID NO: 1881247 - RNA, 19 nt, Homo sapiens
  misc_RNA (1)...(19): siRNA sense strand
agugggacuugcuucauua

SEQ ID NO: 1881248 - RNA, 19 nt, Homo sapiens
  misc_RNA (1)...(19): siRNA sense strand
cagugggacuugcuucauu

SEQ ID NO: 1881249 - RNA, 19 nt, Homo sapiens
  misc_RNA (1)...(19): siRNA sense strand
gauauggaacucucguuug

SEQ ID NO: 1881250 - RNA, 19 nt, Homo sapiens
  misc_RNA (1)...(19): siRNA sense strand
caucugcagguauuauaua

SEQ ID NO: 1881251 - RNA, 19 nt, Homo sapiens
  misc_RNA (1)...(19): siRNA sense strand
gagaagcagaaacuuauuc

SEQ ID NO: 1881252 - RNA, 19 nt, Homo sapiens
  misc_RNA (1)...(19): siRNA sense strand
cauaugagggccugcauug

SEQ ID NO: 1881253 - RNA, 19 nt, Homo sapiens
  misc_RNA (1)...(19): siRNA sense strand
gaagugccagacaguuuga

SEQ ID NO: 1881254 - RNA, 19 nt, Homo sapiens
  misc_RNA (1)...(19): siRNA sense strand
gcuggaagaauauuucaau

SEQ ID NO: 1881255 - RNA, 19 nt, Homo sapiens
  misc_RNA (1)...(19): siRNA sense strand
gcaacaugcucuauaaaag

SEQ ID NO: 1881256 - RNA, 19 nt, Homo sapiens
  misc_RNA (1)...(19): siRNA sense strand
aacaaggccugcagguauu

SEQ ID NO: 1881257 - RNA, 19 nt, Homo sapiens
  misc_RNA (1)...(19): siRNA sense strand
uaugagggccugcauugaa

SEQ ID NO: 1881258 - RNA, 19 nt, Homo sapiens
  misc_RNA (1)...(19): siRNA sense strand
ggggagaacugucgcuauu

SEQ ID NO: 1881259 - RNA, 19 nt, Homo sapiens
  misc_RNA (1)...(19): siRNA sense strand
agggcaacaugcucuauaa

SEQ ID NO: 1881260 - RNA, 19 nt, Homo sapiens
  misc_RNA (1)...(19): siRNA sense strand
aagagaagcagaaacuuau

SEQ ID NO: 1881261 - RNA, 19 nt, Homo sapiens
  misc_RNA (1)...(19): siRNA sense strand
cagggucaccucugaauug

SEQ ID NO: 1881262 - RNA, 19 nt, Homo sapiens
  misc_RNA (1)...(19): siRNA sense strand
cgagaaagauauggaacuc

SEQ ID NO: 1881263 - RNA, 19 nt, Homo sapiens
  misc_RNA (1)...(19): siRNA sense strand
cauugaagcacacgagaaa

SEQ ID NO: 1881264 - RNA, 19 nt, Homo sapiens
  misc_RNA (1)...(19): siRNA sense strand
gcaaccauuccuucuguau

SEQ ID NO: 1881265 - RNA, 19 nt, Homo sapiens
  misc_RNA (1)...(19): siRNA sense strand
ccagacaguuugagaacag

SEQ ID NO: 1881266 - RNA, 19 nt, Homo sapiens
  misc_RNA (1)...(19): siRNA sense strand
caaccauuccuucuguauu

SEQ ID NO: 1881267 - RNA, 19 nt, Homo sapiens
  misc_RNA (1)...(19): siRNA sense strand
gggcggaugccauugaguu

SEQ ID NO: 1881268 - RNA, 19 nt, Homo sapiens
  misc_RNA (1)...(19): siRNA sense strand
ggaggaagagaagcagaaa

SEQ ID NO: 1881269 - RNA, 19 nt, Homo sapiens
  misc_RNA (1)...(19): siRNA sense strand
uggaggagcagguguagaa

SEQ ID NO: 1881270 - RNA, 19 nt, Homo sapiens
  misc_RNA (1)...(19): siRNA sense strand
gcauuaagaaggagcuugu

SEQ ID NO: 1881271 - RNA, 19 nt, Homo sapiens
  misc_RNA (1)...(19): siRNA sense strand
cgaagcagcggcauuugga

SEQ ID NO: 1881272 - RNA, 19 nt, Homo sapiens
  misc_RNA (1)...(19): siRNA sense strand
gccugcagcucccucagaa

SEQ ID NO: 1881273 - RNA, 19 nt, Homo sapiens
  misc_RNA (1)...(19): siRNA sense strand
ccagagggaagaacauaug

SEQ ID NO: 1881274 - RNA, 19 nt, Homo sapiens
  misc_RNA (1)...(19): siRNA sense strand
gcauugaagcacacgagaa

SEQ ID NO: 1881275 - RNA, 19 nt, Homo sapiens
  misc_RNA (1)...(19): siRNA sense strand
gcuauucgcacgaccuuuc

SEQ ID NO: 1881276 - RNA, 19 nt, Homo sapiens
  misc_RNA (1)...(19): siRNA sense strand
ggagacacaugcuuuuaca

SEQ ID NO: 1881277 - RNA, 19 nt, Homo sapiens
  misc_RNA (1)...(19): siRNA sense strand
gcagggucaccucugaauu

SEQ ID NO: 1881278 - RNA, 19 nt, Homo sapiens
  misc_RNA (1)...(19): siRNA sense strand
agaacaggaucgucaaguc

SEQ ID NO: 1881279 - RNA, 19 nt, Homo sapiens
  misc_RNA (1)...(19): siRNA sense strand
ggagaagugccagacaguu

SEQ ID NO: 1881280 - RNA, 19 nt, Homo sapiens
  misc_RNA (1)...(19): siRNA sense strand
cggaugccauugaguuugu

SEQ ID NO: 1881281 - RNA, 19 nt, Homo sapiens
  misc_RNA (1)...(19): siRNA sense strand
gaucaucugcagguauuau

SEQ ID NO: 1881282 - RNA, 19 nt, Homo sapiens
  misc_RNA (1)...(19): siRNA sense strand
gggcaacaugcucuauaaa

SEQ ID NO: 1881283 - RNA, 19 nt, Homo sapiens
  misc_RNA (1)...(19): siRNA sense strand
gcccagagggaagaacaua

SEQ ID NO: 1881284 - RNA, 19 nt, Homo sapiens
  misc_RNA (1)...(19): siRNA sense strand
ggaagagaagcagaaacuu

SEQ ID NO: 1881285 - RNA, 19 nt, Homo sapiens
  misc_RNA (1)...(19): siRNA sense strand
gcuggccagucuguuguuu

SEQ ID NO: 1881286 - RNA, 19 nt, Homo sapiens
  misc_RNA (1)...(19): siRNA sense strand
ugugugggcugcagaccuu

SEQ ID NO: 1881287 - RNA, 19 nt, Homo sapiens
  misc_RNA (1)...(19): siRNA sense strand
gcaauacaaggaggcaaug

SEQ ID NO: 1881288 - RNA, 19 nt, Homo sapiens
  misc_RNA (1)...(19): siRNA sense strand
gcaucugcauggagguugu

SEQ ID NO: 1881289 - RNA, 19 nt, Homo sapiens
  misc_RNA (1)...(19): siRNA sense strand
gacaagguguguggcaucu

SEQ ID NO: 1881290 - RNA, 19 nt, Homo sapiens
  misc_RNA (1)...(19): siRNA sense strand
ggaggaggaggaagagaag

SEQ ID NO: 1881291 - RNA, 19 nt, Homo sapiens
  misc_RNA (1)...(19): siRNA sense strand
uugcaaccauuccuucugu

SEQ ID NO: 1881292 - RNA, 19 nt, Homo sapiens
  misc_RNA (1)...(19): siRNA sense strand
gagcuggaagaauauuuca

SEQ ID NO: 1881293 - RNA, 19 nt, Homo sapiens
  misc_RNA (1)...(19): siRNA sense strand
auacuggcaucaacuugug

SEQ ID NO: 1881294 - RNA, 19 nt, Homo sapiens
  misc_RNA (1)...(19): siRNA sense strand
ggucauucccagugaguuc

SEQ ID NO: 1881295 - RNA, 19 nt, Homo sapiens
  misc_RNA (1)...(19): siRNA sense strand
agauauggaacucucguuu

SEQ ID NO: 1881296 - RNA, 19 nt, Homo sapiens
  misc_RNA (1)...(19): siRNA sense strand
agagaugaguuacccuucu

SEQ ID NO: 1881297 - RNA, 19 nt, Homo sapiens
  misc_RNA (1)...(19): siRNA sense strand
acaaggaggcaaugagcaa

SEQ ID NO: 1881298 - RNA, 19 nt, Homo sapiens
  misc_RNA (1)...(19): siRNA sense strand
uagcacggcugcgcacauc

SEQ ID NO: 1881299 - RNA, 19 nt, Homo sapiens
  misc_RNA (1)...(19): siRNA sense strand
cagagggaagaacauauga

SEQ ID NO: 1881300 - RNA, 19 nt, Homo sapiens
  misc_RNA (1)...(19): siRNA sense strand
gccagucuguuguuuaagc

SEQ ID NO: 1881301 - RNA, 19 nt, Homo sapiens
  misc_RNA (1)...(19): siRNA sense strand
gcauacuggcaucaacuug

SEQ ID NO: 1881302 - RNA, 19 nt, Homo sapiens
  misc_RNA (1)...(19): siRNA sense strand
ggaggagcagguguagaaa

SEQ ID NO: 1881303 - RNA, 19 nt, Homo sapiens
  misc_RNA (1)...(19): siRNA sense strand
gagaacaggaucgucaagu

SEQ ID NO: 1881304 - RNA, 19 nt, Homo sapiens
  misc_RNA (1)...(19): siRNA sense strand
agaagugccagacaguuug

SEQ ID NO: 1881305 - RNA, 19 nt, Homo sapiens
  misc_RNA (1)...(19): siRNA sense strand
agacugagaggaagcagau

SEQ ID NO: 1881306 - RNA, 19 nt, Homo sapiens
  misc_RNA (1)...(19): siRNA sense strand
gcgguuucuuucacugaga

SEQ ID NO: 1881307 - RNA, 19 nt, Homo sapiens
  misc_RNA (1)...(19): siRNA sense strand
ucccuuuccuugccuguga

SEQ ID NO: 1881308 - RNA, 19 nt, Homo sapiens
  misc_RNA (1)...(19): siRNA sense strand
ccaauugcaaccauuccuu

SEQ ID NO: 1881309 - RNA, 19 nt, Homo sapiens
  misc_RNA (1)...(19): siRNA sense strand
gcugggcggaugccauuga

SEQ ID NO: 1881310 - RNA, 19 nt, Homo sapiens
  misc_RNA (1)...(19): siRNA sense strand
ggcggaugccauugaguuu

SEQ ID NO: 1881311 - RNA, 19 nt, Homo sapiens
  misc_RNA (1)...(19): siRNA sense strand
uggagguugucuaugagaa

SEQ ID NO: 1881312 - RNA, 19 nt, Homo sapiens
  misc_RNA (1)...(19): siRNA sense strand
aagcacacgagaaagauau

SEQ ID NO: 1881313 - RNA, 19 nt, Homo sapiens
  misc_RNA (1)...(19): siRNA sense strand
uggcucggcugcugaaagg

SEQ ID NO: 1881314 - RNA, 19 nt, Homo sapiens
  misc_RNA (1)...(19): siRNA sense strand
ggaugccauugaguuuguu

SEQ ID NO: 1881315 - RNA, 19 nt, Homo sapiens
  misc_RNA (1)...(19): siRNA sense strand
ggcauucuuuccaauugca

SEQ ID NO: 1881316 - RNA, 19 nt, Homo sapiens
  misc_RNA (1)...(19): siRNA sense strand
ggcaguggguugcgguuuu

SEQ ID NO: 1881317 - RNA, 19 nt, Homo sapiens
  misc_RNA (1)...(19): siRNA sense strand
ggagguugucuaugagaag

SEQ ID NO: 1881318 - RNA, 19 nt, Homo sapiens
  misc_RNA (1)...(19): siRNA sense strand
acacgagaaagauauggaa

SEQ ID NO: 1881319 - RNA, 19 nt, Homo sapiens
  misc_RNA (1)...(19): siRNA sense strand
uugaagcacacgagaaaga

SEQ ID NO: 1881320 - RNA, 19 nt, Homo sapiens
  misc_RNA (1)...(19): siRNA sense strand
ggaccagugggacuugcuu

SEQ ID NO: 1881321 - RNA, 19 nt, Homo sapiens
  misc_RNA (1)...(19): siRNA sense strand
ggcaacaugcucuauaaaa

SEQ ID NO: 1881322 - RNA, 19 nt, Homo sapiens
  misc_RNA (1)...(19): siRNA sense strand
cauacuggcaucaacuugu

SEQ ID NO: 1881323 - RNA, 19 nt, Homo sapiens
  misc_RNA (1)...(19): siRNA sense strand
agaagcagaaacuuauuca

SEQ ID NO: 1881324 - RNA, 19 nt, Homo sapiens
  misc_RNA (1)...(19): siRNA sense strand
gccagacaguuugagaaca

SEQ ID NO: 1881325 - RNA, 19 nt, Homo sapiens
  misc_RNA (1)...(19): siRNA sense strand
gaggagcagguguagaaag

SEQ ID NO: 1881326 - RNA, 19 nt, Homo sapiens
  misc_RNA (1)...(19): siRNA sense strand
cauggagguugucuaugag

SEQ ID NO: 1881327 - RNA, 19 nt, Homo sapiens
  misc_RNA (1)...(19): siRNA sense strand
auauggaacucucguuugc

SEQ ID NO: 1881328 - RNA, 19 nt, Homo sapiens
  misc_RNA (1)...(19): siRNA sense strand
aagcugggcggaugccauu

SEQ ID NO: 1881329 - RNA, 19 nt, Homo sapiens
  misc_RNA (1)...(19): siRNA sense strand
caauacaaggaggcaauga

SEQ ID NO: 1881330 - RNA, 19 nt, Homo sapiens
  misc_RNA (1)...(19): siRNA sense strand
agagaagcagaaacuuauu

SEQ ID NO: 1881331 - RNA, 19 nt, Homo sapiens
  misc_RNA (1)...(19): siRNA sense strand
uggaggaggaggaagagaa

SEQ ID NO: 1881332 - RNA, 19 nt, Homo sapiens
  misc_RNA (1)...(19): siRNA sense strand
gaaccacaguccaugacaa

SEQ ID NO: 1881333 - RNA, 19 nt, Homo sapiens
  misc_RNA (1)...(19): siRNA sense strand
ugacaagucugcccaccaa

SEQ ID NO: 1881334 - RNA, 19 nt, Homo sapiens
  misc_RNA (1)...(19): siRNA sense strand
gaccagcuccgcucaggua

SEQ ID NO: 1881335 - RNA, 19 nt, Homo sapiens
  misc_RNA (1)...(19): siRNA sense strand
gcaugggccugcacuacau

SEQ ID NO: 1881336 - RNA, 19 nt, Homo sapiens
  misc_RNA (1)...(19): siRNA sense strand
ggacaggcaaagggagaua

SEQ ID NO: 1881337 - RNA, 19 nt, Homo sapiens
  misc_RNA (1)...(19): siRNA sense strand
cagcagcaacacaaacaaa

SEQ ID NO: 1881338 - RNA, 19 nt, Homo sapiens
  misc_RNA (1)...(19): siRNA sense strand
caagucugcccaccaaaca

SEQ ID NO: 1881339 - RNA, 19 nt, Homo sapiens
  misc_RNA (1)...(19): siRNA sense strand
cagcuccgcucagguaguc

SEQ ID NO: 1881340 - RNA, 19 nt, Homo sapiens
  misc_RNA (1)...(19): siRNA sense strand
guacugccuccuccucaug

SEQ ID NO: 1881341 - RNA, 19 nt, Homo sapiens
  misc_RNA (1)...(19): siRNA sense strand
ccacaguccaugacaaguc

SEQ ID NO: 1881342 - RNA, 19 nt, Homo sapiens
  misc_RNA (1)...(19): siRNA sense strand
gcagcagcaacacaaacaa

SEQ ID NO: 1881343 - RNA, 19 nt, Homo sapiens
  misc_RNA (1)...(19): siRNA sense strand
cacaguccaugacaagucu

SEQ ID NO: 1881344 - RNA, 19 nt, Homo sapiens
  misc_RNA (1)...(19): siRNA sense strand
gguacugccuccuccucau

SEQ ID NO: 1881345 - RNA, 19 nt, Homo sapiens
  misc_RNA (1)...(19): siRNA sense strand
ugaggcagcagcaacacaa

SEQ ID NO: 1881346 - RNA, 19 nt, Homo sapiens
  misc_RNA (1)...(19): siRNA sense strand
gacaggcaaagggagauaa

SEQ ID NO: 1881347 - RNA, 19 nt, Homo sapiens
  misc_RNA (1)...(19): siRNA sense strand
gaggcagcagcaacacaaa

SEQ ID NO: 1881348 - RNA, 19 nt, Homo sapiens
  misc_RNA (1)...(19): siRNA sense strand
ggcaugggccugcacuaca

SEQ ID NO: 1881349 - RNA, 19 nt, Homo sapiens
  misc_RNA (1)...(19): siRNA sense strand
ggcagcagcaacacaaaca

SEQ ID NO: 1881350 - RNA, 19 nt, Homo sapiens
  misc_RNA (1)...(19): siRNA sense strand
gccagaaacuguaaucuua

SEQ ID NO: 1881351 - RNA, 19 nt, Homo sapiens
  misc_RNA (1)...(19): siRNA sense strand
ucacagaucugaacaguau

SEQ ID NO: 1881352 - RNA, 19 nt, Homo sapiens
  misc_RNA (1)...(19): siRNA sense strand
cagaacagcuucaauauca

SEQ ID NO: 1881353 - RNA, 19 nt, Homo sapiens
  misc_RNA (1)...(19): siRNA sense strand
gugaacaucucaacauuaa

SEQ ID NO: 1881354 - RNA, 19 nt, Homo sapiens
  misc_RNA (1)...(19): siRNA sense strand
uaacaaaugugguggagaa

SEQ ID NO: 1881355 - RNA, 19 nt, Homo sapiens
  misc_RNA (1)...(19): siRNA sense strand
ggagaacaauaauaggaua

SEQ ID NO: 1881356 - RNA, 19 nt, Homo sapiens
  misc_RNA (1)...(19): siRNA sense strand
gaaugaaacuccagagcaa

SEQ ID NO: 1881357 - RNA, 19 nt, Homo sapiens
  misc_RNA (1)...(19): siRNA sense strand
gcucagaacuucaucacaa

SEQ ID NO: 1881358 - RNA, 19 nt, Homo sapiens
  misc_RNA (1)...(19): siRNA sense strand
gaaggcauaugaauccaaa

SEQ ID NO: 1881359 - RNA, 19 nt, Homo sapiens
  misc_RNA (1)...(19): siRNA sense strand
caacaaaguacacagcuua

SEQ ID NO: 1881360 - RNA, 19 nt, Homo sapiens
  misc_RNA (1)...(19): siRNA sense strand
ugauauaccugacagagua

SEQ ID NO: 1881361 - RNA, 19 nt, Homo sapiens
  misc_RNA (1)...(19): siRNA sense strand
ccauaaagcuggacccauu

SEQ ID NO: 1881362 - RNA, 19 nt, Homo sapiens
  misc_RNA (1)...(19): siRNA sense strand
gaacaucucaacauuaaug

SEQ ID NO: 1881363 - RNA, 19 nt, Homo sapiens
  misc_RNA (1)...(19): siRNA sense strand
gauacacccuacuuacuaa

SEQ ID NO: 1881364 - RNA, 19 nt, Homo sapiens
  misc_RNA (1)...(19): siRNA sense strand
caaaugugguggagaaaug

SEQ ID NO: 1881365 - RNA, 19 nt, Homo sapiens
  misc_RNA (1)...(19): siRNA sense strand
gaacuugacaacguuaaua

SEQ ID NO: 1881366 - RNA, 19 nt, Homo sapiens
  misc_RNA (1)...(19): siRNA sense strand
cgaacucucuugaaugaaa

SEQ ID NO: 1881367 - RNA, 19 nt, Homo sapiens
  misc_RNA (1)...(19): siRNA sense strand
gaucugaacaguaucaauu

SEQ ID NO: 1881368 - RNA, 19 nt, Homo sapiens
  misc_RNA (1)...(19): siRNA sense strand
gaaaagagaugcacaaacu

SEQ ID NO: 1881369 - RNA, 19 nt, Homo sapiens
  misc_RNA (1)...(19): siRNA sense strand
ggaauagacagaaugaauu

SEQ ID NO: 1881370 - RNA, 19 nt, Homo sapiens
  misc_RNA (1)...(19): siRNA sense strand
aaaguuacauccacagaaa

SEQ ID NO: 1881371 - RNA, 19 nt, Homo sapiens
  misc_RNA (1)...(19): siRNA sense strand
guucagauaucgacaaugu

SEQ ID NO: 1881372 - RNA, 19 nt, Homo sapiens
  misc_RNA (1)...(19): siRNA sense strand
cauaugaucuagaagcaaa

SEQ ID NO: 1881373 - RNA, 19 nt, Homo sapiens
  misc_RNA (1)...(19): siRNA sense strand
gagaguaacuaggauucua

SEQ ID NO: 1881374 - RNA, 19 nt, Homo sapiens
  misc_RNA (1)...(19): siRNA sense strand
ggauacacccuacuuacua

SEQ ID NO: 1881375 - RNA, 19 nt, Homo sapiens
  misc_RNA (1)...(19): siRNA sense strand
ccacagaaauuuaccuaca

SEQ ID NO: 1881376 - RNA, 19 nt, Homo sapiens
  misc_RNA (1)...(19): siRNA sense strand
uggauuaaguuuccucuuu

SEQ ID NO: 1881377 - RNA, 19 nt, Homo sapiens
  misc_RNA (1)...(19): siRNA sense strand
guugaugucuuucugugua

SEQ ID NO: 1881378 - RNA, 19 nt, Homo sapiens
  misc_RNA (1)...(19): siRNA sense strand
gggcugcuguuuauuauuc

SEQ ID NO: 1881379 - RNA, 19 nt, Homo sapiens
  misc_RNA (1)...(19): siRNA sense strand
gcaacgaguccuuccuaua

SEQ ID NO: 1881380 - RNA, 19 nt, Homo sapiens
  misc_RNA (1)...(19): siRNA sense strand
gaaauuuaccuacauugga

SEQ ID NO: 1881381 - RNA, 19 nt, Homo sapiens
  misc_RNA (1)...(19): siRNA sense strand
cagaagauacuuugagaaa

SEQ ID NO: 1881382 - RNA, 19 nt, Homo sapiens
  misc_RNA (1)...(19): siRNA sense strand
cauaagcagugaauuggaa

SEQ ID NO: 1881383 - RNA, 19 nt, Homo sapiens
  misc_RNA (1)...(19): siRNA sense strand
gucuaaagauugucuacua

SEQ ID NO: 1881384 - RNA, 19 nt, Homo sapiens
  misc_RNA (1)...(19): siRNA sense strand
gaucauguauaugguauuc

SEQ ID NO: 1881385 - RNA, 19 nt, Homo sapiens
  misc_RNA (1)...(19): siRNA sense strand
gagcauacuggaagcauaa

SEQ ID NO: 1881386 - RNA, 19 nt, Homo sapiens
  misc_RNA (1)...(19): siRNA sense strand
gugcauccaucaagugaaa

SEQ ID NO: 1881387 - RNA, 19 nt, Homo sapiens
  misc_RNA (1)...(19): siRNA sense strand
gaaaugcaccagcgacaga

SEQ ID NO: 1881388 - RNA, 19 nt, Homo sapiens
  misc_RNA (1)...(19): siRNA sense strand
caacgaguccuuccuauag

SEQ ID NO: 1881389 - RNA, 19 nt, Homo sapiens
  misc_RNA (1)...(19): siRNA sense strand
ggacaaggcguucacagau

SEQ ID NO: 1881390 - RNA, 19 nt, Homo sapiens
  misc_RNA (1)...(19): siRNA sense strand
gaaaguggcaucgugcaaa

SEQ ID NO: 1881391 - RNA, 19 nt, Homo sapiens
  misc_RNA (1)...(19): siRNA sense strand
gcaaaucaccagguaagaa

SEQ ID NO: 1881392 - RNA, 19 nt, Homo sapiens
  misc_RNA (1)...(19): siRNA sense strand
aaacugaucugugaaccuu

SEQ ID NO: 1881393 - RNA, 19 nt, Homo sapiens
  misc_RNA (1)...(19): siRNA sense strand
gaaaguuacauccacagaa

SEQ ID NO: 1881394 - RNA, 19 nt, Homo sapiens
  misc_RNA (1)...(19): siRNA sense strand
gguaagaacccggaucaaa

SEQ ID NO: 1881395 - RNA, 19 nt, Homo sapiens
  misc_RNA (1)...(19): siRNA sense strand
gguauucacaauccuguua

SEQ ID NO: 1881396 - RNA, 19 nt, Homo sapiens
  misc_RNA (1)...(19): siRNA sense strand
gauucuagcuucucuggau

SEQ ID NO: 1881397 - RNA, 19 nt, Homo sapiens
  misc_RNA (1)...(19): siRNA sense strand
gagaugcacaaacuauuaa

SEQ ID NO: 1881398 - RNA, 19 nt, Homo sapiens
  misc_RNA (1)...(19): siRNA sense strand
uggaaagucugaagguaaa

SEQ ID NO: 1881399 - RNA, 19 nt, Homo sapiens
  misc_RNA (1)...(19): siRNA sense strand
ucagauaucgacaauguaa

SEQ ID NO: 1881400 - RNA, 19 nt, Homo sapiens
  misc_RNA (1)...(19): siRNA sense strand
uaagccagcugaauagcaa

SEQ ID NO: 1881401 - RNA, 19 nt, Homo sapiens
  misc_RNA (1)...(19): siRNA sense strand
guucuuaccuuugucuuug

SEQ ID NO: 1881402 - RNA, 19 nt, Homo sapiens
  misc_RNA (1)...(19): siRNA sense strand
uaaguacuaucgucgaaug

SEQ ID NO: 1881403 - RNA, 19 nt, Homo sapiens
  misc_RNA (1)...(19): siRNA sense strand
gcagugaauuggaaagucu

SEQ ID NO: 1881404 - RNA, 19 nt, Homo sapiens
  misc_RNA (1)...(19): siRNA sense strand
gaacaaguuuacagugacu

SEQ ID NO: 1881405 - RNA, 19 nt, Homo sapiens
  misc_RNA (1)...(19): siRNA sense strand
gaaacuggcagauagcaau

SEQ ID NO: 1881406 - RNA, 19 nt, Homo sapiens
  misc_RNA (1)...(19): siRNA sense strand
ucacaauccuguuaugaca

SEQ ID NO: 1881407 - RNA, 19 nt, Homo sapiens
  misc_RNA (1)...(19): siRNA sense strand
gcuaaguacuaucgucgaa

SEQ ID NO: 1881408 - RNA, 19 nt, Homo sapiens
  misc_RNA (1)...(19): siRNA sense strand
gaaguaugggagaacaaua

SEQ ID NO: 1881409 - RNA, 19 nt, Homo sapiens
  misc_RNA (1)...(19): siRNA sense strand
gcauaugaauccaaaauug

SEQ ID NO: 1881410 - RNA, 19 nt, Homo sapiens
  misc_RNA (1)...(19): siRNA sense strand
agagaugcacaaacuauua

SEQ ID NO: 1881411 - RNA, 19 nt, Homo sapiens
  misc_RNA (1)...(19): siRNA sense strand
ucucagcauucucuguuua

SEQ ID NO: 1881412 - RNA, 19 nt, Homo sapiens
  misc_RNA (1)...(19): siRNA sense strand
cagcuuagcagcagucuga

SEQ ID NO: 1881413 - RNA, 19 nt, Homo sapiens
  misc_RNA (1)...(19): siRNA sense strand
ccagagcaaaucaaauaua

SEQ ID NO: 1881414 - RNA, 19 nt, Homo sapiens
  misc_RNA (1)...(19): siRNA sense strand
caaauuaugagacccaaga

SEQ ID NO: 1881415 - RNA, 19 nt, Homo sapiens
  misc_RNA (1)...(19): siRNA sense strand
ggaaaugcuuugcaaucuc

SEQ ID NO: 1881416 - RNA, 19 nt, Homo sapiens
  misc_RNA (1)...(19): siRNA sense strand
ucucuaagccagcugaaua

SEQ ID NO: 1881417 - RNA, 19 nt, Homo sapiens
  misc_RNA (1)...(19): siRNA sense strand
cgacugagacccaacauca

SEQ ID NO: 1881418 - RNA, 19 nt, Homo sapiens
  misc_RNA (1)...(19): siRNA sense strand
gaagcagggauuauucuau

SEQ ID NO: 1881419 - RNA, 19 nt, Homo sapiens
  misc_RNA (1)...(19): siRNA sense strand
ggacguguacgaugauguu

SEQ ID NO: 1881420 - RNA, 19 nt, Homo sapiens
  misc_RNA (1)...(19): siRNA sense strand
aggaaaagcuacuguauuu

SEQ ID NO: 1881421 - RNA, 19 nt, Homo sapiens
  misc_RNA (1)...(19): siRNA sense strand
uaaaugaagacugggaaua

SEQ ID NO: 1881422 - RNA, 19 nt, Homo sapiens
  misc_RNA (1)...(19): siRNA sense strand
gauauacucucagcauucu

SEQ ID NO: 1881423 - RNA, 19 nt, Homo sapiens
  misc_RNA (1)...(19): siRNA sense strand
gcauuggcaucuucuaugg

SEQ ID NO: 1881424 - RNA, 19 nt, Homo sapiens
  misc_RNA (1)...(19): siRNA sense strand
guacgaugauguugaaacu

SEQ ID NO: 1881425 - RNA, 19 nt, Homo sapiens
  misc_RNA (1)...(19): siRNA sense strand
cggaggacguguacgauga

SEQ ID NO: 1881426 - RNA, 19 nt, Homo sapiens
  misc_RNA (1)...(19): siRNA sense strand
ugaggaaacuaagaaguau

SEQ ID NO: 1881427 - RNA, 19 nt, Homo sapiens
  misc_RNA (1)...(19): siRNA sense strand
cagugaacaucucaacauu

SEQ ID NO: 1881428 - RNA, 19 nt, Homo sapiens
  misc_RNA (1)...(19): siRNA sense strand
uaacucagcgucuuccuau

SEQ ID NO: 1881429 - RNA, 19 nt, Homo sapiens
  misc_RNA (1)...(19): siRNA sense strand
aagcagggauuauucuaug

SEQ ID NO: 1881430 - RNA, 19 nt, Homo sapiens
  misc_RNA (1)...(19): siRNA sense strand
aaaugaagcucacuuuuga

SEQ ID NO: 1881431 - RNA, 19 nt, Homo sapiens
  misc_RNA (1)...(19): siRNA sense strand
ggaguuggauuaaguuucc

SEQ ID NO: 1881432 - RNA, 19 nt, Homo sapiens
  misc_RNA (1)...(19): siRNA sense strand
gaacuagugcauaucuuuc

SEQ ID NO: 1881433 - RNA, 19 nt, Homo sapiens
  misc_RNA (1)...(19): siRNA sense strand
gacaaggcguucacagauc

SEQ ID NO: 1881434 - RNA, 19 nt, Homo sapiens
  misc_RNA (1)...(19): siRNA sense strand
ugcgaacucucuugaauga

SEQ ID NO: 1881435 - RNA, 19 nt, Homo sapiens
  misc_RNA (1)...(19): siRNA sense strand
gaggaaaugcuuugcaauc

SEQ ID NO: 1881436 - RNA, 19 nt, Homo sapiens
  misc_RNA (1)...(19): siRNA sense strand
caaacaauacuuccucugu

SEQ ID NO: 1881437 - RNA, 19 nt, Homo sapiens
  misc_RNA (1)...(19): siRNA sense strand
cugcagaacagcuucaaua

SEQ ID NO: 1881438 - RNA, 19 nt, Homo sapiens
  misc_RNA (1)...(19): siRNA sense strand
gaagcucacuuuugaacaa

SEQ ID NO: 1881439 - RNA, 19 nt, Homo sapiens
  misc_RNA (1)...(19): siRNA sense strand
ggauuaaguuuccucuuuu

SEQ ID NO: 1881440 - RNA, 19 nt, Homo sapiens
  misc_RNA (1)...(19): siRNA sense strand
ccauuggcauucucuuuga

SEQ ID NO: 1881441 - RNA, 19 nt, Homo sapiens
  misc_RNA (1)...(19): siRNA sense strand
ugacaagccagaaacugua

SEQ ID NO: 1881442 - RNA, 19 nt, Homo sapiens
  misc_RNA (1)...(19): siRNA sense strand
acgaugauguugaaacuau

SEQ ID NO: 1881443 - RNA, 19 nt, Homo sapiens
  misc_RNA (1)...(19): siRNA sense strand
gaaugaauuaugacagcua

SEQ ID NO: 1881444 - RNA, 19 nt, Homo sapiens
  misc_RNA (1)...(19): siRNA sense strand
gcagaacagcuucaauauc

SEQ ID NO: 1881445 - RNA, 19 nt, Homo sapiens
  misc_RNA (1)...(19): siRNA sense strand
gacccaagacucccauaaa

SEQ ID NO: 1881446 - RNA, 19 nt, Homo sapiens
  misc_RNA (1)...(19): siRNA sense strand
ggauauacucucagcauuc

SEQ ID NO: 1881447 - RNA, 19 nt, Homo sapiens
  misc_RNA (1)...(19): siRNA sense strand
gaaacuauacccaugaaaa

SEQ ID NO: 1881448 - RNA, 19 nt, Homo sapiens
  misc_RNA (1)...(19): siRNA sense strand
gaacuucaucacaaacaau

SEQ ID NO: 1881449 - RNA, 19 nt, Homo sapiens
  misc_RNA (1)...(19): siRNA sense strand
ggagagaguaacuaggauu

SEQ ID NO: 1881450 - RNA, 19 nt, Homo sapiens
  misc_RNA (1)...(19): siRNA sense strand
cagcaaauaugacaucuug

SEQ ID NO: 1881451 - RNA, 19 nt, Homo sapiens
  misc_RNA (1)...(19): siRNA sense strand
gaugugaugugggaauaua

SEQ ID NO: 1881452 - RNA, 19 nt, Homo sapiens
  misc_RNA (1)...(19): siRNA sense strand
gagauggucugguggaugu

SEQ ID NO: 1881453 - RNA, 19 nt, Homo sapiens
  misc_RNA (1)...(19): siRNA sense strand
gaaccgggaugcucagauc

SEQ ID NO: 1881454 - RNA, 19 nt, Homo sapiens
  misc_RNA (1)...(19): siRNA sense strand
gaauauaagugggagaaca

SEQ ID NO: 1881455 - RNA, 19 nt, Homo sapiens
  misc_RNA (1)...(19): siRNA sense strand
ggaggaggaugaugaugau

SEQ ID NO: 1881456 - RNA, 19 nt, Homo sapiens
  misc_RNA (1)...(19): siRNA sense strand
gcauugacuuugaccucua

SEQ ID NO: 1881457 - RNA, 19 nt, Homo sapiens
  misc_RNA (1)...(19): siRNA sense strand
guucggaucacacccuuua

SEQ ID NO: 1881458 - RNA, 19 nt, Homo sapiens
  misc_RNA (1)...(19): siRNA sense strand
ggaggaaggccacuuugau

SEQ ID NO: 1881459 - RNA, 19 nt, Homo sapiens
  misc_RNA (1)...(19): siRNA sense strand
gaggaaggccacuuugaug

SEQ ID NO: 1881460 - RNA, 19 nt, Homo sapiens
  misc_RNA (1)...(19): siRNA sense strand
cauguucgcugaggaguug

SEQ ID NO: 1881461 - RNA, 19 nt, Homo sapiens
  misc_RNA (1)...(19): siRNA sense strand
gcgaugaggaggaggauga

SEQ ID NO: 1881462 - RNA, 19 nt, Homo sapiens
  misc_RNA (1)...(19): siRNA sense strand
gauggaggaaggccacuuu

SEQ ID NO: 1881463 - RNA, 19 nt, Homo sapiens
  misc_RNA (1)...(19): siRNA sense strand
caagggaacgguuggcuau

SEQ ID NO: 1881464 - RNA, 19 nt, Homo sapiens
  misc_RNA (1)...(19): siRNA sense strand
gagcuccuauugccuagag

SEQ ID NO: 1881465 - RNA, 19 nt, Homo sapiens
  misc_RNA (1)...(19): siRNA sense strand
cuacaacuccaaacgcauu

SEQ ID NO: 1881466 - RNA, 19 nt, Homo sapiens
  misc_RNA (1)...(19): siRNA sense strand
gggcaaccuugguguguac

SEQ ID NO: 1881467 - RNA, 19 nt, Homo sapiens
  misc_RNA (1)...(19): siRNA sense strand
ugaggaggaugaggaugaa

SEQ ID NO: 1881468 - RNA, 19 nt, Homo sapiens
  misc_RNA (1)...(19): siRNA sense strand
cuaugcgucugaaggguuu

SEQ ID NO: 1881469 - RNA, 19 nt, Homo sapiens
  misc_RNA (1)...(19): siRNA sense strand
ggaguuggcggaggaggaa

SEQ ID NO: 1881470 - RNA, 19 nt, Homo sapiens
  misc_RNA (1)...(19): siRNA sense strand
uggaugugaugugggaaua

SEQ ID NO: 1881471 - RNA, 19 nt, Homo sapiens
  misc_RNA (1)...(19): siRNA sense strand
gagccgcuuuaaaggcaaa

SEQ ID NO: 1881472 - RNA, 19 nt, Homo sapiens
  misc_RNA (1)...(19): siRNA sense strand
gggaauauaagugggagaa

SEQ ID NO: 1881473 - RNA, 19 nt, Homo sapiens
  misc_RNA (1)...(19): siRNA sense strand
gguccugggagccgcuuua

SEQ ID NO: 1881474 - RNA, 19 nt, Homo sapiens
  misc_RNA (1)...(19): siRNA sense strand
ggaggaugaggaugaaauc

SEQ ID NO: 1881475 - RNA, 19 nt, Homo sapiens
  misc_RNA (1)...(19): siRNA sense strand
caaagaggaaagugaccuu

SEQ ID NO: 1881476 - RNA, 19 nt, Homo sapiens
  misc_RNA (1)...(19): siRNA sense strand
ccuauugccuagagagaca

SEQ ID NO: 1881477 - RNA, 19 nt, Homo sapiens
  misc_RNA (1)...(19): siRNA sense strand
ccugggagccgcuuuaaag

SEQ ID NO: 1881478 - RNA, 19 nt, Homo sapiens
  misc_RNA (1)...(19): siRNA sense strand
cacccucccuggacauguu

SEQ ID NO: 1881479 - RNA, 19 nt, Homo sapiens
  misc_RNA (1)...(19): siRNA sense strand
caacauugacugggugaag

SEQ ID NO: 1881480 - RNA, 19 nt, Homo sapiens
  misc_RNA (1)...(19): siRNA sense strand
ggaggaggcaaagggagaa

SEQ ID NO: 1881481 - RNA, 19 nt, Homo sapiens
  misc_RNA (1)...(19): siRNA sense strand
aggaggaggaugaugauga

SEQ ID NO: 1881482 - RNA, 19 nt, Homo sapiens
  misc_RNA (1)...(19): siRNA sense strand
aacauugacugggugaaga

SEQ ID NO: 1881483 - RNA, 19 nt, Homo sapiens
  misc_RNA (1)...(19): siRNA sense strand
cuccaaacgcauugacuuu

SEQ ID NO: 1881484 - RNA, 19 nt, Homo sapiens
  misc_RNA (1)...(19): siRNA sense strand
ggaggcaaagggagaaagg

SEQ ID NO: 1881485 - RNA, 19 nt, Homo sapiens
  misc_RNA (1)...(19): siRNA sense strand
gggagauggucugguggau

SEQ ID NO: 1881486 - RNA, 19 nt, Homo sapiens
  misc_RNA (1)...(19): siRNA sense strand
gaagaucccuuugacuuga

SEQ ID NO: 1881487 - RNA, 19 nt, Homo sapiens
  misc_RNA (1)...(19): siRNA sense strand
gaugacggcugggacauua

SEQ ID NO: 1881488 - RNA, 19 nt, Homo sapiens
  misc_RNA (1)...(19): siRNA sense strand
gaagauacauuggcucagu

SEQ ID NO: 1881489 - RNA, 19 nt, Homo sapiens
  misc_RNA (1)...(19): siRNA sense strand
gcaucuggcuggauaaugu

SEQ ID NO: 1881490 - RNA, 19 nt, Homo sapiens
  misc_RNA (1)...(19): siRNA sense strand
gcaagaagaaguuuaugau

SEQ ID NO: 1881491 - RNA, 19 nt, Homo sapiens
  misc_RNA (1)...(19): siRNA sense strand
aagcaacccuucaggauug

SEQ ID NO: 1881492 - RNA, 19 nt, Homo sapiens
  misc_RNA (1)...(19): siRNA sense strand
gcaacaagcaugccuaugg

SEQ ID NO: 1881493 - RNA, 19 nt, Homo sapiens
  misc_RNA (1)...(19): siRNA sense strand
acacgugggucgaauguga

SEQ ID NO: 1881494 - RNA, 19 nt, Homo sapiens
  misc_RNA (1)...(19): siRNA sense strand
ggccgcaucuggcuggaua

SEQ ID NO: 1881495 - RNA, 19 nt, Homo sapiens
  misc_RNA (1)...(19): siRNA sense strand
gaagaacaccugcaaccau

SEQ ID NO: 1881496 - RNA, 19 nt, Homo sapiens
  misc_RNA (1)...(19): siRNA sense strand
caacugggcugugggaagu

SEQ ID NO: 1881497 - RNA, 19 nt, Homo sapiens
  misc_RNA (1)...(19): siRNA sense strand
gcucugcuauucuccuuga

SEQ ID NO: 1881498 - RNA, 19 nt, Homo sapiens
  misc_RNA (1)...(19): siRNA sense strand
gaagacacgugggucgaau

SEQ ID NO: 1881499 - RNA, 19 nt, Homo sapiens
  misc_RNA (1)...(19): siRNA sense strand
gugaagaucccuuugacuu

SEQ ID NO: 1881500 - RNA, 19 nt, Homo sapiens
  misc_RNA (1)...(19): siRNA sense strand
ucagagaccggaaaugcua

SEQ ID NO: 1881501 - RNA, 19 nt, Homo sapiens
  misc_RNA (1)...(19): siRNA sense strand
ggagggcuguacugacuca

SEQ ID NO: 1881502 - RNA, 19 nt, Homo sapiens
  misc_RNA (1)...(19): siRNA sense strand
gcugucaucugcucaggau

SEQ ID NO: 1881503 - RNA, 19 nt, Homo sapiens
  misc_RNA (1)...(19): siRNA sense strand
ucagucaguugcacaggaa

SEQ ID NO: 1881504 - RNA, 19 nt, Homo sapiens
  misc_RNA (1)...(19): siRNA sense strand
uuaaggacguggcuguguu

SEQ ID NO: 1881505 - RNA, 19 nt, Homo sapiens
  misc_RNA (1)...(19): siRNA sense strand
gcacaggaacagaagauac

SEQ ID NO: 1881506 - RNA, 19 nt, Homo sapiens
  misc_RNA (1)...(19): siRNA sense strand
cgacugcacccaccaggaa

SEQ ID NO: 1881507 - RNA, 19 nt, Homo sapiens
  misc_RNA (1)...(19): siRNA sense strand
ugaagaucccuuugacuug

SEQ ID NO: 1881508 - RNA, 19 nt, Homo sapiens
  misc_RNA (1)...(19): siRNA sense strand
gaacaccugcaaccaugau

SEQ ID NO: 1881509 - RNA, 19 nt, Homo sapiens
  misc_RNA (1)...(19): siRNA sense strand
uaugauuguucacaugaug

SEQ ID NO: 1881510 - RNA, 19 nt, Homo sapiens
  misc_RNA (1)...(19): siRNA sense strand
gcaagggacgcguggaagu

SEQ ID NO: 1881511 - RNA, 19 nt, Homo sapiens
  misc_RNA (1)...(19): siRNA sense strand
cgaaugugaagaucccuuu

SEQ ID NO: 1881512 - RNA, 19 nt, Homo sapiens
  misc_RNA (1)...(19): siRNA sense strand
gcacccaccaggaagaugu

SEQ ID NO: 1881513 - RNA, 19 nt, Homo sapiens
  misc_RNA (1)...(19): siRNA sense strand
gaugacaacuggggagaaa

SEQ ID NO: 1881514 - RNA, 19 nt, Homo sapiens
  misc_RNA (1)...(19): siRNA sense strand
ugagcaagaagaaguuuau

SEQ ID NO: 1881515 - RNA, 19 nt, Homo sapiens
  misc_RNA (1)...(19): siRNA sense strand
guuuaugauuguucacaug

SEQ ID NO: 1881516 - RNA, 19 nt, Homo sapiens
  misc_RNA (1)...(19): siRNA sense strand
cuagugguauuuuguauga

SEQ ID NO: 1881517 - RNA, 19 nt, Homo sapiens
  misc_RNA (1)...(19): siRNA sense strand
ggaagaacaccugcaacca

SEQ ID NO: 1881518 - RNA, 19 nt, Homo sapiens
  misc_RNA (1)...(19): siRNA sense strand
auacauuggcucaguguga

SEQ ID NO: 1881519 - RNA, 19 nt, Homo sapiens
  misc_RNA (1)...(19): siRNA sense strand
gggcuguacugacucaaaa

SEQ ID NO: 1881520 - RNA, 19 nt, Homo sapiens
  misc_RNA (1)...(19): siRNA sense strand
caaaagguccucauccaau

SEQ ID NO: 1881521 - RNA, 19 nt, Homo sapiens
  misc_RNA (1)...(19): siRNA sense strand
gaaugugaagaucccuuug

SEQ ID NO: 1881522 - RNA, 19 nt, Homo sapiens
  misc_RNA (1)...(19): siRNA sense strand
gcuauucuccuugauccuu

SEQ ID NO: 1881523 - RNA, 19 nt, Homo sapiens
  misc_RNA (1)...(19): siRNA sense strand
gugagcaagaagaaguuua

SEQ ID NO: 1881524 - RNA, 19 nt, Homo sapiens
  misc_RNA (1)...(19): siRNA sense strand
aggaacagaagauacauug

SEQ ID NO: 1881525 - RNA, 19 nt, Homo sapiens
  misc_RNA (1)...(19): siRNA sense strand
ugggagggcuguacugacu

SEQ ID NO: 1881526 - RNA, 19 nt, Homo sapiens
  misc_RNA (1)...(19): siRNA sense strand
uaaggacguggcuguguug

SEQ ID NO: 1881527 - RNA, 19 nt, Homo sapiens
  misc_RNA (1)...(19): siRNA sense strand
ccuugauccuugccauuug

SEQ ID NO: 1881528 - RNA, 19 nt, Homo sapiens
  misc_RNA (1)...(19): siRNA sense strand
ugacuugagacuaguagga

SEQ ID NO: 1881529 - RNA, 19 nt, Homo sapiens
  misc_RNA (1)...(19): siRNA sense strand
gcaaaagguccucauccaa

SEQ ID NO: 1881530 - RNA, 19 nt, Homo sapiens
  misc_RNA (1)...(19): siRNA sense strand
ggaagugaagcaccagaac

SEQ ID NO: 1881531 - RNA, 19 nt, Homo sapiens
  misc_RNA (1)...(19): siRNA sense strand
caagggacgcguggaagug

SEQ ID NO: 1881532 - RNA, 19 nt, Homo sapiens
  misc_RNA (1)...(19): siRNA sense strand
cacaggaacagaagauaca

SEQ ID NO: 1881533 - RNA, 19 nt, Homo sapiens
  misc_RNA (1)...(19): siRNA sense strand
guaugagccaccagcagaa

SEQ ID NO: 1881534 - RNA, 19 nt, Homo sapiens
  misc_RNA (1)...(19): siRNA sense strand
gagcaagaagaaguuuaug

SEQ ID NO: 1881535 - RNA, 19 nt, Homo sapiens
  misc_RNA (1)...(19): siRNA sense strand
ucagugugagcaagaagaa

SEQ ID NO: 1881536 - RNA, 19 nt, Homo sapiens
  misc_RNA (1)...(19): siRNA sense strand
caggaacagaagauacauu

SEQ ID NO: 1881537 - RNA, 19 nt, Homo sapiens
  misc_RNA (1)...(19): siRNA sense strand
aaugugaagaucccuuuga

SEQ ID NO: 1881538 - RNA, 19 nt, Homo sapiens
  misc_RNA (1)...(19): siRNA sense strand
gggaagaacugauaucuga

SEQ ID NO: 1881539 - RNA, 19 nt, Homo sapiens
  misc_RNA (1)...(19): siRNA sense strand
gaaauacaguggucugaug

SEQ ID NO: 1881540 - RNA, 19 nt, Homo sapiens
  misc_RNA (1)...(19): siRNA sense strand
gaacugauaucugagaaca

SEQ ID NO: 1881541 - RNA, 19 nt, Homo sapiens
  misc_RNA (1)...(19): siRNA sense strand
gagggacgcucacaagcua

SEQ ID NO: 1881542 - RNA, 19 nt, Homo sapiens
  misc_RNA (1)...(19): siRNA sense strand
ggauagcaaugaauaguuc

SEQ ID NO: 1881543 - RNA, 19 nt, Homo sapiens
  misc_RNA (1)...(19): siRNA sense strand
caaagagacuacacacaau

SEQ ID NO: 1881544 - RNA, 19 nt, Homo sapiens
  misc_RNA (1)...(19): siRNA sense strand
gaauaguucucugaaaugu

SEQ ID NO: 1881545 - RNA, 19 nt, Homo sapiens
  misc_RNA (1)...(19): siRNA sense strand
ugaugaagcagaagaaaua

SEQ ID NO: 1881546 - RNA, 19 nt, Homo sapiens
  misc_RNA (1)...(19): siRNA sense strand
gaaauucgcagaugcauac

SEQ ID NO: 1881547 - RNA, 19 nt, Homo sapiens
  misc_RNA (1)...(19): siRNA sense strand
gggcugaguuucgauguuu

SEQ ID NO: 1881548 - RNA, 19 nt, Homo sapiens
  misc_RNA (1)...(19): siRNA sense strand
gggaagguguggcucauug

SEQ ID NO: 1881549 - RNA, 19 nt, Homo sapiens
  misc_RNA (1)...(19): siRNA sense strand
ucaagaaacacauacagua

SEQ ID NO: 1881550 - RNA, 19 nt, Homo sapiens
  misc_RNA (1)...(19): siRNA sense strand
gaaggauuauuuacucgau

SEQ ID NO: 1881551 - RNA, 19 nt, Homo sapiens
  misc_RNA (1)...(19): siRNA sense strand
gaagaacugauaucugaga

SEQ ID NO: 1881552 - RNA, 19 nt, Homo sapiens
  misc_RNA (1)...(19): siRNA sense strand
gaaaacaagcuuauuggua

SEQ ID NO: 1881553 - RNA, 19 nt, Homo sapiens
  misc_RNA (1)...(19): siRNA sense strand
ccagauccauguauagaau

SEQ ID NO: 1881554 - RNA, 19 nt, Homo sapiens
  misc_RNA (1)...(19): siRNA sense strand
gcaaugaauaguucucuga

SEQ ID NO: 1881555 - RNA, 19 nt, Homo sapiens
  misc_RNA (1)...(19): siRNA sense strand
cucagaaugugaaggauua

SEQ ID NO: 1881556 - RNA, 19 nt, Homo sapiens
  misc_RNA (1)...(19): siRNA sense strand
gcagaugcauacaagacuu

SEQ ID NO: 1881557 - RNA, 19 nt, Homo sapiens
  misc_RNA (1)...(19): siRNA sense strand
ucaaagagacuacacacaa

SEQ ID NO: 1881558 - RNA, 19 nt, Homo sapiens
  misc_RNA (1)...(19): siRNA sense strand
gagaacacagccacgcuua

SEQ ID NO: 1881559 - RNA, 19 nt, Homo sapiens
  misc_RNA (1)...(19): siRNA sense strand
gcuaauagacuuccuuaag

SEQ ID NO: 1881560 - RNA, 19 nt, Homo sapiens
  misc_RNA (1)...(19): siRNA sense strand
ugacuucacucagccguuu

SEQ ID NO: 1881561 - RNA, 19 nt, Homo sapiens
  misc_RNA (1)...(19): siRNA sense strand
gaugauccaccaacacauu

SEQ ID NO: 1881562 - RNA, 19 nt, Homo sapiens
  misc_RNA (1)...(19): siRNA sense strand
ucacucagccguuuauuca

SEQ ID NO: 1881563 - RNA, 19 nt, Homo sapiens
  misc_RNA (1)...(19): siRNA sense strand
gcaccagaauuuccugagu

SEQ ID NO: 1881564 - RNA, 19 nt, Homo sapiens
  misc_RNA (1)...(19): siRNA sense strand
aaagagacuacacacaaua

SEQ ID NO: 1881565 - RNA, 19 nt, Homo sapiens
  misc_RNA (1)...(19): siRNA sense strand
agaaacacauacaguacaa

SEQ ID NO: 1881566 - RNA, 19 nt, Homo sapiens
  misc_RNA (1)...(19): siRNA sense strand
gaagaaauucgcagaugca

SEQ ID NO: 1881567 - RNA, 19 nt, Homo sapiens
  misc_RNA (1)...(19): siRNA sense strand
acacauacaguacaaauuc

SEQ ID NO: 1881568 - RNA, 19 nt, Homo sapiens
  misc_RNA (1)...(19): siRNA sense strand
caccagaauuuccugaguu

SEQ ID NO: 1881569 - RNA, 19 nt, Homo sapiens
  misc_RNA (1)...(19): siRNA sense strand
gagacuacacacaauacua

SEQ ID NO: 1881570 - RNA, 19 nt, Homo sapiens
  misc_RNA (1)...(19): siRNA sense strand
uccuuaagcugaagagaaa

SEQ ID NO: 1881571 - RNA, 19 nt, Homo sapiens
  misc_RNA (1)...(19): siRNA sense strand
acucagccguuuauucauu

SEQ ID NO: 1881572 - RNA, 19 nt, Homo sapiens
  misc_RNA (1)...(19): siRNA sense strand
cuaauagacuuccuuaagc

SEQ ID NO: 1881573 - RNA, 19 nt, Homo sapiens
  misc_RNA (1)...(19): siRNA sense strand
caguacaaauucuuagaug

SEQ ID NO: 1881574 - RNA, 19 nt, Homo sapiens
  misc_RNA (1)...(19): siRNA sense strand
gcuuacggcaccagaauuu

SEQ ID NO: 1881575 - RNA, 19 nt, Homo sapiens
  misc_RNA (1)...(19): siRNA sense strand
gauaucugagaacaacuua

SEQ ID NO: 1881576 - RNA, 19 nt, Homo sapiens
  misc_RNA (1)...(19): siRNA sense strand
uauagaauaugagcucguu

SEQ ID NO: 1881577 - RNA, 19 nt, Homo sapiens
  misc_RNA (1)...(19): siRNA sense strand
gccagacagugaugaugaa

SEQ ID NO: 1881578 - RNA, 19 nt, Homo sapiens
  misc_RNA (1)...(19): siRNA sense strand
caacuuaaacggcgauuuu

SEQ ID NO: 1881579 - RNA, 19 nt, Homo sapiens
  misc_RNA (1)...(19): siRNA sense strand
agacagugaugaugaagca

SEQ ID NO: 1881580 - RNA, 19 nt, Homo sapiens
  misc_RNA (1)...(19): siRNA sense strand
caagaaacacauacaguac

SEQ ID NO: 1881581 - RNA, 19 nt, Homo sapiens
  misc_RNA (1)...(19): siRNA sense strand
caagaguuccgauuucauc

SEQ ID NO: 1881582 - RNA, 19 nt, Homo sapiens
  misc_RNA (1)...(19): siRNA sense strand
cacaaacagugaagugaca

SEQ ID NO: 1881583 - RNA, 19 nt, Homo sapiens
  misc_RNA (1)...(19): siRNA sense strand
ugauggaacucuggugguu

SEQ ID NO: 1881584 - RNA, 19 nt, Homo sapiens
  misc_RNA (1)...(19): siRNA sense strand
uaauagacuuccuuaagcu

SEQ ID NO: 1881585 - RNA, 19 nt, Homo sapiens
  misc_RNA (1)...(19): siRNA sense strand
gauauauacagagacagua

SEQ ID NO: 1881586 - RNA, 19 nt, Homo sapiens
  misc_RNA (1)...(19): siRNA sense strand
gaagacuuuguguucgaua

SEQ ID NO: 1881587 - RNA, 19 nt, Homo sapiens
  misc_RNA (1)...(19): siRNA sense strand
agacuacacacaauacuau

SEQ ID NO: 1881588 - RNA, 19 nt, Homo sapiens
  misc_RNA (1)...(19): siRNA sense strand
uuccugaguuugccacuaa

SEQ ID NO: 1881589 - RNA, 19 nt, Homo sapiens
  misc_RNA (1)...(19): siRNA sense strand
gacuuuguguucgauauau

SEQ ID NO: 1881590 - RNA, 19 nt, Homo sapiens
  misc_RNA (1)...(19): siRNA sense strand
caagggaugcguauuggau

SEQ ID NO: 1881591 - RNA, 19 nt, Homo sapiens
  misc_RNA (1)...(19): siRNA sense strand
ugaauaguucucugaaaug

SEQ ID NO: 1881592 - RNA, 19 nt, Homo sapiens
  misc_RNA (1)...(19): siRNA sense strand
ggaagguguggcucauuga

SEQ ID NO: 1881593 - RNA, 19 nt, Homo sapiens
  misc_RNA (1)...(19): siRNA sense strand
agcgacaucuuucugcuuu

SEQ ID NO: 1881594 - RNA, 19 nt, Homo sapiens
  misc_RNA (1)...(19): siRNA sense strand
accagaauuuccugaguuu

SEQ ID NO: 1881595 - RNA, 19 nt, Homo sapiens
  misc_RNA (1)...(19): siRNA sense strand
ugugaaggauuauuuacuc

SEQ ID NO: 1881596 - RNA, 19 nt, Homo sapiens
  misc_RNA (1)...(19): siRNA sense strand
ggcagugucuuuccuaagc

SEQ ID NO: 1881597 - RNA, 19 nt, Homo sapiens
  misc_RNA (1)...(19): siRNA sense strand
caccugggaagaacugaua

SEQ ID NO: 1881598 - RNA, 19 nt, Homo sapiens
  misc_RNA (1)...(19): siRNA sense strand
gaaacacauacaguacaaa

SEQ ID NO: 1881599 - RNA, 19 nt, Homo sapiens
  misc_RNA (1)...(19): siRNA sense strand
gaugaugaagcagaagaaa

SEQ ID NO: 1881600 - RNA, 19 nt, Homo sapiens
  misc_RNA (1)...(19): siRNA sense strand
aagcuaauagacuuccuua

SEQ ID NO: 1881601 - RNA, 19 nt, Homo sapiens
  misc_RNA (1)...(19): siRNA sense strand
aggauuauuuacucgauga

SEQ ID NO: 1881602 - RNA, 19 nt, Homo sapiens
  misc_RNA (1)...(19): siRNA sense strand
uuucaagaguuccgauuuc

SEQ ID NO: 1881603 - RNA, 19 nt, Homo sapiens
  misc_RNA (1)...(19): siRNA sense strand
gaacacagccacgcuuacg

SEQ ID NO: 1881604 - RNA, 19 nt, Homo sapiens
  misc_RNA (1)...(19): siRNA sense strand
uguguucgauauauacaga

SEQ ID NO: 1881605 - RNA, 19 nt, Homo sapiens
  misc_RNA (1)...(19): siRNA sense strand
aggaagaaauucgcagaug

SEQ ID NO: 1881606 - RNA, 19 nt, Homo sapiens
  misc_RNA (1)...(19): siRNA sense strand
caaugaauaguucucugaa

SEQ ID NO: 1881607 - RNA, 19 nt, Homo sapiens
  misc_RNA (1)...(19): siRNA sense strand
gcguuaccaucaagagugu

SEQ ID NO: 1881608 - RNA, 19 nt, Homo sapiens
  misc_RNA (1)...(19): siRNA sense strand
uccaggaaccuaucaauuc

SEQ ID NO: 1881609 - RNA, 19 nt, Homo sapiens
  misc_RNA (1)...(19): siRNA sense strand
agaugaagacuuuguguuc

SEQ ID NO: 1881610 - RNA, 19 nt, Homo sapiens
  misc_RNA (1)...(19): siRNA sense strand
guccaggaaccuaucaauu

SEQ ID NO: 1881611 - RNA, 19 nt, Homo sapiens
  misc_RNA (1)...(19): siRNA sense strand
aaacggcgauuuuagugaa

SEQ ID NO: 1881612 - RNA, 19 nt, Homo sapiens
  misc_RNA (1)...(19): siRNA sense strand
cgaaaauggugugaauuga

SEQ ID NO: 1881613 - RNA, 19 nt, Homo sapiens
  misc_RNA (1)...(19): siRNA sense strand
acaguggucugaugaugag

SEQ ID NO: 1881614 - RNA, 19 nt, Homo sapiens
  misc_RNA (1)...(19): siRNA sense strand
ggacgcucacaagcuaaua

SEQ ID NO: 1881615 - RNA, 19 nt, Homo sapiens
  misc_RNA (1)...(19): siRNA sense strand
ugacuuuaauccauuuggu

SEQ ID NO: 1881616 - RNA, 19 nt, Homo sapiens
  misc_RNA (1)...(19): siRNA sense strand
agacuuuguguucgauaua

SEQ ID NO: 1881617 - RNA, 19 nt, Homo sapiens
  misc_RNA (1)...(19): siRNA sense strand
cagugaugaugaagcagaa

SEQ ID NO: 1881618 - RNA, 19 nt, Homo sapiens
  misc_RNA (1)...(19): siRNA sense strand
gaaaauggugugaauugau

SEQ ID NO: 1881619 - RNA, 19 nt, Homo sapiens
  misc_RNA (1)...(19): siRNA sense strand
uagacuuccuuaagcugaa

SEQ ID NO: 1881620 - RNA, 19 nt, Homo sapiens
  misc_RNA (1)...(19): siRNA sense strand
gauggaacucuggugguuu

SEQ ID NO: 1881621 - RNA, 19 nt, Homo sapiens
  misc_RNA (1)...(19): siRNA sense strand
aagaacugauaucugagaa

SEQ ID NO: 1881622 - RNA, 19 nt, Homo sapiens
  misc_RNA (1)...(19): siRNA sense strand
cagaugcauacaagacuuu

SEQ ID NO: 1881623 - RNA, 19 nt, Homo sapiens
  misc_RNA (1)...(19): siRNA sense strand
aaauacaguggucugauga

SEQ ID NO: 1881624 - RNA, 19 nt, Homo sapiens
  misc_RNA (1)...(19): siRNA sense strand
gaguuucgauguuuuguca

SEQ ID NO: 1881625 - RNA, 19 nt, Homo sapiens
  misc_RNA (1)...(19): siRNA sense strand
guuaccggcuacccaagga

SEQ ID NO: 1881626 - RNA, 19 nt, Homo sapiens
  misc_RNA (1)...(19): siRNA sense strand
gcuguucaccugggaagaa

SEQ ID NO: 1881627 - RNA, 19 nt, Homo sapiens
  misc_RNA (1)...(19): siRNA sense strand
agaaauucgcagaugcaua

SEQ ID NO: 1881628 - RNA, 19 nt, Homo sapiens
  misc_RNA (1)...(19): siRNA sense strand
gaguuccgauuucaucacu

SEQ ID NO: 1881629 - RNA, 19 nt, Homo sapiens
  misc_RNA (1)...(19): siRNA sense strand
cucacaagcuaauagacuu

SEQ ID NO: 1881630 - RNA, 19 nt, Homo sapiens
  misc_RNA (1)...(19): siRNA sense strand
gcucacaagcuaauagacu

SEQ ID NO: 1881631 - RNA, 19 nt, Homo sapiens
  misc_RNA (1)...(19): siRNA sense strand
ggagggacgcucacaagcu

SEQ ID NO: 1881632 - RNA, 19 nt, Homo sapiens
  misc_RNA (1)...(19): siRNA sense strand
cagauucacugcuguucac

SEQ ID NO: 1881633 - RNA, 19 nt, Homo sapiens
  misc_RNA (1)...(19): siRNA sense strand
ccacuuccucagaauguga

SEQ ID NO: 1881634 - RNA, 19 nt, Homo sapiens
  misc_RNA (1)...(19): siRNA sense strand
gcuuauugguauuucucaa

SEQ ID NO: 1881635 - RNA, 19 nt, Homo sapiens
  misc_RNA (1)...(19): siRNA sense strand
auacaguggucugaugaug

SEQ ID NO: 1881636 - RNA, 19 nt, Homo sapiens
  misc_RNA (1)...(19): siRNA sense strand
cagauccauguauagaaua

SEQ ID NO: 1881637 - RNA, 19 nt, Homo sapiens
  misc_RNA (1)...(19): siRNA sense strand
cuaaaguccaggaaccuau

SEQ ID NO: 1881638 - RNA, 19 nt, Homo sapiens
  misc_RNA (1)...(19): siRNA sense strand
gcuggucucuggacacaua

SEQ ID NO: 1881639 - RNA, 19 nt, Homo sapiens
  misc_RNA (1)...(19): siRNA sense strand
gaaaugcgacugaaaucuu

SEQ ID NO: 1881640 - RNA, 19 nt, Homo sapiens
  misc_RNA (1)...(19): siRNA sense strand
ggucugggcucuuggaaau

SEQ ID NO: 1881641 - RNA, 19 nt, Homo sapiens
  misc_RNA (1)...(19): siRNA sense strand
gaacgaggccuugggaaau

SEQ ID NO: 1881642 - RNA, 19 nt, Homo sapiens
  misc_RNA (1)...(19): siRNA sense strand
gaacagccugagagaagua

SEQ ID NO: 1881643 - RNA, 19 nt, Homo sapiens
  misc_RNA (1)...(19): siRNA sense strand
ggaacgaggccuugggaaa

SEQ ID NO: 1881644 - RNA, 19 nt, Homo sapiens
  misc_RNA (1)...(19): siRNA sense strand
gaaaugguccugcuuuggu

SEQ ID NO: 1881645 - RNA, 19 nt, Homo sapiens
  misc_RNA (1)...(19): siRNA sense strand
ggacgauucuccucacacu

SEQ ID NO: 1881646 - RNA, 19 nt, Homo sapiens
  misc_RNA (1)...(19): siRNA sense strand
gaaccaggagguccaagga

SEQ ID NO: 1881647 - RNA, 19 nt, Homo sapiens
  misc_RNA (1)...(19): siRNA sense strand
ggaacagccugagagaagu

SEQ ID NO: 1881648 - RNA, 19 nt, Homo sapiens
  misc_RNA (1)...(19): siRNA sense strand
acgauucuccucacacuua

SEQ ID NO: 1881649 - RNA, 19 nt, Homo sapiens
  misc_RNA (1)...(19): siRNA sense strand
aaaugcgacugaaaucuuc

SEQ ID NO: 1881650 - RNA, 19 nt, Homo sapiens
  misc_RNA (1)...(19): siRNA sense strand
ggaaauuaccuggaaaugc

SEQ ID NO: 1881651 - RNA, 19 nt, Homo sapiens
  misc_RNA (1)...(19): siRNA sense strand
ggaaaugcgacugaaaucu

SEQ ID NO: 1881652 - RNA, 19 nt, Homo sapiens
  misc_RNA (1)...(19): siRNA sense strand
gaacuccuccuacccucau

SEQ ID NO: 1881653 - RNA, 19 nt, Homo sapiens
  misc_RNA (1)...(19): siRNA sense strand
cuugggaaauuaccuggaa

SEQ ID NO: 1881654 - RNA, 19 nt, Homo sapiens
  misc_RNA (1)...(19): siRNA sense strand
ggaaaugguccugcuuugg

SEQ ID NO: 1881655 - RNA, 19 nt, Homo sapiens
  misc_RNA (1)...(19): siRNA sense strand
aacgaggccuugggaaauu

SEQ ID NO: 1881656 - RNA, 19 nt, Homo sapiens
  misc_RNA (1)...(19): siRNA sense strand
acgaggccuugggaaauua

SEQ ID NO: 1881657 - RNA, 19 nt, Homo sapiens
  misc_RNA (1)...(19): siRNA sense strand
uggaacagccugagagaag

SEQ ID NO: 1881658 - RNA, 19 nt, Homo sapiens
  misc_RNA (1)...(19): siRNA sense strand
uagggccucugcaccaaug

SEQ ID NO: 1881659 - RNA, 19 nt, Homo sapiens
  misc_RNA (1)...(19): siRNA sense strand
uuggguggcuggacgauuc

SEQ ID NO: 1881660 - RNA, 19 nt, Homo sapiens
  misc_RNA (1)...(19): siRNA sense strand
gggaaauuaccuggaaaug

SEQ ID NO: 1881661 - RNA, 19 nt, Homo sapiens
  misc_RNA (1)...(19): siRNA sense strand
ucugggcucuuggaaauca

SEQ ID NO: 1881662 - RNA, 19 nt, Homo sapiens
  misc_RNA (1)...(19): siRNA sense strand
ccuccuacccucauugugu

SEQ ID NO: 1881663 - RNA, 19 nt, Homo sapiens
  misc_RNA (1)...(19): siRNA sense strand
ggaugucagagcacaggaa

SEQ ID NO: 1881664 - RNA, 19 nt, Homo sapiens
  misc_RNA (1)...(19): siRNA sense strand
caaauacacuguccaggau

SEQ ID NO: 1881665 - RNA, 19 nt, Homo sapiens
  misc_RNA (1)...(19): siRNA sense strand
uagaugaacugaagcaaga

SEQ ID NO: 1881666 - RNA, 19 nt, Homo sapiens
  misc_RNA (1)...(19): siRNA sense strand
gauaagaccaucaucaugu

SEQ ID NO: 1881667 - RNA, 19 nt, Homo sapiens
  misc_RNA (1)...(19): siRNA sense strand
ggaaagaucauuguagaug

SEQ ID NO: 1881668 - RNA, 19 nt, Homo sapiens
  misc_RNA (1)...(19): siRNA sense strand
ccaaggaugugcugagugu

SEQ ID NO: 1881669 - RNA, 19 nt, Homo sapiens
  misc_RNA (1)...(19): siRNA sense strand
guuaugggaucucaacgaa

SEQ ID NO: 1881670 - RNA, 19 nt, Homo sapiens
  misc_RNA (1)...(19): siRNA sense strand
gagauaagaccaucaucau

SEQ ID NO: 1881671 - RNA, 19 nt, Homo sapiens
  misc_RNA (1)...(19): siRNA sense strand
cagagugggugucuugugu

SEQ ID NO: 1881672 - RNA, 19 nt, Homo sapiens
  misc_RNA (1)...(19): siRNA sense strand
gaugagaccaacuauggaa

SEQ ID NO: 1881673 - RNA, 19 nt, Homo sapiens
  misc_RNA (1)...(19): siRNA sense strand
gaagcaagaaguuaucagu

SEQ ID NO: 1881674 - RNA, 19 nt, Homo sapiens
  misc_RNA (1)...(19): siRNA sense strand
gggaugagaccaacuaugg

SEQ ID NO: 1881675 - RNA, 19 nt, Homo sapiens
  misc_RNA (1)...(19): siRNA sense strand
gagaccaacuauggaauuc

SEQ ID NO: 1881676 - RNA, 19 nt, Homo sapiens
  misc_RNA (1)...(19): siRNA sense strand
uaacccagaucgcuacuac

SEQ ID NO: 1881677 - RNA, 19 nt, Homo sapiens
  misc_RNA (1)...(19): siRNA sense strand
ggucacucccacuuuguua

SEQ ID NO: 1881678 - RNA, 19 nt, Homo sapiens
  misc_RNA (1)...(19): siRNA sense strand
uauggaaccuggcuaacug

SEQ ID NO: 1881679 - RNA, 19 nt, Homo sapiens
  misc_RNA (1)...(19): siRNA sense strand
agggaaagaucauuguaga

SEQ ID NO: 1881680 - RNA, 19 nt, Homo sapiens
  misc_RNA (1)...(19): siRNA sense strand
cauuguagaugaacugaag

SEQ ID NO: 1881681 - RNA, 19 nt, Homo sapiens
  misc_RNA (1)...(19): siRNA sense strand
gcugaagaccaaccacauu

SEQ ID NO: 1881682 - RNA, 19 nt, Homo sapiens
  misc_RNA (1)...(19): siRNA sense strand
ggauuuagagggaaagauc

SEQ ID NO: 1881683 - RNA, 19 nt, Homo sapiens
  misc_RNA (1)...(19): siRNA sense strand
cgagauaagaccaucauca

SEQ ID NO: 1881684 - RNA, 19 nt, Homo sapiens
  misc_RNA (1)...(19): siRNA sense strand
gugacugucucuccagaug

SEQ ID NO: 1881685 - RNA, 19 nt, Homo sapiens
  misc_RNA (1)...(19): siRNA sense strand
ggaaacugaccagggauga

SEQ ID NO: 1881686 - RNA, 19 nt, Homo sapiens
  misc_RNA (1)...(19): siRNA sense strand
gauaaaaccaucaagcuau

SEQ ID NO: 1881687 - RNA, 19 nt, Homo sapiens
  misc_RNA (1)...(19): siRNA sense strand
ccagggaugagaccaacua

SEQ ID NO: 1881688 - RNA, 19 nt, Homo sapiens
  misc_RNA (1)...(19): siRNA sense strand
cuccucagauggccaguuu

SEQ ID NO: 1881689 - RNA, 19 nt, Homo sapiens
  misc_RNA (1)...(19): siRNA sense strand
gagggaaagaucauuguag

SEQ ID NO: 1881690 - RNA, 19 nt, Homo sapiens
  misc_RNA (1)...(19): siRNA sense strand
aauacacuguccaggauga

SEQ ID NO: 1881691 - RNA, 19 nt, Homo sapiens
  misc_RNA (1)...(19): siRNA sense strand
aagcaagaaguuaucagua

SEQ ID NO: 1881692 - RNA, 19 nt, Homo sapiens
  misc_RNA (1)...(19): siRNA sense strand
ggccacaacggcuggguaa

SEQ ID NO: 1881693 - RNA, 19 nt, Homo sapiens
  misc_RNA (1)...(19): siRNA sense strand
ccacacaggcuaucugaac

SEQ ID NO: 1881694 - RNA, 19 nt, Homo sapiens
  misc_RNA (1)...(19): siRNA sense strand
caaccacauuggccacaca

SEQ ID NO: 1881695 - RNA, 19 nt, Homo sapiens
  misc_RNA (1)...(19): siRNA sense strand
gcaguucccggacaugauc

SEQ ID NO: 1881696 - RNA, 19 nt, Homo sapiens
  misc_RNA (1)...(19): siRNA sense strand
ugagaccaacuauggaauu

SEQ ID NO: 1881697 - RNA, 19 nt, Homo sapiens
  misc_RNA (1)...(19): siRNA sense strand
aaacugaccagggaugaga

SEQ ID NO: 1881698 - RNA, 19 nt, Homo sapiens
  misc_RNA (1)...(19): siRNA sense strand
auaagaccaucaucaugug

SEQ ID NO: 1881699 - RNA, 19 nt, Homo sapiens
  misc_RNA (1)...(19): siRNA sense strand
acugcaagcugaagaccaa

SEQ ID NO: 1881700 - RNA, 19 nt, Homo sapiens
  misc_RNA (1)...(19): siRNA sense strand
ggaugagaccaacuaugga

SEQ ID NO: 1881701 - RNA, 19 nt, Homo sapiens
  misc_RNA (1)...(19): siRNA sense strand
agcaagaaguuaucaguac

SEQ ID NO: 1881702 - RNA, 19 nt, Homo sapiens
  misc_RNA (1)...(19): siRNA sense strand
gcagcaacccuaucaucgu

SEQ ID NO: 1881703 - RNA, 19 nt, Homo sapiens
  misc_RNA (1)...(19): siRNA sense strand
cacacaggcuaucugaaca

SEQ ID NO: 1881704 - RNA, 19 nt, Homo sapiens
  misc_RNA (1)...(19): siRNA sense strand
caacagcagcaacccuauc

SEQ ID NO: 1881705 - RNA, 19 nt, Homo sapiens
  misc_RNA (1)...(19): siRNA sense strand
ggccacacaggcuaucuga

SEQ ID NO: 1881706 - RNA, 19 nt, Homo sapiens
  misc_RNA (1)...(19): siRNA sense strand
uuagugaugugguuaucuc

SEQ ID NO: 1881707 - RNA, 19 nt, Homo sapiens
  misc_RNA (1)...(19): siRNA sense strand
agaccaucaucauguggaa

SEQ ID NO: 1881708 - RNA, 19 nt, Homo sapiens
  misc_RNA (1)...(19): siRNA sense strand
gggaaagaucauuguagau

SEQ ID NO: 1881709 - RNA, 19 nt, Homo sapiens
  misc_RNA (1)...(19): siRNA sense strand
ggaucucaacgaaggcaaa

SEQ ID NO: 1881710 - RNA, 19 nt, Homo sapiens
  misc_RNA (1)...(19): siRNA sense strand
gaacacggugacugucucu

SEQ ID NO: 1881711 - RNA, 19 nt, Homo sapiens
  misc_RNA (1)...(19): siRNA sense strand
cugaagaccaaccacauug

SEQ ID NO: 1881712 - RNA, 19 nt, Homo sapiens
  misc_RNA (1)...(19): siRNA sense strand
cagcagcaacccuaucauc

SEQ ID NO: 1881713 - RNA, 19 nt, Homo sapiens
  misc_RNA (1)...(19): siRNA sense strand
agagggaaagaucauugua

SEQ ID NO: 1881714 - RNA, 19 nt, Homo sapiens
  misc_RNA (1)...(19): siRNA sense strand
acaagcuggucaagguaug

SEQ ID NO: 1881715 - RNA, 19 nt, Homo sapiens
  misc_RNA (1)...(19): siRNA sense strand
gauggaucccucugugcuu

SEQ ID NO: 1881716 - RNA, 19 nt, Homo sapiens
  misc_RNA (1)...(19): siRNA sense strand
uaccaaggaugugcugagu

SEQ ID NO: 1881717 - RNA, 19 nt, Homo sapiens
  misc_RNA (1)...(19): siRNA sense strand
uuagagggaaagaucauug

SEQ ID NO: 1881718 - RNA, 19 nt, Homo sapiens
  misc_RNA (1)...(19): siRNA sense strand
gcuaacugcaagcugaaga

SEQ ID NO: 1881719 - RNA, 19 nt, Homo sapiens
  misc_RNA (1)...(19): siRNA sense strand
agauaagaccaucaucaug

SEQ ID NO: 1881720 - RNA, 19 nt, Homo sapiens
  misc_RNA (1)...(19): siRNA sense strand
gauuuagagggaaagauca

SEQ ID NO: 1881721 - RNA, 19 nt, Homo sapiens
  misc_RNA (1)...(19): siRNA sense strand
ggaaccuggcuaacugcaa

SEQ ID NO: 1881722 - RNA, 19 nt, Homo sapiens
  misc_RNA (1)...(19): siRNA sense strand
gaagaaagcuacucuaauu

SEQ ID NO: 1881723 - RNA, 19 nt, Homo sapiens
  misc_RNA (1)...(19): siRNA sense strand
ggacauggaucccggaaua

SEQ ID NO: 1881724 - RNA, 19 nt, Homo sapiens
  misc_RNA (1)...(19): siRNA sense strand
gaaugaaacugaagaagaa

SEQ ID NO: 1881725 - RNA, 19 nt, Homo sapiens
  misc_RNA (1)...(19): siRNA sense strand
ggaaauugcuagaguagaa

SEQ ID NO: 1881726 - RNA, 19 nt, Homo sapiens
  misc_RNA (1)...(19): siRNA sense strand
gcgaauaaaucaugaaaga

SEQ ID NO: 1881727 - RNA, 19 nt, Homo sapiens
  misc_RNA (1)...(19): siRNA sense strand
ccaacugccuugucaaaua

SEQ ID NO: 1881728 - RNA, 19 nt, Homo sapiens
  misc_RNA (1)...(19): siRNA sense strand
gaagauggaauuaugcaua

SEQ ID NO: 1881729 - RNA, 19 nt, Homo sapiens
  misc_RNA (1)...(19): siRNA sense strand
gaguagaacuagaauguga

SEQ ID NO: 1881730 - RNA, 19 nt, Homo sapiens
  misc_RNA (1)...(19): siRNA sense strand
gaagaucucucggaaaaua

SEQ ID NO: 1881731 - RNA, 19 nt, Homo sapiens
  misc_RNA (1)...(19): siRNA sense strand
gaacuagaaugugaaacaa

SEQ ID NO: 1881732 - RNA, 19 nt, Homo sapiens
  misc_RNA (1)...(19): siRNA sense strand
gagaagaaagcuacucuaa

SEQ ID NO: 1881733 - RNA, 19 nt, Homo sapiens
  misc_RNA (1)...(19): siRNA sense strand
guacucaguugcagacauu

SEQ ID NO: 1881734 - RNA, 19 nt, Homo sapiens
  misc_RNA (1)...(19): siRNA sense strand
gcagcagacuauuaauaaa

SEQ ID NO: 1881735 - RNA, 19 nt, Homo sapiens
  misc_RNA (1)...(19): siRNA sense strand
gaauugcagcagacuauua

SEQ ID NO: 1881736 - RNA, 19 nt, Homo sapiens
  misc_RNA (1)...(19): siRNA sense strand
ccagugagcuugaguccuu

SEQ ID NO: 1881737 - RNA, 19 nt, Homo sapiens
  misc_RNA (1)...(19): siRNA sense strand
ggaggauacuuuagaacaa

SEQ ID NO: 1881738 - RNA, 19 nt, Homo sapiens
  misc_RNA (1)...(19): siRNA sense strand
auacagggcucaaguuuau

SEQ ID NO: 1881739 - RNA, 19 nt, Homo sapiens
  misc_RNA (1)...(19): siRNA sense strand
ugagaacucugaaagaaga

SEQ ID NO: 1881740 - RNA, 19 nt, Homo sapiens
  misc_RNA (1)...(19): siRNA sense strand
gaaagcuacucuaauuaag

SEQ ID NO: 1881741 - RNA, 19 nt, Homo sapiens
  misc_RNA (1)...(19): siRNA sense strand
gugaagcuaugaaugaauu

SEQ ID NO: 1881742 - RNA, 19 nt, Homo sapiens
  misc_RNA (1)...(19): siRNA sense strand
agaagaaacugaagaugga

SEQ ID NO: 1881743 - RNA, 19 nt, Homo sapiens
  misc_RNA (1)...(19): siRNA sense strand
ggaaugaggaguuaaaaua

SEQ ID NO: 1881744 - RNA, 19 nt, Homo sapiens
  misc_RNA (1)...(19): siRNA sense strand
uaaacaaaccgacaucuga

SEQ ID NO: 1881745 - RNA, 19 nt, Homo sapiens
  misc_RNA (1)...(19): siRNA sense strand
gauacauacugccaugaaa

SEQ ID NO: 1881746 - RNA, 19 nt, Homo sapiens
  misc_RNA (1)...(19): siRNA sense strand
cuaauagacugcaucaaga

SEQ ID NO: 1881747 - RNA, 19 nt, Homo sapiens
  misc_RNA (1)...(19): siRNA sense strand
gaagaagagguuccaagaa

SEQ ID NO: 1881748 - RNA, 19 nt, Homo sapiens
  misc_RNA (1)...(19): siRNA sense strand
gaaagcaagagaaguguga

SEQ ID NO: 1881749 - RNA, 19 nt, Homo sapiens
  misc_RNA (1)...(19): siRNA sense strand
ggagaacacucgacuacag

SEQ ID NO: 1881750 - RNA, 19 nt, Homo sapiens
  misc_RNA (1)...(19): siRNA sense strand
aagaagagguuccaagaau

SEQ ID NO: 1881751 - RNA, 19 nt, Homo sapiens
  misc_RNA (1)...(19): siRNA sense strand
caaagaagcgauugaaaca

SEQ ID NO: 1881752 - RNA, 19 nt, Homo sapiens
  misc_RNA (1)...(19): siRNA sense strand
aaacacaauuagcagagua

SEQ ID NO: 1881753 - RNA, 19 nt, Homo sapiens
  misc_RNA (1)...(19): siRNA sense strand
cauaauguguccaugaaau

SEQ ID NO: 1881754 - RNA, 19 nt, Homo sapiens
  misc_RNA (1)...(19): siRNA sense strand
gagauaaguaugagaagaa

SEQ ID NO: 1881755 - RNA, 19 nt, Homo sapiens
  misc_RNA (1)...(19): siRNA sense strand
ugaaugcaaugauaacaga

SEQ ID NO: 1881756 - RNA, 19 nt, Homo sapiens
  misc_RNA (1)...(19): siRNA sense strand
ugaggaaauugcuagagua

SEQ ID NO: 1881757 - RNA, 19 nt, Homo sapiens
  misc_RNA (1)...(19): siRNA sense strand
gaugaucuuuaccaacaaa

SEQ ID NO: 1881758 - RNA, 19 nt, Homo sapiens
  misc_RNA (1)...(19): siRNA sense strand
gaaacugaagauggaauua

SEQ ID NO: 1881759 - RNA, 19 nt, Homo sapiens
  misc_RNA (1)...(19): siRNA sense strand
gcugagaauuccaaagguu

SEQ ID NO: 1881760 - RNA, 19 nt, Homo sapiens
  misc_RNA (1)...(19): siRNA sense strand
gcaaagaagcgauugaaac

SEQ ID NO: 1881761 - RNA, 19 nt, Homo sapiens
  misc_RNA (1)...(19): siRNA sense strand
cgacagcuuugaugagaug

SEQ ID NO: 1881762 - RNA, 19 nt, Homo sapiens
  misc_RNA (1)...(19): siRNA sense strand
cagaagaucucucggaaaa

SEQ ID NO: 1881763 - RNA, 19 nt, Homo sapiens
  misc_RNA (1)...(19): siRNA sense strand
cgagaccacuuaaugacaa

SEQ ID NO: 1881764 - RNA, 19 nt, Homo sapiens
  misc_RNA (1)...(19): siRNA sense strand
caacugccuugucaaauac

SEQ ID NO: 1881765 - RNA, 19 nt, Homo sapiens
  misc_RNA (1)...(19): siRNA sense strand
aggcauacaugagcaauuu

SEQ ID NO: 1881766 - RNA, 19 nt, Homo sapiens
  misc_RNA (1)...(19): siRNA sense strand
gaacagauugcaagauugg

SEQ ID NO: 1881767 - RNA, 19 nt, Homo sapiens
  misc_RNA (1)...(19): siRNA sense strand
gcuaauagacugcaucaag

SEQ ID NO: 1881768 - RNA, 19 nt, Homo sapiens
  misc_RNA (1)...(19): siRNA sense strand
caugaaaucucuacaagcu

SEQ ID NO: 1881769 - RNA, 19 nt, Homo sapiens
  misc_RNA (1)...(19): siRNA sense strand
gaggauacuuuagaacaau

SEQ ID NO: 1881770 - RNA, 19 nt, Homo sapiens
  misc_RNA (1)...(19): siRNA sense strand
gaugguugcuacacauguu

SEQ ID NO: 1881771 - RNA, 19 nt, Homo sapiens
  misc_RNA (1)...(19): siRNA sense strand
ucagugaagcuaugaauga

SEQ ID NO: 1881772 - RNA, 19 nt, Homo sapiens
  misc_RNA (1)...(19): siRNA sense strand
gaagaaugcaugucagaag

SEQ ID NO: 1881773 - RNA, 19 nt, Homo sapiens
  misc_RNA (1)...(19): siRNA sense strand
gaaacacaauuagcagagu

SEQ ID NO: 1881774 - RNA, 19 nt, Homo sapiens
  misc_RNA (1)...(19): siRNA sense strand
ugugagaacucugaaagaa

SEQ ID NO: 1881775 - RNA, 19 nt, Homo sapiens
  misc_RNA (1)...(19): siRNA sense strand
uuauguaccucuuaaggaa

SEQ ID NO: 1881776 - RNA, 19 nt, Homo sapiens
  misc_RNA (1)...(19): siRNA sense strand
aaaccgacaucugaaagaa

SEQ ID NO: 1881777 - RNA, 19 nt, Homo sapiens
  misc_RNA (1)...(19): siRNA sense strand
gcaaaccacgacugaagaa

SEQ ID NO: 1881778 - RNA, 19 nt, Homo sapiens
  misc_RNA (1)...(19): siRNA sense strand
uggaugaucuuuaccaaca

SEQ ID NO: 1881779 - RNA, 19 nt, Homo sapiens
  misc_RNA (1)...(19): siRNA sense strand
ugaaugaaacugaagaaga

SEQ ID NO: 1881780 - RNA, 19 nt, Homo sapiens
  misc_RNA (1)...(19): siRNA sense strand
uagcagaguaucacaaauu

SEQ ID NO: 1881781 - RNA, 19 nt, Homo sapiens
  misc_RNA (1)...(19): siRNA sense strand
cuacaagcucccucuguua

SEQ ID NO: 1881782 - RNA, 19 nt, Homo sapiens
  misc_RNA (1)...(19): siRNA sense strand
uaucacaaauuggcuagaa

SEQ ID NO: 1881783 - RNA, 19 nt, Homo sapiens
  misc_RNA (1)...(19): siRNA sense strand
gagcgaauaaaucaugaaa

SEQ ID NO: 1881784 - RNA, 19 nt, Homo sapiens
  misc_RNA (1)...(19): siRNA sense strand
acacucgacuacagaauau

SEQ ID NO: 1881785 - RNA, 19 nt, Homo sapiens
  misc_RNA (1)...(19): siRNA sense strand
gaauagucaacuugguaua

SEQ ID NO: 1881786 - RNA, 19 nt, Homo sapiens
  misc_RNA (1)...(19): siRNA sense strand
aagaaugcaugucagaaga

SEQ ID NO: 1881787 - RNA, 19 nt, Homo sapiens
  misc_RNA (1)...(19): siRNA sense strand
uagagaauaugaagaaugc

SEQ ID NO: 1881788 - RNA, 19 nt, Homo sapiens
  misc_RNA (1)...(19): siRNA sense strand
aagaagcgauugaaacaca

SEQ ID NO: 1881789 - RNA, 19 nt, Homo sapiens
  misc_RNA (1)...(19): siRNA sense strand
gcagacauugagcgaauaa

SEQ ID NO: 1881790 - RNA, 19 nt, Homo sapiens
  misc_RNA (1)...(19): siRNA sense strand
gaagagguuccaagaaucu

SEQ ID NO: 1881791 - RNA, 19 nt, Homo sapiens
  misc_RNA (1)...(19): siRNA sense strand
ggaauagucaacuugguau

SEQ ID NO: 1881792 - RNA, 19 nt, Homo sapiens
  misc_RNA (1)...(19): siRNA sense strand
gauaacagaaagcaagaga

SEQ ID NO: 1881793 - RNA, 19 nt, Homo sapiens
  misc_RNA (1)...(19): siRNA sense strand
guuguggaaugaggaguua

SEQ ID NO: 1881794 - RNA, 19 nt, Homo sapiens
  misc_RNA (1)...(19): siRNA sense strand
cgaaucgucuagagucguu

SEQ ID NO: 1881795 - RNA, 19 nt, Homo sapiens
  misc_RNA (1)...(19): siRNA sense strand
gccgacagcuuugaugaga

SEQ ID NO: 1881796 - RNA, 19 nt, Homo sapiens
  misc_RNA (1)...(19): siRNA sense strand
gcucaccuuuauuugauga

SEQ ID NO: 1881797 - RNA, 19 nt, Homo sapiens
  misc_RNA (1)...(19): siRNA sense strand
caaauacagggcucaaguu

SEQ ID NO: 1881798 - RNA, 19 nt, Homo sapiens
  misc_RNA (1)...(19): siRNA sense strand
ggaaaguugaguauaaaca

SEQ ID NO: 1881799 - RNA, 19 nt, Homo sapiens
  misc_RNA (1)...(19): siRNA sense strand
augaacagauugcaagauu

SEQ ID NO: 1881800 - RNA, 19 nt, Homo sapiens
  misc_RNA (1)...(19): siRNA sense strand
agucaaaacugaaggauuu

SEQ ID NO: 1881801 - RNA, 19 nt, Homo sapiens
  misc_RNA (1)...(19): siRNA sense strand
gagaccacuuaaugacaaa

SEQ ID NO: 1881802 - RNA, 19 nt, Homo sapiens
  misc_RNA (1)...(19): siRNA sense strand
gagauuagagauaaguaug

SEQ ID NO: 1881803 - RNA, 19 nt, Homo sapiens
  misc_RNA (1)...(19): siRNA sense strand
gaaagaagaaguucaaaag

SEQ ID NO: 1881804 - RNA, 19 nt, Homo sapiens
  misc_RNA (1)...(19): siRNA sense strand
ccucauacauggccucaca

SEQ ID NO: 1881805 - RNA, 19 nt, Homo sapiens
  misc_RNA (1)...(19): siRNA sense strand
ugaagaagagguuccaaga

SEQ ID NO: 1881806 - RNA, 19 nt, Homo sapiens
  misc_RNA (1)...(19): siRNA sense strand
gacccgagaccacuuaaug

SEQ ID NO: 1881807 - RNA, 19 nt, Homo sapiens
  misc_RNA (1)...(19): siRNA sense strand
agaaaagucucgcuauuug

SEQ ID NO: 1881808 - RNA, 19 nt, Homo sapiens
  misc_RNA (1)...(19): siRNA sense strand
caagagaagugugagaacu

SEQ ID NO: 1881809 - RNA, 19 nt, Homo sapiens
  misc_RNA (1)...(19): siRNA sense strand
uaacagaaagcaagagaag

SEQ ID NO: 1881810 - RNA, 19 nt, Homo sapiens
  misc_RNA (1)...(19): siRNA sense strand
ucuacaagcucccucuguu

SEQ ID NO: 1881811 - RNA, 19 nt, Homo sapiens
  misc_RNA (1)...(19): siRNA sense strand
aaacaaaccgacaucugaa

SEQ ID NO: 1881812 - RNA, 19 nt, Homo sapiens
  misc_RNA (1)...(19): siRNA sense strand
gaaugcaugucagaagauc

SEQ ID NO: 1881813 - RNA, 19 nt, Homo sapiens
  misc_RNA (1)...(19): siRNA sense strand
gacgaaaagugggaaauaa

SEQ ID NO: 1881814 - RNA, 19 nt, Homo sapiens
  misc_RNA (1)...(19): siRNA sense strand
cuaaaggugcugagaauuc

SEQ ID NO: 1881815 - RNA, 19 nt, Homo sapiens
  misc_RNA (1)...(19): siRNA sense strand
gcaauuuggagucucauuc

SEQ ID NO: 1881816 - RNA, 19 nt, Homo sapiens
  misc_RNA (1)...(19): siRNA sense strand
ugaacagauugcaagauug

SEQ ID NO: 1881817 - RNA, 19 nt, Homo sapiens
  misc_RNA (1)...(19): siRNA sense strand
gagaacacucgacuacaga

SEQ ID NO: 1881818 - RNA, 19 nt, Homo sapiens
  misc_RNA (1)...(19): siRNA sense strand
aaccacgacugaagaaaga

SEQ ID NO: 1881819 - RNA, 19 nt, Homo sapiens
  misc_RNA (1)...(19): siRNA sense strand
gcgggaauaccaacuaguu

SEQ ID NO: 1881820 - RNA, 19 nt, Homo sapiens
  misc_RNA (1)...(19): siRNA sense strand
caaaagaacuaguggacau

SEQ ID NO: 1881821 - RNA, 19 nt, Homo sapiens
  misc_RNA (1)...(19): siRNA sense strand
aaauacagggcucaaguuu

SEQ ID NO: 1881822 - RNA, 19 nt, Homo sapiens
  misc_RNA (1)...(19): siRNA sense strand
gaagugauguuaauccuua

SEQ ID NO: 1881823 - RNA, 19 nt, Homo sapiens
  misc_RNA (1)...(19): siRNA sense strand
gcacagaccuccaaagauu

SEQ ID NO: 1881824 - RNA, 19 nt, Homo sapiens
  misc_RNA (1)...(19): siRNA sense strand
guacaaacuugaugacuua

SEQ ID NO: 1881825 - RNA, 19 nt, Homo sapiens
  misc_RNA (1)...(19): siRNA sense strand
gaacaacacuugacuaaag

SEQ ID NO: 1881826 - RNA, 19 nt, Homo sapiens
  misc_RNA (1)...(19): siRNA sense strand
caacugaacuugaagauga

SEQ ID NO: 1881827 - RNA, 19 nt, Homo sapiens
  misc_RNA (1)...(19): siRNA sense strand
ugauaaagcucgugaauuu

SEQ ID NO: 1881828 - RNA, 19 nt, Homo sapiens
  misc_RNA (1)...(19): siRNA sense strand
ggaauuagaugcuauguuc

SEQ ID NO: 1881829 - RNA, 19 nt, Homo sapiens
  misc_RNA (1)...(19): siRNA sense strand
gaaggcagcucuugaugaa

SEQ ID NO: 1881830 - RNA, 19 nt, Homo sapiens
  misc_RNA (1)...(19): siRNA sense strand
gaagaugcuuuaauggaua

SEQ ID NO: 1881831 - RNA, 19 nt, Homo sapiens
  misc_RNA (1)...(19): siRNA sense strand
caacagauagcuauucuua

SEQ ID NO: 1881832 - RNA, 19 nt, Homo sapiens
  misc_RNA (1)...(19): siRNA sense strand
cagcagauauugaucauaa

SEQ ID NO: 1881833 - RNA, 19 nt, Homo sapiens
  misc_RNA (1)...(19): siRNA sense strand
caaaguaggugcagcagaa

SEQ ID NO: 1881834 - RNA, 19 nt, Homo sapiens
  misc_RNA (1)...(19): siRNA sense strand
gcaaacgagucaaaccaua

SEQ ID NO: 1881835 - RNA, 19 nt, Homo sapiens
  misc_RNA (1)...(19): siRNA sense strand
gaacugcuguugucaugaa

SEQ ID NO: 1881836 - RNA, 19 nt, Homo sapiens
  misc_RNA (1)...(19): siRNA sense strand
uaagaugacuccaccaauu

SEQ ID NO: 1881837 - RNA, 19 nt, Homo sapiens
  misc_RNA (1)...(19): siRNA sense strand
gaaacauguucacccuuua

SEQ ID NO: 1881838 - RNA, 19 nt, Homo sapiens
  misc_RNA (1)...(19): siRNA sense strand
gauaagaacaccuauauuc

SEQ ID NO: 1881839 - RNA, 19 nt, Homo sapiens
  misc_RNA (1)...(19): siRNA sense strand
gggcauuccuucuuuauug

SEQ ID NO: 1881840 - RNA, 19 nt, Homo sapiens
  misc_RNA (1)...(19): siRNA sense strand
gagaacaacacuugacuaa

SEQ ID NO: 1881841 - RNA, 19 nt, Homo sapiens
  misc_RNA (1)...(19): siRNA sense strand
gaacaccuauauucguuau

SEQ ID NO: 1881842 - RNA, 19 nt, Homo sapiens
  misc_RNA (1)...(19): siRNA sense strand
gaaccgcuauugauugaug

SEQ ID NO: 1881843 - RNA, 19 nt, Homo sapiens
  misc_RNA (1)...(19): siRNA sense strand
acagauagcuauucuuaug

SEQ ID NO: 1881844 - RNA, 19 nt, Homo sapiens
  misc_RNA (1)...(19): siRNA sense strand
guagaauguugcaauauug

SEQ ID NO: 1881845 - RNA, 19 nt, Homo sapiens
  misc_RNA (1)...(19): siRNA sense strand
gaacaccaccaaugagaaa

SEQ ID NO: 1881846 - RNA, 19 nt, Homo sapiens
  misc_RNA (1)...(19): siRNA sense strand
gaaagucagagauguauau

SEQ ID NO: 1881847 - RNA, 19 nt, Homo sapiens
  misc_RNA (1)...(19): siRNA sense strand
uagauaacauggaugagua

SEQ ID NO: 1881848 - RNA, 19 nt, Homo sapiens
  misc_RNA (1)...(19): siRNA sense strand
caugagaccugauauagau

SEQ ID NO: 1881849 - RNA, 19 nt, Homo sapiens
  misc_RNA (1)...(19): siRNA sense strand
gagcugguccuuuguuuaa

SEQ ID NO: 1881850 - RNA, 19 nt, Homo sapiens
  misc_RNA (1)...(19): siRNA sense strand
ugacuuaguucguccauau

SEQ ID NO: 1881851 - RNA, 19 nt, Homo sapiens
  misc_RNA (1)...(19): siRNA sense strand
gcacugaaggccauuguaa

SEQ ID NO: 1881852 - RNA, 19 nt, Homo sapiens
  misc_RNA (1)...(19): siRNA sense strand
caagagaauuguauugauc

SEQ ID NO: 1881853 - RNA, 19 nt, Homo sapiens
  misc_RNA (1)...(19): siRNA sense strand
gaagaacaacugauugaug

SEQ ID NO: 1881854 - RNA, 19 nt, Homo sapiens
  misc_RNA (1)...(19): siRNA sense strand
ggaguuggcaaacaaagua

SEQ ID NO: 1881855 - RNA, 19 nt, Homo sapiens
  misc_RNA (1)...(19): siRNA sense strand
gauuguggaugaucugaaa

SEQ ID NO: 1881856 - RNA, 19 nt, Homo sapiens
  misc_RNA (1)...(19): siRNA sense strand
gauaaacuauugguugaug

SEQ ID NO: 1881857 - RNA, 19 nt, Homo sapiens
  misc_RNA (1)...(19): siRNA sense strand
cauguagaauguugcaaua

SEQ ID NO: 1881858 - RNA, 19 nt, Homo sapiens
  misc_RNA (1)...(19): siRNA sense strand
agaaacauguucacccuuu

SEQ ID NO: 1881859 - RNA, 19 nt, Homo sapiens
  misc_RNA (1)...(19): siRNA sense strand
caacuacuauacuagagaa

SEQ ID NO: 1881860 - RNA, 19 nt, Homo sapiens
  misc_RNA (1)...(19): siRNA sense strand
gcuauuggguaucuuauuc

SEQ ID NO: 1881861 - RNA, 19 nt, Homo sapiens
  misc_RNA (1)...(19): siRNA sense strand
ggaaauuuaugguggaagu

SEQ ID NO: 1881862 - RNA, 19 nt, Homo sapiens
  misc_RNA (1)...(19): siRNA sense strand
gagcgucauuuacuuguga

SEQ ID NO: 1881863 - RNA, 19 nt, Homo sapiens
  misc_RNA (1)...(19): siRNA sense strand
gagcacagaccuccaaaga

SEQ ID NO: 1881864 - RNA, 19 nt, Homo sapiens
  misc_RNA (1)...(19): siRNA sense strand
gaacaacugauugauggua

SEQ ID NO: 1881865 - RNA, 19 nt, Homo sapiens
  misc_RNA (1)...(19): siRNA sense strand
gagaguggaugaggauuug

SEQ ID NO: 1881866 - RNA, 19 nt, Homo sapiens
  misc_RNA (1)...(19): siRNA sense strand
agaguacccugaaguauug

SEQ ID NO: 1881867 - RNA, 19 nt, Homo sapiens
  misc_RNA (1)...(19): siRNA sense strand
ucaaacagcugaucagacu

SEQ ID NO: 1881868 - RNA, 19 nt, Homo sapiens
  misc_RNA (1)...(19): siRNA sense strand
acaggcagcugacuugauu

SEQ ID NO: 1881869 - RNA, 19 nt, Homo sapiens
  misc_RNA (1)...(19): siRNA sense strand
gaauaugccaacuacuaua

SEQ ID NO: 1881870 - RNA, 19 nt, Homo sapiens
  misc_RNA (1)...(19): siRNA sense strand
cagaauaugccaacuacua

SEQ ID NO: 1881871 - RNA, 19 nt, Homo sapiens
  misc_RNA (1)...(19): siRNA sense strand
ggaucaagagcgucauuua

SEQ ID NO: 1881872 - RNA, 19 nt, Homo sapiens
  misc_RNA (1)...(19): siRNA sense strand
ggaaguggaugggcugaga

SEQ ID NO: 1881873 - RNA, 19 nt, Homo sapiens
  misc_RNA (1)...(19): siRNA sense strand
ggaagugacagcagauuug

SEQ ID NO: 1881874 - RNA, 19 nt, Homo sapiens
  misc_RNA (1)...(19): siRNA sense strand
acuaugaucucuaccauga

SEQ ID NO: 1881875 - RNA, 19 nt, Homo sapiens
  misc_RNA (1)...(19): siRNA sense strand
gcauacuccuuccuuaaga

SEQ ID NO: 1881876 - RNA, 19 nt, Homo sapiens
  misc_RNA (1)...(19): siRNA sense strand
acacuugacuaaagaagaa

SEQ ID NO: 1881877 - RNA, 19 nt, Homo sapiens
  misc_RNA (1)...(19): siRNA sense strand
ccgggaagaugaauacaaa

SEQ ID NO: 1881878 - RNA, 19 nt, Homo sapiens
  misc_RNA (1)...(19): siRNA sense strand
ucagagauguauauuggaa

SEQ ID NO: 1881879 - RNA, 19 nt, Homo sapiens
  misc_RNA (1)...(19): siRNA sense strand
ugaaucacuuguugaacua

SEQ ID NO: 1881880 - RNA, 19 nt, Homo sapiens
  misc_RNA (1)...(19): siRNA sense strand
cuagagaagugauguuaau

SEQ ID NO: 1881881 - RNA, 19 nt, Homo sapiens
  misc_RNA (1)...(19): siRNA sense strand
ggguuuggcugcuuucuug

SEQ ID NO: 1881882 - RNA, 19 nt, Homo sapiens
  misc_RNA (1)...(19): siRNA sense strand
gaaauuaccgacaguuagu

SEQ ID NO: 1881883 - RNA, 19 nt, Homo sapiens
  misc_RNA (1)...(19): siRNA sense strand
guacagcacaugucacuug

SEQ ID NO: 1881884 - RNA, 19 nt, Homo sapiens
  misc_RNA (1)...(19): siRNA sense strand
ggaaaagacuacauuuaug

SEQ ID NO: 1881885 - RNA, 19 nt, Homo sapiens
  misc_RNA (1)...(19): siRNA sense strand
ggaugaggauuugcuuuga

SEQ ID NO: 1881886 - RNA, 19 nt, Homo sapiens
  misc_RNA (1)...(19): siRNA sense strand
gaugaggaauuagaugcua

SEQ ID NO: 1881887 - RNA, 19 nt, Homo sapiens
  misc_RNA (1)...(19): siRNA sense strand
gaaaggcagaacagaguuu

SEQ ID NO: 1881888 - RNA, 19 nt, Homo sapiens
  misc_RNA (1)...(19): siRNA sense strand
gagccacagucaacacauu

SEQ ID NO: 1881889 - RNA, 19 nt, Homo sapiens
  misc_RNA (1)...(19): siRNA sense strand
gcugaugucuccuacacuu

SEQ ID NO: 1881890 - RNA, 19 nt, Homo sapiens
  misc_RNA (1)...(19): siRNA sense strand
gagagaaaucgcccacuuu

SEQ ID NO: 1881891 - RNA, 19 nt, Homo sapiens
  misc_RNA (1)...(19): siRNA sense strand
gaaucuacaacgaugauaa

SEQ ID NO: 1881892 - RNA, 19 nt, Homo sapiens
  misc_RNA (1)...(19): siRNA sense strand
gcacauuacccaagaaucu

SEQ ID NO: 1881893 - RNA, 19 nt, Homo sapiens
  misc_RNA (1)...(19): siRNA sense strand
gcacagauucgagaaauuc

SEQ ID NO: 1881894 - RNA, 19 nt, Homo sapiens
  misc_RNA (1)...(19): siRNA sense strand
ugaagaugcuuuaauggau

SEQ ID NO: 1881895 - RNA, 19 nt, Homo sapiens
  misc_RNA (1)...(19): siRNA sense strand
uaaaaucgcuuuccuucuu

SEQ ID NO: 1881896 - RNA, 19 nt, Homo sapiens
  misc_RNA (1)...(19): siRNA sense strand
ucacgaagauauugaagca

SEQ ID NO: 1881897 - RNA, 19 nt, Homo sapiens
  misc_RNA (1)...(19): siRNA sense strand
agaacaguaugauccauuu

SEQ ID NO: 1881898 - RNA, 19 nt, Homo sapiens
  misc_RNA (1)...(19): siRNA sense strand
gguuaaugcucuuggcaaa

SEQ ID NO: 1881899 - RNA, 19 nt, Homo sapiens
  misc_RNA (1)...(19): siRNA sense strand
ggaaaggguuuggcugcuu

SEQ ID NO: 1881900 - RNA, 19 nt, Homo sapiens
  misc_RNA (1)...(19): siRNA sense strand
gaugaagauuacuaugcua

SEQ ID NO: 1881901 - RNA, 19 nt, Homo sapiens
  misc_RNA (1)...(19): siRNA sense strand
cagagcgucuugauccuuu

SEQ ID NO: 1881902 - RNA, 19 nt, Homo sapiens
  misc_RNA (1)...(19): siRNA sense strand
ccaggacgcucucauagca

SEQ ID NO: 1881903 - RNA, 19 nt, Homo sapiens
  misc_RNA (1)...(19): siRNA sense strand
gcaacaggcagcugacuug

SEQ ID NO: 1881904 - RNA, 19 nt, Homo sapiens
  misc_RNA (1)...(19): siRNA sense strand
gagacacacugguauuaag

SEQ ID NO: 1881905 - RNA, 19 nt, Homo sapiens
  misc_RNA (1)...(19): siRNA sense strand
ucaagagcgucauuuacuu

SEQ ID NO: 1881906 - RNA, 19 nt, Homo sapiens
  misc_RNA (1)...(19): siRNA sense strand
gaauggaacaccaccaaug

SEQ ID NO: 1881907 - RNA, 19 nt, Homo sapiens
  misc_RNA (1)...(19): siRNA sense strand
caucuuagaaguuuaguug

SEQ ID NO: 1881908 - RNA, 19 nt, Homo sapiens
  misc_RNA (1)...(19): siRNA sense strand
gcuauuggaccauguagaa

SEQ ID NO: 1881909 - RNA, 19 nt, Homo sapiens
  misc_RNA (1)...(19): siRNA sense strand
ugagagaaaucgcccacuu

SEQ ID NO: 1881910 - RNA, 19 nt, Homo sapiens
  misc_RNA (1)...(19): siRNA sense strand
acaccuauauucguuauga

SEQ ID NO: 1881911 - RNA, 19 nt, Homo sapiens
  misc_RNA (1)...(19): siRNA sense strand
gaugauaagaacaccuaua

SEQ ID NO: 1881912 - RNA, 19 nt, Homo sapiens
  misc_RNA (1)...(19): siRNA sense strand
caggauggcuuuggauaga

SEQ ID NO: 1881913 - RNA, 19 nt, Homo sapiens
  misc_RNA (1)...(19): siRNA sense strand
gcgagacacacugguauua

SEQ ID NO: 1881914 - RNA, 19 nt, Homo sapiens
  misc_RNA (1)...(19): siRNA sense strand
gaauuccagucuccugaug

SEQ ID NO: 1881915 - RNA, 19 nt, Homo sapiens
  misc_RNA (1)...(19): siRNA sense strand
aagaacaccuauauucguu

SEQ ID NO: 1881916 - RNA, 19 nt, Homo sapiens
  misc_RNA (1)...(19): siRNA sense strand
cuacaacgaugauaagaac

SEQ ID NO: 1881917 - RNA, 19 nt, Homo sapiens
  misc_RNA (1)...(19): siRNA sense strand
ggauuugguugugaagauu

SEQ ID NO: 1881918 - RNA, 19 nt, Homo sapiens
  misc_RNA (1)...(19): siRNA sense strand
gucaacacauuugguuaua

SEQ ID NO: 1881919 - RNA, 19 nt, Homo sapiens
  misc_RNA (1)...(19): siRNA sense strand
gaauauguaucugcaagag

SEQ ID NO: 1881920 - RNA, 19 nt, Homo sapiens
  misc_RNA (1)...(19): siRNA sense strand
aagaugacuccaccaauua

SEQ ID NO: 1881921 - RNA, 19 nt, Homo sapiens
  misc_RNA (1)...(19): siRNA sense strand
gaagaguacccugaaguau

SEQ ID NO: 1881922 - RNA, 19 nt, Homo sapiens
  misc_RNA (1)...(19): siRNA sense strand
ugaacaagaucuccaauug

SEQ ID NO: 1881923 - RNA, 19 nt, Homo sapiens
  misc_RNA (1)...(19): siRNA sense strand
ggcaguagcugacuuucua

SEQ ID NO: 1881924 - RNA, 19 nt, Homo sapiens
  misc_RNA (1)...(19): siRNA sense strand
aagaagaacugcugugugu

SEQ ID NO: 1881925 - RNA, 19 nt, Homo sapiens
  misc_RNA (1)...(19): siRNA sense strand
caggugagccagauaauaa

SEQ ID NO: 1881926 - RNA, 19 nt, Homo sapiens
  misc_RNA (1)...(19): siRNA sense strand
cagcagccaucaucucuug

SEQ ID NO: 1881927 - RNA, 19 nt, Homo sapiens
  misc_RNA (1)...(19): siRNA sense strand
gaccuggcguucuuuauca

SEQ ID NO: 1881928 - RNA, 19 nt, Homo sapiens
  misc_RNA (1)...(19): siRNA sense strand
agaaguugcugauccagaa

SEQ ID NO: 1881929 - RNA, 19 nt, Homo sapiens
  misc_RNA (1)...(19): siRNA sense strand
gggcuggaguuuaucuuug

SEQ ID NO: 1881930 - RNA, 19 nt, Homo sapiens
  misc_RNA (1)...(19): siRNA sense strand
gaacaagaucuccaauugg

SEQ ID NO: 1881931 - RNA, 19 nt, Homo sapiens
  misc_RNA (1)...(19): siRNA sense strand
gcagaauugugaaguguac

SEQ ID NO: 1881932 - RNA, 19 nt, Homo sapiens
  misc_RNA (1)...(19): siRNA sense strand
caucaucucuugccuucug

SEQ ID NO: 1881933 - RNA, 19 nt, Homo sapiens
  misc_RNA (1)...(19): siRNA sense strand
ggaccggcaugccaagauc

SEQ ID NO: 1881934 - RNA, 19 nt, Homo sapiens
  misc_RNA (1)...(19): siRNA sense strand
ggaaauagacaagaagaac

SEQ ID NO: 1881935 - RNA, 19 nt, Homo sapiens
  misc_RNA (1)...(19): siRNA sense strand
ggugguggccaucgucuuu

SEQ ID NO: 1881936 - RNA, 19 nt, Homo sapiens
  misc_RNA (1)...(19): siRNA sense strand
ggaccuggcguucuuuauc

SEQ ID NO: 1881937 - RNA, 19 nt, Homo sapiens
  misc_RNA (1)...(19): siRNA sense strand
ggccuugcccuguggauuu

SEQ ID NO: 1881938 - RNA, 19 nt, Homo sapiens
  misc_RNA (1)...(19): siRNA sense strand
gaaauagacaagaagaacu

SEQ ID NO: 1881939 - RNA, 19 nt, Homo sapiens
  misc_RNA (1)...(19): siRNA sense strand
ccaacuucuucuccacuuu

SEQ ID NO: 1881940 - RNA, 19 nt, Homo sapiens
  misc_RNA (1)...(19): siRNA sense strand
caacuucuucuccacuuug

SEQ ID NO: 1881941 - RNA, 19 nt, Homo sapiens
  misc_RNA (1)...(19): siRNA sense strand
gcccauccuuucccaacuu

SEQ ID NO: 1881942 - RNA, 19 nt, Homo sapiens
  misc_RNA (1)...(19): siRNA sense strand
ggcaccaucugcaggauca

SEQ ID NO: 1881943 - RNA, 19 nt, Homo sapiens
  misc_RNA (1)...(19): siRNA sense strand
ucaccuacaugaacagcau

SEQ ID NO: 1881944 - RNA, 19 nt, Homo sapiens
  misc_RNA (1)...(19): siRNA sense strand
gaagaagaaguugcugauc

SEQ ID NO: 1881945 - RNA, 19 nt, Homo sapiens
  misc_RNA (1)...(19): siRNA sense strand
agaagaaguugcugaucca

SEQ ID NO: 1881946 - RNA, 19 nt, Homo sapiens
  misc_RNA (1)...(19): siRNA sense strand
gcaggaucacuuucuggaa

SEQ ID NO: 1881947 - RNA, 19 nt, Homo sapiens
  misc_RNA (1)...(19): siRNA sense strand
caguccaccuccugaagaa

SEQ ID NO: 1881948 - RNA, 19 nt, Homo sapiens
  misc_RNA (1)...(19): siRNA sense strand
ggacagcagccaucaucuc

SEQ ID NO: 1881949 - RNA, 19 nt, Homo sapiens
  misc_RNA (1)...(19): siRNA sense strand
caccucaaguccuggaaau

SEQ ID NO: 1881950 - RNA, 19 nt, Homo sapiens
  misc_RNA (1)...(19): siRNA sense strand
ucacggugguggcgguaga

SEQ ID NO: 1881951 - RNA, 19 nt, Homo sapiens
  misc_RNA (1)...(19): siRNA sense strand
gcuggugcucuucauguuu

SEQ ID NO: 1881952 - RNA, 19 nt, Homo sapiens
  misc_RNA (1)...(19): siRNA sense strand
acucucagcuucaccuaca

SEQ ID NO: 1881953 - RNA, 19 nt, Homo sapiens
  misc_RNA (1)...(19): siRNA sense strand
uaacaguccaccuccugaa

SEQ ID NO: 1881954 - RNA, 19 nt, Homo sapiens
  misc_RNA (1)...(19): siRNA sense strand
cuggugcucuucauguuug

SEQ ID NO: 1881955 - RNA, 19 nt, Homo sapiens
  misc_RNA (1)...(19): siRNA sense strand
uagcugacuuucuacugau

SEQ ID NO: 1881956 - RNA, 19 nt, Homo sapiens
  misc_RNA (1)...(19): siRNA sense strand
ugcaucagcuucagcaucu

SEQ ID NO: 1881957 - RNA, 19 nt, Homo sapiens
  misc_RNA (1)...(19): siRNA sense strand
ugaagaagaaguugcugau

SEQ ID NO: 1881958 - RNA, 19 nt, Homo sapiens
  misc_RNA (1)...(19): siRNA sense strand
ggcuggugcucuucauguu

SEQ ID NO: 1881959 - RNA, 19 nt, Homo sapiens
  misc_RNA (1)...(19): siRNA sense strand
gcacgcagaauugugaagu

SEQ ID NO: 1881960 - RNA, 19 nt, Homo sapiens
  misc_RNA (1)...(19): siRNA sense strand
acaggugagccagauaaua

SEQ ID NO: 1881961 - RNA, 19 nt, Homo sapiens
  misc_RNA (1)...(19): siRNA sense strand
gacagcagccaucaucucu

SEQ ID NO: 1881962 - RNA, 19 nt, Homo sapiens
  misc_RNA (1)...(19): siRNA sense strand
ggcuggaguuuaucuuugg

SEQ ID NO: 1881963 - RNA, 19 nt, Homo sapiens
  misc_RNA (1)...(19): siRNA sense strand
ggcccaaccucaaauaacc

SEQ ID NO: 1881964 - RNA, 19 nt, Homo sapiens
  misc_RNA (1)...(19): siRNA sense strand
aaauagacaagaagaacug

SEQ ID NO: 1881965 - RNA, 19 nt, Homo sapiens
  misc_RNA (1)...(19): siRNA sense strand
agagagccaucaccuucau

SEQ ID NO: 1881966 - RNA, 19 nt, Homo sapiens
  misc_RNA (1)...(19): siRNA sense strand
gaaguugcugauccagaau

SEQ ID NO: 1881967 - RNA, 19 nt, Homo sapiens
  misc_RNA (1)...(19): siRNA sense strand
uaucugggcccaaccucaa

SEQ ID NO: 1881968 - RNA, 19 nt, Homo sapiens
  misc_RNA (1)...(19): siRNA sense strand
gcuguguguuccgagauga

SEQ ID NO: 1881969 - RNA, 19 nt, Homo sapiens
  misc_RNA (1)...(19): siRNA sense strand
cgguggaccuggcguucuu

SEQ ID NO: 1881970 - RNA, 19 nt, Homo sapiens
  misc_RNA (1)...(19): siRNA sense strand
ucaagagagccaucaccuu

SEQ ID NO: 1881971 - RNA, 19 nt, Homo sapiens
  misc_RNA (1)...(19): siRNA sense strand
gggcuguugcaucgaguaa

SEQ ID NO: 1881972 - RNA, 19 nt, Homo sapiens
  misc_RNA (1)...(19): siRNA sense strand
ggccaucgucuuugucauc

SEQ ID NO: 1881973 - RNA, 19 nt, Homo sapiens
  misc_RNA (1)...(19): siRNA sense strand
cgugauggacuacuaugug

SEQ ID NO: 1881974 - RNA, 19 nt, Homo sapiens
  misc_RNA (1)...(19): siRNA sense strand
caccacgcccugaacaaga

SEQ ID NO: 1881975 - RNA, 19 nt, Homo sapiens
  misc_RNA (1)...(19): siRNA sense strand
guccaccuccugaagaaga

SEQ ID NO: 1881976 - RNA, 19 nt, Homo sapiens
  misc_RNA (1)...(19): siRNA sense strand
acaagaagaacugcugugu

SEQ ID NO: 1881977 - RNA, 19 nt, Homo sapiens
  misc_RNA (1)...(19): siRNA sense strand
acgcagaauugugaagugu

SEQ ID NO: 1881978 - RNA, 19 nt, Homo sapiens
  misc_RNA (1)...(19): siRNA sense strand
acacuucgggcacgcagaa

SEQ ID NO: 1881979 - RNA, 19 nt, Homo sapiens
  misc_RNA (1)...(19): siRNA sense strand
gaacgccugucaguugauu

SEQ ID NO: 1881980 - RNA, 19 nt, Homo sapiens
  misc_RNA (1)...(19): siRNA sense strand
aaccuuaaccgccuuauua

SEQ ID NO: 1881981 - RNA, 19 nt, Homo sapiens
  misc_RNA (1)...(19): siRNA sense strand
acaaugaggccaucuauga

SEQ ID NO: 1881982 - RNA, 19 nt, Homo sapiens
  misc_RNA (1)...(19): siRNA sense strand
caaccuacacuaaccuuaa

SEQ ID NO: 1881983 - RNA, 19 nt, Homo sapiens
  misc_RNA (1)...(19): siRNA sense strand
ugacagaauuccagaccaa

SEQ ID NO: 1881984 - RNA, 19 nt, Homo sapiens
  misc_RNA (1)...(19): siRNA sense strand
ccacaaguuugaccugaug

SEQ ID NO: 1881985 - RNA, 19 nt, Homo sapiens
  misc_RNA (1)...(19): siRNA sense strand
caucaccaaugcuugcuuu

SEQ ID NO: 1881986 - RNA, 19 nt, Homo sapiens
  misc_RNA (1)...(19): siRNA sense strand
cgagggcacuacaccauug

SEQ ID NO: 1881987 - RNA, 19 nt, Homo sapiens
  misc_RNA (1)...(19): siRNA sense strand
caucacugcuucccugaga

SEQ ID NO: 1881988 - RNA, 19 nt, Homo sapiens
  misc_RNA (1)...(19): siRNA sense strand
gauggagcccugaauguug

SEQ ID NO: 1881989 - RNA, 19 nt, Homo sapiens
  misc_RNA (1)...(19): siRNA sense strand
ggccaucuaugacaucugu

SEQ ID NO: 1881990 - RNA, 19 nt, Homo sapiens
  misc_RNA (1)...(19): siRNA sense strand
gaaggauuaugaggagguu

SEQ ID NO: 1881991 - RNA, 19 nt, Homo sapiens
  misc_RNA (1)...(19): siRNA sense strand
uagcagacaucaccaaugc

SEQ ID NO: 1881992 - RNA, 19 nt, Homo sapiens
  misc_RNA (1)...(19): siRNA sense strand
gcagacaucaccaaugcuu

SEQ ID NO: 1881993 - RNA, 19 nt, Homo sapiens
  misc_RNA (1)...(19): siRNA sense strand
cagauuguguccuccauca

SEQ ID NO: 1881994 - RNA, 19 nt, Homo sapiens
  misc_RNA (1)...(19): siRNA sense strand
ugacgugguucccaaagau

SEQ ID NO: 1881995 - RNA, 19 nt, Homo sapiens
  misc_RNA (1)...(19): siRNA sense strand
gauggaggaaggcgaguuu

SEQ ID NO: 1881996 - RNA, 19 nt, Homo sapiens
  misc_RNA (1)...(19): siRNA sense strand
gaacccacagucauugaug

SEQ ID NO: 1881997 - RNA, 19 nt, Homo sapiens
  misc_RNA (1)...(19): siRNA sense strand
ucaacaccuucuucaguga

SEQ ID NO: 1881998 - RNA, 19 nt, Homo sapiens
  misc_RNA (1)...(19): siRNA sense strand
ugaaggagagggugaggaa

SEQ ID NO: 1881999 - RNA, 19 nt, Homo sapiens
  misc_RNA (1)...(19): siRNA sense strand
uggaacgccugucaguuga

SEQ ID NO: 1882000 - RNA, 19 nt, Homo sapiens
  misc_RNA (1)...(19): siRNA sense strand
ccaagugacaagaccauug

SEQ ID NO: 1882001 - RNA, 19 nt, Homo sapiens
  misc_RNA (1)...(19): siRNA sense strand
gcucauggaacgccuguca

SEQ ID NO: 1882002 - RNA, 19 nt, Homo sapiens
  misc_RNA (1)...(19): siRNA sense strand
caccaaugcuugcuuugag

SEQ ID NO: 1882003 - RNA, 19 nt, Homo sapiens
  misc_RNA (1)...(19): siRNA sense strand
gggcuguguuuguagacuu

SEQ ID NO: 1882004 - RNA, 19 nt, Homo sapiens
  misc_RNA (1)...(19): siRNA sense strand
ugauugugccuucauggua

SEQ ID NO: 1882005 - RNA, 19 nt, Homo sapiens
  misc_RNA (1)...(19): siRNA sense strand
gaagaugcugccaauaacu

SEQ ID NO: 1882006 - RNA, 19 nt, Homo sapiens
  misc_RNA (1)...(19): siRNA sense strand
agauauggcugcccuugag

SEQ ID NO: 1882007 - RNA, 19 nt, Homo sapiens
  misc_RNA (1)...(19): siRNA sense strand
gugacgugguucccaaaga

SEQ ID NO: 1882008 - RNA, 19 nt, Homo sapiens
  misc_RNA (1)...(19): siRNA sense strand
cuuauuagccagauugugu

SEQ ID NO: 1882009 - RNA, 19 nt, Homo sapiens
  misc_RNA (1)...(19): siRNA sense strand
gugccuuuguucacuggua

SEQ ID NO: 1882010 - RNA, 19 nt, Homo sapiens
  misc_RNA (1)...(19): siRNA sense strand
cugcuucccugagauuuga

SEQ ID NO: 1882011 - RNA, 19 nt, Homo sapiens
  misc_RNA (1)...(19): siRNA sense strand
aagaugcugccaauaacua

SEQ ID NO: 1882012 - RNA, 19 nt, Homo sapiens
  misc_RNA (1)...(19): siRNA sense strand
ggagguugguguggauucu

SEQ ID NO: 1882013 - RNA, 19 nt, Homo sapiens
  misc_RNA (1)...(19): siRNA sense strand
gugcaucuccauccacguu

SEQ ID NO: 1882014 - RNA, 19 nt, Homo sapiens
  misc_RNA (1)...(19): siRNA sense strand
caaguuugaccugauguau

SEQ ID NO: 1882015 - RNA, 19 nt, Homo sapiens
  misc_RNA (1)...(19): siRNA sense strand
ggagcucuacugccuggaa

SEQ ID NO: 1882016 - RNA, 19 nt, Homo sapiens
  misc_RNA (1)...(19): siRNA sense strand
auguugaccugacagaauu

SEQ ID NO: 1882017 - RNA, 19 nt, Homo sapiens
  misc_RNA (1)...(19): siRNA sense strand
gaauguugaccugacagaa

SEQ ID NO: 1882018 - RNA, 19 nt, Homo sapiens
  misc_RNA (1)...(19): siRNA sense strand
ccaaccuacacuaaccuua

SEQ ID NO: 1882019 - RNA, 19 nt, Homo sapiens
  misc_RNA (1)...(19): siRNA sense strand
ugaggagguugguguggau

SEQ ID NO: 1882020 - RNA, 19 nt, Homo sapiens
  misc_RNA (1)...(19): siRNA sense strand
ggccagaugccaagugaca

SEQ ID NO: 1882021 - RNA, 19 nt, Homo sapiens
  misc_RNA (1)...(19): siRNA sense strand
caagugacaagaccauugg

SEQ ID NO: 1882022 - RNA, 19 nt, Homo sapiens
  misc_RNA (1)...(19): siRNA sense strand
agacaaugaggccaucuau

SEQ ID NO: 1882023 - RNA, 19 nt, Homo sapiens
  misc_RNA (1)...(19): siRNA sense strand
ugauggagcccugaauguu

SEQ ID NO: 1882024 - RNA, 19 nt, Homo sapiens
  misc_RNA (1)...(19): siRNA sense strand
ucacugcuucccugagauu

SEQ ID NO: 1882025 - RNA, 19 nt, Homo sapiens
  misc_RNA (1)...(19): siRNA sense strand
uaaccuuaaccgccuuauu

SEQ ID NO: 1882026 - RNA, 19 nt, Homo sapiens
  misc_RNA (1)...(19): siRNA sense strand
ugucguagaaaccucgaua

SEQ ID NO: 1882027 - RNA, 19 nt, Homo sapiens
  misc_RNA (1)...(19): siRNA sense strand
uguggauucuguugaagga

SEQ ID NO: 1882028 - RNA, 19 nt, Homo sapiens
  misc_RNA (1)...(19): siRNA sense strand
ucaccaaugcuugcuuuga

SEQ ID NO: 1882029 - RNA, 19 nt, Homo sapiens
  misc_RNA (1)...(19): siRNA sense strand
auggagcccugaauguuga

SEQ ID NO: 1882030 - RNA, 19 nt, Homo sapiens
  misc_RNA (1)...(19): siRNA sense strand
gacaaugaggccaucuaug

SEQ ID NO: 1882031 - RNA, 19 nt, Homo sapiens
  misc_RNA (1)...(19): siRNA sense strand
ugguguggauucuguugaa

SEQ ID NO: 1882032 - RNA, 19 nt, Homo sapiens
  misc_RNA (1)...(19): siRNA sense strand
ucccaaagaugucaaugcu

SEQ ID NO: 1882033 - RNA, 19 nt, Homo sapiens
  misc_RNA (1)...(19): siRNA sense strand
guagcagacaucaccaaug

SEQ ID NO: 1882034 - RNA, 19 nt, Homo sapiens
  misc_RNA (1)...(19): siRNA sense strand
gauauggcugcccuugaga

SEQ ID NO: 1882035 - RNA, 19 nt, Homo sapiens
  misc_RNA (1)...(19): siRNA sense strand
ggcuguguuuguagacuug

SEQ ID NO: 1882036 - RNA, 19 nt, Homo sapiens
  misc_RNA (1)...(19): siRNA sense strand
ggaacccacagucauugau

SEQ ID NO: 1882037 - RNA, 19 nt, Homo sapiens
  misc_RNA (1)...(19): siRNA sense strand
gccugucaguugauuaugg

SEQ ID NO: 1882038 - RNA, 19 nt, Homo sapiens
  misc_RNA (1)...(19): siRNA sense strand
gccuggaccacaaguuuga

SEQ ID NO: 1882039 - RNA, 19 nt, Homo sapiens
  misc_RNA (1)...(19): siRNA sense strand
uuccacagcuguaguugag

SEQ ID NO: 1882040 - RNA, 19 nt, Homo sapiens
  misc_RNA (1)...(19): siRNA sense strand
aguuugaccugauguaugc

SEQ ID NO: 1882041 - RNA, 19 nt, Homo sapiens
  misc_RNA (1)...(19): siRNA sense strand
ucgccuggaccacaaguuu

SEQ ID NO: 1882042 - RNA, 19 nt, Homo sapiens
  misc_RNA (1)...(19): siRNA sense strand
gagcgcccaaccuacacua

SEQ ID NO: 1882043 - RNA, 19 nt, Homo sapiens
  misc_RNA (1)...(19): siRNA sense strand
cuucaacaccuucuucagu

SEQ ID NO: 1882044 - RNA, 19 nt, Homo sapiens
  misc_RNA (1)...(19): siRNA sense strand
acuuggaucuugggccuuu

SEQ ID NO: 1882045 - RNA, 19 nt, Homo sapiens
  misc_RNA (1)...(19): siRNA sense strand
gcucuugcagcguguuuca

SEQ ID NO: 1882046 - RNA, 19 nt, Homo sapiens
  misc_RNA (1)...(19): siRNA sense strand
ggaagugggucucccgaaa

SEQ ID NO: 1882047 - RNA, 19 nt, Homo sapiens
  misc_RNA (1)...(19): siRNA sense strand
gaucuucggugaaucagaa

SEQ ID NO: 1882048 - RNA, 19 nt, Homo sapiens
  misc_RNA (1)...(19): siRNA sense strand
gaggagaacuguggaguga

SEQ ID NO: 1882049 - RNA, 19 nt, Homo sapiens
  misc_RNA (1)...(19): siRNA sense strand
caucagcgcuuccagagaa

SEQ ID NO: 1882050 - RNA, 19 nt, Homo sapiens
  misc_RNA (1)...(19): siRNA sense strand
gcacugagcucuccuaccu

SEQ ID NO: 1882051 - RNA, 19 nt, Homo sapiens
  misc_RNA (1)...(19): siRNA sense strand
ccgcagcccucauccuuua

SEQ ID NO: 1882052 - RNA, 19 nt, Homo sapiens
  misc_RNA (1)...(19): siRNA sense strand
gcagcaacgucaccaaaga

SEQ ID NO: 1882053 - RNA, 19 nt, Homo sapiens
  misc_RNA (1)...(19): siRNA sense strand
ccaagcagaucaagcaaga

SEQ ID NO: 1882054 - RNA, 19 nt, Homo sapiens
  misc_RNA (1)...(19): siRNA sense strand
gcaggagccuuugauguau

SEQ ID NO: 1882055 - RNA, 19 nt, Homo sapiens
  misc_RNA (1)...(19): siRNA sense strand
ggagaacuguggagugauc

SEQ ID NO: 1882056 - RNA, 19 nt, Homo sapiens
  misc_RNA (1)...(19): siRNA sense strand
cagaggagccgcugaacua

SEQ ID NO: 1882057 - RNA, 19 nt, Homo sapiens
  misc_RNA (1)...(19): siRNA sense strand
gaugggcgcuucagaugga

SEQ ID NO: 1882058 - RNA, 19 nt, Homo sapiens
  misc_RNA (1)...(19): siRNA sense strand
gggagcaccugcagagcua

SEQ ID NO: 1882059 - RNA, 19 nt, Homo sapiens
  misc_RNA (1)...(19): siRNA sense strand
acacacagcuggacuggau

SEQ ID NO: 1882060 - RNA, 19 nt, Homo sapiens
  misc_RNA (1)...(19): siRNA sense strand
gcaucgcgcugcccuaugu

SEQ ID NO: 1882061 - RNA, 19 nt, Homo sapiens
  misc_RNA (1)...(19): siRNA sense strand
gacagcugcuaccaguuua

SEQ ID NO: 1882062 - RNA, 19 nt, Homo sapiens
  misc_RNA (1)...(19): siRNA sense strand
uggaugagauggagaaugu

SEQ ID NO: 1882063 - RNA, 19 nt, Homo sapiens
  misc_RNA (1)...(19): siRNA sense strand
aaacuccgguauugcuaua

SEQ ID NO: 1882064 - RNA, 19 nt, Homo sapiens
  misc_RNA (1)...(19): siRNA sense strand
gagaagaccaagugaccua

SEQ ID NO: 1882065 - RNA, 19 nt, Homo sapiens
  misc_RNA (1)...(19): siRNA sense strand
ugaaacugcagaugaauuu

SEQ ID NO: 1882066 - RNA, 19 nt, Homo sapiens
  misc_RNA (1)...(19): siRNA sense strand
acaccaaacuccgguauug

SEQ ID NO: 1882067 - RNA, 19 nt, Homo sapiens
  misc_RNA (1)...(19): siRNA sense strand
caacagcugcuacuggauu

SEQ ID NO: 1882068 - RNA, 19 nt, Homo sapiens
  misc_RNA (1)...(19): siRNA sense strand
ccaacaugcucaacaagau

SEQ ID NO: 1882069 - RNA, 19 nt, Homo sapiens
  misc_RNA (1)...(19): siRNA sense strand
ugacagcugcuaccaguuu

SEQ ID NO: 1882070 - RNA, 19 nt, Homo sapiens
  misc_RNA (1)...(19): siRNA sense strand
gauuugaaacugcagauga

SEQ ID NO: 1882071 - RNA, 19 nt, Homo sapiens
  misc_RNA (1)...(19): siRNA sense strand
ggagacccauggcuucauc

SEQ ID NO: 1882072 - RNA, 19 nt, Homo sapiens
  misc_RNA (1)...(19): siRNA sense strand
gcacagccaggcagagcua

SEQ ID NO: 1882073 - RNA, 19 nt, Homo sapiens
  misc_RNA (1)...(19): siRNA sense strand
gcuacuggauucagagcaa

SEQ ID NO: 1882074 - RNA, 19 nt, Homo sapiens
  misc_RNA (1)...(19): siRNA sense strand
gcacgacgacgacgacauc

SEQ ID NO: 1882075 - RNA, 19 nt, Homo sapiens
  misc_RNA (1)...(19): siRNA sense strand
aaugugaccuuugaccuuu

SEQ ID NO: 1882076 - RNA, 19 nt, Homo sapiens
  misc_RNA (1)...(19): siRNA sense strand
gcuacuggcugggagaaga

SEQ ID NO: 1882077 - RNA, 19 nt, Homo sapiens
  misc_RNA (1)...(19): siRNA sense strand
gagcaggagccuuugaugu

SEQ ID NO: 1882078 - RNA, 19 nt, Homo sapiens
  misc_RNA (1)...(19): siRNA sense strand
caagaucuucggugaauca

SEQ ID NO: 1882079 - RNA, 19 nt, Homo sapiens
  misc_RNA (1)...(19): siRNA sense strand
gaaaccggcuauucaaccu

SEQ ID NO: 1882080 - RNA, 19 nt, Homo sapiens
  misc_RNA (1)...(19): siRNA sense strand
ggauccaguuccucaacaa

SEQ ID NO: 1882081 - RNA, 19 nt, Homo sapiens
  misc_RNA (1)...(19): siRNA sense strand
gcacugaccauggcucuca

SEQ ID NO: 1882082 - RNA, 19 nt, Homo sapiens
  misc_RNA (1)...(19): siRNA sense strand
ccagacaggugggccaaug

SEQ ID NO: 1882083 - RNA, 19 nt, Homo sapiens
  misc_RNA (1)...(19): siRNA sense strand
ucagcagccucaucuacaa

SEQ ID NO: 1882084 - RNA, 19 nt, Homo sapiens
  misc_RNA (1)...(19): siRNA sense strand
acaaggaccagcugacuga

SEQ ID NO: 1882085 - RNA, 19 nt, Homo sapiens
  misc_RNA (1)...(19): siRNA sense strand
cagccagccugcccaaugu

SEQ ID NO: 1882086 - RNA, 19 nt, Homo sapiens
  misc_RNA (1)...(19): siRNA sense strand
caacaagaucuucggugaa

SEQ ID NO: 1882087 - RNA, 19 nt, Homo sapiens
  misc_RNA (1)...(19): siRNA sense strand
cagagcggcugcaggacaa

SEQ ID NO: 1882088 - RNA, 19 nt, Homo sapiens
  misc_RNA (1)...(19): siRNA sense strand
uggcggagcuggaauucau

SEQ ID NO: 1882089 - RNA, 19 nt, Homo sapiens
  misc_RNA (1)...(19): siRNA sense strand
ugagauggagaauguguuu

SEQ ID NO: 1882090 - RNA, 19 nt, Homo sapiens
  misc_RNA (1)...(19): siRNA sense strand
gacaagaagugcguguaca

SEQ ID NO: 1882091 - RNA, 19 nt, Homo sapiens
  misc_RNA (1)...(19): siRNA sense strand
aacaagaucuucggugaau

SEQ ID NO: 1882092 - RNA, 19 nt, Homo sapiens
  misc_RNA (1)...(19): siRNA sense strand
aaucuucgcuggcauuguc

SEQ ID NO: 1882093 - RNA, 19 nt, Homo sapiens
  misc_RNA (1)...(19): siRNA sense strand
ggacaagaagugcguguac

SEQ ID NO: 1882094 - RNA, 19 nt, Homo sapiens
  misc_RNA (1)...(19): siRNA sense strand
ccaccgaggccacugagaa

SEQ ID NO: 1882095 - RNA, 19 nt, Homo sapiens
  misc_RNA (1)...(19): siRNA sense strand
gcgaugggcgcuucagaug

SEQ ID NO: 1882096 - RNA, 19 nt, Homo sapiens
  misc_RNA (1)...(19): siRNA sense strand
gcugugaacuacuccaacu

SEQ ID NO: 1882097 - RNA, 19 nt, Homo sapiens
  misc_RNA (1)...(19): siRNA sense strand
gcgcagcaacgucaccaaa

SEQ ID NO: 1882098 - RNA, 19 nt, Homo sapiens
  misc_RNA (1)...(19): siRNA sense strand
gaagugcguguacaugaca

SEQ ID NO: 1882099 - RNA, 19 nt, Homo sapiens
  misc_RNA (1)...(19): siRNA sense strand
gaagaacauccugguguca

SEQ ID NO: 1882100 - RNA, 19 nt, Homo sapiens
  misc_RNA (1)...(19): siRNA sense strand
gaccgcagcccucauccuu

SEQ ID NO: 1882101 - RNA, 19 nt, Homo sapiens
  misc_RNA (1)...(19): siRNA sense strand
agcaggagccuuugaugua

SEQ ID NO: 1882102 - RNA, 19 nt, Homo sapiens
  misc_RNA (1)...(19): siRNA sense strand
caacgucuuccucaucuuc

SEQ ID NO: 1882103 - RNA, 19 nt, Homo sapiens
  misc_RNA (1)...(19): siRNA sense strand
ggacaccaaacuccgguau

SEQ ID NO: 1882104 - RNA, 19 nt, Homo sapiens
  misc_RNA (1)...(19): siRNA sense strand
ggguggagcaggagccuuu

SEQ ID NO: 1882105 - RNA, 19 nt, Homo sapiens
  misc_RNA (1)...(19): siRNA sense strand
gcaccauccccuucaaaua

SEQ ID NO: 1882106 - RNA, 19 nt, Homo sapiens
  misc_RNA (1)...(19): siRNA sense strand
gaugagauggagaaugugu

SEQ ID NO: 1882107 - RNA, 19 nt, Homo sapiens
  misc_RNA (1)...(19): siRNA sense strand
caaugugaccuuugaccuu

SEQ ID NO: 1882108 - RNA, 19 nt, Homo sapiens
  misc_RNA (1)...(19): siRNA sense strand
ugacagccuugcccuacau

SEQ ID NO: 1882109 - RNA, 19 nt, Homo sapiens
  misc_RNA (1)...(19): siRNA sense strand
gcauggcggagcuggaauu

SEQ ID NO: 1882110 - RNA, 19 nt, Homo sapiens
  misc_RNA (1)...(19): siRNA sense strand
ucaccaagcagaucaagca

SEQ ID NO: 1882111 - RNA, 19 nt, Homo sapiens
  misc_RNA (1)...(19): siRNA sense strand
agaacauccuggugucaga

SEQ ID NO: 1882112 - RNA, 19 nt, Homo sapiens
  misc_RNA (1)...(19): siRNA sense strand
aagaagugcguguacauga

SEQ ID NO: 1882113 - RNA, 19 nt, Homo sapiens
  misc_RNA (1)...(19): siRNA sense strand
gccaacaugcucaacaaga

SEQ ID NO: 1882114 - RNA, 19 nt, Homo sapiens
  misc_RNA (1)...(19): siRNA sense strand
ugugggaggugaagaacug

SEQ ID NO: 1882115 - RNA, 19 nt, Homo sapiens
  misc_RNA (1)...(19): siRNA sense strand
gaccuuugaccuuuggauu

SEQ ID NO: 1882116 - RNA, 19 nt, Homo sapiens
  misc_RNA (1)...(19): siRNA sense strand
cagcaacgucaccaaagaa

SEQ ID NO: 1882117 - RNA, 19 nt, Homo sapiens
  misc_RNA (1)...(19): siRNA sense strand
uggccaacaugcucaacaa

SEQ ID NO: 1882118 - RNA, 19 nt, Homo sapiens
  misc_RNA (1)...(19): siRNA sense strand
gaacuucaaccccaaagga

SEQ ID NO: 1882119 - RNA, 19 nt, Homo sapiens
  misc_RNA (1)...(19): siRNA sense strand
caagaagugcguguacaug

SEQ ID NO: 1882120 - RNA, 19 nt, Homo sapiens
  misc_RNA (1)...(19): siRNA sense strand
ggacaaggaccagcugacu

SEQ ID NO: 1882121 - RNA, 19 nt, Homo sapiens
  misc_RNA (1)...(19): siRNA sense strand
caggagccuuugauguaug

SEQ ID NO: 1882122 - RNA, 19 nt, Homo sapiens
  misc_RNA (1)...(19): siRNA sense strand
ccgaguacaaguucuuuga

SEQ ID NO: 1882123 - RNA, 19 nt, Homo sapiens
  misc_RNA (1)...(19): siRNA sense strand
caacaugcucaacaagauc

SEQ ID NO: 1882124 - RNA, 19 nt, Homo sapiens
  misc_RNA (1)...(19): siRNA sense strand
ccaaacuccgguauugcua

SEQ ID NO: 1882125 - RNA, 19 nt, Homo sapiens
  misc_RNA (1)...(19): siRNA sense strand
gcugggagaagaccaagug

SEQ ID NO: 1882126 - RNA, 19 nt, Homo sapiens
  misc_RNA (1)...(19): siRNA sense strand
ccuuugagcccaacaacuu

SEQ ID NO: 1882127 - RNA, 19 nt, Homo sapiens
  misc_RNA (1)...(19): siRNA sense strand
gcagcuggcaggaguccaa

SEQ ID NO: 1882128 - RNA, 19 nt, Homo sapiens
  misc_RNA (1)...(19): siRNA sense strand
gaagugggucucccgaaac

SEQ ID NO: 1882129 - RNA, 19 nt, Homo sapiens
  misc_RNA (1)...(19): siRNA sense strand
cugcuauucuuuccacaug

SEQ ID NO: 1882130 - RNA, 19 nt, Homo sapiens
  misc_RNA (1)...(19): siRNA sense strand
ggagcaggagccuuugaug

SEQ ID NO: 1882131 - RNA, 19 nt, Homo sapiens
  misc_RNA (1)...(19): siRNA sense strand
ggaggccgaguacaaguuc

SEQ ID NO: 1882132 - RNA, 19 nt, Homo sapiens
  misc_RNA (1)...(19): siRNA sense strand
gcacuuuguggccaacaug

SEQ ID NO: 1882133 - RNA, 19 nt, Homo sapiens
  misc_RNA (1)...(19): siRNA sense strand
ccucaaggccgacgggaau

SEQ ID NO: 1882134 - RNA, 19 nt, Homo sapiens
  misc_RNA (1)...(19): siRNA sense strand
gcagcgaggaggaccuaug

SEQ ID NO: 1882135 - RNA, 19 nt, Homo sapiens
  misc_RNA (1)...(19): siRNA sense strand
gauggagaauguguuuguc

SEQ ID NO: 1882136 - RNA, 19 nt, Homo sapiens
  misc_RNA (1)...(19): siRNA sense strand
ugcccaaugugaccuuuga

SEQ ID NO: 1882137 - RNA, 19 nt, Homo sapiens
  misc_RNA (1)...(19): siRNA sense strand
ggaucggcuugaaugacuu

SEQ ID NO: 1882138 - RNA, 19 nt, Homo sapiens
  misc_RNA (1)...(19): siRNA sense strand
caacgucaccaaagaaacg

SEQ ID NO: 1882139 - RNA, 19 nt, Homo sapiens
  misc_RNA (1)...(19): siRNA sense strand
gcaccagcaacauauccaa

SEQ ID NO: 1882140 - RNA, 19 nt, Homo sapiens
  misc_RNA (1)...(19): siRNA sense strand
aggguucucuuaccacaau

SEQ ID NO: 1882141 - RNA, 19 nt, Homo sapiens
  misc_RNA (1)...(19): siRNA sense strand
caaacuccgguauugcuau

SEQ ID NO: 1882142 - RNA, 19 nt, Homo sapiens
  misc_RNA (1)...(19): siRNA sense strand
caacugggagggcgaguac

SEQ ID NO: 1882143 - RNA, 19 nt, Homo sapiens
  misc_RNA (1)...(19): siRNA sense strand
gaagaccaagugaccuaca

SEQ ID NO: 1882144 - RNA, 19 nt, Homo sapiens
  misc_RNA (1)...(19): siRNA sense strand
gcuggcaggaguccaagaa

SEQ ID NO: 1882145 - RNA, 19 nt, Homo sapiens
  misc_RNA (1)...(19): siRNA sense strand
ccaugggugucgucugcaa

SEQ ID NO: 1882146 - RNA, 19 nt, Homo sapiens
  misc_RNA (1)...(19): siRNA sense strand
agagugagcugcacaaguu

SEQ ID NO: 1882147 - RNA, 19 nt, Homo sapiens
  misc_RNA (1)...(19): siRNA sense strand
ccaguucaauggauacuaa

SEQ ID NO: 1882148 - RNA, 19 nt, Homo sapiens
  misc_RNA (1)...(19): siRNA sense strand
ccucagcgcuuaccauuau

SEQ ID NO: 1882149 - RNA, 19 nt, Homo sapiens
  misc_RNA (1)...(19): siRNA sense strand
gggacgaccucaaggauga

SEQ ID NO: 1882150 - RNA, 19 nt, Homo sapiens
  misc_RNA (1)...(19): siRNA sense strand
gcaucaaccucuuccucua

SEQ ID NO: 1882151 - RNA, 19 nt, Homo sapiens
  misc_RNA (1)...(19): siRNA sense strand
ucagaagcaucaagaccua

SEQ ID NO: 1882152 - RNA, 19 nt, Homo sapiens
  misc_RNA (1)...(19): siRNA sense strand
acaaccagcugaacuacaa

SEQ ID NO: 1882153 - RNA, 19 nt, Homo sapiens
  misc_RNA (1)...(19): siRNA sense strand
ugaagauggucuccuuuga

SEQ ID NO: 1882154 - RNA, 19 nt, Homo sapiens
  misc_RNA (1)...(19): siRNA sense strand
caagagcagugcagaggau

SEQ ID NO: 1882155 - RNA, 19 nt, Homo sapiens
  misc_RNA (1)...(19): siRNA sense strand
gcaguuccaugagagcaaa

SEQ ID NO: 1882156 - RNA, 19 nt, Homo sapiens
  misc_RNA (1)...(19): siRNA sense strand
guaccuacuucuccacuca

SEQ ID NO: 1882157 - RNA, 19 nt, Homo sapiens
  misc_RNA (1)...(19): siRNA sense strand
gaauucagaagcaucaaga

SEQ ID NO: 1882158 - RNA, 19 nt, Homo sapiens
  misc_RNA (1)...(19): siRNA sense strand
ccaacaaccagcugaacua

SEQ ID NO: 1882159 - RNA, 19 nt, Homo sapiens
  misc_RNA (1)...(19): siRNA sense strand
ggaagaaggaauucagaag

SEQ ID NO: 1882160 - RNA, 19 nt, Homo sapiens
  misc_RNA (1)...(19): siRNA sense strand
ccacccagcucucccaucu

SEQ ID NO: 1882161 - RNA, 19 nt, Homo sapiens
  misc_RNA (1)...(19): siRNA sense strand
gcaaggccucgacucauga

SEQ ID NO: 1882162 - RNA, 19 nt, Homo sapiens
  misc_RNA (1)...(19): siRNA sense strand
guucaaaagucucauguga

SEQ ID NO: 1882163 - RNA, 19 nt, Homo sapiens
  misc_RNA (1)...(19): siRNA sense strand
gaagauggucuccuuugag

SEQ ID NO: 1882164 - RNA, 19 nt, Homo sapiens
  misc_RNA (1)...(19): siRNA sense strand
ggucaguggaugccuauga

SEQ ID NO: 1882165 - RNA, 19 nt, Homo sapiens
  misc_RNA (1)...(19): siRNA sense strand
gaagcccaguucaauggau

SEQ ID NO: 1882166 - RNA, 19 nt, Homo sapiens
  misc_RNA (1)...(19): siRNA sense strand
gauuccggcugauccaguu

SEQ ID NO: 1882167 - RNA, 19 nt, Homo sapiens
  misc_RNA (1)...(19): siRNA sense strand
gcugggcacugcauacaag

SEQ ID NO: 1882168 - RNA, 19 nt, Homo sapiens
  misc_RNA (1)...(19): siRNA sense strand
aagaaggaauucagaagca

SEQ ID NO: 1882169 - RNA, 19 nt, Homo sapiens
  misc_RNA (1)...(19): siRNA sense strand
aggaugacguggaucugua

SEQ ID NO: 1882170 - RNA, 19 nt, Homo sapiens
  misc_RNA (1)...(19): siRNA sense strand
caugagagcaaaguggaua

SEQ ID NO: 1882171 - RNA, 19 nt, Homo sapiens
  misc_RNA (1)...(19): siRNA sense strand
acuccgagcuggacauugu

SEQ ID NO: 1882172 - RNA, 19 nt, Homo sapiens
  misc_RNA (1)...(19): siRNA sense strand
aagcccaguucaauggaua

SEQ ID NO: 1882173 - RNA, 19 nt, Homo sapiens
  misc_RNA (1)...(19): siRNA sense strand
uggccaaagucgaguguga

SEQ ID NO: 1882174 - RNA, 19 nt, Homo sapiens
  misc_RNA (1)...(19): siRNA sense strand
ugacguggaucuguacaca

SEQ ID NO: 1882175 - RNA, 19 nt, Homo sapiens
  misc_RNA (1)...(19): siRNA sense strand
gggaagcccaguucaaugg

SEQ ID NO: 1882176 - RNA, 19 nt, Homo sapiens
  misc_RNA (1)...(19): siRNA sense strand
acaaguucaugcccaacaa

SEQ ID NO: 1882177 - RNA, 19 nt, Homo sapiens
  misc_RNA (1)...(19): siRNA sense strand
caagucgacauuacuggaa

SEQ ID NO: 1882178 - RNA, 19 nt, Homo sapiens
  misc_RNA (1)...(19): siRNA sense strand
ggucuccuuugagcucuuu

SEQ ID NO: 1882179 - RNA, 19 nt, Homo sapiens
  misc_RNA (1)...(19): siRNA sense strand
gugaagauggucuccuuug

SEQ ID NO: 1882180 - RNA, 19 nt, Homo sapiens
  misc_RNA (1)...(19): siRNA sense strand
gcuagaaauccacucacaa

SEQ ID NO: 1882181 - RNA, 19 nt, Homo sapiens
  misc_RNA (1)...(19): siRNA sense strand
cuagaaauccacucacaag

SEQ ID NO: 1882182 - RNA, 19 nt, Homo sapiens
  misc_RNA (1)...(19): siRNA sense strand
gauguguggcugcucagaa

SEQ ID NO: 1882183 - RNA, 19 nt, Homo sapiens
  misc_RNA (1)...(19): siRNA sense strand
gaaguacccaggccagacu

SEQ ID NO: 1882184 - RNA, 19 nt, Homo sapiens
  misc_RNA (1)...(19): siRNA sense strand
ggccaaggacuacuacaag

SEQ ID NO: 1882185 - RNA, 19 nt, Homo sapiens
  misc_RNA (1)...(19): siRNA sense strand
agcaaggccucgacucaug

SEQ ID NO: 1882186 - RNA, 19 nt, Homo sapiens
  misc_RNA (1)...(19): siRNA sense strand
ccagcaaggccucgacuca

SEQ ID NO: 1882187 - RNA, 19 nt, Homo sapiens
  misc_RNA (1)...(19): siRNA sense strand
gcucucccaucucguguac

SEQ ID NO: 1882188 - RNA, 19 nt, Homo sapiens
  misc_RNA (1)...(19): siRNA sense strand
ggaauucagaagcaucaag

SEQ ID NO: 1882189 - RNA, 19 nt, Homo sapiens
  misc_RNA (1)...(19): siRNA sense strand
gaugcuagaaauccacuca

SEQ ID NO: 1882190 - RNA, 19 nt, Homo sapiens
  misc_RNA (1)...(19): siRNA sense strand
ggaagcccaguucaaugga

SEQ ID NO: 1882191 - RNA, 19 nt, Homo sapiens
  misc_RNA (1)...(19): siRNA sense strand
caccuucacuccaaaucca

SEQ ID NO: 1882192 - RNA, 19 nt, Homo sapiens
  misc_RNA (1)...(19): siRNA sense strand
gcugcgcgguaccuacuuc

SEQ ID NO: 1882193 - RNA, 19 nt, Homo sapiens
  misc_RNA (1)...(19): siRNA sense strand
gagcugggcacugcauaca

SEQ ID NO: 1882194 - RNA, 19 nt, Homo sapiens
  misc_RNA (1)...(19): siRNA sense strand
ggugaagauggucuccuuu

SEQ ID NO: 1882195 - RNA, 19 nt, Homo sapiens
  misc_RNA (1)...(19): siRNA sense strand
auguguggcugcucagaaa

SEQ ID NO: 1882196 - RNA, 19 nt, Homo sapiens
  misc_RNA (1)...(19): siRNA sense strand
gagcagugcagaggaugug

SEQ ID NO: 1882197 - RNA, 19 nt, Homo sapiens
  misc_RNA (1)...(19): siRNA sense strand
uacgugcaguuccaugaga

SEQ ID NO: 1882198 - RNA, 19 nt, Homo sapiens
  misc_RNA (1)...(19): siRNA sense strand
acgccugccucagcgcuua

SEQ ID NO: 1882199 - RNA, 19 nt, Homo sapiens
  misc_RNA (1)...(19): siRNA sense strand
caacaaccagcugaacuac

SEQ ID NO: 1882200 - RNA, 19 nt, Homo sapiens
  misc_RNA (1)...(19): siRNA sense strand
cggcugauccaguucuaug

SEQ ID NO: 1882201 - RNA, 19 nt, Homo sapiens
  misc_RNA (1)...(19): siRNA sense strand
uaugaccccugcuacaaaa

SEQ ID NO: 1882202 - RNA, 19 nt, Homo sapiens
  misc_RNA (1)...(19): siRNA sense strand
ucccgcaccuucacuccaa

SEQ ID NO: 1882203 - RNA, 19 nt, Homo sapiens
  misc_RNA (1)...(19): siRNA sense strand
gaggucaguggaugccuau

SEQ ID NO: 1882204 - RNA, 19 nt, Homo sapiens
  misc_RNA (1)...(19): siRNA sense strand
ggacucuccucuuuauuua

SEQ ID NO: 1882205 - RNA, 19 nt, Homo sapiens
  misc_RNA (1)...(19): siRNA sense strand
gaucaaagguagauucuuc

SEQ ID NO: 1882206 - RNA, 19 nt, Homo sapiens
  misc_RNA (1)...(19): siRNA sense strand
aaagguagauucuucauga

SEQ ID NO: 1882207 - RNA, 19 nt, Homo sapiens
  misc_RNA (1)...(19): siRNA sense strand
ccaagggacucuccucuuu

SEQ ID NO: 1882208 - RNA, 19 nt, Homo sapiens
  misc_RNA (1)...(19): siRNA sense strand
caacaugaguucccugguu

SEQ ID NO: 1882209 - RNA, 19 nt, Homo sapiens
  misc_RNA (1)...(19): siRNA sense strand
gcacugacacaacaauuaa

SEQ ID NO: 1882210 - RNA, 19 nt, Homo sapiens
  misc_RNA (1)...(19): siRNA sense strand
ggaugcagcugagaaaguu

SEQ ID NO: 1882211 - RNA, 19 nt, Homo sapiens
  misc_RNA (1)...(19): siRNA sense strand
ucacacauccuuugccuuu

SEQ ID NO: 1882212 - RNA, 19 nt, Homo sapiens
  misc_RNA (1)...(19): siRNA sense strand
gcccugaacugcagauugu

SEQ ID NO: 1882213 - RNA, 19 nt, Homo sapiens
  misc_RNA (1)...(19): siRNA sense strand
gggacucuccucuuuauuu

SEQ ID NO: 1882214 - RNA, 19 nt, Homo sapiens
  misc_RNA (1)...(19): siRNA sense strand
ugacuucagugacgaucua

SEQ ID NO: 1882215 - RNA, 19 nt, Homo sapiens
  misc_RNA (1)...(19): siRNA sense strand
caagggacucuccucuuua

SEQ ID NO: 1882216 - RNA, 19 nt, Homo sapiens
  misc_RNA (1)...(19): siRNA sense strand
acacauccuuugccuuuau

SEQ ID NO: 1882217 - RNA, 19 nt, Homo sapiens
  misc_RNA (1)...(19): siRNA sense strand
ggugugcccugcaguuuua

SEQ ID NO: 1882218 - RNA, 19 nt, Homo sapiens
  misc_RNA (1)...(19): siRNA sense strand
gguugauugucuugucaua

SEQ ID NO: 1882219 - RNA, 19 nt, Homo sapiens
  misc_RNA (1)...(19): siRNA sense strand
uuguagaccuuugcuauuu

SEQ ID NO: 1882220 - RNA, 19 nt, Homo sapiens
  misc_RNA (1)...(19): siRNA sense strand
caucaucaucuccuacuuu

SEQ ID NO: 1882221 - RNA, 19 nt, Homo sapiens
  misc_RNA (1)...(19): siRNA sense strand
aaacuauccugcacugaca

SEQ ID NO: 1882222 - RNA, 19 nt, Homo sapiens
  misc_RNA (1)...(19): siRNA sense strand
ucuguaacccuuuauugua

SEQ ID NO: 1882223 - RNA, 19 nt, Homo sapiens
  misc_RNA (1)...(19): siRNA sense strand
uuucugacauuguaugcua

SEQ ID NO: 1882224 - RNA, 19 nt, Homo sapiens
  misc_RNA (1)...(19): siRNA sense strand
cgccaucuguaacccuuua

SEQ ID NO: 1882225 - RNA, 19 nt, Homo sapiens
  misc_RNA (1)...(19): siRNA sense strand
gauagggaacauuggauug

SEQ ID NO: 1882226 - RNA, 19 nt, Homo sapiens
  misc_RNA (1)...(19): siRNA sense strand
uaaaggaugcagcugagaa

SEQ ID NO: 1882227 - RNA, 19 nt, Homo sapiens
  misc_RNA (1)...(19): siRNA sense strand
guuggucacugaguuuauu

SEQ ID NO: 1882228 - RNA, 19 nt, Homo sapiens
  misc_RNA (1)...(19): siRNA sense strand
aagggacucuccucuuuau

SEQ ID NO: 1882229 - RNA, 19 nt, Homo sapiens
  misc_RNA (1)...(19): siRNA sense strand
acacguuggucacugaguu

SEQ ID NO: 1882230 - RNA, 19 nt, Homo sapiens
  misc_RNA (1)...(19): siRNA sense strand
gcagauacagaauccuuca

SEQ ID NO: 1882231 - RNA, 19 nt, Homo sapiens
  misc_RNA (1)...(19): siRNA sense strand
uaagaucaaagguagauuc

SEQ ID NO: 1882232 - RNA, 19 nt, Homo sapiens
  misc_RNA (1)...(19): siRNA sense strand
uuagcaaccuaucauuugu

SEQ ID NO: 1882233 - RNA, 19 nt, Homo sapiens
  misc_RNA (1)...(19): siRNA sense strand
gcuaugucgccaucuguaa

SEQ ID NO: 1882234 - RNA, 19 nt, Homo sapiens
  misc_RNA (1)...(19): siRNA sense strand
caaccuaucauuuguagac

SEQ ID NO: 1882235 - RNA, 19 nt, Homo sapiens
  misc_RNA (1)...(19): siRNA sense strand
gcgguugauugucuuguca

SEQ ID NO: 1882236 - RNA, 19 nt, Homo sapiens
  misc_RNA (1)...(19): siRNA sense strand
gcagcucaguggaaaucau

SEQ ID NO: 1882237 - RNA, 19 nt, Homo sapiens
  misc_RNA (1)...(19): siRNA sense strand
uaucauuuguagaccuuug

SEQ ID NO: 1882238 - RNA, 19 nt, Homo sapiens
  misc_RNA (1)...(19): siRNA sense strand
ggaauuuacagauagaaac

SEQ ID NO: 1882239 - RNA, 19 nt, Homo sapiens
  misc_RNA (1)...(19): siRNA sense strand
gucacugaguuuauucuau

SEQ ID NO: 1882240 - RNA, 19 nt, Homo sapiens
  misc_RNA (1)...(19): siRNA sense strand
caucuguaacccuuuauug

SEQ ID NO: 1882241 - RNA, 19 nt, Homo sapiens
  misc_RNA (1)...(19): siRNA sense strand
guagaccuuugcuauuucu

SEQ ID NO: 1882242 - RNA, 19 nt, Homo sapiens
  misc_RNA (1)...(19): siRNA sense strand
aaaggaugcagcugagaaa

SEQ ID NO: 1882243 - RNA, 19 nt, Homo sapiens
  misc_RNA (1)...(19): siRNA sense strand
cuuagcaaccuaucauuug

SEQ ID NO: 1882244 - RNA, 19 nt, Homo sapiens
  misc_RNA (1)...(19): siRNA sense strand
cggcccagcuaccuguauu

SEQ ID NO: 1882245 - RNA, 19 nt, Homo sapiens
  misc_RNA (1)...(19): siRNA sense strand
cacacauccuuugccuuua

SEQ ID NO: 1882246 - RNA, 19 nt, Homo sapiens
  misc_RNA (1)...(19): siRNA sense strand
uguaugcgguugauugucu

SEQ ID NO: 1882247 - RNA, 19 nt, Homo sapiens
  misc_RNA (1)...(19): siRNA sense strand
ggucacugaguuuauucua

SEQ ID NO: 1882248 - RNA, 19 nt, Homo sapiens
  misc_RNA (1)...(19): siRNA sense strand
caaagguagauucuucaug

SEQ ID NO: 1882249 - RNA, 19 nt, Homo sapiens
  misc_RNA (1)...(19): siRNA sense strand
ugcacugacacaacaauua

SEQ ID NO: 1882250 - RNA, 19 nt, Homo sapiens
  misc_RNA (1)...(19): siRNA sense strand
uagcaaccuaucauuugua

SEQ ID NO: 1882251 - RNA, 19 nt, Homo sapiens
  misc_RNA (1)...(19): siRNA sense strand
ccuuagcaaccuaucauuu

SEQ ID NO: 1882252 - RNA, 19 nt, Homo sapiens
  misc_RNA (1)...(19): siRNA sense strand
cagcucaguggaaaucauu

SEQ ID NO: 1882253 - RNA, 19 nt, Homo sapiens
  misc_RNA (1)...(19): siRNA sense strand
uccuuugccuuuauucuga

SEQ ID NO: 1882254 - RNA, 19 nt, Homo sapiens
  misc_RNA (1)...(19): siRNA sense strand
cacauccuuugccuuuauu

SEQ ID NO: 1882255 - RNA, 19 nt, Homo sapiens
  misc_RNA (1)...(19): siRNA sense strand
ccuaucauuuguagaccuu

SEQ ID NO: 1882256 - RNA, 19 nt, Homo sapiens
  misc_RNA (1)...(19): siRNA sense strand
uguagaccuuugcuauuuc

SEQ ID NO: 1882257 - RNA, 19 nt, Homo sapiens
  misc_RNA (1)...(19): siRNA sense strand
ccguugauuuauaguuuga

SEQ ID NO: 1882258 - RNA, 19 nt, Homo sapiens
  misc_RNA (1)...(19): siRNA sense strand
uguauucuccaaacacuga

SEQ ID NO: 1882259 - RNA, 19 nt, Homo sapiens
  misc_RNA (1)...(19): siRNA sense strand
auucuucucucagucuuaa

SEQ ID NO: 1882260 - RNA, 19 nt, Homo sapiens
  misc_RNA (1)...(19): siRNA sense strand
ugauagggaacauuggauu

SEQ ID NO: 1882261 - RNA, 19 nt, Homo sapiens
  misc_RNA (1)...(19): siRNA sense strand
cauggccuaugaucgcuau

SEQ ID NO: 1882262 - RNA, 19 nt, Homo sapiens
  misc_RNA (1)...(19): siRNA sense strand
uacggcagcucaguggaaa

SEQ ID NO: 1882263 - RNA, 19 nt, Homo sapiens
  misc_RNA (1)...(19): siRNA sense strand
cuguaacccuuuauuguac

SEQ ID NO: 1882264 - RNA, 19 nt, Homo sapiens
  misc_RNA (1)...(19): siRNA sense strand
cagauagaaacuacacguu

SEQ ID NO: 1882265 - RNA, 19 nt, Homo sapiens
  misc_RNA (1)...(19): siRNA sense strand
ggccuaugaucgcuauguc

SEQ ID NO: 1882266 - RNA, 19 nt, Homo sapiens
  misc_RNA (1)...(19): siRNA sense strand
ggaggaagaagaccuuuuc

SEQ ID NO: 1882267 - RNA, 19 nt, Homo sapiens
  misc_RNA (1)...(19): siRNA sense strand
acuacacguuggucacuga

SEQ ID NO: 1882268 - RNA, 19 nt, Homo sapiens
  misc_RNA (1)...(19): siRNA sense strand
ugacacaacaauuaaugag

SEQ ID NO: 1882269 - RNA, 19 nt, Homo sapiens
  misc_RNA (1)...(19): siRNA sense strand
uagggaacauuggauugau

SEQ ID NO: 1882270 - RNA, 19 nt, Homo sapiens
  misc_RNA (1)...(19): siRNA sense strand
gacacaacaauuaaugagu

SEQ ID NO: 1882271 - RNA, 19 nt, Homo sapiens
  misc_RNA (1)...(19): siRNA sense strand
guaugcgguugauugucuu

SEQ ID NO: 1882272 - RNA, 19 nt, Homo sapiens
  misc_RNA (1)...(19): siRNA sense strand
cuaccuguauucuccaaac

SEQ ID NO: 1882273 - RNA, 19 nt, Homo sapiens
  misc_RNA (1)...(19): siRNA sense strand
gggcagagauguacaggaa

SEQ ID NO: 1882274 - RNA, 19 nt, Homo sapiens
  misc_RNA (1)...(19): siRNA sense strand
ggaaggagcaccacuuuga

SEQ ID NO: 1882275 - RNA, 19 nt, Homo sapiens
  misc_RNA (1)...(19): siRNA sense strand
gcagagauguacaggaauc

SEQ ID NO: 1882276 - RNA, 19 nt, Homo sapiens
  misc_RNA (1)...(19): siRNA sense strand
gggaauaccugggcagaga

SEQ ID NO: 1882277 - RNA, 19 nt, Homo sapiens
  misc_RNA (1)...(19): siRNA sense strand
gcauugcccugguggagaa

SEQ ID NO: 1882278 - RNA, 19 nt, Homo sapiens
  misc_RNA (1)...(19): siRNA sense strand
ggacaaggaugggaaacag

SEQ ID NO: 1882279 - RNA, 19 nt, Homo sapiens
  misc_RNA (1)...(19): siRNA sense strand
gcauuugguugcucacgaa

SEQ ID NO: 1882280 - RNA, 19 nt, Homo sapiens
  misc_RNA (1)...(19): siRNA sense strand
caaggccauuccacuguuu

SEQ ID NO: 1882281 - RNA, 19 nt, Homo sapiens
  misc_RNA (1)...(19): siRNA sense strand
ggaaguggccgagaucugu

SEQ ID NO: 1882282 - RNA, 19 nt, Homo sapiens
  misc_RNA (1)...(19): siRNA sense strand
ucacgaaugucccaacuac

SEQ ID NO: 1882283 - RNA, 19 nt, Homo sapiens
  misc_RNA (1)...(19): siRNA sense strand
guacaaguaugaggacaag

SEQ ID NO: 1882284 - RNA, 19 nt, Homo sapiens
  misc_RNA (1)...(19): siRNA sense strand
ccaaggccauuccacuguu

SEQ ID NO: 1882285 - RNA, 19 nt, Homo sapiens
  misc_RNA (1)...(19): siRNA sense strand
uggagcagcuggagcagaa

SEQ ID NO: 1882286 - RNA, 19 nt, Homo sapiens
  misc_RNA (1)...(19): siRNA sense strand
gaaguggccgagaucugua

SEQ ID NO: 1882287 - RNA, 19 nt, Homo sapiens
  misc_RNA (1)...(19): siRNA sense strand
aaucaagccuggcauuugg

SEQ ID NO: 1882288 - RNA, 19 nt, Homo sapiens
  misc_RNA (1)...(19): siRNA sense strand
gaccucuucuaccugcaua

SEQ ID NO: 1882289 - RNA, 19 nt, Homo sapiens
  misc_RNA (1)...(19): siRNA sense strand
gagguucuaugccuucaac

SEQ ID NO: 1882290 - RNA, 19 nt, Homo sapiens
  misc_RNA (1)...(19): siRNA sense strand
gaguggaccucuucuaccu

SEQ ID NO: 1882291 - RNA, 19 nt, Homo sapiens
  misc_RNA (1)...(19): siRNA sense strand
uaaucaagccuggcauuug

SEQ ID NO: 1882292 - RNA, 19 nt, Homo sapiens
  misc_RNA (1)...(19): siRNA sense strand
ggauguaccaccacucaca

SEQ ID NO: 1882293 - RNA, 19 nt, Homo sapiens
  misc_RNA (1)...(19): siRNA sense strand
gcaccacuuugagggcauu

SEQ ID NO: 1882294 - RNA, 19 nt, Homo sapiens
  misc_RNA (1)...(19): siRNA sense strand
gcaccaggagggcaaguuc

SEQ ID NO: 1882295 - RNA, 19 nt, Homo sapiens
  misc_RNA (1)...(19): siRNA sense strand
guggacgccuuuaaucaag

SEQ ID NO: 1882296 - RNA, 19 nt, Homo sapiens
  misc_RNA (1)...(19): siRNA sense strand
gcuggauccugcccacugu

SEQ ID NO: 1882297 - RNA, 19 nt, Homo sapiens
  misc_RNA (1)...(19): siRNA sense strand
gaaggagcaccacuuugag

SEQ ID NO: 1882298 - RNA, 19 nt, Homo sapiens
  misc_RNA (1)...(19): siRNA sense strand
ggccgcuucuuugggaaua

SEQ ID NO: 1882299 - RNA, 19 nt, Homo sapiens
  misc_RNA (1)...(19): siRNA sense strand
acaggaaucgcuacuggaa

SEQ ID NO: 1882300 - RNA, 19 nt, Homo sapiens
  misc_RNA (1)...(19): siRNA sense strand
uaccagggcauguacaaug

SEQ ID NO: 1882301 - RNA, 19 nt, Homo sapiens
  misc_RNA (1)...(19): siRNA sense strand
gcucacgaaugucccaacu

SEQ ID NO: 1882302 - RNA, 19 nt, Homo sapiens
  misc_RNA (1)...(19): siRNA sense strand
gaauaccugggcagagaug

SEQ ID NO: 1882303 - RNA, 19 nt, Homo sapiens
  misc_RNA (1)...(19): siRNA sense strand
acaaguaugaggacaagga

SEQ ID NO: 1882304 - RNA, 19 nt, Homo sapiens
  misc_RNA (1)...(19): siRNA sense strand
ugaccggcaaguacaagua

SEQ ID NO: 1882305 - RNA, 19 nt, Homo sapiens
  misc_RNA (1)...(19): siRNA sense strand
gaccggcaaguacaaguau

SEQ ID NO: 1882306 - RNA, 19 nt, Homo sapiens
  misc_RNA (1)...(19): siRNA sense strand
acgaaugucccaacuacuu

SEQ ID NO: 1882307 - RNA, 19 nt, Homo sapiens
  misc_RNA (1)...(19): siRNA sense strand
gagugaaaauugauaccaa

SEQ ID NO: 1882308 - RNA, 19 nt, Homo sapiens
  misc_RNA (1)...(19): siRNA sense strand
cgaaugucccaacuacuuc

SEQ ID NO: 1882309 - RNA, 19 nt, Homo sapiens
  misc_RNA (1)...(19): siRNA sense strand
uuugguugcucacgaaugu

SEQ ID NO: 1882310 - RNA, 19 nt, Homo sapiens
  misc_RNA (1)...(19): siRNA sense strand
cguggacgccuuuaaucaa

SEQ ID NO: 1882311 - RNA, 19 nt, Homo sapiens
  misc_RNA (1)...(19): siRNA sense strand
uuaaucaagccuggcauuu

SEQ ID NO: 1882312 - RNA, 19 nt, Homo sapiens
  misc_RNA (1)...(19): siRNA sense strand
ggaauaccugggcagagau

SEQ ID NO: 1882313 - RNA, 19 nt, Homo sapiens
  misc_RNA (1)...(19): siRNA sense strand
gcagcuggagcagaacuug

SEQ ID NO: 1882314 - RNA, 19 nt, Homo sapiens
  misc_RNA (1)...(19): siRNA sense strand
ccugggaaguggccgagau

SEQ ID NO: 1882315 - RNA, 19 nt, Homo sapiens
  misc_RNA (1)...(19): siRNA sense strand
cagcgacugcagagugaaa

SEQ ID NO: 1882316 - RNA, 19 nt, Homo sapiens
  misc_RNA (1)...(19): siRNA sense strand
ggauccugcccacugugua

SEQ ID NO: 1882317 - RNA, 19 nt, Homo sapiens
  misc_RNA (1)...(19): siRNA sense strand
cagcuggagacgucacuga

SEQ ID NO: 1882318 - RNA, 19 nt, Homo sapiens
  misc_RNA (1)...(19): siRNA sense strand
gaaugaagaccacaauaaa

SEQ ID NO: 1882319 - RNA, 19 nt, Homo sapiens
  misc_RNA (1)...(19): siRNA sense strand
gcaauucuuaccuuucuua

SEQ ID NO: 1882320 - RNA, 19 nt, Homo sapiens
  misc_RNA (1)...(19): siRNA sense strand
gcucagcaauucuuaccuu

SEQ ID NO: 1882321 - RNA, 19 nt, Homo sapiens
  misc_RNA (1)...(19): siRNA sense strand
agaaugaagaccacaauaa

SEQ ID NO: 1882322 - RNA, 19 nt, Homo sapiens
  misc_RNA (1)...(19): siRNA sense strand
guuuguaaauucucccuuu

SEQ ID NO: 1882323 - RNA, 19 nt, Homo sapiens
  misc_RNA (1)...(19): siRNA sense strand
cagcaauucuuaccuuucu

SEQ ID NO: 1882324 - RNA, 19 nt, Homo sapiens
  misc_RNA (1)...(19): siRNA sense strand
uuugaaagguguacugcaa

SEQ ID NO: 1882325 - RNA, 19 nt, Homo sapiens
  misc_RNA (1)...(19): siRNA sense strand
uagaaugaagaccacaaua

SEQ ID NO: 1882326 - RNA, 19 nt, Homo sapiens
  misc_RNA (1)...(19): siRNA sense strand
gauagaaugaagaccacaa

SEQ ID NO: 1882327 - RNA, 19 nt, Homo sapiens
  misc_RNA (1)...(19): siRNA sense strand
auccuuagcucagcaauuc

SEQ ID NO: 1882328 - RNA, 19 nt, Homo sapiens
  misc_RNA (1)...(19): siRNA sense strand
aaagguguacugcaaggaa

SEQ ID NO: 1882329 - RNA, 19 nt, Homo sapiens
  misc_RNA (1)...(19): siRNA sense strand
ccuauuugaugaagauguc

SEQ ID NO: 1882330 - RNA, 19 nt, Homo sapiens
  misc_RNA (1)...(19): siRNA sense strand
aaggguggauaauuacugu

SEQ ID NO: 1882331 - RNA, 19 nt, Homo sapiens
  misc_RNA (1)...(19): siRNA sense strand
gaaagguguacugcaagga

SEQ ID NO: 1882332 - RNA, 19 nt, Homo sapiens
  misc_RNA (1)...(19): siRNA sense strand
uacuguaccuccucaugga

SEQ ID NO: 1882333 - RNA, 19 nt, Homo sapiens
  misc_RNA (1)...(19): siRNA sense strand
cucagcaauucuuaccuuu

SEQ ID NO: 1882334 - RNA, 19 nt, Homo sapiens
  misc_RNA (1)...(19): siRNA sense strand
caaggguggauaauuacug

SEQ ID NO: 1882335 - RNA, 19 nt, Homo sapiens
  misc_RNA (1)...(19): siRNA sense strand
ggauugagcugcaccugaa

SEQ ID NO: 1882336 - RNA, 19 nt, Homo sapiens
  misc_RNA (1)...(19): siRNA sense strand
ucaagagccuggucaagaa

SEQ ID NO: 1882337 - RNA, 19 nt, Homo sapiens
  misc_RNA (1)...(19): siRNA sense strand
gaguucgccuucaauauga

SEQ ID NO: 1882338 - RNA, 19 nt, Homo sapiens
  misc_RNA (1)...(19): siRNA sense strand
ucaagaaacucaagaagac

SEQ ID NO: 1882339 - RNA, 19 nt, Homo sapiens
  misc_RNA (1)...(19): siRNA sense strand
gaugcaaccugaagaucuu

SEQ ID NO: 1882340 - RNA, 19 nt, Homo sapiens
  misc_RNA (1)...(19): siRNA sense strand
ggaagaagggcgagcagaa

SEQ ID NO: 1882341 - RNA, 19 nt, Homo sapiens
  misc_RNA (1)...(19): siRNA sense strand
ggacgcagguucuccaaac

SEQ ID NO: 1882342 - RNA, 19 nt, Homo sapiens
  misc_RNA (1)...(19): siRNA sense strand
gggcugcucuccaauguca

SEQ ID NO: 1882343 - RNA, 19 nt, Homo sapiens
  misc_RNA (1)...(19): siRNA sense strand
ccauggagcugugugaguu

SEQ ID NO: 1882344 - RNA, 19 nt, Homo sapiens
  misc_RNA (1)...(19): siRNA sense strand
gcagagugccucagugaca

SEQ ID NO: 1882345 - RNA, 19 nt, Homo sapiens
  misc_RNA (1)...(19): siRNA sense strand
ugaguucgccuucaauaug

SEQ ID NO: 1882346 - RNA, 19 nt, Homo sapiens
  misc_RNA (1)...(19): siRNA sense strand
gagaguagagacaccaguu

SEQ ID NO: 1882347 - RNA, 19 nt, Homo sapiens
  misc_RNA (1)...(19): siRNA sense strand
ggacgaggucugcgugaau

SEQ ID NO: 1882348 - RNA, 19 nt, Homo sapiens
  misc_RNA (1)...(19): siRNA sense strand
gcuguuccagugugucuua

SEQ ID NO: 1882349 - RNA, 19 nt, Homo sapiens
  misc_RNA (1)...(19): siRNA sense strand
gaggcugucuaccaguuga

SEQ ID NO: 1882350 - RNA, 19 nt, Homo sapiens
  misc_RNA (1)...(19): siRNA sense strand
ggugcuccaucuccuacua

SEQ ID NO: 1882351 - RNA, 19 nt, Homo sapiens
  misc_RNA (1)...(19): siRNA sense strand
ggagaaauggugcgagaag

SEQ ID NO: 1882352 - RNA, 19 nt, Homo sapiens
  misc_RNA (1)...(19): siRNA sense strand
gcaccugaaugggccuuug

SEQ ID NO: 1882353 - RNA, 19 nt, Homo sapiens
  misc_RNA (1)...(19): siRNA sense strand
gaacgggcaggaggagaaa

SEQ ID NO: 1882354 - RNA, 19 nt, Homo sapiens
  misc_RNA (1)...(19): siRNA sense strand
gucaagaaacucaagaaga

SEQ ID NO: 1882355 - RNA, 19 nt, Homo sapiens
  misc_RNA (1)...(19): siRNA sense strand
gagcugacacggagacaca

SEQ ID NO: 1882356 - RNA, 19 nt, Homo sapiens
  misc_RNA (1)...(19): siRNA sense strand
gccuagggcugcucuccaa

SEQ ID NO: 1882357 - RNA, 19 nt, Homo sapiens
  misc_RNA (1)...(19): siRNA sense strand
ccagugaccaccagaugaa

SEQ ID NO: 1882358 - RNA, 19 nt, Homo sapiens
  misc_RNA (1)...(19): siRNA sense strand
gcgugaaucccuaccacua

SEQ ID NO: 1882359 - RNA, 19 nt, Homo sapiens
  misc_RNA (1)...(19): siRNA sense strand
gagugaagauggagaaacc

SEQ ID NO: 1882360 - RNA, 19 nt, Homo sapiens
  misc_RNA (1)...(19): siRNA sense strand
gacgaggucugcgugaauc

SEQ ID NO: 1882361 - RNA, 19 nt, Homo sapiens
  misc_RNA (1)...(19): siRNA sense strand
ucuccaaugucaacaggaa

SEQ ID NO: 1882362 - RNA, 19 nt, Homo sapiens
  misc_RNA (1)...(19): siRNA sense strand
caagagccuggucaagaaa

SEQ ID NO: 1882363 - RNA, 19 nt, Homo sapiens
  misc_RNA (1)...(19): siRNA sense strand
gucaagagccuggucaaga

SEQ ID NO: 1882364 - RNA, 19 nt, Homo sapiens
  misc_RNA (1)...(19): siRNA sense strand
gcgagaaggcggucaagag

SEQ ID NO: 1882365 - RNA, 19 nt, Homo sapiens
  misc_RNA (1)...(19): siRNA sense strand
ggaugcaaccugaagaucu

SEQ ID NO: 1882366 - RNA, 19 nt, Homo sapiens
  misc_RNA (1)...(19): siRNA sense strand
gaagaagggcgagcagaac

SEQ ID NO: 1882367 - RNA, 19 nt, Homo sapiens
  misc_RNA (1)...(19): siRNA sense strand
ccgcaugagcuucgucaaa

SEQ ID NO: 1882368 - RNA, 19 nt, Homo sapiens
  misc_RNA (1)...(19): siRNA sense strand
gcaugagcuucgucaaagg

SEQ ID NO: 1882369 - RNA, 19 nt, Homo sapiens
  misc_RNA (1)...(19): siRNA sense strand
cgcaugagcuucgucaaag

SEQ ID NO: 1882370 - RNA, 19 nt, Homo sapiens
  misc_RNA (1)...(19): siRNA sense strand
cgcagaacgucaacaccaa

SEQ ID NO: 1882371 - RNA, 19 nt, Homo sapiens
  misc_RNA (1)...(19): siRNA sense strand
acaagguccucacccagau

SEQ ID NO: 1882372 - RNA, 19 nt, Homo sapiens
  misc_RNA (1)...(19): siRNA sense strand
uagggcugcucuccaaugu

SEQ ID NO: 1882373 - RNA, 19 nt, Homo sapiens
  misc_RNA (1)...(19): siRNA sense strand
cuaccugagugaagaugga

SEQ ID NO: 1882374 - RNA, 19 nt, Homo sapiens
  misc_RNA (1)...(19): siRNA sense strand
cccagcacauaauaacuug

SEQ ID NO: 1882375 - RNA, 19 nt, Homo sapiens
  misc_RNA (1)...(19): siRNA sense strand
gcgugcggcucuacuacau

SEQ ID NO: 1882376 - RNA, 19 nt, Homo sapiens
  misc_RNA (1)...(19): siRNA sense strand
ugugugaguucgccuucaa

SEQ ID NO: 1882377 - RNA, 19 nt, Homo sapiens
  misc_RNA (1)...(19): siRNA sense strand
ggucaagaaacucaagaag

SEQ ID NO: 1882378 - RNA, 19 nt, Homo sapiens
  misc_RNA (1)...(19): siRNA sense strand
cagcacauaauaacuugga

SEQ ID NO: 1882379 - RNA, 19 nt, Homo sapiens
  misc_RNA (1)...(19): siRNA sense strand
aguucuaccuccuguguug

SEQ ID NO: 1882380 - RNA, 19 nt, Homo sapiens
  misc_RNA (1)...(19): siRNA sense strand
gaggcgugcggcucuacua

SEQ ID NO: 1882381 - RNA, 19 nt, Homo sapiens
  misc_RNA (1)...(19): siRNA sense strand
ucgcagagugccucaguga

SEQ ID NO: 1882382 - RNA, 19 nt, Homo sapiens
  misc_RNA (1)...(19): siRNA sense strand
ugugaguucgccuucaaua

SEQ ID NO: 1882383 - RNA, 19 nt, Homo sapiens
  misc_RNA (1)...(19): siRNA sense strand
ccaguucuaccuccugugu

SEQ ID NO: 1882384 - RNA, 19 nt, Homo sapiens
  misc_RNA (1)...(19): siRNA sense strand
gugaguucgccuucaauau

SEQ ID NO: 1882385 - RNA, 19 nt, Homo sapiens
  misc_RNA (1)...(19): siRNA sense strand
gaguagagacaccaguucu

SEQ ID NO: 1882386 - RNA, 19 nt, Homo sapiens
  misc_RNA (1)...(19): siRNA sense strand
agaacgggcaggaggagaa

SEQ ID NO: 1882387 - RNA, 19 nt, Homo sapiens
  misc_RNA (1)...(19): siRNA sense strand
ccaagcauccgcuguucca

SEQ ID NO: 1882388 - RNA, 19 nt, Homo sapiens
  misc_RNA (1)...(19): siRNA sense strand
gcaccauccgcaugagcuu

SEQ ID NO: 1882389 - RNA, 19 nt, Homo sapiens
  misc_RNA (1)...(19): siRNA sense strand
uugaggcugucuaccaguu

SEQ ID NO: 1882390 - RNA, 19 nt, Homo sapiens
  misc_RNA (1)...(19): siRNA sense strand
ccagauacccgauggauuu

SEQ ID NO: 1882391 - RNA, 19 nt, Homo sapiens
  misc_RNA (1)...(19): siRNA sense strand
caucaaggcuuucgacuac

SEQ ID NO: 1882392 - RNA, 19 nt, Homo sapiens
  misc_RNA (1)...(19): siRNA sense strand
caaaccaacugcagacugu

SEQ ID NO: 1882393 - RNA, 19 nt, Homo sapiens
  misc_RNA (1)...(19): siRNA sense strand
caggagcccucucuggaua

SEQ ID NO: 1882394 - RNA, 19 nt, Homo sapiens
  misc_RNA (1)...(19): siRNA sense strand
ccaaugaccacgaguuuau

SEQ ID NO: 1882395 - RNA, 19 nt, Homo sapiens
  misc_RNA (1)...(19): siRNA sense strand
agagucagcuggugcagaa

SEQ ID NO: 1882396 - RNA, 19 nt, Homo sapiens
  misc_RNA (1)...(19): siRNA sense strand
gugcagaucagcuuuguga

SEQ ID NO: 1882397 - RNA, 19 nt, Homo sapiens
  misc_RNA (1)...(19): siRNA sense strand
cuggauaucuucuaugauc

SEQ ID NO: 1882398 - RNA, 19 nt, Homo sapiens
  misc_RNA (1)...(19): siRNA sense strand
ccaggacgcuguugguaca

SEQ ID NO: 1882399 - RNA, 19 nt, Homo sapiens
  misc_RNA (1)...(19): siRNA sense strand
gcuuucagauucccaacuu

SEQ ID NO: 1882400 - RNA, 19 nt, Homo sapiens
  misc_RNA (1)...(19): siRNA sense strand
ggauaucuucuaugaucua

SEQ ID NO: 1882401 - RNA, 19 nt, Homo sapiens
  misc_RNA (1)...(19): siRNA sense strand
ggcuagaggucaucuucaa

SEQ ID NO: 1882402 - RNA, 19 nt, Homo sapiens
  misc_RNA (1)...(19): siRNA sense strand
gcagaucagcuuugugaag

SEQ ID NO: 1882403 - RNA, 19 nt, Homo sapiens
  misc_RNA (1)...(19): siRNA sense strand
ggccggaucucaggcauuc

SEQ ID NO: 1882404 - RNA, 19 nt, Homo sapiens
  misc_RNA (1)...(19): siRNA sense strand
ggacgcuguugguacacaa

SEQ ID NO: 1882405 - RNA, 19 nt, Homo sapiens
  misc_RNA (1)...(19): siRNA sense strand
gcccaaugaccacgaguuu

SEQ ID NO: 1882406 - RNA, 19 nt, Homo sapiens
  misc_RNA (1)...(19): siRNA sense strand
gaagucaagaggcuguguu

SEQ ID NO: 1882407 - RNA, 19 nt, Homo sapiens
  misc_RNA (1)...(19): siRNA sense strand
ggugcgaggugccaaaggu

SEQ ID NO: 1882408 - RNA, 19 nt, Homo sapiens
  misc_RNA (1)...(19): siRNA sense strand
gaggcuguguugcugugaa

SEQ ID NO: 1882409 - RNA, 19 nt, Homo sapiens
  misc_RNA (1)...(19): siRNA sense strand
ucaaggcuuucgacuacga

SEQ ID NO: 1882410 - RNA, 19 nt, Homo sapiens
  misc_RNA (1)...(19): siRNA sense strand
ccaucaaggcuuucgacua

SEQ ID NO: 1882411 - RNA, 19 nt, Homo sapiens
  misc_RNA (1)...(19): siRNA sense strand
cucuggauaucuucuauga

SEQ ID NO: 1882412 - RNA, 19 nt, Homo sapiens
  misc_RNA (1)...(19): siRNA sense strand
ugccaaaggucaccaccau

SEQ ID NO: 1882413 - RNA, 19 nt, Homo sapiens
  misc_RNA (1)...(19): siRNA sense strand
gggaggagaagacgagagu

SEQ ID NO: 1882414 - RNA, 19 nt, Homo sapiens
  misc_RNA (1)...(19): siRNA sense strand
ggagcccucucuggauauc

SEQ ID NO: 1882415 - RNA, 19 nt, Homo sapiens
  misc_RNA (1)...(19): siRNA sense strand
gauaucuucuaugaucuac

SEQ ID NO: 1882416 - RNA, 19 nt, Homo sapiens
  misc_RNA (1)...(19): siRNA sense strand
gugcuacacccgccaguuc

SEQ ID NO: 1882417 - RNA, 19 nt, Homo sapiens
  misc_RNA (1)...(19): siRNA sense strand
uguacaaccgcagcaguua

SEQ ID NO: 1882418 - RNA, 19 nt, Homo sapiens
  misc_RNA (1)...(19): siRNA sense strand
gcagaaggugcggagcaaa

SEQ ID NO: 1882419 - RNA, 19 nt, Homo sapiens
  misc_RNA (1)...(19): siRNA sense strand
guuucuccaucaaggcuuu

SEQ ID NO: 1882420 - RNA, 19 nt, Homo sapiens
  misc_RNA (1)...(19): siRNA sense strand
gcucaauucggacaacaag

SEQ ID NO: 1882421 - RNA, 19 nt, Homo sapiens
  misc_RNA (1)...(19): siRNA sense strand
cuagaggucaucuucaaca

SEQ ID NO: 1882422 - RNA, 19 nt, Homo sapiens
  misc_RNA (1)...(19): siRNA sense strand
ucaauucggacaacaagag

SEQ ID NO: 1882423 - RNA, 19 nt, Homo sapiens
  misc_RNA (1)...(19): siRNA sense strand
ucagauucccaacuucuuc

SEQ ID NO: 1882424 - RNA, 19 nt, Homo sapiens
  misc_RNA (1)...(19): siRNA sense strand
uaucuucuaugaucuaccu

SEQ ID NO: 1882425 - RNA, 19 nt, Homo sapiens
  misc_RNA (1)...(19): siRNA sense strand
acuggugcgugguggcaua

SEQ ID NO: 1882426 - RNA, 19 nt, Homo sapiens
  misc_RNA (1)...(19): siRNA sense strand
gaugguguguggguguaca

SEQ ID NO: 1882427 - RNA, 19 nt, Homo sapiens
  misc_RNA (1)...(19): siRNA sense strand
cccaaugaccacgaguuua

SEQ ID NO: 1882428 - RNA, 19 nt, Homo sapiens
  misc_RNA (1)...(19): siRNA sense strand
guguacaaccgcagcaguu

SEQ ID NO: 1882429 - RNA, 19 nt, Homo sapiens
  misc_RNA (1)...(19): siRNA sense strand
guucaggaccaaacgaucu

SEQ ID NO: 1882430 - RNA, 19 nt, Homo sapiens
  misc_RNA (1)...(19): siRNA sense strand
acucggugcucaagaaacu

SEQ ID NO: 1882431 - RNA, 19 nt, Homo sapiens
  misc_RNA (1)...(19): siRNA sense strand
ggaagaagacauuguugaa

SEQ ID NO: 1882432 - RNA, 19 nt, Homo sapiens
  misc_RNA (1)...(19): siRNA sense strand
gaggcaaccuugucucuau

SEQ ID NO: 1882433 - RNA, 19 nt, Homo sapiens
  misc_RNA (1)...(19): siRNA sense strand
caaaggagcaggagagaga

SEQ ID NO: 1882434 - RNA, 19 nt, Homo sapiens
  misc_RNA (1)...(19): siRNA sense strand
gaugggagccacuggaauu

SEQ ID NO: 1882435 - RNA, 19 nt, Homo sapiens
  misc_RNA (1)...(19): siRNA sense strand
ggacccagcugccuuagac

SEQ ID NO: 1882436 - RNA, 19 nt, Homo sapiens
  misc_RNA (1)...(19): siRNA sense strand
caacuucaacuaucgcauu

SEQ ID NO: 1882437 - RNA, 19 nt, Homo sapiens
  misc_RNA (1)...(19): siRNA sense strand
aagaagacauuguugaagu

SEQ ID NO: 1882438 - RNA, 19 nt, Homo sapiens
  misc_RNA (1)...(19): siRNA sense strand
gggaacaguuucugcucuu

SEQ ID NO: 1882439 - RNA, 19 nt, Homo sapiens
  misc_RNA (1)...(19): siRNA sense strand
gggaagaagacauuguuga

SEQ ID NO: 1882440 - RNA, 19 nt, Homo sapiens
  misc_RNA (1)...(19): siRNA sense strand
gaagaagacauuguugaag

SEQ ID NO: 1882441 - RNA, 19 nt, Homo sapiens
  misc_RNA (1)...(19): siRNA sense strand
gaacaguuucugcucuuca

SEQ ID NO: 1882442 - RNA, 19 nt, Homo sapiens
  misc_RNA (1)...(19): siRNA sense strand
ugacuucaacuucaacuau

SEQ ID NO: 1882443 - RNA, 19 nt, Homo sapiens
  misc_RNA (1)...(19): siRNA sense strand
ggaaguccaaggugcaaga

SEQ ID NO: 1882444 - RNA, 19 nt, Homo sapiens
  misc_RNA (1)...(19): siRNA sense strand
agaagacauuguugaagug

SEQ ID NO: 1882445 - RNA, 19 nt, Homo sapiens
  misc_RNA (1)...(19): siRNA sense strand
gaccugccgcuaccuauug

SEQ ID NO: 1882446 - RNA, 19 nt, Homo sapiens
  misc_RNA (1)...(19): siRNA sense strand
aagacaacuuugaggauga

SEQ ID NO: 1882447 - RNA, 19 nt, Homo sapiens
  misc_RNA (1)...(19): siRNA sense strand
ggaacaguuucugcucuuc

SEQ ID NO: 1882448 - RNA, 19 nt, Homo sapiens
  misc_RNA (1)...(19): siRNA sense strand
caacuuugaggaugaggaa

SEQ ID NO: 1882449 - RNA, 19 nt, Homo sapiens
  misc_RNA (1)...(19): siRNA sense strand
gacuucaacuucaacuauc

SEQ ID NO: 1882450 - RNA, 19 nt, Homo sapiens
  misc_RNA (1)...(19): siRNA sense strand
ggaucuggauaguucaaag

SEQ ID NO: 1882451 - RNA, 19 nt, Homo sapiens
  misc_RNA (1)...(19): siRNA sense strand
ggaggcaaccuugucucua

SEQ ID NO: 1882452 - RNA, 19 nt, Homo sapiens
  misc_RNA (1)...(19): siRNA sense strand
gaagugcagggaaguccaa

SEQ ID NO: 1882453 - RNA, 19 nt, Homo sapiens
  misc_RNA (1)...(19): siRNA sense strand
ugacggaggaggugauuca

SEQ ID NO: 1882454 - RNA, 19 nt, Homo sapiens
  misc_RNA (1)...(19): siRNA sense strand
caagaccugccgcuaccua

SEQ ID NO: 1882455 - RNA, 19 nt, Homo sapiens
  misc_RNA (1)...(19): siRNA sense strand
gcaccaaaggagguuauug

SEQ ID NO: 1882456 - RNA, 19 nt, Homo sapiens
  misc_RNA (1)...(19): siRNA sense strand
cagggaagaagacauuguu

SEQ ID NO: 1882457 - RNA, 19 nt, Homo sapiens
  misc_RNA (1)...(19): siRNA sense strand
gggagccacuggaauuuug

SEQ ID NO: 1882458 - RNA, 19 nt, Homo sapiens
  misc_RNA (1)...(19): siRNA sense strand
acaagcaacugcccuucgu

SEQ ID NO: 1882459 - RNA, 19 nt, Homo sapiens
  misc_RNA (1)...(19): siRNA sense strand
gcuccuguguggcccuaug

SEQ ID NO: 1882460 - RNA, 19 nt, Homo sapiens
  misc_RNA (1)...(19): siRNA sense strand
ggagcaggagagagacuug

SEQ ID NO: 1882461 - RNA, 19 nt, Homo sapiens
  misc_RNA (1)...(19): siRNA sense strand
uugcagaagcucagaaugu

SEQ ID NO: 1882462 - RNA, 19 nt, Homo sapiens
  misc_RNA (1)...(19): siRNA sense strand
gcacuagcacagucaacca

SEQ ID NO: 1882463 - RNA, 19 nt, Homo sapiens
  misc_RNA (1)...(19): siRNA sense strand
ugcagaagcucagaauguc

SEQ ID NO: 1882464 - RNA, 19 nt, Homo sapiens
  misc_RNA (1)...(19): siRNA sense strand
cuucgucugcuccuucuaa

SEQ ID NO: 1882465 - RNA, 19 nt, Homo sapiens
  misc_RNA (1)...(19): siRNA sense strand
gcagaagcucagaaugucu

SEQ ID NO: 1882466 - RNA, 19 nt, Homo sapiens
  misc_RNA (1)...(19): siRNA sense strand
uggagagccuagagacaca

SEQ ID NO: 1882467 - RNA, 19 nt, Homo sapiens
  misc_RNA (1)...(19): siRNA sense strand
uccaugacuucaacuucaa

SEQ ID NO: 1882468 - RNA, 19 nt, Homo sapiens
  misc_RNA (1)...(19): siRNA sense strand
auccaugacuucaacuuca

SEQ ID NO: 1882469 - RNA, 19 nt, Homo sapiens
  misc_RNA (1)...(19): siRNA sense strand
gagaauaucuuagugauug

SEQ ID NO: 1882470 - RNA, 19 nt, Homo sapiens
  misc_RNA (1)...(19): siRNA sense strand
ucucauggcuucucucuau

SEQ ID NO: 1882471 - RNA, 19 nt, Homo sapiens
  misc_RNA (1)...(19): siRNA sense strand
gcaguggacagguacuuua

SEQ ID NO: 1882472 - RNA, 19 nt, Homo sapiens
  misc_RNA (1)...(19): siRNA sense strand
gaucauguguaauucaauc

SEQ ID NO: 1882473 - RNA, 19 nt, Homo sapiens
  misc_RNA (1)...(19): siRNA sense strand
ggaaaaggcuacucugaug

SEQ ID NO: 1882474 - RNA, 19 nt, Homo sapiens
  misc_RNA (1)...(19): siRNA sense strand
ugacuugucuagcagauau

SEQ ID NO: 1882475 - RNA, 19 nt, Homo sapiens
  misc_RNA (1)...(19): siRNA sense strand
caauugcaguggacaggua

SEQ ID NO: 1882476 - RNA, 19 nt, Homo sapiens
  misc_RNA (1)...(19): siRNA sense strand
guggacagguacuuuacua

SEQ ID NO: 1882477 - RNA, 19 nt, Homo sapiens
  misc_RNA (1)...(19): siRNA sense strand
uggccaggcuucacauuaa

SEQ ID NO: 1882478 - RNA, 19 nt, Homo sapiens
  misc_RNA (1)...(19): siRNA sense strand
ucaucgauccucugauuua

SEQ ID NO: 1882479 - RNA, 19 nt, Homo sapiens
  misc_RNA (1)...(19): siRNA sense strand
gacagguacuuuacuaucu

SEQ ID NO: 1882480 - RNA, 19 nt, Homo sapiens
  misc_RNA (1)...(19): siRNA sense strand
ggacagguacuuuacuauc

SEQ ID NO: 1882481 - RNA, 19 nt, Homo sapiens
  misc_RNA (1)...(19): siRNA sense strand
ucauacugaucauguguaa

SEQ ID NO: 1882482 - RNA, 19 nt, Homo sapiens
  misc_RNA (1)...(19): siRNA sense strand
gcaauagccaagaacaaga

SEQ ID NO: 1882483 - RNA, 19 nt, Homo sapiens
  misc_RNA (1)...(19): siRNA sense strand
ggugagcguuucaaaugga

SEQ ID NO: 1882484 - RNA, 19 nt, Homo sapiens
  misc_RNA (1)...(19): siRNA sense strand
cacuuuaacuuguaucuca

SEQ ID NO: 1882485 - RNA, 19 nt, Homo sapiens
  misc_RNA (1)...(19): siRNA sense strand
cagaauccauauugugugu

SEQ ID NO: 1882486 - RNA, 19 nt, Homo sapiens
  misc_RNA (1)...(19): siRNA sense strand
ggagaauaucuuagugauu

SEQ ID NO: 1882487 - RNA, 19 nt, Homo sapiens
  misc_RNA (1)...(19): siRNA sense strand
gggaggccuuugugacuug

SEQ ID NO: 1882488 - RNA, 19 nt, Homo sapiens
  misc_RNA (1)...(19): siRNA sense strand
ucaaauggaucagaaacca

SEQ ID NO: 1882489 - RNA, 19 nt, Homo sapiens
  misc_RNA (1)...(19): siRNA sense strand
gucaucaucugccucauca

SEQ ID NO: 1882490 - RNA, 19 nt, Homo sapiens
  misc_RNA (1)...(19): siRNA sense strand
gauaugcuggugagcguuu

SEQ ID NO: 1882491 - RNA, 19 nt, Homo sapiens
  misc_RNA (1)...(19): siRNA sense strand
ugucucacuuuaacuugua

SEQ ID NO: 1882492 - RNA, 19 nt, Homo sapiens
  misc_RNA (1)...(19): siRNA sense strand
guucaucauuuacucagau

SEQ ID NO: 1882493 - RNA, 19 nt, Homo sapiens
  misc_RNA (1)...(19): siRNA sense strand
cauccugauuggcgucuuu

SEQ ID NO: 1882494 - RNA, 19 nt, Homo sapiens
  misc_RNA (1)...(19): siRNA sense strand
ccgccaaggugccaauaug

SEQ ID NO: 1882495 - RNA, 19 nt, Homo sapiens
  misc_RNA (1)...(19): siRNA sense strand
caauagccaagaacaagaa

SEQ ID NO: 1882496 - RNA, 19 nt, Homo sapiens
  misc_RNA (1)...(19): siRNA sense strand
caucgauccucugauuuau

SEQ ID NO: 1882497 - RNA, 19 nt, Homo sapiens
  misc_RNA (1)...(19): siRNA sense strand
guagugcugucaucaucug

SEQ ID NO: 1882498 - RNA, 19 nt, Homo sapiens
  misc_RNA (1)...(19): siRNA sense strand
gaaccgcagcaguuacaga

SEQ ID NO: 1882499 - RNA, 19 nt, Homo sapiens
  misc_RNA (1)...(19): siRNA sense strand
gccagugagucccuuggaa

SEQ ID NO: 1882500 - RNA, 19 nt, Homo sapiens
  misc_RNA (1)...(19): siRNA sense strand
guuacagacugcacagcaa

SEQ ID NO: 1882501 - RNA, 19 nt, Homo sapiens
  misc_RNA (1)...(19): siRNA sense strand
ccagugagucccuuggaaa

SEQ ID NO: 1882502 - RNA, 19 nt, Homo sapiens
  misc_RNA (1)...(19): siRNA sense strand
acagguacuuuacuaucuu

SEQ ID NO: 1882503 - RNA, 19 nt, Homo sapiens
  misc_RNA (1)...(19): siRNA sense strand
gcauucacccauguacuuu

SEQ ID NO: 1882504 - RNA, 19 nt, Homo sapiens
  misc_RNA (1)...(19): siRNA sense strand
ggaaaaccuucaaagagau

SEQ ID NO: 1882505 - RNA, 19 nt, Homo sapiens
  misc_RNA (1)...(19): siRNA sense strand
gcuuggcuguggcugauau

SEQ ID NO: 1882506 - RNA, 19 nt, Homo sapiens
  misc_RNA (1)...(19): siRNA sense strand
ucagcuuguuggagaauau

SEQ ID NO: 1882507 - RNA, 19 nt, Homo sapiens
  misc_RNA (1)...(19): siRNA sense strand
ucaaucaucgauccucuga

SEQ ID NO: 1882508 - RNA, 19 nt, Homo sapiens
  misc_RNA (1)...(19): siRNA sense strand
cuucaugucucacuuuaac

SEQ ID NO: 1882509 - RNA, 19 nt, Homo sapiens
  misc_RNA (1)...(19): siRNA sense strand
uggagaauaucuuagugau

SEQ ID NO: 1882510 - RNA, 19 nt, Homo sapiens
  misc_RNA (1)...(19): siRNA sense strand
uaguagugcugucaucauc

SEQ ID NO: 1882511 - RNA, 19 nt, Homo sapiens
  misc_RNA (1)...(19): siRNA sense strand
gauaguagugcugucauca

SEQ ID NO: 1882512 - RNA, 19 nt, Homo sapiens
  misc_RNA (1)...(19): siRNA sense strand
aauaugaagggagcgauua

SEQ ID NO: 1882513 - RNA, 19 nt, Homo sapiens
  misc_RNA (1)...(19): siRNA sense strand
gccaaggugccaauaugaa

SEQ ID NO: 1882514 - RNA, 19 nt, Homo sapiens
  misc_RNA (1)...(19): siRNA sense strand
gcuccuugcuugcauccau

SEQ ID NO: 1882515 - RNA, 19 nt, Homo sapiens
  misc_RNA (1)...(19): siRNA sense strand
aggaaaaccuucaaagaga

SEQ ID NO: 1882516 - RNA, 19 nt, Homo sapiens
  misc_RNA (1)...(19): siRNA sense strand
ccacuuaauauucuacauc

SEQ ID NO: 1882517 - RNA, 19 nt, Homo sapiens
  misc_RNA (1)...(19): siRNA sense strand
gcucuccaguaccauaaca

SEQ ID NO: 1882518 - RNA, 19 nt, Homo sapiens
  misc_RNA (1)...(19): siRNA sense strand
guuggagaauaucuuagug

SEQ ID NO: 1882519 - RNA, 19 nt, Homo sapiens
  misc_RNA (1)...(19): siRNA sense strand
caauaugaagggagcgauu

SEQ ID NO: 1882520 - RNA, 19 nt, Homo sapiens
  misc_RNA (1)...(19): siRNA sense strand
auacggaugcacagaguuu

SEQ ID NO: 1882521 - RNA, 19 nt, Homo sapiens
  misc_RNA (1)...(19): siRNA sense strand
cugaucauguguaauucaa

SEQ ID NO: 1882522 - RNA, 19 nt, Homo sapiens
  misc_RNA (1)...(19): siRNA sense strand
guccucagaauccauauug

SEQ ID NO: 1882523 - RNA, 19 nt, Homo sapiens
  misc_RNA (1)...(19): siRNA sense strand
ggcaauagccaagaacaag

SEQ ID NO: 1882524 - RNA, 19 nt, Homo sapiens
  misc_RNA (1)...(19): siRNA sense strand
cauguguaauucaaucauc

SEQ ID NO: 1882525 - RNA, 19 nt, Homo sapiens
  misc_RNA (1)...(19): siRNA sense strand
ggccaggcuucacauuaag

SEQ ID NO: 1882526 - RNA, 19 nt, Homo sapiens
  misc_RNA (1)...(19): siRNA sense strand
cuggugagcguuucaaaug

SEQ ID NO: 1882527 - RNA, 19 nt, Homo sapiens
  misc_RNA (1)...(19): siRNA sense strand
cguuucaaauggaucagaa

SEQ ID NO: 1882528 - RNA, 19 nt, Homo sapiens
  misc_RNA (1)...(19): siRNA sense strand
cugauuggcgucuuuguug

SEQ ID NO: 1882529 - RNA, 19 nt, Homo sapiens
  misc_RNA (1)...(19): siRNA sense strand
ucuaugcucuccaguacca

SEQ ID NO: 1882530 - RNA, 19 nt, Homo sapiens
  misc_RNA (1)...(19): siRNA sense strand
ugcuucaugucucacuuua

SEQ ID NO: 1882531 - RNA, 19 nt, Homo sapiens
  misc_RNA (1)...(19): siRNA sense strand
gaggaaaaccuucaaagag

SEQ ID NO: 1882532 - RNA, 19 nt, Homo sapiens
  misc_RNA (1)...(19): siRNA sense strand
ggagucaagaacugaggaa

SEQ ID NO: 1882533 - RNA, 19 nt, Homo sapiens
  misc_RNA (1)...(19): siRNA sense strand
uaucucauacugaucaugu

SEQ ID NO: 1882534 - RNA, 19 nt, Homo sapiens
  misc_RNA (1)...(19): siRNA sense strand
cagguacuuuacuaucuuc

SEQ ID NO: 1882535 - RNA, 19 nt, Homo sapiens
  misc_RNA (1)...(19): siRNA sense strand
gaacugaggaaaaccuuca

SEQ ID NO: 1882536 - RNA, 19 nt, Homo sapiens
  misc_RNA (1)...(19): siRNA sense strand
ucgauccucugauuuaugc

SEQ ID NO: 1882537 - RNA, 19 nt, Homo sapiens
  misc_RNA (1)...(19): siRNA sense strand
ccaaggugccaauaugaag

SEQ ID NO: 1882538 - RNA, 19 nt, Homo sapiens
  misc_RNA (1)...(19): siRNA sense strand
cuccaguaccauaacauua

SEQ ID NO: 1882539 - RNA, 19 nt, Homo sapiens
  misc_RNA (1)...(19): siRNA sense strand
cuucuaugcucuccaguac

SEQ ID NO: 1882540 - RNA, 19 nt, Homo sapiens
  misc_RNA (1)...(19): siRNA sense strand
gagcguuucaaauggauca

SEQ ID NO: 1882541 - RNA, 19 nt, Homo sapiens
  misc_RNA (1)...(19): siRNA sense strand
uauugugugugcuucaugu

SEQ ID NO: 1882542 - RNA, 19 nt, Homo sapiens
  misc_RNA (1)...(19): siRNA sense strand
ccucagaauccauauugug

SEQ ID NO: 1882543 - RNA, 19 nt, Homo sapiens
  misc_RNA (1)...(19): siRNA sense strand
cccauucuuccuccacuua

SEQ ID NO: 1882544 - RNA, 19 nt, Homo sapiens
  misc_RNA (1)...(19): siRNA sense strand
ugauuggcgucuuuguugu

SEQ ID NO: 1882545 - RNA, 19 nt, Homo sapiens
  misc_RNA (1)...(19): siRNA sense strand
ucuggaaccgcagcaguua

SEQ ID NO: 1882546 - RNA, 19 nt, Homo sapiens
  misc_RNA (1)...(19): siRNA sense strand
aaucugcauucacccaugu

SEQ ID NO: 1882547 - RNA, 19 nt, Homo sapiens
  misc_RNA (1)...(19): siRNA sense strand
gguacuuuacuaucuucua

SEQ ID NO: 1882548 - RNA, 19 nt, Homo sapiens
  misc_RNA (1)...(19): siRNA sense strand
cuuguuggagaauaucuua

SEQ ID NO: 1882549 - RNA, 19 nt, Homo sapiens
  misc_RNA (1)...(19): siRNA sense strand
gaucuguagcuccuugcuu

SEQ ID NO: 1882550 - RNA, 19 nt, Homo sapiens
  misc_RNA (1)...(19): siRNA sense strand
caucucuuguccucagaau

SEQ ID NO: 1882551 - RNA, 19 nt, Homo sapiens
  misc_RNA (1)...(19): siRNA sense strand
ggcauuuuguucaucauuu

SEQ ID NO: 1882552 - RNA, 19 nt, Homo sapiens
  misc_RNA (1)...(19): siRNA sense strand
gcuggugagcguuucaaau

SEQ ID NO: 1882553 - RNA, 19 nt, Homo sapiens
  misc_RNA (1)...(19): siRNA sense strand
ucaugucucacuuuaacuu

SEQ ID NO: 1882554 - RNA, 19 nt, Homo sapiens
  misc_RNA (1)...(19): siRNA sense strand
gugcuucaugucucacuuu

SEQ ID NO: 1882555 - RNA, 19 nt, Homo sapiens
  misc_RNA (1)...(19): siRNA sense strand
agauacggaugcacagagu

SEQ ID NO: 1882556 - RNA, 19 nt, Homo sapiens
  misc_RNA (1)...(19): siRNA sense strand
caucauuuacucagauagu

SEQ ID NO: 1882557 - RNA, 19 nt, Homo sapiens
  misc_RNA (1)...(19): siRNA sense strand
ucaccaugcuggcucucau

SEQ ID NO: 1882558 - RNA, 19 nt, Homo sapiens
  misc_RNA (1)...(19): siRNA sense strand
uagccaagaacaagaaucu

SEQ ID NO: 1882559 - RNA, 19 nt, Homo sapiens
  misc_RNA (1)...(19): siRNA sense strand
cauauugugugugcuucau

SEQ ID NO: 1882560 - RNA, 19 nt, Homo sapiens
  misc_RNA (1)...(19): siRNA sense strand
gaauaucuuagugauugug

SEQ ID NO: 1882561 - RNA, 19 nt, Homo sapiens
  misc_RNA (1)...(19): siRNA sense strand
uaccuugaccauccugauu

SEQ ID NO: 1882562 - RNA, 19 nt, Homo sapiens
  misc_RNA (1)...(19): siRNA sense strand
cgccaaggugccaauauga

SEQ ID NO: 1882563 - RNA, 19 nt, Homo sapiens
  misc_RNA (1)...(19): siRNA sense strand
gauggacccucucauauau

SEQ ID NO: 1882564 - RNA, 19 nt, Homo sapiens
  misc_RNA (1)...(19): siRNA sense strand
aaacaagucuucaccaugu

SEQ ID NO: 1882565 - RNA, 19 nt, Homo sapiens
  misc_RNA (1)...(19): siRNA sense strand
caacaagcaccuagugaua

SEQ ID NO: 1882566 - RNA, 19 nt, Homo sapiens
  misc_RNA (1)...(19): siRNA sense strand
gagaacaucuuggucauag

SEQ ID NO: 1882567 - RNA, 19 nt, Homo sapiens
  misc_RNA (1)...(19): siRNA sense strand
gggagaccaucaccaucua

SEQ ID NO: 1882568 - RNA, 19 nt, Homo sapiens
  misc_RNA (1)...(19): siRNA sense strand
cuacugcucucgcuucaug

SEQ ID NO: 1882569 - RNA, 19 nt, Homo sapiens
  misc_RNA (1)...(19): siRNA sense strand
ucacuuuaaugcuuucuug

SEQ ID NO: 1882570 - RNA, 19 nt, Homo sapiens
  misc_RNA (1)...(19): siRNA sense strand
caucucacuuuaaugcuuu

SEQ ID NO: 1882571 - RNA, 19 nt, Homo sapiens
  misc_RNA (1)...(19): siRNA sense strand
ugauggacccucucauaua

SEQ ID NO: 1882572 - RNA, 19 nt, Homo sapiens
  misc_RNA (1)...(19): siRNA sense strand
ggagaacaucuuggucaua

SEQ ID NO: 1882573 - RNA, 19 nt, Homo sapiens
  misc_RNA (1)...(19): siRNA sense strand
gagaugcggaagaccuuua

SEQ ID NO: 1882574 - RNA, 19 nt, Homo sapiens
  misc_RNA (1)...(19): siRNA sense strand
ccauugcaguggauaggua

SEQ ID NO: 1882575 - RNA, 19 nt, Homo sapiens
  misc_RNA (1)...(19): siRNA sense strand
cuucaugucucacuucaau

SEQ ID NO: 1882576 - RNA, 19 nt, Homo sapiens
  misc_RNA (1)...(19): siRNA sense strand
gaccaucaccaucuaccua

SEQ ID NO: 1882577 - RNA, 19 nt, Homo sapiens
  misc_RNA (1)...(19): siRNA sense strand
caacaacaagcaccuagug

SEQ ID NO: 1882578 - RNA, 19 nt, Homo sapiens
  misc_RNA (1)...(19): siRNA sense strand
ccuggugucucuguacaua

SEQ ID NO: 1882579 - RNA, 19 nt, Homo sapiens
  misc_RNA (1)...(19): siRNA sense strand
ccacagagggcaaccuuuc

SEQ ID NO: 1882580 - RNA, 19 nt, Homo sapiens
  misc_RNA (1)...(19): siRNA sense strand
gcauugcuguggagguguu

SEQ ID NO: 1882581 - RNA, 19 nt, Homo sapiens
  misc_RNA (1)...(19): siRNA sense strand
ccaucuaccuacucaacaa

SEQ ID NO: 1882582 - RNA, 19 nt, Homo sapiens
  misc_RNA (1)...(19): siRNA sense strand
cgugauggacccucucaua

SEQ ID NO: 1882583 - RNA, 19 nt, Homo sapiens
  misc_RNA (1)...(19): siRNA sense strand
gauagcagacgccuuugug

SEQ ID NO: 1882584 - RNA, 19 nt, Homo sapiens
  misc_RNA (1)...(19): siRNA sense strand
ugucucacuucaauaugua

SEQ ID NO: 1882585 - RNA, 19 nt, Homo sapiens
  misc_RNA (1)...(19): siRNA sense strand
ucauacucaucauguguaa

SEQ ID NO: 1882586 - RNA, 19 nt, Homo sapiens
  misc_RNA (1)...(19): siRNA sense strand
gccugcagcuuucccagaa

SEQ ID NO: 1882587 - RNA, 19 nt, Homo sapiens
  misc_RNA (1)...(19): siRNA sense strand
gcauugucuucauccugua

SEQ ID NO: 1882588 - RNA, 19 nt, Homo sapiens
  misc_RNA (1)...(19): siRNA sense strand
guucuucgcuaugcuguuc

SEQ ID NO: 1882589 - RNA, 19 nt, Homo sapiens
  misc_RNA (1)...(19): siRNA sense strand
cauuucaccugcauuucuu

SEQ ID NO: 1882590 - RNA, 19 nt, Homo sapiens
  misc_RNA (1)...(19): siRNA sense strand
gugauggacccucucauau

SEQ ID NO: 1882591 - RNA, 19 nt, Homo sapiens
  misc_RNA (1)...(19): siRNA sense strand
agugauagcagacgccuuu

SEQ ID NO: 1882592 - RNA, 19 nt, Homo sapiens
  misc_RNA (1)...(19): siRNA sense strand
ucaucucacuuuaaugcuu

SEQ ID NO: 1882593 - RNA, 19 nt, Homo sapiens
  misc_RNA (1)...(19): siRNA sense strand
ccucauuucaccugcauuu

SEQ ID NO: 1882594 - RNA, 19 nt, Homo sapiens
  misc_RNA (1)...(19): siRNA sense strand
gccaagagaugcggaagac

SEQ ID NO: 1882595 - RNA, 19 nt, Homo sapiens
  misc_RNA (1)...(19): siRNA sense strand
ucaucagccucuuggagaa

SEQ ID NO: 1882596 - RNA, 19 nt, Homo sapiens
  misc_RNA (1)...(19): siRNA sense strand
guacgucaccaucuucuac

SEQ ID NO: 1882597 - RNA, 19 nt, Homo sapiens
  misc_RNA (1)...(19): siRNA sense strand
ucaccugcauuucuuggau

SEQ ID NO: 1882598 - RNA, 19 nt, Homo sapiens
  misc_RNA (1)...(19): siRNA sense strand
ucaugucucacuucaauau

SEQ ID NO: 1882599 - RNA, 19 nt, Homo sapiens
  misc_RNA (1)...(19): siRNA sense strand
gggccauagugaagaacaa

SEQ ID NO: 1882600 - RNA, 19 nt, Homo sapiens
  misc_RNA (1)...(19): siRNA sense strand
ucuuggaucucaaccugaa

SEQ ID NO: 1882601 - RNA, 19 nt, Homo sapiens
  misc_RNA (1)...(19): siRNA sense strand
gcucucgcuucaugucuca

SEQ ID NO: 1882602 - RNA, 19 nt, Homo sapiens
  misc_RNA (1)...(19): siRNA sense strand
gcagcuuacuggccauugc

SEQ ID NO: 1882603 - RNA, 19 nt, Homo sapiens
  misc_RNA (1)...(19): siRNA sense strand
cauguguaauuccgugaug

SEQ ID NO: 1882604 - RNA, 19 nt, Homo sapiens
  misc_RNA (1)...(19): siRNA sense strand
auagguacgucaccaucuu

SEQ ID NO: 1882605 - RNA, 19 nt, Homo sapiens
  misc_RNA (1)...(19): siRNA sense strand
gcgcuaccaccacaucaug

SEQ ID NO: 1882606 - RNA, 19 nt, Homo sapiens
  misc_RNA (1)...(19): siRNA sense strand
cuuccuucaucucacuuua

SEQ ID NO: 1882607 - RNA, 19 nt, Homo sapiens
  misc_RNA (1)...(19): siRNA sense strand
guguuugacuccaugaucu

SEQ ID NO: 1882608 - RNA, 19 nt, Homo sapiens
  misc_RNA (1)...(19): siRNA sense strand
gugaagacaugggcauugc

SEQ ID NO: 1882609 - RNA, 19 nt, Homo sapiens
  misc_RNA (1)...(19): siRNA sense strand
auuauuugcugccgugguu

SEQ ID NO: 1882610 - RNA, 19 nt, Homo sapiens
  misc_RNA (1)...(19): siRNA sense strand
gggcugcggcauugucuuc

SEQ ID NO: 1882611 - RNA, 19 nt, Homo sapiens
  misc_RNA (1)...(19): siRNA sense strand
gcauccaugugcagcuuac

SEQ ID NO: 1882612 - RNA, 19 nt, Homo sapiens
  misc_RNA (1)...(19): siRNA sense strand
cugcauuucuuggaucuca

SEQ ID NO: 1882613 - RNA, 19 nt, Homo sapiens
  misc_RNA (1)...(19): siRNA sense strand
acaacaagcaccuagugau

SEQ ID NO: 1882614 - RNA, 19 nt, Homo sapiens
  misc_RNA (1)...(19): siRNA sense strand
gauagguacgucaccaucu

SEQ ID NO: 1882615 - RNA, 19 nt, Homo sapiens
  misc_RNA (1)...(19): siRNA sense strand
uggagaacaucuuggucau

SEQ ID NO: 1882616 - RNA, 19 nt, Homo sapiens
  misc_RNA (1)...(19): siRNA sense strand
acaauguguuugacuccau

SEQ ID NO: 1882617 - RNA, 19 nt, Homo sapiens
  misc_RNA (1)...(19): siRNA sense strand
acaagcaccuagugauagc

SEQ ID NO: 1882618 - RNA, 19 nt, Homo sapiens
  misc_RNA (1)...(19): siRNA sense strand
ggccauagugaagaacaaa

SEQ ID NO: 1882619 - RNA, 19 nt, Homo sapiens
  misc_RNA (1)...(19): siRNA sense strand
gaugauagcucagaugaua

SEQ ID NO: 1882620 - RNA, 19 nt, Homo sapiens
  misc_RNA (1)...(19): siRNA sense strand
gaacaugacugguccaaug

SEQ ID NO: 1882621 - RNA, 19 nt, Homo sapiens
  misc_RNA (1)...(19): siRNA sense strand
gcaaggagcuacucuguug

SEQ ID NO: 1882622 - RNA, 19 nt, Homo sapiens
  misc_RNA (1)...(19): siRNA sense strand
aagaugggcuuucauguua

SEQ ID NO: 1882623 - RNA, 19 nt, Homo sapiens
  misc_RNA (1)...(19): siRNA sense strand
gcaauuaaaucaaccaaca

SEQ ID NO: 1882624 - RNA, 19 nt, Homo sapiens
  misc_RNA (1)...(19): siRNA sense strand
caaagauggugaccugaua

SEQ ID NO: 1882625 - RNA, 19 nt, Homo sapiens
  misc_RNA (1)...(19): siRNA sense strand
ggaaaugggugaugaguac

SEQ ID NO: 1882626 - RNA, 19 nt, Homo sapiens
  misc_RNA (1)...(19): siRNA sense strand
gaugauaacuucuguaagg

SEQ ID NO: 1882627 - RNA, 19 nt, Homo sapiens
  misc_RNA (1)...(19): siRNA sense strand
gaaacaagaugucaguagu

SEQ ID NO: 1882628 - RNA, 19 nt, Homo sapiens
  misc_RNA (1)...(19): siRNA sense strand
uaauugagauuccugauga

SEQ ID NO: 1882629 - RNA, 19 nt, Homo sapiens
  misc_RNA (1)...(19): siRNA sense strand
gaagauggauuguguacag

SEQ ID NO: 1882630 - RNA, 19 nt, Homo sapiens
  misc_RNA (1)...(19): siRNA sense strand
gaacacacgccaauucuau

SEQ ID NO: 1882631 - RNA, 19 nt, Homo sapiens
  misc_RNA (1)...(19): siRNA sense strand
acugaaagcucucgaaauu

SEQ ID NO: 1882632 - RNA, 19 nt, Homo sapiens
  misc_RNA (1)...(19): siRNA sense strand
gcagaggacgucuucuuua

SEQ ID NO: 1882633 - RNA, 19 nt, Homo sapiens
  misc_RNA (1)...(19): siRNA sense strand
gaugauguccucaguauug

SEQ ID NO: 1882634 - RNA, 19 nt, Homo sapiens
  misc_RNA (1)...(19): siRNA sense strand
aaagucagcucaagauguu

SEQ ID NO: 1882635 - RNA, 19 nt, Homo sapiens
  misc_RNA (1)...(19): siRNA sense strand
ccucaugucugcagcuaua

SEQ ID NO: 1882636 - RNA, 19 nt, Homo sapiens
  misc_RNA (1)...(19): siRNA sense strand
cuacagcgguugacaguga

SEQ ID NO: 1882637 - RNA, 19 nt, Homo sapiens
  misc_RNA (1)...(19): siRNA sense strand
gaagagcaguucccaggau

SEQ ID NO: 1882638 - RNA, 19 nt, Homo sapiens
  misc_RNA (1)...(19): siRNA sense strand
uaacaaacgcugcaaaugu

SEQ ID NO: 1882639 - RNA, 19 nt, Homo sapiens
  misc_RNA (1)...(19): siRNA sense strand
cagaaugucuucguggaua

SEQ ID NO: 1882640 - RNA, 19 nt, Homo sapiens
  misc_RNA (1)...(19): siRNA sense strand
caacauggacuacaaguuc

SEQ ID NO: 1882641 - RNA, 19 nt, Homo sapiens
  misc_RNA (1)...(19): siRNA sense strand
caucaaagccgaagacuca

SEQ ID NO: 1882642 - RNA, 19 nt, Homo sapiens
  misc_RNA (1)...(19): siRNA sense strand
ugaaagcucucgaaauuac

SEQ ID NO: 1882643 - RNA, 19 nt, Homo sapiens
  misc_RNA (1)...(19): siRNA sense strand
gaacuaagacuuggcacaa

SEQ ID NO: 1882644 - RNA, 19 nt, Homo sapiens
  misc_RNA (1)...(19): siRNA sense strand
gaagagacacccaagaaca

SEQ ID NO: 1882645 - RNA, 19 nt, Homo sapiens
  misc_RNA (1)...(19): siRNA sense strand
gaagaaauacaaggugaaa

SEQ ID NO: 1882646 - RNA, 19 nt, Homo sapiens
  misc_RNA (1)...(19): siRNA sense strand
aagcucagguuucucauuu

SEQ ID NO: 1882647 - RNA, 19 nt, Homo sapiens
  misc_RNA (1)...(19): siRNA sense strand
gaaagucagcucaagaugu

SEQ ID NO: 1882648 - RNA, 19 nt, Homo sapiens
  misc_RNA (1)...(19): siRNA sense strand
aacaagaugucaguaguua

SEQ ID NO: 1882649 - RNA, 19 nt, Homo sapiens
  misc_RNA (1)...(19): siRNA sense strand
gcaaggguguuuucauuaa

SEQ ID NO: 1882650 - RNA, 19 nt, Homo sapiens
  misc_RNA (1)...(19): siRNA sense strand
ggaaucaggucuggcucua

SEQ ID NO: 1882651 - RNA, 19 nt, Homo sapiens
  misc_RNA (1)...(19): siRNA sense strand
gaccaacucuuugaugaug

SEQ ID NO: 1882652 - RNA, 19 nt, Homo sapiens
  misc_RNA (1)...(19): siRNA sense strand
gcaaaauccugacagauga

SEQ ID NO: 1882653 - RNA, 19 nt, Homo sapiens
  misc_RNA (1)...(19): siRNA sense strand
ggacaaugcaggagauaga

SEQ ID NO: 1882654 - RNA, 19 nt, Homo sapiens
  misc_RNA (1)...(19): siRNA sense strand
ccagggcagugacuaauug

SEQ ID NO: 1882655 - RNA, 19 nt, Homo sapiens
  misc_RNA (1)...(19): siRNA sense strand
caaccaacauggccucugu

SEQ ID NO: 1882656 - RNA, 19 nt, Homo sapiens
  misc_RNA (1)...(19): siRNA sense strand
uugcaaaucuggaccauau

SEQ ID NO: 1882657 - RNA, 19 nt, Homo sapiens
  misc_RNA (1)...(19): siRNA sense strand
agacauggguaauacagaa

SEQ ID NO: 1882658 - RNA, 19 nt, Homo sapiens
  misc_RNA (1)...(19): siRNA sense strand
ucaaacaggccaagaaaga

SEQ ID NO: 1882659 - RNA, 19 nt, Homo sapiens
  misc_RNA (1)...(19): siRNA sense strand
guacagaggacccugaaga

SEQ ID NO: 1882660 - RNA, 19 nt, Homo sapiens
  misc_RNA (1)...(19): siRNA sense strand
acauauagaucaccuuuag

SEQ ID NO: 1882661 - RNA, 19 nt, Homo sapiens
  misc_RNA (1)...(19): siRNA sense strand
caagaugggcuuucauguu

SEQ ID NO: 1882662 - RNA, 19 nt, Homo sapiens
  misc_RNA (1)...(19): siRNA sense strand
gaaggcacgugguggaagu

SEQ ID NO: 1882663 - RNA, 19 nt, Homo sapiens
  misc_RNA (1)...(19): siRNA sense strand
cagcagugguguagacuug

SEQ ID NO: 1882664 - RNA, 19 nt, Homo sapiens
  misc_RNA (1)...(19): siRNA sense strand
ggagauagaacgcuaccuu

SEQ ID NO: 1882665 - RNA, 19 nt, Homo sapiens
  misc_RNA (1)...(19): siRNA sense strand
gggaucaaccagacauaua

SEQ ID NO: 1882666 - RNA, 19 nt, Homo sapiens
  misc_RNA (1)...(19): siRNA sense strand
gaacuuacuugggacuaca

SEQ ID NO: 1882667 - RNA, 19 nt, Homo sapiens
  misc_RNA (1)...(19): siRNA sense strand
uagcucagaugauaacuuc

SEQ ID NO: 1882668 - RNA, 19 nt, Homo sapiens
  misc_RNA (1)...(19): siRNA sense strand
caaggagggucuggaaaug

SEQ ID NO: 1882669 - RNA, 19 nt, Homo sapiens
  misc_RNA (1)...(19): siRNA sense strand
agaagcagcuagcagaguu

SEQ ID NO: 1882670 - RNA, 19 nt, Homo sapiens
  misc_RNA (1)...(19): siRNA sense strand
cccaugggauugcaauuaa

SEQ ID NO: 1882671 - RNA, 19 nt, Homo sapiens
  misc_RNA (1)...(19): siRNA sense strand
ggaacuggguaucucuaug

SEQ ID NO: 1882672 - RNA, 19 nt, Homo sapiens
  misc_RNA (1)...(19): siRNA sense strand
gcagugguguagacuugaa

SEQ ID NO: 1882673 - RNA, 19 nt, Homo sapiens
  misc_RNA (1)...(19): siRNA sense strand
gaucugaccgguacuggaa

SEQ ID NO: 1882674 - RNA, 19 nt, Homo sapiens
  misc_RNA (1)...(19): siRNA sense strand
ccucugcacuggagaagaa

SEQ ID NO: 1882675 - RNA, 19 nt, Homo sapiens
  misc_RNA (1)...(19): siRNA sense strand
gagauagaacgcuaccuuu

SEQ ID NO: 1882676 - RNA, 19 nt, Homo sapiens
  misc_RNA (1)...(19): siRNA sense strand
cagaggacgucuucuuuag

SEQ ID NO: 1882677 - RNA, 19 nt, Homo sapiens
  misc_RNA (1)...(19): siRNA sense strand
gaggccaaaucaacccuaa

SEQ ID NO: 1882678 - RNA, 19 nt, Homo sapiens
  misc_RNA (1)...(19): siRNA sense strand
cagcuacaguggagucuga

SEQ ID NO: 1882679 - RNA, 19 nt, Homo sapiens
  misc_RNA (1)...(19): siRNA sense strand
uggaggaacuucggcauuu

SEQ ID NO: 1882680 - RNA, 19 nt, Homo sapiens
  misc_RNA (1)...(19): siRNA sense strand
caaagaaggauaugagagu

SEQ ID NO: 1882681 - RNA, 19 nt, Homo sapiens
  misc_RNA (1)...(19): siRNA sense strand
gaugaguacuuugcaaauc

SEQ ID NO: 1882682 - RNA, 19 nt, Homo sapiens
  misc_RNA (1)...(19): siRNA sense strand
uggagaagauggauugugu

SEQ ID NO: 1882683 - RNA, 19 nt, Homo sapiens
  misc_RNA (1)...(19): siRNA sense strand
gggcuuucauguuaucuau

SEQ ID NO: 1882684 - RNA, 19 nt, Homo sapiens
  misc_RNA (1)...(19): siRNA sense strand
ugagauuccugaugaagau

SEQ ID NO: 1882685 - RNA, 19 nt, Homo sapiens
  misc_RNA (1)...(19): siRNA sense strand
uagcagaguuagagacaug

SEQ ID NO: 1882686 - RNA, 19 nt, Homo sapiens
  misc_RNA (1)...(19): siRNA sense strand
gagcaaaggcccuguuguc

SEQ ID NO: 1882687 - RNA, 19 nt, Homo sapiens
  misc_RNA (1)...(19): siRNA sense strand
cgaggagucuugcuacauc

SEQ ID NO: 1882688 - RNA, 19 nt, Homo sapiens
  misc_RNA (1)...(19): siRNA sense strand
uaagaacacacgccaauuc

SEQ ID NO: 1882689 - RNA, 19 nt, Homo sapiens
  misc_RNA (1)...(19): siRNA sense strand
gagcgcaccuguucguaag

SEQ ID NO: 1882690 - RNA, 19 nt, Homo sapiens
  misc_RNA (1)...(19): siRNA sense strand
gaaauuacgguuacaaucc

SEQ ID NO: 1882691 - RNA, 19 nt, Homo sapiens
  misc_RNA (1)...(19): siRNA sense strand
agaacaagguggccucaug

SEQ ID NO: 1882692 - RNA, 19 nt, Homo sapiens
  misc_RNA (1)...(19): siRNA sense strand
gaagaguccaaugaugaua

SEQ ID NO: 1882693 - RNA, 19 nt, Homo sapiens
  misc_RNA (1)...(19): siRNA sense strand
gaagcagcuagcagaguua

SEQ ID NO: 1882694 - RNA, 19 nt, Homo sapiens
  misc_RNA (1)...(19): siRNA sense strand
gggaugacuuugaggacaa

SEQ ID NO: 1882695 - RNA, 19 nt, Homo sapiens
  misc_RNA (1)...(19): siRNA sense strand
gaacuggguaucucuaugg

SEQ ID NO: 1882696 - RNA, 19 nt, Homo sapiens
  misc_RNA (1)...(19): siRNA sense strand
aaaugucucuggugggaaa

SEQ ID NO: 1882697 - RNA, 19 nt, Homo sapiens
  misc_RNA (1)...(19): siRNA sense strand
gcucaagaguggccagcuu

SEQ ID NO: 1882698 - RNA, 19 nt, Homo sapiens
  misc_RNA (1)...(19): siRNA sense strand
gggcagugacuaauuguga

SEQ ID NO: 1882699 - RNA, 19 nt, Homo sapiens
  misc_RNA (1)...(19): siRNA sense strand
caucaaacaggccaagaaa

SEQ ID NO: 1882700 - RNA, 19 nt, Homo sapiens
  misc_RNA (1)...(19): siRNA sense strand
aacaaacgcugcaaaugug

SEQ ID NO: 1882701 - RNA, 19 nt, Homo sapiens
  misc_RNA (1)...(19): siRNA sense strand
cucaagauguucagaaguu

SEQ ID NO: 1882702 - RNA, 19 nt, Homo sapiens
  misc_RNA (1)...(19): siRNA sense strand
ggagaacuaagcaaagaug

SEQ ID NO: 1882703 - RNA, 19 nt, Homo sapiens
  misc_RNA (1)...(19): siRNA sense strand
ccaagaaagaggacacuga

SEQ ID NO: 1882704 - RNA, 19 nt, Homo sapiens
  misc_RNA (1)...(19): siRNA sense strand
ggaggaacuucggcauuuc

SEQ ID NO: 1882705 - RNA, 19 nt, Homo sapiens
  misc_RNA (1)...(19): siRNA sense strand
gggcaaggguguuuucauu

SEQ ID NO: 1882706 - RNA, 19 nt, Homo sapiens
  misc_RNA (1)...(19): siRNA sense strand
uaagaaagucagcucaaga

SEQ ID NO: 1882707 - RNA, 19 nt, Homo sapiens
  misc_RNA (1)...(19): siRNA sense strand
ggugcaacauggacuacaa

SEQ ID NO: 1882708 - RNA, 19 nt, Homo sapiens
  misc_RNA (1)...(19): siRNA sense strand
aaucaggucuggcucuaug

SEQ ID NO: 1882709 - RNA, 19 nt, Homo sapiens
  misc_RNA (1)...(19): siRNA sense strand
gcaaagauggugaccugau

SEQ ID NO: 1882710 - RNA, 19 nt, Homo sapiens
  misc_RNA (1)...(19): siRNA sense strand
ggaagaaauacaaggugaa

SEQ ID NO: 1882711 - RNA, 19 nt, Homo sapiens
  misc_RNA (1)...(19): siRNA sense strand
caaccuguuuguccagaau

SEQ ID NO: 1882712 - RNA, 19 nt, Homo sapiens
  misc_RNA (1)...(19): siRNA sense strand
aggcuuugcucuuaaauca

SEQ ID NO: 1882713 - RNA, 19 nt, Homo sapiens
  misc_RNA (1)...(19): siRNA sense strand
gaacuggagaagauggauu

SEQ ID NO: 1882714 - RNA, 19 nt, Homo sapiens
  misc_RNA (1)...(19): siRNA sense strand
cagaugacuuugcagacaa

SEQ ID NO: 1882715 - RNA, 19 nt, Homo sapiens
  misc_RNA (1)...(19): siRNA sense strand
ggaacuguaucccauuugc

SEQ ID NO: 1882716 - RNA, 19 nt, Homo sapiens
  misc_RNA (1)...(19): siRNA sense strand
gguggucgccaaauacaaa

SEQ ID NO: 1882717 - RNA, 19 nt, Homo sapiens
  misc_RNA (1)...(19): siRNA sense strand
ugguugagcugcaauagug

SEQ ID NO: 1882718 - RNA, 19 nt, Homo sapiens
  misc_RNA (1)...(19): siRNA sense strand
caaguucggcuacagcuau

SEQ ID NO: 1882719 - RNA, 19 nt, Homo sapiens
  misc_RNA (1)...(19): siRNA sense strand
acaaggugcugcucaagua

SEQ ID NO: 1882720 - RNA, 19 nt, Homo sapiens
  misc_RNA (1)...(19): siRNA sense strand
gugcagagcucuccuccuu

SEQ ID NO: 1882721 - RNA, 19 nt, Homo sapiens
  misc_RNA (1)...(19): siRNA sense strand
cuugauaccuggacauuaa

SEQ ID NO: 1882722 - RNA, 19 nt, Homo sapiens
  misc_RNA (1)...(19): siRNA sense strand
gcagagcucuccuccuuac

SEQ ID NO: 1882723 - RNA, 19 nt, Homo sapiens
  misc_RNA (1)...(19): siRNA sense strand
gcaccgacauggacaaggu

SEQ ID NO: 1882724 - RNA, 19 nt, Homo sapiens
  misc_RNA (1)...(19): siRNA sense strand
ggucaucccugccaagucu

SEQ ID NO: 1882725 - RNA, 19 nt, Homo sapiens
  misc_RNA (1)...(19): siRNA sense strand
gcaacagccuaaacaaggu

SEQ ID NO: 1882726 - RNA, 19 nt, Homo sapiens
  misc_RNA (1)...(19): siRNA sense strand
gagcugagcgugcuaugug

SEQ ID NO: 1882727 - RNA, 19 nt, Homo sapiens
  misc_RNA (1)...(19): siRNA sense strand
ccauuuagaucugaacaau

SEQ ID NO: 1882728 - RNA, 19 nt, Homo sapiens
  misc_RNA (1)...(19): siRNA sense strand
gcucagcugugaagaggau

SEQ ID NO: 1882729 - RNA, 19 nt, Homo sapiens
  misc_RNA (1)...(19): siRNA sense strand
ggaaccgacaggugacuuu

SEQ ID NO: 1882730 - RNA, 19 nt, Homo sapiens
  misc_RNA (1)...(19): siRNA sense strand
ugacugaggaccauuuaga

SEQ ID NO: 1882731 - RNA, 19 nt, Homo sapiens
  misc_RNA (1)...(19): siRNA sense strand
ucacugcaguucagcaauc

SEQ ID NO: 1882732 - RNA, 19 nt, Homo sapiens
  misc_RNA (1)...(19): siRNA sense strand
ugaagaggaugcggcuuga

SEQ ID NO: 1882733 - RNA, 19 nt, Homo sapiens
  misc_RNA (1)...(19): siRNA sense strand
gaaagggguuaaugcauca

SEQ ID NO: 1882734 - RNA, 19 nt, Homo sapiens
  misc_RNA (1)...(19): siRNA sense strand
aagaggaugcggcuugaua

SEQ ID NO: 1882735 - RNA, 19 nt, Homo sapiens
  misc_RNA (1)...(19): siRNA sense strand
ugaugaagaaggcguauga

SEQ ID NO: 1882736 - RNA, 19 nt, Homo sapiens
  misc_RNA (1)...(19): siRNA sense strand
gaggaccauuuagaucuga

SEQ ID NO: 1882737 - RNA, 19 nt, Homo sapiens
  misc_RNA (1)...(19): siRNA sense strand
cgagaucgcacucaucauc

SEQ ID NO: 1882738 - RNA, 19 nt, Homo sapiens
  misc_RNA (1)...(19): siRNA sense strand
gcggaaguuuggccugaug

SEQ ID NO: 1882739 - RNA, 19 nt, Homo sapiens
  misc_RNA (1)...(19): siRNA sense strand
guuaaugcaucacuugacu

SEQ ID NO: 1882740 - RNA, 19 nt, Homo sapiens
  misc_RNA (1)...(19): siRNA sense strand
uaaugcaucacuugacuga

SEQ ID NO: 1882741 - RNA, 19 nt, Homo sapiens
  misc_RNA (1)...(19): siRNA sense strand
ccacaucagcaucaaguca

SEQ ID NO: 1882742 - RNA, 19 nt, Homo sapiens
  misc_RNA (1)...(19): siRNA sense strand
caccaacgccgacaucauc

SEQ ID NO: 1882743 - RNA, 19 nt, Homo sapiens
  misc_RNA (1)...(19): siRNA sense strand
ggaaguuuggccugaugaa

SEQ ID NO: 1882744 - RNA, 19 nt, Homo sapiens
  misc_RNA (1)...(19): siRNA sense strand
gcaacagccaccucagcaa

SEQ ID NO: 1882745 - RNA, 19 nt, Homo sapiens
  misc_RNA (1)...(19): siRNA sense strand
ucgagacccugaggaagaa

SEQ ID NO: 1882746 - RNA, 19 nt, Homo sapiens
  misc_RNA (1)...(19): siRNA sense strand
cuacagaggaacagugugu

SEQ ID NO: 1882747 - RNA, 19 nt, Homo sapiens
  misc_RNA (1)...(19): siRNA sense strand
ugaggaccauuuagaucug

SEQ ID NO: 1882748 - RNA, 19 nt, Homo sapiens
  misc_RNA (1)...(19): siRNA sense strand
ucacuugacugaggaccau

SEQ ID NO: 1882749 - RNA, 19 nt, Homo sapiens
  misc_RNA (1)...(19): siRNA sense strand
gaaccgacaggugacuuuc

SEQ ID NO: 1882750 - RNA, 19 nt, Homo sapiens
  misc_RNA (1)...(19): siRNA sense strand
gcuugauaccuggacauua

SEQ ID NO: 1882751 - RNA, 19 nt, Homo sapiens
  misc_RNA (1)...(19): siRNA sense strand
aguuuggccugaugaagaa

SEQ ID NO: 1882752 - RNA, 19 nt, Homo sapiens
  misc_RNA (1)...(19): siRNA sense strand
gcaccaacgccgacaucau

SEQ ID NO: 1882753 - RNA, 19 nt, Homo sapiens
  misc_RNA (1)...(19): siRNA sense strand
gacaaggugcugcucaagu

SEQ ID NO: 1882754 - RNA, 19 nt, Homo sapiens
  misc_RNA (1)...(19): siRNA sense strand
ccacagcacccagcuugga

SEQ ID NO: 1882755 - RNA, 19 nt, Homo sapiens
  misc_RNA (1)...(19): siRNA sense strand
cugccuacaacacagauua

SEQ ID NO: 1882756 - RNA, 19 nt, Homo sapiens
  misc_RNA (1)...(19): siRNA sense strand
uaccuggacauuaaaguga

SEQ ID NO: 1882757 - RNA, 19 nt, Homo sapiens
  misc_RNA (1)...(19): siRNA sense strand
gaaguuuggccugaugaag

SEQ ID NO: 1882758 - RNA, 19 nt, Homo sapiens
  misc_RNA (1)...(19): siRNA sense strand
uggacaaggugcugcucaa

SEQ ID NO: 1882759 - RNA, 19 nt, Homo sapiens
  misc_RNA (1)...(19): siRNA sense strand
auuuagaucugaacaaugc

SEQ ID NO: 1882760 - RNA, 19 nt, Homo sapiens
  misc_RNA (1)...(19): siRNA sense strand
gaccugcgagucaucacuu

SEQ ID NO: 1882761 - RNA, 19 nt, Homo sapiens
  misc_RNA (1)...(19): siRNA sense strand
gaucgcacucaucaucuuc

SEQ ID NO: 1882762 - RNA, 19 nt, Homo sapiens
  misc_RNA (1)...(19): siRNA sense strand
ggacaaggugcugcucaag

SEQ ID NO: 1882763 - RNA, 19 nt, Homo sapiens
  misc_RNA (1)...(19): siRNA sense strand
gacugaggaccauuuagau

SEQ ID NO: 1882764 - RNA, 19 nt, Homo sapiens
  misc_RNA (1)...(19): siRNA sense strand
agccagcacuacagaggaa

SEQ ID NO: 1882765 - RNA, 19 nt, Homo sapiens
  misc_RNA (1)...(19): siRNA sense strand
cagcagccagcacuacaga

SEQ ID NO: 1882766 - RNA, 19 nt, Homo sapiens
  misc_RNA (1)...(19): siRNA sense strand
gcucacugcaguucagcaa

SEQ ID NO: 1882767 - RNA, 19 nt, Homo sapiens
  misc_RNA (1)...(19): siRNA sense strand
gcuaugugacugcgagauc

SEQ ID NO: 1882768 - RNA, 19 nt, Homo sapiens
  misc_RNA (1)...(19): siRNA sense strand
ggguuaaugcaucacuuga

SEQ ID NO: 1882769 - RNA, 19 nt, Homo sapiens
  misc_RNA (1)...(19): siRNA sense strand
aaguuuggccugaugaaga

SEQ ID NO: 1882770 - RNA, 19 nt, Homo sapiens
  misc_RNA (1)...(19): siRNA sense strand
gaagauagcuuggaaauga

SEQ ID NO: 1882771 - RNA, 19 nt, Homo sapiens
  misc_RNA (1)...(19): siRNA sense strand
gaacagagccgacaauugu

SEQ ID NO: 1882772 - RNA, 19 nt, Homo sapiens
  misc_RNA (1)...(19): siRNA sense strand
guagaacgcuguacccuaa

SEQ ID NO: 1882773 - RNA, 19 nt, Homo sapiens
  misc_RNA (1)...(19): siRNA sense strand
ggacaggccuucuaaagug

SEQ ID NO: 1882774 - RNA, 19 nt, Homo sapiens
  misc_RNA (1)...(19): siRNA sense strand
gaagaaauaucgugaaagg

SEQ ID NO: 1882775 - RNA, 19 nt, Homo sapiens
  misc_RNA (1)...(19): siRNA sense strand
caauguggauggcaauuua

SEQ ID NO: 1882776 - RNA, 19 nt, Homo sapiens
  misc_RNA (1)...(19): siRNA sense strand
gauagcagcucuguaaaug

SEQ ID NO: 1882777 - RNA, 19 nt, Homo sapiens
  misc_RNA (1)...(19): siRNA sense strand
gguuaugccuuucagauuu

SEQ ID NO: 1882778 - RNA, 19 nt, Homo sapiens
  misc_RNA (1)...(19): siRNA sense strand
caacugaacaucuauauca

SEQ ID NO: 1882779 - RNA, 19 nt, Homo sapiens
  misc_RNA (1)...(19): siRNA sense strand
caaaggcucuggugcauca

SEQ ID NO: 1882780 - RNA, 19 nt, Homo sapiens
  misc_RNA (1)...(19): siRNA sense strand
ggcaaacugugaccgaaua

SEQ ID NO: 1882781 - RNA, 19 nt, Homo sapiens
  misc_RNA (1)...(19): siRNA sense strand
gaaagugaccaagaaguuu

SEQ ID NO: 1882782 - RNA, 19 nt, Homo sapiens
  misc_RNA (1)...(19): siRNA sense strand
gaccaggacauauuugaua

SEQ ID NO: 1882783 - RNA, 19 nt, Homo sapiens
  misc_RNA (1)...(19): siRNA sense strand
guuaugccuuucagauuua

SEQ ID NO: 1882784 - RNA, 19 nt, Homo sapiens
  misc_RNA (1)...(19): siRNA sense strand
gaaacacggugcccucauc

SEQ ID NO: 1882785 - RNA, 19 nt, Homo sapiens
  misc_RNA (1)...(19): siRNA sense strand
aaguauagauggccucaua

SEQ ID NO: 1882786 - RNA, 19 nt, Homo sapiens
  misc_RNA (1)...(19): siRNA sense strand
gaaaggaugagcucaaauc

SEQ ID NO: 1882787 - RNA, 19 nt, Homo sapiens
  misc_RNA (1)...(19): siRNA sense strand
gaauggaccaggacauauu

SEQ ID NO: 1882788 - RNA, 19 nt, Homo sapiens
  misc_RNA (1)...(19): siRNA sense strand
gugaucaacugaacaucua

SEQ ID NO: 1882789 - RNA, 19 nt, Homo sapiens
  misc_RNA (1)...(19): siRNA sense strand
ugaaucaacuguauaacug

SEQ ID NO: 1882790 - RNA, 19 nt, Homo sapiens
  misc_RNA (1)...(19): siRNA sense strand
ugaauguucccuaugauua

SEQ ID NO: 1882791 - RNA, 19 nt, Homo sapiens
  misc_RNA (1)...(19): siRNA sense strand
gcagagagcacaauuuuaa

SEQ ID NO: 1882792 - RNA, 19 nt, Homo sapiens
  misc_RNA (1)...(19): siRNA sense strand
ggaguauucugcagacaau

SEQ ID NO: 1882793 - RNA, 19 nt, Homo sapiens
  misc_RNA (1)...(19): siRNA sense strand
ccaaauggaacucuguaua

SEQ ID NO: 1882794 - RNA, 19 nt, Homo sapiens
  misc_RNA (1)...(19): siRNA sense strand
ggauauauuuccacuugau

SEQ ID NO: 1882795 - RNA, 19 nt, Homo sapiens
  misc_RNA (1)...(19): siRNA sense strand
gagcucaaaucgaccaaau

SEQ ID NO: 1882796 - RNA, 19 nt, Homo sapiens
  misc_RNA (1)...(19): siRNA sense strand
gcuuggaaaugaaugcuaa

SEQ ID NO: 1882797 - RNA, 19 nt, Homo sapiens
  misc_RNA (1)...(19): siRNA sense strand
uaaggaauuucacacaguu

SEQ ID NO: 1882798 - RNA, 19 nt, Homo sapiens
  misc_RNA (1)...(19): siRNA sense strand
acucugaucuccuaaaguu

SEQ ID NO: 1882799 - RNA, 19 nt, Homo sapiens
  misc_RNA (1)...(19): siRNA sense strand
agacauaucucaccucaac

SEQ ID NO: 1882800 - RNA, 19 nt, Homo sapiens
  misc_RNA (1)...(19): siRNA sense strand
uauggaaucugucuugguu

SEQ ID NO: 1882801 - RNA, 19 nt, Homo sapiens
  misc_RNA (1)...(19): siRNA sense strand
gcaacggguuucacagguu

SEQ ID NO: 1882802 - RNA, 19 nt, Homo sapiens
  misc_RNA (1)...(19): siRNA sense strand
acugggagcuggcaacuuu

SEQ ID NO: 1882803 - RNA, 19 nt, Homo sapiens
  misc_RNA (1)...(19): siRNA sense strand
caccucaacucuacacaaa

SEQ ID NO: 1882804 - RNA, 19 nt, Homo sapiens
  misc_RNA (1)...(19): siRNA sense strand
ggaaccagugccuuuauaa

SEQ ID NO: 1882805 - RNA, 19 nt, Homo sapiens
  misc_RNA (1)...(19): siRNA sense strand
ucacaagaaucucagacuu

SEQ ID NO: 1882806 - RNA, 19 nt, Homo sapiens
  misc_RNA (1)...(19): siRNA sense strand
ggagaaaggugugaaaaga

SEQ ID NO: 1882807 - RNA, 19 nt, Homo sapiens
  misc_RNA (1)...(19): siRNA sense strand
gcaacuuuaucauguaaca

SEQ ID NO: 1882808 - RNA, 19 nt, Homo sapiens
  misc_RNA (1)...(19): siRNA sense strand
gcuggcaacuuuaucaugu

SEQ ID NO: 1882809 - RNA, 19 nt, Homo sapiens
  misc_RNA (1)...(19): siRNA sense strand
acaagaaucucagacuuug

SEQ ID NO: 1882810 - RNA, 19 nt, Homo sapiens
  misc_RNA (1)...(19): siRNA sense strand
cuugauagggcacaaauua

SEQ ID NO: 1882811 - RNA, 19 nt, Homo sapiens
  misc_RNA (1)...(19): siRNA sense strand
gugaaaggaugagcucaaa

SEQ ID NO: 1882812 - RNA, 19 nt, Homo sapiens
  misc_RNA (1)...(19): siRNA sense strand
caauuuaacccuuguggaa

SEQ ID NO: 1882813 - RNA, 19 nt, Homo sapiens
  misc_RNA (1)...(19): siRNA sense strand
ccaagguucugguuucuuc

SEQ ID NO: 1882814 - RNA, 19 nt, Homo sapiens
  misc_RNA (1)...(19): siRNA sense strand
gauaaugugggacagaauu

SEQ ID NO: 1882815 - RNA, 19 nt, Homo sapiens
  misc_RNA (1)...(19): siRNA sense strand
gcaacaagccacaaugaca

SEQ ID NO: 1882816 - RNA, 19 nt, Homo sapiens
  misc_RNA (1)...(19): siRNA sense strand
caaauggaacucuguauag

SEQ ID NO: 1882817 - RNA, 19 nt, Homo sapiens
  misc_RNA (1)...(19): siRNA sense strand
uagcagcucuguaaaugug

SEQ ID NO: 1882818 - RNA, 19 nt, Homo sapiens
  misc_RNA (1)...(19): siRNA sense strand
gauccaaaguucaggagau

SEQ ID NO: 1882819 - RNA, 19 nt, Homo sapiens
  misc_RNA (1)...(19): siRNA sense strand
gaaaauguguguggcauga

SEQ ID NO: 1882820 - RNA, 19 nt, Homo sapiens
  misc_RNA (1)...(19): siRNA sense strand
guaaugcacuacaguaaaa

SEQ ID NO: 1882821 - RNA, 19 nt, Homo sapiens
  misc_RNA (1)...(19): siRNA sense strand
ggaacagagccgacaauug

SEQ ID NO: 1882822 - RNA, 19 nt, Homo sapiens
  misc_RNA (1)...(19): siRNA sense strand
aaagugaccaagaaguuua

SEQ ID NO: 1882823 - RNA, 19 nt, Homo sapiens
  misc_RNA (1)...(19): siRNA sense strand
uaagggaguuauccucaau

SEQ ID NO: 1882824 - RNA, 19 nt, Homo sapiens
  misc_RNA (1)...(19): siRNA sense strand
gaucaucacccuugucagu

SEQ ID NO: 1882825 - RNA, 19 nt, Homo sapiens
  misc_RNA (1)...(19): siRNA sense strand
cauugaaagugaccaagaa

SEQ ID NO: 1882826 - RNA, 19 nt, Homo sapiens
  misc_RNA (1)...(19): siRNA sense strand
ggaguuauccucaaugcau

SEQ ID NO: 1882827 - RNA, 19 nt, Homo sapiens
  misc_RNA (1)...(19): siRNA sense strand
gaucaacugaacaucuaua

SEQ ID NO: 1882828 - RNA, 19 nt, Homo sapiens
  misc_RNA (1)...(19): siRNA sense strand
ugauguagauggcggaaug

SEQ ID NO: 1882829 - RNA, 19 nt, Homo sapiens
  misc_RNA (1)...(19): siRNA sense strand
ccucaacucuacacaaauc

SEQ ID NO: 1882830 - RNA, 19 nt, Homo sapiens
  misc_RNA (1)...(19): siRNA sense strand
aggaagaaauaucgugaaa

SEQ ID NO: 1882831 - RNA, 19 nt, Homo sapiens
  misc_RNA (1)...(19): siRNA sense strand
gaguuauccucaaugcauu

SEQ ID NO: 1882832 - RNA, 19 nt, Homo sapiens
  misc_RNA (1)...(19): siRNA sense strand
gacggugucugcacuguuc

SEQ ID NO: 1882833 - RNA, 19 nt, Homo sapiens
  misc_RNA (1)...(19): siRNA sense strand
uggaaccagugccuuuaua

SEQ ID NO: 1882834 - RNA, 19 nt, Homo sapiens
  misc_RNA (1)...(19): siRNA sense strand
agggauauauuuccacuug

SEQ ID NO: 1882835 - RNA, 19 nt, Homo sapiens
  misc_RNA (1)...(19): siRNA sense strand
ugauaucaaugaagguuug

SEQ ID NO: 1882836 - RNA, 19 nt, Homo sapiens
  misc_RNA (1)...(19): siRNA sense strand
ucuagaagauagcuuggaa

SEQ ID NO: 1882837 - RNA, 19 nt, Homo sapiens
  misc_RNA (1)...(19): siRNA sense strand
gagaugauguuuauauccu

SEQ ID NO: 1882838 - RNA, 19 nt, Homo sapiens
  misc_RNA (1)...(19): siRNA sense strand
ugaaagugaccaagaaguu

SEQ ID NO: 1882839 - RNA, 19 nt, Homo sapiens
  misc_RNA (1)...(19): siRNA sense strand
acacggugcccucaucaua

SEQ ID NO: 1882840 - RNA, 19 nt, Homo sapiens
  misc_RNA (1)...(19): siRNA sense strand
cuaaugcagggauauauuu

SEQ ID NO: 1882841 - RNA, 19 nt, Homo sapiens
  misc_RNA (1)...(19): siRNA sense strand
gauagggcacaaauuagaa

SEQ ID NO: 1882842 - RNA, 19 nt, Homo sapiens
  misc_RNA (1)...(19): siRNA sense strand
gaauuucacacaguucauu

SEQ ID NO: 1882843 - RNA, 19 nt, Homo sapiens
  misc_RNA (1)...(19): siRNA sense strand
gguggucugucuauugaug

SEQ ID NO: 1882844 - RNA, 19 nt, Homo sapiens
  misc_RNA (1)...(19): siRNA sense strand
gaugugaucggccaacgaa

SEQ ID NO: 1882845 - RNA, 19 nt, Homo sapiens
  misc_RNA (1)...(19): siRNA sense strand
cacaagaaucucagacuuu

SEQ ID NO: 1882846 - RNA, 19 nt, Homo sapiens
  misc_RNA (1)...(19): siRNA sense strand
agaaauaucgugaaaggau

SEQ ID NO: 1882847 - RNA, 19 nt, Homo sapiens
  misc_RNA (1)...(19): siRNA sense strand
acacuucaguaaugcacua

SEQ ID NO: 1882848 - RNA, 19 nt, Homo sapiens
  misc_RNA (1)...(19): siRNA sense strand
gcuguuucaucuacuguug

SEQ ID NO: 1882849 - RNA, 19 nt, Homo sapiens
  misc_RNA (1)...(19): siRNA sense strand
uaucucaccucaacucuac

SEQ ID NO: 1882850 - RNA, 19 nt, Homo sapiens
  misc_RNA (1)...(19): siRNA sense strand
uggcaacuuuaucauguaa

SEQ ID NO: 1882851 - RNA, 19 nt, Homo sapiens
  misc_RNA (1)...(19): siRNA sense strand
ugaaagugaucaacugaac

SEQ ID NO: 1882852 - RNA, 19 nt, Homo sapiens
  misc_RNA (1)...(19): siRNA sense strand
ggauuucagugccugcaau

SEQ ID NO: 1882853 - RNA, 19 nt, Homo sapiens
  misc_RNA (1)...(19): siRNA sense strand
cagugacucugaucuccua

SEQ ID NO: 1882854 - RNA, 19 nt, Homo sapiens
  misc_RNA (1)...(19): siRNA sense strand
caaugcauuugaacguuau

SEQ ID NO: 1882855 - RNA, 19 nt, Homo sapiens
  misc_RNA (1)...(19): siRNA sense strand
caucuacuguugcuguguu

SEQ ID NO: 1882856 - RNA, 19 nt, Homo sapiens
  misc_RNA (1)...(19): siRNA sense strand
ggaauggaccaggacauau

SEQ ID NO: 1882857 - RNA, 19 nt, Homo sapiens
  misc_RNA (1)...(19): siRNA sense strand
cauauguucuagaagauag

SEQ ID NO: 1882858 - RNA, 19 nt, Homo sapiens
  misc_RNA (1)...(19): siRNA sense strand
cauagucauugcuguuuca

SEQ ID NO: 1882859 - RNA, 19 nt, Homo sapiens
  misc_RNA (1)...(19): siRNA sense strand
gcuuuguucucuaauggaa

SEQ ID NO: 1882860 - RNA, 19 nt, Homo sapiens
  misc_RNA (1)...(19): siRNA sense strand
uggguggucugucuauuga

SEQ ID NO: 1882861 - RNA, 19 nt, Homo sapiens
  misc_RNA (1)...(19): siRNA sense strand
gugccaagguucugguuuc

SEQ ID NO: 1882862 - RNA, 19 nt, Homo sapiens
  misc_RNA (1)...(19): siRNA sense strand
uaacaccuauagugacgau

SEQ ID NO: 1882863 - RNA, 19 nt, Homo sapiens
  misc_RNA (1)...(19): siRNA sense strand
ggagcuggcaacuuuauca

SEQ ID NO: 1882864 - RNA, 19 nt, Homo sapiens
  misc_RNA (1)...(19): siRNA sense strand
uaacuacagacccauuuau

SEQ ID NO: 1882865 - RNA, 19 nt, Homo sapiens
  misc_RNA (1)...(19): siRNA sense strand
gagggugacaucagacuug

SEQ ID NO: 1882866 - RNA, 19 nt, Homo sapiens
  misc_RNA (1)...(19): siRNA sense strand
ucaguaaugcacuacagua

SEQ ID NO: 1882867 - RNA, 19 nt, Homo sapiens
  misc_RNA (1)...(19): siRNA sense strand
ccgauaauggaaacuauuu

SEQ ID NO: 1882868 - RNA, 19 nt, Homo sapiens
  misc_RNA (1)...(19): siRNA sense strand
gggauauauuuccacuuga

SEQ ID NO: 1882869 - RNA, 19 nt, Homo sapiens
  misc_RNA (1)...(19): siRNA sense strand
gaaagugaucaacugaaca

SEQ ID NO: 1882870 - RNA, 19 nt, Homo sapiens
  misc_RNA (1)...(19): siRNA sense strand
gagaagcgcuugagaagga

SEQ ID NO: 1882871 - RNA, 19 nt, Homo sapiens
  misc_RNA (1)...(19): siRNA sense strand
ggaaauugaugaugaggaa

SEQ ID NO: 1882872 - RNA, 19 nt, Homo sapiens
  misc_RNA (1)...(19): siRNA sense strand
ggaugaggaugaagaagua

SEQ ID NO: 1882873 - RNA, 19 nt, Homo sapiens
  misc_RNA (1)...(19): siRNA sense strand
ggagaaagcagaaauugaa

SEQ ID NO: 1882874 - RNA, 19 nt, Homo sapiens
  misc_RNA (1)...(19): siRNA sense strand
caaaagagcuggaagagaa

SEQ ID NO: 1882875 - RNA, 19 nt, Homo sapiens
  misc_RNA (1)...(19): siRNA sense strand
ugaggaggaugaagaauuu

SEQ ID NO: 1882876 - RNA, 19 nt, Homo sapiens
  misc_RNA (1)...(19): siRNA sense strand
gcaaagucauuaccaacaa

SEQ ID NO: 1882877 - RNA, 19 nt, Homo sapiens
  misc_RNA (1)...(19): siRNA sense strand
ggacagagaagaucgagaa

SEQ ID NO: 1882878 - RNA, 19 nt, Homo sapiens
  misc_RNA (1)...(19): siRNA sense strand
caaauacacucaccuugug

SEQ ID NO: 1882879 - RNA, 19 nt, Homo sapiens
  misc_RNA (1)...(19): siRNA sense strand
acacaaaguucuucaaaca

SEQ ID NO: 1882880 - RNA, 19 nt, Homo sapiens
  misc_RNA (1)...(19): siRNA sense strand
uaagaaagccaaagaacaa

SEQ ID NO: 1882881 - RNA, 19 nt, Homo sapiens
  misc_RNA (1)...(19): siRNA sense strand
gagcugaacuucgggcaaa

SEQ ID NO: 1882882 - RNA, 19 nt, Homo sapiens
  misc_RNA (1)...(19): siRNA sense strand
ggaggaucauuucaauaaa

SEQ ID NO: 1882883 - RNA, 19 nt, Homo sapiens
  misc_RNA (1)...(19): siRNA sense strand
gcucaggucgcaccaaaua

SEQ ID NO: 1882884 - RNA, 19 nt, Homo sapiens
  misc_RNA (1)...(19): siRNA sense strand
gcaaacggcaaagucauua

SEQ ID NO: 1882885 - RNA, 19 nt, Homo sapiens
  misc_RNA (1)...(19): siRNA sense strand
gaaggagaaagcagaaauu

SEQ ID NO: 1882886 - RNA, 19 nt, Homo sapiens
  misc_RNA (1)...(19): siRNA sense strand
gcaaauacaaguucuuaca

SEQ ID NO: 1882887 - RNA, 19 nt, Homo sapiens
  misc_RNA (1)...(19): siRNA sense strand
caaagucauuaccaacaaa

SEQ ID NO: 1882888 - RNA, 19 nt, Homo sapiens
  misc_RNA (1)...(19): siRNA sense strand
gggcaaauacaaguucuua

SEQ ID NO: 1882889 - RNA, 19 nt, Homo sapiens
  misc_RNA (1)...(19): siRNA sense strand
caagauaccaccuccuuug

SEQ ID NO: 1882890 - RNA, 19 nt, Homo sapiens
  misc_RNA (1)...(19): siRNA sense strand
gaaagccaaagaacaagaa

SEQ ID NO: 1882891 - RNA, 19 nt, Homo sapiens
  misc_RNA (1)...(19): siRNA sense strand
gagauggagccucgccuua

SEQ ID NO: 1882892 - RNA, 19 nt, Homo sapiens
  misc_RNA (1)...(19): siRNA sense strand
uuacagaaccguauuagug

SEQ ID NO: 1882893 - RNA, 19 nt, Homo sapiens
  misc_RNA (1)...(19): siRNA sense strand
uggaugcacucaauacuga

SEQ ID NO: 1882894 - RNA, 19 nt, Homo sapiens
  misc_RNA (1)...(19): siRNA sense strand
acacucaccuuguggauca

SEQ ID NO: 1882895 - RNA, 19 nt, Homo sapiens
  misc_RNA (1)...(19): siRNA sense strand
uggaggaucauuucaauaa

SEQ ID NO: 1882896 - RNA, 19 nt, Homo sapiens
  misc_RNA (1)...(19): siRNA sense strand
gaagguaaagcguuaugug

SEQ ID NO: 1882897 - RNA, 19 nt, Homo sapiens
  misc_RNA (1)...(19): siRNA sense strand
ggaggaaauugaugaugag

SEQ ID NO: 1882898 - RNA, 19 nt, Homo sapiens
  misc_RNA (1)...(19): siRNA sense strand
aguggaaccugaaguggua

SEQ ID NO: 1882899 - RNA, 19 nt, Homo sapiens
  misc_RNA (1)...(19): siRNA sense strand
aggaggaaauugaugauga

SEQ ID NO: 1882900 - RNA, 19 nt, Homo sapiens
  misc_RNA (1)...(19): siRNA sense strand
aagugaagguaaagcguua

SEQ ID NO: 1882901 - RNA, 19 nt, Homo sapiens
  misc_RNA (1)...(19): siRNA sense strand
gguacgagauguauuugag

SEQ ID NO: 1882902 - RNA, 19 nt, Homo sapiens
  misc_RNA (1)...(19): siRNA sense strand
ccaaauacacucaccuugu

SEQ ID NO: 1882903 - RNA, 19 nt, Homo sapiens
  misc_RNA (1)...(19): siRNA sense strand
gaagacagcagugaagaag

SEQ ID NO: 1882904 - RNA, 19 nt, Homo sapiens
  misc_RNA (1)...(19): siRNA sense strand
gaaguauacaagagagauu

SEQ ID NO: 1882905 - RNA, 19 nt, Homo sapiens
  misc_RNA (1)...(19): siRNA sense strand
gauggagccucgccuuaag

SEQ ID NO: 1882906 - RNA, 19 nt, Homo sapiens
  misc_RNA (1)...(19): siRNA sense strand
guacacagacagugaagau

SEQ ID NO: 1882907 - RNA, 19 nt, Homo sapiens
  misc_RNA (1)...(19): siRNA sense strand
caagcgcucucaugaagca

SEQ ID NO: 1882908 - RNA, 19 nt, Homo sapiens
  misc_RNA (1)...(19): siRNA sense strand
acacagacagugaagauga

SEQ ID NO: 1882909 - RNA, 19 nt, Homo sapiens
  misc_RNA (1)...(19): siRNA sense strand
aaaccauucuuccuaaagu

SEQ ID NO: 1882910 - RNA, 19 nt, Homo sapiens
  misc_RNA (1)...(19): siRNA sense strand
ggaauaugaggcauggaaa

SEQ ID NO: 1882911 - RNA, 19 nt, Homo sapiens
  misc_RNA (1)...(19): siRNA sense strand
gccgaagcauugaaacaga

SEQ ID NO: 1882912 - RNA, 19 nt, Homo sapiens
  misc_RNA (1)...(19): siRNA sense strand
aaggugagauuucaaugga

SEQ ID NO: 1882913 - RNA, 19 nt, Homo sapiens
  misc_RNA (1)...(19): siRNA sense strand
gaugaagaaguauacaaga

SEQ ID NO: 1882914 - RNA, 19 nt, Homo sapiens
  misc_RNA (1)...(19): siRNA sense strand
gaaucaagagggacagaga

SEQ ID NO: 1882915 - RNA, 19 nt, Homo sapiens
  misc_RNA (1)...(19): siRNA sense strand
ggaaaguucgagagcuaaa

SEQ ID NO: 1882916 - RNA, 19 nt, Homo sapiens
  misc_RNA (1)...(19): siRNA sense strand
gagaggagucagaaucaga

SEQ ID NO: 1882917 - RNA, 19 nt, Homo sapiens
  misc_RNA (1)...(19): siRNA sense strand
gauaccaccuccuuugacu

SEQ ID NO: 1882918 - RNA, 19 nt, Homo sapiens
  misc_RNA (1)...(19): siRNA sense strand
cgaaagaaggaccgaguga

SEQ ID NO: 1882919 - RNA, 19 nt, Homo sapiens
  misc_RNA (1)...(19): siRNA sense strand
ucaugcaggucaagaacuu

SEQ ID NO: 1882920 - RNA, 19 nt, Homo sapiens
  misc_RNA (1)...(19): siRNA sense strand
uaugaggcauggaaaguuc

SEQ ID NO: 1882921 - RNA, 19 nt, Homo sapiens
  misc_RNA (1)...(19): siRNA sense strand
aagcagagccugaggaaca

SEQ ID NO: 1882922 - RNA, 19 nt, Homo sapiens
  misc_RNA (1)...(19): siRNA sense strand
ugaagaaguauacaagaga

SEQ ID NO: 1882923 - RNA, 19 nt, Homo sapiens
  misc_RNA (1)...(19): siRNA sense strand
acucaauacugaugaugaa

SEQ ID NO: 1882924 - RNA, 19 nt, Homo sapiens
  misc_RNA (1)...(19): siRNA sense strand
ccgaagcauugaaacagaa

SEQ ID NO: 1882925 - RNA, 19 nt, Homo sapiens
  misc_RNA (1)...(19): siRNA sense strand
gaagaggaggaggaaauug

SEQ ID NO: 1882926 - RNA, 19 nt, Homo sapiens
  misc_RNA (1)...(19): siRNA sense strand
agacagcagugaagaagag

SEQ ID NO: 1882927 - RNA, 19 nt, Homo sapiens
  misc_RNA (1)...(19): siRNA sense strand
gaaccguauuagugaagau

SEQ ID NO: 1882928 - RNA, 19 nt, Homo sapiens
  misc_RNA (1)...(19): siRNA sense strand
ggaugaagaaguauacaag

SEQ ID NO: 1882929 - RNA, 19 nt, Homo sapiens
  misc_RNA (1)...(19): siRNA sense strand
caagagggacagagaagau

SEQ ID NO: 1882930 - RNA, 19 nt, Homo sapiens
  misc_RNA (1)...(19): siRNA sense strand
gaggaaaggcgccaguaca

SEQ ID NO: 1882931 - RNA, 19 nt, Homo sapiens
  misc_RNA (1)...(19): siRNA sense strand
cccaagcgcucucaugaag

SEQ ID NO: 1882932 - RNA, 19 nt, Homo sapiens
  misc_RNA (1)...(19): siRNA sense strand
gagaagacagcagugaaga

SEQ ID NO: 1882933 - RNA, 19 nt, Homo sapiens
  misc_RNA (1)...(19): siRNA sense strand
gagcggccaucugccaaga

SEQ ID NO: 1882934 - RNA, 19 nt, Homo sapiens
  misc_RNA (1)...(19): siRNA sense strand
aagccagucuucauucgaa

SEQ ID NO: 1882935 - RNA, 19 nt, Homo sapiens
  misc_RNA (1)...(19): siRNA sense strand
gccaagagagugcccagaa

SEQ ID NO: 1882936 - RNA, 19 nt, Homo sapiens
  misc_RNA (1)...(19): siRNA sense strand
ccuggaggaucauuucaau

SEQ ID NO: 1882937 - RNA, 19 nt, Homo sapiens
  misc_RNA (1)...(19): siRNA sense strand
gaaaccugacugaggaaga

SEQ ID NO: 1882938 - RNA, 19 nt, Homo sapiens
  misc_RNA (1)...(19): siRNA sense strand
cagaugaggaggaugaaga

SEQ ID NO: 1882939 - RNA, 19 nt, Homo sapiens
  misc_RNA (1)...(19): siRNA sense strand
uacagaaccguauuaguga

SEQ ID NO: 1882940 - RNA, 19 nt, Homo sapiens
  misc_RNA (1)...(19): siRNA sense strand
ggcaaacggcaaagucauu

SEQ ID NO: 1882941 - RNA, 19 nt, Homo sapiens
  misc_RNA (1)...(19): siRNA sense strand
ggaagucauggaaguggaa

SEQ ID NO: 1882942 - RNA, 19 nt, Homo sapiens
  misc_RNA (1)...(19): siRNA sense strand
caagagagugcccagaaca

SEQ ID NO: 1882943 - RNA, 19 nt, Homo sapiens
  misc_RNA (1)...(19): siRNA sense strand
gagaggagagcugaacuuc

SEQ ID NO: 1882944 - RNA, 19 nt, Homo sapiens
  misc_RNA (1)...(19): siRNA sense strand
gaagagaggagagcugaac

SEQ ID NO: 1882945 - RNA, 19 nt, Homo sapiens
  misc_RNA (1)...(19): siRNA sense strand
gaagaugagggucguucug

SEQ ID NO: 1882946 - RNA, 19 nt, Homo sapiens
  misc_RNA (1)...(19): siRNA sense strand
ccuauggaguccucagaug

SEQ ID NO: 1882947 - RNA, 19 nt, Homo sapiens
  misc_RNA (1)...(19): siRNA sense strand
gaauaugaggcauggaaag

SEQ ID NO: 1882948 - RNA, 19 nt, Homo sapiens
  misc_RNA (1)...(19): siRNA sense strand
ugacucagaaguagaagga

SEQ ID NO: 1882949 - RNA, 19 nt, Homo sapiens
  misc_RNA (1)...(19): siRNA sense strand
gagagugcccagaacacaa

SEQ ID NO: 1882950 - RNA, 19 nt, Homo sapiens
  misc_RNA (1)...(19): siRNA sense strand
aaauugaacgcaugcgaaa

SEQ ID NO: 1882951 - RNA, 19 nt, Homo sapiens
  misc_RNA (1)...(19): siRNA sense strand
aagaggaggaggaaauuga

SEQ ID NO: 1882952 - RNA, 19 nt, Homo sapiens
  misc_RNA (1)...(19): siRNA sense strand
acagaaccguauuagugaa

SEQ ID NO: 1882953 - RNA, 19 nt, Homo sapiens
  misc_RNA (1)...(19): siRNA sense strand
ccaagagagugcccagaac

SEQ ID NO: 1882954 - RNA, 19 nt, Homo sapiens
  misc_RNA (1)...(19): siRNA sense strand
aaagaaggaccgagugaca

SEQ ID NO: 1882955 - RNA, 19 nt, Homo sapiens
  misc_RNA (1)...(19): siRNA sense strand
ggagucagaaucagagucu

SEQ ID NO: 1882956 - RNA, 19 nt, Homo sapiens
  misc_RNA (1)...(19): siRNA sense strand
gaucgagaagcgcuugaga

SEQ ID NO: 1882957 - RNA, 19 nt, Homo sapiens
  misc_RNA (1)...(19): siRNA sense strand
ggaaaggcgccaguacaca

SEQ ID NO: 1882958 - RNA, 19 nt, Homo sapiens
  misc_RNA (1)...(19): siRNA sense strand
aagaagaggaggaggaaau

SEQ ID NO: 1882959 - RNA, 19 nt, Homo sapiens
  misc_RNA (1)...(19): siRNA sense strand
caaccgcccauucagucua

SEQ ID NO: 1882960 - RNA, 19 nt, Homo sapiens
  misc_RNA (1)...(19): siRNA sense strand
cuaaagucaugcaggucaa

SEQ ID NO: 1882961 - RNA, 19 nt, Homo sapiens
  misc_RNA (1)...(19): siRNA sense strand
auggaaaguucgagagcua

SEQ ID NO: 1882962 - RNA, 19 nt, Homo sapiens
  misc_RNA (1)...(19): siRNA sense strand
gcaaugagaaaggugagau

SEQ ID NO: 1882963 - RNA, 19 nt, Homo sapiens
  misc_RNA (1)...(19): siRNA sense strand
caaugagaaaggugagauu

SEQ ID NO: 1882964 - RNA, 19 nt, Homo sapiens
  misc_RNA (1)...(19): siRNA sense strand
ugaagccgaagcauugaaa

SEQ ID NO: 1882965 - RNA, 19 nt, Homo sapiens
  misc_RNA (1)...(19): siRNA sense strand
ggagaggagucagaaucag

SEQ ID NO: 1882966 - RNA, 19 nt, Homo sapiens
  misc_RNA (1)...(19): siRNA sense strand
uuaagaaagccaaagaaca

SEQ ID NO: 1882967 - RNA, 19 nt, Homo sapiens
  misc_RNA (1)...(19): siRNA sense strand
caaauacaaguucuuacag

SEQ ID NO: 1882968 - RNA, 19 nt, Homo sapiens
  misc_RNA (1)...(19): siRNA sense strand
ucaagauaccaccuccuuu

SEQ ID NO: 1882969 - RNA, 19 nt, Homo sapiens
  misc_RNA (1)...(19): siRNA sense strand
acgcucaggucgcaccaaa

SEQ ID NO: 1882970 - RNA, 19 nt, Homo sapiens
  misc_RNA (1)...(19): siRNA sense strand
gaaauacucugucuagaaa

SEQ ID NO: 1882971 - RNA, 19 nt, Homo sapiens
  misc_RNA (1)...(19): siRNA sense strand
gaagagaaauccaaacauu

SEQ ID NO: 1882972 - RNA, 19 nt, Homo sapiens
  misc_RNA (1)...(19): siRNA sense strand
gcaagaagcugaaguaugg

SEQ ID NO: 1882973 - RNA, 19 nt, Homo sapiens
  misc_RNA (1)...(19): siRNA sense strand
gaaagaaaccucaaugauu

SEQ ID NO: 1882974 - RNA, 19 nt, Homo sapiens
  misc_RNA (1)...(19): siRNA sense strand
gaaguagagucaucuuuaa

SEQ ID NO: 1882975 - RNA, 19 nt, Homo sapiens
  misc_RNA (1)...(19): siRNA sense strand
gaaaugauaccaaagauga

SEQ ID NO: 1882976 - RNA, 19 nt, Homo sapiens
  misc_RNA (1)...(19): siRNA sense strand
caaaugagccugcuacuga

SEQ ID NO: 1882977 - RNA, 19 nt, Homo sapiens
  misc_RNA (1)...(19): siRNA sense strand
gaaauuaacaguagaggaa

SEQ ID NO: 1882978 - RNA, 19 nt, Homo sapiens
  misc_RNA (1)...(19): siRNA sense strand
caaaguacaugcagaacaa

SEQ ID NO: 1882979 - RNA, 19 nt, Homo sapiens
  misc_RNA (1)...(19): siRNA sense strand
ggagaaagaaaccaaauuu

SEQ ID NO: 1882980 - RNA, 19 nt, Homo sapiens
  misc_RNA (1)...(19): siRNA sense strand
gagaagacauaacggauga

SEQ ID NO: 1882981 - RNA, 19 nt, Homo sapiens
  misc_RNA (1)...(19): siRNA sense strand
acaaguagcugaagccaaa

SEQ ID NO: 1882982 - RNA, 19 nt, Homo sapiens
  misc_RNA (1)...(19): siRNA sense strand
ggaaaauggugcuuacuua

SEQ ID NO: 1882983 - RNA, 19 nt, Homo sapiens
  misc_RNA (1)...(19): siRNA sense strand
ggaaagaacaagugaguga

SEQ ID NO: 1882984 - RNA, 19 nt, Homo sapiens
  misc_RNA (1)...(19): siRNA sense strand
gaugauaacuuggaauuag

SEQ ID NO: 1882985 - RNA, 19 nt, Homo sapiens
  misc_RNA (1)...(19): siRNA sense strand
caacagaagcacaaaguuu

SEQ ID NO: 1882986 - RNA, 19 nt, Homo sapiens
  misc_RNA (1)...(19): siRNA sense strand
gaagaagaauuggagagaa

SEQ ID NO: 1882987 - RNA, 19 nt, Homo sapiens
  misc_RNA (1)...(19): siRNA sense strand
gaacgcuuguuaaagauga

SEQ ID NO: 1882988 - RNA, 19 nt, Homo sapiens
  misc_RNA (1)...(19): siRNA sense strand
gauucaugcugcuaaguua

SEQ ID NO: 1882989 - RNA, 19 nt, Homo sapiens
  misc_RNA (1)...(19): siRNA sense strand
gagcuuacagagcauauua

SEQ ID NO: 1882990 - RNA, 19 nt, Homo sapiens
  misc_RNA (1)...(19): siRNA sense strand
gaagaacgacugaagauag

SEQ ID NO: 1882991 - RNA, 19 nt, Homo sapiens
  misc_RNA (1)...(19): siRNA sense strand
ugaaguagagucaucuuua

SEQ ID NO: 1882992 - RNA, 19 nt, Homo sapiens
  misc_RNA (1)...(19): siRNA sense strand
ugaacaagaugaauugaug

SEQ ID NO: 1882993 - RNA, 19 nt, Homo sapiens
  misc_RNA (1)...(19): siRNA sense strand
gaacagguccaauucugaa

SEQ ID NO: 1882994 - RNA, 19 nt, Homo sapiens
  misc_RNA (1)...(19): siRNA sense strand
cugaagagcuggagaccua

SEQ ID NO: 1882995 - RNA, 19 nt, Homo sapiens
  misc_RNA (1)...(19): siRNA sense strand
uaaagaaagucacaucaag

SEQ ID NO: 1882996 - RNA, 19 nt, Homo sapiens
  misc_RNA (1)...(19): siRNA sense strand
guaugaaggcuaugaagua

SEQ ID NO: 1882997 - RNA, 19 nt, Homo sapiens
  misc_RNA (1)...(19): siRNA sense strand
gaaacagagcuuaaauuug

SEQ ID NO: 1882998 - RNA, 19 nt, Homo sapiens
  misc_RNA (1)...(19): siRNA sense strand
gauacagucucuagaagau

SEQ ID NO: 1882999 - RNA, 19 nt, Homo sapiens
  misc_RNA (1)...(19): siRNA sense strand
gaaaguaacauuugaagac

SEQ ID NO: 1883000 - RNA, 19 nt, Homo sapiens
  misc_RNA (1)...(19): siRNA sense strand
ccagauauuuccaaugaau

SEQ ID NO: 1883001 - RNA, 19 nt, Homo sapiens
  misc_RNA (1)...(19): siRNA sense strand
gaaacuccacaggaaauua

SEQ ID NO: 1883002 - RNA, 19 nt, Homo sapiens
  misc_RNA (1)...(19): siRNA sense strand
gaagguaugagaccagauu

SEQ ID NO: 1883003 - RNA, 19 nt, Homo sapiens
  misc_RNA (1)...(19): siRNA sense strand
aaaugaaacuccacaggaa

SEQ ID NO: 1883004 - RNA, 19 nt, Homo sapiens
  misc_RNA (1)...(19): siRNA sense strand
gucaaugccuucagaaaug

SEQ ID NO: 1883005 - RNA, 19 nt, Homo sapiens
  misc_RNA (1)...(19): siRNA sense strand
gagcuucucgagauuauuu

SEQ ID NO: 1883006 - RNA, 19 nt, Homo sapiens
  misc_RNA (1)...(19): siRNA sense strand
caaacauucugaacaagau

SEQ ID NO: 1883007 - RNA, 19 nt, Homo sapiens
  misc_RNA (1)...(19): siRNA sense strand
guagaaaugauaccaaaga

SEQ ID NO: 1883008 - RNA, 19 nt, Homo sapiens
  misc_RNA (1)...(19): siRNA sense strand
acugaacgcuuguuaaaga

SEQ ID NO: 1883009 - RNA, 19 nt, Homo sapiens
  misc_RNA (1)...(19): siRNA sense strand
caaaaugaccuuccagaua

SEQ ID NO: 1883010 - RNA, 19 nt, Homo sapiens
  misc_RNA (1)...(19): siRNA sense strand
uaauaugccuucuuuggau

SEQ ID NO: 1883011 - RNA, 19 nt, Homo sapiens
  misc_RNA (1)...(19): siRNA sense strand
gacugaagauagcaauaaa

SEQ ID NO: 1883012 - RNA, 19 nt, Homo sapiens
  misc_RNA (1)...(19): siRNA sense strand
ggugauaugugcagcuguu

SEQ ID NO: 1883013 - RNA, 19 nt, Homo sapiens
  misc_RNA (1)...(19): siRNA sense strand
caguagaaaugauaccaaa

SEQ ID NO: 1883014 - RNA, 19 nt, Homo sapiens
  misc_RNA (1)...(19): siRNA sense strand
gaugaaauacucugucuag

SEQ ID NO: 1883015 - RNA, 19 nt, Homo sapiens
  misc_RNA (1)...(19): siRNA sense strand
caagacagauuuuguucua

SEQ ID NO: 1883016 - RNA, 19 nt, Homo sapiens
  misc_RNA (1)...(19): siRNA sense strand
uaucaagggcagauuauuu

SEQ ID NO: 1883017 - RNA, 19 nt, Homo sapiens
  misc_RNA (1)...(19): siRNA sense strand
ugacugaacgcuuguuaaa

SEQ ID NO: 1883018 - RNA, 19 nt, Homo sapiens
  misc_RNA (1)...(19): siRNA sense strand
gaauugauggcggauauuu

SEQ ID NO: 1883019 - RNA, 19 nt, Homo sapiens
  misc_RNA (1)...(19): siRNA sense strand
ugaaauacucugucuagaa

SEQ ID NO: 1883020 - RNA, 19 nt, Homo sapiens
  misc_RNA (1)...(19): siRNA sense strand
aaaaugaccuuccagauau

SEQ ID NO: 1883021 - RNA, 19 nt, Homo sapiens
  misc_RNA (1)...(19): siRNA sense strand
uaacugaaacagagcuuaa

SEQ ID NO: 1883022 - RNA, 19 nt, Homo sapiens
  misc_RNA (1)...(19): siRNA sense strand
cagauuauuucccaugaga

SEQ ID NO: 1883023 - RNA, 19 nt, Homo sapiens
  misc_RNA (1)...(19): siRNA sense strand
ucagaagcuucaacagaaa

SEQ ID NO: 1883024 - RNA, 19 nt, Homo sapiens
  misc_RNA (1)...(19): siRNA sense strand
gaccaggaccguaggauga

SEQ ID NO: 1883025 - RNA, 19 nt, Homo sapiens
  misc_RNA (1)...(19): siRNA sense strand
ccucaaugauuuaaggaaa

SEQ ID NO: 1883026 - RNA, 19 nt, Homo sapiens
  misc_RNA (1)...(19): siRNA sense strand
ccacaggaaauuaacagua

SEQ ID NO: 1883027 - RNA, 19 nt, Homo sapiens
  misc_RNA (1)...(19): siRNA sense strand
gaagagcuggagaccuaua

SEQ ID NO: 1883028 - RNA, 19 nt, Homo sapiens
  misc_RNA (1)...(19): siRNA sense strand
caaaaucccucaaaucaca

SEQ ID NO: 1883029 - RNA, 19 nt, Homo sapiens
  misc_RNA (1)...(19): siRNA sense strand
ggaauccuuuggaccauca

SEQ ID NO: 1883030 - RNA, 19 nt, Homo sapiens
  misc_RNA (1)...(19): siRNA sense strand
gcagagagcauuccccaua

SEQ ID NO: 1883031 - RNA, 19 nt, Homo sapiens
  misc_RNA (1)...(19): siRNA sense strand
gcacucgauguuccaaaua

SEQ ID NO: 1883032 - RNA, 19 nt, Homo sapiens
  misc_RNA (1)...(19): siRNA sense strand
uuccagauauuuccaauga

SEQ ID NO: 1883033 - RNA, 19 nt, Homo sapiens
  misc_RNA (1)...(19): siRNA sense strand
gugcagcuguuguuggauu

SEQ ID NO: 1883034 - RNA, 19 nt, Homo sapiens
  misc_RNA (1)...(19): siRNA sense strand
caaaggaagagcuuacaga

SEQ ID NO: 1883035 - RNA, 19 nt, Homo sapiens
  misc_RNA (1)...(19): siRNA sense strand
gaaggagaaagaaaccaaa

SEQ ID NO: 1883036 - RNA, 19 nt, Homo sapiens
  misc_RNA (1)...(19): siRNA sense strand
cgacugaagauagcaauaa

SEQ ID NO: 1883037 - RNA, 19 nt, Homo sapiens
  misc_RNA (1)...(19): siRNA sense strand
auucugaacuugaggauga

SEQ ID NO: 1883038 - RNA, 19 nt, Homo sapiens
  misc_RNA (1)...(19): siRNA sense strand
gaauccaguagaaaugaua

SEQ ID NO: 1883039 - RNA, 19 nt, Homo sapiens
  misc_RNA (1)...(19): siRNA sense strand
ggucaaugccuucagaaau

SEQ ID NO: 1883040 - RNA, 19 nt, Homo sapiens
  misc_RNA (1)...(19): siRNA sense strand
cacaggaaauuaacaguag

SEQ ID NO: 1883041 - RNA, 19 nt, Homo sapiens
  misc_RNA (1)...(19): siRNA sense strand
gauaaagaaagucacauca

SEQ ID NO: 1883042 - RNA, 19 nt, Homo sapiens
  misc_RNA (1)...(19): siRNA sense strand
agaaacagcuuuugcaaga

SEQ ID NO: 1883043 - RNA, 19 nt, Homo sapiens
  misc_RNA (1)...(19): siRNA sense strand
gaaagaaaaugcucacaac

SEQ ID NO: 1883044 - RNA, 19 nt, Homo sapiens
  misc_RNA (1)...(19): siRNA sense strand
caucaagacucugacugaa

SEQ ID NO: 1883045 - RNA, 19 nt, Homo sapiens
  misc_RNA (1)...(19): siRNA sense strand
gaaagaacaagugagugaa

SEQ ID NO: 1883046 - RNA, 19 nt, Homo sapiens
  misc_RNA (1)...(19): siRNA sense strand
ggaugaugauaacuuggaa

SEQ ID NO: 1883047 - RNA, 19 nt, Homo sapiens
  misc_RNA (1)...(19): siRNA sense strand
uaacggaugaugauaacuu

SEQ ID NO: 1883048 - RNA, 19 nt, Homo sapiens
  misc_RNA (1)...(19): siRNA sense strand
ggauacagucucuagaaga

SEQ ID NO: 1883049 - RNA, 19 nt, Homo sapiens
  misc_RNA (1)...(19): siRNA sense strand
ggaauccaguagaaaugau

SEQ ID NO: 1883050 - RNA, 19 nt, Homo sapiens
  misc_RNA (1)...(19): siRNA sense strand
ugaaagaaaccucaaugau

SEQ ID NO: 1883051 - RNA, 19 nt, Homo sapiens
  misc_RNA (1)...(19): siRNA sense strand
gaagaauuggagagaacua

SEQ ID NO: 1883052 - RNA, 19 nt, Homo sapiens
  misc_RNA (1)...(19): siRNA sense strand
aaacuccacaggaaauuaa

SEQ ID NO: 1883053 - RNA, 19 nt, Homo sapiens
  misc_RNA (1)...(19): siRNA sense strand
aaauggugcuuacuuagau

SEQ ID NO: 1883054 - RNA, 19 nt, Homo sapiens
  misc_RNA (1)...(19): siRNA sense strand
gguaugagaccagauucua

SEQ ID NO: 1883055 - RNA, 19 nt, Homo sapiens
  misc_RNA (1)...(19): siRNA sense strand
uaaaugugccugauucauc

SEQ ID NO: 1883056 - RNA, 19 nt, Homo sapiens
  misc_RNA (1)...(19): siRNA sense strand
agacugaacaagcaucuuu

SEQ ID NO: 1883057 - RNA, 19 nt, Homo sapiens
  misc_RNA (1)...(19): siRNA sense strand
agagucaucuuuaaaggau

SEQ ID NO: 1883058 - RNA, 19 nt, Homo sapiens
  misc_RNA (1)...(19): siRNA sense strand
gaaugaagaacgacugaag

SEQ ID NO: 1883059 - RNA, 19 nt, Homo sapiens
  misc_RNA (1)...(19): siRNA sense strand
gaaauccaaacauucugaa

SEQ ID NO: 1883060 - RNA, 19 nt, Homo sapiens
  misc_RNA (1)...(19): siRNA sense strand
guuuggagcuucucgagau

SEQ ID NO: 1883061 - RNA, 19 nt, Homo sapiens
  misc_RNA (1)...(19): siRNA sense strand
aauaugccuucuuuggaua

SEQ ID NO: 1883062 - RNA, 19 nt, Homo sapiens
  misc_RNA (1)...(19): siRNA sense strand
accaucagauuaccaauga

SEQ ID NO: 1883063 - RNA, 19 nt, Homo sapiens
  misc_RNA (1)...(19): siRNA sense strand
gcugcuaaguuaaaugcuu

SEQ ID NO: 1883064 - RNA, 19 nt, Homo sapiens
  misc_RNA (1)...(19): siRNA sense strand
guaugagaccagauucuaa

SEQ ID NO: 1883065 - RNA, 19 nt, Homo sapiens
  misc_RNA (1)...(19): siRNA sense strand
uacagucucuagaagauga

SEQ ID NO: 1883066 - RNA, 19 nt, Homo sapiens
  misc_RNA (1)...(19): siRNA sense strand
guagagucaucuuuaaagg

SEQ ID NO: 1883067 - RNA, 19 nt, Homo sapiens
  misc_RNA (1)...(19): siRNA sense strand
ccaaacauucugaacaaga

SEQ ID NO: 1883068 - RNA, 19 nt, Homo sapiens
  misc_RNA (1)...(19): siRNA sense strand
caucagauuaccaaugaaa

SEQ ID NO: 1883069 - RNA, 19 nt, Homo sapiens
  misc_RNA (1)...(19): siRNA sense strand
gauaugugcagcuguuguu

SEQ ID NO: 1883070 - RNA, 19 nt, Homo sapiens
  misc_RNA (1)...(19): siRNA sense strand
gauaagcucuuuccuauug

SEQ ID NO: 1883071 - RNA, 19 nt, Homo sapiens
  misc_RNA (1)...(19): siRNA sense strand
caauugaccucuucuguua

SEQ ID NO: 1883072 - RNA, 19 nt, Homo sapiens
  misc_RNA (1)...(19): siRNA sense strand
gagauaagaucaagaagaa

SEQ ID NO: 1883073 - RNA, 19 nt, Homo sapiens
  misc_RNA (1)...(19): siRNA sense strand
gaaagugacucaucagaga

SEQ ID NO: 1883074 - RNA, 19 nt, Homo sapiens
  misc_RNA (1)...(19): siRNA sense strand
gaagaaaggugaagacaca

SEQ ID NO: 1883075 - RNA, 19 nt, Homo sapiens
  misc_RNA (1)...(19): siRNA sense strand
ggaaucagcuugagaagga

SEQ ID NO: 1883076 - RNA, 19 nt, Homo sapiens
  misc_RNA (1)...(19): siRNA sense strand
gaagacgacuuauacuauu

SEQ ID NO: 1883077 - RNA, 19 nt, Homo sapiens
  misc_RNA (1)...(19): siRNA sense strand
caaagaagauagccugaaa

SEQ ID NO: 1883078 - RNA, 19 nt, Homo sapiens
  misc_RNA (1)...(19): siRNA sense strand
gcaggcacaucaacaauaa

SEQ ID NO: 1883079 - RNA, 19 nt, Homo sapiens
  misc_RNA (1)...(19): siRNA sense strand
gagaauggauuugaaguuu

SEQ ID NO: 1883080 - RNA, 19 nt, Homo sapiens
  misc_RNA (1)...(19): siRNA sense strand
gaaggaacaccuccacuua

SEQ ID NO: 1883081 - RNA, 19 nt, Homo sapiens
  misc_RNA (1)...(19): siRNA sense strand
ggacugauauuacuucugu

SEQ ID NO: 1883082 - RNA, 19 nt, Homo sapiens
  misc_RNA (1)...(19): siRNA sense strand
gaacagagaacuuaaagau

SEQ ID NO: 1883083 - RNA, 19 nt, Homo sapiens
  misc_RNA (1)...(19): siRNA sense strand
gaucagaaauucagaguag

SEQ ID NO: 1883084 - RNA, 19 nt, Homo sapiens
  misc_RNA (1)...(19): siRNA sense strand
gaacauaugggaucuaguu

SEQ ID NO: 1883085 - RNA, 19 nt, Homo sapiens
  misc_RNA (1)...(19): siRNA sense strand
gcaagcagcugagauguga

SEQ ID NO: 1883086 - RNA, 19 nt, Homo sapiens
  misc_RNA (1)...(19): siRNA sense strand
gcacaguggucucaugauu

SEQ ID NO: 1883087 - RNA, 19 nt, Homo sapiens
  misc_RNA (1)...(19): siRNA sense strand
gaaggaaguuucucaaugg

SEQ ID NO: 1883088 - RNA, 19 nt, Homo sapiens
  misc_RNA (1)...(19): siRNA sense strand
acagagaacuuaaagauug

SEQ ID NO: 1883089 - RNA, 19 nt, Homo sapiens
  misc_RNA (1)...(19): siRNA sense strand
gauuaugacccuccaauua

SEQ ID NO: 1883090 - RNA, 19 nt, Homo sapiens
  misc_RNA (1)...(19): siRNA sense strand
gcaacaagcugcccugcaa

SEQ ID NO: 1883091 - RNA, 19 nt, Homo sapiens
  misc_RNA (1)...(19): siRNA sense strand
gaacaagguuugauaugca

SEQ ID NO: 1883092 - RNA, 19 nt, Homo sapiens
  misc_RNA (1)...(19): siRNA sense strand
ggaacucacuuacgacuau

SEQ ID NO: 1883093 - RNA, 19 nt, Homo sapiens
  misc_RNA (1)...(19): siRNA sense strand
gaaagaacaugucacuaag

SEQ ID NO: 1883094 - RNA, 19 nt, Homo sapiens
  misc_RNA (1)...(19): siRNA sense strand
gcgccaagcucuuugcuaa

SEQ ID NO: 1883095 - RNA, 19 nt, Homo sapiens
  misc_RNA (1)...(19): siRNA sense strand
ucugagagcuccaagauuu

SEQ ID NO: 1883096 - RNA, 19 nt, Homo sapiens
  misc_RNA (1)...(19): siRNA sense strand
gcucagcucugcaagauug

SEQ ID NO: 1883097 - RNA, 19 nt, Homo sapiens
  misc_RNA (1)...(19): siRNA sense strand
gagaggaacucacuuacga

SEQ ID NO: 1883098 - RNA, 19 nt, Homo sapiens
  misc_RNA (1)...(19): siRNA sense strand
gaacaugucacuaagaguu

SEQ ID NO: 1883099 - RNA, 19 nt, Homo sapiens
  misc_RNA (1)...(19): siRNA sense strand
cacaguaggugauccuuua

SEQ ID NO: 1883100 - RNA, 19 nt, Homo sapiens
  misc_RNA (1)...(19): siRNA sense strand
cuacagacccgaaagaaua

SEQ ID NO: 1883101 - RNA, 19 nt, Homo sapiens
  misc_RNA (1)...(19): siRNA sense strand
ggaguucagugaugauauu

SEQ ID NO: 1883102 - RNA, 19 nt, Homo sapiens
  misc_RNA (1)...(19): siRNA sense strand
gccaagcacugucgaaauu

SEQ ID NO: 1883103 - RNA, 19 nt, Homo sapiens
  misc_RNA (1)...(19): siRNA sense strand
ccaggaagcucgaucaaau

SEQ ID NO: 1883104 - RNA, 19 nt, Homo sapiens
  misc_RNA (1)...(19): siRNA sense strand
ccacugaauucaaguacua

SEQ ID NO: 1883105 - RNA, 19 nt, Homo sapiens
  misc_RNA (1)...(19): siRNA sense strand
ggaaagcauuacugagaaa

SEQ ID NO: 1883106 - RNA, 19 nt, Homo sapiens
  misc_RNA (1)...(19): siRNA sense strand
ugaaucaagugccaaagua

SEQ ID NO: 1883107 - RNA, 19 nt, Homo sapiens
  misc_RNA (1)...(19): siRNA sense strand
gaugauggcuuucagaucu

SEQ ID NO: 1883108 - RNA, 19 nt, Homo sapiens
  misc_RNA (1)...(19): siRNA sense strand
gguaaacucucuccucuca

SEQ ID NO: 1883109 - RNA, 19 nt, Homo sapiens
  misc_RNA (1)...(19): siRNA sense strand
gaagcacauugucaucuuu

SEQ ID NO: 1883110 - RNA, 19 nt, Homo sapiens
  misc_RNA (1)...(19): siRNA sense strand
caaaguaguuucccaccaa

SEQ ID NO: 1883111 - RNA, 19 nt, Homo sapiens
  misc_RNA (1)...(19): siRNA sense strand
gauugggucuugacaguaa

SEQ ID NO: 1883112 - RNA, 19 nt, Homo sapiens
  misc_RNA (1)...(19): siRNA sense strand
ggaauauccugccuucaga

SEQ ID NO: 1883113 - RNA, 19 nt, Homo sapiens
  misc_RNA (1)...(19): siRNA sense strand
ggacaagaguagagagaga

SEQ ID NO: 1883114 - RNA, 19 nt, Homo sapiens
  misc_RNA (1)...(19): siRNA sense strand
gcaguuguguuccucauug

SEQ ID NO: 1883115 - RNA, 19 nt, Homo sapiens
  misc_RNA (1)...(19): siRNA sense strand
gaggauggcucuuuuaaaa

SEQ ID NO: 1883116 - RNA, 19 nt, Homo sapiens
  misc_RNA (1)...(19): siRNA sense strand
gaugacggaucacuaaaga

SEQ ID NO: 1883117 - RNA, 19 nt, Homo sapiens
  misc_RNA (1)...(19): siRNA sense strand
uaaugaugcuggucguuua

SEQ ID NO: 1883118 - RNA, 19 nt, Homo sapiens
  misc_RNA (1)...(19): siRNA sense strand
gaacaccuccacuuacaaa

SEQ ID NO: 1883119 - RNA, 19 nt, Homo sapiens
  misc_RNA (1)...(19): siRNA sense strand
gcaagaagcacaaaguuuc

SEQ ID NO: 1883120 - RNA, 19 nt, Homo sapiens
  misc_RNA (1)...(19): siRNA sense strand
gaucaaaggcgaagugguu

SEQ ID NO: 1883121 - RNA, 19 nt, Homo sapiens
  misc_RNA (1)...(19): siRNA sense strand
ccgaggagcuguccaaaga

SEQ ID NO: 1883122 - RNA, 19 nt, Homo sapiens
  misc_RNA (1)...(19): siRNA sense strand
ggcaauaguucuaagcaaa

SEQ ID NO: 1883123 - RNA, 19 nt, Homo sapiens
  misc_RNA (1)...(19): siRNA sense strand
ggacagagagugauacuag

SEQ ID NO: 1883124 - RNA, 19 nt, Homo sapiens
  misc_RNA (1)...(19): siRNA sense strand
cgacuggcaucccauaauu

SEQ ID NO: 1883125 - RNA, 19 nt, Homo sapiens
  misc_RNA (1)...(19): siRNA sense strand
gaaggaaucagcuugagaa

SEQ ID NO: 1883126 - RNA, 19 nt, Homo sapiens
  misc_RNA (1)...(19): siRNA sense strand
gaggacagccagaaauuaa

SEQ ID NO: 1883127 - RNA, 19 nt, Homo sapiens
  misc_RNA (1)...(19): siRNA sense strand
aaaggacauuucagaguua

SEQ ID NO: 1883128 - RNA, 19 nt, Homo sapiens
  misc_RNA (1)...(19): siRNA sense strand
gaugugguuucuaauauga

SEQ ID NO: 1883129 - RNA, 19 nt, Homo sapiens
  misc_RNA (1)...(19): siRNA sense strand
gaugagcaauucuuagguu

SEQ ID NO: 1883130 - RNA, 19 nt, Homo sapiens
  misc_RNA (1)...(19): siRNA sense strand
agaaagaacaugucacuaa

SEQ ID NO: 1883131 - RNA, 19 nt, Homo sapiens
  misc_RNA (1)...(19): siRNA sense strand
caacgaccauguaacaaug

SEQ ID NO: 1883132 - RNA, 19 nt, Homo sapiens
  misc_RNA (1)...(19): siRNA sense strand
gcuggucguuuacuauaua

SEQ ID NO: 1883133 - RNA, 19 nt, Homo sapiens
  misc_RNA (1)...(19): siRNA sense strand
gaaccaagaucuccuucuc

SEQ ID NO: 1883134 - RNA, 19 nt, Homo sapiens
  misc_RNA (1)...(19): siRNA sense strand
gaggcucacucuagaauau

SEQ ID NO: 1883135 - RNA, 19 nt, Homo sapiens
  misc_RNA (1)...(19): siRNA sense strand
gaggagaggaacucacuua

SEQ ID NO: 1883136 - RNA, 19 nt, Homo sapiens
  misc_RNA (1)...(19): siRNA sense strand
gaagaugccuggaagucau

SEQ ID NO: 1883137 - RNA, 19 nt, Homo sapiens
  misc_RNA (1)...(19): siRNA sense strand
aaacugggauucauucuuc

SEQ ID NO: 1883138 - RNA, 19 nt, Homo sapiens
  misc_RNA (1)...(19): siRNA sense strand
ggacagaaaccuaaugcuu

SEQ ID NO: 1883139 - RNA, 19 nt, Homo sapiens
  misc_RNA (1)...(19): siRNA sense strand
caaaguaguugaucauguc

SEQ ID NO: 1883140 - RNA, 19 nt, Homo sapiens
  misc_RNA (1)...(19): siRNA sense strand
guauauacaugcaagauag

SEQ ID NO: 1883141 - RNA, 19 nt, Homo sapiens
  misc_RNA (1)...(19): siRNA sense strand
gaaaauauccacaugauga

SEQ ID NO: 1883142 - RNA, 19 nt, Homo sapiens
  misc_RNA (1)...(19): siRNA sense strand
gcagacaagcuuccaauga

SEQ ID NO: 1883143 - RNA, 19 nt, Homo sapiens
  misc_RNA (1)...(19): siRNA sense strand
gaugaugacuaugagagua

SEQ ID NO: 1883144 - RNA, 19 nt, Homo sapiens
  misc_RNA (1)...(19): siRNA sense strand
ggaaggaaagcauuacuga

SEQ ID NO: 1883145 - RNA, 19 nt, Homo sapiens
  misc_RNA (1)...(19): siRNA sense strand
gaacaugcagccacuuuau

SEQ ID NO: 1883146 - RNA, 19 nt, Homo sapiens
  misc_RNA (1)...(19): siRNA sense strand
gcaaauagagucaacaucu

SEQ ID NO: 1883147 - RNA, 19 nt, Homo sapiens
  misc_RNA (1)...(19): siRNA sense strand
agaaggaucugccaaggaa

SEQ ID NO: 1883148 - RNA, 19 nt, Homo sapiens
  misc_RNA (1)...(19): siRNA sense strand
gcaaacuccucuccagaug

SEQ ID NO: 1883149 - RNA, 19 nt, Homo sapiens
  misc_RNA (1)...(19): siRNA sense strand
cggauaaugucuccaauga

SEQ ID NO: 1883150 - RNA, 19 nt, Homo sapiens
  misc_RNA (1)...(19): siRNA sense strand
cagcaagccacaaagauua

SEQ ID NO: 1883151 - RNA, 19 nt, Homo sapiens
  misc_RNA (1)...(19): siRNA sense strand
caggugagauggugauuga

SEQ ID NO: 1883152 - RNA, 19 nt, Homo sapiens
  misc_RNA (1)...(19): siRNA sense strand
ggaagcagacgaacacuau

SEQ ID NO: 1883153 - RNA, 19 nt, Homo sapiens
  misc_RNA (1)...(19): siRNA sense strand
uagacuagcuguuaucuca

SEQ ID NO: 1883154 - RNA, 19 nt, Homo sapiens
  misc_RNA (1)...(19): siRNA sense strand
auacugagcuccugaaauc

SEQ ID NO: 1883155 - RNA, 19 nt, Homo sapiens
  misc_RNA (1)...(19): siRNA sense strand
ugaagauacugaagucaaa

SEQ ID NO: 1883156 - RNA, 19 nt, Homo sapiens
  misc_RNA (1)...(19): siRNA sense strand
caccuucacuugaccauaa

SEQ ID NO: 1883157 - RNA, 19 nt, Homo sapiens
  misc_RNA (1)...(19): siRNA sense strand
ucaagaaagugacucauca

SEQ ID NO: 1883158 - RNA, 19 nt, Homo sapiens
  misc_RNA (1)...(19): siRNA sense strand
ucuguaaccuugccuagua

SEQ ID NO: 1883159 - RNA, 19 nt, Homo sapiens
  misc_RNA (1)...(19): siRNA sense strand
aaacaugucugcagaagag

SEQ ID NO: 1883160 - RNA, 19 nt, Homo sapiens
  misc_RNA (1)...(19): siRNA sense strand
uaaagcagcucucauuugc

SEQ ID NO: 1883161 - RNA, 19 nt, Homo sapiens
  misc_RNA (1)...(19): siRNA sense strand
gaagaagaggaaaguaauu

SEQ ID NO: 1883162 - RNA, 19 nt, Homo sapiens
  misc_RNA (1)...(19): siRNA sense strand
gagaagagaguaaccauca

SEQ ID NO: 1883163 - RNA, 19 nt, Homo sapiens
  misc_RNA (1)...(19): siRNA sense strand
caacagaucauccauuauc

SEQ ID NO: 1883164 - RNA, 19 nt, Homo sapiens
  misc_RNA (1)...(19): siRNA sense strand
cccaaccacucaugaaaua

SEQ ID NO: 1883165 - RNA, 19 nt, Homo sapiens
  misc_RNA (1)...(19): siRNA sense strand
gaagaguguuuguggacuu

SEQ ID NO: 1883166 - RNA, 19 nt, Homo sapiens
  misc_RNA (1)...(19): siRNA sense strand
gaaccagacucaccaacuc

SEQ ID NO: 1883167 - RNA, 19 nt, Homo sapiens
  misc_RNA (1)...(19): siRNA sense strand
agaaguaugugcccaauuc

SEQ ID NO: 1883168 - RNA, 19 nt, Homo sapiens
  misc_RNA (1)...(19): siRNA sense strand
gaacucacuuacgacuaua

SEQ ID NO: 1883169 - RNA, 19 nt, Homo sapiens
  misc_RNA (1)...(19): siRNA sense strand
ccacuaaacccaaaccaaa

SEQ ID NO: 1883170 - RNA, 19 nt, Homo sapiens
  misc_RNA (1)...(19): siRNA sense strand
gagcauagcuuuguccaua

SEQ ID NO: 1883171 - RNA, 19 nt, Homo sapiens
  misc_RNA (1)...(19): siRNA sense strand
gcagggaccuuguauauuc

SEQ ID NO: 1883172 - RNA, 19 nt, Homo sapiens
  misc_RNA (1)...(19): siRNA sense strand
agacagagaugacaacaaa

SEQ ID NO: 1883173 - RNA, 19 nt, Homo sapiens
  misc_RNA (1)...(19): siRNA sense strand
gagauacacuggccgagua

SEQ ID NO: 1883174 - RNA, 19 nt, Homo sapiens
  misc_RNA (1)...(19): siRNA sense strand
gaaagucgaggauauguuu

SEQ ID NO: 1883175 - RNA, 19 nt, Homo sapiens
  misc_RNA (1)...(19): siRNA sense strand
aaacaaugcucacgcaauu

SEQ ID NO: 1883176 - RNA, 19 nt, Homo sapiens
  misc_RNA (1)...(19): siRNA sense strand
gcacugagcaugacgauga

SEQ ID NO: 1883177 - RNA, 19 nt, Homo sapiens
  misc_RNA (1)...(19): siRNA sense strand
gaaaggacgugagacaaga

SEQ ID NO: 1883178 - RNA, 19 nt, Homo sapiens
  misc_RNA (1)...(19): siRNA sense strand
ugaauggaauugacacaua

SEQ ID NO: 1883179 - RNA, 19 nt, Homo sapiens
  misc_RNA (1)...(19): siRNA sense strand
gaauggaauugacacauau

SEQ ID NO: 1883180 - RNA, 19 nt, Homo sapiens
  misc_RNA (1)...(19): siRNA sense strand
ggaauugugcugaaaguaa

SEQ ID NO: 1883181 - RNA, 19 nt, Homo sapiens
  misc_RNA (1)...(19): siRNA sense strand
ggaagaauacugcgagaaa

SEQ ID NO: 1883182 - RNA, 19 nt, Homo sapiens
  misc_RNA (1)...(19): siRNA sense strand
agagaauacuggugaauaa

SEQ ID NO: 1883183 - RNA, 19 nt, Homo sapiens
  misc_RNA (1)...(19): siRNA sense strand
uaagauggaccuugguuua

SEQ ID NO: 1883184 - RNA, 19 nt, Homo sapiens
  misc_RNA (1)...(19): siRNA sense strand
gcaagaagucauccacuaa

SEQ ID NO: 1883185 - RNA, 19 nt, Homo sapiens
  misc_RNA (1)...(19): siRNA sense strand
gaagucauccacuaaugua

SEQ ID NO: 1883186 - RNA, 19 nt, Homo sapiens
  misc_RNA (1)...(19): siRNA sense strand
gaauugugcugaaaguaau

SEQ ID NO: 1883187 - RNA, 19 nt, Homo sapiens
  misc_RNA (1)...(19): siRNA sense strand
ggauaagacugaagaacau

SEQ ID NO: 1883188 - RNA, 19 nt, Homo sapiens
  misc_RNA (1)...(19): siRNA sense strand
gagaaucagugacggcuau

SEQ ID NO: 1883189 - RNA, 19 nt, Homo sapiens
  misc_RNA (1)...(19): siRNA sense strand
ucauaagaauccagugaua

SEQ ID NO: 1883190 - RNA, 19 nt, Homo sapiens
  misc_RNA (1)...(19): siRNA sense strand
caaugcugcuggaugaaua

SEQ ID NO: 1883191 - RNA, 19 nt, Homo sapiens
  misc_RNA (1)...(19): siRNA sense strand
caauaugacgucuuguuua

SEQ ID NO: 1883192 - RNA, 19 nt, Homo sapiens
  misc_RNA (1)...(19): siRNA sense strand
aaaguuaucugguuuguac

SEQ ID NO: 1883193 - RNA, 19 nt, Homo sapiens
  misc_RNA (1)...(19): siRNA sense strand
aaaguauggugcacagaua

SEQ ID NO: 1883194 - RNA, 19 nt, Homo sapiens
  misc_RNA (1)...(19): siRNA sense strand
ugacggcuauaaagagaua

SEQ ID NO: 1883195 - RNA, 19 nt, Homo sapiens
  misc_RNA (1)...(19): siRNA sense strand
cuauggagauuucuucaaa

SEQ ID NO: 1883196 - RNA, 19 nt, Homo sapiens
  misc_RNA (1)...(19): siRNA sense strand
uaugacgucuuguuuauug

SEQ ID NO: 1883197 - RNA, 19 nt, Homo sapiens
  misc_RNA (1)...(19): siRNA sense strand
gagacucguuugcucagua

SEQ ID NO: 1883198 - RNA, 19 nt, Homo sapiens
  misc_RNA (1)...(19): siRNA sense strand
gaauacuggugaauaagug

SEQ ID NO: 1883199 - RNA, 19 nt, Homo sapiens
  misc_RNA (1)...(19): siRNA sense strand
gagaugacaacaaaguaua

SEQ ID NO: 1883200 - RNA, 19 nt, Homo sapiens
  misc_RNA (1)...(19): siRNA sense strand
uaccagagaucauaagaau

SEQ ID NO: 1883201 - RNA, 19 nt, Homo sapiens
  misc_RNA (1)...(19): siRNA sense strand
guuccaaaccugagcauua

SEQ ID NO: 1883202 - RNA, 19 nt, Homo sapiens
  misc_RNA (1)...(19): siRNA sense strand
caacaguacuuugcuggaa

SEQ ID NO: 1883203 - RNA, 19 nt, Homo sapiens
  misc_RNA (1)...(19): siRNA sense strand
ggcaacagcuguauauugg

SEQ ID NO: 1883204 - RNA, 19 nt, Homo sapiens
  misc_RNA (1)...(19): siRNA sense strand
auacaaugcugcuggauga

SEQ ID NO: 1883205 - RNA, 19 nt, Homo sapiens
  misc_RNA (1)...(19): siRNA sense strand
gguuacgccugucacauaa

SEQ ID NO: 1883206 - RNA, 19 nt, Homo sapiens
  misc_RNA (1)...(19): siRNA sense strand
ggaccuugguuuacucuuc

SEQ ID NO: 1883207 - RNA, 19 nt, Homo sapiens
  misc_RNA (1)...(19): siRNA sense strand
caacagcuguauauuggau

SEQ ID NO: 1883208 - RNA, 19 nt, Homo sapiens
  misc_RNA (1)...(19): siRNA sense strand
ggaaucaauggaagaagua

SEQ ID NO: 1883209 - RNA, 19 nt, Homo sapiens
  misc_RNA (1)...(19): siRNA sense strand
cauaaaaccugcccauaaa

SEQ ID NO: 1883210 - RNA, 19 nt, Homo sapiens
  misc_RNA (1)...(19): siRNA sense strand
gaagaauacugcgagaaag

SEQ ID NO: 1883211 - RNA, 19 nt, Homo sapiens
  misc_RNA (1)...(19): siRNA sense strand
gcacagauagaaagaggaa

SEQ ID NO: 1883212 - RNA, 19 nt, Homo sapiens
  misc_RNA (1)...(19): siRNA sense strand
acaaugcucacgcaauuua

SEQ ID NO: 1883213 - RNA, 19 nt, Homo sapiens
  misc_RNA (1)...(19): siRNA sense strand
gaaaguauggugcacagau

SEQ ID NO: 1883214 - RNA, 19 nt, Homo sapiens
  misc_RNA (1)...(19): siRNA sense strand
gaucauaagaauccaguga

SEQ ID NO: 1883215 - RNA, 19 nt, Homo sapiens
  misc_RNA (1)...(19): siRNA sense strand
ggauccaguuccuauuauu

SEQ ID NO: 1883216 - RNA, 19 nt, Homo sapiens
  misc_RNA (1)...(19): siRNA sense strand
gggugaaugugcaaauuau

SEQ ID NO: 1883217 - RNA, 19 nt, Homo sapiens
  misc_RNA (1)...(19): siRNA sense strand
gacaguagagcauagcuuu

SEQ ID NO: 1883218 - RNA, 19 nt, Homo sapiens
  misc_RNA (1)...(19): siRNA sense strand
aagaggaggugaagacaga

SEQ ID NO: 1883219 - RNA, 19 nt, Homo sapiens
  misc_RNA (1)...(19): siRNA sense strand
ccaauaugacgucuuguuu

SEQ ID NO: 1883220 - RNA, 19 nt, Homo sapiens
  misc_RNA (1)...(19): siRNA sense strand
uaucacaugucuagcauuc

SEQ ID NO: 1883221 - RNA, 19 nt, Homo sapiens
  misc_RNA (1)...(19): siRNA sense strand
caucagaguuggauaucau

SEQ ID NO: 1883222 - RNA, 19 nt, Homo sapiens
  misc_RNA (1)...(19): siRNA sense strand
guacagaaaggacgugaga

SEQ ID NO: 1883223 - RNA, 19 nt, Homo sapiens
  misc_RNA (1)...(19): siRNA sense strand
aagaacaucuggcuuaugg

SEQ ID NO: 1883224 - RNA, 19 nt, Homo sapiens
  misc_RNA (1)...(19): siRNA sense strand
caugauuccugacaaugaa

SEQ ID NO: 1883225 - RNA, 19 nt, Homo sapiens
  misc_RNA (1)...(19): siRNA sense strand
ucuugcagcugaucgguua

SEQ ID NO: 1883226 - RNA, 19 nt, Homo sapiens
  misc_RNA (1)...(19): siRNA sense strand
gauccaguuccuauuauuu

SEQ ID NO: 1883227 - RNA, 19 nt, Homo sapiens
  misc_RNA (1)...(19): siRNA sense strand
ugaaacaaauagcaguaga

SEQ ID NO: 1883228 - RNA, 19 nt, Homo sapiens
  misc_RNA (1)...(19): siRNA sense strand
ggacagauaauggaauugu

SEQ ID NO: 1883229 - RNA, 19 nt, Homo sapiens
  misc_RNA (1)...(19): siRNA sense strand
aagcgaaaguuaucugguu

SEQ ID NO: 1883230 - RNA, 19 nt, Homo sapiens
  misc_RNA (1)...(19): siRNA sense strand
cugaagaacaucuggcuua

SEQ ID NO: 1883231 - RNA, 19 nt, Homo sapiens
  misc_RNA (1)...(19): siRNA sense strand
caagucagauuccaucacu

SEQ ID NO: 1883232 - RNA, 19 nt, Homo sapiens
  misc_RNA (1)...(19): siRNA sense strand
ggaagaaugcauaaugaag

SEQ ID NO: 1883233 - RNA, 19 nt, Homo sapiens
  misc_RNA (1)...(19): siRNA sense strand
agugauauuuggacucuuu

SEQ ID NO: 1883234 - RNA, 19 nt, Homo sapiens
  misc_RNA (1)...(19): siRNA sense strand
gaaacaaauagcaguagau

SEQ ID NO: 1883235 - RNA, 19 nt, Homo sapiens
  misc_RNA (1)...(19): siRNA sense strand
ggagaaagucgaggauaug

SEQ ID NO: 1883236 - RNA, 19 nt, Homo sapiens
  misc_RNA (1)...(19): siRNA sense strand
ugaagaacaucuggcuuau

SEQ ID NO: 1883237 - RNA, 19 nt, Homo sapiens
  misc_RNA (1)...(19): siRNA sense strand
cagagacgcugcgaucuuc

SEQ ID NO: 1883238 - RNA, 19 nt, Homo sapiens
  misc_RNA (1)...(19): siRNA sense strand
acaaauagcaguagaucga

SEQ ID NO: 1883239 - RNA, 19 nt, Homo sapiens
  misc_RNA (1)...(19): siRNA sense strand
ugcaagaagucauccacua

SEQ ID NO: 1883240 - RNA, 19 nt, Homo sapiens
  misc_RNA (1)...(19): siRNA sense strand
cagagaauacuggugaaua

SEQ ID NO: 1883241 - RNA, 19 nt, Homo sapiens
  misc_RNA (1)...(19): siRNA sense strand
caaauuauguucggguuuu

SEQ ID NO: 1883242 - RNA, 19 nt, Homo sapiens
  misc_RNA (1)...(19): siRNA sense strand
gcauagagaacaacaguac

SEQ ID NO: 1883243 - RNA, 19 nt, Homo sapiens
  misc_RNA (1)...(19): siRNA sense strand
gcaaauuauguucggguuu

SEQ ID NO: 1883244 - RNA, 19 nt, Homo sapiens
  misc_RNA (1)...(19): siRNA sense strand
gaaaguuaucugguuugua

SEQ ID NO: 1883245 - RNA, 19 nt, Homo sapiens
  misc_RNA (1)...(19): siRNA sense strand
caacaggcacacaugcaaa

SEQ ID NO: 1883246 - RNA, 19 nt, Homo sapiens
  misc_RNA (1)...(19): siRNA sense strand
uaauguaccaggccauaaa

SEQ ID NO: 1883247 - RNA, 19 nt, Homo sapiens
  misc_RNA (1)...(19): siRNA sense strand
gggcgacucugugugaaug

SEQ ID NO: 1883248 - RNA, 19 nt, Homo sapiens
  misc_RNA (1)...(19): siRNA sense strand
gagcgucuguugaaagaac

SEQ ID NO: 1883249 - RNA, 19 nt, Homo sapiens
  misc_RNA (1)...(19): siRNA sense strand
gcgggugaaugugcaaauu

SEQ ID NO: 1883250 - RNA, 19 nt, Homo sapiens
  misc_RNA (1)...(19): siRNA sense strand
ugacagagugguuaagaug

SEQ ID NO: 1883251 - RNA, 19 nt, Homo sapiens
  misc_RNA (1)...(19): siRNA sense strand
ggucauacagcugauacua

SEQ ID NO: 1883252 - RNA, 19 nt, Homo sapiens
  misc_RNA (1)...(19): siRNA sense strand
ggaaugaauggaauugaca

SEQ ID NO: 1883253 - RNA, 19 nt, Homo sapiens
  misc_RNA (1)...(19): siRNA sense strand
caagaagucauccacuaau

SEQ ID NO: 1883254 - RNA, 19 nt, Homo sapiens
  misc_RNA (1)...(19): siRNA sense strand
gaucgguuauagcaacuuc

SEQ ID NO: 1883255 - RNA, 19 nt, Homo sapiens
  misc_RNA (1)...(19): siRNA sense strand
agaaauggaaucaauggaa

SEQ ID NO: 1883256 - RNA, 19 nt, Homo sapiens
  misc_RNA (1)...(19): siRNA sense strand
uaauggaauugugcugaaa

SEQ ID NO: 1883257 - RNA, 19 nt, Homo sapiens
  misc_RNA (1)...(19): siRNA sense strand
ugggacagauaauggaauu

SEQ ID NO: 1883258 - RNA, 19 nt, Homo sapiens
  misc_RNA (1)...(19): siRNA sense strand
aagaagucauccacuaaug

SEQ ID NO: 1883259 - RNA, 19 nt, Homo sapiens
  misc_RNA (1)...(19): siRNA sense strand
aggagaaagucgaggauau

SEQ ID NO: 1883260 - RNA, 19 nt, Homo sapiens
  misc_RNA (1)...(19): siRNA sense strand
gaggagaaagucgaggaua

SEQ ID NO: 1883261 - RNA, 19 nt, Homo sapiens
  misc_RNA (1)...(19): siRNA sense strand
gcugcuggaugaauaucaa

SEQ ID NO: 1883262 - RNA, 19 nt, Homo sapiens
  misc_RNA (1)...(19): siRNA sense strand
cgaaaguuaucugguuugu

SEQ ID NO: 1883263 - RNA, 19 nt, Homo sapiens
  misc_RNA (1)...(19): siRNA sense strand
cggcaacagcuguauauug

SEQ ID NO: 1883264 - RNA, 19 nt, Homo sapiens
  misc_RNA (1)...(19): siRNA sense strand
gauauucaaggauccaguu

SEQ ID NO: 1883265 - RNA, 19 nt, Homo sapiens
  misc_RNA (1)...(19): siRNA sense strand
caagaaauggaaucaaugg

SEQ ID NO: 1883266 - RNA, 19 nt, Homo sapiens
  misc_RNA (1)...(19): siRNA sense strand
gcugaaaguaaucacaauu

SEQ ID NO: 1883267 - RNA, 19 nt, Homo sapiens
  misc_RNA (1)...(19): siRNA sense strand
caacggaccauaugcacau

SEQ ID NO: 1883268 - RNA, 19 nt, Homo sapiens
  misc_RNA (1)...(19): siRNA sense strand
gaugacagagugguuaaga

SEQ ID NO: 1883269 - RNA, 19 nt, Homo sapiens
  misc_RNA (1)...(19): siRNA sense strand
gguuuacucuuccuaaggu

SEQ ID NO: 1883270 - RNA, 19 nt, Homo sapiens
  misc_RNA (1)...(19): siRNA sense strand
caagaaaggugaccgaaga

SEQ ID NO: 1883271 - RNA, 19 nt, Homo sapiens
  misc_RNA (1)...(19): siRNA sense strand
gaaagagacugugauaaca

SEQ ID NO: 1883272 - RNA, 19 nt, Homo sapiens
  misc_RNA (1)...(19): siRNA sense strand
gagaaagggugaagcagaa

SEQ ID NO: 1883273 - RNA, 19 nt, Homo sapiens
  misc_RNA (1)...(19): siRNA sense strand
gagcagaccuacuccaaug

SEQ ID NO: 1883274 - RNA, 19 nt, Homo sapiens
  misc_RNA (1)...(19): siRNA sense strand
gaaaguccaugauaaagag

SEQ ID NO: 1883275 - RNA, 19 nt, Homo sapiens
  misc_RNA (1)...(19): siRNA sense strand
gaggaaagcagaagauaaa

SEQ ID NO: 1883276 - RNA, 19 nt, Homo sapiens
  misc_RNA (1)...(19): siRNA sense strand
gccgaaauauccuuuaauu

SEQ ID NO: 1883277 - RNA, 19 nt, Homo sapiens
  misc_RNA (1)...(19): siRNA sense strand
gcagaaagagacugugaua

SEQ ID NO: 1883278 - RNA, 19 nt, Homo sapiens
  misc_RNA (1)...(19): siRNA sense strand
gccaagaacugaaccaaug

SEQ ID NO: 1883279 - RNA, 19 nt, Homo sapiens
  misc_RNA (1)...(19): siRNA sense strand
gaagagauucugaaggaaa

SEQ ID NO: 1883280 - RNA, 19 nt, Homo sapiens
  misc_RNA (1)...(19): siRNA sense strand
gcagaaagcagaguuaaug

SEQ ID NO: 1883281 - RNA, 19 nt, Homo sapiens
  misc_RNA (1)...(19): siRNA sense strand
ggaaagaggagcugucaga

SEQ ID NO: 1883282 - RNA, 19 nt, Homo sapiens
  misc_RNA (1)...(19): siRNA sense strand
gcagugaaaguccaugaua

SEQ ID NO: 1883283 - RNA, 19 nt, Homo sapiens
  misc_RNA (1)...(19): siRNA sense strand
gaaacuguagaucucauua

SEQ ID NO: 1883284 - RNA, 19 nt, Homo sapiens
  misc_RNA (1)...(19): siRNA sense strand
ggaagaagcacagcucuga

SEQ ID NO: 1883285 - RNA, 19 nt, Homo sapiens
  misc_RNA (1)...(19): siRNA sense strand
gaaaucaaaucacagucau

SEQ ID NO: 1883286 - RNA, 19 nt, Homo sapiens
  misc_RNA (1)...(19): siRNA sense strand
gaugagcugucuagucgaa

SEQ ID NO: 1883287 - RNA, 19 nt, Homo sapiens
  misc_RNA (1)...(19): siRNA sense strand
gaagcagaaagcagaguua

SEQ ID NO: 1883288 - RNA, 19 nt, Homo sapiens
  misc_RNA (1)...(19): siRNA sense strand
guucauggcagcagcaaua

SEQ ID NO: 1883289 - RNA, 19 nt, Homo sapiens
  misc_RNA (1)...(19): siRNA sense strand
gaaagccagucauccaagu

SEQ ID NO: 1883290 - RNA, 19 nt, Homo sapiens
  misc_RNA (1)...(19): siRNA sense strand
ucagacagcucaagcaagu

SEQ ID NO: 1883291 - RNA, 19 nt, Homo sapiens
  misc_RNA (1)...(19): siRNA sense strand
ggaaagacgcaaccaggaa

SEQ ID NO: 1883292 - RNA, 19 nt, Homo sapiens
  misc_RNA (1)...(19): siRNA sense strand
gaauaugacaucuuccuau

SEQ ID NO: 1883293 - RNA, 19 nt, Homo sapiens
  misc_RNA (1)...(19): siRNA sense strand
cagugaaaguccaugauaa

SEQ ID NO: 1883294 - RNA, 19 nt, Homo sapiens
  misc_RNA (1)...(19): siRNA sense strand
ccaaggaccuagcagugaa

SEQ ID NO: 1883295 - RNA, 19 nt, Homo sapiens
  misc_RNA (1)...(19): siRNA sense strand
agaaaccugcuucgaauua

SEQ ID NO: 1883296 - RNA, 19 nt, Homo sapiens
  misc_RNA (1)...(19): siRNA sense strand
acagaaaccugcuucgaau

SEQ ID NO: 1883297 - RNA, 19 nt, Homo sapiens
  misc_RNA (1)...(19): siRNA sense strand
ggaaaucaaaucacaguca

SEQ ID NO: 1883298 - RNA, 19 nt, Homo sapiens
  misc_RNA (1)...(19): siRNA sense strand
ugaaguccauuguguugaa

SEQ ID NO: 1883299 - RNA, 19 nt, Homo sapiens
  misc_RNA (1)...(19): siRNA sense strand
uugaagagauucugaagga

SEQ ID NO: 1883300 - RNA, 19 nt, Homo sapiens
  misc_RNA (1)...(19): siRNA sense strand
cgaggaagaauaaagaauu

SEQ ID NO: 1883301 - RNA, 19 nt, Homo sapiens
  misc_RNA (1)...(19): siRNA sense strand
gacagaaaccugcuucgaa

SEQ ID NO: 1883302 - RNA, 19 nt, Homo sapiens
  misc_RNA (1)...(19): siRNA sense strand
agaaggaaaucaaaucaca

SEQ ID NO: 1883303 - RNA, 19 nt, Homo sapiens
  misc_RNA (1)...(19): siRNA sense strand
cagcaugucaguucuguaa

SEQ ID NO: 1883304 - RNA, 19 nt, Homo sapiens
  misc_RNA (1)...(19): siRNA sense strand
gcaauacauacgccuagua

SEQ ID NO: 1883305 - RNA, 19 nt, Homo sapiens
  misc_RNA (1)...(19): siRNA sense strand
guacuaagucucacacuca

SEQ ID NO: 1883306 - RNA, 19 nt, Homo sapiens
  misc_RNA (1)...(19): siRNA sense strand
gggaagggcuccagaagcu

SEQ ID NO: 1883307 - RNA, 19 nt, Homo sapiens
  misc_RNA (1)...(19): siRNA sense strand
ggagaaggaaaucaaauca

SEQ ID NO: 1883308 - RNA, 19 nt, Homo sapiens
  misc_RNA (1)...(19): siRNA sense strand
aagaggagcugucagaagu

SEQ ID NO: 1883309 - RNA, 19 nt, Homo sapiens
  misc_RNA (1)...(19): siRNA sense strand
gagagcaguucaagugaca

SEQ ID NO: 1883310 - RNA, 19 nt, Homo sapiens
  misc_RNA (1)...(19): siRNA sense strand
ugagcugucuagucgaaua

SEQ ID NO: 1883311 - RNA, 19 nt, Homo sapiens
  misc_RNA (1)...(19): siRNA sense strand
gaaaccugcuucgaauuag

SEQ ID NO: 1883312 - RNA, 19 nt, Homo sapiens
  misc_RNA (1)...(19): siRNA sense strand
gcaaagacagacucccauu

SEQ ID NO: 1883313 - RNA, 19 nt, Homo sapiens
  misc_RNA (1)...(19): siRNA sense strand
gaccagacuuccaaagaca

SEQ ID NO: 1883314 - RNA, 19 nt, Homo sapiens
  misc_RNA (1)...(19): siRNA sense strand
cagccaagccugcacuuaa

SEQ ID NO: 1883315 - RNA, 19 nt, Homo sapiens
  misc_RNA (1)...(19): siRNA sense strand
cagcagcaauaacaguaaa

SEQ ID NO: 1883316 - RNA, 19 nt, Homo sapiens
  misc_RNA (1)...(19): siRNA sense strand
ccacagcgccaacacaaga

SEQ ID NO: 1883317 - RNA, 19 nt, Homo sapiens
  misc_RNA (1)...(19): siRNA sense strand
cagcugagccauccaaguu

SEQ ID NO: 1883318 - RNA, 19 nt, Homo sapiens
  misc_RNA (1)...(19): siRNA sense strand
caauaacaguaaaggcuau

SEQ ID NO: 1883319 - RNA, 19 nt, Homo sapiens
  misc_RNA (1)...(19): siRNA sense strand
cgaaauauccuuuaauucc

SEQ ID NO: 1883320 - RNA, 19 nt, Homo sapiens
  misc_RNA (1)...(19): siRNA sense strand
gagaagaggagcucagaca

SEQ ID NO: 1883321 - RNA, 19 nt, Homo sapiens
  misc_RNA (1)...(19): siRNA sense strand
gaaagcagaagauaaacag

SEQ ID NO: 1883322 - RNA, 19 nt, Homo sapiens
  misc_RNA (1)...(19): siRNA sense strand
acaacuggcugaccaaagu

SEQ ID NO: 1883323 - RNA, 19 nt, Homo sapiens
  misc_RNA (1)...(19): siRNA sense strand
ucacucaaauucucagcaa

SEQ ID NO: 1883324 - RNA, 19 nt, Homo sapiens
  misc_RNA (1)...(19): siRNA sense strand
gcaaggaagcagcaagguu

SEQ ID NO: 1883325 - RNA, 19 nt, Homo sapiens
  misc_RNA (1)...(19): siRNA sense strand
gaaaauagguugggaaagc

SEQ ID NO: 1883326 - RNA, 19 nt, Homo sapiens
  misc_RNA (1)...(19): siRNA sense strand
ccagucaccauccagaaua

SEQ ID NO: 1883327 - RNA, 19 nt, Homo sapiens
  misc_RNA (1)...(19): siRNA sense strand
cgagaguucuuccaaaguc

SEQ ID NO: 1883328 - RNA, 19 nt, Homo sapiens
  misc_RNA (1)...(19): siRNA sense strand
aagcacagcucugagaaga

SEQ ID NO: 1883329 - RNA, 19 nt, Homo sapiens
  misc_RNA (1)...(19): siRNA sense strand
gaggacagccgcaaagaca

SEQ ID NO: 1883330 - RNA, 19 nt, Homo sapiens
  misc_RNA (1)...(19): siRNA sense strand
gagaccagacuuccaaaga

SEQ ID NO: 1883331 - RNA, 19 nt, Homo sapiens
  misc_RNA (1)...(19): siRNA sense strand
gaaagaggagcugucagaa

SEQ ID NO: 1883332 - RNA, 19 nt, Homo sapiens
  misc_RNA (1)...(19): siRNA sense strand
gaaaaugagccccuagaaa

SEQ ID NO: 1883333 - RNA, 19 nt, Homo sapiens
  misc_RNA (1)...(19): siRNA sense strand
gugcuucggugacagauuc

SEQ ID NO: 1883334 - RNA, 19 nt, Homo sapiens
  misc_RNA (1)...(19): siRNA sense strand
agucaaguuuguacaauga

SEQ ID NO: 1883335 - RNA, 19 nt, Homo sapiens
  misc_RNA (1)...(19): siRNA sense strand
aauaaacacuucgagaguu

SEQ ID NO: 1883336 - RNA, 19 nt, Homo sapiens
  misc_RNA (1)...(19): siRNA sense strand
ggacagugacagugaacaa

SEQ ID NO: 1883337 - RNA, 19 nt, Homo sapiens
  misc_RNA (1)...(19): siRNA sense strand
uacagaacauguugggaaa

SEQ ID NO: 1883338 - RNA, 19 nt, Homo sapiens
  misc_RNA (1)...(19): siRNA sense strand
ggaagcccaccaagagaaa

SEQ ID NO: 1883339 - RNA, 19 nt, Homo sapiens
  misc_RNA (1)...(19): siRNA sense strand
caagcagaccuucacauga

SEQ ID NO: 1883340 - RNA, 19 nt, Homo sapiens
  misc_RNA (1)...(19): siRNA sense strand
ucaaaucacagucaucuuc

SEQ ID NO: 1883341 - RNA, 19 nt, Homo sapiens
  misc_RNA (1)...(19): siRNA sense strand
agacugugauaacaagaaa

SEQ ID NO: 1883342 - RNA, 19 nt, Homo sapiens
  misc_RNA (1)...(19): siRNA sense strand
gaccugcucucucggauac

SEQ ID NO: 1883343 - RNA, 19 nt, Homo sapiens
  misc_RNA (1)...(19): siRNA sense strand
gcucuagucaucacaagaa

SEQ ID NO: 1883344 - RNA, 19 nt, Homo sapiens
  misc_RNA (1)...(19): siRNA sense strand
acgaagaagugaaggaguu

SEQ ID NO: 1883345 - RNA, 19 nt, Homo sapiens
  misc_RNA (1)...(19): siRNA sense strand
aagccgaaauauccuuuaa

SEQ ID NO: 1883346 - RNA, 19 nt, Homo sapiens
  misc_RNA (1)...(19): siRNA sense strand
cgaauuagagagaaggaaa

SEQ ID NO: 1883347 - RNA, 19 nt, Homo sapiens
  misc_RNA (1)...(19): siRNA sense strand
aauaugacaucuuccuaug

SEQ ID NO: 1883348 - RNA, 19 nt, Homo sapiens
  misc_RNA (1)...(19): siRNA sense strand
aagcagaccuucacaugag

SEQ ID NO: 1883349 - RNA, 19 nt, Homo sapiens
  misc_RNA (1)...(19): siRNA sense strand
gagauacugcaaauccuuu

SEQ ID NO: 1883350 - RNA, 19 nt, Homo sapiens
  misc_RNA (1)...(19): siRNA sense strand
ggaaagcagaagauaaaca

SEQ ID NO: 1883351 - RNA, 19 nt, Homo sapiens
  misc_RNA (1)...(19): siRNA sense strand
ggacagccgcaaagacaga

SEQ ID NO: 1883352 - RNA, 19 nt, Homo sapiens
  misc_RNA (1)...(19): siRNA sense strand
gagaagaagaagcacaaga

SEQ ID NO: 1883353 - RNA, 19 nt, Homo sapiens
  misc_RNA (1)...(19): siRNA sense strand
gaacauguugggaaacuac

SEQ ID NO: 1883354 - RNA, 19 nt, Homo sapiens
  misc_RNA (1)...(19): siRNA sense strand
gcuacaagaauuaaccaaa

SEQ ID NO: 1883355 - RNA, 19 nt, Homo sapiens
  misc_RNA (1)...(19): siRNA sense strand
gccaaaugguaacucuaaa

SEQ ID NO: 1883356 - RNA, 19 nt, Homo sapiens
  misc_RNA (1)...(19): siRNA sense strand
acagucaucuucaucuuca

SEQ ID NO: 1883357 - RNA, 19 nt, Homo sapiens
  misc_RNA (1)...(19): siRNA sense strand
cgucauccaugcucgaaga

SEQ ID NO: 1883358 - RNA, 19 nt, Homo sapiens
  misc_RNA (1)...(19): siRNA sense strand
ugaaaguccaugauaaaga

SEQ ID NO: 1883359 - RNA, 19 nt, Homo sapiens
  misc_RNA (1)...(19): siRNA sense strand
cgacagcagaccuuugaaa

SEQ ID NO: 1883360 - RNA, 19 nt, Homo sapiens
  misc_RNA (1)...(19): siRNA sense strand
ucacgaggaagaauaaaga

SEQ ID NO: 1883361 - RNA, 19 nt, Homo sapiens
  misc_RNA (1)...(19): siRNA sense strand
ucacagucaucuucaucuu

SEQ ID NO: 1883362 - RNA, 19 nt, Homo sapiens
  misc_RNA (1)...(19): siRNA sense strand
caaagacagacucccauug

SEQ ID NO: 1883363 - RNA, 19 nt, Homo sapiens
  misc_RNA (1)...(19): siRNA sense strand
caaaggacucucagcaugu

SEQ ID NO: 1883364 - RNA, 19 nt, Homo sapiens
  misc_RNA (1)...(19): siRNA sense strand
caaguuuccuuucccuaca

SEQ ID NO: 1883365 - RNA, 19 nt, Homo sapiens
  misc_RNA (1)...(19): siRNA sense strand
gcugagccauccaaguuuc

SEQ ID NO: 1883366 - RNA, 19 nt, Homo sapiens
  misc_RNA (1)...(19): siRNA sense strand
gcagcagcaauaacaguaa

SEQ ID NO: 1883367 - RNA, 19 nt, Homo sapiens
  misc_RNA (1)...(19): siRNA sense strand
gggaaacuacgaagaagug

SEQ ID NO: 1883368 - RNA, 19 nt, Homo sapiens
  misc_RNA (1)...(19): siRNA sense strand
caaggguucuuccggagau

SEQ ID NO: 1883369 - RNA, 19 nt, Homo sapiens
  misc_RNA (1)...(19): siRNA sense strand
gcagaccuacuccaaugaa

SEQ ID NO: 1883370 - RNA, 19 nt, Homo sapiens
  misc_RNA (1)...(19): siRNA sense strand
gaaagaaccugaaauaauc

SEQ ID NO: 1883371 - RNA, 19 nt, Homo sapiens
  misc_RNA (1)...(19): siRNA sense strand
gaaagaagauuggauauag

SEQ ID NO: 1883372 - RNA, 19 nt, Homo sapiens
  misc_RNA (1)...(19): siRNA sense strand
gaaggcagauuuguucuua

SEQ ID NO: 1883373 - RNA, 19 nt, Homo sapiens
  misc_RNA (1)...(19): siRNA sense strand
gcuuugagcucuauaauaa

SEQ ID NO: 1883374 - RNA, 19 nt, Homo sapiens
  misc_RNA (1)...(19): siRNA sense strand
gaaaccagcuuuacucgaa

SEQ ID NO: 1883375 - RNA, 19 nt, Homo sapiens
  misc_RNA (1)...(19): siRNA sense strand
ugagaaaccucuaguugua

SEQ ID NO: 1883376 - RNA, 19 nt, Homo sapiens
  misc_RNA (1)...(19): siRNA sense strand
gaacuucucaacuucauua

SEQ ID NO: 1883377 - RNA, 19 nt, Homo sapiens
  misc_RNA (1)...(19): siRNA sense strand
gaaaggaggugcugcagau

SEQ ID NO: 1883378 - RNA, 19 nt, Homo sapiens
  misc_RNA (1)...(19): siRNA sense strand
ggaaagaaccugaaauaau

SEQ ID NO: 1883379 - RNA, 19 nt, Homo sapiens
  misc_RNA (1)...(19): siRNA sense strand
cggagaagcugcccuauuu

SEQ ID NO: 1883380 - RNA, 19 nt, Homo sapiens
  misc_RNA (1)...(19): siRNA sense strand
gaggaaagaaccugaaaua

SEQ ID NO: 1883381 - RNA, 19 nt, Homo sapiens
  misc_RNA (1)...(19): siRNA sense strand
gguggaacauugagaauuu

SEQ ID NO: 1883382 - RNA, 19 nt, Homo sapiens
  misc_RNA (1)...(19): siRNA sense strand
ggagaaagaagauuggaua

SEQ ID NO: 1883383 - RNA, 19 nt, Homo sapiens
  misc_RNA (1)...(19): siRNA sense strand
gaacgaagagcgaggguaa

SEQ ID NO: 1883384 - RNA, 19 nt, Homo sapiens
  misc_RNA (1)...(19): siRNA sense strand
gauacuaccugcaagcauu

SEQ ID NO: 1883385 - RNA, 19 nt, Homo sapiens
  misc_RNA (1)...(19): siRNA sense strand
gaagcugcccuauuuagua

SEQ ID NO: 1883386 - RNA, 19 nt, Homo sapiens
  misc_RNA (1)...(19): siRNA sense strand
caucugaacuucucaacuu

SEQ ID NO: 1883387 - RNA, 19 nt, Homo sapiens
  misc_RNA (1)...(19): siRNA sense strand
gaagggaagugcaguugga

SEQ ID NO: 1883388 - RNA, 19 nt, Homo sapiens
  misc_RNA (1)...(19): siRNA sense strand
caacggaucuuauagaaaa

SEQ ID NO: 1883389 - RNA, 19 nt, Homo sapiens
  misc_RNA (1)...(19): siRNA sense strand
agauaaagcuuaccaacuu

SEQ ID NO: 1883390 - RNA, 19 nt, Homo sapiens
  misc_RNA (1)...(19): siRNA sense strand
cuacagagcgcacacauaa

SEQ ID NO: 1883391 - RNA, 19 nt, Homo sapiens
  misc_RNA (1)...(19): siRNA sense strand
gauggaggccugaugguua

SEQ ID NO: 1883392 - RNA, 19 nt, Homo sapiens
  misc_RNA (1)...(19): siRNA sense strand
ccaaaugguuuacaagaau

SEQ ID NO: 1883393 - RNA, 19 nt, Homo sapiens
  misc_RNA (1)...(19): siRNA sense strand
gcucuacaguccacuuuaa

SEQ ID NO: 1883394 - RNA, 19 nt, Homo sapiens
  misc_RNA (1)...(19): siRNA sense strand
guuaagggcccaagacaua

SEQ ID NO: 1883395 - RNA, 19 nt, Homo sapiens
  misc_RNA (1)...(19): siRNA sense strand
ggagagagcaggagaggaa

SEQ ID NO: 1883396 - RNA, 19 nt, Homo sapiens
  misc_RNA (1)...(19): siRNA sense strand
gcaaaugcaucugaacuuc

SEQ ID NO: 1883397 - RNA, 19 nt, Homo sapiens
  misc_RNA (1)...(19): siRNA sense strand
uuacaaaucuucagggaau

SEQ ID NO: 1883398 - RNA, 19 nt, Homo sapiens
  misc_RNA (1)...(19): siRNA sense strand
gcacacagauaguaaucau

SEQ ID NO: 1883399 - RNA, 19 nt, Homo sapiens
  misc_RNA (1)...(19): siRNA sense strand
gaaauugccuggugaugac

SEQ ID NO: 1883400 - RNA, 19 nt, Homo sapiens
  misc_RNA (1)...(19): siRNA sense strand
uagaacagcagccagauua

SEQ ID NO: 1883401 - RNA, 19 nt, Homo sapiens
  misc_RNA (1)...(19): siRNA sense strand
gaagauuggauauagauga

SEQ ID NO: 1883402 - RNA, 19 nt, Homo sapiens
  misc_RNA (1)...(19): siRNA sense strand
ccacauaugcacacagaua

SEQ ID NO: 1883403 - RNA, 19 nt, Homo sapiens
  misc_RNA (1)...(19): siRNA sense strand
ggagacaacuuuugauuug

SEQ ID NO: 1883404 - RNA, 19 nt, Homo sapiens
  misc_RNA (1)...(19): siRNA sense strand
gcagaacucaugacaagaa

SEQ ID NO: 1883405 - RNA, 19 nt, Homo sapiens
  misc_RNA (1)...(19): siRNA sense strand
gauaaagcuuaccaacuug

SEQ ID NO: 1883406 - RNA, 19 nt, Homo sapiens
  misc_RNA (1)...(19): siRNA sense strand
gaugagaaaccucuaguug

SEQ ID NO: 1883407 - RNA, 19 nt, Homo sapiens
  misc_RNA (1)...(19): siRNA sense strand
guaugcaccugaugacauu

SEQ ID NO: 1883408 - RNA, 19 nt, Homo sapiens
  misc_RNA (1)...(19): siRNA sense strand
acauaaaccuggaauuguu

SEQ ID NO: 1883409 - RNA, 19 nt, Homo sapiens
  misc_RNA (1)...(19): siRNA sense strand
aaagggugcuaaagaaauu

SEQ ID NO: 1883410 - RNA, 19 nt, Homo sapiens
  misc_RNA (1)...(19): siRNA sense strand
caacugaauuggaacaaag

SEQ ID NO: 1883411 - RNA, 19 nt, Homo sapiens
  misc_RNA (1)...(19): siRNA sense strand
gcagagacuugcaguacau

SEQ ID NO: 1883412 - RNA, 19 nt, Homo sapiens
  misc_RNA (1)...(19): siRNA sense strand
gaacaucagcguugguaug

SEQ ID NO: 1883413 - RNA, 19 nt, Homo sapiens
  misc_RNA (1)...(19): siRNA sense strand
ggaacaacagcgaagauaa

SEQ ID NO: 1883414 - RNA, 19 nt, Homo sapiens
  misc_RNA (1)...(19): siRNA sense strand
ccagguacuuggacaauau

SEQ ID NO: 1883415 - RNA, 19 nt, Homo sapiens
  misc_RNA (1)...(19): siRNA sense strand
gcaagacacccaagggaaa

SEQ ID NO: 1883416 - RNA, 19 nt, Homo sapiens
  misc_RNA (1)...(19): siRNA sense strand
gcgcacacauaaagucauu

SEQ ID NO: 1883417 - RNA, 19 nt, Homo sapiens
  misc_RNA (1)...(19): siRNA sense strand
ggaguuccauggagugaug

SEQ ID NO: 1883418 - RNA, 19 nt, Homo sapiens
  misc_RNA (1)...(19): siRNA sense strand
gauaacaucugucucuacu

SEQ ID NO: 1883419 - RNA, 19 nt, Homo sapiens
  misc_RNA (1)...(19): siRNA sense strand
ggagaaauuucgaccugau

SEQ ID NO: 1883420 - RNA, 19 nt, Homo sapiens
  misc_RNA (1)...(19): siRNA sense strand
gcauaugccucuggaacaa

SEQ ID NO: 1883421 - RNA, 19 nt, Homo sapiens
  misc_RNA (1)...(19): siRNA sense strand
gaauauagugaaccaaaga

SEQ ID NO: 1883422 - RNA, 19 nt, Homo sapiens
  misc_RNA (1)...(19): siRNA sense strand
cgacuuugcuuaccaugga

SEQ ID NO: 1883423 - RNA, 19 nt, Homo sapiens
  misc_RNA (1)...(19): siRNA sense strand
cuacgacgcugcagaguca

SEQ ID NO: 1883424 - RNA, 19 nt, Homo sapiens
  misc_RNA (1)...(19): siRNA sense strand
ggagaagcugcccuauuua

SEQ ID NO: 1883425 - RNA, 19 nt, Homo sapiens
  misc_RNA (1)...(19): siRNA sense strand
gaacucaugacaagaacaa

SEQ ID NO: 1883426 - RNA, 19 nt, Homo sapiens
  misc_RNA (1)...(19): siRNA sense strand
cugcugagguuuacaaaga

SEQ ID NO: 1883427 - RNA, 19 nt, Homo sapiens
  misc_RNA (1)...(19): siRNA sense strand
cagaaccaguggccaaauu

SEQ ID NO: 1883428 - RNA, 19 nt, Homo sapiens
  misc_RNA (1)...(19): siRNA sense strand
gugaucagcuccucagugu

SEQ ID NO: 1883429 - RNA, 19 nt, Homo sapiens
  misc_RNA (1)...(19): siRNA sense strand
gguucugacucuagagaua

SEQ ID NO: 1883430 - RNA, 19 nt, Homo sapiens
  misc_RNA (1)...(19): siRNA sense strand
gagaauuuaugcagauagu

SEQ ID NO: 1883431 - RNA, 19 nt, Homo sapiens
  misc_RNA (1)...(19): siRNA sense strand
gaugcgcacucaguccuua

SEQ ID NO: 1883432 - RNA, 19 nt, Homo sapiens
  misc_RNA (1)...(19): siRNA sense strand
caucagcguugguaugaga

SEQ ID NO: 1883433 - RNA, 19 nt, Homo sapiens
  misc_RNA (1)...(19): siRNA sense strand
cugaugacauuccaaauau

SEQ ID NO: 1883434 - RNA, 19 nt, Homo sapiens
  misc_RNA (1)...(19): siRNA sense strand
ggaacuggcugcggacugu

SEQ ID NO: 1883435 - RNA, 19 nt, Homo sapiens
  misc_RNA (1)...(19): siRNA sense strand
cgccuucaguuaaguguua

SEQ ID NO: 1883436 - RNA, 19 nt, Homo sapiens
  misc_RNA (1)...(19): siRNA sense strand
gcuggaaacuuugcaacaa

SEQ ID NO: 1883437 - RNA, 19 nt, Homo sapiens
  misc_RNA (1)...(19): siRNA sense strand
ucgaaacgcucgcggagaa

SEQ ID NO: 1883438 - RNA, 19 nt, Homo sapiens
  misc_RNA (1)...(19): siRNA sense strand
cggcagaacucaugacaag

SEQ ID NO: 1883439 - RNA, 19 nt, Homo sapiens
  misc_RNA (1)...(19): siRNA sense strand
gggaggagauauucauagu

SEQ ID NO: 1883440 - RNA, 19 nt, Homo sapiens
  misc_RNA (1)...(19): siRNA sense strand
gauuggauauagaugagaa

SEQ ID NO: 1883441 - RNA, 19 nt, Homo sapiens
  misc_RNA (1)...(19): siRNA sense strand
gauaguaaucauuccagua

SEQ ID NO: 1883442 - RNA, 19 nt, Homo sapiens
  misc_RNA (1)...(19): siRNA sense strand
gaacaacagcgaagauaac

SEQ ID NO: 1883443 - RNA, 19 nt, Homo sapiens
  misc_RNA (1)...(19): siRNA sense strand
gagaggauuuugcagguua

SEQ ID NO: 1883444 - RNA, 19 nt, Homo sapiens
  misc_RNA (1)...(19): siRNA sense strand
cuucaagccuuauuacaga

SEQ ID NO: 1883445 - RNA, 19 nt, Homo sapiens
  misc_RNA (1)...(19): siRNA sense strand
gcaguugggccauauugaa

SEQ ID NO: 1883446 - RNA, 19 nt, Homo sapiens
  misc_RNA (1)...(19): siRNA sense strand
gauuaucgcaggcaagaaa

SEQ ID NO: 1883447 - RNA, 19 nt, Homo sapiens
  misc_RNA (1)...(19): siRNA sense strand
gcaugaaagugcaguuugg

SEQ ID NO: 1883448 - RNA, 19 nt, Homo sapiens
  misc_RNA (1)...(19): siRNA sense strand
gaugaugaguguccuuuac

SEQ ID NO: 1883449 - RNA, 19 nt, Homo sapiens
  misc_RNA (1)...(19): siRNA sense strand
ccaaauauucccuacaaga

SEQ ID NO: 1883450 - RNA, 19 nt, Homo sapiens
  misc_RNA (1)...(19): siRNA sense strand
gagaaauuucgaccugaua

SEQ ID NO: 1883451 - RNA, 19 nt, Homo sapiens
  misc_RNA (1)...(19): siRNA sense strand
caaaguaauggaccugaaa

SEQ ID NO: 1883452 - RNA, 19 nt, Homo sapiens
  misc_RNA (1)...(19): siRNA sense strand
gaaaacaccagcagccaua

SEQ ID NO: 1883453 - RNA, 19 nt, Homo sapiens
  misc_RNA (1)...(19): siRNA sense strand
gcagagaauuucagaucgu

SEQ ID NO: 1883454 - RNA, 19 nt, Homo sapiens
  misc_RNA (1)...(19): siRNA sense strand
ggaauggccaagugacaaa

SEQ ID NO: 1883455 - RNA, 19 nt, Homo sapiens
  misc_RNA (1)...(19): siRNA sense strand
guggaacauugagaauuua

SEQ ID NO: 1883456 - RNA, 19 nt, Homo sapiens
  misc_RNA (1)...(19): siRNA sense strand
ugauucagguggaacauug

SEQ ID NO: 1883457 - RNA, 19 nt, Homo sapiens
  misc_RNA (1)...(19): siRNA sense strand
gaacggagaaagagagaag

SEQ ID NO: 1883458 - RNA, 19 nt, Homo sapiens
  misc_RNA (1)...(19): siRNA sense strand
gcaaaucagccuccuaguc

SEQ ID NO: 1883459 - RNA, 19 nt, Homo sapiens
  misc_RNA (1)...(19): siRNA sense strand
ccugaugacauuccaaaua

SEQ ID NO: 1883460 - RNA, 19 nt, Homo sapiens
  misc_RNA (1)...(19): siRNA sense strand
ugucuucaaucagaacuua

SEQ ID NO: 1883461 - RNA, 19 nt, Homo sapiens
  misc_RNA (1)...(19): siRNA sense strand
aaccaaauauucccuacaa

SEQ ID NO: 1883462 - RNA, 19 nt, Homo sapiens
  misc_RNA (1)...(19): siRNA sense strand
gaagcuggccgacaucauc

SEQ ID NO: 1883463 - RNA, 19 nt, Homo sapiens
  misc_RNA (1)...(19): siRNA sense strand
gaaagucugauagugauau

SEQ ID NO: 1883464 - RNA, 19 nt, Homo sapiens
  misc_RNA (1)...(19): siRNA sense strand
agauaaagcugcuggaaac

SEQ ID NO: 1883465 - RNA, 19 nt, Homo sapiens
  misc_RNA (1)...(19): siRNA sense strand
caacagcgaagauaacauc

SEQ ID NO: 1883466 - RNA, 19 nt, Homo sapiens
  misc_RNA (1)...(19): siRNA sense strand
gggcgucccauguauuuaa

SEQ ID NO: 1883467 - RNA, 19 nt, Homo sapiens
  misc_RNA (1)...(19): siRNA sense strand
ugaaaagggugcuaaagaa

SEQ ID NO: 1883468 - RNA, 19 nt, Homo sapiens
  misc_RNA (1)...(19): siRNA sense strand
ccaaguauucacucuauga

SEQ ID NO: 1883469 - RNA, 19 nt, Homo sapiens
  misc_RNA (1)...(19): siRNA sense strand
ggagaaagagagaagaaca

SEQ ID NO: 1883470 - RNA, 19 nt, Homo sapiens
  misc_RNA (1)...(19): siRNA sense strand
gaagaggacugauaaugga

SEQ ID NO: 1883471 - RNA, 19 nt, Homo sapiens
  misc_RNA (1)...(19): siRNA sense strand
ggaaaggugugagcaguuu

SEQ ID NO: 1883472 - RNA, 19 nt, Homo sapiens
  misc_RNA (1)...(19): siRNA sense strand
gcaggcaucuacaccagua

SEQ ID NO: 1883473 - RNA, 19 nt, Homo sapiens
  misc_RNA (1)...(19): siRNA sense strand
caugaucgcuucaacaaga

SEQ ID NO: 1883474 - RNA, 19 nt, Homo sapiens
  misc_RNA (1)...(19): siRNA sense strand
gcaaauaccacuucagcaa

SEQ ID NO: 1883475 - RNA, 19 nt, Homo sapiens
  misc_RNA (1)...(19): siRNA sense strand
guaggaggcugcugcguau

SEQ ID NO: 1883476 - RNA, 19 nt, Homo sapiens
  misc_RNA (1)...(19): siRNA sense strand
gagccugcaugaccuguaa

SEQ ID NO: 1883477 - RNA, 19 nt, Homo sapiens
  misc_RNA (1)...(19): siRNA sense strand
agacaggccugaaggagaa

SEQ ID NO: 1883478 - RNA, 19 nt, Homo sapiens
  misc_RNA (1)...(19): siRNA sense strand
ggacaaagaacgccuuaag

SEQ ID NO: 1883479 - RNA, 19 nt, Homo sapiens
  misc_RNA (1)...(19): siRNA sense strand
gagagucugucuuccaugu

SEQ ID NO: 1883480 - RNA, 19 nt, Homo sapiens
  misc_RNA (1)...(19): siRNA sense strand
gcauugaagaggacugaua

SEQ ID NO: 1883481 - RNA, 19 nt, Homo sapiens
  misc_RNA (1)...(19): siRNA sense strand
gcaagagcccuccgggaaa

SEQ ID NO: 1883482 - RNA, 19 nt, Homo sapiens
  misc_RNA (1)...(19): siRNA sense strand
gccauagccugagucauaa

SEQ ID NO: 1883483 - RNA, 19 nt, Homo sapiens
  misc_RNA (1)...(19): siRNA sense strand
gcacgcaggagaccucuga

SEQ ID NO: 1883484 - RNA, 19 nt, Homo sapiens
  misc_RNA (1)...(19): siRNA sense strand
agccauagccugagucaua

SEQ ID NO: 1883485 - RNA, 19 nt, Homo sapiens
  misc_RNA (1)...(19): siRNA sense strand
acaacucgcuguccacuuc

SEQ ID NO: 1883486 - RNA, 19 nt, Homo sapiens
  misc_RNA (1)...(19): siRNA sense strand
aaauaccacuucagcaaga

SEQ ID NO: 1883487 - RNA, 19 nt, Homo sapiens
  misc_RNA (1)...(19): siRNA sense strand
guacugcggcuacugcaaa

SEQ ID NO: 1883488 - RNA, 19 nt, Homo sapiens
  misc_RNA (1)...(19): siRNA sense strand
caacaacacaagucucaug

SEQ ID NO: 1883489 - RNA, 19 nt, Homo sapiens
  misc_RNA (1)...(19): siRNA sense strand
aagaacgccuuaagcagaa

SEQ ID NO: 1883490 - RNA, 19 nt, Homo sapiens
  misc_RNA (1)...(19): siRNA sense strand
gcaucuacaccaguaauaa

SEQ ID NO: 1883491 - RNA, 19 nt, Homo sapiens
  misc_RNA (1)...(19): siRNA sense strand
cuggcuggcucuaccuuua

SEQ ID NO: 1883492 - RNA, 19 nt, Homo sapiens
  misc_RNA (1)...(19): siRNA sense strand
ccaacgugcucaccaugga

SEQ ID NO: 1883493 - RNA, 19 nt, Homo sapiens
  misc_RNA (1)...(19): siRNA sense strand
gcucgucgcuguccuucca

SEQ ID NO: 1883494 - RNA, 19 nt, Homo sapiens
  misc_RNA (1)...(19): siRNA sense strand
caagagcccuccgggaaag

SEQ ID NO: 1883495 - RNA, 19 nt, Homo sapiens
  misc_RNA (1)...(19): siRNA sense strand
cauugaagaggacugauaa

SEQ ID NO: 1883496 - RNA, 19 nt, Homo sapiens
  misc_RNA (1)...(19): siRNA sense strand
uuacagagcagcagagaca

SEQ ID NO: 1883497 - RNA, 19 nt, Homo sapiens
  misc_RNA (1)...(19): siRNA sense strand
acaaagaacgccuuaagca

SEQ ID NO: 1883498 - RNA, 19 nt, Homo sapiens
  misc_RNA (1)...(19): siRNA sense strand
ggaggcugcugcguauguu

SEQ ID NO: 1883499 - RNA, 19 nt, Homo sapiens
  misc_RNA (1)...(19): siRNA sense strand
ugaagaggacugauaaugg

SEQ ID NO: 1883500 - RNA, 19 nt, Homo sapiens
  misc_RNA (1)...(19): siRNA sense strand
cauaaagggaagaaacuga

SEQ ID NO: 1883501 - RNA, 19 nt, Homo sapiens
  misc_RNA (1)...(19): siRNA sense strand
ugaaggagaagaagcacaa

SEQ ID NO: 1883502 - RNA, 19 nt, Homo sapiens
  misc_RNA (1)...(19): siRNA sense strand
ugcaguacgugccucauga

SEQ ID NO: 1883503 - RNA, 19 nt, Homo sapiens
  misc_RNA (1)...(19): siRNA sense strand
cgucaccugugcccaaaug

SEQ ID NO: 1883504 - RNA, 19 nt, Homo sapiens
  misc_RNA (1)...(19): siRNA sense strand
ggagguggcagugguuuca

SEQ ID NO: 1883505 - RNA, 19 nt, Homo sapiens
  misc_RNA (1)...(19): siRNA sense strand
ggcaacaacacaagucuca

SEQ ID NO: 1883506 - RNA, 19 nt, Homo sapiens
  misc_RNA (1)...(19): siRNA sense strand
uggcaggcuugcuguguga

SEQ ID NO: 1883507 - RNA, 19 nt, Homo sapiens
  misc_RNA (1)...(19): siRNA sense strand
uuaagcagaagcacaagaa

SEQ ID NO: 1883508 - RNA, 19 nt, Homo sapiens
  misc_RNA (1)...(19): siRNA sense strand
ccacgcagcaggagaagca

SEQ ID NO: 1883509 - RNA, 19 nt, Homo sapiens
  misc_RNA (1)...(19): siRNA sense strand
gggaaaggugugagcaguu

SEQ ID NO: 1883510 - RNA, 19 nt, Homo sapiens
  misc_RNA (1)...(19): siRNA sense strand
cagccagggugagguguga

SEQ ID NO: 1883511 - RNA, 19 nt, Homo sapiens
  misc_RNA (1)...(19): siRNA sense strand
agggaccgcugacaaagga

SEQ ID NO: 1883512 - RNA, 19 nt, Homo sapiens
  misc_RNA (1)...(19): siRNA sense strand
ggcaucuacaccaguaaua

SEQ ID NO: 1883513 - RNA, 19 nt, Homo sapiens
  misc_RNA (1)...(19): siRNA sense strand
gaaggagaagaagcacaaa

SEQ ID NO: 1883514 - RNA, 19 nt, Homo sapiens
  misc_RNA (1)...(19): siRNA sense strand
aaacggaugcccgcacuga

SEQ ID NO: 1883515 - RNA, 19 nt, Homo sapiens
  misc_RNA (1)...(19): siRNA sense strand
agaacccgcuggucuacug

SEQ ID NO: 1883516 - RNA, 19 nt, Homo sapiens
  misc_RNA (1)...(19): siRNA sense strand
cgccauggaugucgacaag

SEQ ID NO: 1883517 - RNA, 19 nt, Homo sapiens
  misc_RNA (1)...(19): siRNA sense strand
acuguugucuaccagauga

SEQ ID NO: 1883518 - RNA, 19 nt, Homo sapiens
  misc_RNA (1)...(19): siRNA sense strand
agccagaggaggacaagua

SEQ ID NO: 1883519 - RNA, 19 nt, Homo sapiens
  misc_RNA (1)...(19): siRNA sense strand
uccagcagauccagcagaa

SEQ ID NO: 1883520 - RNA, 19 nt, Homo sapiens
  misc_RNA (1)...(19): siRNA sense strand
ccgagaacccgcuggucua

SEQ ID NO: 1883521 - RNA, 19 nt, Homo sapiens
  misc_RNA (1)...(19): siRNA sense strand
ggagguggacaacgucaag

SEQ ID NO: 1883522 - RNA, 19 nt, Homo sapiens
  misc_RNA (1)...(19): siRNA sense strand
ccauggaugucgacaagcu

SEQ ID NO: 1883523 - RNA, 19 nt, Homo sapiens
  misc_RNA (1)...(19): siRNA sense strand
cagcagauccagcagaaac

SEQ ID NO: 1883524 - RNA, 19 nt, Homo sapiens
  misc_RNA (1)...(19): siRNA sense strand
gagucgaaaggacaaagaa

SEQ ID NO: 1883525 - RNA, 19 nt, Homo sapiens
  misc_RNA (1)...(19): siRNA sense strand
cagaagaagagucgaaagg

SEQ ID NO: 1883526 - RNA, 19 nt, Homo sapiens
  misc_RNA (1)...(19): siRNA sense strand
agaagaagagucgaaagga

SEQ ID NO: 1883527 - RNA, 19 nt, Homo sapiens
  misc_RNA (1)...(19): siRNA sense strand
gagcggcugcagauucuca

SEQ ID NO: 1883528 - RNA, 19 nt, Homo sapiens
  misc_RNA (1)...(19): siRNA sense strand
gaagagucgaaaggacaaa

SEQ ID NO: 1883529 - RNA, 19 nt, Homo sapiens
  misc_RNA (1)...(19): siRNA sense strand
uggacaacgucaaguacug

SEQ ID NO: 1883530 - RNA, 19 nt, Homo sapiens
  misc_RNA (1)...(19): siRNA sense strand
ggagggaccgcugacaaag

SEQ ID NO: 1883531 - RNA, 19 nt, Homo sapiens
  misc_RNA (1)...(19): siRNA sense strand
gcagagcuccccugacuuc

SEQ ID NO: 1883532 - RNA, 19 nt, Homo sapiens
  misc_RNA (1)...(19): siRNA sense strand
uggcagugguuucaucucu

SEQ ID NO: 1883533 - RNA, 19 nt, Homo sapiens
  misc_RNA (1)...(19): siRNA sense strand
cauccacgcagcaggagaa

SEQ ID NO: 1883534 - RNA, 19 nt, Homo sapiens
  misc_RNA (1)...(19): siRNA sense strand
cugccaggcugucucaaca

SEQ ID NO: 1883535 - RNA, 19 nt, Homo sapiens
  misc_RNA (1)...(19): siRNA sense strand
ccacucagguguuuucucu

SEQ ID NO: 1883536 - RNA, 19 nt, Homo sapiens
  misc_RNA (1)...(19): siRNA sense strand
caucuacaccaguaauaag

SEQ ID NO: 1883537 - RNA, 19 nt, Homo sapiens
  misc_RNA (1)...(19): siRNA sense strand
gacaaagaacgccuuaagc

SEQ ID NO: 1883538 - RNA, 19 nt, Homo sapiens
  misc_RNA (1)...(19): siRNA sense strand
gcaguacgugccucaugau

SEQ ID NO: 1883539 - RNA, 19 nt, Homo sapiens
  misc_RNA (1)...(19): siRNA sense strand
gcgucaacaucguggagau

SEQ ID NO: 1883540 - RNA, 19 nt, Homo sapiens
  misc_RNA (1)...(19): siRNA sense strand
ggagccugcaugaccugua

SEQ ID NO: 1883541 - RNA, 19 nt, Homo sapiens
  misc_RNA (1)...(19): siRNA sense strand
gggcauugaagaggacuga

SEQ ID NO: 1883542 - RNA, 19 nt, Homo sapiens
  misc_RNA (1)...(19): siRNA sense strand
gguggucuucucuggcuuu

SEQ ID NO: 1883543 - RNA, 19 nt, Homo sapiens
  misc_RNA (1)...(19): siRNA sense strand
gccuuaagcagaagcacaa

SEQ ID NO: 1883544 - RNA, 19 nt, Homo sapiens
  misc_RNA (1)...(19): siRNA sense strand
ggugugugcccucuacauc

SEQ ID NO: 1883545 - RNA, 19 nt, Homo sapiens
  misc_RNA (1)...(19): siRNA sense strand
gccagaagaagagucgaaa

SEQ ID NO: 1883546 - RNA, 19 nt, Homo sapiens
  misc_RNA (1)...(19): siRNA sense strand
ggccagaagaagagucgaa

SEQ ID NO: 1883547 - RNA, 19 nt, Homo sapiens
  misc_RNA (1)...(19): siRNA sense strand
cacgucaccugugcccaaa

SEQ ID NO: 1883548 - RNA, 19 nt, Homo sapiens
  misc_RNA (1)...(19): siRNA sense strand
cagaggaggacaaguacuc

SEQ ID NO: 1883549 - RNA, 19 nt, Homo sapiens
  misc_RNA (1)...(19): siRNA sense strand
gagagcagcagggagucaa

SEQ ID NO: 1883550 - RNA, 19 nt, Homo sapiens
  misc_RNA (1)...(19): siRNA sense strand
cuacugcaaauaccacuuc

SEQ ID NO: 1883551 - RNA, 19 nt, Homo sapiens
  misc_RNA (1)...(19): siRNA sense strand
ggacuggacuucaacuuug

SEQ ID NO: 1883552 - RNA, 19 nt, Homo sapiens
  misc_RNA (1)...(19): siRNA sense strand
ccacgaagcaguucaaaug

SEQ ID NO: 1883553 - RNA, 19 nt, Homo sapiens
  misc_RNA (1)...(19): siRNA sense strand
gagaagcgacugacacuug

SEQ ID NO: 1883554 - RNA, 19 nt, Homo sapiens
  misc_RNA (1)...(19): siRNA sense strand
gaccagagaucgcuaacca

SEQ ID NO: 1883555 - RNA, 19 nt, Homo sapiens
  misc_RNA (1)...(19): siRNA sense strand
uggagaaccuggaguguga

SEQ ID NO: 1883556 - RNA, 19 nt, Homo sapiens
  misc_RNA (1)...(19): siRNA sense strand
cagcuucagucagcaguua

SEQ ID NO: 1883557 - RNA, 19 nt, Homo sapiens
  misc_RNA (1)...(19): siRNA sense strand
ugacauggauaacaucauc

SEQ ID NO: 1883558 - RNA, 19 nt, Homo sapiens
  misc_RNA (1)...(19): siRNA sense strand
uggauaacaucaucaguga

SEQ ID NO: 1883559 - RNA, 19 nt, Homo sapiens
  misc_RNA (1)...(19): siRNA sense strand
gcaaguucaucaagguuca

SEQ ID NO: 1883560 - RNA, 19 nt, Homo sapiens
  misc_RNA (1)...(19): siRNA sense strand
caucaucagugaccucaug

SEQ ID NO: 1883561 - RNA, 19 nt, Homo sapiens
  misc_RNA (1)...(19): siRNA sense strand
cagaaugccucaggaucua

SEQ ID NO: 1883562 - RNA, 19 nt, Homo sapiens
  misc_RNA (1)...(19): siRNA sense strand
gaaauaccagcuucaguca

SEQ ID NO: 1883563 - RNA, 19 nt, Homo sapiens
  misc_RNA (1)...(19): siRNA sense strand
ucagucauaugcagaauuc

SEQ ID NO: 1883564 - RNA, 19 nt, Homo sapiens
  misc_RNA (1)...(19): siRNA sense strand
gcgagggacuggacuucaa

SEQ ID NO: 1883565 - RNA, 19 nt, Homo sapiens
  misc_RNA (1)...(19): siRNA sense strand
ccagguagaucccauucug

SEQ ID NO: 1883566 - RNA, 19 nt, Homo sapiens
  misc_RNA (1)...(19): siRNA sense strand
gggcuuccuuccuccagua

SEQ ID NO: 1883567 - RNA, 19 nt, Homo sapiens
  misc_RNA (1)...(19): siRNA sense strand
agaccuagaucccgacuuc

SEQ ID NO: 1883568 - RNA, 19 nt, Homo sapiens
  misc_RNA (1)...(19): siRNA sense strand
gaaccuggagugugacaug

SEQ ID NO: 1883569 - RNA, 19 nt, Homo sapiens
  misc_RNA (1)...(19): siRNA sense strand
caacgaggccaccggcaaa

SEQ ID NO: 1883570 - RNA, 19 nt, Homo sapiens
  misc_RNA (1)...(19): siRNA sense strand
aaucucaccucuucccauu

SEQ ID NO: 1883571 - RNA, 19 nt, Homo sapiens
  misc_RNA (1)...(19): siRNA sense strand
gcuguuagaugggcucaau

SEQ ID NO: 1883572 - RNA, 19 nt, Homo sapiens
  misc_RNA (1)...(19): siRNA sense strand
gggacuggacuucaacuuu

SEQ ID NO: 1883573 - RNA, 19 nt, Homo sapiens
  misc_RNA (1)...(19): siRNA sense strand
ugacacuugcccagauuua

SEQ ID NO: 1883574 - RNA, 19 nt, Homo sapiens
  misc_RNA (1)...(19): siRNA sense strand
gaaggugccacuccaacga

SEQ ID NO: 1883575 - RNA, 19 nt, Homo sapiens
  misc_RNA (1)...(19): siRNA sense strand
gcacagcaaguucaucaag

SEQ ID NO: 1883576 - RNA, 19 nt, Homo sapiens
  misc_RNA (1)...(19): siRNA sense strand
ucaaaugccagcaguguca

SEQ ID NO: 1883577 - RNA, 19 nt, Homo sapiens
  misc_RNA (1)...(19): siRNA sense strand
guucccacccuuucuauga

SEQ ID NO: 1883578 - RNA, 19 nt, Homo sapiens
  misc_RNA (1)...(19): siRNA sense strand
ucaucaagguucacaacga

SEQ ID NO: 1883579 - RNA, 19 nt, Homo sapiens
  misc_RNA (1)...(19): siRNA sense strand
gcccugcucaccucugaua

SEQ ID NO: 1883580 - RNA, 19 nt, Homo sapiens
  misc_RNA (1)...(19): siRNA sense strand
ccaagaagaaaccaucugu

SEQ ID NO: 1883581 - RNA, 19 nt, Homo sapiens
  misc_RNA (1)...(19): siRNA sense strand
gugaagaagccgauaugug

SEQ ID NO: 1883582 - RNA, 19 nt, Homo sapiens
  misc_RNA (1)...(19): siRNA sense strand
ggcucaaucucaccucuuc

SEQ ID NO: 1883583 - RNA, 19 nt, Homo sapiens
  misc_RNA (1)...(19): siRNA sense strand
gacugacacuugcccagau

SEQ ID NO: 1883584 - RNA, 19 nt, Homo sapiens
  misc_RNA (1)...(19): siRNA sense strand
ggugcuggcggaggaaaua

SEQ ID NO: 1883585 - RNA, 19 nt, Homo sapiens
  misc_RNA (1)...(19): siRNA sense strand
ucccacccuuucuaugaua

SEQ ID NO: 1883586 - RNA, 19 nt, Homo sapiens
  misc_RNA (1)...(19): siRNA sense strand
acagcaaguucaucaaggu

SEQ ID NO: 1883587 - RNA, 19 nt, Homo sapiens
  misc_RNA (1)...(19): siRNA sense strand
gaaugccucaggaucuaga

SEQ ID NO: 1883588 - RNA, 19 nt, Homo sapiens
  misc_RNA (1)...(19): siRNA sense strand
ggaggaaauaccagcuuca

SEQ ID NO: 1883589 - RNA, 19 nt, Homo sapiens
  misc_RNA (1)...(19): siRNA sense strand
caucagccaggccauugaa

SEQ ID NO: 1883590 - RNA, 19 nt, Homo sapiens
  misc_RNA (1)...(19): siRNA sense strand
gaaggucuagagcuguuag

SEQ ID NO: 1883591 - RNA, 19 nt, Homo sapiens
  misc_RNA (1)...(19): siRNA sense strand
guucaaaugccagcagugu

SEQ ID NO: 1883592 - RNA, 19 nt, Homo sapiens
  misc_RNA (1)...(19): siRNA sense strand
guggaugguccguacugua

SEQ ID NO: 1883593 - RNA, 19 nt, Homo sapiens
  misc_RNA (1)...(19): siRNA sense strand
cacccucaaugaaggucua

SEQ ID NO: 1883594 - RNA, 19 nt, Homo sapiens
  misc_RNA (1)...(19): siRNA sense strand
acugacacuugcccagauu

SEQ ID NO: 1883595 - RNA, 19 nt, Homo sapiens
  misc_RNA (1)...(19): siRNA sense strand
caucagugaccucauggau

SEQ ID NO: 1883596 - RNA, 19 nt, Homo sapiens
  misc_RNA (1)...(19): siRNA sense strand
agugugacauggauaacau

SEQ ID NO: 1883597 - RNA, 19 nt, Homo sapiens
  misc_RNA (1)...(19): siRNA sense strand
gaagcugcaagccaagaca

SEQ ID NO: 1883598 - RNA, 19 nt, Homo sapiens
  misc_RNA (1)...(19): siRNA sense strand
ucagcaggauggaagaacu

SEQ ID NO: 1883599 - RNA, 19 nt, Homo sapiens
  misc_RNA (1)...(19): siRNA sense strand
gcugcaagccaagacagaa

SEQ ID NO: 1883600 - RNA, 19 nt, Homo sapiens
  misc_RNA (1)...(19): siRNA sense strand
gagaauucagccacagaag

SEQ ID NO: 1883601 - RNA, 19 nt, Homo sapiens
  misc_RNA (1)...(19): siRNA sense strand
uggagugugacauggauaa

SEQ ID NO: 1883602 - RNA, 19 nt, Homo sapiens
  misc_RNA (1)...(19): siRNA sense strand
acagaaugccucaggaucu

SEQ ID NO: 1883603 - RNA, 19 nt, Homo sapiens
  misc_RNA (1)...(19): siRNA sense strand
gcaaaggggcaucggagaa

SEQ ID NO: 1883604 - RNA, 19 nt, Homo sapiens
  misc_RNA (1)...(19): siRNA sense strand
gaacagaacuuacaaugga

SEQ ID NO: 1883605 - RNA, 19 nt, Homo sapiens
  misc_RNA (1)...(19): siRNA sense strand
gcacacaguuugcugcuaa

SEQ ID NO: 1883606 - RNA, 19 nt, Homo sapiens
  misc_RNA (1)...(19): siRNA sense strand
gaaaggucaugauaacaaa

SEQ ID NO: 1883607 - RNA, 19 nt, Homo sapiens
  misc_RNA (1)...(19): siRNA sense strand
guaaagcgguaccaaugua

SEQ ID NO: 1883608 - RNA, 19 nt, Homo sapiens
  misc_RNA (1)...(19): siRNA sense strand
gaaucaauguuccagaauu

SEQ ID NO: 1883609 - RNA, 19 nt, Homo sapiens
  misc_RNA (1)...(19): siRNA sense strand
ggaccacuguucuuauuga

SEQ ID NO: 1883610 - RNA, 19 nt, Homo sapiens
  misc_RNA (1)...(19): siRNA sense strand
gaucagaggauacaaauca

SEQ ID NO: 1883611 - RNA, 19 nt, Homo sapiens
  misc_RNA (1)...(19): siRNA sense strand
gauaggaccacuguucuua

SEQ ID NO: 1883612 - RNA, 19 nt, Homo sapiens
  misc_RNA (1)...(19): siRNA sense strand
gcagcaagccaccaccuua

SEQ ID NO: 1883613 - RNA, 19 nt, Homo sapiens
  misc_RNA (1)...(19): siRNA sense strand
gcaaauacuucaccacacu

SEQ ID NO: 1883614 - RNA, 19 nt, Homo sapiens
  misc_RNA (1)...(19): siRNA sense strand
cagcaagcaucuaaaguug

SEQ ID NO: 1883615 - RNA, 19 nt, Homo sapiens
  misc_RNA (1)...(19): siRNA sense strand
ggaaaacguuuaacuguga

SEQ ID NO: 1883616 - RNA, 19 nt, Homo sapiens
  misc_RNA (1)...(19): siRNA sense strand
ccaacucuguccuaacuaa

SEQ ID NO: 1883617 - RNA, 19 nt, Homo sapiens
  misc_RNA (1)...(19): siRNA sense strand
aaaggacacucauacaaug

SEQ ID NO: 1883618 - RNA, 19 nt, Homo sapiens
  misc_RNA (1)...(19): siRNA sense strand
ggauacaaaucacucacuu

SEQ ID NO: 1883619 - RNA, 19 nt, Homo sapiens
  misc_RNA (1)...(19): siRNA sense strand
ccacacccaugccaagaaa

SEQ ID NO: 1883620 - RNA, 19 nt, Homo sapiens
  misc_RNA (1)...(19): siRNA sense strand
gcaagcaucuaaaguugag

SEQ ID NO: 1883621 - RNA, 19 nt, Homo sapiens
  misc_RNA (1)...(19): siRNA sense strand
caaaggacacucauacaau

SEQ ID NO: 1883622 - RNA, 19 nt, Homo sapiens
  misc_RNA (1)...(19): siRNA sense strand
caccagaucagauucauuu

SEQ ID NO: 1883623 - RNA, 19 nt, Homo sapiens
  misc_RNA (1)...(19): siRNA sense strand
gagaacagaacuuacaaug

SEQ ID NO: 1883624 - RNA, 19 nt, Homo sapiens
  misc_RNA (1)...(19): siRNA sense strand
caacaacaucaucuacuuu

SEQ ID NO: 1883625 - RNA, 19 nt, Homo sapiens
  misc_RNA (1)...(19): siRNA sense strand
ggaagcacauucgaacuca

SEQ ID NO: 1883626 - RNA, 19 nt, Homo sapiens
  misc_RNA (1)...(19): siRNA sense strand
gauagaucaugaagcaaug

SEQ ID NO: 1883627 - RNA, 19 nt, Homo sapiens
  misc_RNA (1)...(19): siRNA sense strand
gaaguaaagcgguaccaau

SEQ ID NO: 1883628 - RNA, 19 nt, Homo sapiens
  misc_RNA (1)...(19): siRNA sense strand
cgaaggagaagccauuuga

SEQ ID NO: 1883629 - RNA, 19 nt, Homo sapiens
  misc_RNA (1)...(19): siRNA sense strand
caccagcaaucaucuuuga

SEQ ID NO: 1883630 - RNA, 19 nt, Homo sapiens
  misc_RNA (1)...(19): siRNA sense strand
cacaauggaucagaggaua

SEQ ID NO: 1883631 - RNA, 19 nt, Homo sapiens
  misc_RNA (1)...(19): siRNA sense strand
uaacaaaggacacucauac

SEQ ID NO: 1883632 - RNA, 19 nt, Homo sapiens
  misc_RNA (1)...(19): siRNA sense strand
caucuaaaguugagaaggu

SEQ ID NO: 1883633 - RNA, 19 nt, Homo sapiens
  misc_RNA (1)...(19): siRNA sense strand
uaggaccacuguucuuauu

SEQ ID NO: 1883634 - RNA, 19 nt, Homo sapiens
  misc_RNA (1)...(19): siRNA sense strand
gaaauucagcaucuuuauc

SEQ ID NO: 1883635 - RNA, 19 nt, Homo sapiens
  misc_RNA (1)...(19): siRNA sense strand
ggaaauucagcaucuuuau

SEQ ID NO: 1883636 - RNA, 19 nt, Homo sapiens
  misc_RNA (1)...(19): siRNA sense strand
ggagaagccauuugagugu

SEQ ID NO: 1883637 - RNA, 19 nt, Homo sapiens
  misc_RNA (1)...(19): siRNA sense strand
acaacaacaucaucuacuu

SEQ ID NO: 1883638 - RNA, 19 nt, Homo sapiens
  misc_RNA (1)...(19): siRNA sense strand
ggagaacacuugccuuuuc

SEQ ID NO: 1883639 - RNA, 19 nt, Homo sapiens
  misc_RNA (1)...(19): siRNA sense strand
gcggagaacacuugccuuu

SEQ ID NO: 1883640 - RNA, 19 nt, Homo sapiens
  misc_RNA (1)...(19): siRNA sense strand
ugaaaggucaugauaacaa

SEQ ID NO: 1883641 - RNA, 19 nt, Homo sapiens
  misc_RNA (1)...(19): siRNA sense strand
acaaugcacuuccacaaca

SEQ ID NO: 1883642 - RNA, 19 nt, Homo sapiens
  misc_RNA (1)...(19): siRNA sense strand
gaacccaccagaagacuca

SEQ ID NO: 1883643 - RNA, 19 nt, Homo sapiens
  misc_RNA (1)...(19): siRNA sense strand
ccauggaugugucagaguu

SEQ ID NO: 1883644 - RNA, 19 nt, Homo sapiens
  misc_RNA (1)...(19): siRNA sense strand
gaacaaauucagcaagcau

SEQ ID NO: 1883645 - RNA, 19 nt, Homo sapiens
  misc_RNA (1)...(19): siRNA sense strand
caucuggaacuguuuauga

SEQ ID NO: 1883646 - RNA, 19 nt, Homo sapiens
  misc_RNA (1)...(19): siRNA sense strand
gaucaucaucaaacaagaa

SEQ ID NO: 1883647 - RNA, 19 nt, Homo sapiens
  misc_RNA (1)...(19): siRNA sense strand
guaccaggacuuucuguug

SEQ ID NO: 1883648 - RNA, 19 nt, Homo sapiens
  misc_RNA (1)...(19): siRNA sense strand
ucugaaggcugcagcaaau

SEQ ID NO: 1883649 - RNA, 19 nt, Homo sapiens
  misc_RNA (1)...(19): siRNA sense strand
gccaagaaauauugaaggu

SEQ ID NO: 1883650 - RNA, 19 nt, Homo sapiens
  misc_RNA (1)...(19): siRNA sense strand
acacuugccuuuucuagua

SEQ ID NO: 1883651 - RNA, 19 nt, Homo sapiens
  misc_RNA (1)...(19): siRNA sense strand
gcucagguuuguggauaaa

SEQ ID NO: 1883652 - RNA, 19 nt, Homo sapiens
  misc_RNA (1)...(19): siRNA sense strand
gaacacaguccagacaaca

SEQ ID NO: 1883653 - RNA, 19 nt, Homo sapiens
  misc_RNA (1)...(19): siRNA sense strand
aaacauucagcacucaaua

SEQ ID NO: 1883654 - RNA, 19 nt, Homo sapiens
  misc_RNA (1)...(19): siRNA sense strand
gauacaaaucacucacuuu

SEQ ID NO: 1883655 - RNA, 19 nt, Homo sapiens
  misc_RNA (1)...(19): siRNA sense strand
ucagcaagcaucuaaaguu

SEQ ID NO: 1883656 - RNA, 19 nt, Homo sapiens
  misc_RNA (1)...(19): siRNA sense strand
gaucagauucauuugacaa

SEQ ID NO: 1883657 - RNA, 19 nt, Homo sapiens
  misc_RNA (1)...(19): siRNA sense strand
cagauuggccucaguguuc

SEQ ID NO: 1883658 - RNA, 19 nt, Homo sapiens
  misc_RNA (1)...(19): siRNA sense strand
aaucaauguuccagaauuc

SEQ ID NO: 1883659 - RNA, 19 nt, Homo sapiens
  misc_RNA (1)...(19): siRNA sense strand
agagggcuuucaccugaua

SEQ ID NO: 1883660 - RNA, 19 nt, Homo sapiens
  misc_RNA (1)...(19): siRNA sense strand
acucuguccuaacuaauaa

SEQ ID NO: 1883661 - RNA, 19 nt, Homo sapiens
  misc_RNA (1)...(19): siRNA sense strand
gaucugaggaagcacauuc

SEQ ID NO: 1883662 - RNA, 19 nt, Homo sapiens
  misc_RNA (1)...(19): siRNA sense strand
aagcagagacuccuucaga

SEQ ID NO: 1883663 - RNA, 19 nt, Homo sapiens
  misc_RNA (1)...(19): siRNA sense strand
caugggagaacagaacuua

SEQ ID NO: 1883664 - RNA, 19 nt, Homo sapiens
  misc_RNA (1)...(19): siRNA sense strand
gcacuuccacaacacaaug

SEQ ID NO: 1883665 - RNA, 19 nt, Homo sapiens
  misc_RNA (1)...(19): siRNA sense strand
gcacuuuggaggaugaaga

SEQ ID NO: 1883666 - RNA, 19 nt, Homo sapiens
  misc_RNA (1)...(19): siRNA sense strand
uaccaggacuuucuguugu

SEQ ID NO: 1883667 - RNA, 19 nt, Homo sapiens
  misc_RNA (1)...(19): siRNA sense strand
cagcaaucaucuuugaauc

SEQ ID NO: 1883668 - RNA, 19 nt, Homo sapiens
  misc_RNA (1)...(19): siRNA sense strand
ggaacacaguccagacaac

SEQ ID NO: 1883669 - RNA, 19 nt, Homo sapiens
  misc_RNA (1)...(19): siRNA sense strand
cagcaagccaccaccuuaa

SEQ ID NO: 1883670 - RNA, 19 nt, Homo sapiens
  misc_RNA (1)...(19): siRNA sense strand
ccagaucagauucauuuga

SEQ ID NO: 1883671 - RNA, 19 nt, Homo sapiens
  misc_RNA (1)...(19): siRNA sense strand
acacccaugccaagaaaua

SEQ ID NO: 1883672 - RNA, 19 nt, Homo sapiens
  misc_RNA (1)...(19): siRNA sense strand
gccaggaccucagcacaau

SEQ ID NO: 1883673 - RNA, 19 nt, Homo sapiens
  misc_RNA (1)...(19): siRNA sense strand
acaaaggacacucauacaa

SEQ ID NO: 1883674 - RNA, 19 nt, Homo sapiens
  misc_RNA (1)...(19): siRNA sense strand
gcacaucagaggcuucaca

SEQ ID NO: 1883675 - RNA, 19 nt, Homo sapiens
  misc_RNA (1)...(19): siRNA sense strand
gaggagaguacaccuuugu

SEQ ID NO: 1883676 - RNA, 19 nt, Homo sapiens
  misc_RNA (1)...(19): siRNA sense strand
gcagauuggccucaguguu

SEQ ID NO: 1883677 - RNA, 19 nt, Homo sapiens
  misc_RNA (1)...(19): siRNA sense strand
caggaccucagcacaauuu

SEQ ID NO: 1883678 - RNA, 19 nt, Homo sapiens
  misc_RNA (1)...(19): siRNA sense strand
ccucagacagaaacauuaa

SEQ ID NO: 1883679 - RNA, 19 nt, Homo sapiens
  misc_RNA (1)...(19): siRNA sense strand
aaauucagcaagcaucuaa

SEQ ID NO: 1883680 - RNA, 19 nt, Homo sapiens
  misc_RNA (1)...(19): siRNA sense strand
cuaauaaucccacaauaac

SEQ ID NO: 1883681 - RNA, 19 nt, Homo sapiens
  misc_RNA (1)...(19): siRNA sense strand
cuuacaaccuccagaagug

SEQ ID NO: 1883682 - RNA, 19 nt, Homo sapiens
  misc_RNA (1)...(19): siRNA sense strand
uaauggugaugcagaguca

SEQ ID NO: 1883683 - RNA, 19 nt, Homo sapiens
  misc_RNA (1)...(19): siRNA sense strand
cagaugauacggcaauuca

SEQ ID NO: 1883684 - RNA, 19 nt, Homo sapiens
  misc_RNA (1)...(19): siRNA sense strand
cagaucagauucauuugac

SEQ ID NO: 1883685 - RNA, 19 nt, Homo sapiens
  misc_RNA (1)...(19): siRNA sense strand
gccaccaguucuccacaaa

SEQ ID NO: 1883686 - RNA, 19 nt, Homo sapiens
  misc_RNA (1)...(19): siRNA sense strand
ggugccaacucuguccuaa

SEQ ID NO: 1883687 - RNA, 19 nt, Homo sapiens
  misc_RNA (1)...(19): siRNA sense strand
caggaaauucagcaucuuu

SEQ ID NO: 1883688 - RNA, 19 nt, Homo sapiens
  misc_RNA (1)...(19): siRNA sense strand
cacaggaaauucagcaucu

SEQ ID NO: 1883689 - RNA, 19 nt, Homo sapiens
  misc_RNA (1)...(19): siRNA sense strand
acaacaucaucuacuuuga

SEQ ID NO: 1883690 - RNA, 19 nt, Homo sapiens
  misc_RNA (1)...(19): siRNA sense strand
ggaaacaaaacguaaagaa

SEQ ID NO: 1883691 - RNA, 19 nt, Homo sapiens
  misc_RNA (1)...(19): siRNA sense strand
ugagaaggcauucaacaca

SEQ ID NO: 1883692 - RNA, 19 nt, Homo sapiens
  misc_RNA (1)...(19): siRNA sense strand
gauaaaaugcucagguuug

SEQ ID NO: 1883693 - RNA, 19 nt, Homo sapiens
  misc_RNA (1)...(19): siRNA sense strand
auacggcaauucaggaaga

SEQ ID NO: 1883694 - RNA, 19 nt, Homo sapiens
  misc_RNA (1)...(19): siRNA sense strand
aagcacauucgaacucaua

SEQ ID NO: 1883695 - RNA, 19 nt, Homo sapiens
  misc_RNA (1)...(19): siRNA sense strand
cgaggagaguacaccuuug

SEQ ID NO: 1883696 - RNA, 19 nt, Homo sapiens
  misc_RNA (1)...(19): siRNA sense strand
cuucagacccucagacaga

SEQ ID NO: 1883697 - RNA, 19 nt, Homo sapiens
  misc_RNA (1)...(19): siRNA sense strand
gcgcagacuuucucuucag

SEQ ID NO: 1883698 - RNA, 19 nt, Homo sapiens
  misc_RNA (1)...(19): siRNA sense strand
ggagaacagaacuuacaau

SEQ ID NO: 1883699 - RNA, 19 nt, Homo sapiens
  misc_RNA (1)...(19): siRNA sense strand
ggaacuguuuaugauagga

SEQ ID NO: 1883700 - RNA, 19 nt, Homo sapiens
  misc_RNA (1)...(19): siRNA sense strand
ucucaaaagucacaugaaa

SEQ ID NO: 1883701 - RNA, 19 nt, Homo sapiens
  misc_RNA (1)...(19): siRNA sense strand
guuuaacugugaaucugaa

SEQ ID NO: 1883702 - RNA, 19 nt, Homo sapiens
  misc_RNA (1)...(19): siRNA sense strand
agaagccauuugaguguga

SEQ ID NO: 1883703 - RNA, 19 nt, Homo sapiens
  misc_RNA (1)...(19): siRNA sense strand
acacgaaggagaagccauu

SEQ ID NO: 1883704 - RNA, 19 nt, Homo sapiens
  misc_RNA (1)...(19): siRNA sense strand
gagcuuugcuuuaugauua

SEQ ID NO: 1883705 - RNA, 19 nt, Homo sapiens
  misc_RNA (1)...(19): siRNA sense strand
ccgaggugcuccaauauua

SEQ ID NO: 1883706 - RNA, 19 nt, Homo sapiens
  misc_RNA (1)...(19): siRNA sense strand
ggaaugagauagaugauac

SEQ ID NO: 1883707 - RNA, 19 nt, Homo sapiens
  misc_RNA (1)...(19): siRNA sense strand
gaggagcuuugcuuuauga

SEQ ID NO: 1883708 - RNA, 19 nt, Homo sapiens
  misc_RNA (1)...(19): siRNA sense strand
ugagauagaugauacuugu

SEQ ID NO: 1883709 - RNA, 19 nt, Homo sapiens
  misc_RNA (1)...(19): siRNA sense strand
ggacgaagaauuccaaagu

SEQ ID NO: 1883710 - RNA, 19 nt, Homo sapiens
  misc_RNA (1)...(19): siRNA sense strand
agagaagaaugaagagauu

SEQ ID NO: 1883711 - RNA, 19 nt, Homo sapiens
  misc_RNA (1)...(19): siRNA sense strand
ggucagcaggguucauuua

SEQ ID NO: 1883712 - RNA, 19 nt, Homo sapiens
  misc_RNA (1)...(19): siRNA sense strand
gaugauacuuguucgucuu

SEQ ID NO: 1883713 - RNA, 19 nt, Homo sapiens
  misc_RNA (1)...(19): siRNA sense strand
ggaggagcuuugcuuuaug

SEQ ID NO: 1883714 - RNA, 19 nt, Homo sapiens
  misc_RNA (1)...(19): siRNA sense strand
uggaggagcuuugcuuuau

SEQ ID NO: 1883715 - RNA, 19 nt, Homo sapiens
  misc_RNA (1)...(19): siRNA sense strand
gagagaagaaugaagagau

SEQ ID NO: 1883716 - RNA, 19 nt, Homo sapiens
  misc_RNA (1)...(19): siRNA sense strand
gauuacagccugaacaaca

SEQ ID NO: 1883717 - RNA, 19 nt, Homo sapiens
  misc_RNA (1)...(19): siRNA sense strand
gacgaagaauuccaaaguc

SEQ ID NO: 1883718 - RNA, 19 nt, Homo sapiens
  misc_RNA (1)...(19): siRNA sense strand
cugccgaggugcuccaaua

SEQ ID NO: 1883719 - RNA, 19 nt, Homo sapiens
  misc_RNA (1)...(19): siRNA sense strand
cagcuacaguuguggaaug

SEQ ID NO: 1883720 - RNA, 19 nt, Homo sapiens
  misc_RNA (1)...(19): siRNA sense strand
gcuccaauauuaccucaag

SEQ ID NO: 1883721 - RNA, 19 nt, Homo sapiens
  misc_RNA (1)...(19): siRNA sense strand
cuacaguuguggaaugaga

SEQ ID NO: 1883722 - RNA, 19 nt, Homo sapiens
  misc_RNA (1)...(19): siRNA sense strand
caaauguugugucgucagu

SEQ ID NO: 1883723 - RNA, 19 nt, Homo sapiens
  misc_RNA (1)...(19): siRNA sense strand
caugagagaagaaugaaga

SEQ ID NO: 1883724 - RNA, 19 nt, Homo sapiens
  misc_RNA (1)...(19): siRNA sense strand
caauauuaccucaaggauu

SEQ ID NO: 1883725 - RNA, 19 nt, Homo sapiens
  misc_RNA (1)...(19): siRNA sense strand
cagaguggacgaagaauuc

SEQ ID NO: 1883726 - RNA, 19 nt, Homo sapiens
  misc_RNA (1)...(19): siRNA sense strand
uaccaaagccucaggaaca

SEQ ID NO: 1883727 - RNA, 19 nt, Homo sapiens
  misc_RNA (1)...(19): siRNA sense strand
caaagccucaggaacaaga

SEQ ID NO: 1883728 - RNA, 19 nt, Homo sapiens
  misc_RNA (1)...(19): siRNA sense strand
acacagaaguugggcaagu

SEQ ID NO: 1883729 - RNA, 19 nt, Homo sapiens
  misc_RNA (1)...(19): siRNA sense strand
gaaguugggcaagucaaau

SEQ ID NO: 1883730 - RNA, 19 nt, Homo sapiens
  misc_RNA (1)...(19): siRNA sense strand
aauguugugucgucaguug

SEQ ID NO: 1883731 - RNA, 19 nt, Homo sapiens
  misc_RNA (1)...(19): siRNA sense strand
ggagcuuugcuuuaugauu

SEQ ID NO: 1883732 - RNA, 19 nt, Homo sapiens
  misc_RNA (1)...(19): siRNA sense strand
gauucagaguggacgaaga

SEQ ID NO: 1883733 - RNA, 19 nt, Homo sapiens
  misc_RNA (1)...(19): siRNA sense strand
gcaagucaaagucgaggau

SEQ ID NO: 1883734 - RNA, 19 nt, Homo sapiens
  misc_RNA (1)...(19): siRNA sense strand
gcuuuaugauuaugggaau

SEQ ID NO: 1883735 - RNA, 19 nt, Homo sapiens
  misc_RNA (1)...(19): siRNA sense strand
gucagcaggguucauuuaa

SEQ ID NO: 1883736 - RNA, 19 nt, Homo sapiens
  misc_RNA (1)...(19): siRNA sense strand
gcucguuccucaccugcau

SEQ ID NO: 1883737 - RNA, 19 nt, Homo sapiens
  misc_RNA (1)...(19): siRNA sense strand
caagucaaagucgaggaua

SEQ ID NO: 1883738 - RNA, 19 nt, Homo sapiens
  misc_RNA (1)...(19): siRNA sense strand
uuaugggaaugcuaccaaa

SEQ ID NO: 1883739 - RNA, 19 nt, Homo sapiens
  misc_RNA (1)...(19): siRNA sense strand
ucagaguggacgaagaauu

SEQ ID NO: 1883740 - RNA, 19 nt, Homo sapiens
  misc_RNA (1)...(19): siRNA sense strand
gggcaagucaaauguugug

SEQ ID NO: 1883741 - RNA, 19 nt, Homo sapiens
  misc_RNA (1)...(19): siRNA sense strand
gccgaggugcuccaauauu

SEQ ID NO: 1883742 - RNA, 19 nt, Homo sapiens
  misc_RNA (1)...(19): siRNA sense strand
ucaccugcaugagagaaga

SEQ ID NO: 1883743 - RNA, 19 nt, Homo sapiens
  misc_RNA (1)...(19): siRNA sense strand
cuggaggagcuuugcuuua

SEQ ID NO: 1883744 - RNA, 19 nt, Homo sapiens
  misc_RNA (1)...(19): siRNA sense strand
gucaaagucgaggauauuu

SEQ ID NO: 1883745 - RNA, 19 nt, Homo sapiens
  misc_RNA (1)...(19): siRNA sense strand
agauagaugauacuuguuc

SEQ ID NO: 1883746 - RNA, 19 nt, Homo sapiens
  misc_RNA (1)...(19): siRNA sense strand
aagucaaagucgaggauau

SEQ ID NO: 1883747 - RNA, 19 nt, Homo sapiens
  misc_RNA (1)...(19): siRNA sense strand
cugcaugagagaagaauga

SEQ ID NO: 1883748 - RNA, 19 nt, Homo sapiens
  misc_RNA (1)...(19): siRNA sense strand
gagauagaugauacuuguu

SEQ ID NO: 1883749 - RNA, 19 nt, Homo sapiens
  misc_RNA (1)...(19): siRNA sense strand
uggaaugagauagaugaua

SEQ ID NO: 1883750 - RNA, 19 nt, Homo sapiens
  misc_RNA (1)...(19): siRNA sense strand
agaaguugggcaagucaaa

SEQ ID NO: 1883751 - RNA, 19 nt, Homo sapiens
  misc_RNA (1)...(19): siRNA sense strand
cacagaaguugggcaaguc

SEQ ID NO: 1883752 - RNA, 19 nt, Homo sapiens
  misc_RNA (1)...(19): siRNA sense strand
guuguggaaugagauagau

SEQ ID NO: 1883753 - RNA, 19 nt, Homo sapiens
  misc_RNA (1)...(19): siRNA sense strand
uugggcaagucaaauguug

SEQ ID NO: 1883754 - RNA, 19 nt, Homo sapiens
  misc_RNA (1)...(19): siRNA sense strand
ccaauauuaccucaaggau

SEQ ID NO: 1883755 - RNA, 19 nt, Homo sapiens
  misc_RNA (1)...(19): siRNA sense strand
agucaaagucgaggauauu

SEQ ID NO: 1883756 - RNA, 19 nt, Homo sapiens
  misc_RNA (1)...(19): siRNA sense strand
acaguuguggaaugagaua

SEQ ID NO: 1883757 - RNA, 19 nt, Homo sapiens
  misc_RNA (1)...(19): siRNA sense strand
cugaacaacagcuacaguu

SEQ ID NO: 1883758 - RNA, 19 nt, Homo sapiens
  misc_RNA (1)...(19): siRNA sense strand
accaaagccucaggaacaa

SEQ ID NO: 1883759 - RNA, 19 nt, Homo sapiens
  misc_RNA (1)...(19): siRNA sense strand
gagauucagaguggacgaa

SEQ ID NO: 1883760 - RNA, 19 nt, Homo sapiens
  misc_RNA (1)...(19): siRNA sense strand
gggaggagcugaccaguga

SEQ ID NO: 1883761 - RNA, 19 nt, Homo sapiens
  misc_RNA (1)...(19): siRNA sense strand
agugagagcuccaaagaua

SEQ ID NO: 1883762 - RNA, 19 nt, Homo sapiens
  misc_RNA (1)...(19): siRNA sense strand
gaagugaguuuggugacua

SEQ ID NO: 1883763 - RNA, 19 nt, Homo sapiens
  misc_RNA (1)...(19): siRNA sense strand
aaagauaguucgagauguu

SEQ ID NO: 1883764 - RNA, 19 nt, Homo sapiens
  misc_RNA (1)...(19): siRNA sense strand
gaacgaagccagaggaaac

SEQ ID NO: 1883765 - RNA, 19 nt, Homo sapiens
  misc_RNA (1)...(19): siRNA sense strand
gaccaaagaguuacaucua

SEQ ID NO: 1883766 - RNA, 19 nt, Homo sapiens
  misc_RNA (1)...(19): siRNA sense strand
gcagugagagcuccaaaga

SEQ ID NO: 1883767 - RNA, 19 nt, Homo sapiens
  misc_RNA (1)...(19): siRNA sense strand
gcaagugucuuugaagucu

SEQ ID NO: 1883768 - RNA, 19 nt, Homo sapiens
  misc_RNA (1)...(19): siRNA sense strand
gaaggccuacuuagaguuu

SEQ ID NO: 1883769 - RNA, 19 nt, Homo sapiens
  misc_RNA (1)...(19): siRNA sense strand
ugaguuuggugacuacuuu

SEQ ID NO: 1883770 - RNA, 19 nt, Homo sapiens
  misc_RNA (1)...(19): siRNA sense strand
ugcaagugcugaagaagua

SEQ ID NO: 1883771 - RNA, 19 nt, Homo sapiens
  misc_RNA (1)...(19): siRNA sense strand
ugaagcaagugucuuugaa

SEQ ID NO: 1883772 - RNA, 19 nt, Homo sapiens
  misc_RNA (1)...(19): siRNA sense strand
ugacuugccugcccuggaa

SEQ ID NO: 1883773 - RNA, 19 nt, Homo sapiens
  misc_RNA (1)...(19): siRNA sense strand
gcacauccgaagugaguuu

SEQ ID NO: 1883774 - RNA, 19 nt, Homo sapiens
  misc_RNA (1)...(19): siRNA sense strand
aaaccggaauggucacaaa

SEQ ID NO: 1883775 - RNA, 19 nt, Homo sapiens
  misc_RNA (1)...(19): siRNA sense strand
ccaaagauaguucgagaug

SEQ ID NO: 1883776 - RNA, 19 nt, Homo sapiens
  misc_RNA (1)...(19): siRNA sense strand
aaucucaucucaagguuug

SEQ ID NO: 1883777 - RNA, 19 nt, Homo sapiens
  misc_RNA (1)...(19): siRNA sense strand
ucacgcagcuuuucuuuga

SEQ ID NO: 1883778 - RNA, 19 nt, Homo sapiens
  misc_RNA (1)...(19): siRNA sense strand
gagaccauccugcacauga

SEQ ID NO: 1883779 - RNA, 19 nt, Homo sapiens
  misc_RNA (1)...(19): siRNA sense strand
aggaggagcugcugaagau

SEQ ID NO: 1883780 - RNA, 19 nt, Homo sapiens
  misc_RNA (1)...(19): siRNA sense strand
ugagggagcugucaaucuc

SEQ ID NO: 1883781 - RNA, 19 nt, Homo sapiens
  misc_RNA (1)...(19): siRNA sense strand
ggagggaggcuucaacuac

SEQ ID NO: 1883782 - RNA, 19 nt, Homo sapiens
  misc_RNA (1)...(19): siRNA sense strand
gagaccuccuccaugauga

SEQ ID NO: 1883783 - RNA, 19 nt, Homo sapiens
  misc_RNA (1)...(19): siRNA sense strand
cagaaggccuacuuagagu

SEQ ID NO: 1883784 - RNA, 19 nt, Homo sapiens
  misc_RNA (1)...(19): siRNA sense strand
gcaccgccgugaacuacug

SEQ ID NO: 1883785 - RNA, 19 nt, Homo sapiens
  misc_RNA (1)...(19): siRNA sense strand
ugaagcacuugaaggagaa

SEQ ID NO: 1883786 - RNA, 19 nt, Homo sapiens
  misc_RNA (1)...(19): siRNA sense strand
caacaggcccacccagaau

SEQ ID NO: 1883787 - RNA, 19 nt, Homo sapiens
  misc_RNA (1)...(19): siRNA sense strand
ccagaaggccuacuuagag

SEQ ID NO: 1883788 - RNA, 19 nt, Homo sapiens
  misc_RNA (1)...(19): siRNA sense strand
ugaagcacauccgaaguga

SEQ ID NO: 1883789 - RNA, 19 nt, Homo sapiens
  misc_RNA (1)...(19): siRNA sense strand
ugacuacuuugacaucugu

SEQ ID NO: 1883790 - RNA, 19 nt, Homo sapiens
  misc_RNA (1)...(19): siRNA sense strand
gggagccgauuucaucauc

SEQ ID NO: 1883791 - RNA, 19 nt, Homo sapiens
  misc_RNA (1)...(19): siRNA sense strand
ggacuacuaccucuucuac

SEQ ID NO: 1883792 - RNA, 19 nt, Homo sapiens
  misc_RNA (1)...(19): siRNA sense strand
caaagauaguucgagaugu

SEQ ID NO: 1883793 - RNA, 19 nt, Homo sapiens
  misc_RNA (1)...(19): siRNA sense strand
cauuggagcuucucaacag

SEQ ID NO: 1883794 - RNA, 19 nt, Homo sapiens
  misc_RNA (1)...(19): siRNA sense strand
gacacauucuuccgcuuug

SEQ ID NO: 1883795 - RNA, 19 nt, Homo sapiens
  misc_RNA (1)...(19): siRNA sense strand
ucaaccugguggacaauga

SEQ ID NO: 1883796 - RNA, 19 nt, Homo sapiens
  misc_RNA (1)...(19): siRNA sense strand
cuaagcagcugggccugaa

SEQ ID NO: 1883797 - RNA, 19 nt, Homo sapiens
  misc_RNA (1)...(19): siRNA sense strand
guacauccacgacaacuac

SEQ ID NO: 1883798 - RNA, 19 nt, Homo sapiens
  misc_RNA (1)...(19): siRNA sense strand
gcgccgagaggaagaugua

SEQ ID NO: 1883799 - RNA, 19 nt, Homo sapiens
  misc_RNA (1)...(19): siRNA sense strand
ugacacauucuuccgcuuu

SEQ ID NO: 1883800 - RNA, 19 nt, Homo sapiens
  misc_RNA (1)...(19): siRNA sense strand
ugaagucuuuguucuuuac

SEQ ID NO: 1883801 - RNA, 19 nt, Homo sapiens
  misc_RNA (1)...(19): siRNA sense strand
gcaccaucauccaguacau

SEQ ID NO: 1883802 - RNA, 19 nt, Homo sapiens
  misc_RNA (1)...(19): siRNA sense strand
ugccaggccuccacuucua

SEQ ID NO: 1883803 - RNA, 19 nt, Homo sapiens
  misc_RNA (1)...(19): siRNA sense strand
aagcaagugucuuugaagu

SEQ ID NO: 1883804 - RNA, 19 nt, Homo sapiens
  misc_RNA (1)...(19): siRNA sense strand
gaagcaagugucuuugaag

SEQ ID NO: 1883805 - RNA, 19 nt, Homo sapiens
  misc_RNA (1)...(19): siRNA sense strand
aggcugaccugaagcacuu

SEQ ID NO: 1883806 - RNA, 19 nt, Homo sapiens
  misc_RNA (1)...(19): siRNA sense strand
cgagacagcggaagcacuu

SEQ ID NO: 1883807 - RNA, 19 nt, Homo sapiens
  misc_RNA (1)...(19): siRNA sense strand
cagugaagcaagugucuuu

SEQ ID NO: 1883808 - RNA, 19 nt, Homo sapiens
  misc_RNA (1)...(19): siRNA sense strand
gaggagcugcugaagaugu

SEQ ID NO: 1883809 - RNA, 19 nt, Homo sapiens
  misc_RNA (1)...(19): siRNA sense strand
caguggaccuggugaagca

SEQ ID NO: 1883810 - RNA, 19 nt, Homo sapiens
  misc_RNA (1)...(19): siRNA sense strand
ucaacaggcccacccagaa

SEQ ID NO: 1883811 - RNA, 19 nt, Homo sapiens
  misc_RNA (1)...(19): siRNA sense strand
aguacgagcuccggguuaa

SEQ ID NO: 1883812 - RNA, 19 nt, Homo sapiens
  misc_RNA (1)...(19): siRNA sense strand
ccaaggaggagcugcugaa

SEQ ID NO: 1883813 - RNA, 19 nt, Homo sapiens
  misc_RNA (1)...(19): siRNA sense strand
ccuccagaccaaagaguua

SEQ ID NO: 1883814 - RNA, 19 nt, Homo sapiens
  misc_RNA (1)...(19): siRNA sense strand
ucaaucucaucucaagguu

SEQ ID NO: 1883815 - RNA, 19 nt, Homo sapiens
  misc_RNA (1)...(19): siRNA sense strand
ggaagacacauuggagcuu

SEQ ID NO: 1883816 - RNA, 19 nt, Homo sapiens
  misc_RNA (1)...(19): siRNA sense strand
gugaagcaagugucuuuga

SEQ ID NO: 1883817 - RNA, 19 nt, Homo sapiens
  misc_RNA (1)...(19): siRNA sense strand
ggagccgauuucaucauca

SEQ ID NO: 1883818 - RNA, 19 nt, Homo sapiens
  misc_RNA (1)...(19): siRNA sense strand
acaucuguguggcagguua

SEQ ID NO: 1883819 - RNA, 19 nt, Homo sapiens
  misc_RNA (1)...(19): siRNA sense strand
cagcugggccugaagaaca

SEQ ID NO: 1883820 - RNA, 19 nt, Homo sapiens
  misc_RNA (1)...(19): siRNA sense strand
gaauucuucccuccucgaa

SEQ ID NO: 1883821 - RNA, 19 nt, Homo sapiens
  misc_RNA (1)...(19): siRNA sense strand
ccggaauggucacaaagug

SEQ ID NO: 1883822 - RNA, 19 nt, Homo sapiens
  misc_RNA (1)...(19): siRNA sense strand
gagcugaccagugaagcaa

SEQ ID NO: 1883823 - RNA, 19 nt, Homo sapiens
  misc_RNA (1)...(19): siRNA sense strand
gugaagcacauccgaagug

SEQ ID NO: 1883824 - RNA, 19 nt, Homo sapiens
  misc_RNA (1)...(19): siRNA sense strand
ggugguggaagacacauug

SEQ ID NO: 1883825 - RNA, 19 nt, Homo sapiens
  misc_RNA (1)...(19): siRNA sense strand
ggagaaccaaaccggaaug

SEQ ID NO: 1883826 - RNA, 19 nt, Homo sapiens
  misc_RNA (1)...(19): siRNA sense strand
gcugaccagugaagcaagu

SEQ ID NO: 1883827 - RNA, 19 nt, Homo sapiens
  misc_RNA (1)...(19): siRNA sense strand
cuuugaggcugacacauuc

SEQ ID NO: 1883828 - RNA, 19 nt, Homo sapiens
  misc_RNA (1)...(19): siRNA sense strand
gguucucccuggaauucuu

SEQ ID NO: 1883829 - RNA, 19 nt, Homo sapiens
  misc_RNA (1)...(19): siRNA sense strand
aagugucuuugaagucuuu

SEQ ID NO: 1883830 - RNA, 19 nt, Homo sapiens
  misc_RNA (1)...(19): siRNA sense strand
caagugucuuugaagucuu

SEQ ID NO: 1883831 - RNA, 19 nt, Homo sapiens
  misc_RNA (1)...(19): siRNA sense strand
ucuggcaggugguggaaga

SEQ ID NO: 1883832 - RNA, 19 nt, Homo sapiens
  misc_RNA (1)...(19): siRNA sense strand
uuaauuaccaccuugucaa

SEQ ID NO: 1883833 - RNA, 19 nt, Homo sapiens
  misc_RNA (1)...(19): siRNA sense strand
acucacagcccaacaucaa

SEQ ID NO: 1883834 - RNA, 19 nt, Homo sapiens
  misc_RNA (1)...(19): siRNA sense strand
caacucacagcccaacauc

SEQ ID NO: 1883835 - RNA, 19 nt, Homo sapiens
  misc_RNA (1)...(19): siRNA sense strand
gcuuugaggcugaccugaa

SEQ ID NO: 1883836 - RNA, 19 nt, Homo sapiens
  misc_RNA (1)...(19): siRNA sense strand
caagugguucucccuggaa

SEQ ID NO: 1883837 - RNA, 19 nt, Homo sapiens
  misc_RNA (1)...(19): siRNA sense strand
gcgagauggcuaccacaga

SEQ ID NO: 1883838 - RNA, 19 nt, Homo sapiens
  misc_RNA (1)...(19): siRNA sense strand
guuaauuaccaccuuguca

SEQ ID NO: 1883839 - RNA, 19 nt, Homo sapiens
  misc_RNA (1)...(19): siRNA sense strand
uccaguacauccacgacaa

SEQ ID NO: 1883840 - RNA, 19 nt, Homo sapiens
  misc_RNA (1)...(19): siRNA sense strand
uaauuaccaccuugucaau

SEQ ID NO: 1883841 - RNA, 19 nt, Homo sapiens
  misc_RNA (1)...(19): siRNA sense strand
auuaccaccuugucaaugu

SEQ ID NO: 1883842 - RNA, 19 nt, Homo sapiens
  misc_RNA (1)...(19): siRNA sense strand
acaacuacuuccuggucaa

SEQ ID NO: 1883843 - RNA, 19 nt, Homo sapiens
  misc_RNA (1)...(19): siRNA sense strand
ggccaucugcacaaagcua

SEQ ID NO: 1883844 - RNA, 19 nt, Homo sapiens
  misc_RNA (1)...(19): siRNA sense strand
ucagcuucauguucuggaa

SEQ ID NO: 1883845 - RNA, 19 nt, Homo sapiens
  misc_RNA (1)...(19): siRNA sense strand
cagggcauccucaccauca

SEQ ID NO: 1883846 - RNA, 19 nt, Homo sapiens
  misc_RNA (1)...(19): siRNA sense strand
ugagagcuccaaagauagu

SEQ ID NO: 1883847 - RNA, 19 nt, Homo sapiens
  misc_RNA (1)...(19): siRNA sense strand
gggagaaccaaaccggaau

SEQ ID NO: 1883848 - RNA, 19 nt, Homo sapiens
  misc_RNA (1)...(19): siRNA sense strand
cgaagugaguuuggugacu

SEQ ID NO: 1883849 - RNA, 19 nt, Homo sapiens
  misc_RNA (1)...(19): siRNA sense strand
aagcacauccgaagugagu

SEQ ID NO: 1883850 - RNA, 19 nt, Homo sapiens
  misc_RNA (1)...(19): siRNA sense strand
gugacuacuuugacaucug

SEQ ID NO: 1883851 - RNA, 19 nt, Homo sapiens
  misc_RNA (1)...(19): siRNA sense strand
ccacccagaaugcgagaga

SEQ ID NO: 1883852 - RNA, 19 nt, Homo sapiens
  misc_RNA (1)...(19): siRNA sense strand
gcaggugguggaagacaca

SEQ ID NO: 1883853 - RNA, 19 nt, Homo sapiens
  misc_RNA (1)...(19): siRNA sense strand
ucuuugaggcugacacauu

SEQ ID NO: 1883854 - RNA, 19 nt, Homo sapiens
  misc_RNA (1)...(19): siRNA sense strand
gagccgauuucaucaucac

SEQ ID NO: 1883855 - RNA, 19 nt, Homo sapiens
  misc_RNA (1)...(19): siRNA sense strand
gccaucugcacaaagcuaa

SEQ ID NO: 1883856 - RNA, 19 nt, Homo sapiens
  misc_RNA (1)...(19): siRNA sense strand
ccuuugcccuguggauuga

SEQ ID NO: 1883857 - RNA, 19 nt, Homo sapiens
  misc_RNA (1)...(19): siRNA sense strand
uccagaaggccuacuuaga

SEQ ID NO: 1883858 - RNA, 19 nt, Homo sapiens
  misc_RNA (1)...(19): siRNA sense strand
caaucucaucucaagguuu

SEQ ID NO: 1883859 - RNA, 19 nt, Homo sapiens
  misc_RNA (1)...(19): siRNA sense strand
ggagcugaccagugaagca

SEQ ID NO: 1883860 - RNA, 19 nt, Homo sapiens
  misc_RNA (1)...(19): siRNA sense strand
ggacaacacgcucuuauua

SEQ ID NO: 1883861 - RNA, 19 nt, Homo sapiens
  misc_RNA (1)...(19): siRNA sense strand
gaguggagcucuucucuuu

SEQ ID NO: 1883862 - RNA, 19 nt, Homo sapiens
  misc_RNA (1)...(19): siRNA sense strand
ugaagaagcugaaacaaga

SEQ ID NO: 1883863 - RNA, 19 nt, Homo sapiens
  misc_RNA (1)...(19): siRNA sense strand
gaacagagucacccugaaa

SEQ ID NO: 1883864 - RNA, 19 nt, Homo sapiens
  misc_RNA (1)...(19): siRNA sense strand
gcaaauacagcaucaucua

SEQ ID NO: 1883865 - RNA, 19 nt, Homo sapiens
  misc_RNA (1)...(19): siRNA sense strand
gaaacaagagguuggagaa

SEQ ID NO: 1883866 - RNA, 19 nt, Homo sapiens
  misc_RNA (1)...(19): siRNA sense strand
aagaggagauccgcaaaua

SEQ ID NO: 1883867 - RNA, 19 nt, Homo sapiens
  misc_RNA (1)...(19): siRNA sense strand
gcgccaaccuccuuuccua

SEQ ID NO: 1883868 - RNA, 19 nt, Homo sapiens
  misc_RNA (1)...(19): siRNA sense strand
gaggucacaucccugcuaa

SEQ ID NO: 1883869 - RNA, 19 nt, Homo sapiens
  misc_RNA (1)...(19): siRNA sense strand
ugcuaaagcugaauaagaa

SEQ ID NO: 1883870 - RNA, 19 nt, Homo sapiens
  misc_RNA (1)...(19): siRNA sense strand
ucuuugagauggaugauaa

SEQ ID NO: 1883871 - RNA, 19 nt, Homo sapiens
  misc_RNA (1)...(19): siRNA sense strand
gaggagauccgcaaauaca

SEQ ID NO: 1883872 - RNA, 19 nt, Homo sapiens
  misc_RNA (1)...(19): siRNA sense strand
ggaaagggagcaugagcaa

SEQ ID NO: 1883873 - RNA, 19 nt, Homo sapiens
  misc_RNA (1)...(19): siRNA sense strand
gcaccuacuuguccuccuu

SEQ ID NO: 1883874 - RNA, 19 nt, Homo sapiens
  misc_RNA (1)...(19): siRNA sense strand
gaacuuggagagaagcuau

SEQ ID NO: 1883875 - RNA, 19 nt, Homo sapiens
  misc_RNA (1)...(19): siRNA sense strand
caaccuccuuuccuacuau

SEQ ID NO: 1883876 - RNA, 19 nt, Homo sapiens
  misc_RNA (1)...(19): siRNA sense strand
ucacaucccugcuaaagcu

SEQ ID NO: 1883877 - RNA, 19 nt, Homo sapiens
  misc_RNA (1)...(19): siRNA sense strand
guggagcucuucucuuugu

SEQ ID NO: 1883878 - RNA, 19 nt, Homo sapiens
  misc_RNA (1)...(19): siRNA sense strand
gagucuggauggacauuug

SEQ ID NO: 1883879 - RNA, 19 nt, Homo sapiens
  misc_RNA (1)...(19): siRNA sense strand
gaagaggagauccgcaaau

SEQ ID NO: 1883880 - RNA, 19 nt, Homo sapiens
  misc_RNA (1)...(19): siRNA sense strand
caucaucuauggccguuuc

SEQ ID NO: 1883881 - RNA, 19 nt, Homo sapiens
  misc_RNA (1)...(19): siRNA sense strand
caaauacagcaucaucuau

SEQ ID NO: 1883882 - RNA, 19 nt, Homo sapiens
  misc_RNA (1)...(19): siRNA sense strand
aaagggagcaugagcaaug

SEQ ID NO: 1883883 - RNA, 19 nt, Homo sapiens
  misc_RNA (1)...(19): siRNA sense strand
cgagagagcaccuacuugu

SEQ ID NO: 1883884 - RNA, 19 nt, Homo sapiens
  misc_RNA (1)...(19): siRNA sense strand
ccaaccuccuuuccuacua

SEQ ID NO: 1883885 - RNA, 19 nt, Homo sapiens
  misc_RNA (1)...(19): siRNA sense strand
gcauggugguggaaagugu

SEQ ID NO: 1883886 - RNA, 19 nt, Homo sapiens
  misc_RNA (1)...(19): siRNA sense strand
ggaggucacaucccugcua

SEQ ID NO: 1883887 - RNA, 19 nt, Homo sapiens
  misc_RNA (1)...(19): siRNA sense strand
gagcguugggcacaucuuu

SEQ ID NO: 1883888 - RNA, 19 nt, Homo sapiens
  misc_RNA (1)...(19): siRNA sense strand
ggaagaggagauccgcaaa

SEQ ID NO: 1883889 - RNA, 19 nt, Homo sapiens
  misc_RNA (1)...(19): siRNA sense strand
ugagauggaugauaaugac

SEQ ID NO: 1883890 - RNA, 19 nt, Homo sapiens
  misc_RNA (1)...(19): siRNA sense strand
gggacaacacgcucuuauu

SEQ ID NO: 1883891 - RNA, 19 nt, Homo sapiens
  misc_RNA (1)...(19): siRNA sense strand
ccagggcucuucagucaac

SEQ ID NO: 1883892 - RNA, 19 nt, Homo sapiens
  misc_RNA (1)...(19): siRNA sense strand
gaagcugaaacaagagguu

SEQ ID NO: 1883893 - RNA, 19 nt, Homo sapiens
  misc_RNA (1)...(19): siRNA sense strand
aaauacagcaucaucuaug

SEQ ID NO: 1883894 - RNA, 19 nt, Homo sapiens
  misc_RNA (1)...(19): siRNA sense strand
ggucacaucccugcuaaag

SEQ ID NO: 1883895 - RNA, 19 nt, Homo sapiens
  misc_RNA (1)...(19): siRNA sense strand
gacaacacgcucuuauuac

SEQ ID NO: 1883896 - RNA, 19 nt, Homo sapiens
  misc_RNA (1)...(19): siRNA sense strand
cugcuaaagcugaauaaga

SEQ ID NO: 1883897 - RNA, 19 nt, Homo sapiens
  misc_RNA (1)...(19): siRNA sense strand
aacaagagguuggagaaca

SEQ ID NO: 1883898 - RNA, 19 nt, Homo sapiens
  misc_RNA (1)...(19): siRNA sense strand
gagggacaacacgcucuua

SEQ ID NO: 1883899 - RNA, 19 nt, Homo sapiens
  misc_RNA (1)...(19): siRNA sense strand
ugcacgagcucaccaucaa

SEQ ID NO: 1883900 - RNA, 19 nt, Homo sapiens
  misc_RNA (1)...(19): siRNA sense strand
gcguugggcacaucuuuga

SEQ ID NO: 1883901 - RNA, 19 nt, Homo sapiens
  misc_RNA (1)...(19): siRNA sense strand
gaaaguguggagaggaucu

SEQ ID NO: 1883902 - RNA, 19 nt, Homo sapiens
  misc_RNA (1)...(19): siRNA sense strand
acaacacgcucuuauuacg

SEQ ID NO: 1883903 - RNA, 19 nt, Homo sapiens
  misc_RNA (1)...(19): siRNA sense strand
ggaggaguuucuggagauc

SEQ ID NO: 1883904 - RNA, 19 nt, Homo sapiens
  misc_RNA (1)...(19): siRNA sense strand
uggaaaguguggagaggau

SEQ ID NO: 1883905 - RNA, 19 nt, Homo sapiens
  misc_RNA (1)...(19): siRNA sense strand
auccagggcucuucaguca

SEQ ID NO: 1883906 - RNA, 19 nt, Homo sapiens
  misc_RNA (1)...(19): siRNA sense strand
gcugcccaguucugcauga

SEQ ID NO: 1883907 - RNA, 19 nt, Homo sapiens
  misc_RNA (1)...(19): siRNA sense strand
agaacagagucacccugaa

SEQ ID NO: 1883908 - RNA, 19 nt, Homo sapiens
  misc_RNA (1)...(19): siRNA sense strand
cuacuuguccuccuugaag

SEQ ID NO: 1883909 - RNA, 19 nt, Homo sapiens
  misc_RNA (1)...(19): siRNA sense strand
gaaagggagcaugagcaau

SEQ ID NO: 1883910 - RNA, 19 nt, Homo sapiens
  misc_RNA (1)...(19): siRNA sense strand
gcaggagcagcgugaaagu

SEQ ID NO: 1883911 - RNA, 19 nt, Homo sapiens
  misc_RNA (1)...(19): siRNA sense strand
acaagagguuggagaacag

SEQ ID NO: 1883912 - RNA, 19 nt, Homo sapiens
  misc_RNA (1)...(19): siRNA sense strand
gaagaagcugaaacaagag

SEQ ID NO: 1883913 - RNA, 19 nt, Homo sapiens
  misc_RNA (1)...(19): siRNA sense strand
aauacagcaucaucuaugg

SEQ ID NO: 1883914 - RNA, 19 nt, Homo sapiens
  misc_RNA (1)...(19): siRNA sense strand
ggagaucauggcacuugug

SEQ ID NO: 1883915 - RNA, 19 nt, Homo sapiens
  misc_RNA (1)...(19): siRNA sense strand
gagagagcaccuacuuguc

SEQ ID NO: 1883916 - RNA, 19 nt, Homo sapiens
  misc_RNA (1)...(19): siRNA sense strand
aggaggaguuucuggagau

SEQ ID NO: 1883917 - RNA, 19 nt, Homo sapiens
  misc_RNA (1)...(19): siRNA sense strand
cagaaggcacugagagagu

SEQ ID NO: 1883918 - RNA, 19 nt, Homo sapiens
  misc_RNA (1)...(19): siRNA sense strand
cagcaucccgcucuucaag

SEQ ID NO: 1883919 - RNA, 19 nt, Homo sapiens
  misc_RNA (1)...(19): siRNA sense strand
gaagggcugcuggacagau

SEQ ID NO: 1883920 - RNA, 19 nt, Homo sapiens
  misc_RNA (1)...(19): siRNA sense strand
gcuauggagccgacacauc

SEQ ID NO: 1883921 - RNA, 19 nt, Homo sapiens
  misc_RNA (1)...(19): siRNA sense strand
ccgcaaauacagcaucauc

SEQ ID NO: 1883922 - RNA, 19 nt, Homo sapiens
  misc_RNA (1)...(19): siRNA sense strand
gaaaggagauugagauuga

SEQ ID NO: 1883923 - RNA, 19 nt, Homo sapiens
  misc_RNA (1)...(19): siRNA sense strand
gcaagcagaugaaugauga

SEQ ID NO: 1883924 - RNA, 19 nt, Homo sapiens
  misc_RNA (1)...(19): siRNA sense strand
ugaagacgcugaccggaaa

SEQ ID NO: 1883925 - RNA, 19 nt, Homo sapiens
  misc_RNA (1)...(19): siRNA sense strand
gcagaugaaugaugagaag

SEQ ID NO: 1883926 - RNA, 19 nt, Homo sapiens
  misc_RNA (1)...(19): siRNA sense strand
agauugagauugacauuga

SEQ ID NO: 1883927 - RNA, 19 nt, Homo sapiens
  misc_RNA (1)...(19): siRNA sense strand
ggaaaggagauugagauug

SEQ ID NO: 1883928 - RNA, 19 nt, Homo sapiens
  misc_RNA (1)...(19): siRNA sense strand
ggagauugagauugacauu

SEQ ID NO: 1883929 - RNA, 19 nt, Homo sapiens
  misc_RNA (1)...(19): siRNA sense strand
gauugagauugacauugaa

SEQ ID NO: 1883930 - RNA, 19 nt, Homo sapiens
  misc_RNA (1)...(19): siRNA sense strand
cagacaagguggagcgaau

SEQ ID NO: 1883931 - RNA, 19 nt, Homo sapiens
  misc_RNA (1)...(19): siRNA sense strand
gaugaaugaugagaagaca

SEQ ID NO: 1883932 - RNA, 19 nt, Homo sapiens
  misc_RNA (1)...(19): siRNA sense strand
gagauugacauugaaccua

SEQ ID NO: 1883933 - RNA, 19 nt, Homo sapiens
  misc_RNA (1)...(19): siRNA sense strand
guggcaagcagaugaauga

SEQ ID NO: 1883934 - RNA, 19 nt, Homo sapiens
  misc_RNA (1)...(19): siRNA sense strand
cagcagaggcucaucuaca

SEQ ID NO: 1883935 - RNA, 19 nt, Homo sapiens
  misc_RNA (1)...(19): siRNA sense strand
gagauugagauugacauug

SEQ ID NO: 1883936 - RNA, 19 nt, Homo sapiens
  misc_RNA (1)...(19): siRNA sense strand
gagaggaggagguggucuu

SEQ ID NO: 1883937 - RNA, 19 nt, Homo sapiens
  misc_RNA (1)...(19): siRNA sense strand
cauugaaccuacagacaag

SEQ ID NO: 1883938 - RNA, 19 nt, Homo sapiens
  misc_RNA (1)...(19): siRNA sense strand
caacagcagaggcucaucu

SEQ ID NO: 1883939 - RNA, 19 nt, Homo sapiens
  misc_RNA (1)...(19): siRNA sense strand
cggaaaggagauugagauu

SEQ ID NO: 1883940 - RNA, 19 nt, Homo sapiens
  misc_RNA (1)...(19): siRNA sense strand
acauugaaccuacagacaa

SEQ ID NO: 1883941 - RNA, 19 nt, Homo sapiens
  misc_RNA (1)...(19): siRNA sense strand
gacauugaaccuacagaca

SEQ ID NO: 1883942 - RNA, 19 nt, Homo sapiens
  misc_RNA (1)...(19): siRNA sense strand
gauugacauugaaccuaca

SEQ ID NO: 1883943 - RNA, 19 nt, Homo sapiens
  misc_RNA (1)...(19): siRNA sense strand
caagguggagcgaaucaag

SEQ ID NO: 1883944 - RNA, 19 nt, Homo sapiens
  misc_RNA (1)...(19): siRNA sense strand
gacaagguggagcgaauca

SEQ ID NO: 1883945 - RNA, 19 nt, Homo sapiens
  misc_RNA (1)...(19): siRNA sense strand
agaggaggagguggucuua

SEQ ID NO: 1883946 - RNA, 19 nt, Homo sapiens
  misc_RNA (1)...(19): siRNA sense strand
ggcaagcagaugaaugaug

SEQ ID NO: 1883947 - RNA, 19 nt, Homo sapiens
  misc_RNA (1)...(19): siRNA sense strand
aggaggagguggucuuagg

SEQ ID NO: 1883948 - RNA, 19 nt, Homo sapiens
  misc_RNA (1)...(19): siRNA sense strand
gcagaggcucaucuacagu

SEQ ID NO: 1883949 - RNA, 19 nt, Homo sapiens
  misc_RNA (1)...(19): siRNA sense strand
ggaagaagcugccaaggaa

SEQ ID NO: 1883950 - RNA, 19 nt, Homo sapiens
  misc_RNA (1)...(19): siRNA sense strand
gaagauggcuuuggauauu

SEQ ID NO: 1883951 - RNA, 19 nt, Homo sapiens
  misc_RNA (1)...(19): siRNA sense strand
ggaggcagcugaagaggaa

SEQ ID NO: 1883952 - RNA, 19 nt, Homo sapiens
  misc_RNA (1)...(19): siRNA sense strand
ggaagagucugaagaagca

SEQ ID NO: 1883953 - RNA, 19 nt, Homo sapiens
  misc_RNA (1)...(19): siRNA sense strand
gaaauggcacgauaccuaa

SEQ ID NO: 1883954 - RNA, 19 nt, Homo sapiens
  misc_RNA (1)...(19): siRNA sense strand
gcagaacgcugaggaaugg

SEQ ID NO: 1883955 - RNA, 19 nt, Homo sapiens
  misc_RNA (1)...(19): siRNA sense strand
ggacacgaucaacaaauua

SEQ ID NO: 1883956 - RNA, 19 nt, Homo sapiens
  misc_RNA (1)...(19): siRNA sense strand
gaacaagcagcuaagaaga

SEQ ID NO: 1883957 - RNA, 19 nt, Homo sapiens
  misc_RNA (1)...(19): siRNA sense strand
ugaagaaagugcacgaaga

SEQ ID NO: 1883958 - RNA, 19 nt, Homo sapiens
  misc_RNA (1)...(19): siRNA sense strand
gcaacgaccucaaguccau

SEQ ID NO: 1883959 - RNA, 19 nt, Homo sapiens
  misc_RNA (1)...(19): siRNA sense strand
gaauugaggaccacaaaga

SEQ ID NO: 1883960 - RNA, 19 nt, Homo sapiens
  misc_RNA (1)...(19): siRNA sense strand
agagugaaauggcacgaua

SEQ ID NO: 1883961 - RNA, 19 nt, Homo sapiens
  misc_RNA (1)...(19): siRNA sense strand
caaggaagagucugaagaa

SEQ ID NO: 1883962 - RNA, 19 nt, Homo sapiens
  misc_RNA (1)...(19): siRNA sense strand
gaggagacccgacucaguu

SEQ ID NO: 1883963 - RNA, 19 nt, Homo sapiens
  misc_RNA (1)...(19): siRNA sense strand
ugaaauggcacgauaccua

SEQ ID NO: 1883964 - RNA, 19 nt, Homo sapiens
  misc_RNA (1)...(19): siRNA sense strand
agaaggaggugaaggugaa

SEQ ID NO: 1883965 - RNA, 19 nt, Homo sapiens
  misc_RNA (1)...(19): siRNA sense strand
gcaccgcacgcucagcuua

SEQ ID NO: 1883966 - RNA, 19 nt, Homo sapiens
  misc_RNA (1)...(19): siRNA sense strand
gcugaggaaugguucaaga

SEQ ID NO: 1883967 - RNA, 19 nt, Homo sapiens
  misc_RNA (1)...(19): siRNA sense strand
ggaacaagcagcuaagaag

SEQ ID NO: 1883968 - RNA, 19 nt, Homo sapiens
  misc_RNA (1)...(19): siRNA sense strand
gaagaaagugcacgaagag

SEQ ID NO: 1883969 - RNA, 19 nt, Homo sapiens
  misc_RNA (1)...(19): siRNA sense strand
acaagcagcuaagaagaaa

SEQ ID NO: 1883970 - RNA, 19 nt, Homo sapiens
  misc_RNA (1)...(19): siRNA sense strand
ccaagacccuggaaaucga

SEQ ID NO: 1883971 - RNA, 19 nt, Homo sapiens
  misc_RNA (1)...(19): siRNA sense strand
cagcuaagaagaaagauug

SEQ ID NO: 1883972 - RNA, 19 nt, Homo sapiens
  misc_RNA (1)...(19): siRNA sense strand
gaccagcuccuaucugaug

SEQ ID NO: 1883973 - RNA, 19 nt, Homo sapiens
  misc_RNA (1)...(19): siRNA sense strand
gugaagauggcuuuggaua

SEQ ID NO: 1883974 - RNA, 19 nt, Homo sapiens
  misc_RNA (1)...(19): siRNA sense strand
gcaggacacgaucaacaaa

SEQ ID NO: 1883975 - RNA, 19 nt, Homo sapiens
  misc_RNA (1)...(19): siRNA sense strand
cacgauaccuaaaagaaua

SEQ ID NO: 1883976 - RNA, 19 nt, Homo sapiens
  misc_RNA (1)...(19): siRNA sense strand
caaggaagaggccgaggaa

SEQ ID NO: 1883977 - RNA, 19 nt, Homo sapiens
  misc_RNA (1)...(19): siRNA sense strand
gaucguugaugcccagucu

SEQ ID NO: 1883978 - RNA, 19 nt, Homo sapiens
  misc_RNA (1)...(19): siRNA sense strand
gcagaacaagguccuggaa

SEQ ID NO: 1883979 - RNA, 19 nt, Homo sapiens
  misc_RNA (1)...(19): siRNA sense strand
aggacacgaucaacaaauu

SEQ ID NO: 1883980 - RNA, 19 nt, Homo sapiens
  misc_RNA (1)...(19): siRNA sense strand
ugaaugaagcgcuggagaa

SEQ ID NO: 1883981 - RNA, 19 nt, Homo sapiens
  misc_RNA (1)...(19): siRNA sense strand
gggaggaacaagcagcuaa

SEQ ID NO: 1883982 - RNA, 19 nt, Homo sapiens
  misc_RNA (1)...(19): siRNA sense strand
ggaagaggaggcagcugaa

SEQ ID NO: 1883983 - RNA, 19 nt, Homo sapiens
  misc_RNA (1)...(19): siRNA sense strand
gaaguggaggaaaccauug

SEQ ID NO: 1883984 - RNA, 19 nt, Homo sapiens
  misc_RNA (1)...(19): siRNA sense strand
ccagagcucccaggucuuu

SEQ ID NO: 1883985 - RNA, 19 nt, Homo sapiens
  misc_RNA (1)...(19): siRNA sense strand
ugcaggagcuggaggacaa

SEQ ID NO: 1883986 - RNA, 19 nt, Homo sapiens
  misc_RNA (1)...(19): siRNA sense strand
agaaggagaggaaaccaaa

SEQ ID NO: 1883987 - RNA, 19 nt, Homo sapiens
  misc_RNA (1)...(19): siRNA sense strand
ccaaggaagagucugaaga

SEQ ID NO: 1883988 - RNA, 19 nt, Homo sapiens
  misc_RNA (1)...(19): siRNA sense strand
ggaagaggccgaggaagag

SEQ ID NO: 1883989 - RNA, 19 nt, Homo sapiens
  misc_RNA (1)...(19): siRNA sense strand
cgaaguggaggaaaccauu

SEQ ID NO: 1883990 - RNA, 19 nt, Homo sapiens
  misc_RNA (1)...(19): siRNA sense strand
ggaaaccaaagaagcugaa

SEQ ID NO: 1883991 - RNA, 19 nt, Homo sapiens
  misc_RNA (1)...(19): siRNA sense strand
ugaccaagcccgaccuuuc

SEQ ID NO: 1883992 - RNA, 19 nt, Homo sapiens
  misc_RNA (1)...(19): siRNA sense strand
gcagcuaagaagaaagauu

SEQ ID NO: 1883993 - RNA, 19 nt, Homo sapiens
  misc_RNA (1)...(19): siRNA sense strand
gaaugaagcgcuggagaag

SEQ ID NO: 1883994 - RNA, 19 nt, Homo sapiens
  misc_RNA (1)...(19): siRNA sense strand
ugaagauggcuuuggauau

SEQ ID NO: 1883995 - RNA, 19 nt, Homo sapiens
  misc_RNA (1)...(19): siRNA sense strand
ggcuuuggauauugagauu

SEQ ID NO: 1883996 - RNA, 19 nt, Homo sapiens
  misc_RNA (1)...(19): siRNA sense strand
ggaggagaaggacaaggaa

SEQ ID NO: 1883997 - RNA, 19 nt, Homo sapiens
  misc_RNA (1)...(19): siRNA sense strand
ggagaggaaaccaaagaag

SEQ ID NO: 1883998 - RNA, 19 nt, Homo sapiens
  misc_RNA (1)...(19): siRNA sense strand
augaagcgcuggagaagca

SEQ ID NO: 1883999 - RNA, 19 nt, Homo sapiens
  misc_RNA (1)...(19): siRNA sense strand
agaagaagaaggaggugaa

SEQ ID NO: 1884000 - RNA, 19 nt, Homo sapiens
  misc_RNA (1)...(19): siRNA sense strand
gaccacaaagagugaaaug

SEQ ID NO: 1884001 - RNA, 19 nt, Homo sapiens
  misc_RNA (1)...(19): siRNA sense strand
aagaggagaucgccgaacu

SEQ ID NO: 1884002 - RNA, 19 nt, Homo sapiens
  misc_RNA (1)...(19): siRNA sense strand
aagauggcuuuggauauug

SEQ ID NO: 1884003 - RNA, 19 nt, Homo sapiens
  misc_RNA (1)...(19): siRNA sense strand
gcugauggaacgccgcaaa

SEQ ID NO: 1884004 - RNA, 19 nt, Homo sapiens
  misc_RNA (1)...(19): siRNA sense strand
agauggcuuuggauauuga

SEQ ID NO: 1884005 - RNA, 19 nt, Homo sapiens
  misc_RNA (1)...(19): siRNA sense strand
caccagccauguccaagag

SEQ ID NO: 1884006 - RNA, 19 nt, Homo sapiens
  misc_RNA (1)...(19): siRNA sense strand
gaagaagaaggaggugaag

SEQ ID NO: 1884007 - RNA, 19 nt, Homo sapiens
  misc_RNA (1)...(19): siRNA sense strand
aggaagaggccgaggaaga

SEQ ID NO: 1884008 - RNA, 19 nt, Homo sapiens
  misc_RNA (1)...(19): siRNA sense strand
gcuccuucccguccuacua

SEQ ID NO: 1884009 - RNA, 19 nt, Homo sapiens
  misc_RNA (1)...(19): siRNA sense strand
gaggaacaagcagcuaaga

SEQ ID NO: 1884010 - RNA, 19 nt, Homo sapiens
  misc_RNA (1)...(19): siRNA sense strand
aggugaaggugaagaagga

SEQ ID NO: 1884011 - RNA, 19 nt, Homo sapiens
  misc_RNA (1)...(19): siRNA sense strand
ugaagaagcaaaagaagaa

SEQ ID NO: 1884012 - RNA, 19 nt, Homo sapiens
  misc_RNA (1)...(19): siRNA sense strand
gacacgaucaacaaauuag

SEQ ID NO: 1884013 - RNA, 19 nt, Homo sapiens
  misc_RNA (1)...(19): siRNA sense strand
aagcagcuaagaagaaaga

SEQ ID NO: 1884014 - RNA, 19 nt, Homo sapiens
  misc_RNA (1)...(19): siRNA sense strand
gagacccgacucaguuuca

SEQ ID NO: 1884015 - RNA, 19 nt, Homo sapiens
  misc_RNA (1)...(19): siRNA sense strand
uuacaggaaacucuuggaa

SEQ ID NO: 1884016 - RNA, 19 nt, Homo sapiens
  misc_RNA (1)...(19): siRNA sense strand
aacaagcagcuaagaagaa

SEQ ID NO: 1884017 - RNA, 19 nt, Homo sapiens
  misc_RNA (1)...(19): siRNA sense strand
ggaggaacaagcagcuaag

SEQ ID NO: 1884018 - RNA, 19 nt, Homo sapiens
  misc_RNA (1)...(19): siRNA sense strand
cggaagaugccaccaccaa

SEQ ID NO: 1884019 - RNA, 19 nt, Homo sapiens
  misc_RNA (1)...(19): siRNA sense strand
uuacagaccagcuccuauc

SEQ ID NO: 1884020 - RNA, 19 nt, Homo sapiens
  misc_RNA (1)...(19): siRNA sense strand
accaagaccuccucaacgu

SEQ ID NO: 1884021 - RNA, 19 nt, Homo sapiens
  misc_RNA (1)...(19): siRNA sense strand
aaggagaggaaaccaaaga

SEQ ID NO: 1884022 - RNA, 19 nt, Homo sapiens
  misc_RNA (1)...(19): siRNA sense strand
gaaggagaggaaaccaaag

SEQ ID NO: 1884023 - RNA, 19 nt, Homo sapiens
  misc_RNA (1)...(19): siRNA sense strand
agaagaaggaggugaaggu

SEQ ID NO: 1884024 - RNA, 19 nt, Homo sapiens
  misc_RNA (1)...(19): siRNA sense strand
ggagaaggacaaggaagag

SEQ ID NO: 1884025 - RNA, 19 nt, Homo sapiens
  misc_RNA (1)...(19): siRNA sense strand
cacgaucaacaaauuagaa

SEQ ID NO: 1884026 - RNA, 19 nt, Homo sapiens
  misc_RNA (1)...(19): siRNA sense strand
aagaagcugccaaggaaga

SEQ ID NO: 1884027 - RNA, 19 nt, Homo sapiens
  misc_RNA (1)...(19): siRNA sense strand
cugaggaagccaaggauga

SEQ ID NO: 1884028 - RNA, 19 nt, Homo sapiens
  misc_RNA (1)...(19): siRNA sense strand
gcacgauaccuaaaagaau

SEQ ID NO: 1884029 - RNA, 19 nt, Homo sapiens
  misc_RNA (1)...(19): siRNA sense strand
ggccaagacccuggaaauc

SEQ ID NO: 1884030 - RNA, 19 nt, Homo sapiens
  misc_RNA (1)...(19): siRNA sense strand
caucagcaacgaccucaag

SEQ ID NO: 1884031 - RNA, 19 nt, Homo sapiens
  misc_RNA (1)...(19): siRNA sense strand
gaagaaggagaggaaacca

SEQ ID NO: 1884032 - RNA, 19 nt, Homo sapiens
  misc_RNA (1)...(19): siRNA sense strand
aaaagaagaagaagaagga

SEQ ID NO: 1884033 - RNA, 19 nt, Homo sapiens
  misc_RNA (1)...(19): siRNA sense strand
aggaagaagcugccaagga

SEQ ID NO: 1884034 - RNA, 19 nt, Homo sapiens
  misc_RNA (1)...(19): siRNA sense strand
gaagaggaggcagcugaag

SEQ ID NO: 1884035 - RNA, 19 nt, Homo sapiens
  misc_RNA (1)...(19): siRNA sense strand
ugauggacgaaaucucuuu

SEQ ID NO: 1884036 - RNA, 19 nt, Homo sapiens
  misc_RNA (1)...(19): siRNA sense strand
caccagcgugggaagcaua

SEQ ID NO: 1884037 - RNA, 19 nt, Homo sapiens
  misc_RNA (1)...(19): siRNA sense strand
gccaagacccuggaaaucg

SEQ ID NO: 1884038 - RNA, 19 nt, Homo sapiens
  misc_RNA (1)...(19): siRNA sense strand
aagaggaggcagcugaaga

SEQ ID NO: 1884039 - RNA, 19 nt, Homo sapiens
  misc_RNA (1)...(19): siRNA sense strand
ccgaggaggaggagaagga

SEQ ID NO: 1884040 - RNA, 19 nt, Homo sapiens
  misc_RNA (1)...(19): siRNA sense strand
ccaggucuuuggccgaucu

SEQ ID NO: 1884041 - RNA, 19 nt, Homo sapiens
  misc_RNA (1)...(19): siRNA sense strand
cgaggagacccgacucagu

SEQ ID NO: 1884042 - RNA, 19 nt, Homo sapiens
  misc_RNA (1)...(19): siRNA sense strand
acagcuugauggacgaaau

SEQ ID NO: 1884043 - RNA, 19 nt, Homo sapiens
  misc_RNA (1)...(19): siRNA sense strand
ugaggaccacaaagaguga

SEQ ID NO: 1884044 - RNA, 19 nt, Homo sapiens
  misc_RNA (1)...(19): siRNA sense strand
aaaccaaagaagcugaaga

SEQ ID NO: 1884045 - RNA, 19 nt, Homo sapiens
  misc_RNA (1)...(19): siRNA sense strand
ggagacccgacucaguuuc

SEQ ID NO: 1884046 - RNA, 19 nt, Homo sapiens
  misc_RNA (1)...(19): siRNA sense strand
acgugaagauggcuuugga

SEQ ID NO: 1884047 - RNA, 19 nt, Homo sapiens
  misc_RNA (1)...(19): siRNA sense strand
gcaaccgcaugcacaacuu

SEQ ID NO: 1884048 - RNA, 19 nt, Homo sapiens
  misc_RNA (1)...(19): siRNA sense strand
acaacgcccuguuucauuc

SEQ ID NO: 1884049 - RNA, 19 nt, Homo sapiens
  misc_RNA (1)...(19): siRNA sense strand
ucccaagccugcccaaaga

SEQ ID NO: 1884050 - RNA, 19 nt, Homo sapiens
  misc_RNA (1)...(19): siRNA sense strand
acaccaagcucaccaaaau

SEQ ID NO: 1884051 - RNA, 19 nt, Homo sapiens
  misc_RNA (1)...(19): siRNA sense strand
gcgcuucgccuacaacuac

SEQ ID NO: 1884052 - RNA, 19 nt, Homo sapiens
  misc_RNA (1)...(19): siRNA sense strand
ccacacaacgcccuguuuc

SEQ ID NO: 1884053 - RNA, 19 nt, Homo sapiens
  misc_RNA (1)...(19): siRNA sense strand
cacaacgcccuguuucauu

SEQ ID NO: 1884054 - RNA, 19 nt, Homo sapiens
  misc_RNA (1)...(19): siRNA sense strand
uuucauuccuuaccacuag

SEQ ID NO: 1884055 - RNA, 19 nt, Homo sapiens
  misc_RNA (1)...(19): siRNA sense strand
cagcagcggcagugaccua

SEQ ID NO: 1884056 - RNA, 19 nt, Homo sapiens
  misc_RNA (1)...(19): siRNA sense strand
cgcccuguuucauuccuua

SEQ ID NO: 1884057 - RNA, 19 nt, Homo sapiens
  misc_RNA (1)...(19): siRNA sense strand
cgacaccaagcucaccaaa

SEQ ID NO: 1884058 - RNA, 19 nt, Homo sapiens
  misc_RNA (1)...(19): siRNA sense strand
caaccgcaugcacaacuug

SEQ ID NO: 1884059 - RNA, 19 nt, Homo sapiens
  misc_RNA (1)...(19): siRNA sense strand
caaagacuugcuccacaca

SEQ ID NO: 1884060 - RNA, 19 nt, Homo sapiens
  misc_RNA (1)...(19): siRNA sense strand
acacaacgcccuguuucau

SEQ ID NO: 1884061 - RNA, 19 nt, Homo sapiens
  misc_RNA (1)...(19): siRNA sense strand
ggagaagacuuucgaacaa

SEQ ID NO: 1884062 - RNA, 19 nt, Homo sapiens
  misc_RNA (1)...(19): siRNA sense strand
ucacgcagcuguugaagaa

SEQ ID NO: 1884063 - RNA, 19 nt, Homo sapiens
  misc_RNA (1)...(19): siRNA sense strand
gaagcacgcugccgagaug

SEQ ID NO: 1884064 - RNA, 19 nt, Homo sapiens
  misc_RNA (1)...(19): siRNA sense strand
gagaagacuuucgaacaaa

SEQ ID NO: 1884065 - RNA, 19 nt, Homo sapiens
  misc_RNA (1)...(19): siRNA sense strand
ccacacggcaucaacaaua

SEQ ID NO: 1884066 - RNA, 19 nt, Homo sapiens
  misc_RNA (1)...(19): siRNA sense strand
ggacaaagacgggaagaga

SEQ ID NO: 1884067 - RNA, 19 nt, Homo sapiens
  misc_RNA (1)...(19): siRNA sense strand
ggacgacgacuacaauaag

SEQ ID NO: 1884068 - RNA, 19 nt, Homo sapiens
  misc_RNA (1)...(19): siRNA sense strand
ggaagaggacgacgacuac

SEQ ID NO: 1884069 - RNA, 19 nt, Homo sapiens
  misc_RNA (1)...(19): siRNA sense strand
gcuguacccugccgcguau

SEQ ID NO: 1884070 - RNA, 19 nt, Homo sapiens
  misc_RNA (1)...(19): siRNA sense strand
acaaagacgggaagagaaa

SEQ ID NO: 1884071 - RNA, 19 nt, Homo sapiens
  misc_RNA (1)...(19): siRNA sense strand
gacaaagacgggaagagaa

SEQ ID NO: 1884072 - RNA, 19 nt, Homo sapiens
  misc_RNA (1)...(19): siRNA sense strand
gaggacgacgacuacaaua

SEQ ID NO: 1884073 - RNA, 19 nt, Homo sapiens
  misc_RNA (1)...(19): siRNA sense strand
cacacggcaucaacaauau

SEQ ID NO: 1884074 - RNA, 19 nt, Homo sapiens
  misc_RNA (1)...(19): siRNA sense strand
ggacugccacgcuuuagca

SEQ ID NO: 1884075 - RNA, 19 nt, Homo sapiens
  misc_RNA (1)...(19): siRNA sense strand
ccucaucaaggauccauuu

SEQ ID NO: 1884076 - RNA, 19 nt, Homo sapiens
  misc_RNA (1)...(19): siRNA sense strand
caucaaggauccauuuugu

SEQ ID NO: 1884077 - RNA, 19 nt, Homo sapiens
  misc_RNA (1)...(19): siRNA sense strand
gggcucguuuggccuauuc

SEQ ID NO: 1884078 - RNA, 19 nt, Homo sapiens
  misc_RNA (1)...(19): siRNA sense strand
gcacagcauggccgagaug

SEQ ID NO: 1884079 - RNA, 19 nt, Homo sapiens
  misc_RNA (1)...(19): siRNA sense strand
gaaaaucacgcagcuguug

SEQ ID NO: 1884080 - RNA, 19 nt, Homo sapiens
  misc_RNA (1)...(19): siRNA sense strand
ggagacagagcgccucaag

SEQ ID NO: 1884081 - RNA, 19 nt, Homo sapiens
  misc_RNA (1)...(19): siRNA sense strand
ggaccaaguggaggaagaa

SEQ ID NO: 1884082 - RNA, 19 nt, Homo sapiens
  misc_RNA (1)...(19): siRNA sense strand
gaagacuuucgaacaaaca

SEQ ID NO: 1884083 - RNA, 19 nt, Homo sapiens
  misc_RNA (1)...(19): siRNA sense strand
ccaaguggaggaagaagca

SEQ ID NO: 1884084 - RNA, 19 nt, Homo sapiens
  misc_RNA (1)...(19): siRNA sense strand
uggagaagacuuucgaaca

SEQ ID NO: 1884085 - RNA, 19 nt, Homo sapiens
  misc_RNA (1)...(19): siRNA sense strand
cagcauggccgagaugaag

SEQ ID NO: 1884086 - RNA, 19 nt, Homo sapiens
  misc_RNA (1)...(19): siRNA sense strand
gacgacgacuacaauaagc

SEQ ID NO: 1884087 - RNA, 19 nt, Homo sapiens
  misc_RNA (1)...(19): siRNA sense strand
aggaagaggacgacgacua

SEQ ID NO: 1884088 - RNA, 19 nt, Homo sapiens
  misc_RNA (1)...(19): siRNA sense strand
ucaaggauccauuuuguug

SEQ ID NO: 1884089 - RNA, 19 nt, Homo sapiens
  misc_RNA (1)...(19): siRNA sense strand
gccggacugccacgcuuua

SEQ ID NO: 1884090 - RNA, 19 nt, Homo sapiens
  misc_RNA (1)...(19): siRNA sense strand
gacagagagucaggucaag

SEQ ID NO: 1884091 - RNA, 19 nt, Homo sapiens
  misc_RNA (1)...(19): siRNA sense strand
aaacacacgagacccacuu

SEQ ID NO: 1884092 - RNA, 19 nt, Homo sapiens
  misc_RNA (1)...(19): siRNA sense strand
agaagacuuucgaacaaac

SEQ ID NO: 1884093 - RNA, 19 nt, Homo sapiens
  misc_RNA (1)...(19): siRNA sense strand
gaagcaggacucggagaca

SEQ ID NO: 1884094 - RNA, 19 nt, Homo sapiens
  misc_RNA (1)...(19): siRNA sense strand
cggaccaaguggaggaaga

SEQ ID NO: 1884095 - RNA, 19 nt, Homo sapiens
  misc_RNA (1)...(19): siRNA sense strand
gaagaggacgacgacuaca

SEQ ID NO: 1884096 - RNA, 19 nt, Homo sapiens
  misc_RNA (1)...(19): siRNA sense strand
agaggacgacgacuacaau

SEQ ID NO: 1884097 - RNA, 19 nt, Homo sapiens
  misc_RNA (1)...(19): siRNA sense strand
aggacgacgacuacaauaa

SEQ ID NO: 1884098 - RNA, 19 nt, Homo sapiens
  misc_RNA (1)...(19): siRNA sense strand
gaacacgucucuagaaaua

SEQ ID NO: 1884099 - RNA, 19 nt, Homo sapiens
  misc_RNA (1)...(19): siRNA sense strand
gcgaagagcugaccaaaua

SEQ ID NO: 1884100 - RNA, 19 nt, Homo sapiens
  misc_RNA (1)...(19): siRNA sense strand
gcagaaauguugaaaguca

SEQ ID NO: 1884101 - RNA, 19 nt, Homo sapiens
  misc_RNA (1)...(19): siRNA sense strand
uaacagagauuugccuaaa

SEQ ID NO: 1884102 - RNA, 19 nt, Homo sapiens
  misc_RNA (1)...(19): siRNA sense strand
gagcaacacuggcauaaca

SEQ ID NO: 1884103 - RNA, 19 nt, Homo sapiens
  misc_RNA (1)...(19): siRNA sense strand
gaaauaaucccaucagagu

SEQ ID NO: 1884104 - RNA, 19 nt, Homo sapiens
  misc_RNA (1)...(19): siRNA sense strand
gcagagaguuuggcagaaa

SEQ ID NO: 1884105 - RNA, 19 nt, Homo sapiens
  misc_RNA (1)...(19): siRNA sense strand
gcaaaggccucacgcaucu

SEQ ID NO: 1884106 - RNA, 19 nt, Homo sapiens
  misc_RNA (1)...(19): siRNA sense strand
gaagaugagaagcggauua

SEQ ID NO: 1884107 - RNA, 19 nt, Homo sapiens
  misc_RNA (1)...(19): siRNA sense strand
gaaagucaaccagacguua

SEQ ID NO: 1884108 - RNA, 19 nt, Homo sapiens
  misc_RNA (1)...(19): siRNA sense strand
agaaucagaucacagcuaa

SEQ ID NO: 1884109 - RNA, 19 nt, Homo sapiens
  misc_RNA (1)...(19): siRNA sense strand
acaacaaucucaacgacua

SEQ ID NO: 1884110 - RNA, 19 nt, Homo sapiens
  misc_RNA (1)...(19): siRNA sense strand
cagaacacgucucuagaaa

SEQ ID NO: 1884111 - RNA, 19 nt, Homo sapiens
  misc_RNA (1)...(19): siRNA sense strand
gcgaggagguguccgaguu

SEQ ID NO: 1884112 - RNA, 19 nt, Homo sapiens
  misc_RNA (1)...(19): siRNA sense strand
ucacugagguccaucugaa

SEQ ID NO: 1884113 - RNA, 19 nt, Homo sapiens
  misc_RNA (1)...(19): siRNA sense strand
gcagaacacgucucuagaa

SEQ ID NO: 1884114 - RNA, 19 nt, Homo sapiens
  misc_RNA (1)...(19): siRNA sense strand
acaacuugcugaagaauga

SEQ ID NO: 1884115 - RNA, 19 nt, Homo sapiens
  misc_RNA (1)...(19): siRNA sense strand
agaagcggauuaucuguuu

SEQ ID NO: 1884116 - RNA, 19 nt, Homo sapiens
  misc_RNA (1)...(19): siRNA sense strand
aaaaugaacucaacgauga

SEQ ID NO: 1884117 - RNA, 19 nt, Homo sapiens
  misc_RNA (1)...(19): siRNA sense strand
caaauucuucuuccacuuu

SEQ ID NO: 1884118 - RNA, 19 nt, Homo sapiens
  misc_RNA (1)...(19): siRNA sense strand
acagugagauggaaauaau

SEQ ID NO: 1884119 - RNA, 19 nt, Homo sapiens
  misc_RNA (1)...(19): siRNA sense strand
guggacaacuugcugaaga

SEQ ID NO: 1884120 - RNA, 19 nt, Homo sapiens
  misc_RNA (1)...(19): siRNA sense strand
ccaccggcauccucaauga

SEQ ID NO: 1884121 - RNA, 19 nt, Homo sapiens
  misc_RNA (1)...(19): siRNA sense strand
gcaaguccaugcugcuaca

SEQ ID NO: 1884122 - RNA, 19 nt, Homo sapiens
  misc_RNA (1)...(19): siRNA sense strand
caaagucuaugaagaugag

SEQ ID NO: 1884123 - RNA, 19 nt, Homo sapiens
  misc_RNA (1)...(19): siRNA sense strand
gaacagcaaaucaaucucu

SEQ ID NO: 1884124 - RNA, 19 nt, Homo sapiens
  misc_RNA (1)...(19): siRNA sense strand
gagcagggccacagugaga

SEQ ID NO: 1884125 - RNA, 19 nt, Homo sapiens
  misc_RNA (1)...(19): siRNA sense strand
guccaaagccaaacagaaa

SEQ ID NO: 1884126 - RNA, 19 nt, Homo sapiens
  misc_RNA (1)...(19): siRNA sense strand
uggcagaaauguugaaagu

SEQ ID NO: 1884127 - RNA, 19 nt, Homo sapiens
  misc_RNA (1)...(19): siRNA sense strand
ugaccuauuuggguuuaua

SEQ ID NO: 1884128 - RNA, 19 nt, Homo sapiens
  misc_RNA (1)...(19): siRNA sense strand
gaagaacagcaaaucaauc

SEQ ID NO: 1884129 - RNA, 19 nt, Homo sapiens
  misc_RNA (1)...(19): siRNA sense strand
gaugagaagcggauuaucu

SEQ ID NO: 1884130 - RNA, 19 nt, Homo sapiens
  misc_RNA (1)...(19): siRNA sense strand
ggccgaagaugcggagauu

SEQ ID NO: 1884131 - RNA, 19 nt, Homo sapiens
  misc_RNA (1)...(19): siRNA sense strand
aaccagacguuaaagcauu

SEQ ID NO: 1884132 - RNA, 19 nt, Homo sapiens
  misc_RNA (1)...(19): siRNA sense strand
cuaaauggaaaccugauaa

SEQ ID NO: 1884133 - RNA, 19 nt, Homo sapiens
  misc_RNA (1)...(19): siRNA sense strand
gaccagcaguccuaugagu

SEQ ID NO: 1884134 - RNA, 19 nt, Homo sapiens
  misc_RNA (1)...(19): siRNA sense strand
gagaagcggauuaucuguu

SEQ ID NO: 1884135 - RNA, 19 nt, Homo sapiens
  misc_RNA (1)...(19): siRNA sense strand
gggaacuucuggucacuca

SEQ ID NO: 1884136 - RNA, 19 nt, Homo sapiens
  misc_RNA (1)...(19): siRNA sense strand
gaaaagcaaucgggaacuu

SEQ ID NO: 1884137 - RNA, 19 nt, Homo sapiens
  misc_RNA (1)...(19): siRNA sense strand
gaguuuggcagaaauguug

SEQ ID NO: 1884138 - RNA, 19 nt, Homo sapiens
  misc_RNA (1)...(19): siRNA sense strand
gaagagcugaccaaauaca

SEQ ID NO: 1884139 - RNA, 19 nt, Homo sapiens
  misc_RNA (1)...(19): siRNA sense strand
uaaaggugcuaagcgaaga

SEQ ID NO: 1884140 - RNA, 19 nt, Homo sapiens
  misc_RNA (1)...(19): siRNA sense strand
ggccuuggcugcuggagau

SEQ ID NO: 1884141 - RNA, 19 nt, Homo sapiens
  misc_RNA (1)...(19): siRNA sense strand
gaacuucuggucacucaca

SEQ ID NO: 1884142 - RNA, 19 nt, Homo sapiens
  misc_RNA (1)...(19): siRNA sense strand
gcguaaaccagaucacuga

SEQ ID NO: 1884143 - RNA, 19 nt, Homo sapiens
  misc_RNA (1)...(19): siRNA sense strand
gcacgaugacccugacaga

SEQ ID NO: 1884144 - RNA, 19 nt, Homo sapiens
  misc_RNA (1)...(19): siRNA sense strand
uggaggagaucuacaugga

SEQ ID NO: 1884145 - RNA, 19 nt, Homo sapiens
  misc_RNA (1)...(19): siRNA sense strand
cgaugacccugacagaugu

SEQ ID NO: 1884146 - RNA, 19 nt, Homo sapiens
  misc_RNA (1)...(19): siRNA sense strand
ccagcaguccuaugaguuu

SEQ ID NO: 1884147 - RNA, 19 nt, Homo sapiens
  misc_RNA (1)...(19): siRNA sense strand
gugaagaacagcaaaucaa

SEQ ID NO: 1884148 - RNA, 19 nt, Homo sapiens
  misc_RNA (1)...(19): siRNA sense strand
ccagcuggcagaugcguua

SEQ ID NO: 1884149 - RNA, 19 nt, Homo sapiens
  misc_RNA (1)...(19): siRNA sense strand
caaaucaaucucugagguu

SEQ ID NO: 1884150 - RNA, 19 nt, Homo sapiens
  misc_RNA (1)...(19): siRNA sense strand
cggcagcccugaggagaaa

SEQ ID NO: 1884151 - RNA, 19 nt, Homo sapiens
  misc_RNA (1)...(19): siRNA sense strand
gccaaagucuaugaagaug

SEQ ID NO: 1884152 - RNA, 19 nt, Homo sapiens
  misc_RNA (1)...(19): siRNA sense strand
ggccaaagucuaugaagau

SEQ ID NO: 1884153 - RNA, 19 nt, Homo sapiens
  misc_RNA (1)...(19): siRNA sense strand
cagcagaacacgucucuag

SEQ ID NO: 1884154 - RNA, 19 nt, Homo sapiens
  misc_RNA (1)...(19): siRNA sense strand
ccaacggcaucuccacaga

SEQ ID NO: 1884155 - RNA, 19 nt, Homo sapiens
  misc_RNA (1)...(19): siRNA sense strand
gcaaagucguggucaacac

SEQ ID NO: 1884156 - RNA, 19 nt, Homo sapiens
  misc_RNA (1)...(19): siRNA sense strand
cagaggaggccaaagucua

SEQ ID NO: 1884157 - RNA, 19 nt, Homo sapiens
  misc_RNA (1)...(19): siRNA sense strand
aaaggccucacgcaucuua

SEQ ID NO: 1884158 - RNA, 19 nt, Homo sapiens
  misc_RNA (1)...(19): siRNA sense strand
guucucagacucagcguaa

SEQ ID NO: 1884159 - RNA, 19 nt, Homo sapiens
  misc_RNA (1)...(19): siRNA sense strand
caagaacaaggaucacuuc

SEQ ID NO: 1884160 - RNA, 19 nt, Homo sapiens
  misc_RNA (1)...(19): siRNA sense strand
acaaggaucacuuccaguu

SEQ ID NO: 1884161 - RNA, 19 nt, Homo sapiens
  misc_RNA (1)...(19): siRNA sense strand
acaaccagaucaccgaugu

SEQ ID NO: 1884162 - RNA, 19 nt, Homo sapiens
  misc_RNA (1)...(19): siRNA sense strand
gaagaugcggagauugugu

SEQ ID NO: 1884163 - RNA, 19 nt, Homo sapiens
  misc_RNA (1)...(19): siRNA sense strand
aaggaucacuuccaguuca

SEQ ID NO: 1884164 - RNA, 19 nt, Homo sapiens
  misc_RNA (1)...(19): siRNA sense strand
ucaaauucuucuuccacuu

SEQ ID NO: 1884165 - RNA, 19 nt, Homo sapiens
  misc_RNA (1)...(19): siRNA sense strand
gaagcggauuaucuguuuc

SEQ ID NO: 1884166 - RNA, 19 nt, Homo sapiens
  misc_RNA (1)...(19): siRNA sense strand
aaagucaaccagacguuaa

SEQ ID NO: 1884167 - RNA, 19 nt, Homo sapiens
  misc_RNA (1)...(19): siRNA sense strand
ugaagaacagcaaaucaau

SEQ ID NO: 1884168 - RNA, 19 nt, Homo sapiens
  misc_RNA (1)...(19): siRNA sense strand
cugguuggcuucagcaaug

SEQ ID NO: 1884169 - RNA, 19 nt, Homo sapiens
  misc_RNA (1)...(19): siRNA sense strand
ccacagugagauggaaaua

SEQ ID NO: 1884170 - RNA, 19 nt, Homo sapiens
  misc_RNA (1)...(19): siRNA sense strand
cagagaguuuggcagaaau

SEQ ID NO: 1884171 - RNA, 19 nt, Homo sapiens
  misc_RNA (1)...(19): siRNA sense strand
ggagguguccgaguucuuc

SEQ ID NO: 1884172 - RNA, 19 nt, Homo sapiens
  misc_RNA (1)...(19): siRNA sense strand
gcaacacuggcauaacaga

SEQ ID NO: 1884173 - RNA, 19 nt, Homo sapiens
  misc_RNA (1)...(19): siRNA sense strand
gcaaucaaguuggggauga

SEQ ID NO: 1884174 - RNA, 19 nt, Homo sapiens
  misc_RNA (1)...(19): siRNA sense strand
caaaauaacaagugaagga

SEQ ID NO: 1884175 - RNA, 19 nt, Homo sapiens
  misc_RNA (1)...(19): siRNA sense strand
gugaccagcaguccuauga

SEQ ID NO: 1884176 - RNA, 19 nt, Homo sapiens
  misc_RNA (1)...(19): siRNA sense strand
ccgccucacuguucucaga

SEQ ID NO: 1884177 - RNA, 19 nt, Homo sapiens
  misc_RNA (1)...(19): siRNA sense strand
auuuauggcuuauccagaa

SEQ ID NO: 1884178 - RNA, 19 nt, Homo sapiens
  misc_RNA (1)...(19): siRNA sense strand
uggaaauaaucccaucaga

SEQ ID NO: 1884179 - RNA, 19 nt, Homo sapiens
  misc_RNA (1)...(19): siRNA sense strand
caacggcaucuccacagaa

SEQ ID NO: 1884180 - RNA, 19 nt, Homo sapiens
  misc_RNA (1)...(19): siRNA sense strand
cagaaucagaucacagcua

SEQ ID NO: 1884181 - RNA, 19 nt, Homo sapiens
  misc_RNA (1)...(19): siRNA sense strand
guucagcugcuucaaggaa

SEQ ID NO: 1884182 - RNA, 19 nt, Homo sapiens
  misc_RNA (1)...(19): siRNA sense strand
caagugaaggagggaagua

SEQ ID NO: 1884183 - RNA, 19 nt, Homo sapiens
  misc_RNA (1)...(19): siRNA sense strand
uggacaacuugcugaagaa

SEQ ID NO: 1884184 - RNA, 19 nt, Homo sapiens
  misc_RNA (1)...(19): siRNA sense strand
ucacucacauccgcaauac

SEQ ID NO: 1884185 - RNA, 19 nt, Homo sapiens
  misc_RNA (1)...(19): siRNA sense strand
ucaagaacaaggaucacuu

SEQ ID NO: 1884186 - RNA, 19 nt, Homo sapiens
  misc_RNA (1)...(19): siRNA sense strand
ccgaagaugcggagauugu

SEQ ID NO: 1884187 - RNA, 19 nt, Homo sapiens
  misc_RNA (1)...(19): siRNA sense strand
cagaugcguuacagagcaa

SEQ ID NO: 1884188 - RNA, 19 nt, Homo sapiens
  misc_RNA (1)...(19): siRNA sense strand
acacgucucuagaaauacu

SEQ ID NO: 1884189 - RNA, 19 nt, Homo sapiens
  misc_RNA (1)...(19): siRNA sense strand
ccagguacgucaccaaaau

SEQ ID NO: 1884190 - RNA, 19 nt, Homo sapiens
  misc_RNA (1)...(19): siRNA sense strand
ugugaccuauuuggguuua

SEQ ID NO: 1884191 - RNA, 19 nt, Homo sapiens
  misc_RNA (1)...(19): siRNA sense strand
cacuuucgcugccgcaugu

SEQ ID NO: 1884192 - RNA, 19 nt, Homo sapiens
  misc_RNA (1)...(19): siRNA sense strand
ccaaagucuaugaagauga

SEQ ID NO: 1884193 - RNA, 19 nt, Homo sapiens
  misc_RNA (1)...(19): siRNA sense strand
aggccaaagucuaugaaga

SEQ ID NO: 1884194 - RNA, 19 nt, Homo sapiens
  misc_RNA (1)...(19): siRNA sense strand
agaggaggccaaagucuau

SEQ ID NO: 1884195 - RNA, 19 nt, Homo sapiens
  misc_RNA (1)...(19): siRNA sense strand
cagagcaacacuggcauaa

SEQ ID NO: 1884196 - RNA, 19 nt, Homo sapiens
  misc_RNA (1)...(19): siRNA sense strand
ccucacgcaucuuaaacug

SEQ ID NO: 1884197 - RNA, 19 nt, Homo sapiens
  misc_RNA (1)...(19): siRNA sense strand
ccuaaauggaaaccugaua

SEQ ID NO: 1884198 - RNA, 19 nt, Homo sapiens
  misc_RNA (1)...(19): siRNA sense strand
agaaggaucuggccauuua

SEQ ID NO: 1884199 - RNA, 19 nt, Homo sapiens
  misc_RNA (1)...(19): siRNA sense strand
gcaacgaucaccuaaauua

SEQ ID NO: 1884200 - RNA, 19 nt, Homo sapiens
  misc_RNA (1)...(19): siRNA sense strand
agacagaacucgucagauu

SEQ ID NO: 1884201 - RNA, 19 nt, Homo sapiens
  misc_RNA (1)...(19): siRNA sense strand
ggaagacucugaagaagau

SEQ ID NO: 1884202 - RNA, 19 nt, Homo sapiens
  misc_RNA (1)...(19): siRNA sense strand
gcauacccaugaaauuuaa

SEQ ID NO: 1884203 - RNA, 19 nt, Homo sapiens
  misc_RNA (1)...(19): siRNA sense strand
ggaggaagacucugaagaa

SEQ ID NO: 1884204 - RNA, 19 nt, Homo sapiens
  misc_RNA (1)...(19): siRNA sense strand
gacaggaaauucugaaaca

SEQ ID NO: 1884205 - RNA, 19 nt, Homo sapiens
  misc_RNA (1)...(19): siRNA sense strand
gaaagcugccuuccagaaa

SEQ ID NO: 1884206 - RNA, 19 nt, Homo sapiens
  misc_RNA (1)...(19): siRNA sense strand
gcagaagggugccgagaca

SEQ ID NO: 1884207 - RNA, 19 nt, Homo sapiens
  misc_RNA (1)...(19): siRNA sense strand
gguagacuaugcucugaaa

SEQ ID NO: 1884208 - RNA, 19 nt, Homo sapiens
  misc_RNA (1)...(19): siRNA sense strand
gaggaugccuucucuacug

SEQ ID NO: 1884209 - RNA, 19 nt, Homo sapiens
  misc_RNA (1)...(19): siRNA sense strand
ggagucaccaacaccauua

SEQ ID NO: 1884210 - RNA, 19 nt, Homo sapiens
  misc_RNA (1)...(19): siRNA sense strand
caagaaggaucuggccauu

SEQ ID NO: 1884211 - RNA, 19 nt, Homo sapiens
  misc_RNA (1)...(19): siRNA sense strand
ugucugagcugguggaguu

SEQ ID NO: 1884212 - RNA, 19 nt, Homo sapiens
  misc_RNA (1)...(19): siRNA sense strand
aagcaacgaucaccuaaau

SEQ ID NO: 1884213 - RNA, 19 nt, Homo sapiens
  misc_RNA (1)...(19): siRNA sense strand
ggacgaggaggaagagaaa

SEQ ID NO: 1884214 - RNA, 19 nt, Homo sapiens
  misc_RNA (1)...(19): siRNA sense strand
gaagggcggucucguucug

SEQ ID NO: 1884215 - RNA, 19 nt, Homo sapiens
  misc_RNA (1)...(19): siRNA sense strand
gaggcuaccugguuuacug

SEQ ID NO: 1884216 - RNA, 19 nt, Homo sapiens
  misc_RNA (1)...(19): siRNA sense strand
ggacuagugguguaugauu

SEQ ID NO: 1884217 - RNA, 19 nt, Homo sapiens
  misc_RNA (1)...(19): siRNA sense strand
gugcauacccaugaaauuu

SEQ ID NO: 1884218 - RNA, 19 nt, Homo sapiens
  misc_RNA (1)...(19): siRNA sense strand
caauauggauggguucuuc

SEQ ID NO: 1884219 - RNA, 19 nt, Homo sapiens
  misc_RNA (1)...(19): siRNA sense strand
gaaacagccacaccuacaa

SEQ ID NO: 1884220 - RNA, 19 nt, Homo sapiens
  misc_RNA (1)...(19): siRNA sense strand
gagauugggcucuguugaa

SEQ ID NO: 1884221 - RNA, 19 nt, Homo sapiens
  misc_RNA (1)...(19): siRNA sense strand
gucaaagacuggacuagug

SEQ ID NO: 1884222 - RNA, 19 nt, Homo sapiens
  misc_RNA (1)...(19): siRNA sense strand
caaagaggaagaaaucuca

SEQ ID NO: 1884223 - RNA, 19 nt, Homo sapiens
  misc_RNA (1)...(19): siRNA sense strand
cgacgcuucuacccucaua

SEQ ID NO: 1884224 - RNA, 19 nt, Homo sapiens
  misc_RNA (1)...(19): siRNA sense strand
gaggaagacucugaagaag

SEQ ID NO: 1884225 - RNA, 19 nt, Homo sapiens
  misc_RNA (1)...(19): siRNA sense strand
cagcaaagaggaagaaauc

SEQ ID NO: 1884226 - RNA, 19 nt, Homo sapiens
  misc_RNA (1)...(19): siRNA sense strand
gugcucaccuccagaagga

SEQ ID NO: 1884227 - RNA, 19 nt, Homo sapiens
  misc_RNA (1)...(19): siRNA sense strand
agacuggacuaguggugua

SEQ ID NO: 1884228 - RNA, 19 nt, Homo sapiens
  misc_RNA (1)...(19): siRNA sense strand
gagcugacuccaacucuga

SEQ ID NO: 1884229 - RNA, 19 nt, Homo sapiens
  misc_RNA (1)...(19): siRNA sense strand
ugaaccggcucaagaagga

SEQ ID NO: 1884230 - RNA, 19 nt, Homo sapiens
  misc_RNA (1)...(19): siRNA sense strand
gaagcuaaagcaacgauca

SEQ ID NO: 1884231 - RNA, 19 nt, Homo sapiens
  misc_RNA (1)...(19): siRNA sense strand
aagcguugcugcccauuga

SEQ ID NO: 1884232 - RNA, 19 nt, Homo sapiens
  misc_RNA (1)...(19): siRNA sense strand
uaaagcaacgaucaccuaa

SEQ ID NO: 1884233 - RNA, 19 nt, Homo sapiens
  misc_RNA (1)...(19): siRNA sense strand
uggcccagcugaugaagaa

SEQ ID NO: 1884234 - RNA, 19 nt, Homo sapiens
  misc_RNA (1)...(19): siRNA sense strand
ggaggaagagaaagaagug

SEQ ID NO: 1884235 - RNA, 19 nt, Homo sapiens
  misc_RNA (1)...(19): siRNA sense strand
gcacaggcucuaaucaauc

SEQ ID NO: 1884236 - RNA, 19 nt, Homo sapiens
  misc_RNA (1)...(19): siRNA sense strand
uaaaaccucuggccacuga

SEQ ID NO: 1884237 - RNA, 19 nt, Homo sapiens
  misc_RNA (1)...(19): siRNA sense strand
aaaggugacugggaagcua

SEQ ID NO: 1884238 - RNA, 19 nt, Homo sapiens
  misc_RNA (1)...(19): siRNA sense strand
gaaagagggcagccaagag

SEQ ID NO: 1884239 - RNA, 19 nt, Homo sapiens
  misc_RNA (1)...(19): siRNA sense strand
gaggaagggcggucucguu

SEQ ID NO: 1884240 - RNA, 19 nt, Homo sapiens
  misc_RNA (1)...(19): siRNA sense strand
gcaaagaggaagaaaucuc

SEQ ID NO: 1884241 - RNA, 19 nt, Homo sapiens
  misc_RNA (1)...(19): siRNA sense strand
gcagccagccagccaagaa

SEQ ID NO: 1884242 - RNA, 19 nt, Homo sapiens
  misc_RNA (1)...(19): siRNA sense strand
gacuagugguguaugauuc

SEQ ID NO: 1884243 - RNA, 19 nt, Homo sapiens
  misc_RNA (1)...(19): siRNA sense strand
cuaaagcaacgaucaccua

SEQ ID NO: 1884244 - RNA, 19 nt, Homo sapiens
  misc_RNA (1)...(19): siRNA sense strand
gaagggugccgagacagaa

SEQ ID NO: 1884245 - RNA, 19 nt, Homo sapiens
  misc_RNA (1)...(19): siRNA sense strand
uugccaaguucaagaaauu

SEQ ID NO: 1884246 - RNA, 19 nt, Homo sapiens
  misc_RNA (1)...(19): siRNA sense strand
gcagaucaauguggaugag

SEQ ID NO: 1884247 - RNA, 19 nt, Homo sapiens
  misc_RNA (1)...(19): siRNA sense strand
aaauuacaguccuccaaga

SEQ ID NO: 1884248 - RNA, 19 nt, Homo sapiens
  misc_RNA (1)...(19): siRNA sense strand
aaacagccacaccuacaaa

SEQ ID NO: 1884249 - RNA, 19 nt, Homo sapiens
  misc_RNA (1)...(19): siRNA sense strand
gagcggauccuggacaugu

SEQ ID NO: 1884250 - RNA, 19 nt, Homo sapiens
  misc_RNA (1)...(19): siRNA sense strand
ugaauggcaucuccaaagg

SEQ ID NO: 1884251 - RNA, 19 nt, Homo sapiens
  misc_RNA (1)...(19): siRNA sense strand
ggagauugggcucuguuga

SEQ ID NO: 1884252 - RNA, 19 nt, Homo sapiens
  misc_RNA (1)...(19): siRNA sense strand
gcaaguuggacccuacgaa

SEQ ID NO: 1884253 - RNA, 19 nt, Homo sapiens
  misc_RNA (1)...(19): siRNA sense strand
uuacaguccuccaagaaag

SEQ ID NO: 1884254 - RNA, 19 nt, Homo sapiens
  misc_RNA (1)...(19): siRNA sense strand
ccacgggccuagacuuugg

SEQ ID NO: 1884255 - RNA, 19 nt, Homo sapiens
  misc_RNA (1)...(19): siRNA sense strand
gcacuggggucaucuccaa

SEQ ID NO: 1884256 - RNA, 19 nt, Homo sapiens
  misc_RNA (1)...(19): siRNA sense strand
uacgguagaugacuaugga

SEQ ID NO: 1884257 - RNA, 19 nt, Homo sapiens
  misc_RNA (1)...(19): siRNA sense strand
cgaaagagggcagccaaga

SEQ ID NO: 1884258 - RNA, 19 nt, Homo sapiens
  misc_RNA (1)...(19): siRNA sense strand
gugugauccuugccaauga

SEQ ID NO: 1884259 - RNA, 19 nt, Homo sapiens
  misc_RNA (1)...(19): siRNA sense strand
guaccuggcugggcacuac

SEQ ID NO: 1884260 - RNA, 19 nt, Homo sapiens
  misc_RNA (1)...(19): siRNA sense strand
gaggaaagaccagcuacau

SEQ ID NO: 1884261 - RNA, 19 nt, Homo sapiens
  misc_RNA (1)...(19): siRNA sense strand
ugcauacccaugaaauuua

SEQ ID NO: 1884262 - RNA, 19 nt, Homo sapiens
  misc_RNA (1)...(19): siRNA sense strand
gggcacagacacacaaaca

SEQ ID NO: 1884263 - RNA, 19 nt, Homo sapiens
  misc_RNA (1)...(19): siRNA sense strand
guucuucauugccaaguuc

SEQ ID NO: 1884264 - RNA, 19 nt, Homo sapiens
  misc_RNA (1)...(19): siRNA sense strand
gaguugcuccugagugcua

SEQ ID NO: 1884265 - RNA, 19 nt, Homo sapiens
  misc_RNA (1)...(19): siRNA sense strand
gauccagccgugaagacua

SEQ ID NO: 1884266 - RNA, 19 nt, Homo sapiens
  misc_RNA (1)...(19): siRNA sense strand
ccaaggauccagccgugaa

SEQ ID NO: 1884267 - RNA, 19 nt, Homo sapiens
  misc_RNA (1)...(19): siRNA sense strand
ggaggaggaagacucugaa

SEQ ID NO: 1884268 - RNA, 19 nt, Homo sapiens
  misc_RNA (1)...(19): siRNA sense strand
ugaagacuaacaaggauga

SEQ ID NO: 1884269 - RNA, 19 nt, Homo sapiens
  misc_RNA (1)...(19): siRNA sense strand
gaucaauguggaugaggaa

SEQ ID NO: 1884270 - RNA, 19 nt, Homo sapiens
  misc_RNA (1)...(19): siRNA sense strand
acucagaauuguccacugu

SEQ ID NO: 1884271 - RNA, 19 nt, Homo sapiens
  misc_RNA (1)...(19): siRNA sense strand
aaacagcaacaucccaaga

SEQ ID NO: 1884272 - RNA, 19 nt, Homo sapiens
  misc_RNA (1)...(19): siRNA sense strand
cuacauggcccagcugaug

SEQ ID NO: 1884273 - RNA, 19 nt, Homo sapiens
  misc_RNA (1)...(19): siRNA sense strand
cugauacgguagaugacua

SEQ ID NO: 1884274 - RNA, 19 nt, Homo sapiens
  misc_RNA (1)...(19): siRNA sense strand
cuacugugcauacccauga

SEQ ID NO: 1884275 - RNA, 19 nt, Homo sapiens
  misc_RNA (1)...(19): siRNA sense strand
agaaagcugccuuccagaa

SEQ ID NO: 1884276 - RNA, 19 nt, Homo sapiens
  misc_RNA (1)...(19): siRNA sense strand
gacagaacucgucagauuc

SEQ ID NO: 1884277 - RNA, 19 nt, Homo sapiens
  misc_RNA (1)...(19): siRNA sense strand
ugaaacagccacaccuaca

SEQ ID NO: 1884278 - RNA, 19 nt, Homo sapiens
  misc_RNA (1)...(19): siRNA sense strand
auggauggguucuucauug

SEQ ID NO: 1884279 - RNA, 19 nt, Homo sapiens
  misc_RNA (1)...(19): siRNA sense strand
ggcggucucguucugaaua

SEQ ID NO: 1884280 - RNA, 19 nt, Homo sapiens
  misc_RNA (1)...(19): siRNA sense strand
ugggaauucugcgugauuu

SEQ ID NO: 1884281 - RNA, 19 nt, Homo sapiens
  misc_RNA (1)...(19): siRNA sense strand
agacuaacaaggaugagaa

SEQ ID NO: 1884282 - RNA, 19 nt, Homo sapiens
  misc_RNA (1)...(19): siRNA sense strand
cgugaagacuaacaaggau

SEQ ID NO: 1884283 - RNA, 19 nt, Homo sapiens
  misc_RNA (1)...(19): siRNA sense strand
gggagucaccaacaccauu

SEQ ID NO: 1884284 - RNA, 19 nt, Homo sapiens
  misc_RNA (1)...(19): siRNA sense strand
gcaagcucauggaccucuu

SEQ ID NO: 1884285 - RNA, 19 nt, Homo sapiens
  misc_RNA (1)...(19): siRNA sense strand
gaagcguugcugcccauug

SEQ ID NO: 1884286 - RNA, 19 nt, Homo sapiens
  misc_RNA (1)...(19): siRNA sense strand
aggccacccugaaaccuaa

SEQ ID NO: 1884287 - RNA, 19 nt, Homo sapiens
  misc_RNA (1)...(19): siRNA sense strand
cacuguaccuucugucaca

SEQ ID NO: 1884288 - RNA, 19 nt, Homo sapiens
  misc_RNA (1)...(19): siRNA sense strand
cagccacaccuacaaaugu

SEQ ID NO: 1884289 - RNA, 19 nt, Homo sapiens
  misc_RNA (1)...(19): siRNA sense strand
ugcacaggcucuaaucaau

SEQ ID NO: 1884290 - RNA, 19 nt, Homo sapiens
  misc_RNA (1)...(19): siRNA sense strand
ggaacucuugccucuguga

SEQ ID NO: 1884291 - RNA, 19 nt, Homo sapiens
  misc_RNA (1)...(19): siRNA sense strand
caagggcacagacacacaa

SEQ ID NO: 1884292 - RNA, 19 nt, Homo sapiens
  misc_RNA (1)...(19): siRNA sense strand
ucagaauuguccacuguac

SEQ ID NO: 1884293 - RNA, 19 nt, Homo sapiens
  misc_RNA (1)...(19): siRNA sense strand
agacuugccucaggucauc

SEQ ID NO: 1884294 - RNA, 19 nt, Homo sapiens
  misc_RNA (1)...(19): siRNA sense strand
uacugcaccuguucuauca

SEQ ID NO: 1884295 - RNA, 19 nt, Homo sapiens
  misc_RNA (1)...(19): siRNA sense strand
cuaacaaggaugagaagga

SEQ ID NO: 1884296 - RNA, 19 nt, Homo sapiens
  misc_RNA (1)...(19): siRNA sense strand
ggugugauccuugccaaug

SEQ ID NO: 1884297 - RNA, 19 nt, Homo sapiens
  misc_RNA (1)...(19): siRNA sense strand
ggucaaagacuggacuagu

SEQ ID NO: 1884298 - RNA, 19 nt, Homo sapiens
  misc_RNA (1)...(19): siRNA sense strand
gaggagagcuggucuauuu

SEQ ID NO: 1884299 - RNA, 19 nt, Homo sapiens
  misc_RNA (1)...(19): siRNA sense strand
ggaaauggauuaugaggaa

SEQ ID NO: 1884300 - RNA, 19 nt, Homo sapiens
  misc_RNA (1)...(19): siRNA sense strand
guacugaucugcucugaaa

SEQ ID NO: 1884301 - RNA, 19 nt, Homo sapiens
  misc_RNA (1)...(19): siRNA sense strand
gagaguaacaaccuuauua

SEQ ID NO: 1884302 - RNA, 19 nt, Homo sapiens
  misc_RNA (1)...(19): siRNA sense strand
ccaagaaacucgaggauau

SEQ ID NO: 1884303 - RNA, 19 nt, Homo sapiens
  misc_RNA (1)...(19): siRNA sense strand
gaacgucucugaagaacug

SEQ ID NO: 1884304 - RNA, 19 nt, Homo sapiens
  misc_RNA (1)...(19): siRNA sense strand
ggagacagaugaagauaug

SEQ ID NO: 1884305 - RNA, 19 nt, Homo sapiens
  misc_RNA (1)...(19): siRNA sense strand
uaacaccaaugaugaagua

SEQ ID NO: 1884306 - RNA, 19 nt, Homo sapiens
  misc_RNA (1)...(19): siRNA sense strand
ccaaggaccugauacuaaa

SEQ ID NO: 1884307 - RNA, 19 nt, Homo sapiens
  misc_RNA (1)...(19): siRNA sense strand
ggacauaggguaauuguau

SEQ ID NO: 1884308 - RNA, 19 nt, Homo sapiens
  misc_RNA (1)...(19): siRNA sense strand
gaacacggcaacuuccuua

SEQ ID NO: 1884309 - RNA, 19 nt, Homo sapiens
  misc_RNA (1)...(19): siRNA sense strand
caggacagcugaaugagua

SEQ ID NO: 1884310 - RNA, 19 nt, Homo sapiens
  misc_RNA (1)...(19): siRNA sense strand
gauauccgcuguccaauuc

SEQ ID NO: 1884311 - RNA, 19 nt, Homo sapiens
  misc_RNA (1)...(19): siRNA sense strand
caagaaaccuuuggcaaga

SEQ ID NO: 1884312 - RNA, 19 nt, Homo sapiens
  misc_RNA (1)...(19): siRNA sense strand
uagcugaucuggccaauga

SEQ ID NO: 1884313 - RNA, 19 nt, Homo sapiens
  misc_RNA (1)...(19): siRNA sense strand
cacggcaacuuccuuauua

SEQ ID NO: 1884314 - RNA, 19 nt, Homo sapiens
  misc_RNA (1)...(19): siRNA sense strand
ccaaaucgauguucuucuu

SEQ ID NO: 1884315 - RNA, 19 nt, Homo sapiens
  misc_RNA (1)...(19): siRNA sense strand
gaagauaugguuacugaga

SEQ ID NO: 1884316 - RNA, 19 nt, Homo sapiens
  misc_RNA (1)...(19): siRNA sense strand
ggacugagaagcaggauga

SEQ ID NO: 1884317 - RNA, 19 nt, Homo sapiens
  misc_RNA (1)...(19): siRNA sense strand
cagaaucacuugucuauac

SEQ ID NO: 1884318 - RNA, 19 nt, Homo sapiens
  misc_RNA (1)...(19): siRNA sense strand
uggaguagaugucggauuu

SEQ ID NO: 1884319 - RNA, 19 nt, Homo sapiens
  misc_RNA (1)...(19): siRNA sense strand
uggagaaacuguagaagaa

SEQ ID NO: 1884320 - RNA, 19 nt, Homo sapiens
  misc_RNA (1)...(19): siRNA sense strand
gaccguggcuugcucaaug

SEQ ID NO: 1884321 - RNA, 19 nt, Homo sapiens
  misc_RNA (1)...(19): siRNA sense strand
agacaaguuuggcaacaua

SEQ ID NO: 1884322 - RNA, 19 nt, Homo sapiens
  misc_RNA (1)...(19): siRNA sense strand
uaaaucaugugguccgaaa

SEQ ID NO: 1884323 - RNA, 19 nt, Homo sapiens
  misc_RNA (1)...(19): siRNA sense strand
gcaugagucuggccaaugu

SEQ ID NO: 1884324 - RNA, 19 nt, Homo sapiens
  misc_RNA (1)...(19): siRNA sense strand
gcagggagauaucuuuaag

SEQ ID NO: 1884325 - RNA, 19 nt, Homo sapiens
  misc_RNA (1)...(19): siRNA sense strand
ggaagaaggagacacauuc

SEQ ID NO: 1884326 - RNA, 19 nt, Homo sapiens
  misc_RNA (1)...(19): siRNA sense strand
gcagacacuuacuuucuau

SEQ ID NO: 1884327 - RNA, 19 nt, Homo sapiens
  misc_RNA (1)...(19): siRNA sense strand
gagcagggagauaucuuua

SEQ ID NO: 1884328 - RNA, 19 nt, Homo sapiens
  misc_RNA (1)...(19): siRNA sense strand
uaccagccaucuaagaaua

SEQ ID NO: 1884329 - RNA, 19 nt, Homo sapiens
  misc_RNA (1)...(19): siRNA sense strand
gagcuauucuuaccaaucu

SEQ ID NO: 1884330 - RNA, 19 nt, Homo sapiens
  misc_RNA (1)...(19): siRNA sense strand
ggaacacacuggaccuugu

SEQ ID NO: 1884331 - RNA, 19 nt, Homo sapiens
  misc_RNA (1)...(19): siRNA sense strand
gggcgagccguuaugauua

SEQ ID NO: 1884332 - RNA, 19 nt, Homo sapiens
  misc_RNA (1)...(19): siRNA sense strand
guacacacccaggaaauuu

SEQ ID NO: 1884333 - RNA, 19 nt, Homo sapiens
  misc_RNA (1)...(19): siRNA sense strand
gaccuuguccugcuccuua

SEQ ID NO: 1884334 - RNA, 19 nt, Homo sapiens
  misc_RNA (1)...(19): siRNA sense strand
ugaagauacuccacaguug

SEQ ID NO: 1884335 - RNA, 19 nt, Homo sapiens
  misc_RNA (1)...(19): siRNA sense strand
gaaccaaacaacaagaaau

SEQ ID NO: 1884336 - RNA, 19 nt, Homo sapiens
  misc_RNA (1)...(19): siRNA sense strand
gccaaggaccugauacuaa

SEQ ID NO: 1884337 - RNA, 19 nt, Homo sapiens
  misc_RNA (1)...(19): siRNA sense strand
gaagaccccuggaaagaaa

SEQ ID NO: 1884338 - RNA, 19 nt, Homo sapiens
  misc_RNA (1)...(19): siRNA sense strand
gaccuugguuuaaaucaug

SEQ ID NO: 1884339 - RNA, 19 nt, Homo sapiens
  misc_RNA (1)...(19): siRNA sense strand
guagaugucggauuugaaa

SEQ ID NO: 1884340 - RNA, 19 nt, Homo sapiens
  misc_RNA (1)...(19): siRNA sense strand
gaguagaugucggauuuga

SEQ ID NO: 1884341 - RNA, 19 nt, Homo sapiens
  misc_RNA (1)...(19): siRNA sense strand
gaaaauacagugaaccuuu

SEQ ID NO: 1884342 - RNA, 19 nt, Homo sapiens
  misc_RNA (1)...(19): siRNA sense strand
caacuuaaccuugcagaga

SEQ ID NO: 1884343 - RNA, 19 nt, Homo sapiens
  misc_RNA (1)...(19): siRNA sense strand
cagaggugaucaugaacua

SEQ ID NO: 1884344 - RNA, 19 nt, Homo sapiens
  misc_RNA (1)...(19): siRNA sense strand
gcaacuuccuuauuacagu

SEQ ID NO: 1884345 - RNA, 19 nt, Homo sapiens
  misc_RNA (1)...(19): siRNA sense strand
gagcuagaccuugguuuaa

SEQ ID NO: 1884346 - RNA, 19 nt, Homo sapiens
  misc_RNA (1)...(19): siRNA sense strand
guggaaguauucgguguua

SEQ ID NO: 1884347 - RNA, 19 nt, Homo sapiens
  misc_RNA (1)...(19): siRNA sense strand
gaagaggucccugcugcua

SEQ ID NO: 1884348 - RNA, 19 nt, Homo sapiens
  misc_RNA (1)...(19): siRNA sense strand
caaucucgcuuccaucuca

SEQ ID NO: 1884349 - RNA, 19 nt, Homo sapiens
  misc_RNA (1)...(19): siRNA sense strand
gagaaacuguagaagaagu

SEQ ID NO: 1884350 - RNA, 19 nt, Homo sapiens
  misc_RNA (1)...(19): siRNA sense strand
gagaagauucaccaagaaa

SEQ ID NO: 1884351 - RNA, 19 nt, Homo sapiens
  misc_RNA (1)...(19): siRNA sense strand
ccacgaaagcucagagaaa

SEQ ID NO: 1884352 - RNA, 19 nt, Homo sapiens
  misc_RNA (1)...(19): siRNA sense strand
gcucggugcugucuucaau

SEQ ID NO: 1884353 - RNA, 19 nt, Homo sapiens
  misc_RNA (1)...(19): siRNA sense strand
gacagugcgucgacacauu

SEQ ID NO: 1884354 - RNA, 19 nt, Homo sapiens
  misc_RNA (1)...(19): siRNA sense strand
gaagauacuccacaguugu

SEQ ID NO: 1884355 - RNA, 19 nt, Homo sapiens
  misc_RNA (1)...(19): siRNA sense strand
ugagaagauucaccaagaa

SEQ ID NO: 1884356 - RNA, 19 nt, Homo sapiens
  misc_RNA (1)...(19): siRNA sense strand
caccuugucuggaggaauu

SEQ ID NO: 1884357 - RNA, 19 nt, Homo sapiens
  misc_RNA (1)...(19): siRNA sense strand
gcuagaccuugguuuaaau

SEQ ID NO: 1884358 - RNA, 19 nt, Homo sapiens
  misc_RNA (1)...(19): siRNA sense strand
aggcagaggugaucaugaa

SEQ ID NO: 1884359 - RNA, 19 nt, Homo sapiens
  misc_RNA (1)...(19): siRNA sense strand
gcagauggcagaggaaaug

SEQ ID NO: 1884360 - RNA, 19 nt, Homo sapiens
  misc_RNA (1)...(19): siRNA sense strand
uaagaucacuuuggagaca

SEQ ID NO: 1884361 - RNA, 19 nt, Homo sapiens
  misc_RNA (1)...(19): siRNA sense strand
ugagcuagaccuugguuua

SEQ ID NO: 1884362 - RNA, 19 nt, Homo sapiens
  misc_RNA (1)...(19): siRNA sense strand
gacuugaggugucagaaau

SEQ ID NO: 1884363 - RNA, 19 nt, Homo sapiens
  misc_RNA (1)...(19): siRNA sense strand
ggacuugaggugucagaaa

SEQ ID NO: 1884364 - RNA, 19 nt, Homo sapiens
  misc_RNA (1)...(19): siRNA sense strand
ggaaaccauuacuuauauc

SEQ ID NO: 1884365 - RNA, 19 nt, Homo sapiens
  misc_RNA (1)...(19): siRNA sense strand
gaucugcucugaaaacuau

SEQ ID NO: 1884366 - RNA, 19 nt, Homo sapiens
  misc_RNA (1)...(19): siRNA sense strand
gaauaccagccaucuaaga

SEQ ID NO: 1884367 - RNA, 19 nt, Homo sapiens
  misc_RNA (1)...(19): siRNA sense strand
agaagaaguuacuccgaaa

SEQ ID NO: 1884368 - RNA, 19 nt, Homo sapiens
  misc_RNA (1)...(19): siRNA sense strand
gaaaugggugggacugaga

SEQ ID NO: 1884369 - RNA, 19 nt, Homo sapiens
  misc_RNA (1)...(19): siRNA sense strand
agauccggcucaaauauuu

SEQ ID NO: 1884370 - RNA, 19 nt, Homo sapiens
  misc_RNA (1)...(19): siRNA sense strand
uggaauaccagccaucuaa

SEQ ID NO: 1884371 - RNA, 19 nt, Homo sapiens
  misc_RNA (1)...(19): siRNA sense strand
gcagacaaguuuggcaaca

SEQ ID NO: 1884372 - RNA, 19 nt, Homo sapiens
  misc_RNA (1)...(19): siRNA sense strand
gcagauguggugugcauga

SEQ ID NO: 1884373 - RNA, 19 nt, Homo sapiens
  misc_RNA (1)...(19): siRNA sense strand
gagauccggcucaaauauu

SEQ ID NO: 1884374 - RNA, 19 nt, Homo sapiens
  misc_RNA (1)...(19): siRNA sense strand
augaagauaugguuacuga

SEQ ID NO: 1884375 - RNA, 19 nt, Homo sapiens
  misc_RNA (1)...(19): siRNA sense strand
ccugaaagaggaaugauuu

SEQ ID NO: 1884376 - RNA, 19 nt, Homo sapiens
  misc_RNA (1)...(19): siRNA sense strand
ccagauauccgcuguccaa

SEQ ID NO: 1884377 - RNA, 19 nt, Homo sapiens
  misc_RNA (1)...(19): siRNA sense strand
ggaggaacacggcaacuuc

SEQ ID NO: 1884378 - RNA, 19 nt, Homo sapiens
  misc_RNA (1)...(19): siRNA sense strand
ucuaugaccugggaaagaa

SEQ ID NO: 1884379 - RNA, 19 nt, Homo sapiens
  misc_RNA (1)...(19): siRNA sense strand
gcagugggccucugugauc

SEQ ID NO: 1884380 - RNA, 19 nt, Homo sapiens
  misc_RNA (1)...(19): siRNA sense strand
ggaaagaaaacaauuguga

SEQ ID NO: 1884381 - RNA, 19 nt, Homo sapiens
  misc_RNA (1)...(19): siRNA sense strand
gcacauacgagcagacaag

SEQ ID NO: 1884382 - RNA, 19 nt, Homo sapiens
  misc_RNA (1)...(19): siRNA sense strand
gugcaggucuauccagaug

SEQ ID NO: 1884383 - RNA, 19 nt, Homo sapiens
  misc_RNA (1)...(19): siRNA sense strand
ggaaguauucgguguuauc

SEQ ID NO: 1884384 - RNA, 19 nt, Homo sapiens
  misc_RNA (1)...(19): siRNA sense strand
gaaugccacccuaguguug

SEQ ID NO: 1884385 - RNA, 19 nt, Homo sapiens
  misc_RNA (1)...(19): siRNA sense strand
uugagaagauucaccaaga

SEQ ID NO: 1884386 - RNA, 19 nt, Homo sapiens
  misc_RNA (1)...(19): siRNA sense strand
gggagacggugcuguccuu

SEQ ID NO: 1884387 - RNA, 19 nt, Homo sapiens
  misc_RNA (1)...(19): siRNA sense strand
gacagccucucucccauuc

SEQ ID NO: 1884388 - RNA, 19 nt, Homo sapiens
  misc_RNA (1)...(19): siRNA sense strand
aaacugagcagggagauau

SEQ ID NO: 1884389 - RNA, 19 nt, Homo sapiens
  misc_RNA (1)...(19): siRNA sense strand
aaagaacgucucugaagaa

SEQ ID NO: 1884390 - RNA, 19 nt, Homo sapiens
  misc_RNA (1)...(19): siRNA sense strand
uaucugauguccaagaaag

SEQ ID NO: 1884391 - RNA, 19 nt, Homo sapiens
  misc_RNA (1)...(19): siRNA sense strand
ggaaccaaacaacaagaaa

SEQ ID NO: 1884392 - RNA, 19 nt, Homo sapiens
  misc_RNA (1)...(19): siRNA sense strand
gcuggucuauuucgagaug

SEQ ID NO: 1884393 - RNA, 19 nt, Homo sapiens
  misc_RNA (1)...(19): siRNA sense strand
cagugacucuggucgaauu

SEQ ID NO: 1884394 - RNA, 19 nt, Homo sapiens
  misc_RNA (1)...(19): siRNA sense strand
ggacagccucucucccauu

SEQ ID NO: 1884395 - RNA, 19 nt, Homo sapiens
  misc_RNA (1)...(19): siRNA sense strand
cagcagauguggugugcau

SEQ ID NO: 1884396 - RNA, 19 nt, Homo sapiens
  misc_RNA (1)...(19): siRNA sense strand
aaaccagcuuaucaucuuu

SEQ ID NO: 1884397 - RNA, 19 nt, Homo sapiens
  misc_RNA (1)...(19): siRNA sense strand
gcaguacacacccaggaaa

SEQ ID NO: 1884398 - RNA, 19 nt, Homo sapiens
  misc_RNA (1)...(19): siRNA sense strand
ggaaauuaucgcccacauu

SEQ ID NO: 1884399 - RNA, 19 nt, Homo sapiens
  misc_RNA (1)...(19): siRNA sense strand
ccauuagugugccucuuug

SEQ ID NO: 1884400 - RNA, 19 nt, Homo sapiens
  misc_RNA (1)...(19): siRNA sense strand
uagugugccucuuuggaaa

SEQ ID NO: 1884401 - RNA, 19 nt, Homo sapiens
  misc_RNA (1)...(19): siRNA sense strand
gugccucuuuggaaauuau

SEQ ID NO: 1884402 - RNA, 19 nt, Homo sapiens
  misc_RNA (1)...(19): siRNA sense strand
gugugccucuuuggaaauu

SEQ ID NO: 1884403 - RNA, 19 nt, Homo sapiens
  misc_RNA (1)...(19): siRNA sense strand
aauuaucgcccacauuugu

SEQ ID NO: 1884404 - RNA, 19 nt, Homo sapiens
  misc_RNA (1)...(19): siRNA sense strand
gacaguguaguccugcaaa

SEQ ID NO: 1884405 - RNA, 19 nt, Homo sapiens
  misc_RNA (1)...(19): siRNA sense strand
cccauuagugugccucuuu

SEQ ID NO: 1884406 - RNA, 19 nt, Homo sapiens
  misc_RNA (1)...(19): siRNA sense strand
uuagugugccucuuuggaa

SEQ ID NO: 1884407 - RNA, 19 nt, Homo sapiens
  misc_RNA (1)...(19): siRNA sense strand
gaagauggcuaucagauga

SEQ ID NO: 1884408 - RNA, 19 nt, Homo sapiens
  misc_RNA (1)...(19): siRNA sense strand
ggaaugaucugacuaacuu

SEQ ID NO: 1884409 - RNA, 19 nt, Homo sapiens
  misc_RNA (1)...(19): siRNA sense strand
gaaauuaugcgugcacuua

SEQ ID NO: 1884410 - RNA, 19 nt, Homo sapiens
  misc_RNA (1)...(19): siRNA sense strand
gaaacgaagugaagcuaaa

SEQ ID NO: 1884411 - RNA, 19 nt, Homo sapiens
  misc_RNA (1)...(19): siRNA sense strand
caacagagaugcuuauuuu

SEQ ID NO: 1884412 - RNA, 19 nt, Homo sapiens
  misc_RNA (1)...(19): siRNA sense strand
ucacaaagaucauguucaa

SEQ ID NO: 1884413 - RNA, 19 nt, Homo sapiens
  misc_RNA (1)...(19): siRNA sense strand
acacugagauguaucauga

SEQ ID NO: 1884414 - RNA, 19 nt, Homo sapiens
  misc_RNA (1)...(19): siRNA sense strand
ggaccaggcugaaggcauu

SEQ ID NO: 1884415 - RNA, 19 nt, Homo sapiens
  misc_RNA (1)...(19): siRNA sense strand
gcagaacuauguggauuug

SEQ ID NO: 1884416 - RNA, 19 nt, Homo sapiens
  misc_RNA (1)...(19): siRNA sense strand
caaaugcuguggugaacuu

SEQ ID NO: 1884417 - RNA, 19 nt, Homo sapiens
  misc_RNA (1)...(19): siRNA sense strand
caggaaauggugacuauua

SEQ ID NO: 1884418 - RNA, 19 nt, Homo sapiens
  misc_RNA (1)...(19): siRNA sense strand
gcuauucgaugccguguau

SEQ ID NO: 1884419 - RNA, 19 nt, Homo sapiens
  misc_RNA (1)...(19): siRNA sense strand
gcccaaaccagguguauuu

SEQ ID NO: 1884420 - RNA, 19 nt, Homo sapiens
  misc_RNA (1)...(19): siRNA sense strand
cauaaacacugagauguau

SEQ ID NO: 1884421 - RNA, 19 nt, Homo sapiens
  misc_RNA (1)...(19): siRNA sense strand
ugacuaacuucacugauau

SEQ ID NO: 1884422 - RNA, 19 nt, Homo sapiens
  misc_RNA (1)...(19): siRNA sense strand
cugacuaacuucacugaua

SEQ ID NO: 1884423 - RNA, 19 nt, Homo sapiens
  misc_RNA (1)...(19): siRNA sense strand
ucagaugaaugcacaaaug

SEQ ID NO: 1884424 - RNA, 19 nt, Homo sapiens
  misc_RNA (1)...(19): siRNA sense strand
gcaacagagaugcuuauuu

SEQ ID NO: 1884425 - RNA, 19 nt, Homo sapiens
  misc_RNA (1)...(19): siRNA sense strand
caaaagagguaaucaggaa

SEQ ID NO: 1884426 - RNA, 19 nt, Homo sapiens
  misc_RNA (1)...(19): siRNA sense strand
gaaggcauuugcaaagcuu

SEQ ID NO: 1884427 - RNA, 19 nt, Homo sapiens
  misc_RNA (1)...(19): siRNA sense strand
gaacagacaggaaaucaac

SEQ ID NO: 1884428 - RNA, 19 nt, Homo sapiens
  misc_RNA (1)...(19): siRNA sense strand
cagcaaggaugacucaauc

SEQ ID NO: 1884429 - RNA, 19 nt, Homo sapiens
  misc_RNA (1)...(19): siRNA sense strand
ggaaacgaagugaagcuaa

SEQ ID NO: 1884430 - RNA, 19 nt, Homo sapiens
  misc_RNA (1)...(19): siRNA sense strand
gaguagaggagaaagcuaa

SEQ ID NO: 1884431 - RNA, 19 nt, Homo sapiens
  misc_RNA (1)...(19): siRNA sense strand
ccauaaacacugagaugua

SEQ ID NO: 1884432 - RNA, 19 nt, Homo sapiens
  misc_RNA (1)...(19): siRNA sense strand
gauuugguguccaguuuga

SEQ ID NO: 1884433 - RNA, 19 nt, Homo sapiens
  misc_RNA (1)...(19): siRNA sense strand
uauauaagcaggccacuga

SEQ ID NO: 1884434 - RNA, 19 nt, Homo sapiens
  misc_RNA (1)...(19): siRNA sense strand
ggaagauggcuaucagaug

SEQ ID NO: 1884435 - RNA, 19 nt, Homo sapiens
  misc_RNA (1)...(19): siRNA sense strand
gggaauuugugggcuguuu

SEQ ID NO: 1884436 - RNA, 19 nt, Homo sapiens
  misc_RNA (1)...(19): siRNA sense strand
aauggugacuauuacagua

SEQ ID NO: 1884437 - RNA, 19 nt, Homo sapiens
  misc_RNA (1)...(19): siRNA sense strand
caaaugggacgcauggaau

SEQ ID NO: 1884438 - RNA, 19 nt, Homo sapiens
  misc_RNA (1)...(19): siRNA sense strand
ccaaaugggacgcauggaa

SEQ ID NO: 1884439 - RNA, 19 nt, Homo sapiens
  misc_RNA (1)...(19): siRNA sense strand
gacagggcaacauuucaua

SEQ ID NO: 1884440 - RNA, 19 nt, Homo sapiens
  misc_RNA (1)...(19): siRNA sense strand
cagaaggacuuugaaaauu

SEQ ID NO: 1884441 - RNA, 19 nt, Homo sapiens
  misc_RNA (1)...(19): siRNA sense strand
aacaggaaauggugacuau

SEQ ID NO: 1884442 - RNA, 19 nt, Homo sapiens
  misc_RNA (1)...(19): siRNA sense strand
acugagauguaucaugaaa

SEQ ID NO: 1884443 - RNA, 19 nt, Homo sapiens
  misc_RNA (1)...(19): siRNA sense strand
ggcaugugcucaaggacuu

SEQ ID NO: 1884444 - RNA, 19 nt, Homo sapiens
  misc_RNA (1)...(19): siRNA sense strand
ggagaggcaugugcucaag

SEQ ID NO: 1884445 - RNA, 19 nt, Homo sapiens
  misc_RNA (1)...(19): siRNA sense strand
ggaacagacaggaaaucaa

SEQ ID NO: 1884446 - RNA, 19 nt, Homo sapiens
  misc_RNA (1)...(19): siRNA sense strand
gaaauggugacuauuacag

SEQ ID NO: 1884447 - RNA, 19 nt, Homo sapiens
  misc_RNA (1)...(19): siRNA sense strand
gaucaacaaggccaaaugg

SEQ ID NO: 1884448 - RNA, 19 nt, Homo sapiens
  misc_RNA (1)...(19): siRNA sense strand
ggaaauggugacuauuaca

SEQ ID NO: 1884449 - RNA, 19 nt, Homo sapiens
  misc_RNA (1)...(19): siRNA sense strand
caggaaaucaacuggguuu

SEQ ID NO: 1884450 - RNA, 19 nt, Homo sapiens
  misc_RNA (1)...(19): siRNA sense strand
ccagguguauuugacuuga

SEQ ID NO: 1884451 - RNA, 19 nt, Homo sapiens
  misc_RNA (1)...(19): siRNA sense strand
aauuaugcgugcacuuaaa

SEQ ID NO: 1884452 - RNA, 19 nt, Homo sapiens
  misc_RNA (1)...(19): siRNA sense strand
caguuugaguccuucauug

SEQ ID NO: 1884453 - RNA, 19 nt, Homo sapiens
  misc_RNA (1)...(19): siRNA sense strand
guggugaacuucuuaucca

SEQ ID NO: 1884454 - RNA, 19 nt, Homo sapiens
  misc_RNA (1)...(19): siRNA sense strand
aaacucuacgcgcuauaua

SEQ ID NO: 1884455 - RNA, 19 nt, Homo sapiens
  misc_RNA (1)...(19): siRNA sense strand
gcugaaggcauuugcaaag

SEQ ID NO: 1884456 - RNA, 19 nt, Homo sapiens
  misc_RNA (1)...(19): siRNA sense strand
ggaugcuccucuuacacuu

SEQ ID NO: 1884457 - RNA, 19 nt, Homo sapiens
  misc_RNA (1)...(19): siRNA sense strand
caucugacagggcaacauu

SEQ ID NO: 1884458 - RNA, 19 nt, Homo sapiens
  misc_RNA (1)...(19): siRNA sense strand
gacucaaucaucacuguuu

SEQ ID NO: 1884459 - RNA, 19 nt, Homo sapiens
  misc_RNA (1)...(19): siRNA sense strand
guggugaccuccgaagaug

SEQ ID NO: 1884460 - RNA, 19 nt, Homo sapiens
  misc_RNA (1)...(19): siRNA sense strand
gggaagauggcuaucagau

SEQ ID NO: 1884461 - RNA, 19 nt, Homo sapiens
  misc_RNA (1)...(19): siRNA sense strand
aggcagaacuauguggauu

SEQ ID NO: 1884462 - RNA, 19 nt, Homo sapiens
  misc_RNA (1)...(19): siRNA sense strand
aaacuacacgcuguuaaug

SEQ ID NO: 1884463 - RNA, 19 nt, Homo sapiens
  misc_RNA (1)...(19): siRNA sense strand
agaggcaugugcucaagga

SEQ ID NO: 1884464 - RNA, 19 nt, Homo sapiens
  misc_RNA (1)...(19): siRNA sense strand
gugggaaugaucugacuaa

SEQ ID NO: 1884465 - RNA, 19 nt, Homo sapiens
  misc_RNA (1)...(19): siRNA sense strand
uaacaggaaauggugacua

SEQ ID NO: 1884466 - RNA, 19 nt, Homo sapiens
  misc_RNA (1)...(19): siRNA sense strand
uaaacacugagauguauca

SEQ ID NO: 1884467 - RNA, 19 nt, Homo sapiens
  misc_RNA (1)...(19): siRNA sense strand
agaacuauguggauuuggu

SEQ ID NO: 1884468 - RNA, 19 nt, Homo sapiens
  misc_RNA (1)...(19): siRNA sense strand
ggcagaacuauguggauuu

SEQ ID NO: 1884469 - RNA, 19 nt, Homo sapiens
  misc_RNA (1)...(19): siRNA sense strand
gaugcuccucuuacacuuu

SEQ ID NO: 1884470 - RNA, 19 nt, Homo sapiens
  misc_RNA (1)...(19): siRNA sense strand
aaauuaugcgugcacuuaa

SEQ ID NO: 1884471 - RNA, 19 nt, Homo sapiens
  misc_RNA (1)...(19): siRNA sense strand
cagggaagauggcuaucag

SEQ ID NO: 1884472 - RNA, 19 nt, Homo sapiens
  misc_RNA (1)...(19): siRNA sense strand
ggaguagaggagaaagcua

SEQ ID NO: 1884473 - RNA, 19 nt, Homo sapiens
  misc_RNA (1)...(19): siRNA sense strand
agaaggacuuugaaaauuc

SEQ ID NO: 1884474 - RNA, 19 nt, Homo sapiens
  misc_RNA (1)...(19): siRNA sense strand
ugaagaaugcaauguccuu

SEQ ID NO: 1884475 - RNA, 19 nt, Homo sapiens
  misc_RNA (1)...(19): siRNA sense strand
aaaaugccauaaacacuga

SEQ ID NO: 1884476 - RNA, 19 nt, Homo sapiens
  misc_RNA (1)...(19): siRNA sense strand
uaagcaggccacugaagga

SEQ ID NO: 1884477 - RNA, 19 nt, Homo sapiens
  misc_RNA (1)...(19): siRNA sense strand
ucauuggaauccucuaguc

SEQ ID NO: 1884478 - RNA, 19 nt, Homo sapiens
  misc_RNA (1)...(19): siRNA sense strand
gguggugaccuccgaagau

SEQ ID NO: 1884479 - RNA, 19 nt, Homo sapiens
  misc_RNA (1)...(19): siRNA sense strand
ccaguuugaguccuucauu

SEQ ID NO: 1884480 - RNA, 19 nt, Homo sapiens
  misc_RNA (1)...(19): siRNA sense strand
ucuacgcgcuauauaagca

SEQ ID NO: 1884481 - RNA, 19 nt, Homo sapiens
  misc_RNA (1)...(19): siRNA sense strand
ggauuugguguccaguuug

SEQ ID NO: 1884482 - RNA, 19 nt, Homo sapiens
  misc_RNA (1)...(19): siRNA sense strand
gaagugaagcuaaaacucu

SEQ ID NO: 1884483 - RNA, 19 nt, Homo sapiens
  misc_RNA (1)...(19): siRNA sense strand
uuugaguccuucauuggaa

SEQ ID NO: 1884484 - RNA, 19 nt, Homo sapiens
  misc_RNA (1)...(19): siRNA sense strand
ccagcaaggaugacucaau

SEQ ID NO: 1884485 - RNA, 19 nt, Homo sapiens
  misc_RNA (1)...(19): siRNA sense strand
uguuaaugcugaagaaugc

SEQ ID NO: 1884486 - RNA, 19 nt, Homo sapiens
  misc_RNA (1)...(19): siRNA sense strand
aggaaauggugacuauuac

SEQ ID NO: 1884487 - RNA, 19 nt, Homo sapiens
  misc_RNA (1)...(19): siRNA sense strand
ugacagggcaacauuucau

SEQ ID NO: 1884488 - RNA, 19 nt, Homo sapiens
  misc_RNA (1)...(19): siRNA sense strand
cagaaaaucaaaacuguga

SEQ ID NO: 1884489 - RNA, 19 nt, Homo sapiens
  misc_RNA (1)...(19): siRNA sense strand
ugaaggcauuugcaaagcu

SEQ ID NO: 1884490 - RNA, 19 nt, Homo sapiens
  misc_RNA (1)...(19): siRNA sense strand
caucacaaagaucauguuc

SEQ ID NO: 1884491 - RNA, 19 nt, Homo sapiens
  misc_RNA (1)...(19): siRNA sense strand
gggaaugaucugacuaacu

SEQ ID NO: 1884492 - RNA, 19 nt, Homo sapiens
  misc_RNA (1)...(19): siRNA sense strand
gccauaaacacugagaugu

SEQ ID NO: 1884493 - RNA, 19 nt, Homo sapiens
  misc_RNA (1)...(19): siRNA sense strand
agaaugcaauguccuucag

SEQ ID NO: 1884494 - RNA, 19 nt, Homo sapiens
  misc_RNA (1)...(19): siRNA sense strand
uaucagaugaaugcacaaa

SEQ ID NO: 1884495 - RNA, 19 nt, Homo sapiens
  misc_RNA (1)...(19): siRNA sense strand
gcaucacaaagaucauguu

SEQ ID NO: 1884496 - RNA, 19 nt, Homo sapiens
  misc_RNA (1)...(19): siRNA sense strand
ggaaaagagagagagaaaa

SEQ ID NO: 1884497 - RNA, 19 nt, Homo sapiens
  misc_RNA (1)...(19): siRNA sense strand
gagaauuucaaaagaggua

SEQ ID NO: 1884498 - RNA, 19 nt, Homo sapiens
  misc_RNA (1)...(19): siRNA sense strand
ucagaaggacuuugaaaau

SEQ ID NO: 1884499 - RNA, 19 nt, Homo sapiens
  misc_RNA (1)...(19): siRNA sense strand
aaccagguguauuugacuu

SEQ ID NO: 1884500 - RNA, 19 nt, Homo sapiens
  misc_RNA (1)...(19): siRNA sense strand
gaaagcagcucaguauuug

SEQ ID NO: 1884501 - RNA, 19 nt, Homo sapiens
  misc_RNA (1)...(19): siRNA sense strand
gcagaucccuguauaaaga

SEQ ID NO: 1884502 - RNA, 19 nt, Homo sapiens
  misc_RNA (1)...(19): siRNA sense strand
ggagucacaugaugcauua

SEQ ID NO: 1884503 - RNA, 19 nt, Homo sapiens
  misc_RNA (1)...(19): siRNA sense strand
gaagagauuugacagauca

SEQ ID NO: 1884504 - RNA, 19 nt, Homo sapiens
  misc_RNA (1)...(19): siRNA sense strand
ggaauguuguggcaaauaa

SEQ ID NO: 1884505 - RNA, 19 nt, Homo sapiens
  misc_RNA (1)...(19): siRNA sense strand
gaacuucuguuacgcuuga

SEQ ID NO: 1884506 - RNA, 19 nt, Homo sapiens
  misc_RNA (1)...(19): siRNA sense strand
gaaaugaaggcaucaguuu

SEQ ID NO: 1884507 - RNA, 19 nt, Homo sapiens
  misc_RNA (1)...(19): siRNA sense strand
caacaagaaugcaucagaa

SEQ ID NO: 1884508 - RNA, 19 nt, Homo sapiens
  misc_RNA (1)...(19): siRNA sense strand
gaaaguagcaaaugagaga

SEQ ID NO: 1884509 - RNA, 19 nt, Homo sapiens
  misc_RNA (1)...(19): siRNA sense strand
guggagagcuugccuuaaa

SEQ ID NO: 1884510 - RNA, 19 nt, Homo sapiens
  misc_RNA (1)...(19): siRNA sense strand
gaugaguagugccuauuua

SEQ ID NO: 1884511 - RNA, 19 nt, Homo sapiens
  misc_RNA (1)...(19): siRNA sense strand
ggaguaaacugcaaagaag

SEQ ID NO: 1884512 - RNA, 19 nt, Homo sapiens
  misc_RNA (1)...(19): siRNA sense strand
aaagggaacuugucaaaug

SEQ ID NO: 1884513 - RNA, 19 nt, Homo sapiens
  misc_RNA (1)...(19): siRNA sense strand
aaagugaacugccauguga

SEQ ID NO: 1884514 - RNA, 19 nt, Homo sapiens
  misc_RNA (1)...(19): siRNA sense strand
caaauucucuucgauguga

SEQ ID NO: 1884515 - RNA, 19 nt, Homo sapiens
  misc_RNA (1)...(19): siRNA sense strand
gcacguccauacuuaacua

SEQ ID NO: 1884516 - RNA, 19 nt, Homo sapiens
  misc_RNA (1)...(19): siRNA sense strand
ccuaaacccugcucagaua

SEQ ID NO: 1884517 - RNA, 19 nt, Homo sapiens
  misc_RNA (1)...(19): siRNA sense strand
guacaacaaagaacaguua

SEQ ID NO: 1884518 - RNA, 19 nt, Homo sapiens
  misc_RNA (1)...(19): siRNA sense strand
cagaaagggugcauagaaa

SEQ ID NO: 1884519 - RNA, 19 nt, Homo sapiens
  misc_RNA (1)...(19): siRNA sense strand
gcaaaugagagacuacuaa

SEQ ID NO: 1884520 - RNA, 19 nt, Homo sapiens
  misc_RNA (1)...(19): siRNA sense strand
ugaagcagaucccuguaua

SEQ ID NO: 1884521 - RNA, 19 nt, Homo sapiens
  misc_RNA (1)...(19): siRNA sense strand
gaacauauuguguaucuuc

SEQ ID NO: 1884522 - RNA, 19 nt, Homo sapiens
  misc_RNA (1)...(19): siRNA sense strand
cagagcaacucacaaacua

SEQ ID NO: 1884523 - RNA, 19 nt, Homo sapiens
  misc_RNA (1)...(19): siRNA sense strand
gaauugacccuucuuuaga

SEQ ID NO: 1884524 - RNA, 19 nt, Homo sapiens
  misc_RNA (1)...(19): siRNA sense strand
agacgagccugucagcuua

SEQ ID NO: 1884525 - RNA, 19 nt, Homo sapiens
  misc_RNA (1)...(19): siRNA sense strand
gcuccaaacugcaagugua

SEQ ID NO: 1884526 - RNA, 19 nt, Homo sapiens
  misc_RNA (1)...(19): siRNA sense strand
caacaacaguuccuuccuu

SEQ ID NO: 1884527 - RNA, 19 nt, Homo sapiens
  misc_RNA (1)...(19): siRNA sense strand
caaaggucauuuacaagaa

SEQ ID NO: 1884528 - RNA, 19 nt, Homo sapiens
  misc_RNA (1)...(19): siRNA sense strand
ccuauuggcucuucugaaa

SEQ ID NO: 1884529 - RNA, 19 nt, Homo sapiens
  misc_RNA (1)...(19): siRNA sense strand
guucuaugcucccuaauga

SEQ ID NO: 1884530 - RNA, 19 nt, Homo sapiens
  misc_RNA (1)...(19): siRNA sense strand
guacugaguuguuucgaau

SEQ ID NO: 1884531 - RNA, 19 nt, Homo sapiens
  misc_RNA (1)...(19): siRNA sense strand
gaaguugacauaccucauu

SEQ ID NO: 1884532 - RNA, 19 nt, Homo sapiens
  misc_RNA (1)...(19): siRNA sense strand
gaaaagaaagccccaauaa

SEQ ID NO: 1884533 - RNA, 19 nt, Homo sapiens
  misc_RNA (1)...(19): siRNA sense strand
ccauuucagugucauauuu

SEQ ID NO: 1884534 - RNA, 19 nt, Homo sapiens
  misc_RNA (1)...(19): siRNA sense strand
ccagaagauuuagaaguua

SEQ ID NO: 1884535 - RNA, 19 nt, Homo sapiens
  misc_RNA (1)...(19): siRNA sense strand
caacucagaucaagugaag

SEQ ID NO: 1884536 - RNA, 19 nt, Homo sapiens
  misc_RNA (1)...(19): siRNA sense strand
cggaggaagucaauaaauu

SEQ ID NO: 1884537 - RNA, 19 nt, Homo sapiens
  misc_RNA (1)...(19): siRNA sense strand
caagaggaaugcagaaaca

SEQ ID NO: 1884538 - RNA, 19 nt, Homo sapiens
  misc_RNA (1)...(19): siRNA sense strand
uuacaaaccuaugggauuu

SEQ ID NO: 1884539 - RNA, 19 nt, Homo sapiens
  misc_RNA (1)...(19): siRNA sense strand
gggaaauacauucagauua

SEQ ID NO: 1884540 - RNA, 19 nt, Homo sapiens
  misc_RNA (1)...(19): siRNA sense strand
ggagaaagacaaagcaaga

SEQ ID NO: 1884541 - RNA, 19 nt, Homo sapiens
  misc_RNA (1)...(19): siRNA sense strand
ucaggaaagugaagagaaa

SEQ ID NO: 1884542 - RNA, 19 nt, Homo sapiens
  misc_RNA (1)...(19): siRNA sense strand
aauaguagcugaaacaaca

SEQ ID NO: 1884543 - RNA, 19 nt, Homo sapiens
  misc_RNA (1)...(19): siRNA sense strand
cuacuuaaccaaacugaua

SEQ ID NO: 1884544 - RNA, 19 nt, Homo sapiens
  misc_RNA (1)...(19): siRNA sense strand
ugucggaggucucaucuuu

SEQ ID NO: 1884545 - RNA, 19 nt, Homo sapiens
  misc_RNA (1)...(19): siRNA sense strand
uaugcaggauguauuguua

SEQ ID NO: 1884546 - RNA, 19 nt, Homo sapiens
  misc_RNA (1)...(19): siRNA sense strand
guacuagacaucauuugua

SEQ ID NO: 1884547 - RNA, 19 nt, Homo sapiens
  misc_RNA (1)...(19): siRNA sense strand
gcaaguguauauuguucuu

SEQ ID NO: 1884548 - RNA, 19 nt, Homo sapiens
  misc_RNA (1)...(19): siRNA sense strand
ggaccuuccuuucugcaaa

SEQ ID NO: 1884549 - RNA, 19 nt, Homo sapiens
  misc_RNA (1)...(19): siRNA sense strand
caacaaagaacaguuaugu

SEQ ID NO: 1884550 - RNA, 19 nt, Homo sapiens
  misc_RNA (1)...(19): siRNA sense strand
guacagaggauaccauguu

SEQ ID NO: 1884551 - RNA, 19 nt, Homo sapiens
  misc_RNA (1)...(19): siRNA sense strand
cagaaaaccugaaagaaaa

SEQ ID NO: 1884552 - RNA, 19 nt, Homo sapiens
  misc_RNA (1)...(19): siRNA sense strand
agaaaucagugaaacuuga

SEQ ID NO: 1884553 - RNA, 19 nt, Homo sapiens
  misc_RNA (1)...(19): siRNA sense strand
ggagcgcugucgucaguuu

SEQ ID NO: 1884554 - RNA, 19 nt, Homo sapiens
  misc_RNA (1)...(19): siRNA sense strand
aaucccaccuuuaauagua

SEQ ID NO: 1884555 - RNA, 19 nt, Homo sapiens
  misc_RNA (1)...(19): siRNA sense strand
gccagaaaguagcaaauga

SEQ ID NO: 1884556 - RNA, 19 nt, Homo sapiens
  misc_RNA (1)...(19): siRNA sense strand
ggaacagcauaauauugaa

SEQ ID NO: 1884557 - RNA, 19 nt, Homo sapiens
  misc_RNA (1)...(19): siRNA sense strand
aauaaacgcuuccuguguu

SEQ ID NO: 1884558 - RNA, 19 nt, Homo sapiens
  misc_RNA (1)...(19): siRNA sense strand
caucagaacauauugugua

SEQ ID NO: 1884559 - RNA, 19 nt, Homo sapiens
  misc_RNA (1)...(19): siRNA sense strand
aaacacaccuuaggauuca

SEQ ID NO: 1884560 - RNA, 19 nt, Homo sapiens
  misc_RNA (1)...(19): siRNA sense strand
gcaacuuccuuggcuguaa

SEQ ID NO: 1884561 - RNA, 19 nt, Homo sapiens
  misc_RNA (1)...(19): siRNA sense strand
gaaggcaucaguuuguaaa

SEQ ID NO: 1884562 - RNA, 19 nt, Homo sapiens
  misc_RNA (1)...(19): siRNA sense strand
gcagauuaguacugaguug

SEQ ID NO: 1884563 - RNA, 19 nt, Homo sapiens
  misc_RNA (1)...(19): siRNA sense strand
gggaacuugucaaauguaa

SEQ ID NO: 1884564 - RNA, 19 nt, Homo sapiens
  misc_RNA (1)...(19): siRNA sense strand
aaaccacacugucauccua

SEQ ID NO: 1884565 - RNA, 19 nt, Homo sapiens
  misc_RNA (1)...(19): siRNA sense strand
ugacagagcaacucacaaa

SEQ ID NO: 1884566 - RNA, 19 nt, Homo sapiens
  misc_RNA (1)...(19): siRNA sense strand
aaucaccucucaaugcaua

SEQ ID NO: 1884567 - RNA, 19 nt, Homo sapiens
  misc_RNA (1)...(19): siRNA sense strand
gauuaguacugaguuguuu

SEQ ID NO: 1884568 - RNA, 19 nt, Homo sapiens
  misc_RNA (1)...(19): siRNA sense strand
gaaugacagugaaccugaa

SEQ ID NO: 1884569 - RNA, 19 nt, Homo sapiens
  misc_RNA (1)...(19): siRNA sense strand
uggagaaucuuguuguuug

SEQ ID NO: 1884570 - RNA, 19 nt, Homo sapiens
  misc_RNA (1)...(19): siRNA sense strand
gauggagaaucuuguuguu

SEQ ID NO: 1884571 - RNA, 19 nt, Homo sapiens
  misc_RNA (1)...(19): siRNA sense strand
gaaugcaucagaacauauu

SEQ ID NO: 1884572 - RNA, 19 nt, Homo sapiens
  misc_RNA (1)...(19): siRNA sense strand
cuaaaggaaaucuguguua

SEQ ID NO: 1884573 - RNA, 19 nt, Homo sapiens
  misc_RNA (1)...(19): siRNA sense strand
gaacauaaucagacaacug

SEQ ID NO: 1884574 - RNA, 19 nt, Homo sapiens
  misc_RNA (1)...(19): siRNA sense strand
caggauguauuguuaucua

SEQ ID NO: 1884575 - RNA, 19 nt, Homo sapiens
  misc_RNA (1)...(19): siRNA sense strand
cuagaucacucugaaacua

SEQ ID NO: 1884576 - RNA, 19 nt, Homo sapiens
  misc_RNA (1)...(19): siRNA sense strand
caacuuccuuggcuguaaa

SEQ ID NO: 1884577 - RNA, 19 nt, Homo sapiens
  misc_RNA (1)...(19): siRNA sense strand
gaagaagagauuugacaga

SEQ ID NO: 1884578 - RNA, 19 nt, Homo sapiens
  misc_RNA (1)...(19): siRNA sense strand
ggacaagaagccucagauu

SEQ ID NO: 1884579 - RNA, 19 nt, Homo sapiens
  misc_RNA (1)...(19): siRNA sense strand
aaacggaggaagucaauaa

SEQ ID NO: 1884580 - RNA, 19 nt, Homo sapiens
  misc_RNA (1)...(19): siRNA sense strand
cuacaaauauugguucaug

SEQ ID NO: 1884581 - RNA, 19 nt, Homo sapiens
  misc_RNA (1)...(19): siRNA sense strand
gcaaggaaguacuagacau

SEQ ID NO: 1884582 - RNA, 19 nt, Homo sapiens
  misc_RNA (1)...(19): siRNA sense strand
cuagaacaguguaauauag

SEQ ID NO: 1884583 - RNA, 19 nt, Homo sapiens
  misc_RNA (1)...(19): siRNA sense strand
agaaagcagcucaguauuu

SEQ ID NO: 1884584 - RNA, 19 nt, Homo sapiens
  misc_RNA (1)...(19): siRNA sense strand
gagcaacucacaaacuauu

SEQ ID NO: 1884585 - RNA, 19 nt, Homo sapiens
  misc_RNA (1)...(19): siRNA sense strand
gaaggucuagaucacaaua

SEQ ID NO: 1884586 - RNA, 19 nt, Homo sapiens
  misc_RNA (1)...(19): siRNA sense strand
cagaacauauuguguaucu

SEQ ID NO: 1884587 - RNA, 19 nt, Homo sapiens
  misc_RNA (1)...(19): siRNA sense strand
gcaacaagaaugcaucaga

SEQ ID NO: 1884588 - RNA, 19 nt, Homo sapiens
  misc_RNA (1)...(19): siRNA sense strand
ugacugcaaucccaccuuu

SEQ ID NO: 1884589 - RNA, 19 nt, Homo sapiens
  misc_RNA (1)...(19): siRNA sense strand
gaucaaagaaucagaaacu

SEQ ID NO: 1884590 - RNA, 19 nt, Homo sapiens
  misc_RNA (1)...(19): siRNA sense strand
gaagcagaucccuguauaa

SEQ ID NO: 1884591 - RNA, 19 nt, Homo sapiens
  misc_RNA (1)...(19): siRNA sense strand
uaaccuagaccauauugaa

SEQ ID NO: 1884592 - RNA, 19 nt, Homo sapiens
  misc_RNA (1)...(19): siRNA sense strand
gcagaaaaccugaaagaaa

SEQ ID NO: 1884593 - RNA, 19 nt, Homo sapiens
  misc_RNA (1)...(19): siRNA sense strand
ccaugaagcacaacacuuu

SEQ ID NO: 1884594 - RNA, 19 nt, Homo sapiens
  misc_RNA (1)...(19): siRNA sense strand
uaucagagguggcuucagu

SEQ ID NO: 1884595 - RNA, 19 nt, Homo sapiens
  misc_RNA (1)...(19): siRNA sense strand
gaaguacuagacaucauuu

SEQ ID NO: 1884596 - RNA, 19 nt, Homo sapiens
  misc_RNA (1)...(19): siRNA sense strand
ggaaguacuagacaucauu

SEQ ID NO: 1884597 - RNA, 19 nt, Homo sapiens
  misc_RNA (1)...(19): siRNA sense strand
aaacccaguucuucuuaaa

SEQ ID NO: 1884598 - RNA, 19 nt, Homo sapiens
  misc_RNA (1)...(19): siRNA sense strand
ugaagagccuaaaguacuu

SEQ ID NO: 1884599 - RNA, 19 nt, Homo sapiens
  misc_RNA (1)...(19): siRNA sense strand
gcacagaacacagccauuc

SEQ ID NO: 1884600 - RNA, 19 nt, Homo sapiens
  misc_RNA (1)...(19): siRNA sense strand
ggaagacgcuugaagagaa

SEQ ID NO: 1884601 - RNA, 19 nt, Homo sapiens
  misc_RNA (1)...(19): siRNA sense strand
ggaagaaguucgaugauga

SEQ ID NO: 1884602 - RNA, 19 nt, Homo sapiens
  misc_RNA (1)...(19): siRNA sense strand
gaugaugacugguugaaga

SEQ ID NO: 1884603 - RNA, 19 nt, Homo sapiens
  misc_RNA (1)...(19): siRNA sense strand
caucacagauauucagauu

SEQ ID NO: 1884604 - RNA, 19 nt, Homo sapiens
  misc_RNA (1)...(19): siRNA sense strand
ggaaguggacgacaaaguu

SEQ ID NO: 1884605 - RNA, 19 nt, Homo sapiens
  misc_RNA (1)...(19): siRNA sense strand
gcucaaauccucaggugua

SEQ ID NO: 1884606 - RNA, 19 nt, Homo sapiens
  misc_RNA (1)...(19): siRNA sense strand
ccaaaccaaugagaauuaa

SEQ ID NO: 1884607 - RNA, 19 nt, Homo sapiens
  misc_RNA (1)...(19): siRNA sense strand
guacauggacaucaagauu

SEQ ID NO: 1884608 - RNA, 19 nt, Homo sapiens
  misc_RNA (1)...(19): siRNA sense strand
gccaaaccaaugagaauua

SEQ ID NO: 1884609 - RNA, 19 nt, Homo sapiens
  misc_RNA (1)...(19): siRNA sense strand
gaagacgcuugaagagaau

SEQ ID NO: 1884610 - RNA, 19 nt, Homo sapiens
  misc_RNA (1)...(19): siRNA sense strand
gcaagcaugugguguuugg

SEQ ID NO: 1884611 - RNA, 19 nt, Homo sapiens
  misc_RNA (1)...(19): siRNA sense strand
gggaagaaguucgaugaug

SEQ ID NO: 1884612 - RNA, 19 nt, Homo sapiens
  misc_RNA (1)...(19): siRNA sense strand
gaagaaguucgaugaugaa

SEQ ID NO: 1884613 - RNA, 19 nt, Homo sapiens
  misc_RNA (1)...(19): siRNA sense strand
ggacguacaauucguguca

SEQ ID NO: 1884614 - RNA, 19 nt, Homo sapiens
  misc_RNA (1)...(19): siRNA sense strand
cgacaaaguucuucaugcu

SEQ ID NO: 1884615 - RNA, 19 nt, Homo sapiens
  misc_RNA (1)...(19): siRNA sense strand
ggagacaucacagauauuc

SEQ ID NO: 1884616 - RNA, 19 nt, Homo sapiens
  misc_RNA (1)...(19): siRNA sense strand
gcaaggacgggaagccaaa

SEQ ID NO: 1884617 - RNA, 19 nt, Homo sapiens
  misc_RNA (1)...(19): siRNA sense strand
ugaagagaauaaagaggaa

SEQ ID NO: 1884618 - RNA, 19 nt, Homo sapiens
  misc_RNA (1)...(19): siRNA sense strand
ucacagauauucagauucc

SEQ ID NO: 1884619 - RNA, 19 nt, Homo sapiens
  misc_RNA (1)...(19): siRNA sense strand
cagaggaaguggacgacaa

SEQ ID NO: 1884620 - RNA, 19 nt, Homo sapiens
  misc_RNA (1)...(19): siRNA sense strand
agauuccucuggauuauga

SEQ ID NO: 1884621 - RNA, 19 nt, Homo sapiens
  misc_RNA (1)...(19): siRNA sense strand
ggucagagccucccaaagc

SEQ ID NO: 1884622 - RNA, 19 nt, Homo sapiens
  misc_RNA (1)...(19): siRNA sense strand
gcagcuaucgacaacauga

SEQ ID NO: 1884623 - RNA, 19 nt, Homo sapiens
  misc_RNA (1)...(19): siRNA sense strand
gaaguucgaugaugaaaac

SEQ ID NO: 1884624 - RNA, 19 nt, Homo sapiens
  misc_RNA (1)...(19): siRNA sense strand
gaaguggacgacaaaguuc

SEQ ID NO: 1884625 - RNA, 19 nt, Homo sapiens
  misc_RNA (1)...(19): siRNA sense strand
cagcagcuaucgacaacau

SEQ ID NO: 1884626 - RNA, 19 nt, Homo sapiens
  misc_RNA (1)...(19): siRNA sense strand
caauggcucucaguucuuc

SEQ ID NO: 1884627 - RNA, 19 nt, Homo sapiens
  misc_RNA (1)...(19): siRNA sense strand
gaaaagcaccgaggauuug

SEQ ID NO: 1884628 - RNA, 19 nt, Homo sapiens
  misc_RNA (1)...(19): siRNA sense strand
agggagagcccauugcuaa

SEQ ID NO: 1884629 - RNA, 19 nt, Homo sapiens
  misc_RNA (1)...(19): siRNA sense strand
gaugacugguugaagaagu

SEQ ID NO: 1884630 - RNA, 19 nt, Homo sapiens
  misc_RNA (1)...(19): siRNA sense strand
uuggagacaucacagauau

SEQ ID NO: 1884631 - RNA, 19 nt, Homo sapiens
  misc_RNA (1)...(19): siRNA sense strand
uggcaagcaugugguguuu

SEQ ID NO: 1884632 - RNA, 19 nt, Homo sapiens
  misc_RNA (1)...(19): siRNA sense strand
gggaagacgcuugaagaga

SEQ ID NO: 1884633 - RNA, 19 nt, Homo sapiens
  misc_RNA (1)...(19): siRNA sense strand
ugacaugugacaagacaga

SEQ ID NO: 1884634 - RNA, 19 nt, Homo sapiens
  misc_RNA (1)...(19): siRNA sense strand
gagggagagcccauugcua

SEQ ID NO: 1884635 - RNA, 19 nt, Homo sapiens
  misc_RNA (1)...(19): siRNA sense strand
gggagagcccauugcuaaa

SEQ ID NO: 1884636 - RNA, 19 nt, Homo sapiens
  misc_RNA (1)...(19): siRNA sense strand
ccaguuuggucagaugaug

SEQ ID NO: 1884637 - RNA, 19 nt, Homo sapiens
  misc_RNA (1)...(19): siRNA sense strand
guucgaugaugaaaacuuu

SEQ ID NO: 1884638 - RNA, 19 nt, Homo sapiens
  misc_RNA (1)...(19): siRNA sense strand
ccaugacagcagagaauuu

SEQ ID NO: 1884639 - RNA, 19 nt, Homo sapiens
  misc_RNA (1)...(19): siRNA sense strand
ucgacaacaugaaugaauc

SEQ ID NO: 1884640 - RNA, 19 nt, Homo sapiens
  misc_RNA (1)...(19): siRNA sense strand
caaagcagaaggugaucau

SEQ ID NO: 1884641 - RNA, 19 nt, Homo sapiens
  misc_RNA (1)...(19): siRNA sense strand
ccgaaggccuagaugucuu

SEQ ID NO: 1884642 - RNA, 19 nt, Homo sapiens
  misc_RNA (1)...(19): siRNA sense strand
ccugacaugugacaagaca

SEQ ID NO: 1884643 - RNA, 19 nt, Homo sapiens
  misc_RNA (1)...(19): siRNA sense strand
ggccaaaccaaugagaauu

SEQ ID NO: 1884644 - RNA, 19 nt, Homo sapiens
  misc_RNA (1)...(19): siRNA sense strand
caaauccucagguguacau

SEQ ID NO: 1884645 - RNA, 19 nt, Homo sapiens
  misc_RNA (1)...(19): siRNA sense strand
gucagagccucccaaagca

SEQ ID NO: 1884646 - RNA, 19 nt, Homo sapiens
  misc_RNA (1)...(19): siRNA sense strand
gcaccgaggauuugcuuuu

SEQ ID NO: 1884647 - RNA, 19 nt, Homo sapiens
  misc_RNA (1)...(19): siRNA sense strand
acauggacaucaagauugg

SEQ ID NO: 1884648 - RNA, 19 nt, Homo sapiens
  misc_RNA (1)...(19): siRNA sense strand
ggacgacaaaguucuucau

SEQ ID NO: 1884649 - RNA, 19 nt, Homo sapiens
  misc_RNA (1)...(19): siRNA sense strand
gcccaugacagcagagaau

SEQ ID NO: 1884650 - RNA, 19 nt, Homo sapiens
  misc_RNA (1)...(19): siRNA sense strand
gacgacaaaguucuucaug

SEQ ID NO: 1884651 - RNA, 19 nt, Homo sapiens
  misc_RNA (1)...(19): siRNA sense strand
caagacagacuggcuggau

SEQ ID NO: 1884652 - RNA, 19 nt, Homo sapiens
  misc_RNA (1)...(19): siRNA sense strand
aacuuuauccucaagcaua

SEQ ID NO: 1884653 - RNA, 19 nt, Homo sapiens
  misc_RNA (1)...(19): siRNA sense strand
acaucaagauugggaacaa

SEQ ID NO: 1884654 - RNA, 19 nt, Homo sapiens
  misc_RNA (1)...(19): siRNA sense strand
caugacagcagagaauuuc

SEQ ID NO: 1884655 - RNA, 19 nt, Homo sapiens
  misc_RNA (1)...(19): siRNA sense strand
agaggaaguggacgacaaa

SEQ ID NO: 1884656 - RNA, 19 nt, Homo sapiens
  misc_RNA (1)...(19): siRNA sense strand
uacauggacaucaagauug

SEQ ID NO: 1884657 - RNA, 19 nt, Homo sapiens
  misc_RNA (1)...(19): siRNA sense strand
augcugcguucauuccuuu

SEQ ID NO: 1884658 - RNA, 19 nt, Homo sapiens
  misc_RNA (1)...(19): siRNA sense strand
accaauggcucucaguucu

SEQ ID NO: 1884659 - RNA, 19 nt, Homo sapiens
  misc_RNA (1)...(19): siRNA sense strand
caucaagauugggaacaag

SEQ ID NO: 1884660 - RNA, 19 nt, Homo sapiens
  misc_RNA (1)...(19): siRNA sense strand
gagaauaaagaggaagaag

SEQ ID NO: 1884661 - RNA, 19 nt, Homo sapiens
  misc_RNA (1)...(19): siRNA sense strand
augaaugaaucugagcuuu

SEQ ID NO: 1884662 - RNA, 19 nt, Homo sapiens
  misc_RNA (1)...(19): siRNA sense strand
ggagagcccauugcuaaaa

SEQ ID NO: 1884663 - RNA, 19 nt, Homo sapiens
  misc_RNA (1)...(19): siRNA sense strand
cgaaggccuagaugucuug

SEQ ID NO: 1884664 - RNA, 19 nt, Homo sapiens
  misc_RNA (1)...(19): siRNA sense strand
gcuccugcguucugauguc

SEQ ID NO: 1884665 - RNA, 19 nt, Homo sapiens
  misc_RNA (1)...(19): siRNA sense strand
aaaccaaugagaauuaagg

SEQ ID NO: 1884666 - RNA, 19 nt, Homo sapiens
  misc_RNA (1)...(19): siRNA sense strand
ggucaccgaaggccuagau

SEQ ID NO: 1884667 - RNA, 19 nt, Homo sapiens
  misc_RNA (1)...(19): siRNA sense strand
caugcugcguucauuccuu

SEQ ID NO: 1884668 - RNA, 19 nt, Homo sapiens
  misc_RNA (1)...(19): siRNA sense strand
gacaucacagauauucaga

SEQ ID NO: 1884669 - RNA, 19 nt, Homo sapiens
  misc_RNA (1)...(19): siRNA sense strand
gcucuuccaggccaguuug

SEQ ID NO: 1884670 - RNA, 19 nt, Homo sapiens
  misc_RNA (1)...(19): siRNA sense strand
ggaagccaaagcagaaggu

SEQ ID NO: 1884671 - RNA, 19 nt, Homo sapiens
  misc_RNA (1)...(19): siRNA sense strand
ccaauggcucucaguucuu

SEQ ID NO: 1884672 - RNA, 19 nt, Homo sapiens
  misc_RNA (1)...(19): siRNA sense strand
ucugaugucgugcccauga

SEQ ID NO: 1884673 - RNA, 19 nt, Homo sapiens
  misc_RNA (1)...(19): siRNA sense strand
ggagggagagcccauugcu

SEQ ID NO: 1884674 - RNA, 19 nt, Homo sapiens
  misc_RNA (1)...(19): siRNA sense strand
caacuucucugaacauugc

SEQ ID NO: 1884675 - RNA, 19 nt, Homo sapiens
  misc_RNA (1)...(19): siRNA sense strand
gcagguccaaucccauuua

SEQ ID NO: 1884676 - RNA, 19 nt, Homo sapiens
  misc_RNA (1)...(19): siRNA sense strand
gguaaccucugccugaugu

SEQ ID NO: 1884677 - RNA, 19 nt, Homo sapiens
  misc_RNA (1)...(19): siRNA sense strand
ggcaucagcucaucaucaa

SEQ ID NO: 1884678 - RNA, 19 nt, Homo sapiens
  misc_RNA (1)...(19): siRNA sense strand
gagacccucugcaagaugu

SEQ ID NO: 1884679 - RNA, 19 nt, Homo sapiens
  misc_RNA (1)...(19): siRNA sense strand
ggagaggcaucagcucauc

SEQ ID NO: 1884680 - RNA, 19 nt, Homo sapiens
  misc_RNA (1)...(19): siRNA sense strand
cagguccaaucccauuuaa

SEQ ID NO: 1884681 - RNA, 19 nt, Homo sapiens
  misc_RNA (1)...(19): siRNA sense strand
gaaccucaucuucuuagug

SEQ ID NO: 1884682 - RNA, 19 nt, Homo sapiens
  misc_RNA (1)...(19): siRNA sense strand
cggauaagguggucuguac

SEQ ID NO: 1884683 - RNA, 19 nt, Homo sapiens
  misc_RNA (1)...(19): siRNA sense strand
ccaacagcauccuggagaa

SEQ ID NO: 1884684 - RNA, 19 nt, Homo sapiens
  misc_RNA (1)...(19): siRNA sense strand
ccauacaacuucucugaac

SEQ ID NO: 1884685 - RNA, 19 nt, Homo sapiens
  misc_RNA (1)...(19): siRNA sense strand
ccaccugugucaacccauu

SEQ ID NO: 1884686 - RNA, 19 nt, Homo sapiens
  misc_RNA (1)...(19): siRNA sense strand
gugcucaucugggucauug

SEQ ID NO: 1884687 - RNA, 19 nt, Homo sapiens
  misc_RNA (1)...(19): siRNA sense strand
uggaguuccuggcggauaa

SEQ ID NO: 1884688 - RNA, 19 nt, Homo sapiens
  misc_RNA (1)...(19): siRNA sense strand
gagcugggcacaugaagca

SEQ ID NO: 1884689 - RNA, 19 nt, Homo sapiens
  misc_RNA (1)...(19): siRNA sense strand
aaccucaucuucuuagugu

SEQ ID NO: 1884690 - RNA, 19 nt, Homo sapiens
  misc_RNA (1)...(19): siRNA sense strand
caacgugaccaaccugcuu

SEQ ID NO: 1884691 - RNA, 19 nt, Homo sapiens
  misc_RNA (1)...(19): siRNA sense strand
cauacaacuucucugaaca

SEQ ID NO: 1884692 - RNA, 19 nt, Homo sapiens
  misc_RNA (1)...(19): siRNA sense strand
gcacaugaagcaggucaau

SEQ ID NO: 1884693 - RNA, 19 nt, Homo sapiens
  misc_RNA (1)...(19): siRNA sense strand
auacggaagucuccaaagg

SEQ ID NO: 1884694 - RNA, 19 nt, Homo sapiens
  misc_RNA (1)...(19): siRNA sense strand
gcuucaucuuggucuguua

SEQ ID NO: 1884695 - RNA, 19 nt, Homo sapiens
  misc_RNA (1)...(19): siRNA sense strand
ugucaacccauucaucuau

SEQ ID NO: 1884696 - RNA, 19 nt, Homo sapiens
  misc_RNA (1)...(19): siRNA sense strand
ggaaccucaucuucuuagu

SEQ ID NO: 1884697 - RNA, 19 nt, Homo sapiens
  misc_RNA (1)...(19): siRNA sense strand
ggagaaugucuuccacaag

SEQ ID NO: 1884698 - RNA, 19 nt, Homo sapiens
  misc_RNA (1)...(19): siRNA sense strand
ggacuacuggaucuuugga

SEQ ID NO: 1884699 - RNA, 19 nt, Homo sapiens
  misc_RNA (1)...(19): siRNA sense strand
ccaaggcucuggaguuccu

SEQ ID NO: 1884700 - RNA, 19 nt, Homo sapiens
  misc_RNA (1)...(19): siRNA sense strand
uacaacuucucugaacauu

SEQ ID NO: 1884701 - RNA, 19 nt, Homo sapiens
  misc_RNA (1)...(19): siRNA sense strand
cuaaguggcagguccaauc

SEQ ID NO: 1884702 - RNA, 19 nt, Homo sapiens
  misc_RNA (1)...(19): siRNA sense strand
acagcauccuggagaaugu

SEQ ID NO: 1884703 - RNA, 19 nt, Homo sapiens
  misc_RNA (1)...(19): siRNA sense strand
caacagcauccuggagaau

SEQ ID NO: 1884704 - RNA, 19 nt, Homo sapiens
  misc_RNA (1)...(19): siRNA sense strand
gucaacccauucaucuaug

SEQ ID NO: 1884705 - RNA, 19 nt, Homo sapiens
  misc_RNA (1)...(19): siRNA sense strand
ucugaacauugccaggauu

SEQ ID NO: 1884706 - RNA, 19 nt, Homo sapiens
  misc_RNA (1)...(19): siRNA sense strand
ccacaguacauacggaagu

SEQ ID NO: 1884707 - RNA, 19 nt, Homo sapiens
  misc_RNA (1)...(19): siRNA sense strand
ccaccuuccugcuccucuu

SEQ ID NO: 1884708 - RNA, 19 nt, Homo sapiens
  misc_RNA (1)...(19): siRNA sense strand
ucucugacuuccucaugug

SEQ ID NO: 1884709 - RNA, 19 nt, Homo sapiens
  misc_RNA (1)...(19): siRNA sense strand
gggaaccucaucuucuuag

SEQ ID NO: 1884710 - RNA, 19 nt, Homo sapiens
  misc_RNA (1)...(19): siRNA sense strand
uggccuugcugcucccaaa

SEQ ID NO: 1884711 - RNA, 19 nt, Homo sapiens
  misc_RNA (1)...(19): siRNA sense strand
ucaacaccaacuucaagaa

SEQ ID NO: 1884712 - RNA, 19 nt, Homo sapiens
  misc_RNA (1)...(19): siRNA sense strand
gcggauaagguggucugua

SEQ ID NO: 1884713 - RNA, 19 nt, Homo sapiens
  misc_RNA (1)...(19): siRNA sense strand
uacuggaucuuuggagaga

SEQ ID NO: 1884714 - RNA, 19 nt, Homo sapiens
  misc_RNA (1)...(19): siRNA sense strand
augggaaccucaucuucuu

SEQ ID NO: 1884715 - RNA, 19 nt, Homo sapiens
  misc_RNA (1)...(19): siRNA sense strand
gcucaccaccgcaccaucu

SEQ ID NO: 1884716 - RNA, 19 nt, Homo sapiens
  misc_RNA (1)...(19): siRNA sense strand
ccgcugaccuccgucuaca

SEQ ID NO: 1884717 - RNA, 19 nt, Homo sapiens
  misc_RNA (1)...(19): siRNA sense strand
caugggaaccucaucuucu

SEQ ID NO: 1884718 - RNA, 19 nt, Homo sapiens
  misc_RNA (1)...(19): siRNA sense strand
ggaagacuggcaccaugag

SEQ ID NO: 1884719 - RNA, 19 nt, Homo sapiens
  misc_RNA (1)...(19): siRNA sense strand
cauggacuacuggaucuuu

SEQ ID NO: 1884720 - RNA, 19 nt, Homo sapiens
  misc_RNA (1)...(19): siRNA sense strand
ggaagcccagcaucucaca

SEQ ID NO: 1884721 - RNA, 19 nt, Homo sapiens
  misc_RNA (1)...(19): siRNA sense strand
ugggaaccucaucuucuua

SEQ ID NO: 1884722 - RNA, 19 nt, Homo sapiens
  misc_RNA (1)...(19): siRNA sense strand
gaauugaacagcacuauuu

SEQ ID NO: 1884723 - RNA, 19 nt, Homo sapiens
  misc_RNA (1)...(19): siRNA sense strand
gaaaucaaguaguaucaga

SEQ ID NO: 1884724 - RNA, 19 nt, Homo sapiens
  misc_RNA (1)...(19): siRNA sense strand
gaacacaaccguauuucuu

SEQ ID NO: 1884725 - RNA, 19 nt, Homo sapiens
  misc_RNA (1)...(19): siRNA sense strand
ccacacaauugacaaauga

SEQ ID NO: 1884726 - RNA, 19 nt, Homo sapiens
  misc_RNA (1)...(19): siRNA sense strand
aaugaaagcuuacauggaa

SEQ ID NO: 1884727 - RNA, 19 nt, Homo sapiens
  misc_RNA (1)...(19): siRNA sense strand
gaauauaugucuccaucug

SEQ ID NO: 1884728 - RNA, 19 nt, Homo sapiens
  misc_RNA (1)...(19): siRNA sense strand
ccaauaguccaauuuguua

SEQ ID NO: 1884729 - RNA, 19 nt, Homo sapiens
  misc_RNA (1)...(19): siRNA sense strand
gcagaaccuuggccugaaa

SEQ ID NO: 1884730 - RNA, 19 nt, Homo sapiens
  misc_RNA (1)...(19): siRNA sense strand
gaagucaaacguaagauga

SEQ ID NO: 1884731 - RNA, 19 nt, Homo sapiens
  misc_RNA (1)...(19): siRNA sense strand
gccaagggccauucucuua

SEQ ID NO: 1884732 - RNA, 19 nt, Homo sapiens
  misc_RNA (1)...(19): siRNA sense strand
ucaauaagcagccuacuga

SEQ ID NO: 1884733 - RNA, 19 nt, Homo sapiens
  misc_RNA (1)...(19): siRNA sense strand
gaaaggggagcaaauuuua

SEQ ID NO: 1884734 - RNA, 19 nt, Homo sapiens
  misc_RNA (1)...(19): siRNA sense strand
gaacuugacgcacugguau

SEQ ID NO: 1884735 - RNA, 19 nt, Homo sapiens
  misc_RNA (1)...(19): siRNA sense strand
ggaauuagucaacaauaug

SEQ ID NO: 1884736 - RNA, 19 nt, Homo sapiens
  misc_RNA (1)...(19): siRNA sense strand
guaaaggcaggcugucaua

SEQ ID NO: 1884737 - RNA, 19 nt, Homo sapiens
  misc_RNA (1)...(19): siRNA sense strand
gggcaaaugcagaauauau

SEQ ID NO: 1884738 - RNA, 19 nt, Homo sapiens
  misc_RNA (1)...(19): siRNA sense strand
cugcagagcuguaucuuca

SEQ ID NO: 1884739 - RNA, 19 nt, Homo sapiens
  misc_RNA (1)...(19): siRNA sense strand
ugugggaaaucaaguagua

SEQ ID NO: 1884740 - RNA, 19 nt, Homo sapiens
  misc_RNA (1)...(19): siRNA sense strand
gcaaaugcagaauauaugu

SEQ ID NO: 1884741 - RNA, 19 nt, Homo sapiens
  misc_RNA (1)...(19): siRNA sense strand
gaacagcacuauuuugaag

SEQ ID NO: 1884742 - RNA, 19 nt, Homo sapiens
  misc_RNA (1)...(19): siRNA sense strand
gaaagcuuacauggaauua

SEQ ID NO: 1884743 - RNA, 19 nt, Homo sapiens
  misc_RNA (1)...(19): siRNA sense strand
caaaugaugaacuuucuga

SEQ ID NO: 1884744 - RNA, 19 nt, Homo sapiens
  misc_RNA (1)...(19): siRNA sense strand
gacaaaugaugaacuuucu

SEQ ID NO: 1884745 - RNA, 19 nt, Homo sapiens
  misc_RNA (1)...(19): siRNA sense strand
gcagagcuguaucuucagu

SEQ ID NO: 1884746 - RNA, 19 nt, Homo sapiens
  misc_RNA (1)...(19): siRNA sense strand
caucuauacaccauucuua

SEQ ID NO: 1884747 - RNA, 19 nt, Homo sapiens
  misc_RNA (1)...(19): siRNA sense strand
gaucacucaugcuagguau

SEQ ID NO: 1884748 - RNA, 19 nt, Homo sapiens
  misc_RNA (1)...(19): siRNA sense strand
uagggcaaaugcagaauau

SEQ ID NO: 1884749 - RNA, 19 nt, Homo sapiens
  misc_RNA (1)...(19): siRNA sense strand
aaacguaagaugaaagcua

SEQ ID NO: 1884750 - RNA, 19 nt, Homo sapiens
  misc_RNA (1)...(19): siRNA sense strand
ggaagucaaacguaagaug

SEQ ID NO: 1884751 - RNA, 19 nt, Homo sapiens
  misc_RNA (1)...(19): siRNA sense strand
gugaugggcuggaggaagu

SEQ ID NO: 1884752 - RNA, 19 nt, Homo sapiens
  misc_RNA (1)...(19): siRNA sense strand
caagggccauucucuuagu

SEQ ID NO: 1884753 - RNA, 19 nt, Homo sapiens
  misc_RNA (1)...(19): siRNA sense strand
guagggcaaaugcagaaua

SEQ ID NO: 1884754 - RNA, 19 nt, Homo sapiens
  misc_RNA (1)...(19): siRNA sense strand
uaucuucaguggugugaug

SEQ ID NO: 1884755 - RNA, 19 nt, Homo sapiens
  misc_RNA (1)...(19): siRNA sense strand
caaccuccuugcuuucugu

SEQ ID NO: 1884756 - RNA, 19 nt, Homo sapiens
  misc_RNA (1)...(19): siRNA sense strand
uaagcagccuacugaacuu

SEQ ID NO: 1884757 - RNA, 19 nt, Homo sapiens
  misc_RNA (1)...(19): siRNA sense strand
aagcuuacauggaauuagu

SEQ ID NO: 1884758 - RNA, 19 nt, Homo sapiens
  misc_RNA (1)...(19): siRNA sense strand
ugacaaaugaugaacuuuc

SEQ ID NO: 1884759 - RNA, 19 nt, Homo sapiens
  misc_RNA (1)...(19): siRNA sense strand
ggccaucuauacaccauuc

SEQ ID NO: 1884760 - RNA, 19 nt, Homo sapiens
  misc_RNA (1)...(19): siRNA sense strand
gucaagcucucucucaaag

SEQ ID NO: 1884761 - RNA, 19 nt, Homo sapiens
  misc_RNA (1)...(19): siRNA sense strand
aacguaagaugaaagcuau

SEQ ID NO: 1884762 - RNA, 19 nt, Homo sapiens
  misc_RNA (1)...(19): siRNA sense strand
caagcucucucucaaagac

SEQ ID NO: 1884763 - RNA, 19 nt, Homo sapiens
  misc_RNA (1)...(19): siRNA sense strand
gacaaugcagcuucucuug

SEQ ID NO: 1884764 - RNA, 19 nt, Homo sapiens
  misc_RNA (1)...(19): siRNA sense strand
acacaaccguauuucuuca

SEQ ID NO: 1884765 - RNA, 19 nt, Homo sapiens
  misc_RNA (1)...(19): siRNA sense strand
agugggaagucaaacguaa

SEQ ID NO: 1884766 - RNA, 19 nt, Homo sapiens
  misc_RNA (1)...(19): siRNA sense strand
guagaccagugcugucaag

SEQ ID NO: 1884767 - RNA, 19 nt, Homo sapiens
  misc_RNA (1)...(19): siRNA sense strand
ggcaaaugcagaauauaug

SEQ ID NO: 1884768 - RNA, 19 nt, Homo sapiens
  misc_RNA (1)...(19): siRNA sense strand
gucuccaucugguaaagua

SEQ ID NO: 1884769 - RNA, 19 nt, Homo sapiens
  misc_RNA (1)...(19): siRNA sense strand
agucaaacguaagaugaaa

SEQ ID NO: 1884770 - RNA, 19 nt, Homo sapiens
  misc_RNA (1)...(19): siRNA sense strand
ugaaagcuuacauggaauu

SEQ ID NO: 1884771 - RNA, 19 nt, Homo sapiens
  misc_RNA (1)...(19): siRNA sense strand
gagcaaauuuuacuuucug

SEQ ID NO: 1884772 - RNA, 19 nt, Homo sapiens
  misc_RNA (1)...(19): siRNA sense strand
gguccaauaguccaauuug

SEQ ID NO: 1884773 - RNA, 19 nt, Homo sapiens
  misc_RNA (1)...(19): siRNA sense strand
gaauuagucaacaauaugc

SEQ ID NO: 1884774 - RNA, 19 nt, Homo sapiens
  misc_RNA (1)...(19): siRNA sense strand
gagaauugaacagcacuau

SEQ ID NO: 1884775 - RNA, 19 nt, Homo sapiens
  misc_RNA (1)...(19): siRNA sense strand
gggaaaucaaguaguauca

SEQ ID NO: 1884776 - RNA, 19 nt, Homo sapiens
  misc_RNA (1)...(19): siRNA sense strand
ggaacacaaccguauuucu

SEQ ID NO: 1884777 - RNA, 19 nt, Homo sapiens
  misc_RNA (1)...(19): siRNA sense strand
uaagaugaaagcuauugga

SEQ ID NO: 1884778 - RNA, 19 nt, Homo sapiens
  misc_RNA (1)...(19): siRNA sense strand
agaaaugaaagcuuacaug

SEQ ID NO: 1884779 - RNA, 19 nt, Homo sapiens
  misc_RNA (1)...(19): siRNA sense strand
cuagguauggaucuccuua

SEQ ID NO: 1884780 - RNA, 19 nt, Homo sapiens
  misc_RNA (1)...(19): siRNA sense strand
guccaauaguccaauuugu

SEQ ID NO: 1884781 - RNA, 19 nt, Homo sapiens
  misc_RNA (1)...(19): siRNA sense strand
cacaauugacaaaugauga

SEQ ID NO: 1884782 - RNA, 19 nt, Homo sapiens
  misc_RNA (1)...(19): siRNA sense strand
uccaauaguccaauuuguu

SEQ ID NO: 1884783 - RNA, 19 nt, Homo sapiens
  misc_RNA (1)...(19): siRNA sense strand
ggagaauugaacagcacua

SEQ ID NO: 1884784 - RNA, 19 nt, Homo sapiens
  misc_RNA (1)...(19): siRNA sense strand
ugaacuugacgcacuggua

SEQ ID NO: 1884785 - RNA, 19 nt, Homo sapiens
  misc_RNA (1)...(19): siRNA sense strand
acaaccguauuucuucaau

SEQ ID NO: 1884786 - RNA, 19 nt, Homo sapiens
  misc_RNA (1)...(19): siRNA sense strand
ucaaagacugggaacacaa

SEQ ID NO: 1884787 - RNA, 19 nt, Homo sapiens
  misc_RNA (1)...(19): siRNA sense strand
auguguaacuugccuauca

SEQ ID NO: 1884788 - RNA, 19 nt, Homo sapiens
  misc_RNA (1)...(19): siRNA sense strand
aaaugaaagcuuacaugga

SEQ ID NO: 1884789 - RNA, 19 nt, Homo sapiens
  misc_RNA (1)...(19): siRNA sense strand
acaccauucuuaccacaca

SEQ ID NO: 1884790 - RNA, 19 nt, Homo sapiens
  misc_RNA (1)...(19): siRNA sense strand
gccuucgucucccagauug

SEQ ID NO: 1884791 - RNA, 19 nt, Homo sapiens
  misc_RNA (1)...(19): siRNA sense strand
ccaagggccauucucuuag

SEQ ID NO: 1884792 - RNA, 19 nt, Homo sapiens
  misc_RNA (1)...(19): siRNA sense strand
gguaaaggcaggcugucau

SEQ ID NO: 1884793 - RNA, 19 nt, Homo sapiens
  misc_RNA (1)...(19): siRNA sense strand
ugaaaggggagcaaauuuu

SEQ ID NO: 1884794 - RNA, 19 nt, Homo sapiens
  misc_RNA (1)...(19): siRNA sense strand
ugggaacacaaccguauuu

SEQ ID NO: 1884795 - RNA, 19 nt, Homo sapiens
  misc_RNA (1)...(19): siRNA sense strand
ugacaaugcagcuucucuu

SEQ ID NO: 1884796 - RNA, 19 nt, Homo sapiens
  misc_RNA (1)...(19): siRNA sense strand
cuuggccucugaaucauau

SEQ ID NO: 1884797 - RNA, 19 nt, Homo sapiens
  misc_RNA (1)...(19): siRNA sense strand
gcagaaaugaaagcuuaca

SEQ ID NO: 1884798 - RNA, 19 nt, Homo sapiens
  misc_RNA (1)...(19): siRNA sense strand
gggccauucucuuagugau

SEQ ID NO: 1884799 - RNA, 19 nt, Homo sapiens
  misc_RNA (1)...(19): siRNA sense strand
gcuauuggauggggaaaga

SEQ ID NO: 1884800 - RNA, 19 nt, Homo sapiens
  misc_RNA (1)...(19): siRNA sense strand
acauggaauuagucaacaa

SEQ ID NO: 1884801 - RNA, 19 nt, Homo sapiens
  misc_RNA (1)...(19): siRNA sense strand
ucaugugggaaaucaagua

SEQ ID NO: 1884802 - RNA, 19 nt, Homo sapiens
  misc_RNA (1)...(19): siRNA sense strand
caauaagcagccuacugaa

SEQ ID NO: 1884803 - RNA, 19 nt, Homo sapiens
  misc_RNA (1)...(19): siRNA sense strand
aaugaugaacuuucugaga

SEQ ID NO: 1884804 - RNA, 19 nt, Homo sapiens
  misc_RNA (1)...(19): siRNA sense strand
acugguauuuggccaucua

SEQ ID NO: 1884805 - RNA, 19 nt, Homo sapiens
  misc_RNA (1)...(19): siRNA sense strand
uguguaacuugccuaucaa

SEQ ID NO: 1884806 - RNA, 19 nt, Homo sapiens
  misc_RNA (1)...(19): siRNA sense strand
auucuuaccacacaauuga

SEQ ID NO: 1884807 - RNA, 19 nt, Homo sapiens
  misc_RNA (1)...(19): siRNA sense strand
cguaagaugaaagcuauug

SEQ ID NO: 1884808 - RNA, 19 nt, Homo sapiens
  misc_RNA (1)...(19): siRNA sense strand
gggagcaaauuuuacuuuc

SEQ ID NO: 1884809 - RNA, 19 nt, Homo sapiens
  misc_RNA (1)...(19): siRNA sense strand
agaauugaacagcacuauu

SEQ ID NO: 1884810 - RNA, 19 nt, Homo sapiens
  misc_RNA (1)...(19): siRNA sense strand
gcugucaagcucucucuca

SEQ ID NO: 1884811 - RNA, 19 nt, Homo sapiens
  misc_RNA (1)...(19): siRNA sense strand
ucaguggugugaugaagcu

SEQ ID NO: 1884812 - RNA, 19 nt, Homo sapiens
  misc_RNA (1)...(19): siRNA sense strand
ugucaagcucucucucaaa

SEQ ID NO: 1884813 - RNA, 19 nt, Homo sapiens
  misc_RNA (1)...(19): siRNA sense strand
caaaugcagaauauauguc

SEQ ID NO: 1884814 - RNA, 19 nt, Homo sapiens
  misc_RNA (1)...(19): siRNA sense strand
gcuacauuauaucagcaau

SEQ ID NO: 1884815 - RNA, 19 nt, Homo sapiens
  misc_RNA (1)...(19): siRNA sense strand
ggagcaaauuuuacuuucu

SEQ ID NO: 1884816 - RNA, 19 nt, Homo sapiens
  misc_RNA (1)...(19): siRNA sense strand
uuauucaugugggaaauca

SEQ ID NO: 1884817 - RNA, 19 nt, Homo sapiens
  misc_RNA (1)...(19): siRNA sense strand
acacaauugacaaaugaug

SEQ ID NO: 1884818 - RNA, 19 nt, Homo sapiens
  misc_RNA (1)...(19): siRNA sense strand
ggaaaucaaguaguaucag

SEQ ID NO: 1884819 - RNA, 19 nt, Homo sapiens
  misc_RNA (1)...(19): siRNA sense strand
uauaucagcaauugaaagg

SEQ ID NO: 1884820 - RNA, 19 nt, Homo sapiens
  misc_RNA (1)...(19): siRNA sense strand
caaagacugggaacacaac

SEQ ID NO: 1884821 - RNA, 19 nt, Homo sapiens
  misc_RNA (1)...(19): siRNA sense strand
cagaagcuuuccauaauua

SEQ ID NO: 1884822 - RNA, 19 nt, Homo sapiens
  misc_RNA (1)...(19): siRNA sense strand
gaagaaggccauccauuca

SEQ ID NO: 1884823 - RNA, 19 nt, Homo sapiens
  misc_RNA (1)...(19): siRNA sense strand
gaucagaccaagucaauug

SEQ ID NO: 1884824 - RNA, 19 nt, Homo sapiens
  misc_RNA (1)...(19): siRNA sense strand
ggagagaugugaagaagac

SEQ ID NO: 1884825 - RNA, 19 nt, Homo sapiens
  misc_RNA (1)...(19): siRNA sense strand
gaagaagacuggguuuguc

SEQ ID NO: 1884826 - RNA, 19 nt, Homo sapiens
  misc_RNA (1)...(19): siRNA sense strand
ucagaagcuuuccauaauu

SEQ ID NO: 1884827 - RNA, 19 nt, Homo sapiens
  misc_RNA (1)...(19): siRNA sense strand
ccagauugaucacuauguu

SEQ ID NO: 1884828 - RNA, 19 nt, Homo sapiens
  misc_RNA (1)...(19): siRNA sense strand
guacagaagucagaagaag

SEQ ID NO: 1884829 - RNA, 19 nt, Homo sapiens
  misc_RNA (1)...(19): siRNA sense strand
cauccaagcuguacagaag

SEQ ID NO: 1884830 - RNA, 19 nt, Homo sapiens
  misc_RNA (1)...(19): siRNA sense strand
ccucagaagcuuuccauaa

SEQ ID NO: 1884831 - RNA, 19 nt, Homo sapiens
  misc_RNA (1)...(19): siRNA sense strand
agaaggccauccauucaaa

SEQ ID NO: 1884832 - RNA, 19 nt, Homo sapiens
  misc_RNA (1)...(19): siRNA sense strand
cggaaucacccuucuaauu

SEQ ID NO: 1884833 - RNA, 19 nt, Homo sapiens
  misc_RNA (1)...(19): siRNA sense strand
ucaucagugugguuucuua

SEQ ID NO: 1884834 - RNA, 19 nt, Homo sapiens
  misc_RNA (1)...(19): siRNA sense strand
gagaucagaccaagucaau

SEQ ID NO: 1884835 - RNA, 19 nt, Homo sapiens
  misc_RNA (1)...(19): siRNA sense strand
gcaccacgcugaucaugcu

SEQ ID NO: 1884836 - RNA, 19 nt, Homo sapiens
  misc_RNA (1)...(19): siRNA sense strand
agacccagauugaucacua

SEQ ID NO: 1884837 - RNA, 19 nt, Homo sapiens
  misc_RNA (1)...(19): siRNA sense strand
cucagaagcuuuccauaau

SEQ ID NO: 1884838 - RNA, 19 nt, Homo sapiens
  misc_RNA (1)...(19): siRNA sense strand
cagaccaagucaauuguug

SEQ ID NO: 1884839 - RNA, 19 nt, Homo sapiens
  misc_RNA (1)...(19): siRNA sense strand
agaagaaggccauccauuc

SEQ ID NO: 1884840 - RNA, 19 nt, Homo sapiens
  misc_RNA (1)...(19): siRNA sense strand
gaaguacaagacccagauu

SEQ ID NO: 1884841 - RNA, 19 nt, Homo sapiens
  misc_RNA (1)...(19): siRNA sense strand
gcccugaaacucauuauuc

SEQ ID NO: 1884842 - RNA, 19 nt, Homo sapiens
  misc_RNA (1)...(19): siRNA sense strand
cauccuggcucuucucucu

SEQ ID NO: 1884843 - RNA, 19 nt, Homo sapiens
  misc_RNA (1)...(19): siRNA sense strand
cuacaaguccgucauccaa

SEQ ID NO: 1884844 - RNA, 19 nt, Homo sapiens
  misc_RNA (1)...(19): siRNA sense strand
guacaagacccagauugau

SEQ ID NO: 1884845 - RNA, 19 nt, Homo sapiens
  misc_RNA (1)...(19): siRNA sense strand
gacccagauugaucacuau

SEQ ID NO: 1884846 - RNA, 19 nt, Homo sapiens
  misc_RNA (1)...(19): siRNA sense strand
cagaagaaggccauccauu

SEQ ID NO: 1884847 - RNA, 19 nt, Homo sapiens
  misc_RNA (1)...(19): siRNA sense strand
uaacggaaucacccuucua

SEQ ID NO: 1884848 - RNA, 19 nt, Homo sapiens
  misc_RNA (1)...(19): siRNA sense strand
ugaagaagacuggguuugu

SEQ ID NO: 1884849 - RNA, 19 nt, Homo sapiens
  misc_RNA (1)...(19): siRNA sense strand
gguagaagaucugguugac

SEQ ID NO: 1884850 - RNA, 19 nt, Homo sapiens
  misc_RNA (1)...(19): siRNA sense strand
acucauuauucgucucuuu

SEQ ID NO: 1884851 - RNA, 19 nt, Homo sapiens
  misc_RNA (1)...(19): siRNA sense strand
ccuugaagcuggcugucuu

SEQ ID NO: 1884852 - RNA, 19 nt, Homo sapiens
  misc_RNA (1)...(19): siRNA sense strand
gaccuauguuggugcuguu

SEQ ID NO: 1884853 - RNA, 19 nt, Homo sapiens
  misc_RNA (1)...(19): siRNA sense strand
gaagcuuuccauaauuaca

SEQ ID NO: 1884854 - RNA, 19 nt, Homo sapiens
  misc_RNA (1)...(19): siRNA sense strand
gaaaagauccaagcaaaac

SEQ ID NO: 1884855 - RNA, 19 nt, Homo sapiens
  misc_RNA (1)...(19): siRNA sense strand
caaagccuaccuggacgua

SEQ ID NO: 1884856 - RNA, 19 nt, Homo sapiens
  misc_RNA (1)...(19): siRNA sense strand
uugcugaacugcucauuuu

SEQ ID NO: 1884857 - RNA, 19 nt, Homo sapiens
  misc_RNA (1)...(19): siRNA sense strand
gcggugcacgaucugauuu

SEQ ID NO: 1884858 - RNA, 19 nt, Homo sapiens
  misc_RNA (1)...(19): siRNA sense strand
gcugaugaccuauguuggu

SEQ ID NO: 1884859 - RNA, 19 nt, Homo sapiens
  misc_RNA (1)...(19): siRNA sense strand
acaagacccagauugauca

SEQ ID NO: 1884860 - RNA, 19 nt, Homo sapiens
  misc_RNA (1)...(19): siRNA sense strand
gcuucaggaucuacaaguc

SEQ ID NO: 1884861 - RNA, 19 nt, Homo sapiens
  misc_RNA (1)...(19): siRNA sense strand
uugaaaagauccaagcaaa

SEQ ID NO: 1884862 - RNA, 19 nt, Homo sapiens
  misc_RNA (1)...(19): siRNA sense strand
gugucccgauugucuauga

SEQ ID NO: 1884863 - RNA, 19 nt, Homo sapiens
  misc_RNA (1)...(19): siRNA sense strand
gaucuacaaguccgucauc

SEQ ID NO: 1884864 - RNA, 19 nt, Homo sapiens
  misc_RNA (1)...(19): siRNA sense strand
uaccuggacguagacauua

SEQ ID NO: 1884865 - RNA, 19 nt, Homo sapiens
  misc_RNA (1)...(19): siRNA sense strand
gacguagacauuacucugu

SEQ ID NO: 1884866 - RNA, 19 nt, Homo sapiens
  misc_RNA (1)...(19): siRNA sense strand
aacggaaucacccuucuaa

SEQ ID NO: 1884867 - RNA, 19 nt, Homo sapiens
  misc_RNA (1)...(19): siRNA sense strand
aagcaaaacucccuggaau

SEQ ID NO: 1884868 - RNA, 19 nt, Homo sapiens
  misc_RNA (1)...(19): siRNA sense strand
acgcugaucaugcugcuuu

SEQ ID NO: 1884869 - RNA, 19 nt, Homo sapiens
  misc_RNA (1)...(19): siRNA sense strand
uacaagacccagauugauc

SEQ ID NO: 1884870 - RNA, 19 nt, Homo sapiens
  misc_RNA (1)...(19): siRNA sense strand
aguacaagacccagauuga

SEQ ID NO: 1884871 - RNA, 19 nt, Homo sapiens
  misc_RNA (1)...(19): siRNA sense strand
gauugucuaugagaaguac

SEQ ID NO: 1884872 - RNA, 19 nt, Homo sapiens
  misc_RNA (1)...(19): siRNA sense strand
accaucagcuucaggaucu

SEQ ID NO: 1884873 - RNA, 19 nt, Homo sapiens
  misc_RNA (1)...(19): siRNA sense strand
aaucacccuucuaauucuu

SEQ ID NO: 1884874 - RNA, 19 nt, Homo sapiens
  misc_RNA (1)...(19): siRNA sense strand
gaaggccauccauucaaag

SEQ ID NO: 1884875 - RNA, 19 nt, Homo sapiens
  misc_RNA (1)...(19): siRNA sense strand
cuggagagaugugaagaag

SEQ ID NO: 1884876 - RNA, 19 nt, Homo sapiens
  misc_RNA (1)...(19): siRNA sense strand
cagauugaucacuauguug

SEQ ID NO: 1884877 - RNA, 19 nt, Homo sapiens
  misc_RNA (1)...(19): siRNA sense strand
aagaaggccauccauucaa

SEQ ID NO: 1884878 - RNA, 19 nt, Homo sapiens
  misc_RNA (1)...(19): siRNA sense strand
uggcugaugaccuauguug

SEQ ID NO: 1884879 - RNA, 19 nt, Homo sapiens
  misc_RNA (1)...(19): siRNA sense strand
gaaagaagcuccaucaguu

SEQ ID NO: 1884880 - RNA, 19 nt, Homo sapiens
  misc_RNA (1)...(19): siRNA sense strand
gcaaagaccuucaaacaga

SEQ ID NO: 1884881 - RNA, 19 nt, Homo sapiens
  misc_RNA (1)...(19): siRNA sense strand
ggaaagaucuggcuccaau

SEQ ID NO: 1884882 - RNA, 19 nt, Homo sapiens
  misc_RNA (1)...(19): siRNA sense strand
ggaaauacguuaugcuuca

SEQ ID NO: 1884883 - RNA, 19 nt, Homo sapiens
  misc_RNA (1)...(19): siRNA sense strand
gaaaaugaaugcuaccuua

SEQ ID NO: 1884884 - RNA, 19 nt, Homo sapiens
  misc_RNA (1)...(19): siRNA sense strand
gaugauauauugucuagga

SEQ ID NO: 1884885 - RNA, 19 nt, Homo sapiens
  misc_RNA (1)...(19): siRNA sense strand
uaaaagaucuccuggauga

SEQ ID NO: 1884886 - RNA, 19 nt, Homo sapiens
  misc_RNA (1)...(19): siRNA sense strand
gauuaggacuucuucuuga

SEQ ID NO: 1884887 - RNA, 19 nt, Homo sapiens
  misc_RNA (1)...(19): siRNA sense strand
caaacugucuaaacuguga

SEQ ID NO: 1884888 - RNA, 19 nt, Homo sapiens
  misc_RNA (1)...(19): siRNA sense strand
caauguggauccugcuaua

SEQ ID NO: 1884889 - RNA, 19 nt, Homo sapiens
  misc_RNA (1)...(19): siRNA sense strand
caacuggagucuaaagaau

SEQ ID NO: 1884890 - RNA, 19 nt, Homo sapiens
  misc_RNA (1)...(19): siRNA sense strand
ggaaguaugaagaugauaa

SEQ ID NO: 1884891 - RNA, 19 nt, Homo sapiens
  misc_RNA (1)...(19): siRNA sense strand
cagcagcaguggcuuauga

SEQ ID NO: 1884892 - RNA, 19 nt, Homo sapiens
  misc_RNA (1)...(19): siRNA sense strand
ugggagagguggaugauaa

SEQ ID NO: 1884893 - RNA, 19 nt, Homo sapiens
  misc_RNA (1)...(19): siRNA sense strand
ugauucaacuggagucuaa

SEQ ID NO: 1884894 - RNA, 19 nt, Homo sapiens
  misc_RNA (1)...(19): siRNA sense strand
ucaaugacauauggaagua

SEQ ID NO: 1884895 - RNA, 19 nt, Homo sapiens
  misc_RNA (1)...(19): siRNA sense strand
aagauuuacuuccugguua

SEQ ID NO: 1884896 - RNA, 19 nt, Homo sapiens
  misc_RNA (1)...(19): siRNA sense strand
ggaagaggacuuuaugcaa

SEQ ID NO: 1884897 - RNA, 19 nt, Homo sapiens
  misc_RNA (1)...(19): siRNA sense strand
caagaaagaagcuccauca

SEQ ID NO: 1884898 - RNA, 19 nt, Homo sapiens
  misc_RNA (1)...(19): siRNA sense strand
gggcugggauguugaagga

SEQ ID NO: 1884899 - RNA, 19 nt, Homo sapiens
  misc_RNA (1)...(19): siRNA sense strand
caaaugacagccuaaaugu

SEQ ID NO: 1884900 - RNA, 19 nt, Homo sapiens
  misc_RNA (1)...(19): siRNA sense strand
gcugggauguugaaggaaa

SEQ ID NO: 1884901 - RNA, 19 nt, Homo sapiens
  misc_RNA (1)...(19): siRNA sense strand
gggaugauauauugucuag

SEQ ID NO: 1884902 - RNA, 19 nt, Homo sapiens
  misc_RNA (1)...(19): siRNA sense strand
uuagugaaguguuugauug

SEQ ID NO: 1884903 - RNA, 19 nt, Homo sapiens
  misc_RNA (1)...(19): siRNA sense strand
agaaaucauuccagcauug

SEQ ID NO: 1884904 - RNA, 19 nt, Homo sapiens
  misc_RNA (1)...(19): siRNA sense strand
gcaacacguuuaaaucucu

SEQ ID NO: 1884905 - RNA, 19 nt, Homo sapiens
  misc_RNA (1)...(19): siRNA sense strand
ugaaaugggugcgaacaga

SEQ ID NO: 1884906 - RNA, 19 nt, Homo sapiens
  misc_RNA (1)...(19): siRNA sense strand
agaaugggcugggauguug

SEQ ID NO: 1884907 - RNA, 19 nt, Homo sapiens
  misc_RNA (1)...(19): siRNA sense strand
uaaggaucauguugagaaa

SEQ ID NO: 1884908 - RNA, 19 nt, Homo sapiens
  misc_RNA (1)...(19): siRNA sense strand
ucaaaugacagccuaaaug

SEQ ID NO: 1884909 - RNA, 19 nt, Homo sapiens
  misc_RNA (1)...(19): siRNA sense strand
ucacauaaagggaugauau

SEQ ID NO: 1884910 - RNA, 19 nt, Homo sapiens
  misc_RNA (1)...(19): siRNA sense strand
ucagauauaugugguagga

SEQ ID NO: 1884911 - RNA, 19 nt, Homo sapiens
  misc_RNA (1)...(19): siRNA sense strand
guaaggaagaggacuuuau

SEQ ID NO: 1884912 - RNA, 19 nt, Homo sapiens
  misc_RNA (1)...(19): siRNA sense strand
gggauguaaugaccgaauu

SEQ ID NO: 1884913 - RNA, 19 nt, Homo sapiens
  misc_RNA (1)...(19): siRNA sense strand
ggccucauccucuugguua

SEQ ID NO: 1884914 - RNA, 19 nt, Homo sapiens
  misc_RNA (1)...(19): siRNA sense strand
gugaaguguuugauuguau

SEQ ID NO: 1884915 - RNA, 19 nt, Homo sapiens
  misc_RNA (1)...(19): siRNA sense strand
ggcauggaauguuuguaaa

SEQ ID NO: 1884916 - RNA, 19 nt, Homo sapiens
  misc_RNA (1)...(19): siRNA sense strand
uagcauagcaucugaaugg

SEQ ID NO: 1884917 - RNA, 19 nt, Homo sapiens
  misc_RNA (1)...(19): siRNA sense strand
caacccagaccuccagaaa

SEQ ID NO: 1884918 - RNA, 19 nt, Homo sapiens
  misc_RNA (1)...(19): siRNA sense strand
gaggaaagacagaugacaa

SEQ ID NO: 1884919 - RNA, 19 nt, Homo sapiens
  misc_RNA (1)...(19): siRNA sense strand
cagaaaucauuccagcauu

SEQ ID NO: 1884920 - RNA, 19 nt, Homo sapiens
  misc_RNA (1)...(19): siRNA sense strand
ugaaauugaugaggcgaaa

SEQ ID NO: 1884921 - RNA, 19 nt, Homo sapiens
  misc_RNA (1)...(19): siRNA sense strand
uaaggaagaggacuuuaug

SEQ ID NO: 1884922 - RNA, 19 nt, Homo sapiens
  misc_RNA (1)...(19): siRNA sense strand
acuggagucuaaagaauuu

SEQ ID NO: 1884923 - RNA, 19 nt, Homo sapiens
  misc_RNA (1)...(19): siRNA sense strand
aaucauuccagcauuguua

SEQ ID NO: 1884924 - RNA, 19 nt, Homo sapiens
  misc_RNA (1)...(19): siRNA sense strand
agaucuggcuccaaugaaa

SEQ ID NO: 1884925 - RNA, 19 nt, Homo sapiens
  misc_RNA (1)...(19): siRNA sense strand
ugacggaaaugugcaagau

SEQ ID NO: 1884926 - RNA, 19 nt, Homo sapiens
  misc_RNA (1)...(19): siRNA sense strand
caggaggugucacugaaga

SEQ ID NO: 1884927 - RNA, 19 nt, Homo sapiens
  misc_RNA (1)...(19): siRNA sense strand
cacauaaagggaugauaua

SEQ ID NO: 1884928 - RNA, 19 nt, Homo sapiens
  misc_RNA (1)...(19): siRNA sense strand
gaauggugauguuggugau

SEQ ID NO: 1884929 - RNA, 19 nt, Homo sapiens
  misc_RNA (1)...(19): siRNA sense strand
acggaaaugugcaagauau

SEQ ID NO: 1884930 - RNA, 19 nt, Homo sapiens
  misc_RNA (1)...(19): siRNA sense strand
ugaggugaauggugauguu

SEQ ID NO: 1884931 - RNA, 19 nt, Homo sapiens
  misc_RNA (1)...(19): siRNA sense strand
cugagcagauucccagaaa

SEQ ID NO: 1884932 - RNA, 19 nt, Homo sapiens
  misc_RNA (1)...(19): siRNA sense strand
ggagguagugcuagacaau

SEQ ID NO: 1884933 - RNA, 19 nt, Homo sapiens
  misc_RNA (1)...(19): siRNA sense strand
aaagaagcuccaucaguuu

SEQ ID NO: 1884934 - RNA, 19 nt, Homo sapiens
  misc_RNA (1)...(19): siRNA sense strand
ggauguaaugaccgaauuu

SEQ ID NO: 1884935 - RNA, 19 nt, Homo sapiens
  misc_RNA (1)...(19): siRNA sense strand
ucccaggcauggaauguuu

SEQ ID NO: 1884936 - RNA, 19 nt, Homo sapiens
  misc_RNA (1)...(19): siRNA sense strand
uguuggugaugaagauuua

SEQ ID NO: 1884937 - RNA, 19 nt, Homo sapiens
  misc_RNA (1)...(19): siRNA sense strand
uuaaggaucauguugagaa

SEQ ID NO: 1884938 - RNA, 19 nt, Homo sapiens
  misc_RNA (1)...(19): siRNA sense strand
gaguagcaguccauaaagg

SEQ ID NO: 1884939 - RNA, 19 nt, Homo sapiens
  misc_RNA (1)...(19): siRNA sense strand
aaagaucuggcuccaauga

SEQ ID NO: 1884940 - RNA, 19 nt, Homo sapiens
  misc_RNA (1)...(19): siRNA sense strand
gaaaucauuccagcauugu

SEQ ID NO: 1884941 - RNA, 19 nt, Homo sapiens
  misc_RNA (1)...(19): siRNA sense strand
aagaagaagcaguauuuga

SEQ ID NO: 1884942 - RNA, 19 nt, Homo sapiens
  misc_RNA (1)...(19): siRNA sense strand
caacacguuuaaaucucuu

SEQ ID NO: 1884943 - RNA, 19 nt, Homo sapiens
  misc_RNA (1)...(19): siRNA sense strand
aggaucauguugagaaaga

SEQ ID NO: 1884944 - RNA, 19 nt, Homo sapiens
  misc_RNA (1)...(19): siRNA sense strand
gacggaaaugugcaagaua

SEQ ID NO: 1884945 - RNA, 19 nt, Homo sapiens
  misc_RNA (1)...(19): siRNA sense strand
gaaauacguuaugcuucag

SEQ ID NO: 1884946 - RNA, 19 nt, Homo sapiens
  misc_RNA (1)...(19): siRNA sense strand
uucgcuggauucaguauua

SEQ ID NO: 1884947 - RNA, 19 nt, Homo sapiens
  misc_RNA (1)...(19): siRNA sense strand
gacuauauguggaugaaaa

SEQ ID NO: 1884948 - RNA, 19 nt, Homo sapiens
  misc_RNA (1)...(19): siRNA sense strand
gguaggaggacuauaugug

SEQ ID NO: 1884949 - RNA, 19 nt, Homo sapiens
  misc_RNA (1)...(19): siRNA sense strand
acacagcagcaguggcuua

SEQ ID NO: 1884950 - RNA, 19 nt, Homo sapiens
  misc_RNA (1)...(19): siRNA sense strand
aaugacagccuaaauguag

SEQ ID NO: 1884951 - RNA, 19 nt, Homo sapiens
  misc_RNA (1)...(19): siRNA sense strand
ugaucucagucauuucaaa

SEQ ID NO: 1884952 - RNA, 19 nt, Homo sapiens
  misc_RNA (1)...(19): siRNA sense strand
gauagcauagcaucugaau

SEQ ID NO: 1884953 - RNA, 19 nt, Homo sapiens
  misc_RNA (1)...(19): siRNA sense strand
caacaaauaaaugggaugu

SEQ ID NO: 1884954 - RNA, 19 nt, Homo sapiens
  misc_RNA (1)...(19): siRNA sense strand
uauauugucuaggaggaaa

SEQ ID NO: 1884955 - RNA, 19 nt, Homo sapiens
  misc_RNA (1)...(19): siRNA sense strand
ugaaguguuugauuguauc

SEQ ID NO: 1884956 - RNA, 19 nt, Homo sapiens
  misc_RNA (1)...(19): siRNA sense strand
ggaucucuguaugcaauug

SEQ ID NO: 1884957 - RNA, 19 nt, Homo sapiens
  misc_RNA (1)...(19): siRNA sense strand
agaaagaagcuccaucagu

SEQ ID NO: 1884958 - RNA, 19 nt, Homo sapiens
  misc_RNA (1)...(19): siRNA sense strand
gauucaguauuaugcuaug

SEQ ID NO: 1884959 - RNA, 19 nt, Homo sapiens
  misc_RNA (1)...(19): siRNA sense strand
ccagaaaucauuccagcau

SEQ ID NO: 1884960 - RNA, 19 nt, Homo sapiens
  misc_RNA (1)...(19): siRNA sense strand
uaaaaggccucauccucuu

SEQ ID NO: 1884961 - RNA, 19 nt, Homo sapiens
  misc_RNA (1)...(19): siRNA sense strand
agaagaagcaguauuugag

SEQ ID NO: 1884962 - RNA, 19 nt, Homo sapiens
  misc_RNA (1)...(19): siRNA sense strand
uagcaacacguuuaaaucu

SEQ ID NO: 1884963 - RNA, 19 nt, Homo sapiens
  misc_RNA (1)...(19): siRNA sense strand
ucaacuggagucuaaagaa

SEQ ID NO: 1884964 - RNA, 19 nt, Homo sapiens
  misc_RNA (1)...(19): siRNA sense strand
uggauucaguauuaugcua

SEQ ID NO: 1884965 - RNA, 19 nt, Homo sapiens
  misc_RNA (1)...(19): siRNA sense strand
aggcaaagaccuucaaaca

SEQ ID NO: 1884966 - RNA, 19 nt, Homo sapiens
  misc_RNA (1)...(19): siRNA sense strand
aggcauggaauguuuguaa

SEQ ID NO: 1884967 - RNA, 19 nt, Homo sapiens
  misc_RNA (1)...(19): siRNA sense strand
aaaugacagccuaaaugua

SEQ ID NO: 1884968 - RNA, 19 nt, Homo sapiens
  misc_RNA (1)...(19): siRNA sense strand
aaaggagauuggaaagauc

SEQ ID NO: 1884969 - RNA, 19 nt, Homo sapiens
  misc_RNA (1)...(19): siRNA sense strand
gcaggcaaagaccuucaaa

SEQ ID NO: 1884970 - RNA, 19 nt, Homo sapiens
  misc_RNA (1)...(19): siRNA sense strand
ggugaauggugauguuggu

SEQ ID NO: 1884971 - RNA, 19 nt, Homo sapiens
  misc_RNA (1)...(19): siRNA sense strand
aaaagcaggugacaaaagu

SEQ ID NO: 1884972 - RNA, 19 nt, Homo sapiens
  misc_RNA (1)...(19): siRNA sense strand
gaauuugcacccacugaag

SEQ ID NO: 1884973 - RNA, 19 nt, Homo sapiens
  misc_RNA (1)...(19): siRNA sense strand
ggaguagcaguccauaaag

SEQ ID NO: 1884974 - RNA, 19 nt, Homo sapiens
  misc_RNA (1)...(19): siRNA sense strand
caaaauggaacgaaguaaa

SEQ ID NO: 1884975 - RNA, 19 nt, Homo sapiens
  misc_RNA (1)...(19): siRNA sense strand
aggcuucgcuggauucagu

SEQ ID NO: 1884976 - RNA, 19 nt, Homo sapiens
  misc_RNA (1)...(19): siRNA sense strand
gggagagguggaugauaaa

SEQ ID NO: 1884977 - RNA, 19 nt, Homo sapiens
  misc_RNA (1)...(19): siRNA sense strand
ucgauagcauagcaucuga

SEQ ID NO: 1884978 - RNA, 19 nt, Homo sapiens
  misc_RNA (1)...(19): siRNA sense strand
uucaaccucuacagucaua

SEQ ID NO: 1884979 - RNA, 19 nt, Homo sapiens
  misc_RNA (1)...(19): siRNA sense strand
ggagauaguggaucggaaa

SEQ ID NO: 1884980 - RNA, 19 nt, Homo sapiens
  misc_RNA (1)...(19): siRNA sense strand
gauaguggaucggaaauac

SEQ ID NO: 1884981 - RNA, 19 nt, Homo sapiens
  misc_RNA (1)...(19): siRNA sense strand
gaucggaaauacagcaucu

SEQ ID NO: 1884982 - RNA, 19 nt, Homo sapiens
  misc_RNA (1)...(19): siRNA sense strand
ccguucaccuuccucaauu

SEQ ID NO: 1884983 - RNA, 19 nt, Homo sapiens
  misc_RNA (1)...(19): siRNA sense strand
ucaccuuccucaauuccaa

SEQ ID NO: 1884984 - RNA, 19 nt, Homo sapiens
  misc_RNA (1)...(19): siRNA sense strand
uaagagcggcugcuucuac

SEQ ID NO: 1884985 - RNA, 19 nt, Homo sapiens
  misc_RNA (1)...(19): siRNA sense strand
gaacacuucagcauacacu

SEQ ID NO: 1884986 - RNA, 19 nt, Homo sapiens
  misc_RNA (1)...(19): siRNA sense strand
agaaagaggaggacuggau

SEQ ID NO: 1884987 - RNA, 19 nt, Homo sapiens
  misc_RNA (1)...(19): siRNA sense strand
caagaaggagauaguggau

SEQ ID NO: 1884988 - RNA, 19 nt, Homo sapiens
  misc_RNA (1)...(19): siRNA sense strand
gucagaaaccggccaagga

SEQ ID NO: 1884989 - RNA, 19 nt, Homo sapiens
  misc_RNA (1)...(19): siRNA sense strand
gagauaguggaucggaaau

SEQ ID NO: 1884990 - RNA, 19 nt, Homo sapiens
  misc_RNA (1)...(19): siRNA sense strand
uccgaacacuucagcauac

SEQ ID NO: 1884991 - RNA, 19 nt, Homo sapiens
  misc_RNA (1)...(19): siRNA sense strand
gccguucaccuuccucaau

SEQ ID NO: 1884992 - RNA, 19 nt, Homo sapiens
  misc_RNA (1)...(19): siRNA sense strand
uguaagagcggcugcuucu

SEQ ID NO: 1884993 - RNA, 19 nt, Homo sapiens
  misc_RNA (1)...(19): siRNA sense strand
cagaaguacuccgaacacu

SEQ ID NO: 1884994 - RNA, 19 nt, Homo sapiens
  misc_RNA (1)...(19): siRNA sense strand
ccaaggagggucccagacu

SEQ ID NO: 1884995 - RNA, 19 nt, Homo sapiens
  misc_RNA (1)...(19): siRNA sense strand
ggagauaguggaucggaaa

SEQ ID NO: 1884996 - RNA, 19 nt, Homo sapiens
  misc_RNA (1)...(19): siRNA sense strand
gauaguggaucggaaauac

SEQ ID NO: 1884997 - RNA, 19 nt, Homo sapiens
  misc_RNA (1)...(19): siRNA sense strand
gaucggaaauacagcaucu

SEQ ID NO: 1884998 - RNA, 19 nt, Homo sapiens
  misc_RNA (1)...(19): siRNA sense strand
ccguucaccuuccucaauu

SEQ ID NO: 1884999 - RNA, 19 nt, Homo sapiens
  misc_RNA (1)...(19): siRNA sense strand
ucaccuuccucaauuccaa

SEQ ID NO: 1885000 - RNA, 19 nt, Homo sapiens
  misc_RNA (1)...(19): siRNA sense strand
uaagagcggcugcuucuac

SEQ ID NO: 1885001 - RNA, 19 nt, Homo sapiens
  misc_RNA (1)...(19): siRNA sense strand
gaacacuucagcauacacu

SEQ ID NO: 1885002 - RNA, 19 nt, Homo sapiens
  misc_RNA (1)...(19): siRNA sense strand
agaaagaggaggacuggau

SEQ ID NO: 1885003 - RNA, 19 nt, Homo sapiens
  misc_RNA (1)...(19): siRNA sense strand
caagaaggagauaguggau

SEQ ID NO: 1885004 - RNA, 19 nt, Homo sapiens
  misc_RNA (1)...(19): siRNA sense strand
gucagaaaccggccaagga

SEQ ID NO: 1885005 - RNA, 19 nt, Homo sapiens
  misc_RNA (1)...(19): siRNA sense strand
gagauaguggaucggaaau

SEQ ID NO: 1885006 - RNA, 19 nt, Homo sapiens
  misc_RNA (1)...(19): siRNA sense strand
uccgaacacuucagcauac

SEQ ID NO: 1885007 - RNA, 19 nt, Homo sapiens
  misc_RNA (1)...(19): siRNA sense strand
gccguucaccuuccucaau

SEQ ID NO: 1885008 - RNA, 19 nt, Homo sapiens
  misc_RNA (1)...(19): siRNA sense strand
uguaagagcggcugcuucu

SEQ ID NO: 1885009 - RNA, 19 nt, Homo sapiens
  misc_RNA (1)...(19): siRNA sense strand
cagaaguacuccgaacacu

SEQ ID NO: 1885010 - RNA, 19 nt, Homo sapiens
  misc_RNA (1)...(19): siRNA sense strand
ccaaggagggucccagacu

SEQ ID NO: 1885011 - RNA, 19 nt, Homo sapiens
  misc_RNA (1)...(19): siRNA sense strand
ggagauaguggaucggaaa

SEQ ID NO: 1885012 - RNA, 19 nt, Homo sapiens
  misc_RNA (1)...(19): siRNA sense strand
gauaguggaucggaaauac

SEQ ID NO: 1885013 - RNA, 19 nt, Homo sapiens
  misc_RNA (1)...(19): siRNA sense strand
gaucggaaauacagcaucu

SEQ ID NO: 1885014 - RNA, 19 nt, Homo sapiens
  misc_RNA (1)...(19): siRNA sense strand
ccguucaccuuccucaauu

SEQ ID NO: 1885015 - RNA, 19 nt, Homo sapiens
  misc_RNA (1)...(19): siRNA sense strand
ucaccuuccucaauuccaa

SEQ ID NO: 1885016 - RNA, 19 nt, Homo sapiens
  misc_RNA (1)...(19): siRNA sense strand
uaagagcggcugcuucuac

SEQ ID NO: 1885017 - RNA, 19 nt, Homo sapiens
  misc_RNA (1)...(19): siRNA sense strand
gaacacuucagcauacacu

SEQ ID NO: 1885018 - RNA, 19 nt, Homo sapiens
  misc_RNA (1)...(19): siRNA sense strand
agaaagaggaggacuggau

SEQ ID NO: 1885019 - RNA, 19 nt, Homo sapiens
  misc_RNA (1)...(19): siRNA sense strand
caagaaggagauaguggau

SEQ ID NO: 1885020 - RNA, 19 nt, Homo sapiens
  misc_RNA (1)...(19): siRNA sense strand
gucagaaaccggccaagga

SEQ ID NO: 1885021 - RNA, 19 nt, Homo sapiens
  misc_RNA (1)...(19): siRNA sense strand
gagauaguggaucggaaau

SEQ ID NO: 1885022 - RNA, 19 nt, Homo sapiens
  misc_RNA (1)...(19): siRNA sense strand
uccgaacacuucagcauac

SEQ ID NO: 1885023 - RNA, 19 nt, Homo sapiens
  misc_RNA (1)...(19): siRNA sense strand
gccguucaccuuccucaau

SEQ ID NO: 1885024 - RNA, 19 nt, Homo sapiens
  misc_RNA (1)...(19): siRNA sense strand
uguaagagcggcugcuucu

SEQ ID NO: 1885025 - RNA, 19 nt, Homo sapiens
  misc_RNA (1)...(19): siRNA sense strand
cagaaguacuccgaacacu

SEQ ID NO: 1885026 - RNA, 19 nt, Homo sapiens
  misc_RNA (1)...(19): siRNA sense strand
ccaaggagggucccagacu

SEQ ID NO: 1885027 - RNA, 19 nt, Homo sapiens
  misc_RNA (1)...(19): siRNA sense strand
ucuaagagcucaucacuaa

SEQ ID NO: 1885028 - RNA, 19 nt, Homo sapiens
  misc_RNA (1)...(19): siRNA sense strand
gaaggagaaucaagagaaa

SEQ ID NO: 1885029 - RNA, 19 nt, Homo sapiens
  misc_RNA (1)...(19): siRNA sense strand
gaaguuaaauuccaaaugc

SEQ ID NO: 1885030 - RNA, 19 nt, Homo sapiens
  misc_RNA (1)...(19): siRNA sense strand
gaagugccauucccaaaga

SEQ ID NO: 1885031 - RNA, 19 nt, Homo sapiens
  misc_RNA (1)...(19): siRNA sense strand
gagaucaagucgaauuaaa

SEQ ID NO: 1885032 - RNA, 19 nt, Homo sapiens
  misc_RNA (1)...(19): siRNA sense strand
gaagugauacaguuuauga

SEQ ID NO: 1885033 - RNA, 19 nt, Homo sapiens
  misc_RNA (1)...(19): siRNA sense strand
ggaugaaacuggaagcuau

SEQ ID NO: 1885034 - RNA, 19 nt, Homo sapiens
  misc_RNA (1)...(19): siRNA sense strand
gcucuucgcuuucuugaga

SEQ ID NO: 1885035 - RNA, 19 nt, Homo sapiens
  misc_RNA (1)...(19): siRNA sense strand
aaacaaggcuucucuaagg

SEQ ID NO: 1885036 - RNA, 19 nt, Homo sapiens
  misc_RNA (1)...(19): siRNA sense strand
cauuaaagcuguguuacua

SEQ ID NO: 1885037 - RNA, 19 nt, Homo sapiens
  misc_RNA (1)...(19): siRNA sense strand
caaacgaucuccucagcaa

SEQ ID NO: 1885038 - RNA, 19 nt, Homo sapiens
  misc_RNA (1)...(19): siRNA sense strand
cagagaccguggcauguua

SEQ ID NO: 1885039 - RNA, 19 nt, Homo sapiens
  misc_RNA (1)...(19): siRNA sense strand
gacaaacagugaaugaaga

SEQ ID NO: 1885040 - RNA, 19 nt, Homo sapiens
  misc_RNA (1)...(19): siRNA sense strand
acauacagauccucagaua

SEQ ID NO: 1885041 - RNA, 19 nt, Homo sapiens
  misc_RNA (1)...(19): siRNA sense strand
aaagugaagcuccaaguua

SEQ ID NO: 1885042 - RNA, 19 nt, Homo sapiens
  misc_RNA (1)...(19): siRNA sense strand
gaccguggcauguuauaua

SEQ ID NO: 1885043 - RNA, 19 nt, Homo sapiens
  misc_RNA (1)...(19): siRNA sense strand
gugaugugaugaugaagua

SEQ ID NO: 1885044 - RNA, 19 nt, Homo sapiens
  misc_RNA (1)...(19): siRNA sense strand
ucagcaaacuguaccauau

SEQ ID NO: 1885045 - RNA, 19 nt, Homo sapiens
  misc_RNA (1)...(19): siRNA sense strand
ccacuaggguaccagauga

SEQ ID NO: 1885046 - RNA, 19 nt, Homo sapiens
  misc_RNA (1)...(19): siRNA sense strand
caaaguugguaugaaauug

SEQ ID NO: 1885047 - RNA, 19 nt, Homo sapiens
  misc_RNA (1)...(19): siRNA sense strand
gaugaagugauacaguuua

SEQ ID NO: 1885048 - RNA, 19 nt, Homo sapiens
  misc_RNA (1)...(19): siRNA sense strand
ugaaggagaaccauuguuu

SEQ ID NO: 1885049 - RNA, 19 nt, Homo sapiens
  misc_RNA (1)...(19): siRNA sense strand
uaaaaucgcugaccagaga

SEQ ID NO: 1885050 - RNA, 19 nt, Homo sapiens
  misc_RNA (1)...(19): siRNA sense strand
gaacccguaucucaucugu

SEQ ID NO: 1885051 - RNA, 19 nt, Homo sapiens
  misc_RNA (1)...(19): siRNA sense strand
agugauaacugccuccuuu

SEQ ID NO: 1885052 - RNA, 19 nt, Homo sapiens
  misc_RNA (1)...(19): siRNA sense strand
gcaucugccacauuauuua

SEQ ID NO: 1885053 - RNA, 19 nt, Homo sapiens
  misc_RNA (1)...(19): siRNA sense strand
gaaacaaggcuucucuaag

SEQ ID NO: 1885054 - RNA, 19 nt, Homo sapiens
  misc_RNA (1)...(19): siRNA sense strand
gaaggagaaccauuguuug

SEQ ID NO: 1885055 - RNA, 19 nt, Homo sapiens
  misc_RNA (1)...(19): siRNA sense strand
gcagcugccugaccacuuc

SEQ ID NO: 1885056 - RNA, 19 nt, Homo sapiens
  misc_RNA (1)...(19): siRNA sense strand
gaagcaagccagcauucaa

SEQ ID NO: 1885057 - RNA, 19 nt, Homo sapiens
  misc_RNA (1)...(19): siRNA sense strand
guaugauucucgagauauu

SEQ ID NO: 1885058 - RNA, 19 nt, Homo sapiens
  misc_RNA (1)...(19): siRNA sense strand
ggacaaacagugaaugaag

SEQ ID NO: 1885059 - RNA, 19 nt, Homo sapiens
  misc_RNA (1)...(19): siRNA sense strand
caaaggaguaugcgucuga

SEQ ID NO: 1885060 - RNA, 19 nt, Homo sapiens
  misc_RNA (1)...(19): siRNA sense strand
gaugugaugaugaaguaua

SEQ ID NO: 1885061 - RNA, 19 nt, Homo sapiens
  misc_RNA (1)...(19): siRNA sense strand
caaugccacuucaguaugu

SEQ ID NO: 1885062 - RNA, 19 nt, Homo sapiens
  misc_RNA (1)...(19): siRNA sense strand
aaaaggagcaguucuguua

SEQ ID NO: 1885063 - RNA, 19 nt, Homo sapiens
  misc_RNA (1)...(19): siRNA sense strand
ccacauuauuuaagaagga

SEQ ID NO: 1885064 - RNA, 19 nt, Homo sapiens
  misc_RNA (1)...(19): siRNA sense strand
gucaggagaucaagucgaa

SEQ ID NO: 1885065 - RNA, 19 nt, Homo sapiens
  misc_RNA (1)...(19): siRNA sense strand
uaagagcucaucacuaaau

SEQ ID NO: 1885066 - RNA, 19 nt, Homo sapiens
  misc_RNA (1)...(19): siRNA sense strand
agagugaugugaugaugaa

SEQ ID NO: 1885067 - RNA, 19 nt, Homo sapiens
  misc_RNA (1)...(19): siRNA sense strand
acuggaagcuauugacaaa

SEQ ID NO: 1885068 - RNA, 19 nt, Homo sapiens
  misc_RNA (1)...(19): siRNA sense strand
caagagugaugugaugaug

SEQ ID NO: 1885069 - RNA, 19 nt, Homo sapiens
  misc_RNA (1)...(19): siRNA sense strand
ugaaacaaggcuucucuaa

SEQ ID NO: 1885070 - RNA, 19 nt, Homo sapiens
  misc_RNA (1)...(19): siRNA sense strand
uuauauagcuguaccugau

SEQ ID NO: 1885071 - RNA, 19 nt, Homo sapiens
  misc_RNA (1)...(19): siRNA sense strand
ucaaugcagucuccacaga

SEQ ID NO: 1885072 - RNA, 19 nt, Homo sapiens
  misc_RNA (1)...(19): siRNA sense strand
gaaguucauaucacauuug

SEQ ID NO: 1885073 - RNA, 19 nt, Homo sapiens
  misc_RNA (1)...(19): siRNA sense strand
ccauggaugucaagaagga

SEQ ID NO: 1885074 - RNA, 19 nt, Homo sapiens
  misc_RNA (1)...(19): siRNA sense strand
gcaaagcaccaaacgaucu

SEQ ID NO: 1885075 - RNA, 19 nt, Homo sapiens
  misc_RNA (1)...(19): siRNA sense strand
ggagaucaagucgaauuaa

SEQ ID NO: 1885076 - RNA, 19 nt, Homo sapiens
  misc_RNA (1)...(19): siRNA sense strand
caaguaugauucucgagau

SEQ ID NO: 1885077 - RNA, 19 nt, Homo sapiens
  misc_RNA (1)...(19): siRNA sense strand
cuaaaugggucugaaaugg

SEQ ID NO: 1885078 - RNA, 19 nt, Homo sapiens
  misc_RNA (1)...(19): siRNA sense strand
aaagcuguguuacuacauu

SEQ ID NO: 1885079 - RNA, 19 nt, Homo sapiens
  misc_RNA (1)...(19): siRNA sense strand
caccacaaguucaccacua

SEQ ID NO: 1885080 - RNA, 19 nt, Homo sapiens
  misc_RNA (1)...(19): siRNA sense strand
gagcucaucacuaaauuca

SEQ ID NO: 1885081 - RNA, 19 nt, Homo sapiens
  misc_RNA (1)...(19): siRNA sense strand
caaacuguaccauauguug

SEQ ID NO: 1885082 - RNA, 19 nt, Homo sapiens
  misc_RNA (1)...(19): siRNA sense strand
gaggaguauuugaaagaga

SEQ ID NO: 1885083 - RNA, 19 nt, Homo sapiens
  misc_RNA (1)...(19): siRNA sense strand
uggaugaagugauacaguu

SEQ ID NO: 1885084 - RNA, 19 nt, Homo sapiens
  misc_RNA (1)...(19): siRNA sense strand
aagugaagcuccaaguuau

SEQ ID NO: 1885085 - RNA, 19 nt, Homo sapiens
  misc_RNA (1)...(19): siRNA sense strand
ucaagaaggagaaucaaga

SEQ ID NO: 1885086 - RNA, 19 nt, Homo sapiens
  misc_RNA (1)...(19): siRNA sense strand
gggaggaguauuugaaaga

SEQ ID NO: 1885087 - RNA, 19 nt, Homo sapiens
  misc_RNA (1)...(19): siRNA sense strand
ggaugaagugauacaguuu

SEQ ID NO: 1885088 - RNA, 19 nt, Homo sapiens
  misc_RNA (1)...(19): siRNA sense strand
aaggagcaguucuguuaaa

SEQ ID NO: 1885089 - RNA, 19 nt, Homo sapiens
  misc_RNA (1)...(19): siRNA sense strand
gcaaugccacuucaguaug

SEQ ID NO: 1885090 - RNA, 19 nt, Homo sapiens
  misc_RNA (1)...(19): siRNA sense strand
ucagagugcuuccgucagu

SEQ ID NO: 1885091 - RNA, 19 nt, Homo sapiens
  misc_RNA (1)...(19): siRNA sense strand
guaugcgucugaaggagaa

SEQ ID NO: 1885092 - RNA, 19 nt, Homo sapiens
  misc_RNA (1)...(19): siRNA sense strand
gaacagugcaucauuugcu

SEQ ID NO: 1885093 - RNA, 19 nt, Homo sapiens
  misc_RNA (1)...(19): siRNA sense strand
agugaacagugcaucauuu

SEQ ID NO: 1885094 - RNA, 19 nt, Homo sapiens
  misc_RNA (1)...(19): siRNA sense strand
gucuguggaugaagugaua

SEQ ID NO: 1885095 - RNA, 19 nt, Homo sapiens
  misc_RNA (1)...(19): siRNA sense strand
ggaggaguauuugaaagag

SEQ ID NO: 1885096 - RNA, 19 nt, Homo sapiens
  misc_RNA (1)...(19): siRNA sense strand
gaagcuccaaguuauauag

SEQ ID NO: 1885097 - RNA, 19 nt, Homo sapiens
  misc_RNA (1)...(19): siRNA sense strand
agaggagaaucuuucagaa

SEQ ID NO: 1885098 - RNA, 19 nt, Homo sapiens
  misc_RNA (1)...(19): siRNA sense strand
ggaguaugcgucugaagga

SEQ ID NO: 1885099 - RNA, 19 nt, Homo sapiens
  misc_RNA (1)...(19): siRNA sense strand
ggaugguagugacaacaga

SEQ ID NO: 1885100 - RNA, 19 nt, Homo sapiens
  misc_RNA (1)...(19): siRNA sense strand
ggaguggagcuuuugauua

SEQ ID NO: 1885101 - RNA, 19 nt, Homo sapiens
  misc_RNA (1)...(19): siRNA sense strand
ccaugaaguuaaauuccaa

SEQ ID NO: 1885102 - RNA, 19 nt, Homo sapiens
  misc_RNA (1)...(19): siRNA sense strand
agaaggagaaucaagagaa

SEQ ID NO: 1885103 - RNA, 19 nt, Homo sapiens
  misc_RNA (1)...(19): siRNA sense strand
gugcaggccuguguggauu

SEQ ID NO: 1885104 - RNA, 19 nt, Homo sapiens
  misc_RNA (1)...(19): siRNA sense strand
guauguauugcuacgguua

SEQ ID NO: 1885105 - RNA, 19 nt, Homo sapiens
  misc_RNA (1)...(19): siRNA sense strand
uuaaagcuguguuacuaca

SEQ ID NO: 1885106 - RNA, 19 nt, Homo sapiens
  misc_RNA (1)...(19): siRNA sense strand
auacagauccucagauauc

SEQ ID NO: 1885107 - RNA, 19 nt, Homo sapiens
  misc_RNA (1)...(19): siRNA sense strand
caaccuggucuguggauga

SEQ ID NO: 1885108 - RNA, 19 nt, Homo sapiens
  misc_RNA (1)...(19): siRNA sense strand
aagaagauguaacagaaag

SEQ ID NO: 1885109 - RNA, 19 nt, Homo sapiens
  misc_RNA (1)...(19): siRNA sense strand
gauaacugccuccuuugau

SEQ ID NO: 1885110 - RNA, 19 nt, Homo sapiens
  misc_RNA (1)...(19): siRNA sense strand
aaguaugauucucgagaua

SEQ ID NO: 1885111 - RNA, 19 nt, Homo sapiens
  misc_RNA (1)...(19): siRNA sense strand
gaccauuggagauguuaaa

SEQ ID NO: 1885112 - RNA, 19 nt, Homo sapiens
  misc_RNA (1)...(19): siRNA sense strand
gaugaaacuggaagcuauu

SEQ ID NO: 1885113 - RNA, 19 nt, Homo sapiens
  misc_RNA (1)...(19): siRNA sense strand
guagugacaacagaaauga

SEQ ID NO: 1885114 - RNA, 19 nt, Homo sapiens
  misc_RNA (1)...(19): siRNA sense strand
aaaggaaggagacuuacuu

SEQ ID NO: 1885115 - RNA, 19 nt, Homo sapiens
  misc_RNA (1)...(19): siRNA sense strand
aaacauacagauccucaga

SEQ ID NO: 1885116 - RNA, 19 nt, Homo sapiens
  misc_RNA (1)...(19): siRNA sense strand
cuguagaaauccuauguau

SEQ ID NO: 1885117 - RNA, 19 nt, Homo sapiens
  misc_RNA (1)...(19): siRNA sense strand
caucugccacauuauuuaa

SEQ ID NO: 1885118 - RNA, 19 nt, Homo sapiens
  misc_RNA (1)...(19): siRNA sense strand
ugaaaaggaaggagacuua

SEQ ID NO: 1885119 - RNA, 19 nt, Homo sapiens
  misc_RNA (1)...(19): siRNA sense strand
caggagaucaagucgaauu

SEQ ID NO: 1885120 - RNA, 19 nt, Homo sapiens
  misc_RNA (1)...(19): siRNA sense strand
gaagauuccauggauguca

SEQ ID NO: 1885121 - RNA, 19 nt, Homo sapiens
  misc_RNA (1)...(19): siRNA sense strand
uggccgauguuccucuuaa

SEQ ID NO: 1885122 - RNA, 19 nt, Homo sapiens
  misc_RNA (1)...(19): siRNA sense strand
ggccgauguuccucuuaaa

SEQ ID NO: 1885123 - RNA, 19 nt, Homo sapiens
  misc_RNA (1)...(19): siRNA sense strand
ucaggcaacaugaaauuga

SEQ ID NO: 1885124 - RNA, 19 nt, Homo sapiens
  misc_RNA (1)...(19): siRNA sense strand
auugugcccuugaaacuaa

SEQ ID NO: 1885125 - RNA, 19 nt, Homo sapiens
  misc_RNA (1)...(19): siRNA sense strand
aaauagugaugucuacagu

SEQ ID NO: 1885126 - RNA, 19 nt, Homo sapiens
  misc_RNA (1)...(19): siRNA sense strand
aauccugccuguagaaauc

SEQ ID NO: 1885127 - RNA, 19 nt, Homo sapiens
  misc_RNA (1)...(19): siRNA sense strand
ccaaagaaauguccaauag

SEQ ID NO: 1885128 - RNA, 19 nt, Homo sapiens
  misc_RNA (1)...(19): siRNA sense strand
ccucaaagcucgucugauu

SEQ ID NO: 1885129 - RNA, 19 nt, Homo sapiens
  misc_RNA (1)...(19): siRNA sense strand
gaaaagacauccugaaaga

SEQ ID NO: 1885130 - RNA, 19 nt, Homo sapiens
  misc_RNA (1)...(19): siRNA sense strand
ggacagagcagcaugauuc

SEQ ID NO: 1885131 - RNA, 19 nt, Homo sapiens
  misc_RNA (1)...(19): siRNA sense strand
ccaacaaugugaucacuuu

SEQ ID NO: 1885132 - RNA, 19 nt, Homo sapiens
  misc_RNA (1)...(19): siRNA sense strand
ggucagauaugcaagaaug

SEQ ID NO: 1885133 - RNA, 19 nt, Homo sapiens
  misc_RNA (1)...(19): siRNA sense strand
agagagcgcuggucuauug

SEQ ID NO: 1885134 - RNA, 19 nt, Homo sapiens
  misc_RNA (1)...(19): siRNA sense strand
gagcaaaggaucacauauu

SEQ ID NO: 1885135 - RNA, 19 nt, Homo sapiens
  misc_RNA (1)...(19): siRNA sense strand
gaagucuggugaauaaaug

SEQ ID NO: 1885136 - RNA, 19 nt, Homo sapiens
  misc_RNA (1)...(19): siRNA sense strand
ccacagcccugaagagaga

SEQ ID NO: 1885137 - RNA, 19 nt, Homo sapiens
  misc_RNA (1)...(19): siRNA sense strand
gaagagagaaucaucuaug

SEQ ID NO: 1885138 - RNA, 19 nt, Homo sapiens
  misc_RNA (1)...(19): siRNA sense strand
gauccaaaguucauuagug

SEQ ID NO: 1885139 - RNA, 19 nt, Homo sapiens
  misc_RNA (1)...(19): siRNA sense strand
ucaagguacuuaaggcaua

SEQ ID NO: 1885140 - RNA, 19 nt, Homo sapiens
  misc_RNA (1)...(19): siRNA sense strand
guuauaaccuuugcaagaa

SEQ ID NO: 1885141 - RNA, 19 nt, Homo sapiens
  misc_RNA (1)...(19): siRNA sense strand
gaucagccguguguaugua

SEQ ID NO: 1885142 - RNA, 19 nt, Homo sapiens
  misc_RNA (1)...(19): siRNA sense strand
gcaccuacauugaaauugg

SEQ ID NO: 1885143 - RNA, 19 nt, Homo sapiens
  misc_RNA (1)...(19): siRNA sense strand
acaaagaaauguuggaauc

SEQ ID NO: 1885144 - RNA, 19 nt, Homo sapiens
  misc_RNA (1)...(19): siRNA sense strand
uggaagcacuuacaagaaa

SEQ ID NO: 1885145 - RNA, 19 nt, Homo sapiens
  misc_RNA (1)...(19): siRNA sense strand
gaaagcgugugcugagugu

SEQ ID NO: 1885146 - RNA, 19 nt, Homo sapiens
  misc_RNA (1)...(19): siRNA sense strand
gaagucauccagccaugua

SEQ ID NO: 1885147 - RNA, 19 nt, Homo sapiens
  misc_RNA (1)...(19): siRNA sense strand
uaugaacaaucgcccaaua

SEQ ID NO: 1885148 - RNA, 19 nt, Homo sapiens
  misc_RNA (1)...(19): siRNA sense strand
aaagaaauguccaauagca

SEQ ID NO: 1885149 - RNA, 19 nt, Homo sapiens
  misc_RNA (1)...(19): siRNA sense strand
gaagauggacaguaugaug

SEQ ID NO: 1885150 - RNA, 19 nt, Homo sapiens
  misc_RNA (1)...(19): siRNA sense strand
gcucaaugauccaaaguuc

SEQ ID NO: 1885151 - RNA, 19 nt, Homo sapiens
  misc_RNA (1)...(19): siRNA sense strand
gccaacagcuccaguuauc

SEQ ID NO: 1885152 - RNA, 19 nt, Homo sapiens
  misc_RNA (1)...(19): siRNA sense strand
uaacuaggauugucugucu

SEQ ID NO: 1885153 - RNA, 19 nt, Homo sapiens
  misc_RNA (1)...(19): siRNA sense strand
ggaaccgacugcuauuuca

SEQ ID NO: 1885154 - RNA, 19 nt, Homo sapiens
  misc_RNA (1)...(19): siRNA sense strand
agcaaaggaucacauauuu

SEQ ID NO: 1885155 - RNA, 19 nt, Homo sapiens
  misc_RNA (1)...(19): siRNA sense strand
ggaccuuccugaugauguu

SEQ ID NO: 1885156 - RNA, 19 nt, Homo sapiens
  misc_RNA (1)...(19): siRNA sense strand
gcacaagacgacaagauau

SEQ ID NO: 1885157 - RNA, 19 nt, Homo sapiens
  misc_RNA (1)...(19): siRNA sense strand
gcaaagagacgcacaagac

SEQ ID NO: 1885158 - RNA, 19 nt, Homo sapiens
  misc_RNA (1)...(19): siRNA sense strand
gauggacaguaugauguua

SEQ ID NO: 1885159 - RNA, 19 nt, Homo sapiens
  misc_RNA (1)...(19): siRNA sense strand
gugaauaaauggacaacau

SEQ ID NO: 1885160 - RNA, 19 nt, Homo sapiens
  misc_RNA (1)...(19): siRNA sense strand
cauguacaauccaguguuu

SEQ ID NO: 1885161 - RNA, 19 nt, Homo sapiens
  misc_RNA (1)...(19): siRNA sense strand
uaacaaauggaagcacuua

SEQ ID NO: 1885162 - RNA, 19 nt, Homo sapiens
  misc_RNA (1)...(19): siRNA sense strand
acacagagcauuuggaaga

SEQ ID NO: 1885163 - RNA, 19 nt, Homo sapiens
  misc_RNA (1)...(19): siRNA sense strand
gcagagagcgcuggucuau

SEQ ID NO: 1885164 - RNA, 19 nt, Homo sapiens
  misc_RNA (1)...(19): siRNA sense strand
cagcaacaacuauauauug

SEQ ID NO: 1885165 - RNA, 19 nt, Homo sapiens
  misc_RNA (1)...(19): siRNA sense strand
ggagaauuauacucuggaa

SEQ ID NO: 1885166 - RNA, 19 nt, Homo sapiens
  misc_RNA (1)...(19): siRNA sense strand
gaacaaucgcccaauagug

SEQ ID NO: 1885167 - RNA, 19 nt, Homo sapiens
  misc_RNA (1)...(19): siRNA sense strand
cauacaaacucuucuuaag

SEQ ID NO: 1885168 - RNA, 19 nt, Homo sapiens
  misc_RNA (1)...(19): siRNA sense strand
gcucuaagaccaaagaaau

SEQ ID NO: 1885169 - RNA, 19 nt, Homo sapiens
  misc_RNA (1)...(19): siRNA sense strand
cauucgaccugguuaauau

SEQ ID NO: 1885170 - RNA, 19 nt, Homo sapiens
  misc_RNA (1)...(19): siRNA sense strand
caggaggacccacgaauuu

SEQ ID NO: 1885171 - RNA, 19 nt, Homo sapiens
  misc_RNA (1)...(19): siRNA sense strand
gaaauguccaauagcauga

SEQ ID NO: 1885172 - RNA, 19 nt, Homo sapiens
  misc_RNA (1)...(19): siRNA sense strand
ggacaacauuccucaaagc

SEQ ID NO: 1885173 - RNA, 19 nt, Homo sapiens
  misc_RNA (1)...(19): siRNA sense strand
uaaagaugaugauggagau

SEQ ID NO: 1885174 - RNA, 19 nt, Homo sapiens
  misc_RNA (1)...(19): siRNA sense strand
gaauaggucagauaugcaa

SEQ ID NO: 1885175 - RNA, 19 nt, Homo sapiens
  misc_RNA (1)...(19): siRNA sense strand
guucagacuuacaccauga

SEQ ID NO: 1885176 - RNA, 19 nt, Homo sapiens
  misc_RNA (1)...(19): siRNA sense strand
gaacggaguaggcuguaug

SEQ ID NO: 1885177 - RNA, 19 nt, Homo sapiens
  misc_RNA (1)...(19): siRNA sense strand
gagaaucaucuauggugua

SEQ ID NO: 1885178 - RNA, 19 nt, Homo sapiens
  misc_RNA (1)...(19): siRNA sense strand
gacaagauauaagaaaugg

SEQ ID NO: 1885179 - RNA, 19 nt, Homo sapiens
  misc_RNA (1)...(19): siRNA sense strand
ggagacuugguaugauuua

SEQ ID NO: 1885180 - RNA, 19 nt, Homo sapiens
  misc_RNA (1)...(19): siRNA sense strand
uagcaugagugaugugaga

SEQ ID NO: 1885181 - RNA, 19 nt, Homo sapiens
  misc_RNA (1)...(19): siRNA sense strand
guacuuaaggcauauaauc

SEQ ID NO: 1885182 - RNA, 19 nt, Homo sapiens
  misc_RNA (1)...(19): siRNA sense strand
gacucacuguucagacuua

SEQ ID NO: 1885183 - RNA, 19 nt, Homo sapiens
  misc_RNA (1)...(19): siRNA sense strand
ggaggacccacgaauuuga

SEQ ID NO: 1885184 - RNA, 19 nt, Homo sapiens
  misc_RNA (1)...(19): siRNA sense strand
gaaaagggaccgaaaacaa

SEQ ID NO: 1885185 - RNA, 19 nt, Homo sapiens
  misc_RNA (1)...(19): siRNA sense strand
cagaguggaugaucauauc

SEQ ID NO: 1885186 - RNA, 19 nt, Homo sapiens
  misc_RNA (1)...(19): siRNA sense strand
gacuugguaugauuuagaa

SEQ ID NO: 1885187 - RNA, 19 nt, Homo sapiens
  misc_RNA (1)...(19): siRNA sense strand
gcagcaacaacuauauauu

SEQ ID NO: 1885188 - RNA, 19 nt, Homo sapiens
  misc_RNA (1)...(19): siRNA sense strand
aaagacauccugaaagaau

SEQ ID NO: 1885189 - RNA, 19 nt, Homo sapiens
  misc_RNA (1)...(19): siRNA sense strand
cacaagacgacaagauaua

SEQ ID NO: 1885190 - RNA, 19 nt, Homo sapiens
  misc_RNA (1)...(19): siRNA sense strand
cuaaggagacuugguauga

SEQ ID NO: 1885191 - RNA, 19 nt, Homo sapiens
  misc_RNA (1)...(19): siRNA sense strand
uagaauaggucagauaugc

SEQ ID NO: 1885192 - RNA, 19 nt, Homo sapiens
  misc_RNA (1)...(19): siRNA sense strand
gggauggacccaacuauca

SEQ ID NO: 1885193 - RNA, 19 nt, Homo sapiens
  misc_RNA (1)...(19): siRNA sense strand
uacaaacucuucuuaaggu

SEQ ID NO: 1885194 - RNA, 19 nt, Homo sapiens
  misc_RNA (1)...(19): siRNA sense strand
gauaugcaagaaugacuuu

SEQ ID NO: 1885195 - RNA, 19 nt, Homo sapiens
  misc_RNA (1)...(19): siRNA sense strand
aaggagacuugguaugauu

SEQ ID NO: 1885196 - RNA, 19 nt, Homo sapiens
  misc_RNA (1)...(19): siRNA sense strand
ggaccguucuuaaaguagu

SEQ ID NO: 1885197 - RNA, 19 nt, Homo sapiens
  misc_RNA (1)...(19): siRNA sense strand
ugcagaagauggacaguau

SEQ ID NO: 1885198 - RNA, 19 nt, Homo sapiens
  misc_RNA (1)...(19): siRNA sense strand
gaaugcaagugggcuggaa

SEQ ID NO: 1885199 - RNA, 19 nt, Homo sapiens
  misc_RNA (1)...(19): siRNA sense strand
acagaaggauucaggcaau

SEQ ID NO: 1885200 - RNA, 19 nt, Homo sapiens
  misc_RNA (1)...(19): siRNA sense strand
gcuagaauaggucagauau

SEQ ID NO: 1885201 - RNA, 19 nt, Homo sapiens
  misc_RNA (1)...(19): siRNA sense strand
uccugaagaugacaaagua

SEQ ID NO: 1885202 - RNA, 19 nt, Homo sapiens
  misc_RNA (1)...(19): siRNA sense strand
gugacaauccugaagauga

SEQ ID NO: 1885203 - RNA, 19 nt, Homo sapiens
  misc_RNA (1)...(19): siRNA sense strand
gaauuauacucuggaacug

SEQ ID NO: 1885204 - RNA, 19 nt, Homo sapiens
  misc_RNA (1)...(19): siRNA sense strand
gcgagacuuugcuaucuuc

SEQ ID NO: 1885205 - RNA, 19 nt, Homo sapiens
  misc_RNA (1)...(19): siRNA sense strand
gauguugggaccguucuua

SEQ ID NO: 1885206 - RNA, 19 nt, Homo sapiens
  misc_RNA (1)...(19): siRNA sense strand
cagaagauggacaguauga

SEQ ID NO: 1885207 - RNA, 19 nt, Homo sapiens
  misc_RNA (1)...(19): siRNA sense strand
gaucaaaacggauguaaau

SEQ ID NO: 1885208 - RNA, 19 nt, Homo sapiens
  misc_RNA (1)...(19): siRNA sense strand
ugccaaggcugaaauuauc

SEQ ID NO: 1885209 - RNA, 19 nt, Homo sapiens
  misc_RNA (1)...(19): siRNA sense strand
agaaugugcuaauuucauc

SEQ ID NO: 1885210 - RNA, 19 nt, Homo sapiens
  misc_RNA (1)...(19): siRNA sense strand
caaauggaagcacuuacaa

SEQ ID NO: 1885211 - RNA, 19 nt, Homo sapiens
  misc_RNA (1)...(19): siRNA sense strand
cggcaaaggccaggacaua

SEQ ID NO: 1885212 - RNA, 19 nt, Homo sapiens
  misc_RNA (1)...(19): siRNA sense strand
ugacacagagcauuuggaa

SEQ ID NO: 1885213 - RNA, 19 nt, Homo sapiens
  misc_RNA (1)...(19): siRNA sense strand
caaacucuucuuaagguaa

SEQ ID NO: 1885214 - RNA, 19 nt, Homo sapiens
  misc_RNA (1)...(19): siRNA sense strand
agagaauaguagcacauuu

SEQ ID NO: 1885215 - RNA, 19 nt, Homo sapiens
  misc_RNA (1)...(19): siRNA sense strand
caagagcaaacuaucagaa

SEQ ID NO: 1885216 - RNA, 19 nt, Homo sapiens
  misc_RNA (1)...(19): siRNA sense strand
cuaagcagcaacaacuaua

SEQ ID NO: 1885217 - RNA, 19 nt, Homo sapiens
  misc_RNA (1)...(19): siRNA sense strand
aacaaucgcccaauaguga

SEQ ID NO: 1885218 - RNA, 19 nt, Homo sapiens
  misc_RNA (1)...(19): siRNA sense strand
aauccaguguuuccuauga

SEQ ID NO: 1885219 - RNA, 19 nt, Homo sapiens
  misc_RNA (1)...(19): siRNA sense strand
gcugaaauuauccuacaaa

SEQ ID NO: 1885220 - RNA, 19 nt, Homo sapiens
  misc_RNA (1)...(19): siRNA sense strand
gagaauaguagcacauuuu

SEQ ID NO: 1885221 - RNA, 19 nt, Homo sapiens
  misc_RNA (1)...(19): siRNA sense strand
cgacaagauauaagaaaug

SEQ ID NO: 1885222 - RNA, 19 nt, Homo sapiens
  misc_RNA (1)...(19): siRNA sense strand
acaaugugaucacuuucaa

SEQ ID NO: 1885223 - RNA, 19 nt, Homo sapiens
  misc_RNA (1)...(19): siRNA sense strand
agagcaaacuaucagaaug

SEQ ID NO: 1885224 - RNA, 19 nt, Homo sapiens
  misc_RNA (1)...(19): siRNA sense strand
gagcaaacuaucagaaugg

SEQ ID NO: 1885225 - RNA, 19 nt, Homo sapiens
  misc_RNA (1)...(19): siRNA sense strand
gagugacaauccugaagau

SEQ ID NO: 1885226 - RNA, 19 nt, Homo sapiens
  misc_RNA (1)...(19): siRNA sense strand
gacagcaucccuuuuaaua

SEQ ID NO: 1885227 - RNA, 19 nt, Homo sapiens
  misc_RNA (1)...(19): siRNA sense strand
aaagggagauugugaauaa

SEQ ID NO: 1885228 - RNA, 19 nt, Homo sapiens
  misc_RNA (1)...(19): siRNA sense strand
caaagaggcugcagcaaau

SEQ ID NO: 1885229 - RNA, 19 nt, Homo sapiens
  misc_RNA (1)...(19): siRNA sense strand
acgaagaucucuauaguaa

SEQ ID NO: 1885230 - RNA, 19 nt, Homo sapiens
  misc_RNA (1)...(19): siRNA sense strand
gaagaucucuauaguaacu

SEQ ID NO: 1885231 - RNA, 19 nt, Homo sapiens
  misc_RNA (1)...(19): siRNA sense strand
gaaacaugcugaagaugga

SEQ ID NO: 1885232 - RNA, 19 nt, Homo sapiens
  misc_RNA (1)...(19): siRNA sense strand
guacgaagaucucuauagu

SEQ ID NO: 1885233 - RNA, 19 nt, Homo sapiens
  misc_RNA (1)...(19): siRNA sense strand
gacuauaugucccuuauga

SEQ ID NO: 1885234 - RNA, 19 nt, Homo sapiens
  misc_RNA (1)...(19): siRNA sense strand
gggcaaaccagugcaauua

SEQ ID NO: 1885235 - RNA, 19 nt, Homo sapiens
  misc_RNA (1)...(19): siRNA sense strand
auacacagguuguuuggua

SEQ ID NO: 1885236 - RNA, 19 nt, Homo sapiens
  misc_RNA (1)...(19): siRNA sense strand
ccagaaacaugcugaagau

SEQ ID NO: 1885237 - RNA, 19 nt, Homo sapiens
  misc_RNA (1)...(19): siRNA sense strand
gcaaaccagugcaauuaca

SEQ ID NO: 1885238 - RNA, 19 nt, Homo sapiens
  misc_RNA (1)...(19): siRNA sense strand
gaucgaaugacaagucuaa

SEQ ID NO: 1885239 - RNA, 19 nt, Homo sapiens
  misc_RNA (1)...(19): siRNA sense strand
uaauugggcuaauagacua

SEQ ID NO: 1885240 - RNA, 19 nt, Homo sapiens
  misc_RNA (1)...(19): siRNA sense strand
gaagauggaauggaacaaa

SEQ ID NO: 1885241 - RNA, 19 nt, Homo sapiens
  misc_RNA (1)...(19): siRNA sense strand
gcugguaauugggcuaaua

SEQ ID NO: 1885242 - RNA, 19 nt, Homo sapiens
  misc_RNA (1)...(19): siRNA sense strand
gauggacuaugcaccaaug

SEQ ID NO: 1885243 - RNA, 19 nt, Homo sapiens
  misc_RNA (1)...(19): siRNA sense strand
acaaagaggcugcagcaaa

SEQ ID NO: 1885244 - RNA, 19 nt, Homo sapiens
  misc_RNA (1)...(19): siRNA sense strand
cuacuauguuugccaauau

SEQ ID NO: 1885245 - RNA, 19 nt, Homo sapiens
  misc_RNA (1)...(19): siRNA sense strand
gcaaagggagauugugaau

SEQ ID NO: 1885246 - RNA, 19 nt, Homo sapiens
  misc_RNA (1)...(19): siRNA sense strand
aaagcugguuugaugagua

SEQ ID NO: 1885247 - RNA, 19 nt, Homo sapiens
  misc_RNA (1)...(19): siRNA sense strand
acauuaaccuguaaacauc

SEQ ID NO: 1885248 - RNA, 19 nt, Homo sapiens
  misc_RNA (1)...(19): siRNA sense strand
gcagugguuggacauuaua

SEQ ID NO: 1885249 - RNA, 19 nt, Homo sapiens
  misc_RNA (1)...(19): siRNA sense strand
caaguacgaagaucucuau

SEQ ID NO: 1885250 - RNA, 19 nt, Homo sapiens
  misc_RNA (1)...(19): siRNA sense strand
caaagggagauugugaaua

SEQ ID NO: 1885251 - RNA, 19 nt, Homo sapiens
  misc_RNA (1)...(19): siRNA sense strand
uagacuauaugucccuuau

SEQ ID NO: 1885252 - RNA, 19 nt, Homo sapiens
  misc_RNA (1)...(19): siRNA sense strand
gcaaguacgaagaucucua

SEQ ID NO: 1885253 - RNA, 19 nt, Homo sapiens
  misc_RNA (1)...(19): siRNA sense strand
aagcucacauuaaccugua

SEQ ID NO: 1885254 - RNA, 19 nt, Homo sapiens
  misc_RNA (1)...(19): siRNA sense strand
uaacugugacgauggacua

SEQ ID NO: 1885255 - RNA, 19 nt, Homo sapiens
  misc_RNA (1)...(19): siRNA sense strand
guuugaagcucacauuaac

SEQ ID NO: 1885256 - RNA, 19 nt, Homo sapiens
  misc_RNA (1)...(19): siRNA sense strand
ugaauaagcacaaugaacu

SEQ ID NO: 1885257 - RNA, 19 nt, Homo sapiens
  misc_RNA (1)...(19): siRNA sense strand
caaaggaucgaaugacaag

SEQ ID NO: 1885258 - RNA, 19 nt, Homo sapiens
  misc_RNA (1)...(19): siRNA sense strand
gugcaaagggagauuguga

SEQ ID NO: 1885259 - RNA, 19 nt, Homo sapiens
  misc_RNA (1)...(19): siRNA sense strand
acgcagugguuggacauua

SEQ ID NO: 1885260 - RNA, 19 nt, Homo sapiens
  misc_RNA (1)...(19): siRNA sense strand
gaauaagcacaaugaacug

SEQ ID NO: 1885261 - RNA, 19 nt, Homo sapiens
  misc_RNA (1)...(19): siRNA sense strand
aauauuguccugcugguaa

SEQ ID NO: 1885262 - RNA, 19 nt, Homo sapiens
  misc_RNA (1)...(19): siRNA sense strand
gccagaaacaugcugaaga

SEQ ID NO: 1885263 - RNA, 19 nt, Homo sapiens
  misc_RNA (1)...(19): siRNA sense strand
guaauugggcuaauagacu

SEQ ID NO: 1885264 - RNA, 19 nt, Homo sapiens
  misc_RNA (1)...(19): siRNA sense strand
acuacuauguuugccaaua

SEQ ID NO: 1885265 - RNA, 19 nt, Homo sapiens
  misc_RNA (1)...(19): siRNA sense strand
gguuugaugaguacaauga

SEQ ID NO: 1885266 - RNA, 19 nt, Homo sapiens
  misc_RNA (1)...(19): siRNA sense strand
cccaaaggaucgaaugaca

SEQ ID NO: 1885267 - RNA, 19 nt, Homo sapiens
  misc_RNA (1)...(19): siRNA sense strand
gggagauugugaauaagca

SEQ ID NO: 1885268 - RNA, 19 nt, Homo sapiens
  misc_RNA (1)...(19): siRNA sense strand
gcaaggccuccugcaauug

SEQ ID NO: 1885269 - RNA, 19 nt, Homo sapiens
  misc_RNA (1)...(19): siRNA sense strand
cacauuaaccuguaaacau

SEQ ID NO: 1885270 - RNA, 19 nt, Homo sapiens
  misc_RNA (1)...(19): siRNA sense strand
aagauaaggaucccgcuuu

SEQ ID NO: 1885271 - RNA, 19 nt, Homo sapiens
  misc_RNA (1)...(19): siRNA sense strand
auaugucccuuaugaacaa

SEQ ID NO: 1885272 - RNA, 19 nt, Homo sapiens
  misc_RNA (1)...(19): siRNA sense strand
ccaaaggaucgaaugacaa

SEQ ID NO: 1885273 - RNA, 19 nt, Homo sapiens
  misc_RNA (1)...(19): siRNA sense strand
cagcaaaugaagauaagga

SEQ ID NO: 1885274 - RNA, 19 nt, Homo sapiens
  misc_RNA (1)...(19): siRNA sense strand
ucaagugccuccagcucau

SEQ ID NO: 1885275 - RNA, 19 nt, Homo sapiens
  misc_RNA (1)...(19): siRNA sense strand
caaggccuccugcaauugu

SEQ ID NO: 1885276 - RNA, 19 nt, Homo sapiens
  misc_RNA (1)...(19): siRNA sense strand
cgcagugguuggacauuau

SEQ ID NO: 1885277 - RNA, 19 nt, Homo sapiens
  misc_RNA (1)...(19): siRNA sense strand
agauaacugugacgaugga

SEQ ID NO: 1885278 - RNA, 19 nt, Homo sapiens
  misc_RNA (1)...(19): siRNA sense strand
aagauggaauggaacaaag

SEQ ID NO: 1885279 - RNA, 19 nt, Homo sapiens
  misc_RNA (1)...(19): siRNA sense strand
guuaaccacccaaacacaa

SEQ ID NO: 1885280 - RNA, 19 nt, Homo sapiens
  misc_RNA (1)...(19): siRNA sense strand
gacauuauacacagguugu

SEQ ID NO: 1885281 - RNA, 19 nt, Homo sapiens
  misc_RNA (1)...(19): siRNA sense strand
cugggcugcuuccaucuuu

SEQ ID NO: 1885282 - RNA, 19 nt, Homo sapiens
  misc_RNA (1)...(19): siRNA sense strand
aaaguuugaagcucacauu

SEQ ID NO: 1885283 - RNA, 19 nt, Homo sapiens
  misc_RNA (1)...(19): siRNA sense strand
uacgaagaucucuauagua

SEQ ID NO: 1885284 - RNA, 19 nt, Homo sapiens
  misc_RNA (1)...(19): siRNA sense strand
ugugccaguugcccagaua

SEQ ID NO: 1885285 - RNA, 19 nt, Homo sapiens
  misc_RNA (1)...(19): siRNA sense strand
ugcugaagauggaauggaa

SEQ ID NO: 1885286 - RNA, 19 nt, Homo sapiens
  misc_RNA (1)...(19): siRNA sense strand
cauuauacacagguuguuu

SEQ ID NO: 1885287 - RNA, 19 nt, Homo sapiens
  misc_RNA (1)...(19): siRNA sense strand
ucuaaaauguggugagaau

SEQ ID NO: 1885288 - RNA, 19 nt, Homo sapiens
  misc_RNA (1)...(19): siRNA sense strand
guacucuucauaccucguu

SEQ ID NO: 1885289 - RNA, 19 nt, Homo sapiens
  misc_RNA (1)...(19): siRNA sense strand
uaacccaaaggaucgaaug

SEQ ID NO: 1885290 - RNA, 19 nt, Homo sapiens
  misc_RNA (1)...(19): siRNA sense strand
gauaaggaucccgcuuuua

SEQ ID NO: 1885291 - RNA, 19 nt, Homo sapiens
  misc_RNA (1)...(19): siRNA sense strand
caauauuguccugcuggua

SEQ ID NO: 1885292 - RNA, 19 nt, Homo sapiens
  misc_RNA (1)...(19): siRNA sense strand
gcucauggucacaagcaau

SEQ ID NO: 1885293 - RNA, 19 nt, Homo sapiens
  misc_RNA (1)...(19): siRNA sense strand
ggucacaagcaauccaaag

SEQ ID NO: 1885294 - RNA, 19 nt, Homo sapiens
  misc_RNA (1)...(19): siRNA sense strand
agauaaggaucccgcuuuu

SEQ ID NO: 1885295 - RNA, 19 nt, Homo sapiens
  misc_RNA (1)...(19): siRNA sense strand
aaguuugaagcucacauua

SEQ ID NO: 1885296 - RNA, 19 nt, Homo sapiens
  misc_RNA (1)...(19): siRNA sense strand
caagugcaaagggagauug

SEQ ID NO: 1885297 - RNA, 19 nt, Homo sapiens
  misc_RNA (1)...(19): siRNA sense strand
acagacacaguaacccaaa

SEQ ID NO: 1885298 - RNA, 19 nt, Homo sapiens
  misc_RNA (1)...(19): siRNA sense strand
gcucacauuaaccuguaaa

SEQ ID NO: 1885299 - RNA, 19 nt, Homo sapiens
  misc_RNA (1)...(19): siRNA sense strand
gugaauaagcacaaugaac

SEQ ID NO: 1885300 - RNA, 19 nt, Homo sapiens
  misc_RNA (1)...(19): siRNA sense strand
aguuugaagcucacauuaa

SEQ ID NO: 1885301 - RNA, 19 nt, Homo sapiens
  misc_RNA (1)...(19): siRNA sense strand
uauaugucccuuaugaaca

SEQ ID NO: 1885302 - RNA, 19 nt, Homo sapiens
  misc_RNA (1)...(19): siRNA sense strand
gccaggagcucaaacuauu

SEQ ID NO: 1885303 - RNA, 19 nt, Homo sapiens
  misc_RNA (1)...(19): siRNA sense strand
gcgaccaccugcacaagaa

SEQ ID NO: 1885304 - RNA, 19 nt, Homo sapiens
  misc_RNA (1)...(19): siRNA sense strand
ccaacucucuccucuggaa

SEQ ID NO: 1885305 - RNA, 19 nt, Homo sapiens
  misc_RNA (1)...(19): siRNA sense strand
gucagcaacugguuuaaga

SEQ ID NO: 1885306 - RNA, 19 nt, Homo sapiens
  misc_RNA (1)...(19): siRNA sense strand
gagaccagcuacugcuuca

SEQ ID NO: 1885307 - RNA, 19 nt, Homo sapiens
  misc_RNA (1)...(19): siRNA sense strand
gaacgagagcguacucaag

SEQ ID NO: 1885308 - RNA, 19 nt, Homo sapiens
  misc_RNA (1)...(19): siRNA sense strand
gaaagggagaacaccgaaa

SEQ ID NO: 1885309 - RNA, 19 nt, Homo sapiens
  misc_RNA (1)...(19): siRNA sense strand
gcucauguccagcucagaa

SEQ ID NO: 1885310 - RNA, 19 nt, Homo sapiens
  misc_RNA (1)...(19): siRNA sense strand
uccgugagcucuacaagau

SEQ ID NO: 1885311 - RNA, 19 nt, Homo sapiens
  misc_RNA (1)...(19): siRNA sense strand
caacuuccgugagcucuac

SEQ ID NO: 1885312 - RNA, 19 nt, Homo sapiens
  misc_RNA (1)...(19): siRNA sense strand
caggucagcaacugguuua

SEQ ID NO: 1885313 - RNA, 19 nt, Homo sapiens
  misc_RNA (1)...(19): siRNA sense strand
gagaacaccgaaaacaaua

SEQ ID NO: 1885314 - RNA, 19 nt, Homo sapiens
  misc_RNA (1)...(19): siRNA sense strand
gcuacugcuucaaggagaa

SEQ ID NO: 1885315 - RNA, 19 nt, Homo sapiens
  misc_RNA (1)...(19): siRNA sense strand
uuuaagaaccggaggcaaa

SEQ ID NO: 1885316 - RNA, 19 nt, Homo sapiens
  misc_RNA (1)...(19): siRNA sense strand
ggagaacaccgaaaacaau

SEQ ID NO: 1885317 - RNA, 19 nt, Homo sapiens
  misc_RNA (1)...(19): siRNA sense strand
caccaguucucgccucaca

SEQ ID NO: 1885318 - RNA, 19 nt, Homo sapiens
  misc_RNA (1)...(19): siRNA sense strand
ccaacaagcagaaccaacu

SEQ ID NO: 1885319 - RNA, 19 nt, Homo sapiens
  misc_RNA (1)...(19): siRNA sense strand
uaacuccuccuccaacaag

SEQ ID NO: 1885320 - RNA, 19 nt, Homo sapiens
  misc_RNA (1)...(19): siRNA sense strand
gcaacuuccgugagcucua

SEQ ID NO: 1885321 - RNA, 19 nt, Homo sapiens
  misc_RNA (1)...(19): siRNA sense strand
gaccagcuacugcuucaag

SEQ ID NO: 1885322 - RNA, 19 nt, Homo sapiens
  misc_RNA (1)...(19): siRNA sense strand
ccacccaggucagcaacug

SEQ ID NO: 1885323 - RNA, 19 nt, Homo sapiens
  misc_RNA (1)...(19): siRNA sense strand
aauaacuccuccuccaaca

SEQ ID NO: 1885324 - RNA, 19 nt, Homo sapiens
  misc_RNA (1)...(19): siRNA sense strand
gcgaggagaccagcuacug

SEQ ID NO: 1885325 - RNA, 19 nt, Homo sapiens
  misc_RNA (1)...(19): siRNA sense strand
acaauaacuccuccuccaa

SEQ ID NO: 1885326 - RNA, 19 nt, Homo sapiens
  misc_RNA (1)...(19): siRNA sense strand
caacaagcagaaccaacuc

SEQ ID NO: 1885327 - RNA, 19 nt, Homo sapiens
  misc_RNA (1)...(19): siRNA sense strand
guccagcucagaagaggaa

SEQ ID NO: 1885328 - RNA, 19 nt, Homo sapiens
  misc_RNA (1)...(19): siRNA sense strand
ggagugguacgcgcacaau

SEQ ID NO: 1885329 - RNA, 19 nt, Homo sapiens
  misc_RNA (1)...(19): siRNA sense strand
ccaccagcaucagcuccaa

SEQ ID NO: 1885330 - RNA, 19 nt, Homo sapiens
  misc_RNA (1)...(19): siRNA sense strand
gggaugagaugcugucuuc

SEQ ID NO: 1885331 - RNA, 19 nt, Homo sapiens
  misc_RNA (1)...(19): siRNA sense strand
agaauuagcccuccaauca

SEQ ID NO: 1885332 - RNA, 19 nt, Homo sapiens
  misc_RNA (1)...(19): siRNA sense strand
ggaggaagaggaagaagaa

SEQ ID NO: 1885333 - RNA, 19 nt, Homo sapiens
  misc_RNA (1)...(19): siRNA sense strand
ggaagaggaagaagaauca

SEQ ID NO: 1885334 - RNA, 19 nt, Homo sapiens
  misc_RNA (1)...(19): siRNA sense strand
ucaaugaucaguucuagaa

SEQ ID NO: 1885335 - RNA, 19 nt, Homo sapiens
  misc_RNA (1)...(19): siRNA sense strand
ccugaacagucacaugaua

SEQ ID NO: 1885336 - RNA, 19 nt, Homo sapiens
  misc_RNA (1)...(19): siRNA sense strand
gaauuagcccuccaaucaa

SEQ ID NO: 1885337 - RNA, 19 nt, Homo sapiens
  misc_RNA (1)...(19): siRNA sense strand
aaugaucaguucuagaaga

SEQ ID NO: 1885338 - RNA, 19 nt, Homo sapiens
  misc_RNA (1)...(19): siRNA sense strand
gacaaugaagcaucaauca

SEQ ID NO: 1885339 - RNA, 19 nt, Homo sapiens
  misc_RNA (1)...(19): siRNA sense strand
ggaggaggaggaagaggaa

SEQ ID NO: 1885340 - RNA, 19 nt, Homo sapiens
  misc_RNA (1)...(19): siRNA sense strand
gcugucuucucacacugua

SEQ ID NO: 1885341 - RNA, 19 nt, Homo sapiens
  misc_RNA (1)...(19): siRNA sense strand
gcauguagacaaugaagca

SEQ ID NO: 1885342 - RNA, 19 nt, Homo sapiens
  misc_RNA (1)...(19): siRNA sense strand
caaugaagcaucaaucaac

SEQ ID NO: 1885343 - RNA, 19 nt, Homo sapiens
  misc_RNA (1)...(19): siRNA sense strand
aauuagcccuccaaucaau

SEQ ID NO: 1885344 - RNA, 19 nt, Homo sapiens
  misc_RNA (1)...(19): siRNA sense strand
uguagacaaugaagcauca

SEQ ID NO: 1885345 - RNA, 19 nt, Homo sapiens
  misc_RNA (1)...(19): siRNA sense strand
gaugcugucuucucacacu

SEQ ID NO: 1885346 - RNA, 19 nt, Homo sapiens
  misc_RNA (1)...(19): siRNA sense strand
ggaggaggaagaggaagaa

SEQ ID NO: 1885347 - RNA, 19 nt, Homo sapiens
  misc_RNA (1)...(19): siRNA sense strand
uaccugaacagucacauga

SEQ ID NO: 1885348 - RNA, 19 nt, Homo sapiens
  misc_RNA (1)...(19): siRNA sense strand
gaagaauuagcccuccaau

SEQ ID NO: 1885349 - RNA, 19 nt, Homo sapiens
  misc_RNA (1)...(19): siRNA sense strand
guuggugcauguagacaau

SEQ ID NO: 1885350 - RNA, 19 nt, Homo sapiens
  misc_RNA (1)...(19): siRNA sense strand
gcaucaaucaaccaaacaa

SEQ ID NO: 1885351 - RNA, 19 nt, Homo sapiens
  misc_RNA (1)...(19): siRNA sense strand
aagcaucaaucaaccaaac

SEQ ID NO: 1885352 - RNA, 19 nt, Homo sapiens
  misc_RNA (1)...(19): siRNA sense strand
gaagcaucaaucaaccaaa

SEQ ID NO: 1885353 - RNA, 19 nt, Homo sapiens
  misc_RNA (1)...(19): siRNA sense strand
ugaacagucacaugauaug

SEQ ID NO: 1885354 - RNA, 19 nt, Homo sapiens
  misc_RNA (1)...(19): siRNA sense strand
cccuggagcugagcacaaa

SEQ ID NO: 1885355 - RNA, 19 nt, Homo sapiens
  misc_RNA (1)...(19): siRNA sense strand
acaaugaagcaucaaucaa

SEQ ID NO: 1885356 - RNA, 19 nt, Homo sapiens
  misc_RNA (1)...(19): siRNA sense strand
gagacgcugcugcgguuga

SEQ ID NO: 1885357 - RNA, 19 nt, Homo sapiens
  misc_RNA (1)...(19): siRNA sense strand
gauauguuggugcauguag

SEQ ID NO: 1885358 - RNA, 19 nt, Homo sapiens
  misc_RNA (1)...(19): siRNA sense strand
agaggaagaagaaucagau

SEQ ID NO: 1885359 - RNA, 19 nt, Homo sapiens
  misc_RNA (1)...(19): siRNA sense strand
aagaggaggaggaggaaga

SEQ ID NO: 1885360 - RNA, 19 nt, Homo sapiens
  misc_RNA (1)...(19): siRNA sense strand
ugaagcaucaaucaaccaa

SEQ ID NO: 1885361 - RNA, 19 nt, Homo sapiens
  misc_RNA (1)...(19): siRNA sense strand
guaccugaacagucacaug

SEQ ID NO: 1885362 - RNA, 19 nt, Homo sapiens
  misc_RNA (1)...(19): siRNA sense strand
agacgcugcugcgguugaa

SEQ ID NO: 1885363 - RNA, 19 nt, Homo sapiens
  misc_RNA (1)...(19): siRNA sense strand
uggugcauguagacaauga

SEQ ID NO: 1885364 - RNA, 19 nt, Homo sapiens
  misc_RNA (1)...(19): siRNA sense strand
gaagaccaagcagaaguaa

SEQ ID NO: 1885365 - RNA, 19 nt, Homo sapiens
  misc_RNA (1)...(19): siRNA sense strand
gcaccagcccagcagaaga

SEQ ID NO: 1885366 - RNA, 19 nt, Homo sapiens
  misc_RNA (1)...(19): siRNA sense strand
agaagaccaagcagaagua

SEQ ID NO: 1885367 - RNA, 19 nt, Homo sapiens
  misc_RNA (1)...(19): siRNA sense strand
ccugagcccugcccuucaa

SEQ ID NO: 1885368 - RNA, 19 nt, Homo sapiens
  misc_RNA (1)...(19): siRNA sense strand
cagaagaccaagcagaagu

SEQ ID NO: 1885369 - RNA, 19 nt, Homo sapiens
  misc_RNA (1)...(19): siRNA sense strand
gaaccaugcauccccaaaa

SEQ ID NO: 1885370 - RNA, 19 nt, Homo sapiens
  misc_RNA (1)...(19): siRNA sense strand
gcagaagaccaagcagaag

SEQ ID NO: 1885371 - RNA, 19 nt, Homo sapiens
  misc_RNA (1)...(19): siRNA sense strand
gaaauauccuccugugaca

SEQ ID NO: 1885372 - RNA, 19 nt, Homo sapiens
  misc_RNA (1)...(19): siRNA sense strand
caaaguauccacccaagag

SEQ ID NO: 1885373 - RNA, 19 nt, Homo sapiens
  misc_RNA (1)...(19): siRNA sense strand
gcagugccagcagaaauau

SEQ ID NO: 1885374 - RNA, 19 nt, Homo sapiens
  misc_RNA (1)...(19): siRNA sense strand
cagcagugccagcagaaau

SEQ ID NO: 1885375 - RNA, 19 nt, Homo sapiens
  misc_RNA (1)...(19): siRNA sense strand
cagaaauauccuccuguga

SEQ ID NO: 1885376 - RNA, 19 nt, Homo sapiens
  misc_RNA (1)...(19): siRNA sense strand
cacccugccagucaaagua

SEQ ID NO: 1885377 - RNA, 19 nt, Homo sapiens
  misc_RNA (1)...(19): siRNA sense strand
agcagugccagcagaaaua

SEQ ID NO: 1885378 - RNA, 19 nt, Homo sapiens
  misc_RNA (1)...(19): siRNA sense strand
ucaaaguauccacccaaga

SEQ ID NO: 1885379 - RNA, 19 nt, Homo sapiens
  misc_RNA (1)...(19): siRNA sense strand
gaaacgagauuccuucauc

SEQ ID NO: 1885380 - RNA, 19 nt, Homo sapiens
  misc_RNA (1)...(19): siRNA sense strand
guaccaaucucuccacuga

SEQ ID NO: 1885381 - RNA, 19 nt, Homo sapiens
  misc_RNA (1)...(19): siRNA sense strand
gaaagucccgcgaauauga

SEQ ID NO: 1885382 - RNA, 19 nt, Homo sapiens
  misc_RNA (1)...(19): siRNA sense strand
gaagaaggaugaggagaug

SEQ ID NO: 1885383 - RNA, 19 nt, Homo sapiens
  misc_RNA (1)...(19): siRNA sense strand
gggagaagcuggccaaugg

SEQ ID NO: 1885384 - RNA, 19 nt, Homo sapiens
  misc_RNA (1)...(19): siRNA sense strand
gagaaagucccgcgaauau

SEQ ID NO: 1885385 - RNA, 19 nt, Homo sapiens
  misc_RNA (1)...(19): siRNA sense strand
ccaagaaucugaagacucu

SEQ ID NO: 1885386 - RNA, 19 nt, Homo sapiens
  misc_RNA (1)...(19): siRNA sense strand
gcgagugccucaugaagaa

SEQ ID NO: 1885387 - RNA, 19 nt, Homo sapiens
  misc_RNA (1)...(19): siRNA sense strand
caaguggucuguagaguuc

SEQ ID NO: 1885388 - RNA, 19 nt, Homo sapiens
  misc_RNA (1)...(19): siRNA sense strand
agaaagaggugaagaacga

SEQ ID NO: 1885389 - RNA, 19 nt, Homo sapiens
  misc_RNA (1)...(19): siRNA sense strand
gaaaucaacgccaagaaga

SEQ ID NO: 1885390 - RNA, 19 nt, Homo sapiens
  misc_RNA (1)...(19): siRNA sense strand
gggaagcuguggaucauga

SEQ ID NO: 1885391 - RNA, 19 nt, Homo sapiens
  misc_RNA (1)...(19): siRNA sense strand
gaagauagcccuggauaag

SEQ ID NO: 1885392 - RNA, 19 nt, Homo sapiens
  misc_RNA (1)...(19): siRNA sense strand
ccacugaccugucgcugaa

SEQ ID NO: 1885393 - RNA, 19 nt, Homo sapiens
  misc_RNA (1)...(19): siRNA sense strand
gugagaagaucaagcaguu

SEQ ID NO: 1885394 - RNA, 19 nt, Homo sapiens
  misc_RNA (1)...(19): siRNA sense strand
ucaaacugaugaagaaaga

SEQ ID NO: 1885395 - RNA, 19 nt, Homo sapiens
  misc_RNA (1)...(19): siRNA sense strand
gucaauggaugccagaauu

SEQ ID NO: 1885396 - RNA, 19 nt, Homo sapiens
  misc_RNA (1)...(19): siRNA sense strand
gagcaaaugcauaaacguu

SEQ ID NO: 1885397 - RNA, 19 nt, Homo sapiens
  misc_RNA (1)...(19): siRNA sense strand
ucaaggacccgaaacugua

SEQ ID NO: 1885398 - RNA, 19 nt, Homo sapiens
  misc_RNA (1)...(19): siRNA sense strand
agauagcccuggauaagaa

SEQ ID NO: 1885399 - RNA, 19 nt, Homo sapiens
  misc_RNA (1)...(19): siRNA sense strand
gcaaaugcauaaacguuuu

SEQ ID NO: 1885400 - RNA, 19 nt, Homo sapiens
  misc_RNA (1)...(19): siRNA sense strand
aggaggagcuggaggacua

SEQ ID NO: 1885401 - RNA, 19 nt, Homo sapiens
  misc_RNA (1)...(19): siRNA sense strand
ccaaagucauugaaaccaa

SEQ ID NO: 1885402 - RNA, 19 nt, Homo sapiens
  misc_RNA (1)...(19): siRNA sense strand
uggagaagauggagcaaga

SEQ ID NO: 1885403 - RNA, 19 nt, Homo sapiens
  misc_RNA (1)...(19): siRNA sense strand
aagaagagccuccacauca

SEQ ID NO: 1885404 - RNA, 19 nt, Homo sapiens
  misc_RNA (1)...(19): siRNA sense strand
ggaaaucaacgccaagaag

SEQ ID NO: 1885405 - RNA, 19 nt, Homo sapiens
  misc_RNA (1)...(19): siRNA sense strand
gagcgcgagugccucauga

SEQ ID NO: 1885406 - RNA, 19 nt, Homo sapiens
  misc_RNA (1)...(19): siRNA sense strand
gaucaugauugaguucugu

SEQ ID NO: 1885407 - RNA, 19 nt, Homo sapiens
  misc_RNA (1)...(19): siRNA sense strand
gcacgaaacccagaaacug

SEQ ID NO: 1885408 - RNA, 19 nt, Homo sapiens
  misc_RNA (1)...(19): siRNA sense strand
gcaugaagcagaagaugga

SEQ ID NO: 1885409 - RNA, 19 nt, Homo sapiens
  misc_RNA (1)...(19): siRNA sense strand
ggacagaucccuccaaacc

SEQ ID NO: 1885410 - RNA, 19 nt, Homo sapiens
  misc_RNA (1)...(19): siRNA sense strand
caagcggacacgcaaauuu

SEQ ID NO: 1885411 - RNA, 19 nt, Homo sapiens
  misc_RNA (1)...(19): siRNA sense strand
ugaagcagcagcucaaaga

SEQ ID NO: 1885412 - RNA, 19 nt, Homo sapiens
  misc_RNA (1)...(19): siRNA sense strand
gcucaaagaccaguacuuc

SEQ ID NO: 1885413 - RNA, 19 nt, Homo sapiens
  misc_RNA (1)...(19): siRNA sense strand
guucugcggaugcuucuua

SEQ ID NO: 1885414 - RNA, 19 nt, Homo sapiens
  misc_RNA (1)...(19): siRNA sense strand
agaagagccuccacaucaa

SEQ ID NO: 1885415 - RNA, 19 nt, Homo sapiens
  misc_RNA (1)...(19): siRNA sense strand
ggaaggaaagcaugaagca

SEQ ID NO: 1885416 - RNA, 19 nt, Homo sapiens
  misc_RNA (1)...(19): siRNA sense strand
ucagcagcaucaccaguaa

SEQ ID NO: 1885417 - RNA, 19 nt, Homo sapiens
  misc_RNA (1)...(19): siRNA sense strand
gaaagcaugaagcagaaga

SEQ ID NO: 1885418 - RNA, 19 nt, Homo sapiens
  misc_RNA (1)...(19): siRNA sense strand
ggagaaccauacucagaac

SEQ ID NO: 1885419 - RNA, 19 nt, Homo sapiens
  misc_RNA (1)...(19): siRNA sense strand
ugaagaaagaggugaagaa

SEQ ID NO: 1885420 - RNA, 19 nt, Homo sapiens
  misc_RNA (1)...(19): siRNA sense strand
gcgaagaugagaagaagga

SEQ ID NO: 1885421 - RNA, 19 nt, Homo sapiens
  misc_RNA (1)...(19): siRNA sense strand
gcagccaacagaucucaaa

SEQ ID NO: 1885422 - RNA, 19 nt, Homo sapiens
  misc_RNA (1)...(19): siRNA sense strand
cuacaaccagcgcaugaua

SEQ ID NO: 1885423 - RNA, 19 nt, Homo sapiens
  misc_RNA (1)...(19): siRNA sense strand
gaagaaagaggugaagaac

SEQ ID NO: 1885424 - RNA, 19 nt, Homo sapiens
  misc_RNA (1)...(19): siRNA sense strand
cagcgaagaugagaagaag

SEQ ID NO: 1885425 - RNA, 19 nt, Homo sapiens
  misc_RNA (1)...(19): siRNA sense strand
gaaacacgagaaccagaug

SEQ ID NO: 1885426 - RNA, 19 nt, Homo sapiens
  misc_RNA (1)...(19): siRNA sense strand
ugauugagauggcccagau

SEQ ID NO: 1885427 - RNA, 19 nt, Homo sapiens
  misc_RNA (1)...(19): siRNA sense strand
cgacagcagcggaaggaaa

SEQ ID NO: 1885428 - RNA, 19 nt, Homo sapiens
  misc_RNA (1)...(19): siRNA sense strand
ugaaagacacgcccuacga

SEQ ID NO: 1885429 - RNA, 19 nt, Homo sapiens
  misc_RNA (1)...(19): siRNA sense strand
gaaccuggagcgucagcaa

SEQ ID NO: 1885430 - RNA, 19 nt, Homo sapiens
  misc_RNA (1)...(19): siRNA sense strand
agacccagcugaguaacaa

SEQ ID NO: 1885431 - RNA, 19 nt, Homo sapiens
  misc_RNA (1)...(19): siRNA sense strand
uuuacaaggccaagaauaa

SEQ ID NO: 1885432 - RNA, 19 nt, Homo sapiens
  misc_RNA (1)...(19): siRNA sense strand
aagaugagaagaaggauga

SEQ ID NO: 1885433 - RNA, 19 nt, Homo sapiens
  misc_RNA (1)...(19): siRNA sense strand
ccgagguggucauguguga

SEQ ID NO: 1885434 - RNA, 19 nt, Homo sapiens
  misc_RNA (1)...(19): siRNA sense strand
agagaaagucccgcgaaua

SEQ ID NO: 1885435 - RNA, 19 nt, Homo sapiens
  misc_RNA (1)...(19): siRNA sense strand
aggaaagcaugaagcagaa

SEQ ID NO: 1885436 - RNA, 19 nt, Homo sapiens
  misc_RNA (1)...(19): siRNA sense strand
ggacuaugguaccaaucuc

SEQ ID NO: 1885437 - RNA, 19 nt, Homo sapiens
  misc_RNA (1)...(19): siRNA sense strand
ccaaguggucuguagaguu

SEQ ID NO: 1885438 - RNA, 19 nt, Homo sapiens
  misc_RNA (1)...(19): siRNA sense strand
ucauugaaaccaagaguga

SEQ ID NO: 1885439 - RNA, 19 nt, Homo sapiens
  misc_RNA (1)...(19): siRNA sense strand
accagaaccugaaggaaug

SEQ ID NO: 1885440 - RNA, 19 nt, Homo sapiens
  misc_RNA (1)...(19): siRNA sense strand
cacgaaacccagaaacuga

SEQ ID NO: 1885441 - RNA, 19 nt, Homo sapiens
  misc_RNA (1)...(19): siRNA sense strand
ccaacgaggugugggagau

SEQ ID NO: 1885442 - RNA, 19 nt, Homo sapiens
  misc_RNA (1)...(19): siRNA sense strand
caagaagagccuccacauc

SEQ ID NO: 1885443 - RNA, 19 nt, Homo sapiens
  misc_RNA (1)...(19): siRNA sense strand
gaugaggagaugagauuuc

SEQ ID NO: 1885444 - RNA, 19 nt, Homo sapiens
  misc_RNA (1)...(19): siRNA sense strand
ggacuacaucguggagauu

SEQ ID NO: 1885445 - RNA, 19 nt, Homo sapiens
  misc_RNA (1)...(19): siRNA sense strand
gagagcauggacuauggua

SEQ ID NO: 1885446 - RNA, 19 nt, Homo sapiens
  misc_RNA (1)...(19): siRNA sense strand
ugaagauagcccuggauaa

SEQ ID NO: 1885447 - RNA, 19 nt, Homo sapiens
  misc_RNA (1)...(19): siRNA sense strand
ugaagacucuacagaaacg

SEQ ID NO: 1885448 - RNA, 19 nt, Homo sapiens
  misc_RNA (1)...(19): siRNA sense strand
gaagaacgagguggagaag

SEQ ID NO: 1885449 - RNA, 19 nt, Homo sapiens
  misc_RNA (1)...(19): siRNA sense strand
gagguggucaugugugaga

SEQ ID NO: 1885450 - RNA, 19 nt, Homo sapiens
  misc_RNA (1)...(19): siRNA sense strand
gaagcuguggaucaugauu

SEQ ID NO: 1885451 - RNA, 19 nt, Homo sapiens
  misc_RNA (1)...(19): siRNA sense strand
gagcaggagauguucuuca

SEQ ID NO: 1885452 - RNA, 19 nt, Homo sapiens
  misc_RNA (1)...(19): siRNA sense strand
ugugugagaccaugaaaga

SEQ ID NO: 1885453 - RNA, 19 nt, Homo sapiens
  misc_RNA (1)...(19): siRNA sense strand
aagagaaagucccgcgaau

SEQ ID NO: 1885454 - RNA, 19 nt, Homo sapiens
  misc_RNA (1)...(19): siRNA sense strand
ucaacuuccugcacagcaa

SEQ ID NO: 1885455 - RNA, 19 nt, Homo sapiens
  misc_RNA (1)...(19): siRNA sense strand
aaagugccaccuccuggua

SEQ ID NO: 1885456 - RNA, 19 nt, Homo sapiens
  misc_RNA (1)...(19): siRNA sense strand
ugaagaacgagguggagaa

SEQ ID NO: 1885457 - RNA, 19 nt, Homo sapiens
  misc_RNA (1)...(19): siRNA sense strand
guucuuugacacggaauua

SEQ ID NO: 1885458 - RNA, 19 nt, Homo sapiens
  misc_RNA (1)...(19): siRNA sense strand
gucagcagcaucaccagua

SEQ ID NO: 1885459 - RNA, 19 nt, Homo sapiens
  misc_RNA (1)...(19): siRNA sense strand
gcuggcaacgugcugauga

SEQ ID NO: 1885460 - RNA, 19 nt, Homo sapiens
  misc_RNA (1)...(19): siRNA sense strand
ggaauggcgggacaagcuu

SEQ ID NO: 1885461 - RNA, 19 nt, Homo sapiens
  misc_RNA (1)...(19): siRNA sense strand
gaagagccuccacaucaac

SEQ ID NO: 1885462 - RNA, 19 nt, Homo sapiens
  misc_RNA (1)...(19): siRNA sense strand
ugauagagcagcugaaggu

SEQ ID NO: 1885463 - RNA, 19 nt, Homo sapiens
  misc_RNA (1)...(19): siRNA sense strand
cagcucaaacugaugaaga

SEQ ID NO: 1885464 - RNA, 19 nt, Homo sapiens
  misc_RNA (1)...(19): siRNA sense strand
aaccagacccagcugagua

SEQ ID NO: 1885465 - RNA, 19 nt, Homo sapiens
  misc_RNA (1)...(19): siRNA sense strand
gaaccagacccagcugagu

SEQ ID NO: 1885466 - RNA, 19 nt, Homo sapiens
  misc_RNA (1)...(19): siRNA sense strand
ccaagaucaucagcgaaga

SEQ ID NO: 1885467 - RNA, 19 nt, Homo sapiens
  misc_RNA (1)...(19): siRNA sense strand
cauggacuaugguaccaau

SEQ ID NO: 1885468 - RNA, 19 nt, Homo sapiens
  misc_RNA (1)...(19): siRNA sense strand
ccaugcggguccugcuaaa

SEQ ID NO: 1885469 - RNA, 19 nt, Homo sapiens
  misc_RNA (1)...(19): siRNA sense strand
aagcggacacgcaaauuug

SEQ ID NO: 1885470 - RNA, 19 nt, Homo sapiens
  misc_RNA (1)...(19): siRNA sense strand
agcaggagauguucuucaa

SEQ ID NO: 1885471 - RNA, 19 nt, Homo sapiens
  misc_RNA (1)...(19): siRNA sense strand
gccauaaccagaaccugaa

SEQ ID NO: 1885472 - RNA, 19 nt, Homo sapiens
  misc_RNA (1)...(19): siRNA sense strand
gaggagaagaggcagaagu

SEQ ID NO: 1885473 - RNA, 19 nt, Homo sapiens
  misc_RNA (1)...(19): siRNA sense strand
agaaggagcgggagcagau

SEQ ID NO: 1885474 - RNA, 19 nt, Homo sapiens
  misc_RNA (1)...(19): siRNA sense strand
agaacgagguggagaagcu

SEQ ID NO: 1885475 - RNA, 19 nt, Homo sapiens
  misc_RNA (1)...(19): siRNA sense strand
ggacuacaccagguuccaa

SEQ ID NO: 1885476 - RNA, 19 nt, Homo sapiens
  misc_RNA (1)...(19): siRNA sense strand
uaaggagacgggugcuuug

SEQ ID NO: 1885477 - RNA, 19 nt, Homo sapiens
  misc_RNA (1)...(19): siRNA sense strand
gcauaaacguuuugaacag

SEQ ID NO: 1885478 - RNA, 19 nt, Homo sapiens
  misc_RNA (1)...(19): siRNA sense strand
gcgcaagaaggcucuggaa

SEQ ID NO: 1885479 - RNA, 19 nt, Homo sapiens
  misc_RNA (1)...(19): siRNA sense strand
ggaagagaacguugacaua

SEQ ID NO: 1885480 - RNA, 19 nt, Homo sapiens
  misc_RNA (1)...(19): siRNA sense strand
ucacagaagagcuuaauuu

SEQ ID NO: 1885481 - RNA, 19 nt, Homo sapiens
  misc_RNA (1)...(19): siRNA sense strand
ucacguaccuucaucacuu

SEQ ID NO: 1885482 - RNA, 19 nt, Homo sapiens
  misc_RNA (1)...(19): siRNA sense strand
agaagcagguucauaagaa

SEQ ID NO: 1885483 - RNA, 19 nt, Homo sapiens
  misc_RNA (1)...(19): siRNA sense strand
cauuagaacuacaagauga

SEQ ID NO: 1885484 - RNA, 19 nt, Homo sapiens
  misc_RNA (1)...(19): siRNA sense strand
cagaagagcuuaauuuacg

SEQ ID NO: 1885485 - RNA, 19 nt, Homo sapiens
  misc_RNA (1)...(19): siRNA sense strand
guacauuacugcccaugga

SEQ ID NO: 1885486 - RNA, 19 nt, Homo sapiens
  misc_RNA (1)...(19): siRNA sense strand
cacagaagagcuuaauuua

SEQ ID NO: 1885487 - RNA, 19 nt, Homo sapiens
  misc_RNA (1)...(19): siRNA sense strand
gcucgagccuucaagauca

SEQ ID NO: 1885488 - RNA, 19 nt, Homo sapiens
  misc_RNA (1)...(19): siRNA sense strand
gaagagaacguugacauag

SEQ ID NO: 1885489 - RNA, 19 nt, Homo sapiens
  misc_RNA (1)...(19): siRNA sense strand
ggaggaagaugaguucuac

SEQ ID NO: 1885490 - RNA, 19 nt, Homo sapiens
  misc_RNA (1)...(19): siRNA sense strand
agagaacguugacauagaa

SEQ ID NO: 1885491 - RNA, 19 nt, Homo sapiens
  misc_RNA (1)...(19): siRNA sense strand
gaagcagguucauaagaag

SEQ ID NO: 1885492 - RNA, 19 nt, Homo sapiens
  misc_RNA (1)...(19): siRNA sense strand
cauaaucaccuaucauuca

SEQ ID NO: 1885493 - RNA, 19 nt, Homo sapiens
  misc_RNA (1)...(19): siRNA sense strand
gaacguugacauagaagga

SEQ ID NO: 1885494 - RNA, 19 nt, Homo sapiens
  misc_RNA (1)...(19): siRNA sense strand
cgugaggucuguccaguga

SEQ ID NO: 1885495 - RNA, 19 nt, Homo sapiens
  misc_RNA (1)...(19): siRNA sense strand
gcagaagagccaagaagga

SEQ ID NO: 1885496 - RNA, 19 nt, Homo sapiens
  misc_RNA (1)...(19): siRNA sense strand
uacggucacuggagacaua

SEQ ID NO: 1885497 - RNA, 19 nt, Homo sapiens
  misc_RNA (1)...(19): siRNA sense strand
aagagaacguugacauaga

SEQ ID NO: 1885498 - RNA, 19 nt, Homo sapiens
  misc_RNA (1)...(19): siRNA sense strand
ggacucugacuuugacauu

SEQ ID NO: 1885499 - RNA, 19 nt, Homo sapiens
  misc_RNA (1)...(19): siRNA sense strand
caccaaggccuauaaggaa

SEQ ID NO: 1885500 - RNA, 19 nt, Homo sapiens
  misc_RNA (1)...(19): siRNA sense strand
ugaugcaacuuucgaggaa

SEQ ID NO: 1885501 - RNA, 19 nt, Homo sapiens
  misc_RNA (1)...(19): siRNA sense strand
aaaagaagcagguucauaa

SEQ ID NO: 1885502 - RNA, 19 nt, Homo sapiens
  misc_RNA (1)...(19): siRNA sense strand
gccagaaaauugucauuaa

SEQ ID NO: 1885503 - RNA, 19 nt, Homo sapiens
  misc_RNA (1)...(19): siRNA sense strand
gagcauacacgacaaacgu

SEQ ID NO: 1885504 - RNA, 19 nt, Homo sapiens
  misc_RNA (1)...(19): siRNA sense strand
ugacauagaaggacuugau

SEQ ID NO: 1885505 - RNA, 19 nt, Homo sapiens
  misc_RNA (1)...(19): siRNA sense strand
caagaucacagaagagcuu

SEQ ID NO: 1885506 - RNA, 19 nt, Homo sapiens
  misc_RNA (1)...(19): siRNA sense strand
cagaagagccaagaaggaa

SEQ ID NO: 1885507 - RNA, 19 nt, Homo sapiens
  misc_RNA (1)...(19): siRNA sense strand
ccugcucgcugcucacgua

SEQ ID NO: 1885508 - RNA, 19 nt, Homo sapiens
  misc_RNA (1)...(19): siRNA sense strand
ucaccaaggccuauaagga

SEQ ID NO: 1885509 - RNA, 19 nt, Homo sapiens
  misc_RNA (1)...(19): siRNA sense strand
acucugacuuugacauuga

SEQ ID NO: 1885510 - RNA, 19 nt, Homo sapiens
  misc_RNA (1)...(19): siRNA sense strand
ccaaggaagagaacguuga

SEQ ID NO: 1885511 - RNA, 19 nt, Homo sapiens
  misc_RNA (1)...(19): siRNA sense strand
gcuuacaagaaguacauua

SEQ ID NO: 1885512 - RNA, 19 nt, Homo sapiens
  misc_RNA (1)...(19): siRNA sense strand
gaaggaagcgccgaguagu

SEQ ID NO: 1885513 - RNA, 19 nt, Homo sapiens
  misc_RNA (1)...(19): siRNA sense strand
gaucacagaagagcuuaau

SEQ ID NO: 1885514 - RNA, 19 nt, Homo sapiens
  misc_RNA (1)...(19): siRNA sense strand
caagaugacggcucugaca

SEQ ID NO: 1885515 - RNA, 19 nt, Homo sapiens
  misc_RNA (1)...(19): siRNA sense strand
gccauuagaacuacaagau

SEQ ID NO: 1885516 - RNA, 19 nt, Homo sapiens
  misc_RNA (1)...(19): siRNA sense strand
uauaaggaaccucucaaga

SEQ ID NO: 1885517 - RNA, 19 nt, Homo sapiens
  misc_RNA (1)...(19): siRNA sense strand
cacguaccuucaucacuuu

SEQ ID NO: 1885518 - RNA, 19 nt, Homo sapiens
  misc_RNA (1)...(19): siRNA sense strand
aggccaagaucacagaaga

SEQ ID NO: 1885519 - RNA, 19 nt, Homo sapiens
  misc_RNA (1)...(19): siRNA sense strand
gcacuacugccauuagaac

SEQ ID NO: 1885520 - RNA, 19 nt, Homo sapiens
  misc_RNA (1)...(19): siRNA sense strand
gagaagagaaggcacuacu

SEQ ID NO: 1885521 - RNA, 19 nt, Homo sapiens
  misc_RNA (1)...(19): siRNA sense strand
uuagugaugaugcaacuuu

SEQ ID NO: 1885522 - RNA, 19 nt, Homo sapiens
  misc_RNA (1)...(19): siRNA sense strand
ggucacuggagacauauga

SEQ ID NO: 1885523 - RNA, 19 nt, Homo sapiens
  misc_RNA (1)...(19): siRNA sense strand
cccauaaucaccuaucauu

SEQ ID NO: 1885524 - RNA, 19 nt, Homo sapiens
  misc_RNA (1)...(19): siRNA sense strand
gaagcagaagagccaagaa

SEQ ID NO: 1885525 - RNA, 19 nt, Homo sapiens
  misc_RNA (1)...(19): siRNA sense strand
gagcuuaaggccucgaaag

SEQ ID NO: 1885526 - RNA, 19 nt, Homo sapiens
  misc_RNA (1)...(19): siRNA sense strand
gacucugacuuugacauug

SEQ ID NO: 1885527 - RNA, 19 nt, Homo sapiens
  misc_RNA (1)...(19): siRNA sense strand
agacacagaggacgaagug

SEQ ID NO: 1885528 - RNA, 19 nt, Homo sapiens
  misc_RNA (1)...(19): siRNA sense strand
aggacgaaguggacucuga

SEQ ID NO: 1885529 - RNA, 19 nt, Homo sapiens
  misc_RNA (1)...(19): siRNA sense strand
aggcagaggaggaagauga

SEQ ID NO: 1885530 - RNA, 19 nt, Homo sapiens
  misc_RNA (1)...(19): siRNA sense strand
auccggagaugaugaguau

SEQ ID NO: 1885531 - RNA, 19 nt, Homo sapiens
  misc_RNA (1)...(19): siRNA sense strand
aagaagcagguucauaaga

SEQ ID NO: 1885532 - RNA, 19 nt, Homo sapiens
  misc_RNA (1)...(19): siRNA sense strand
caacuuucgaggaaugguu

SEQ ID NO: 1885533 - RNA, 19 nt, Homo sapiens
  misc_RNA (1)...(19): siRNA sense strand
cagaggaggaagaugaguu

SEQ ID NO: 1885534 - RNA, 19 nt, Homo sapiens
  misc_RNA (1)...(19): siRNA sense strand
acagaggaauccggagaug

SEQ ID NO: 1885535 - RNA, 19 nt, Homo sapiens
  misc_RNA (1)...(19): siRNA sense strand
gaucauucgugaggcuuac

SEQ ID NO: 1885536 - RNA, 19 nt, Homo sapiens
  misc_RNA (1)...(19): siRNA sense strand
ggcccauaaucaccuauca

SEQ ID NO: 1885537 - RNA, 19 nt, Homo sapiens
  misc_RNA (1)...(19): siRNA sense strand
agaggaauccggagaugau

SEQ ID NO: 1885538 - RNA, 19 nt, Homo sapiens
  misc_RNA (1)...(19): siRNA sense strand
ucagaaggcgcgagaagag

SEQ ID NO: 1885539 - RNA, 19 nt, Homo sapiens
  misc_RNA (1)...(19): siRNA sense strand
ugacuuugacauugaugaa

SEQ ID NO: 1885540 - RNA, 19 nt, Homo sapiens
  misc_RNA (1)...(19): siRNA sense strand
agaaggaagcgccgaguag

SEQ ID NO: 1885541 - RNA, 19 nt, Homo sapiens
  misc_RNA (1)...(19): siRNA sense strand
gugaggcuuacaagaagua

SEQ ID NO: 1885542 - RNA, 19 nt, Homo sapiens
  misc_RNA (1)...(19): siRNA sense strand
ccauuagaacuacaagaug

SEQ ID NO: 1885543 - RNA, 19 nt, Homo sapiens
  misc_RNA (1)...(19): siRNA sense strand
agaaggcgcgagaagagaa

SEQ ID NO: 1885544 - RNA, 19 nt, Homo sapiens
  misc_RNA (1)...(19): siRNA sense strand
gcugggaaccggcuuucug

SEQ ID NO: 1885545 - RNA, 19 nt, Homo sapiens
  misc_RNA (1)...(19): siRNA sense strand
cuacugccauuagaacuac

SEQ ID NO: 1885546 - RNA, 19 nt, Homo sapiens
  misc_RNA (1)...(19): siRNA sense strand
gcugagcauacacgacaaa

SEQ ID NO: 1885547 - RNA, 19 nt, Homo sapiens
  misc_RNA (1)...(19): siRNA sense strand
ucgugaggcuuacaagaag

SEQ ID NO: 1885548 - RNA, 19 nt, Homo sapiens
  misc_RNA (1)...(19): siRNA sense strand
gaugcaacuuucgaggaau

SEQ ID NO: 1885549 - RNA, 19 nt, Homo sapiens
  misc_RNA (1)...(19): siRNA sense strand
aagaaggaagcgccgagua

SEQ ID NO: 1885550 - RNA, 19 nt, Homo sapiens
  misc_RNA (1)...(19): siRNA sense strand
acagaagagcuuaauuuac

SEQ ID NO: 1885551 - RNA, 19 nt, Homo sapiens
  misc_RNA (1)...(19): siRNA sense strand
ggaauccggagaugaugag

SEQ ID NO: 1885552 - RNA, 19 nt, Homo sapiens
  misc_RNA (1)...(19): siRNA sense strand
gcgagaagagaaggcacua

SEQ ID NO: 1885553 - RNA, 19 nt, Homo sapiens
  misc_RNA (1)...(19): siRNA sense strand
guagucaccaaggccuaua

SEQ ID NO: 1885554 - RNA, 19 nt, Homo sapiens
  misc_RNA (1)...(19): siRNA sense strand
ggaggcagaggaggaagau

SEQ ID NO: 1885555 - RNA, 19 nt, Homo sapiens
  misc_RNA (1)...(19): siRNA sense strand
ccauaaucaccuaucauuc

SEQ ID NO: 1885556 - RNA, 19 nt, Homo sapiens
  misc_RNA (1)...(19): siRNA sense strand
aaacguuccuucggguaca

SEQ ID NO: 1885557 - RNA, 19 nt, Homo sapiens
  misc_RNA (1)...(19): siRNA sense strand
gggaggccaagaucacaga

SEQ ID NO: 1885558 - RNA, 19 nt, Homo sapiens
  misc_RNA (1)...(19): siRNA sense strand
gacauagaaggacuugauc

SEQ ID NO: 1885559 - RNA, 19 nt, Homo sapiens
  misc_RNA (1)...(19): siRNA sense strand
gcaaagaagucaagccuaa

SEQ ID NO: 1885560 - RNA, 19 nt, Homo sapiens
  misc_RNA (1)...(19): siRNA sense strand
gaagaaggcugagaagaaa

SEQ ID NO: 1885561 - RNA, 19 nt, Homo sapiens
  misc_RNA (1)...(19): siRNA sense strand
gaaagcaacucacaaggaa

SEQ ID NO: 1885562 - RNA, 19 nt, Homo sapiens
  misc_RNA (1)...(19): siRNA sense strand
gcaaacagcugcaaaagua

SEQ ID NO: 1885563 - RNA, 19 nt, Homo sapiens
  misc_RNA (1)...(19): siRNA sense strand
gaaggaaacugccauugau

SEQ ID NO: 1885564 - RNA, 19 nt, Homo sapiens
  misc_RNA (1)...(19): siRNA sense strand
gguaaaagcugucacaaua

SEQ ID NO: 1885565 - RNA, 19 nt, Homo sapiens
  misc_RNA (1)...(19): siRNA sense strand
aaagaaagcuaaagaagga

SEQ ID NO: 1885566 - RNA, 19 nt, Homo sapiens
  misc_RNA (1)...(19): siRNA sense strand
gaaagcagcugugucaaag

SEQ ID NO: 1885567 - RNA, 19 nt, Homo sapiens
  misc_RNA (1)...(19): siRNA sense strand
ugacgaagauacugauaaa

SEQ ID NO: 1885568 - RNA, 19 nt, Homo sapiens
  misc_RNA (1)...(19): siRNA sense strand
agagaaaccugaaaggaaa

SEQ ID NO: 1885569 - RNA, 19 nt, Homo sapiens
  misc_RNA (1)...(19): siRNA sense strand
ggacaaagcccagccauuc

SEQ ID NO: 1885570 - RNA, 19 nt, Homo sapiens
  misc_RNA (1)...(19): siRNA sense strand
aagagaaccuccaucuaua

SEQ ID NO: 1885571 - RNA, 19 nt, Homo sapiens
  misc_RNA (1)...(19): siRNA sense strand
ggaaaugcaucuacaacca

SEQ ID NO: 1885572 - RNA, 19 nt, Homo sapiens
  misc_RNA (1)...(19): siRNA sense strand
gaucacugcugaaggaaau

SEQ ID NO: 1885573 - RNA, 19 nt, Homo sapiens
  misc_RNA (1)...(19): siRNA sense strand
gaaagagaaccuccaucua

SEQ ID NO: 1885574 - RNA, 19 nt, Homo sapiens
  misc_RNA (1)...(19): siRNA sense strand
guacaauggcuauggauuu

SEQ ID NO: 1885575 - RNA, 19 nt, Homo sapiens
  misc_RNA (1)...(19): siRNA sense strand
gccuaaaccuccacaacua

SEQ ID NO: 1885576 - RNA, 19 nt, Homo sapiens
  misc_RNA (1)...(19): siRNA sense strand
gaagaggacagucacagaa

SEQ ID NO: 1885577 - RNA, 19 nt, Homo sapiens
  misc_RNA (1)...(19): siRNA sense strand
cgaagauacugauaaagga

SEQ ID NO: 1885578 - RNA, 19 nt, Homo sapiens
  misc_RNA (1)...(19): siRNA sense strand
aaagagaaccuccaucuau

SEQ ID NO: 1885579 - RNA, 19 nt, Homo sapiens
  misc_RNA (1)...(19): siRNA sense strand
ugagaucacugcugaagga

SEQ ID NO: 1885580 - RNA, 19 nt, Homo sapiens
  misc_RNA (1)...(19): siRNA sense strand
caaacaagacauagugaaa

SEQ ID NO: 1885581 - RNA, 19 nt, Homo sapiens
  misc_RNA (1)...(19): siRNA sense strand
gaagcaacaaggacaguaa

SEQ ID NO: 1885582 - RNA, 19 nt, Homo sapiens
  misc_RNA (1)...(19): siRNA sense strand
agaaggaacugaagaugug

SEQ ID NO: 1885583 - RNA, 19 nt, Homo sapiens
  misc_RNA (1)...(19): siRNA sense strand
gcagacaugaagcaucuua

SEQ ID NO: 1885584 - RNA, 19 nt, Homo sapiens
  misc_RNA (1)...(19): siRNA sense strand
caucagaagucacagaauc

SEQ ID NO: 1885585 - RNA, 19 nt, Homo sapiens
  misc_RNA (1)...(19): siRNA sense strand
gaacagaaagaucaguaug

SEQ ID NO: 1885586 - RNA, 19 nt, Homo sapiens
  misc_RNA (1)...(19): siRNA sense strand
caaagucaccaaagaaaga

SEQ ID NO: 1885587 - RNA, 19 nt, Homo sapiens
  misc_RNA (1)...(19): siRNA sense strand
gaacagaagaaagcuaaga

SEQ ID NO: 1885588 - RNA, 19 nt, Homo sapiens
  misc_RNA (1)...(19): siRNA sense strand
caaaagauguugaagaugu

SEQ ID NO: 1885589 - RNA, 19 nt, Homo sapiens
  misc_RNA (1)...(19): siRNA sense strand
gaagagaaaguuccagcuu

SEQ ID NO: 1885590 - RNA, 19 nt, Homo sapiens
  misc_RNA (1)...(19): siRNA sense strand
ugaagaagaugaugauggu

SEQ ID NO: 1885591 - RNA, 19 nt, Homo sapiens
  misc_RNA (1)...(19): siRNA sense strand
ggauuucaguuuccuuuca

SEQ ID NO: 1885592 - RNA, 19 nt, Homo sapiens
  misc_RNA (1)...(19): siRNA sense strand
gacaucaucucaucugaag

SEQ ID NO: 1885593 - RNA, 19 nt, Homo sapiens
  misc_RNA (1)...(19): siRNA sense strand
ccagcaaagucaccaaaga

SEQ ID NO: 1885594 - RNA, 19 nt, Homo sapiens
  misc_RNA (1)...(19): siRNA sense strand
gacagucacagaagacaua

SEQ ID NO: 1885595 - RNA, 19 nt, Homo sapiens
  misc_RNA (1)...(19): siRNA sense strand
uguaccagcuucaaagaaa

SEQ ID NO: 1885596 - RNA, 19 nt, Homo sapiens
  misc_RNA (1)...(19): siRNA sense strand
ccaagacaguggagcaaga

SEQ ID NO: 1885597 - RNA, 19 nt, Homo sapiens
  misc_RNA (1)...(19): siRNA sense strand
gucaaagcaugaacagaaa

SEQ ID NO: 1885598 - RNA, 19 nt, Homo sapiens
  misc_RNA (1)...(19): siRNA sense strand
caugaagcaucuuagagaa

SEQ ID NO: 1885599 - RNA, 19 nt, Homo sapiens
  misc_RNA (1)...(19): siRNA sense strand
gaacaucagaagucacaga

SEQ ID NO: 1885600 - RNA, 19 nt, Homo sapiens
  misc_RNA (1)...(19): siRNA sense strand
gagaaccuccaucuauaaa

SEQ ID NO: 1885601 - RNA, 19 nt, Homo sapiens
  misc_RNA (1)...(19): siRNA sense strand
agaagaaggcugagaagaa

SEQ ID NO: 1885602 - RNA, 19 nt, Homo sapiens
  misc_RNA (1)...(19): siRNA sense strand
agaaagaucaguaugcauu

SEQ ID NO: 1885603 - RNA, 19 nt, Homo sapiens
  misc_RNA (1)...(19): siRNA sense strand
gaaggaaaugcaucuacaa

SEQ ID NO: 1885604 - RNA, 19 nt, Homo sapiens
  misc_RNA (1)...(19): siRNA sense strand
aaagaaagaacacucaguu

SEQ ID NO: 1885605 - RNA, 19 nt, Homo sapiens
  misc_RNA (1)...(19): siRNA sense strand
gauaaaggagaaauagaug

SEQ ID NO: 1885606 - RNA, 19 nt, Homo sapiens
  misc_RNA (1)...(19): siRNA sense strand
ugaaggaaaugcaucuaca

SEQ ID NO: 1885607 - RNA, 19 nt, Homo sapiens
  misc_RNA (1)...(19): siRNA sense strand
acacaaagauaagacugaa

SEQ ID NO: 1885608 - RNA, 19 nt, Homo sapiens
  misc_RNA (1)...(19): siRNA sense strand
gcaaauacacaaacaagac

SEQ ID NO: 1885609 - RNA, 19 nt, Homo sapiens
  misc_RNA (1)...(19): siRNA sense strand
guccaaagcaggcaaagaa

SEQ ID NO: 1885610 - RNA, 19 nt, Homo sapiens
  misc_RNA (1)...(19): siRNA sense strand
ggagauuggugcgguuuca

SEQ ID NO: 1885611 - RNA, 19 nt, Homo sapiens
  misc_RNA (1)...(19): siRNA sense strand
ccaagugacaaacaaguaa

SEQ ID NO: 1885612 - RNA, 19 nt, Homo sapiens
  misc_RNA (1)...(19): siRNA sense strand
uaucugacaucaucucauc

SEQ ID NO: 1885613 - RNA, 19 nt, Homo sapiens
  misc_RNA (1)...(19): siRNA sense strand
gacaguggagcaagaaauu

SEQ ID NO: 1885614 - RNA, 19 nt, Homo sapiens
  misc_RNA (1)...(19): siRNA sense strand
ugucaaagcaugaacagaa

SEQ ID NO: 1885615 - RNA, 19 nt, Homo sapiens
  misc_RNA (1)...(19): siRNA sense strand
gcaagaguaucaaaagaug

SEQ ID NO: 1885616 - RNA, 19 nt, Homo sapiens
  misc_RNA (1)...(19): siRNA sense strand
gauuggcucagauccuuua

SEQ ID NO: 1885617 - RNA, 19 nt, Homo sapiens
  misc_RNA (1)...(19): siRNA sense strand
gaaagaucaguaugcauuc

SEQ ID NO: 1885618 - RNA, 19 nt, Homo sapiens
  misc_RNA (1)...(19): siRNA sense strand
caagcucuauugccaagau

SEQ ID NO: 1885619 - RNA, 19 nt, Homo sapiens
  misc_RNA (1)...(19): siRNA sense strand
gaacaucgagaaagagaac

SEQ ID NO: 1885620 - RNA, 19 nt, Homo sapiens
  misc_RNA (1)...(19): siRNA sense strand
gaaagaagagaaaguucca

SEQ ID NO: 1885621 - RNA, 19 nt, Homo sapiens
  misc_RNA (1)...(19): siRNA sense strand
uaaagggaaagaagagaaa

SEQ ID NO: 1885622 - RNA, 19 nt, Homo sapiens
  misc_RNA (1)...(19): siRNA sense strand
aaacugaacgagccaaaga

SEQ ID NO: 1885623 - RNA, 19 nt, Homo sapiens
  misc_RNA (1)...(19): siRNA sense strand
cagcaaagucaccaaagaa

SEQ ID NO: 1885624 - RNA, 19 nt, Homo sapiens
  misc_RNA (1)...(19): siRNA sense strand
uaugcauucugucgauaua

SEQ ID NO: 1885625 - RNA, 19 nt, Homo sapiens
  misc_RNA (1)...(19): siRNA sense strand
caagagaaaccugaaagga

SEQ ID NO: 1885626 - RNA, 19 nt, Homo sapiens
  misc_RNA (1)...(19): siRNA sense strand
agagaaagcagcuguguca

SEQ ID NO: 1885627 - RNA, 19 nt, Homo sapiens
  misc_RNA (1)...(19): siRNA sense strand
gagcucuggucaagcaaau

SEQ ID NO: 1885628 - RNA, 19 nt, Homo sapiens
  misc_RNA (1)...(19): siRNA sense strand
aaauggaucugugcccaaa

SEQ ID NO: 1885629 - RNA, 19 nt, Homo sapiens
  misc_RNA (1)...(19): siRNA sense strand
aaaggaacaucagaaguca

SEQ ID NO: 1885630 - RNA, 19 nt, Homo sapiens
  misc_RNA (1)...(19): siRNA sense strand
uaaaagcugucacaauaga

SEQ ID NO: 1885631 - RNA, 19 nt, Homo sapiens
  misc_RNA (1)...(19): siRNA sense strand
agaaggaaacugccauuga

SEQ ID NO: 1885632 - RNA, 19 nt, Homo sapiens
  misc_RNA (1)...(19): siRNA sense strand
cuggaucuauggcuucuuu

SEQ ID NO: 1885633 - RNA, 19 nt, Homo sapiens
  misc_RNA (1)...(19): siRNA sense strand
uaaagaaggaacugaagau

SEQ ID NO: 1885634 - RNA, 19 nt, Homo sapiens
  misc_RNA (1)...(19): siRNA sense strand
uagaacaacccaagggaaa

SEQ ID NO: 1885635 - RNA, 19 nt, Homo sapiens
  misc_RNA (1)...(19): siRNA sense strand
cgaaagaacagaagaaagc

SEQ ID NO: 1885636 - RNA, 19 nt, Homo sapiens
  misc_RNA (1)...(19): siRNA sense strand
aagagaaaccugaaaggaa

SEQ ID NO: 1885637 - RNA, 19 nt, Homo sapiens
  misc_RNA (1)...(19): siRNA sense strand
gaaagucuucaauuacaca

SEQ ID NO: 1885638 - RNA, 19 nt, Homo sapiens
  misc_RNA (1)...(19): siRNA sense strand
aagcagacaugaagcaucu

SEQ ID NO: 1885639 - RNA, 19 nt, Homo sapiens
  misc_RNA (1)...(19): siRNA sense strand
gcacaagcagcagcuaaga

SEQ ID NO: 1885640 - RNA, 19 nt, Homo sapiens
  misc_RNA (1)...(19): siRNA sense strand
agaaagcagcugugucaaa

SEQ ID NO: 1885641 - RNA, 19 nt, Homo sapiens
  misc_RNA (1)...(19): siRNA sense strand
caucaaaacccaaagaaaa

SEQ ID NO: 1885642 - RNA, 19 nt, Homo sapiens
  misc_RNA (1)...(19): siRNA sense strand
ggaaacugccauugaugug

SEQ ID NO: 1885643 - RNA, 19 nt, Homo sapiens
  misc_RNA (1)...(19): siRNA sense strand
gcagaaaagucccaucagu

SEQ ID NO: 1885644 - RNA, 19 nt, Homo sapiens
  misc_RNA (1)...(19): siRNA sense strand
agagaaccuccaucuauaa

SEQ ID NO: 1885645 - RNA, 19 nt, Homo sapiens
  misc_RNA (1)...(19): siRNA sense strand
gcaaagucaccaaagaaag

SEQ ID NO: 1885646 - RNA, 19 nt, Homo sapiens
  misc_RNA (1)...(19): siRNA sense strand
ccaaacaagggacuguaaa

SEQ ID NO: 1885647 - RNA, 19 nt, Homo sapiens
  misc_RNA (1)...(19): siRNA sense strand
aaagaaagcaacucacaag

SEQ ID NO: 1885648 - RNA, 19 nt, Homo sapiens
  misc_RNA (1)...(19): siRNA sense strand
cuacuuggauggguacaau

SEQ ID NO: 1885649 - RNA, 19 nt, Homo sapiens
  misc_RNA (1)...(19): siRNA sense strand
ucaaagaaagcuaaagaag

SEQ ID NO: 1885650 - RNA, 19 nt, Homo sapiens
  misc_RNA (1)...(19): siRNA sense strand
acacaaacaagacauagug

SEQ ID NO: 1885651 - RNA, 19 nt, Homo sapiens
  misc_RNA (1)...(19): siRNA sense strand
acagaaagaucaguaugca

SEQ ID NO: 1885652 - RNA, 19 nt, Homo sapiens
  misc_RNA (1)...(19): siRNA sense strand
caaagcaugaacagaaaga

SEQ ID NO: 1885653 - RNA, 19 nt, Homo sapiens
  misc_RNA (1)...(19): siRNA sense strand
aagaacagaagaaagcuaa

SEQ ID NO: 1885654 - RNA, 19 nt, Homo sapiens
  misc_RNA (1)...(19): siRNA sense strand
gacuguuucucaugguaaa

SEQ ID NO: 1885655 - RNA, 19 nt, Homo sapiens
  misc_RNA (1)...(19): siRNA sense strand
ggcuauggauuucaguuuc

SEQ ID NO: 1885656 - RNA, 19 nt, Homo sapiens
  misc_RNA (1)...(19): siRNA sense strand
uacaauggcuauggauuuc

SEQ ID NO: 1885657 - RNA, 19 nt, Homo sapiens
  misc_RNA (1)...(19): siRNA sense strand
ccaucguuauguuugauuu

SEQ ID NO: 1885658 - RNA, 19 nt, Homo sapiens
  misc_RNA (1)...(19): siRNA sense strand
gaagucacagaaucaggaa

SEQ ID NO: 1885659 - RNA, 19 nt, Homo sapiens
  misc_RNA (1)...(19): siRNA sense strand
guacgugccucgagccauu

SEQ ID NO: 1885660 - RNA, 19 nt, Homo sapiens
  misc_RNA (1)...(19): siRNA sense strand
gcaaggugcgugaggagua

SEQ ID NO: 1885661 - RNA, 19 nt, Homo sapiens
  misc_RNA (1)...(19): siRNA sense strand
gccugacaauuucaucuuu

SEQ ID NO: 1885662 - RNA, 19 nt, Homo sapiens
  misc_RNA (1)...(19): siRNA sense strand
ggaucagcgucuacuacaa

SEQ ID NO: 1885663 - RNA, 19 nt, Homo sapiens
  misc_RNA (1)...(19): siRNA sense strand
caaggugcgugaggaguau

SEQ ID NO: 1885664 - RNA, 19 nt, Homo sapiens
  misc_RNA (1)...(19): siRNA sense strand
ucugggaagucaucaguga

SEQ ID NO: 1885665 - RNA, 19 nt, Homo sapiens
  misc_RNA (1)...(19): siRNA sense strand
gcaguucacggccauguuc

SEQ ID NO: 1885666 - RNA, 19 nt, Homo sapiens
  misc_RNA (1)...(19): siRNA sense strand
caagcuggccgucaacaug

SEQ ID NO: 1885667 - RNA, 19 nt, Homo sapiens
  misc_RNA (1)...(19): siRNA sense strand
gcaagaacagcagcuacuu

SEQ ID NO: 1885668 - RNA, 19 nt, Homo sapiens
  misc_RNA (1)...(19): siRNA sense strand
ccugacaauuucaucuuug

SEQ ID NO: 1885669 - RNA, 19 nt, Homo sapiens
  misc_RNA (1)...(19): siRNA sense strand
caagaacagcagcuacuuc

SEQ ID NO: 1885670 - RNA, 19 nt, Homo sapiens
  misc_RNA (1)...(19): siRNA sense strand
uggauucgguccuggaugu

SEQ ID NO: 1885671 - RNA, 19 nt, Homo sapiens
  misc_RNA (1)...(19): siRNA sense strand
gcgagggcauggacgagau

SEQ ID NO: 1885672 - RNA, 19 nt, Homo sapiens
  misc_RNA (1)...(19): siRNA sense strand
gagcucacccagcagaugu

SEQ ID NO: 1885673 - RNA, 19 nt, Homo sapiens
  misc_RNA (1)...(19): siRNA sense strand
gaucagcgucuacuacaac

SEQ ID NO: 1885674 - RNA, 19 nt, Homo sapiens
  misc_RNA (1)...(19): siRNA sense strand
cgaggccucuucucacaag

SEQ ID NO: 1885675 - RNA, 19 nt, Homo sapiens
  misc_RNA (1)...(19): siRNA sense strand
gccaaguucugggaaguca

SEQ ID NO: 1885676 - RNA, 19 nt, Homo sapiens
  misc_RNA (1)...(19): siRNA sense strand
aggaagagggcgagaugua

SEQ ID NO: 1885677 - RNA, 19 nt, Homo sapiens
  misc_RNA (1)...(19): siRNA sense strand
gcauggacgagauggaguu

SEQ ID NO: 1885678 - RNA, 19 nt, Homo sapiens
  misc_RNA (1)...(19): siRNA sense strand
cgaggaagagggcgagaug

SEQ ID NO: 1885679 - RNA, 19 nt, Homo sapiens
  misc_RNA (1)...(19): siRNA sense strand
ggaagagggcgagauguac

SEQ ID NO: 1885680 - RNA, 19 nt, Homo sapiens
  misc_RNA (1)...(19): siRNA sense strand
ggagguggacgagcagaug

SEQ ID NO: 1885681 - RNA, 19 nt, Homo sapiens
  misc_RNA (1)...(19): siRNA sense strand
gcgcaucuccgagcaguuc

SEQ ID NO: 1885682 - RNA, 19 nt, Homo sapiens
  misc_RNA (1)...(19): siRNA sense strand
acaacgaggccucuucuca

SEQ ID NO: 1885683 - RNA, 19 nt, Homo sapiens
  misc_RNA (1)...(19): siRNA sense strand
ugaagguggccguguguga

SEQ ID NO: 1885684 - RNA, 19 nt, Homo sapiens
  misc_RNA (1)...(19): siRNA sense strand
ccggaaccauggacagugu

SEQ ID NO: 1885685 - RNA, 19 nt, Homo sapiens
  misc_RNA (1)...(19): siRNA sense strand
aagauguccuccaccuuca

SEQ ID NO: 1885686 - RNA, 19 nt, Homo sapiens
  misc_RNA (1)...(19): siRNA sense strand
agggcgagauguacgaaga

SEQ ID NO: 1885687 - RNA, 19 nt, Homo sapiens
  misc_RNA (1)...(19): siRNA sense strand
ucaccgaggccgagagcaa

SEQ ID NO: 1885688 - RNA, 19 nt, Homo sapiens
  misc_RNA (1)...(19): siRNA sense strand
aacgaggccucuucucaca

SEQ ID NO: 1885689 - RNA, 19 nt, Homo sapiens
  misc_RNA (1)...(19): siRNA sense strand
gggccaaguucugggaagu

SEQ ID NO: 1885690 - RNA, 19 nt, Homo sapiens
  misc_RNA (1)...(19): siRNA sense strand
aauuucaucuuuggucaga

SEQ ID NO: 1885691 - RNA, 19 nt, Homo sapiens
  misc_RNA (1)...(19): siRNA sense strand
caaguucugggaagucauc

SEQ ID NO: 1885692 - RNA, 19 nt, Homo sapiens
  misc_RNA (1)...(19): siRNA sense strand
gcaagcuggccgucaacau

SEQ ID NO: 1885693 - RNA, 19 nt, Homo sapiens
  misc_RNA (1)...(19): siRNA sense strand
acgaggcgcucuacgacau

SEQ ID NO: 1885694 - RNA, 19 nt, Homo sapiens
  misc_RNA (1)...(19): siRNA sense strand
acaacgaggcgcucuacga

SEQ ID NO: 1885695 - RNA, 19 nt, Homo sapiens
  misc_RNA (1)...(19): siRNA sense strand
ggccugacaauuucaucuu

SEQ ID NO: 1885696 - RNA, 19 nt, Homo sapiens
  misc_RNA (1)...(19): siRNA sense strand
gaacauggcuuucaaaugg

SEQ ID NO: 1885697 - RNA, 19 nt, Homo sapiens
  misc_RNA (1)...(19): siRNA sense strand
gcaagaacauggcuuucaa

SEQ ID NO: 1885698 - RNA, 19 nt, Homo sapiens
  misc_RNA (1)...(19): siRNA sense strand
ggaagcugcaguugaauua

SEQ ID NO: 1885699 - RNA, 19 nt, Homo sapiens
  misc_RNA (1)...(19): siRNA sense strand
gaaggaaauugagcaggaa

SEQ ID NO: 1885700 - RNA, 19 nt, Homo sapiens
  misc_RNA (1)...(19): siRNA sense strand
gaacccagaaggaaauuga

SEQ ID NO: 1885701 - RNA, 19 nt, Homo sapiens
  misc_RNA (1)...(19): siRNA sense strand
gcaguugaauuaucacagu

SEQ ID NO: 1885702 - RNA, 19 nt, Homo sapiens
  misc_RNA (1)...(19): siRNA sense strand
caaggugccugacuucucu

SEQ ID NO: 1885703 - RNA, 19 nt, Homo sapiens
  misc_RNA (1)...(19): siRNA sense strand
caaugucccugcuucuguu

SEQ ID NO: 1885704 - RNA, 19 nt, Homo sapiens
  misc_RNA (1)...(19): siRNA sense strand
gacgauauggugauuguug

SEQ ID NO: 1885705 - RNA, 19 nt, Homo sapiens
  misc_RNA (1)...(19): siRNA sense strand
ugccugacuucucugaaua

SEQ ID NO: 1885706 - RNA, 19 nt, Homo sapiens
  misc_RNA (1)...(19): siRNA sense strand
cauagaacccagaaggaaa

SEQ ID NO: 1885707 - RNA, 19 nt, Homo sapiens
  misc_RNA (1)...(19): siRNA sense strand
caagaacauggcuuucaaa

SEQ ID NO: 1885708 - RNA, 19 nt, Homo sapiens
  misc_RNA (1)...(19): siRNA sense strand
gugacgauauggugauugu

SEQ ID NO: 1885709 - RNA, 19 nt, Homo sapiens
  misc_RNA (1)...(19): siRNA sense strand
agaaugccgucacccaguu

SEQ ID NO: 1885710 - RNA, 19 nt, Homo sapiens
  misc_RNA (1)...(19): siRNA sense strand
guugaauuaucacaguuga

SEQ ID NO: 1885711 - RNA, 19 nt, Homo sapiens
  misc_RNA (1)...(19): siRNA sense strand
gugccugacuucucugaau

SEQ ID NO: 1885712 - RNA, 19 nt, Homo sapiens
  misc_RNA (1)...(19): siRNA sense strand
aaagguuucuccuauuugg

SEQ ID NO: 1885713 - RNA, 19 nt, Homo sapiens
  misc_RNA (1)...(19): siRNA sense strand
uauggugauuguugguuaa

SEQ ID NO: 1885714 - RNA, 19 nt, Homo sapiens
  misc_RNA (1)...(19): siRNA sense strand
auauggugauuguugguua

SEQ ID NO: 1885715 - RNA, 19 nt, Homo sapiens
  misc_RNA (1)...(19): siRNA sense strand
gaguaaagaaaccugaaug

SEQ ID NO: 1885716 - RNA, 19 nt, Homo sapiens
  misc_RNA (1)...(19): siRNA sense strand
ucgcauaugcugccaagaa

SEQ ID NO: 1885717 - RNA, 19 nt, Homo sapiens
  misc_RNA (1)...(19): siRNA sense strand
caugagugcuucugcugau

SEQ ID NO: 1885718 - RNA, 19 nt, Homo sapiens
  misc_RNA (1)...(19): siRNA sense strand
ugagggacccacagcauga

SEQ ID NO: 1885719 - RNA, 19 nt, Homo sapiens
  misc_RNA (1)...(19): siRNA sense strand
ggacccacagcaugaucua

SEQ ID NO: 1885720 - RNA, 19 nt, Homo sapiens
  misc_RNA (1)...(19): siRNA sense strand
cgcauaugcugccaagaau

SEQ ID NO: 1885721 - RNA, 19 nt, Homo sapiens
  misc_RNA (1)...(19): siRNA sense strand
ucauagaacccagaaggaa

SEQ ID NO: 1885722 - RNA, 19 nt, Homo sapiens
  misc_RNA (1)...(19): siRNA sense strand
aagcugcaguugaauuauc

SEQ ID NO: 1885723 - RNA, 19 nt, Homo sapiens
  misc_RNA (1)...(19): siRNA sense strand
cugaauggguuauccugau

SEQ ID NO: 1885724 - RNA, 19 nt, Homo sapiens
  misc_RNA (1)...(19): siRNA sense strand
gguuucuccuauuugguaa

SEQ ID NO: 1885725 - RNA, 19 nt, Homo sapiens
  misc_RNA (1)...(19): siRNA sense strand
ugccaugggucacacuaug

SEQ ID NO: 1885726 - RNA, 19 nt, Homo sapiens
  misc_RNA (1)...(19): siRNA sense strand
caguugaauuaucacaguu

SEQ ID NO: 1885727 - RNA, 19 nt, Homo sapiens
  misc_RNA (1)...(19): siRNA sense strand
gaagcugcaguugaauuau

SEQ ID NO: 1885728 - RNA, 19 nt, Homo sapiens
  misc_RNA (1)...(19): siRNA sense strand
ggcaagaacauggcuuuca

SEQ ID NO: 1885729 - RNA, 19 nt, Homo sapiens
  misc_RNA (1)...(19): siRNA sense strand
acaucaaggugccugacuu

SEQ ID NO: 1885730 - RNA, 19 nt, Homo sapiens
  misc_RNA (1)...(19): siRNA sense strand
uuugguaacuggaguaacu

SEQ ID NO: 1885731 - RNA, 19 nt, Homo sapiens
  misc_RNA (1)...(19): siRNA sense strand
ucaaugucccugcuucugu

SEQ ID NO: 1885732 - RNA, 19 nt, Homo sapiens
  misc_RNA (1)...(19): siRNA sense strand
gcuguguacccauugcaaa

SEQ ID NO: 1885733 - RNA, 19 nt, Homo sapiens
  misc_RNA (1)...(19): siRNA sense strand
gcauaugcugccaagaaug

SEQ ID NO: 1885734 - RNA, 19 nt, Homo sapiens
  misc_RNA (1)...(19): siRNA sense strand
cugcuucuguuuguuauuc

SEQ ID NO: 1885735 - RNA, 19 nt, Homo sapiens
  misc_RNA (1)...(19): siRNA sense strand
gauauggugauuguugguu

SEQ ID NO: 1885736 - RNA, 19 nt, Homo sapiens
  misc_RNA (1)...(19): siRNA sense strand
gccaugggucacacuauga

SEQ ID NO: 1885737 - RNA, 19 nt, Homo sapiens
  misc_RNA (1)...(19): siRNA sense strand
cggagcagccuguguugga

SEQ ID NO: 1885738 - RNA, 19 nt, Homo sapiens
  misc_RNA (1)...(19): siRNA sense strand
caggagauuuuggugguua

SEQ ID NO: 1885739 - RNA, 19 nt, Homo sapiens
  misc_RNA (1)...(19): siRNA sense strand
caucaaggugccugacuuc

SEQ ID NO: 1885740 - RNA, 19 nt, Homo sapiens
  misc_RNA (1)...(19): siRNA sense strand
cuacugugggugucgcaua

SEQ ID NO: 1885741 - RNA, 19 nt, Homo sapiens
  misc_RNA (1)...(19): siRNA sense strand
agaacauggcuuucaaaug

SEQ ID NO: 1885742 - RNA, 19 nt, Homo sapiens
  misc_RNA (1)...(19): siRNA sense strand
uacugugggugucgcauau

SEQ ID NO: 1885743 - RNA, 19 nt, Homo sapiens
  misc_RNA (1)...(19): siRNA sense strand
gagugcuucugcugaugug

SEQ ID NO: 1885744 - RNA, 19 nt, Homo sapiens
  misc_RNA (1)...(19): siRNA sense strand
cagugacgauauggugauu

SEQ ID NO: 1885745 - RNA, 19 nt, Homo sapiens
  misc_RNA (1)...(19): siRNA sense strand
cgaguaaagaaaccugaau

SEQ ID NO: 1885746 - RNA, 19 nt, Homo sapiens
  misc_RNA (1)...(19): siRNA sense strand
ucccugcuucuguuuguua

SEQ ID NO: 1885747 - RNA, 19 nt, Homo sapiens
  misc_RNA (1)...(19): siRNA sense strand
gcacggaggagcucuuuga

SEQ ID NO: 1885748 - RNA, 19 nt, Homo sapiens
  misc_RNA (1)...(19): siRNA sense strand
cggaggagcucuuugacuu

SEQ ID NO: 1885749 - RNA, 19 nt, Homo sapiens
  misc_RNA (1)...(19): siRNA sense strand
gcgagcaguuggagaaaug

SEQ ID NO: 1885750 - RNA, 19 nt, Homo sapiens
  misc_RNA (1)...(19): siRNA sense strand
ggcuagagcucugugauga

SEQ ID NO: 1885751 - RNA, 19 nt, Homo sapiens
  misc_RNA (1)...(19): siRNA sense strand
ggagcucuuugacuucuug

SEQ ID NO: 1885752 - RNA, 19 nt, Homo sapiens
  misc_RNA (1)...(19): siRNA sense strand
gcaguuggagaaaugugua

SEQ ID NO: 1885753 - RNA, 19 nt, Homo sapiens
  misc_RNA (1)...(19): siRNA sense strand
gagcgugauuccucucgau

SEQ ID NO: 1885754 - RNA, 19 nt, Homo sapiens
  misc_RNA (1)...(19): siRNA sense strand
gaggagcucuuugacuucu

SEQ ID NO: 1885755 - RNA, 19 nt, Homo sapiens
  misc_RNA (1)...(19): siRNA sense strand
caacagugagagagcaaug

SEQ ID NO: 1885756 - RNA, 19 nt, Homo sapiens
  misc_RNA (1)...(19): siRNA sense strand
ggaggagcucuuugacuuc

SEQ ID NO: 1885757 - RNA, 19 nt, Homo sapiens
  misc_RNA (1)...(19): siRNA sense strand
caaaagaugcuuaccgaau

SEQ ID NO: 1885758 - RNA, 19 nt, Homo sapiens
  misc_RNA (1)...(19): siRNA sense strand
aaaagaugcuuaccgaauc

SEQ ID NO: 1885759 - RNA, 19 nt, Homo sapiens
  misc_RNA (1)...(19): siRNA sense strand
gagagcaaugcgagcaguu

SEQ ID NO: 1885760 - RNA, 19 nt, Homo sapiens
  misc_RNA (1)...(19): siRNA sense strand
ucacauacagaagaggauu

SEQ ID NO: 1885761 - RNA, 19 nt, Homo sapiens
  misc_RNA (1)...(19): siRNA sense strand
caaaauaacuaccccgaaa

SEQ ID NO: 1885762 - RNA, 19 nt, Homo sapiens
  misc_RNA (1)...(19): siRNA sense strand
gagagcagacacuagcuua

SEQ ID NO: 1885763 - RNA, 19 nt, Homo sapiens
  misc_RNA (1)...(19): siRNA sense strand
gacacuagcuuaaacaacu

SEQ ID NO: 1885764 - RNA, 19 nt, Homo sapiens
  misc_RNA (1)...(19): siRNA sense strand
aauggaauguguucaguuu

SEQ ID NO: 1885765 - RNA, 19 nt, Homo sapiens
  misc_RNA (1)...(19): siRNA sense strand
ggacaaauggaauguguuc

SEQ ID NO: 1885766 - RNA, 19 nt, Homo sapiens
  misc_RNA (1)...(19): siRNA sense strand
acaacuguccguaugauua

SEQ ID NO: 1885767 - RNA, 19 nt, Homo sapiens
  misc_RNA (1)...(19): siRNA sense strand
gagcagacacuagcuuaaa

SEQ ID NO: 1885768 - RNA, 19 nt, Homo sapiens
  misc_RNA (1)...(19): siRNA sense strand
gcacaacuguccguaugau

SEQ ID NO: 1885769 - RNA, 19 nt, Homo sapiens
  misc_RNA (1)...(19): siRNA sense strand
ggaaauccuaggacaaaug

SEQ ID NO: 1885770 - RNA, 19 nt, Homo sapiens
  misc_RNA (1)...(19): siRNA sense strand
caacaguccuaccucagau

SEQ ID NO: 1885771 - RNA, 19 nt, Homo sapiens
  misc_RNA (1)...(19): siRNA sense strand
guacagagagcagacacua

SEQ ID NO: 1885772 - RNA, 19 nt, Homo sapiens
  misc_RNA (1)...(19): siRNA sense strand
ggauguggcuuuuauggaa

SEQ ID NO: 1885773 - RNA, 19 nt, Homo sapiens
  misc_RNA (1)...(19): siRNA sense strand
caaauggaauguguucagu

SEQ ID NO: 1885774 - RNA, 19 nt, Homo sapiens
  misc_RNA (1)...(19): siRNA sense strand
uaacucagcaaaugacaga

SEQ ID NO: 1885775 - RNA, 19 nt, Homo sapiens
  misc_RNA (1)...(19): siRNA sense strand
caaaauaguggcagaauga

SEQ ID NO: 1885776 - RNA, 19 nt, Homo sapiens
  misc_RNA (1)...(19): siRNA sense strand
aagcacaacuguccguaug

SEQ ID NO: 1885777 - RNA, 19 nt, Homo sapiens
  misc_RNA (1)...(19): siRNA sense strand
gaauugcccaaaccaaaga

SEQ ID NO: 1885778 - RNA, 19 nt, Homo sapiens
  misc_RNA (1)...(19): siRNA sense strand
gaaaagagaauccaguugu

SEQ ID NO: 1885779 - RNA, 19 nt, Homo sapiens
  misc_RNA (1)...(19): siRNA sense strand
uuuguggacuucaccguua

SEQ ID NO: 1885780 - RNA, 19 nt, Homo sapiens
  misc_RNA (1)...(19): siRNA sense strand
guggcugccuugccuguaa

SEQ ID NO: 1885781 - RNA, 19 nt, Homo sapiens
  misc_RNA (1)...(19): siRNA sense strand
uaggacaaauggaaugugu

SEQ ID NO: 1885782 - RNA, 19 nt, Homo sapiens
  misc_RNA (1)...(19): siRNA sense strand
cagcaaaugacagaaauga

SEQ ID NO: 1885783 - RNA, 19 nt, Homo sapiens
  misc_RNA (1)...(19): siRNA sense strand
gaaauccuaggacaaaugg

SEQ ID NO: 1885784 - RNA, 19 nt, Homo sapiens
  misc_RNA (1)...(19): siRNA sense strand
gcaaaauaguggcagaaug

SEQ ID NO: 1885785 - RNA, 19 nt, Homo sapiens
  misc_RNA (1)...(19): siRNA sense strand
gccuguaacucagcaaaug

SEQ ID NO: 1885786 - RNA, 19 nt, Homo sapiens
  misc_RNA (1)...(19): siRNA sense strand
gcccaguacuucucagagu

SEQ ID NO: 1885787 - RNA, 19 nt, Homo sapiens
  misc_RNA (1)...(19): siRNA sense strand
ccaacaguccuaccucaga

SEQ ID NO: 1885788 - RNA, 19 nt, Homo sapiens
  misc_RNA (1)...(19): siRNA sense strand
gcagacacuagcuuaaaca

SEQ ID NO: 1885789 - RNA, 19 nt, Homo sapiens
  misc_RNA (1)...(19): siRNA sense strand
gaauguguucaguuugcua

SEQ ID NO: 1885790 - RNA, 19 nt, Homo sapiens
  misc_RNA (1)...(19): siRNA sense strand
cugccgauguggaaauuug

SEQ ID NO: 1885791 - RNA, 19 nt, Homo sapiens
  misc_RNA (1)...(19): siRNA sense strand
ggguuugacugccgaugug

SEQ ID NO: 1885792 - RNA, 19 nt, Homo sapiens
  misc_RNA (1)...(19): siRNA sense strand
cagagccaguugucacuca

SEQ ID NO: 1885793 - RNA, 19 nt, Homo sapiens
  misc_RNA (1)...(19): siRNA sense strand
aaagagaauccaguuguug

SEQ ID NO: 1885794 - RNA, 19 nt, Homo sapiens
  misc_RNA (1)...(19): siRNA sense strand
gacugccgauguggaaauu

SEQ ID NO: 1885795 - RNA, 19 nt, Homo sapiens
  misc_RNA (1)...(19): siRNA sense strand
ggacagcuagugguuccaa

SEQ ID NO: 1885796 - RNA, 19 nt, Homo sapiens
  misc_RNA (1)...(19): siRNA sense strand
aaaagagaauccaguuguu

SEQ ID NO: 1885797 - RNA, 19 nt, Homo sapiens
  misc_RNA (1)...(19): siRNA sense strand
ccaguacuucucagaguga

SEQ ID NO: 1885798 - RNA, 19 nt, Homo sapiens
  misc_RNA (1)...(19): siRNA sense strand
caacuguccguaugauuac

SEQ ID NO: 1885799 - RNA, 19 nt, Homo sapiens
  misc_RNA (1)...(19): siRNA sense strand
cugaauugcccaaaccaaa

SEQ ID NO: 1885800 - RNA, 19 nt, Homo sapiens
  misc_RNA (1)...(19): siRNA sense strand
cagcccaguccaucaguuu

SEQ ID NO: 1885801 - RNA, 19 nt, Homo sapiens
  misc_RNA (1)...(19): siRNA sense strand
gacuucaccguuacucuga

SEQ ID NO: 1885802 - RNA, 19 nt, Homo sapiens
  misc_RNA (1)...(19): siRNA sense strand
uggaauguguucaguuugc

SEQ ID NO: 1885803 - RNA, 19 nt, Homo sapiens
  misc_RNA (1)...(19): siRNA sense strand
ugaauugcccaaaccaaag

SEQ ID NO: 1885804 - RNA, 19 nt, Homo sapiens
  misc_RNA (1)...(19): siRNA sense strand
caagcacaacuguccguau

SEQ ID NO: 1885805 - RNA, 19 nt, Homo sapiens
  misc_RNA (1)...(19): siRNA sense strand
acacuagcuuaaacaacug

SEQ ID NO: 1885806 - RNA, 19 nt, Homo sapiens
  misc_RNA (1)...(19): siRNA sense strand
gcuccugaauugcccaaac

SEQ ID NO: 1885807 - RNA, 19 nt, Homo sapiens
  misc_RNA (1)...(19): siRNA sense strand
uaacuaccccgaaaacaga

SEQ ID NO: 1885808 - RNA, 19 nt, Homo sapiens
  misc_RNA (1)...(19): siRNA sense strand
uagcuuaaacaacugugaa

SEQ ID NO: 1885809 - RNA, 19 nt, Homo sapiens
  misc_RNA (1)...(19): siRNA sense strand
ggaauguguucaguuugcu

SEQ ID NO: 1885810 - RNA, 19 nt, Homo sapiens
  misc_RNA (1)...(19): siRNA sense strand
aauccuaggacaaauggaa

SEQ ID NO: 1885811 - RNA, 19 nt, Homo sapiens
  misc_RNA (1)...(19): siRNA sense strand
aagagaauccaguuguugu

SEQ ID NO: 1885812 - RNA, 19 nt, Homo sapiens
  misc_RNA (1)...(19): siRNA sense strand
cuucagaggcagcaaaaua

SEQ ID NO: 1885813 - RNA, 19 nt, Homo sapiens
  misc_RNA (1)...(19): siRNA sense strand
gauguggcuuuuauggaaa

SEQ ID NO: 1885814 - RNA, 19 nt, Homo sapiens
  misc_RNA (1)...(19): siRNA sense strand
gagcagcgcuggaggauuu

SEQ ID NO: 1885815 - RNA, 19 nt, Homo sapiens
  misc_RNA (1)...(19): siRNA sense strand
gcaagcagcuauuacagaa

SEQ ID NO: 1885816 - RNA, 19 nt, Homo sapiens
  misc_RNA (1)...(19): siRNA sense strand
gcaacuaccuccaaacuca

SEQ ID NO: 1885817 - RNA, 19 nt, Homo sapiens
  misc_RNA (1)...(19): siRNA sense strand
ggucuggaaugaugaauuu

SEQ ID NO: 1885818 - RNA, 19 nt, Homo sapiens
  misc_RNA (1)...(19): siRNA sense strand
gaacucaucugggaccauu

SEQ ID NO: 1885819 - RNA, 19 nt, Homo sapiens
  misc_RNA (1)...(19): siRNA sense strand
ggucgcagcuucaaucuau

SEQ ID NO: 1885820 - RNA, 19 nt, Homo sapiens
  misc_RNA (1)...(19): siRNA sense strand
caagaggucuggaaugaug

SEQ ID NO: 1885821 - RNA, 19 nt, Homo sapiens
  misc_RNA (1)...(19): siRNA sense strand
cagaagacauucagcauga

SEQ ID NO: 1885822 - RNA, 19 nt, Homo sapiens
  misc_RNA (1)...(19): siRNA sense strand
ucaaauuccuccaugauga

SEQ ID NO: 1885823 - RNA, 19 nt, Homo sapiens
  misc_RNA (1)...(19): siRNA sense strand
ggaauucuagccacagaua

SEQ ID NO: 1885824 - RNA, 19 nt, Homo sapiens
  misc_RNA (1)...(19): siRNA sense strand
gcacagauucaguuuaaug

SEQ ID NO: 1885825 - RNA, 19 nt, Homo sapiens
  misc_RNA (1)...(19): siRNA sense strand
uugcacagauucaguuuaa

SEQ ID NO: 1885826 - RNA, 19 nt, Homo sapiens
  misc_RNA (1)...(19): siRNA sense strand
guucguccaugcuauauug

SEQ ID NO: 1885827 - RNA, 19 nt, Homo sapiens
  misc_RNA (1)...(19): siRNA sense strand
gcugauuccuagcaucuuu

SEQ ID NO: 1885828 - RNA, 19 nt, Homo sapiens
  misc_RNA (1)...(19): siRNA sense strand
ggauguggaugcagagaau

SEQ ID NO: 1885829 - RNA, 19 nt, Homo sapiens
  misc_RNA (1)...(19): siRNA sense strand
cagcauguuugaugagauu

SEQ ID NO: 1885830 - RNA, 19 nt, Homo sapiens
  misc_RNA (1)...(19): siRNA sense strand
cauuugauguccagaauug

SEQ ID NO: 1885831 - RNA, 19 nt, Homo sapiens
  misc_RNA (1)...(19): siRNA sense strand
ugacaggccuagaguggaa

SEQ ID NO: 1885832 - RNA, 19 nt, Homo sapiens
  misc_RNA (1)...(19): siRNA sense strand
ggaugcagagaaucaaaua

SEQ ID NO: 1885833 - RNA, 19 nt, Homo sapiens
  misc_RNA (1)...(19): siRNA sense strand
gagccaggauuguguucaa

SEQ ID NO: 1885834 - RNA, 19 nt, Homo sapiens
  misc_RNA (1)...(19): siRNA sense strand
gaagugagaccuguuuaca

SEQ ID NO: 1885835 - RNA, 19 nt, Homo sapiens
  misc_RNA (1)...(19): siRNA sense strand
gacauaugcuuuuccauuu

SEQ ID NO: 1885836 - RNA, 19 nt, Homo sapiens
  misc_RNA (1)...(19): siRNA sense strand
ccaggauucugcucuguau

SEQ ID NO: 1885837 - RNA, 19 nt, Homo sapiens
  misc_RNA (1)...(19): siRNA sense strand
uaaagacaaguguauggua

SEQ ID NO: 1885838 - RNA, 19 nt, Homo sapiens
  misc_RNA (1)...(19): siRNA sense strand
ucaaugaguuuguggacau

SEQ ID NO: 1885839 - RNA, 19 nt, Homo sapiens
  misc_RNA (1)...(19): siRNA sense strand
cuucuugguucucagcuua

SEQ ID NO: 1885840 - RNA, 19 nt, Homo sapiens
  misc_RNA (1)...(19): siRNA sense strand
ggaccauugagaacuauaa

SEQ ID NO: 1885841 - RNA, 19 nt, Homo sapiens
  misc_RNA (1)...(19): siRNA sense strand
gaggagcccagaagacauu

SEQ ID NO: 1885842 - RNA, 19 nt, Homo sapiens
  misc_RNA (1)...(19): siRNA sense strand
aagcagcuauuacagaaau

SEQ ID NO: 1885843 - RNA, 19 nt, Homo sapiens
  misc_RNA (1)...(19): siRNA sense strand
gagaucucccuaccucuaa

SEQ ID NO: 1885844 - RNA, 19 nt, Homo sapiens
  misc_RNA (1)...(19): siRNA sense strand
cgacugcucuuccaaagcu

SEQ ID NO: 1885845 - RNA, 19 nt, Homo sapiens
  misc_RNA (1)...(19): siRNA sense strand
ggcccaacgugcuguggua

SEQ ID NO: 1885846 - RNA, 19 nt, Homo sapiens
  misc_RNA (1)...(19): siRNA sense strand
gcauacaguggaagacgua

SEQ ID NO: 1885847 - RNA, 19 nt, Homo sapiens
  misc_RNA (1)...(19): siRNA sense strand
ugaaagauacccugaccuu

SEQ ID NO: 1885848 - RNA, 19 nt, Homo sapiens
  misc_RNA (1)...(19): siRNA sense strand
aaagaagugagaccuguuu

SEQ ID NO: 1885849 - RNA, 19 nt, Homo sapiens
  misc_RNA (1)...(19): siRNA sense strand
ucaagagcauucugcauac

SEQ ID NO: 1885850 - RNA, 19 nt, Homo sapiens
  misc_RNA (1)...(19): siRNA sense strand
accaagaggucuggaauga

SEQ ID NO: 1885851 - RNA, 19 nt, Homo sapiens
  misc_RNA (1)...(19): siRNA sense strand
ggaccaaggccaccacagu

SEQ ID NO: 1885852 - RNA, 19 nt, Homo sapiens
  misc_RNA (1)...(19): siRNA sense strand
ggaacuccagcauguuuga

SEQ ID NO: 1885853 - RNA, 19 nt, Homo sapiens
  misc_RNA (1)...(19): siRNA sense strand
uggaggauuugcacagauu

SEQ ID NO: 1885854 - RNA, 19 nt, Homo sapiens
  misc_RNA (1)...(19): siRNA sense strand
gaccuucccuauguuuaug

SEQ ID NO: 1885855 - RNA, 19 nt, Homo sapiens
  misc_RNA (1)...(19): siRNA sense strand
gacaggagcagcccuucuu

SEQ ID NO: 1885856 - RNA, 19 nt, Homo sapiens
  misc_RNA (1)...(19): siRNA sense strand
uuguggacauugaaagaua

SEQ ID NO: 1885857 - RNA, 19 nt, Homo sapiens
  misc_RNA (1)...(19): siRNA sense strand
gcuggaggauuugcacaga

SEQ ID NO: 1885858 - RNA, 19 nt, Homo sapiens
  misc_RNA (1)...(19): siRNA sense strand
agugggaacuucuaucugu

SEQ ID NO: 1885859 - RNA, 19 nt, Homo sapiens
  misc_RNA (1)...(19): siRNA sense strand
guuuagagacauaugcuuu

SEQ ID NO: 1885860 - RNA, 19 nt, Homo sapiens
  misc_RNA (1)...(19): siRNA sense strand
caucugggaccauugagaa

SEQ ID NO: 1885861 - RNA, 19 nt, Homo sapiens
  misc_RNA (1)...(19): siRNA sense strand
uucaagagcauucugcaua

SEQ ID NO: 1885862 - RNA, 19 nt, Homo sapiens
  misc_RNA (1)...(19): siRNA sense strand
acccugaccuucccuaugu

SEQ ID NO: 1885863 - RNA, 19 nt, Homo sapiens
  misc_RNA (1)...(19): siRNA sense strand
caggaauucuagccacaga

SEQ ID NO: 1885864 - RNA, 19 nt, Homo sapiens
  misc_RNA (1)...(19): siRNA sense strand
gaagacauucagcaugaca

SEQ ID NO: 1885865 - RNA, 19 nt, Homo sapiens
  misc_RNA (1)...(19): siRNA sense strand
ugagaccuguuuacaacug

SEQ ID NO: 1885866 - RNA, 19 nt, Homo sapiens
  misc_RNA (1)...(19): siRNA sense strand
ccaacgugcugugguaaca

SEQ ID NO: 1885867 - RNA, 19 nt, Homo sapiens
  misc_RNA (1)...(19): siRNA sense strand
ggucaaauuccuccaugau

SEQ ID NO: 1885868 - RNA, 19 nt, Homo sapiens
  misc_RNA (1)...(19): siRNA sense strand
gggcacuucuucaccaucu

SEQ ID NO: 1885869 - RNA, 19 nt, Homo sapiens
  misc_RNA (1)...(19): siRNA sense strand
caagagcauucugcauaca

SEQ ID NO: 1885870 - RNA, 19 nt, Homo sapiens
  misc_RNA (1)...(19): siRNA sense strand
gacagugagugggaacuuc

SEQ ID NO: 1885871 - RNA, 19 nt, Homo sapiens
  misc_RNA (1)...(19): siRNA sense strand
agacguagaccuggccuuu

SEQ ID NO: 1885872 - RNA, 19 nt, Homo sapiens
  misc_RNA (1)...(19): siRNA sense strand
aaacucaggaccagacaga

SEQ ID NO: 1885873 - RNA, 19 nt, Homo sapiens
  misc_RNA (1)...(19): siRNA sense strand
cugcauggccuucuugguu

SEQ ID NO: 1885874 - RNA, 19 nt, Homo sapiens
  misc_RNA (1)...(19): siRNA sense strand
guaccaagaggucuggaau

SEQ ID NO: 1885875 - RNA, 19 nt, Homo sapiens
  misc_RNA (1)...(19): siRNA sense strand
gauuugcacagauucaguu

SEQ ID NO: 1885876 - RNA, 19 nt, Homo sapiens
  misc_RNA (1)...(19): siRNA sense strand
agugagaccuguuuacaac

SEQ ID NO: 1885877 - RNA, 19 nt, Homo sapiens
  misc_RNA (1)...(19): siRNA sense strand
ucucagcaagcagcuauua

SEQ ID NO: 1885878 - RNA, 19 nt, Homo sapiens
  misc_RNA (1)...(19): siRNA sense strand
ccaucguguuggucaaauu

SEQ ID NO: 1885879 - RNA, 19 nt, Homo sapiens
  misc_RNA (1)...(19): siRNA sense strand
cauguuugaugagauuaga

SEQ ID NO: 1885880 - RNA, 19 nt, Homo sapiens
  misc_RNA (1)...(19): siRNA sense strand
gaccgacugcucuuccaaa

SEQ ID NO: 1885881 - RNA, 19 nt, Homo sapiens
  misc_RNA (1)...(19): siRNA sense strand
caacugccgagccaggauu

SEQ ID NO: 1885882 - RNA, 19 nt, Homo sapiens
  misc_RNA (1)...(19): siRNA sense strand
uaaagaagugagaccuguu

SEQ ID NO: 1885883 - RNA, 19 nt, Homo sapiens
  misc_RNA (1)...(19): siRNA sense strand
cagucuaccuggaccuguu

SEQ ID NO: 1885884 - RNA, 19 nt, Homo sapiens
  misc_RNA (1)...(19): siRNA sense strand
cugggaccauugagaacua

SEQ ID NO: 1885885 - RNA, 19 nt, Homo sapiens
  misc_RNA (1)...(19): siRNA sense strand
guagaccuggccuuucuga

SEQ ID NO: 1885886 - RNA, 19 nt, Homo sapiens
  misc_RNA (1)...(19): siRNA sense strand
ccaaggccaccacagucua

SEQ ID NO: 1885887 - RNA, 19 nt, Homo sapiens
  misc_RNA (1)...(19): siRNA sense strand
cuaaguccaucguguuggu

SEQ ID NO: 1885888 - RNA, 19 nt, Homo sapiens
  misc_RNA (1)...(19): siRNA sense strand
ucagcaagcagcuauuaca

SEQ ID NO: 1885889 - RNA, 19 nt, Homo sapiens
  misc_RNA (1)...(19): siRNA sense strand
gugagucugcugauuccua

SEQ ID NO: 1885890 - RNA, 19 nt, Homo sapiens
  misc_RNA (1)...(19): siRNA sense strand
ugaccuucccuauguuuau

SEQ ID NO: 1885891 - RNA, 19 nt, Homo sapiens
  misc_RNA (1)...(19): siRNA sense strand
acuccagcauguuugauga

SEQ ID NO: 1885892 - RNA, 19 nt, Homo sapiens
  misc_RNA (1)...(19): siRNA sense strand
uagcuaaguccaucguguu

SEQ ID NO: 1885893 - RNA, 19 nt, Homo sapiens
  misc_RNA (1)...(19): siRNA sense strand
agacauucagcaugacaaa

SEQ ID NO: 1885894 - RNA, 19 nt, Homo sapiens
  misc_RNA (1)...(19): siRNA sense strand
caucucagcaagcagcuau

SEQ ID NO: 1885895 - RNA, 19 nt, Homo sapiens
  misc_RNA (1)...(19): siRNA sense strand
uaucagcaacuaccuccaa

SEQ ID NO: 1885896 - RNA, 19 nt, Homo sapiens
  misc_RNA (1)...(19): siRNA sense strand
uauauuggauguggaugca

SEQ ID NO: 1885897 - RNA, 19 nt, Homo sapiens
  misc_RNA (1)...(19): siRNA sense strand
uugaugagauuagagagau

SEQ ID NO: 1885898 - RNA, 19 nt, Homo sapiens
  misc_RNA (1)...(19): siRNA sense strand
gaccuguucguccaugcua

SEQ ID NO: 1885899 - RNA, 19 nt, Homo sapiens
  misc_RNA (1)...(19): siRNA sense strand
aagaagugagaccuguuua

SEQ ID NO: 1885900 - RNA, 19 nt, Homo sapiens
  misc_RNA (1)...(19): siRNA sense strand
cccgauaucaucaucaaug

SEQ ID NO: 1885901 - RNA, 19 nt, Homo sapiens
  misc_RNA (1)...(19): siRNA sense strand
gaugcagagaaucaaauau

SEQ ID NO: 1885902 - RNA, 19 nt, Homo sapiens
  misc_RNA (1)...(19): siRNA sense strand
uucaaucuaucagcaacua

SEQ ID NO: 1885903 - RNA, 19 nt, Homo sapiens
  misc_RNA (1)...(19): siRNA sense strand
gucaaauuccuccaugaug

SEQ ID NO: 1885904 - RNA, 19 nt, Homo sapiens
  misc_RNA (1)...(19): siRNA sense strand
ugucgugagucugcugauu

SEQ ID NO: 1885905 - RNA, 19 nt, Homo sapiens
  misc_RNA (1)...(19): siRNA sense strand
cauaugcuuuuccauuuga

SEQ ID NO: 1885906 - RNA, 19 nt, Homo sapiens
  misc_RNA (1)...(19): siRNA sense strand
uguaucaucucagcaagca

SEQ ID NO: 1885907 - RNA, 19 nt, Homo sapiens
  misc_RNA (1)...(19): siRNA sense strand
caagcagcuauuacagaaa

SEQ ID NO: 1885908 - RNA, 19 nt, Homo sapiens
  misc_RNA (1)...(19): siRNA sense strand
ggaucuacaccaucacucu

SEQ ID NO: 1885909 - RNA, 19 nt, Homo sapiens
  misc_RNA (1)...(19): siRNA sense strand
cagcaacuaccuccaaacu

SEQ ID NO: 1885910 - RNA, 19 nt, Homo sapiens
  misc_RNA (1)...(19): siRNA sense strand
ggacaggagcagcccuucu

SEQ ID NO: 1885911 - RNA, 19 nt, Homo sapiens
  misc_RNA (1)...(19): siRNA sense strand
caaauuccuccaugaugag

SEQ ID NO: 1885912 - RNA, 19 nt, Homo sapiens
  misc_RNA (1)...(19): siRNA sense strand
gcauggccuucuugguucu

SEQ ID NO: 1885913 - RNA, 19 nt, Homo sapiens
  misc_RNA (1)...(19): siRNA sense strand
ggauucugcucuguaucau

SEQ ID NO: 1885914 - RNA, 19 nt, Homo sapiens
  misc_RNA (1)...(19): siRNA sense strand
gaagacuacuacuggauga

SEQ ID NO: 1885915 - RNA, 19 nt, Homo sapiens
  misc_RNA (1)...(19): siRNA sense strand
gaugaaguuugaagugaaa

SEQ ID NO: 1885916 - RNA, 19 nt, Homo sapiens
  misc_RNA (1)...(19): siRNA sense strand
ggaauauguuaaugacuuc

SEQ ID NO: 1885917 - RNA, 19 nt, Homo sapiens
  misc_RNA (1)...(19): siRNA sense strand
ggagaaauacgagaaguug

SEQ ID NO: 1885918 - RNA, 19 nt, Homo sapiens
  misc_RNA (1)...(19): siRNA sense strand
caucagaacuggcaaugag

SEQ ID NO: 1885919 - RNA, 19 nt, Homo sapiens
  misc_RNA (1)...(19): siRNA sense strand
gcagaaggcgcaccuggaa

SEQ ID NO: 1885920 - RNA, 19 nt, Homo sapiens
  misc_RNA (1)...(19): siRNA sense strand
gcaagucgaccaccucaag

SEQ ID NO: 1885921 - RNA, 19 nt, Homo sapiens
  misc_RNA (1)...(19): siRNA sense strand
ugaugaaguuugaagugaa

SEQ ID NO: 1885922 - RNA, 19 nt, Homo sapiens
  misc_RNA (1)...(19): siRNA sense strand
gaagaggcggacccugaaa

SEQ ID NO: 1885923 - RNA, 19 nt, Homo sapiens
  misc_RNA (1)...(19): siRNA sense strand
ucgaggcgcucaucagcaa

SEQ ID NO: 1885924 - RNA, 19 nt, Homo sapiens
  misc_RNA (1)...(19): siRNA sense strand
ggagaccgaccgcaucauc

SEQ ID NO: 1885925 - RNA, 19 nt, Homo sapiens
  misc_RNA (1)...(19): siRNA sense strand
ccauggaauauguuaauga

SEQ ID NO: 1885926 - RNA, 19 nt, Homo sapiens
  misc_RNA (1)...(19): siRNA sense strand
guacuuaccaguguguuca

SEQ ID NO: 1885927 - RNA, 19 nt, Homo sapiens
  misc_RNA (1)...(19): siRNA sense strand
aggcgcaccuggaagacua

SEQ ID NO: 1885928 - RNA, 19 nt, Homo sapiens
  misc_RNA (1)...(19): siRNA sense strand
cauggaauauguuaaugac

SEQ ID NO: 1885929 - RNA, 19 nt, Homo sapiens
  misc_RNA (1)...(19): siRNA sense strand
ugagcccacucgcaaguug

SEQ ID NO: 1885930 - RNA, 19 nt, Homo sapiens
  misc_RNA (1)...(19): siRNA sense strand
acgcguacaaggagaaaua

SEQ ID NO: 1885931 - RNA, 19 nt, Homo sapiens
  misc_RNA (1)...(19): siRNA sense strand
ggccauggaauauguuaau

SEQ ID NO: 1885932 - RNA, 19 nt, Homo sapiens
  misc_RNA (1)...(19): siRNA sense strand
gaacuggcaaugagcaacu

SEQ ID NO: 1885933 - RNA, 19 nt, Homo sapiens
  misc_RNA (1)...(19): siRNA sense strand
gccauggaauauguuaaug

SEQ ID NO: 1885934 - RNA, 19 nt, Homo sapiens
  misc_RNA (1)...(19): siRNA sense strand
acaaggagaaauacgagaa

SEQ ID NO: 1885935 - RNA, 19 nt, Homo sapiens
  misc_RNA (1)...(19): siRNA sense strand
agaaggcgcaccuggaaga

SEQ ID NO: 1885936 - RNA, 19 nt, Homo sapiens
  misc_RNA (1)...(19): siRNA sense strand
gcaccuggaagacuacuac

SEQ ID NO: 1885937 - RNA, 19 nt, Homo sapiens
  misc_RNA (1)...(19): siRNA sense strand
ugauccggcugaagcagaa

SEQ ID NO: 1885938 - RNA, 19 nt, Homo sapiens
  misc_RNA (1)...(19): siRNA sense strand
gcaaguuggagccaucagu

SEQ ID NO: 1885939 - RNA, 19 nt, Homo sapiens
  misc_RNA (1)...(19): siRNA sense strand
gagaccgaccgcaucauca

SEQ ID NO: 1885940 - RNA, 19 nt, Homo sapiens
  misc_RNA (1)...(19): siRNA sense strand
gcgagagggacgcguacaa

SEQ ID NO: 1885941 - RNA, 19 nt, Homo sapiens
  misc_RNA (1)...(19): siRNA sense strand
cccguccucucccgaguuu

SEQ ID NO: 1885942 - RNA, 19 nt, Homo sapiens
  misc_RNA (1)...(19): siRNA sense strand
gcaucagaacuggcaauga

SEQ ID NO: 1885943 - RNA, 19 nt, Homo sapiens
  misc_RNA (1)...(19): siRNA sense strand
agaagaggcggacccugaa

SEQ ID NO: 1885944 - RNA, 19 nt, Homo sapiens
  misc_RNA (1)...(19): siRNA sense strand
ggacgcguacaaggagaaa

SEQ ID NO: 1885945 - RNA, 19 nt, Homo sapiens
  misc_RNA (1)...(19): siRNA sense strand
agaaauacgagaaguuggu

SEQ ID NO: 1885946 - RNA, 19 nt, Homo sapiens
  misc_RNA (1)...(19): siRNA sense strand
agagggacgcguacaagga

SEQ ID NO: 1885947 - RNA, 19 nt, Homo sapiens
  misc_RNA (1)...(19): siRNA sense strand
caaggagaaauacgagaag

SEQ ID NO: 1885948 - RNA, 19 nt, Homo sapiens
  misc_RNA (1)...(19): siRNA sense strand
gaacaaagcucucgaacuu

SEQ ID NO: 1885949 - RNA, 19 nt, Homo sapiens
  misc_RNA (1)...(19): siRNA sense strand
gaacgagacucuauguuug

SEQ ID NO: 1885950 - RNA, 19 nt, Homo sapiens
  misc_RNA (1)...(19): siRNA sense strand
ggaacaagcagaagaaaua

SEQ ID NO: 1885951 - RNA, 19 nt, Homo sapiens
  misc_RNA (1)...(19): siRNA sense strand
ccagauaacagcuauauua

SEQ ID NO: 1885952 - RNA, 19 nt, Homo sapiens
  misc_RNA (1)...(19): siRNA sense strand
gaaauugucuaccaagaga

SEQ ID NO: 1885953 - RNA, 19 nt, Homo sapiens
  misc_RNA (1)...(19): siRNA sense strand
caagugcucugaagaaauu

SEQ ID NO: 1885954 - RNA, 19 nt, Homo sapiens
  misc_RNA (1)...(19): siRNA sense strand
ggaagacauugaucuguuu

SEQ ID NO: 1885955 - RNA, 19 nt, Homo sapiens
  misc_RNA (1)...(19): siRNA sense strand
ggaauuuacuuaaggaaga

SEQ ID NO: 1885956 - RNA, 19 nt, Homo sapiens
  misc_RNA (1)...(19): siRNA sense strand
ggaggaaaguauuaucaaa

SEQ ID NO: 1885957 - RNA, 19 nt, Homo sapiens
  misc_RNA (1)...(19): siRNA sense strand
gauaacagcuauauuaagg

SEQ ID NO: 1885958 - RNA, 19 nt, Homo sapiens
  misc_RNA (1)...(19): siRNA sense strand
ggaacgagacucuauguuu

SEQ ID NO: 1885959 - RNA, 19 nt, Homo sapiens
  misc_RNA (1)...(19): siRNA sense strand
caacagaccuaaaggaaag

SEQ ID NO: 1885960 - RNA, 19 nt, Homo sapiens
  misc_RNA (1)...(19): siRNA sense strand
gcucagaaguauacaggua

SEQ ID NO: 1885961 - RNA, 19 nt, Homo sapiens
  misc_RNA (1)...(19): siRNA sense strand
ugaagaagcucagaaguau

SEQ ID NO: 1885962 - RNA, 19 nt, Homo sapiens
  misc_RNA (1)...(19): siRNA sense strand
gggaaugucuguaagaaau

SEQ ID NO: 1885963 - RNA, 19 nt, Homo sapiens
  misc_RNA (1)...(19): siRNA sense strand
gaaaggcuguuacccugaa

SEQ ID NO: 1885964 - RNA, 19 nt, Homo sapiens
  misc_RNA (1)...(19): siRNA sense strand
gcaagaacacucagacaaa

SEQ ID NO: 1885965 - RNA, 19 nt, Homo sapiens
  misc_RNA (1)...(19): siRNA sense strand
gaagaaauccuggaccaaa

SEQ ID NO: 1885966 - RNA, 19 nt, Homo sapiens
  misc_RNA (1)...(19): siRNA sense strand
aaucuagacuugcucuuua

SEQ ID NO: 1885967 - RNA, 19 nt, Homo sapiens
  misc_RNA (1)...(19): siRNA sense strand
gagcugauuucaucugcua

SEQ ID NO: 1885968 - RNA, 19 nt, Homo sapiens
  misc_RNA (1)...(19): siRNA sense strand
gaaguauacagguaagaua

SEQ ID NO: 1885969 - RNA, 19 nt, Homo sapiens
  misc_RNA (1)...(19): siRNA sense strand
gaacccagauaacagcuau

SEQ ID NO: 1885970 - RNA, 19 nt, Homo sapiens
  misc_RNA (1)...(19): siRNA sense strand
gcugggcacucuugaaauu

SEQ ID NO: 1885971 - RNA, 19 nt, Homo sapiens
  misc_RNA (1)...(19): siRNA sense strand
acaaacaucagauccauua

SEQ ID NO: 1885972 - RNA, 19 nt, Homo sapiens
  misc_RNA (1)...(19): siRNA sense strand
cauaaccgaugaucacaaa

SEQ ID NO: 1885973 - RNA, 19 nt, Homo sapiens
  misc_RNA (1)...(19): siRNA sense strand
gaacaagcagaagaaauaa

SEQ ID NO: 1885974 - RNA, 19 nt, Homo sapiens
  misc_RNA (1)...(19): siRNA sense strand
gacaagugcucugaagaaa

SEQ ID NO: 1885975 - RNA, 19 nt, Homo sapiens
  misc_RNA (1)...(19): siRNA sense strand
auacugccauccaucauua

SEQ ID NO: 1885976 - RNA, 19 nt, Homo sapiens
  misc_RNA (1)...(19): siRNA sense strand
ggcaacagcuugaauuucu

SEQ ID NO: 1885977 - RNA, 19 nt, Homo sapiens
  misc_RNA (1)...(19): siRNA sense strand
ugccauccaucauuauuua

SEQ ID NO: 1885978 - RNA, 19 nt, Homo sapiens
  misc_RNA (1)...(19): siRNA sense strand
gaacauaaccgaugaucac

SEQ ID NO: 1885979 - RNA, 19 nt, Homo sapiens
  misc_RNA (1)...(19): siRNA sense strand
gaaauaauccagcaagaac

SEQ ID NO: 1885980 - RNA, 19 nt, Homo sapiens
  misc_RNA (1)...(19): siRNA sense strand
gcuccgacuuuccauuuaa

SEQ ID NO: 1885981 - RNA, 19 nt, Homo sapiens
  misc_RNA (1)...(19): siRNA sense strand
gggcacaaaugauccaaau

SEQ ID NO: 1885982 - RNA, 19 nt, Homo sapiens
  misc_RNA (1)...(19): siRNA sense strand
gcuaugcuaucacagugua

SEQ ID NO: 1885983 - RNA, 19 nt, Homo sapiens
  misc_RNA (1)...(19): siRNA sense strand
gaaauuuggaggaaaguau

SEQ ID NO: 1885984 - RNA, 19 nt, Homo sapiens
  misc_RNA (1)...(19): siRNA sense strand
caacagcuugaauuucuua

SEQ ID NO: 1885985 - RNA, 19 nt, Homo sapiens
  misc_RNA (1)...(19): siRNA sense strand
gaaugucuguaagaaauug

SEQ ID NO: 1885986 - RNA, 19 nt, Homo sapiens
  misc_RNA (1)...(19): siRNA sense strand
acacagaccuggccaacau

SEQ ID NO: 1885987 - RNA, 19 nt, Homo sapiens
  misc_RNA (1)...(19): siRNA sense strand
gcaagcugcugaguacuau

SEQ ID NO: 1885988 - RNA, 19 nt, Homo sapiens
  misc_RNA (1)...(19): siRNA sense strand
ucagauccauuaccacuau

SEQ ID NO: 1885989 - RNA, 19 nt, Homo sapiens
  misc_RNA (1)...(19): siRNA sense strand
gaagaagcucagaaguaua

SEQ ID NO: 1885990 - RNA, 19 nt, Homo sapiens
  misc_RNA (1)...(19): siRNA sense strand
gaggcaagcugcugaguac

SEQ ID NO: 1885991 - RNA, 19 nt, Homo sapiens
  misc_RNA (1)...(19): siRNA sense strand
gagacucuauguuugcauu

SEQ ID NO: 1885992 - RNA, 19 nt, Homo sapiens
  misc_RNA (1)...(19): siRNA sense strand
gagaaaggcugggcacucu

SEQ ID NO: 1885993 - RNA, 19 nt, Homo sapiens
  misc_RNA (1)...(19): siRNA sense strand
caagaacacucagacaaag

SEQ ID NO: 1885994 - RNA, 19 nt, Homo sapiens
  misc_RNA (1)...(19): siRNA sense strand
gagcuccgacuuuccauuu

SEQ ID NO: 1885995 - RNA, 19 nt, Homo sapiens
  misc_RNA (1)...(19): siRNA sense strand
gcagccaaguucuauagga

SEQ ID NO: 1885996 - RNA, 19 nt, Homo sapiens
  misc_RNA (1)...(19): siRNA sense strand
gaaaggcugggcacucuug

SEQ ID NO: 1885997 - RNA, 19 nt, Homo sapiens
  misc_RNA (1)...(19): siRNA sense strand
ugaagaaauugucuaccaa

SEQ ID NO: 1885998 - RNA, 19 nt, Homo sapiens
  misc_RNA (1)...(19): siRNA sense strand
ugagaaggcucuggaagug

SEQ ID NO: 1885999 - RNA, 19 nt, Homo sapiens
  misc_RNA (1)...(19): siRNA sense strand
gauagagaagggucuguaa

SEQ ID NO: 1886000 - RNA, 19 nt, Homo sapiens
  misc_RNA (1)...(19): siRNA sense strand
gaaggaggccaguauagca

SEQ ID NO: 1886001 - RNA, 19 nt, Homo sapiens
  misc_RNA (1)...(19): siRNA sense strand
gaaacuaugccugggugua

SEQ ID NO: 1886002 - RNA, 19 nt, Homo sapiens
  misc_RNA (1)...(19): siRNA sense strand
gaaaggauaaacuaaaggu

SEQ ID NO: 1886003 - RNA, 19 nt, Homo sapiens
  misc_RNA (1)...(19): siRNA sense strand
gcaacagcuugaauuucuu

SEQ ID NO: 1886004 - RNA, 19 nt, Homo sapiens
  misc_RNA (1)...(19): siRNA sense strand
ccuauuggccuaugugaaa

SEQ ID NO: 1886005 - RNA, 19 nt, Homo sapiens
  misc_RNA (1)...(19): siRNA sense strand
agagaagggucuguaaaga

SEQ ID NO: 1886006 - RNA, 19 nt, Homo sapiens
  misc_RNA (1)...(19): siRNA sense strand
ugacaagugcucugaagaa

SEQ ID NO: 1886007 - RNA, 19 nt, Homo sapiens
  misc_RNA (1)...(19): siRNA sense strand
ucaggaauuucaccguaaa

SEQ ID NO: 1886008 - RNA, 19 nt, Homo sapiens
  misc_RNA (1)...(19): siRNA sense strand
gacaccaacuucuucuuuc

SEQ ID NO: 1886009 - RNA, 19 nt, Homo sapiens
  misc_RNA (1)...(19): siRNA sense strand
guacgaagccuggucacuu

SEQ ID NO: 1886010 - RNA, 19 nt, Homo sapiens
  misc_RNA (1)...(19): siRNA sense strand
ugagguagaagauacaauu

SEQ ID NO: 1886011 - RNA, 19 nt, Homo sapiens
  misc_RNA (1)...(19): siRNA sense strand
ugacaccaacuucuucuuu

SEQ ID NO: 1886012 - RNA, 19 nt, Homo sapiens
  misc_RNA (1)...(19): siRNA sense strand
gaaauccuggaccaaauau

SEQ ID NO: 1886013 - RNA, 19 nt, Homo sapiens
  misc_RNA (1)...(19): siRNA sense strand
gccugacaauccagaauuu

SEQ ID NO: 1886014 - RNA, 19 nt, Homo sapiens
  misc_RNA (1)...(19): siRNA sense strand
gauagggaaugucuguaag

SEQ ID NO: 1886015 - RNA, 19 nt, Homo sapiens
  misc_RNA (1)...(19): siRNA sense strand
ggaaguggagccugacaau

SEQ ID NO: 1886016 - RNA, 19 nt, Homo sapiens
  misc_RNA (1)...(19): siRNA sense strand
cuuuagaugugcagaguuu

SEQ ID NO: 1886017 - RNA, 19 nt, Homo sapiens
  misc_RNA (1)...(19): siRNA sense strand
aggauaaacuaaagguuga

SEQ ID NO: 1886018 - RNA, 19 nt, Homo sapiens
  misc_RNA (1)...(19): siRNA sense strand
gaaauuguccaguccuucu

SEQ ID NO: 1886019 - RNA, 19 nt, Homo sapiens
  misc_RNA (1)...(19): siRNA sense strand
gcuggaugauucugauaga

SEQ ID NO: 1886020 - RNA, 19 nt, Homo sapiens
  misc_RNA (1)...(19): siRNA sense strand
uacgaagccuggucacuug

SEQ ID NO: 1886021 - RNA, 19 nt, Homo sapiens
  misc_RNA (1)...(19): siRNA sense strand
gaccuaaaggaaaggauaa

SEQ ID NO: 1886022 - RNA, 19 nt, Homo sapiens
  misc_RNA (1)...(19): siRNA sense strand
agaaauccuggaccaaaua

SEQ ID NO: 1886023 - RNA, 19 nt, Homo sapiens
  misc_RNA (1)...(19): siRNA sense strand
uaacaucggcuaugcuauc

SEQ ID NO: 1886024 - RNA, 19 nt, Homo sapiens
  misc_RNA (1)...(19): siRNA sense strand
ggaaugucuguaagaaauu

SEQ ID NO: 1886025 - RNA, 19 nt, Homo sapiens
  misc_RNA (1)...(19): siRNA sense strand
agccuuacguccuucguua

SEQ ID NO: 1886026 - RNA, 19 nt, Homo sapiens
  misc_RNA (1)...(19): siRNA sense strand
ugaaggccauucuguugga

SEQ ID NO: 1886027 - RNA, 19 nt, Homo sapiens
  misc_RNA (1)...(19): siRNA sense strand
ucaagaaggccacacacaa

SEQ ID NO: 1886028 - RNA, 19 nt, Homo sapiens
  misc_RNA (1)...(19): siRNA sense strand
agacaaagaagaaguacga

SEQ ID NO: 1886029 - RNA, 19 nt, Homo sapiens
  misc_RNA (1)...(19): siRNA sense strand
ucacaaacaucagauccau

SEQ ID NO: 1886030 - RNA, 19 nt, Homo sapiens
  misc_RNA (1)...(19): siRNA sense strand
uggagaacauaaccgauga

SEQ ID NO: 1886031 - RNA, 19 nt, Homo sapiens
  misc_RNA (1)...(19): siRNA sense strand
gcugaaggaggccaguaua

SEQ ID NO: 1886032 - RNA, 19 nt, Homo sapiens
  misc_RNA (1)...(19): siRNA sense strand
gaaggccacacacaacaga

SEQ ID NO: 1886033 - RNA, 19 nt, Homo sapiens
  misc_RNA (1)...(19): siRNA sense strand
aagaaauccuggaccaaau

SEQ ID NO: 1886034 - RNA, 19 nt, Homo sapiens
  misc_RNA (1)...(19): siRNA sense strand
aggaagacauugaucuguu

SEQ ID NO: 1886035 - RNA, 19 nt, Homo sapiens
  misc_RNA (1)...(19): siRNA sense strand
uaagauagggaaugucugu

SEQ ID NO: 1886036 - RNA, 19 nt, Homo sapiens
  misc_RNA (1)...(19): siRNA sense strand
uugaagaagcucagaagua

SEQ ID NO: 1886037 - RNA, 19 nt, Homo sapiens
  misc_RNA (1)...(19): siRNA sense strand
uguaucggcuggaugauuc

SEQ ID NO: 1886038 - RNA, 19 nt, Homo sapiens
  misc_RNA (1)...(19): siRNA sense strand
uagggaaugucuguaagaa

SEQ ID NO: 1886039 - RNA, 19 nt, Homo sapiens
  misc_RNA (1)...(19): siRNA sense strand
ggaggccaguauagcaaug

SEQ ID NO: 1886040 - RNA, 19 nt, Homo sapiens
  misc_RNA (1)...(19): siRNA sense strand
gcugauuucaucugcuaua

SEQ ID NO: 1886041 - RNA, 19 nt, Homo sapiens
  misc_RNA (1)...(19): siRNA sense strand
gagaagggucuguaaagag

SEQ ID NO: 1886042 - RNA, 19 nt, Homo sapiens
  misc_RNA (1)...(19): siRNA sense strand
cagguaagauagggaaugu

SEQ ID NO: 1886043 - RNA, 19 nt, Homo sapiens
  misc_RNA (1)...(19): siRNA sense strand
ggcaagcugcugaguacua

SEQ ID NO: 1886044 - RNA, 19 nt, Homo sapiens
  misc_RNA (1)...(19): siRNA sense strand
aagaaauugucuaccaaga

SEQ ID NO: 1886045 - RNA, 19 nt, Homo sapiens
  misc_RNA (1)...(19): siRNA sense strand
gaagacauugaucuguuug

SEQ ID NO: 1886046 - RNA, 19 nt, Homo sapiens
  misc_RNA (1)...(19): siRNA sense strand
cauggaauuuacuuaagga

SEQ ID NO: 1886047 - RNA, 19 nt, Homo sapiens
  misc_RNA (1)...(19): siRNA sense strand
gaauuuaacaucggcuaug

SEQ ID NO: 1886048 - RNA, 19 nt, Homo sapiens
  misc_RNA (1)...(19): siRNA sense strand
caaaccuucucuccuguca

SEQ ID NO: 1886049 - RNA, 19 nt, Homo sapiens
  misc_RNA (1)...(19): siRNA sense strand
guucaacacccucuucaug

SEQ ID NO: 1886050 - RNA, 19 nt, Homo sapiens
  misc_RNA (1)...(19): siRNA sense strand
acuacgagaugcucaagga

SEQ ID NO: 1886051 - RNA, 19 nt, Homo sapiens
  misc_RNA (1)...(19): siRNA sense strand
ucaaggaggagcaggaagu

SEQ ID NO: 1886052 - RNA, 19 nt, Homo sapiens
  misc_RNA (1)...(19): siRNA sense strand
ugaagucuagggacaggaa

SEQ ID NO: 1886053 - RNA, 19 nt, Homo sapiens
  misc_RNA (1)...(19): siRNA sense strand
cgucaucaucccaguguug

SEQ ID NO: 1886054 - RNA, 19 nt, Homo sapiens
  misc_RNA (1)...(19): siRNA sense strand
ugccugggcuucauagcau

SEQ ID NO: 1886055 - RNA, 19 nt, Homo sapiens
  misc_RNA (1)...(19): siRNA sense strand
gcaucuucaugaccauucu

SEQ ID NO: 1886056 - RNA, 19 nt, Homo sapiens
  misc_RNA (1)...(19): siRNA sense strand
ggaagaagcuguuugaaua

SEQ ID NO: 1886057 - RNA, 19 nt, Homo sapiens
  misc_RNA (1)...(19): siRNA sense strand
ggaaauggcucacgaagug

SEQ ID NO: 1886058 - RNA, 19 nt, Homo sapiens
  misc_RNA (1)...(19): siRNA sense strand
gcaacgaggucuucuguuu

SEQ ID NO: 1886059 - RNA, 19 nt, Homo sapiens
  misc_RNA (1)...(19): siRNA sense strand
gggaagcccucaagaagua

SEQ ID NO: 1886060 - RNA, 19 nt, Homo sapiens
  misc_RNA (1)...(19): siRNA sense strand
ggagaacccugcugaaaga

SEQ ID NO: 1886061 - RNA, 19 nt, Homo sapiens
  misc_RNA (1)...(19): siRNA sense strand
gaacccugcugaaagauuu

SEQ ID NO: 1886062 - RNA, 19 nt, Homo sapiens
  misc_RNA (1)...(19): siRNA sense strand
aaagguaucucauucaguu

SEQ ID NO: 1886063 - RNA, 19 nt, Homo sapiens
  misc_RNA (1)...(19): siRNA sense strand
gaaacagccaacuacauua

SEQ ID NO: 1886064 - RNA, 19 nt, Homo sapiens
  misc_RNA (1)...(19): siRNA sense strand
gcaaugaagaggacuauga

SEQ ID NO: 1886065 - RNA, 19 nt, Homo sapiens
  misc_RNA (1)...(19): siRNA sense strand
gcaauacaccuacccauau

SEQ ID NO: 1886066 - RNA, 19 nt, Homo sapiens
  misc_RNA (1)...(19): siRNA sense strand
ugaaacagccaacuacauu

SEQ ID NO: 1886067 - RNA, 19 nt, Homo sapiens
  misc_RNA (1)...(19): siRNA sense strand
gcaaugcuccaaauguaaa

SEQ ID NO: 1886068 - RNA, 19 nt, Homo sapiens
  misc_RNA (1)...(19): siRNA sense strand
gcucaguucucgucaagga

SEQ ID NO: 1886069 - RNA, 19 nt, Homo sapiens
  misc_RNA (1)...(19): siRNA sense strand
caauacaccuacccauaug

SEQ ID NO: 1886070 - RNA, 19 nt, Homo sapiens
  misc_RNA (1)...(19): siRNA sense strand
ggucuucuguuucaagugu

SEQ ID NO: 1886071 - RNA, 19 nt, Homo sapiens
  misc_RNA (1)...(19): siRNA sense strand
gaggagaacccugcugaaa

SEQ ID NO: 1886072 - RNA, 19 nt, Homo sapiens
  misc_RNA (1)...(19): siRNA sense strand
gaagacucauggcagugaa

SEQ ID NO: 1886073 - RNA, 19 nt, Homo sapiens
  misc_RNA (1)...(19): siRNA sense strand
gaaaaccucucauggaaag

SEQ ID NO: 1886074 - RNA, 19 nt, Homo sapiens
  misc_RNA (1)...(19): siRNA sense strand
ggacuaugacccaaauugu

SEQ ID NO: 1886075 - RNA, 19 nt, Homo sapiens
  misc_RNA (1)...(19): siRNA sense strand
cagagauauuggacagaua

SEQ ID NO: 1886076 - RNA, 19 nt, Homo sapiens
  misc_RNA (1)...(19): siRNA sense strand
ggaagaagaagaagaagac

SEQ ID NO: 1886077 - RNA, 19 nt, Homo sapiens
  misc_RNA (1)...(19): siRNA sense strand
gcaaguuucagagauauug

SEQ ID NO: 1886078 - RNA, 19 nt, Homo sapiens
  misc_RNA (1)...(19): siRNA sense strand
ggaugugucuaggagauug

SEQ ID NO: 1886079 - RNA, 19 nt, Homo sapiens
  misc_RNA (1)...(19): siRNA sense strand
guaugcaguuugugcgaaa

SEQ ID NO: 1886080 - RNA, 19 nt, Homo sapiens
  misc_RNA (1)...(19): siRNA sense strand
gcuggaggcugagaucgaa

SEQ ID NO: 1886081 - RNA, 19 nt, Homo sapiens
  misc_RNA (1)...(19): siRNA sense strand
ccaggaagaagcuguuuga

SEQ ID NO: 1886082 - RNA, 19 nt, Homo sapiens
  misc_RNA (1)...(19): siRNA sense strand
augcaaugcuccaaaugua

SEQ ID NO: 1886083 - RNA, 19 nt, Homo sapiens
  misc_RNA (1)...(19): siRNA sense strand
ucaagugucgucagaugua

SEQ ID NO: 1886084 - RNA, 19 nt, Homo sapiens
  misc_RNA (1)...(19): siRNA sense strand
ccagaggacuuuguguuuc

SEQ ID NO: 1886085 - RNA, 19 nt, Homo sapiens
  misc_RNA (1)...(19): siRNA sense strand
ggaagacucauggcaguga

SEQ ID NO: 1886086 - RNA, 19 nt, Homo sapiens
  misc_RNA (1)...(19): siRNA sense strand
gaagaagcuguuugaauac

SEQ ID NO: 1886087 - RNA, 19 nt, Homo sapiens
  misc_RNA (1)...(19): siRNA sense strand
ucacuugcuugaccuacaa

SEQ ID NO: 1886088 - RNA, 19 nt, Homo sapiens
  misc_RNA (1)...(19): siRNA sense strand
ugacccaaauugugaggaa

SEQ ID NO: 1886089 - RNA, 19 nt, Homo sapiens
  misc_RNA (1)...(19): siRNA sense strand
gaauugagagagaaauaca

SEQ ID NO: 1886090 - RNA, 19 nt, Homo sapiens
  misc_RNA (1)...(19): siRNA sense strand
aaugaagaauugagagaga

SEQ ID NO: 1886091 - RNA, 19 nt, Homo sapiens
  misc_RNA (1)...(19): siRNA sense strand
ggacuuuguguuuccauug

SEQ ID NO: 1886092 - RNA, 19 nt, Homo sapiens
  misc_RNA (1)...(19): siRNA sense strand
ucagagauauuggacagau

SEQ ID NO: 1886093 - RNA, 19 nt, Homo sapiens
  misc_RNA (1)...(19): siRNA sense strand
ggcaguaccuacagaaugc

SEQ ID NO: 1886094 - RNA, 19 nt, Homo sapiens
  misc_RNA (1)...(19): siRNA sense strand
caauucugcucaacugcuu

SEQ ID NO: 1886095 - RNA, 19 nt, Homo sapiens
  misc_RNA (1)...(19): siRNA sense strand
ggacuuggagaaccagaug

SEQ ID NO: 1886096 - RNA, 19 nt, Homo sapiens
  misc_RNA (1)...(19): siRNA sense strand
gucgauacacccugcaaua

SEQ ID NO: 1886097 - RNA, 19 nt, Homo sapiens
  misc_RNA (1)...(19): siRNA sense strand
ucauggcagugaauacuau

SEQ ID NO: 1886098 - RNA, 19 nt, Homo sapiens
  misc_RNA (1)...(19): siRNA sense strand
cuggcaaguuucagagaua

SEQ ID NO: 1886099 - RNA, 19 nt, Homo sapiens
  misc_RNA (1)...(19): siRNA sense strand
agauuuccaugacaccuaa

SEQ ID NO: 1886100 - RNA, 19 nt, Homo sapiens
  misc_RNA (1)...(19): siRNA sense strand
ggagaaccagaugcauaua

SEQ ID NO: 1886101 - RNA, 19 nt, Homo sapiens
  misc_RNA (1)...(19): siRNA sense strand
acaccuacccauaugcaua

SEQ ID NO: 1886102 - RNA, 19 nt, Homo sapiens
  misc_RNA (1)...(19): siRNA sense strand
gggaguagccagcgaugug

SEQ ID NO: 1886103 - RNA, 19 nt, Homo sapiens
  misc_RNA (1)...(19): siRNA sense strand
gauacacccugcaauacac

SEQ ID NO: 1886104 - RNA, 19 nt, Homo sapiens
  misc_RNA (1)...(19): siRNA sense strand
gaagaauggaggcugcaau

SEQ ID NO: 1886105 - RNA, 19 nt, Homo sapiens
  misc_RNA (1)...(19): siRNA sense strand
caacgaggucuucuguuuc

SEQ ID NO: 1886106 - RNA, 19 nt, Homo sapiens
  misc_RNA (1)...(19): siRNA sense strand
gauauuggacagauacaag

SEQ ID NO: 1886107 - RNA, 19 nt, Homo sapiens
  misc_RNA (1)...(19): siRNA sense strand
gagaaccagaugcauauag

SEQ ID NO: 1886108 - RNA, 19 nt, Homo sapiens
  misc_RNA (1)...(19): siRNA sense strand
ggucugacagcaaugaaga

SEQ ID NO: 1886109 - RNA, 19 nt, Homo sapiens
  misc_RNA (1)...(19): siRNA sense strand
gagagggucaugaacaauc

SEQ ID NO: 1886110 - RNA, 19 nt, Homo sapiens
  misc_RNA (1)...(19): siRNA sense strand
aauggaggcugcaaucaca

SEQ ID NO: 1886111 - RNA, 19 nt, Homo sapiens
  misc_RNA (1)...(19): siRNA sense strand
acuaaagacugucccaagu

SEQ ID NO: 1886112 - RNA, 19 nt, Homo sapiens
  misc_RNA (1)...(19): siRNA sense strand
ggacuauuacgugggagua

SEQ ID NO: 1886113 - RNA, 19 nt, Homo sapiens
  misc_RNA (1)...(19): siRNA sense strand
acagauacaaguccaauuc

SEQ ID NO: 1886114 - RNA, 19 nt, Homo sapiens
  misc_RNA (1)...(19): siRNA sense strand
caaguccaauucugcucaa

SEQ ID NO: 1886115 - RNA, 19 nt, Homo sapiens
  misc_RNA (1)...(19): siRNA sense strand
caacaucugcauugagaag

SEQ ID NO: 1886116 - RNA, 19 nt, Homo sapiens
  misc_RNA (1)...(19): siRNA sense strand
gaagugugcagacgacucu

SEQ ID NO: 1886117 - RNA, 19 nt, Homo sapiens
  misc_RNA (1)...(19): siRNA sense strand
caagugucgucagauguau

SEQ ID NO: 1886118 - RNA, 19 nt, Homo sapiens
  misc_RNA (1)...(19): siRNA sense strand
cuaaagguaucucauucag

SEQ ID NO: 1886119 - RNA, 19 nt, Homo sapiens
  misc_RNA (1)...(19): siRNA sense strand
cacaugcaaugcuccaaau

SEQ ID NO: 1886120 - RNA, 19 nt, Homo sapiens
  misc_RNA (1)...(19): siRNA sense strand
gaggucuucuguuucaagu

SEQ ID NO: 1886121 - RNA, 19 nt, Homo sapiens
  misc_RNA (1)...(19): siRNA sense strand
aacgaggucuucuguuuca

SEQ ID NO: 1886122 - RNA, 19 nt, Homo sapiens
  misc_RNA (1)...(19): siRNA sense strand
aauuuccacuggcaaguuu

SEQ ID NO: 1886123 - RNA, 19 nt, Homo sapiens
  misc_RNA (1)...(19): siRNA sense strand
agaggacuaugacccaaau

SEQ ID NO: 1886124 - RNA, 19 nt, Homo sapiens
  misc_RNA (1)...(19): siRNA sense strand
ucgaaaaccucucauggaa

SEQ ID NO: 1886125 - RNA, 19 nt, Homo sapiens
  misc_RNA (1)...(19): siRNA sense strand
ugcaauacaccuacccaua

SEQ ID NO: 1886126 - RNA, 19 nt, Homo sapiens
  misc_RNA (1)...(19): siRNA sense strand
aggagagggucaugaacaa

SEQ ID NO: 1886127 - RNA, 19 nt, Homo sapiens
  misc_RNA (1)...(19): siRNA sense strand
guacuuauucuacuuugag

SEQ ID NO: 1886128 - RNA, 19 nt, Homo sapiens
  misc_RNA (1)...(19): siRNA sense strand
aaacagccaacuacauuag

SEQ ID NO: 1886129 - RNA, 19 nt, Homo sapiens
  misc_RNA (1)...(19): siRNA sense strand
ucacaugcaaugcuccaaa

SEQ ID NO: 1886130 - RNA, 19 nt, Homo sapiens
  misc_RNA (1)...(19): siRNA sense strand
guccaauucugcucaacug

SEQ ID NO: 1886131 - RNA, 19 nt, Homo sapiens
  misc_RNA (1)...(19): siRNA sense strand
ggaggagaacccugcugaa

SEQ ID NO: 1886132 - RNA, 19 nt, Homo sapiens
  misc_RNA (1)...(19): siRNA sense strand
uagcuucuguccuaaaggu

SEQ ID NO: 1886133 - RNA, 19 nt, Homo sapiens
  misc_RNA (1)...(19): siRNA sense strand
ugaccuacaaggaaucuga

SEQ ID NO: 1886134 - RNA, 19 nt, Homo sapiens
  misc_RNA (1)...(19): siRNA sense strand
acuaugacccaaauuguga

SEQ ID NO: 1886135 - RNA, 19 nt, Homo sapiens
  misc_RNA (1)...(19): siRNA sense strand
gcagcuagaggcacagaca

SEQ ID NO: 1886136 - RNA, 19 nt, Homo sapiens
  misc_RNA (1)...(19): siRNA sense strand
ccucaagaaguacuuauuc

SEQ ID NO: 1886137 - RNA, 19 nt, Homo sapiens
  misc_RNA (1)...(19): siRNA sense strand
ugagugcagucguuacaag

SEQ ID NO: 1886138 - RNA, 19 nt, Homo sapiens
  misc_RNA (1)...(19): siRNA sense strand
uuucaagugucgucagaug

SEQ ID NO: 1886139 - RNA, 19 nt, Homo sapiens
  misc_RNA (1)...(19): siRNA sense strand
ccuuugaucccgaggagua

SEQ ID NO: 1886140 - RNA, 19 nt, Homo sapiens
  misc_RNA (1)...(19): siRNA sense strand
uggagaaccagaugcauau

SEQ ID NO: 1886141 - RNA, 19 nt, Homo sapiens
  misc_RNA (1)...(19): siRNA sense strand
ggagauuggaagacucaug

SEQ ID NO: 1886142 - RNA, 19 nt, Homo sapiens
  misc_RNA (1)...(19): siRNA sense strand
caaauguaaacacgacuuc

SEQ ID NO: 1886143 - RNA, 19 nt, Homo sapiens
  misc_RNA (1)...(19): siRNA sense strand
gaagaauugagagagaaau

SEQ ID NO: 1886144 - RNA, 19 nt, Homo sapiens
  misc_RNA (1)...(19): siRNA sense strand
ugaagaauugagagagaaa

SEQ ID NO: 1886145 - RNA, 19 nt, Homo sapiens
  misc_RNA (1)...(19): siRNA sense strand
cgauacacccugcaauaca

SEQ ID NO: 1886146 - RNA, 19 nt, Homo sapiens
  misc_RNA (1)...(19): siRNA sense strand
gacuaugacccaaauugug

SEQ ID NO: 1886147 - RNA, 19 nt, Homo sapiens
  misc_RNA (1)...(19): siRNA sense strand
uugcauggcucaggacugu

SEQ ID NO: 1886148 - RNA, 19 nt, Homo sapiens
  misc_RNA (1)...(19): siRNA sense strand
agacauaccagcggauuca

SEQ ID NO: 1886149 - RNA, 19 nt, Homo sapiens
  misc_RNA (1)...(19): siRNA sense strand
acaucugcauugagaagaa

SEQ ID NO: 1886150 - RNA, 19 nt, Homo sapiens
  misc_RNA (1)...(19): siRNA sense strand
gagcacaugaccagcuuag

SEQ ID NO: 1886151 - RNA, 19 nt, Homo sapiens
  misc_RNA (1)...(19): siRNA sense strand
uacaggcgcuaccucuuca

SEQ ID NO: 1886152 - RNA, 19 nt, Homo sapiens
  misc_RNA (1)...(19): siRNA sense strand
caccagaggacuuuguguu

SEQ ID NO: 1886153 - RNA, 19 nt, Homo sapiens
  misc_RNA (1)...(19): siRNA sense strand
gaauggaggcugcaaucac

SEQ ID NO: 1886154 - RNA, 19 nt, Homo sapiens
  misc_RNA (1)...(19): siRNA sense strand
guccuaaagguaucucauu

SEQ ID NO: 1886155 - RNA, 19 nt, Homo sapiens
  misc_RNA (1)...(19): siRNA sense strand
caggagagggucaugaaca

SEQ ID NO: 1886156 - RNA, 19 nt, Homo sapiens
  misc_RNA (1)...(19): siRNA sense strand
gaagagacaaguucaagua

SEQ ID NO: 1886157 - RNA, 19 nt, Homo sapiens
  misc_RNA (1)...(19): siRNA sense strand
gaaggaagaugaaguggau

SEQ ID NO: 1886158 - RNA, 19 nt, Homo sapiens
  misc_RNA (1)...(19): siRNA sense strand
gagacaaguucaaguaaau

SEQ ID NO: 1886159 - RNA, 19 nt, Homo sapiens
  misc_RNA (1)...(19): siRNA sense strand
guacacaaguuaagaaagg

SEQ ID NO: 1886160 - RNA, 19 nt, Homo sapiens
  misc_RNA (1)...(19): siRNA sense strand
gaagaacuggccauccaua

SEQ ID NO: 1886161 - RNA, 19 nt, Homo sapiens
  misc_RNA (1)...(19): siRNA sense strand
agagaaaccuaaagaaaca

SEQ ID NO: 1886162 - RNA, 19 nt, Homo sapiens
  misc_RNA (1)...(19): siRNA sense strand
gaacuggccauccauaauc

SEQ ID NO: 1886163 - RNA, 19 nt, Homo sapiens
  misc_RNA (1)...(19): siRNA sense strand
gaucacaggcaguuugaaa

SEQ ID NO: 1886164 - RNA, 19 nt, Homo sapiens
  misc_RNA (1)...(19): siRNA sense strand
gagaguauagugaagauga

SEQ ID NO: 1886165 - RNA, 19 nt, Homo sapiens
  misc_RNA (1)...(19): siRNA sense strand
gaucagaggaugccaggaa

SEQ ID NO: 1886166 - RNA, 19 nt, Homo sapiens
  misc_RNA (1)...(19): siRNA sense strand
gaaguaaggguaacuaagg

SEQ ID NO: 1886167 - RNA, 19 nt, Homo sapiens
  misc_RNA (1)...(19): siRNA sense strand
gugaagaugauguaaauga

SEQ ID NO: 1886168 - RNA, 19 nt, Homo sapiens
  misc_RNA (1)...(19): siRNA sense strand
gugaagagcagacacagaa

SEQ ID NO: 1886169 - RNA, 19 nt, Homo sapiens
  misc_RNA (1)...(19): siRNA sense strand
gaagaaguaaggguaacua

SEQ ID NO: 1886170 - RNA, 19 nt, Homo sapiens
  misc_RNA (1)...(19): siRNA sense strand
agagacaaguucaaguaaa

SEQ ID NO: 1886171 - RNA, 19 nt, Homo sapiens
  misc_RNA (1)...(19): siRNA sense strand
cuagagaaaccuaaagaaa

SEQ ID NO: 1886172 - RNA, 19 nt, Homo sapiens
  misc_RNA (1)...(19): siRNA sense strand
guagugaggaggaagauga

SEQ ID NO: 1886173 - RNA, 19 nt, Homo sapiens
  misc_RNA (1)...(19): siRNA sense strand
gaaaggagaggagacugaa

SEQ ID NO: 1886174 - RNA, 19 nt, Homo sapiens
  misc_RNA (1)...(19): siRNA sense strand
caagguggccucucauuag

SEQ ID NO: 1886175 - RNA, 19 nt, Homo sapiens
  misc_RNA (1)...(19): siRNA sense strand
ccaaauccuucuucaagca

SEQ ID NO: 1886176 - RNA, 19 nt, Homo sapiens
  misc_RNA (1)...(19): siRNA sense strand
ucaaugaugugggaccaaa

SEQ ID NO: 1886177 - RNA, 19 nt, Homo sapiens
  misc_RNA (1)...(19): siRNA sense strand
cuaaagaggccaaauccuu

SEQ ID NO: 1886178 - RNA, 19 nt, Homo sapiens
  misc_RNA (1)...(19): siRNA sense strand
gaagagcuagagaaaccua

SEQ ID NO: 1886179 - RNA, 19 nt, Homo sapiens
  misc_RNA (1)...(19): siRNA sense strand
ugaaguggauggugaagag

SEQ ID NO: 1886180 - RNA, 19 nt, Homo sapiens
  misc_RNA (1)...(19): siRNA sense strand
acaggcaguuugaaauuga

SEQ ID NO: 1886181 - RNA, 19 nt, Homo sapiens
  misc_RNA (1)...(19): siRNA sense strand
ucacaggcaguuugaaauu

SEQ ID NO: 1886182 - RNA, 19 nt, Homo sapiens
  misc_RNA (1)...(19): siRNA sense strand
ggaaagagggguacauuga

SEQ ID NO: 1886183 - RNA, 19 nt, Homo sapiens
  misc_RNA (1)...(19): siRNA sense strand
cagaagagcuagagaaacc

SEQ ID NO: 1886184 - RNA, 19 nt, Homo sapiens
  misc_RNA (1)...(19): siRNA sense strand
gugaagaacuggccaucca

SEQ ID NO: 1886185 - RNA, 19 nt, Homo sapiens
  misc_RNA (1)...(19): siRNA sense strand
acaagguggccucucauua

SEQ ID NO: 1886186 - RNA, 19 nt, Homo sapiens
  misc_RNA (1)...(19): siRNA sense strand
caagcagaaugagaaagaa

SEQ ID NO: 1886187 - RNA, 19 nt, Homo sapiens
  misc_RNA (1)...(19): siRNA sense strand
caaguacacaaguuaagaa

SEQ ID NO: 1886188 - RNA, 19 nt, Homo sapiens
  misc_RNA (1)...(19): siRNA sense strand
ggaggaugccaauucagaa

SEQ ID NO: 1886189 - RNA, 19 nt, Homo sapiens
  misc_RNA (1)...(19): siRNA sense strand
ucaagcagaaugagaaaga

SEQ ID NO: 1886190 - RNA, 19 nt, Homo sapiens
  misc_RNA (1)...(19): siRNA sense strand
ggccaaauccuucuucaag

SEQ ID NO: 1886191 - RNA, 19 nt, Homo sapiens
  misc_RNA (1)...(19): siRNA sense strand
agaggaggaugccaauuca

SEQ ID NO: 1886192 - RNA, 19 nt, Homo sapiens
  misc_RNA (1)...(19): siRNA sense strand
gacaaguucaaguaaauug

SEQ ID NO: 1886193 - RNA, 19 nt, Homo sapiens
  misc_RNA (1)...(19): siRNA sense strand
gggccagcuuccucaauga

SEQ ID NO: 1886194 - RNA, 19 nt, Homo sapiens
  misc_RNA (1)...(19): siRNA sense strand
ggaagaggaggaugccaau

SEQ ID NO: 1886195 - RNA, 19 nt, Homo sapiens
  misc_RNA (1)...(19): siRNA sense strand
gguaaaagcagaagagcua

SEQ ID NO: 1886196 - RNA, 19 nt, Homo sapiens
  misc_RNA (1)...(19): siRNA sense strand
aagacaagguggccucuca

SEQ ID NO: 1886197 - RNA, 19 nt, Homo sapiens
  misc_RNA (1)...(19): siRNA sense strand
cacaggcaguuugaaauug

SEQ ID NO: 1886198 - RNA, 19 nt, Homo sapiens
  misc_RNA (1)...(19): siRNA sense strand
gcuagagaaaccuaaagaa

SEQ ID NO: 1886199 - RNA, 19 nt, Homo sapiens
  misc_RNA (1)...(19): siRNA sense strand
agaggagacugaagagaca

SEQ ID NO: 1886200 - RNA, 19 nt, Homo sapiens
  misc_RNA (1)...(19): siRNA sense strand
guauagugaagaugaugua

SEQ ID NO: 1886201 - RNA, 19 nt, Homo sapiens
  misc_RNA (1)...(19): siRNA sense strand
ggugaagaaguaaggguaa

SEQ ID NO: 1886202 - RNA, 19 nt, Homo sapiens
  misc_RNA (1)...(19): siRNA sense strand
aagguggccucucauuaga

SEQ ID NO: 1886203 - RNA, 19 nt, Homo sapiens
  misc_RNA (1)...(19): siRNA sense strand
ccaaguacacaaguuaaga

SEQ ID NO: 1886204 - RNA, 19 nt, Homo sapiens
  misc_RNA (1)...(19): siRNA sense strand
gacaagguggccucucauu

SEQ ID NO: 1886205 - RNA, 19 nt, Homo sapiens
  misc_RNA (1)...(19): siRNA sense strand
gaggccaaauccuucuuca

SEQ ID NO: 1886206 - RNA, 19 nt, Homo sapiens
  misc_RNA (1)...(19): siRNA sense strand
gaaucugagggaagcagua

SEQ ID NO: 1886207 - RNA, 19 nt, Homo sapiens
  misc_RNA (1)...(19): siRNA sense strand
gaagaggaggaugccaauu

SEQ ID NO: 1886208 - RNA, 19 nt, Homo sapiens
  misc_RNA (1)...(19): siRNA sense strand
gaaagagggguacauugaa

SEQ ID NO: 1886209 - RNA, 19 nt, Homo sapiens
  misc_RNA (1)...(19): siRNA sense strand
aaagaaaggcccagagcau

SEQ ID NO: 1886210 - RNA, 19 nt, Homo sapiens
  misc_RNA (1)...(19): siRNA sense strand
ccagcuuccucaaugaugu

SEQ ID NO: 1886211 - RNA, 19 nt, Homo sapiens
  misc_RNA (1)...(19): siRNA sense strand
gguggccucucauuagaag

SEQ ID NO: 1886212 - RNA, 19 nt, Homo sapiens
  misc_RNA (1)...(19): siRNA sense strand
uagagaaaccuaaagaaac

SEQ ID NO: 1886213 - RNA, 19 nt, Homo sapiens
  misc_RNA (1)...(19): siRNA sense strand
gcaguagugaggaggaaga

SEQ ID NO: 1886214 - RNA, 19 nt, Homo sapiens
  misc_RNA (1)...(19): siRNA sense strand
ugagcacccuugagaaguc

SEQ ID NO: 1886215 - RNA, 19 nt, Homo sapiens
  misc_RNA (1)...(19): siRNA sense strand
agaaaggagaggagacuga

SEQ ID NO: 1886216 - RNA, 19 nt, Homo sapiens
  misc_RNA (1)...(19): siRNA sense strand
gaagagcagacacagaaaa

SEQ ID NO: 1886217 - RNA, 19 nt, Homo sapiens
  misc_RNA (1)...(19): siRNA sense strand
aagaggaggaugccaauuc

SEQ ID NO: 1886218 - RNA, 19 nt, Homo sapiens
  misc_RNA (1)...(19): siRNA sense strand
agaaaggcccagagcauuc

SEQ ID NO: 1886219 - RNA, 19 nt, Homo sapiens
  misc_RNA (1)...(19): siRNA sense strand
caucuaaagaggccaaauc

SEQ ID NO: 1886220 - RNA, 19 nt, Homo sapiens
  misc_RNA (1)...(19): siRNA sense strand
aagagacaaguucaaguaa

SEQ ID NO: 1886221 - RNA, 19 nt, Homo sapiens
  misc_RNA (1)...(19): siRNA sense strand
aaguaaggguaacuaagga

SEQ ID NO: 1886222 - RNA, 19 nt, Homo sapiens
  misc_RNA (1)...(19): siRNA sense strand
gaaaccuaaagaaacagaa

SEQ ID NO: 1886223 - RNA, 19 nt, Homo sapiens
  misc_RNA (1)...(19): siRNA sense strand
agacugaagagacaaguuc

SEQ ID NO: 1886224 - RNA, 19 nt, Homo sapiens
  misc_RNA (1)...(19): siRNA sense strand
cauccauaaucgagggaaa

SEQ ID NO: 1886225 - RNA, 19 nt, Homo sapiens
  misc_RNA (1)...(19): siRNA sense strand
gccgucggguggagaguau

SEQ ID NO: 1886226 - RNA, 19 nt, Homo sapiens
  misc_RNA (1)...(19): siRNA sense strand
aagaaaggcccagagcauu

SEQ ID NO: 1886227 - RNA, 19 nt, Homo sapiens
  misc_RNA (1)...(19): siRNA sense strand
ugggccagcuuccucaaug

SEQ ID NO: 1886228 - RNA, 19 nt, Homo sapiens
  misc_RNA (1)...(19): siRNA sense strand
ggacugggagagcuucaag

SEQ ID NO: 1886229 - RNA, 19 nt, Homo sapiens
  misc_RNA (1)...(19): siRNA sense strand
aaaaugagcacccuugaga

SEQ ID NO: 1886230 - RNA, 19 nt, Homo sapiens
  misc_RNA (1)...(19): siRNA sense strand
aagcagaagagcuagagaa

SEQ ID NO: 1886231 - RNA, 19 nt, Homo sapiens
  misc_RNA (1)...(19): siRNA sense strand
ggagaggagacugaagaga

SEQ ID NO: 1886232 - RNA, 19 nt, Homo sapiens
  misc_RNA (1)...(19): siRNA sense strand
aagaacuggccauccauaa

SEQ ID NO: 1886233 - RNA, 19 nt, Homo sapiens
  misc_RNA (1)...(19): siRNA sense strand
aaggagaggagacugaaga

SEQ ID NO: 1886234 - RNA, 19 nt, Homo sapiens
  misc_RNA (1)...(19): siRNA sense strand
aaggguaacuaaggaagug

SEQ ID NO: 1886235 - RNA, 19 nt, Homo sapiens
  misc_RNA (1)...(19): siRNA sense strand
aagaaguaaggguaacuaa

SEQ ID NO: 1886236 - RNA, 19 nt, Homo sapiens
  misc_RNA (1)...(19): siRNA sense strand
gguggagaguauagugaag

SEQ ID NO: 1886237 - RNA, 19 nt, Homo sapiens
  misc_RNA (1)...(19): siRNA sense strand
cggaggaggacgaggacua

SEQ ID NO: 1886238 - RNA, 19 nt, Homo sapiens
  misc_RNA (1)...(19): siRNA sense strand
cuucagcucugccaucacu

SEQ ID NO: 1886239 - RNA, 19 nt, Homo sapiens
  misc_RNA (1)...(19): siRNA sense strand
gagacugaagagacaaguu

SEQ ID NO: 1886240 - RNA, 19 nt, Homo sapiens
  misc_RNA (1)...(19): siRNA sense strand
uggagaguauagugaagau

SEQ ID NO: 1886241 - RNA, 19 nt, Homo sapiens
  misc_RNA (1)...(19): siRNA sense strand
ggugaagagcagacacaga

SEQ ID NO: 1886242 - RNA, 19 nt, Homo sapiens
  misc_RNA (1)...(19): siRNA sense strand
ugaagagcagacacagaaa

SEQ ID NO: 1886243 - RNA, 19 nt, Homo sapiens
  misc_RNA (1)...(19): siRNA sense strand
guggaucacaggcaguuug

SEQ ID NO: 1886244 - RNA, 19 nt, Homo sapiens
  misc_RNA (1)...(19): siRNA sense strand
agaacuggccauccauaau

SEQ ID NO: 1886245 - RNA, 19 nt, Homo sapiens
  misc_RNA (1)...(19): siRNA sense strand
ugauuuugcuggugaagaa

SEQ ID NO: 1886246 - RNA, 19 nt, Homo sapiens
  misc_RNA (1)...(19): siRNA sense strand
gagcuagagaaaccuaaag

SEQ ID NO: 1886247 - RNA, 19 nt, Homo sapiens
  misc_RNA (1)...(19): siRNA sense strand
agaguauagugaagaugau

SEQ ID NO: 1886248 - RNA, 19 nt, Homo sapiens
  misc_RNA (1)...(19): siRNA sense strand
aagcagaaugagaaagaaa

SEQ ID NO: 1886249 - RNA, 19 nt, Homo sapiens
  misc_RNA (1)...(19): siRNA sense strand
ggguggagaguauagugaa

SEQ ID NO: 1886250 - RNA, 19 nt, Homo sapiens
  misc_RNA (1)...(19): siRNA sense strand
gcagaagagcuagagaaac

SEQ ID NO: 1886251 - RNA, 19 nt, Homo sapiens
  misc_RNA (1)...(19): siRNA sense strand
augaauuagugaaggaaga

SEQ ID NO: 1886252 - RNA, 19 nt, Homo sapiens
  misc_RNA (1)...(19): siRNA sense strand
uaaggaaguggaugcuaca

SEQ ID NO: 1886253 - RNA, 19 nt, Homo sapiens
  misc_RNA (1)...(19): siRNA sense strand
ggaggaggacgaggacuac

SEQ ID NO: 1886254 - RNA, 19 nt, Homo sapiens
  misc_RNA (1)...(19): siRNA sense strand
gggaaugguuguccaagaa

SEQ ID NO: 1886255 - RNA, 19 nt, Homo sapiens
  misc_RNA (1)...(19): siRNA sense strand
gaauggauacaaagaauga

SEQ ID NO: 1886256 - RNA, 19 nt, Homo sapiens
  misc_RNA (1)...(19): siRNA sense strand
ggaagaagaacaagucaau

SEQ ID NO: 1886257 - RNA, 19 nt, Homo sapiens
  misc_RNA (1)...(19): siRNA sense strand
gaaaucauagucuggaaga

SEQ ID NO: 1886258 - RNA, 19 nt, Homo sapiens
  misc_RNA (1)...(19): siRNA sense strand
caagcugaauggauacaaa

SEQ ID NO: 1886259 - RNA, 19 nt, Homo sapiens
  misc_RNA (1)...(19): siRNA sense strand
cgacaucucugcuucucau

SEQ ID NO: 1886260 - RNA, 19 nt, Homo sapiens
  misc_RNA (1)...(19): siRNA sense strand
gaagaagaacaagucaauu

SEQ ID NO: 1886261 - RNA, 19 nt, Homo sapiens
  misc_RNA (1)...(19): siRNA sense strand
ccuagacgcuucauugauc

SEQ ID NO: 1886262 - RNA, 19 nt, Homo sapiens
  misc_RNA (1)...(19): siRNA sense strand
ugauggaaguauugagaaa

SEQ ID NO: 1886263 - RNA, 19 nt, Homo sapiens
  misc_RNA (1)...(19): siRNA sense strand
aagaagaacaagucaauug

SEQ ID NO: 1886264 - RNA, 19 nt, Homo sapiens
  misc_RNA (1)...(19): siRNA sense strand
ggaaugguuguccaagaaa

SEQ ID NO: 1886265 - RNA, 19 nt, Homo sapiens
  misc_RNA (1)...(19): siRNA sense strand
caaagaaugauggaaguau

SEQ ID NO: 1886266 - RNA, 19 nt, Homo sapiens
  misc_RNA (1)...(19): siRNA sense strand
cccucaagcugaauggaua

SEQ ID NO: 1886267 - RNA, 19 nt, Homo sapiens
  misc_RNA (1)...(19): siRNA sense strand
cugaauggauacaaagaau

SEQ ID NO: 1886268 - RNA, 19 nt, Homo sapiens
  misc_RNA (1)...(19): siRNA sense strand
guuccaguguuuaagagaa

SEQ ID NO: 1886269 - RNA, 19 nt, Homo sapiens
  misc_RNA (1)...(19): siRNA sense strand
ugaucgaauucaaaucuug

SEQ ID NO: 1886270 - RNA, 19 nt, Homo sapiens
  misc_RNA (1)...(19): siRNA sense strand
ucuaccaguuccaguguuu

SEQ ID NO: 1886271 - RNA, 19 nt, Homo sapiens
  misc_RNA (1)...(19): siRNA sense strand
uacaaagaaugauggaagu

SEQ ID NO: 1886272 - RNA, 19 nt, Homo sapiens
  misc_RNA (1)...(19): siRNA sense strand
cagccucucuccaguccaa

SEQ ID NO: 1886273 - RNA, 19 nt, Homo sapiens
  misc_RNA (1)...(19): siRNA sense strand
gcugaauggauacaaagaa

SEQ ID NO: 1886274 - RNA, 19 nt, Homo sapiens
  misc_RNA (1)...(19): siRNA sense strand
guguagauguguccaagag

SEQ ID NO: 1886275 - RNA, 19 nt, Homo sapiens
  misc_RNA (1)...(19): siRNA sense strand
gaaugguuguccaagaaaa

SEQ ID NO: 1886276 - RNA, 19 nt, Homo sapiens
  misc_RNA (1)...(19): siRNA sense strand
ccaguuccaguguuuaaga

SEQ ID NO: 1886277 - RNA, 19 nt, Homo sapiens
  misc_RNA (1)...(19): siRNA sense strand
ugggaaugguuguccaaga

SEQ ID NO: 1886278 - RNA, 19 nt, Homo sapiens
  misc_RNA (1)...(19): siRNA sense strand
aagaaaucauagucuggaa

SEQ ID NO: 1886279 - RNA, 19 nt, Homo sapiens
  misc_RNA (1)...(19): siRNA sense strand
acgcuucauugaucgaauu

SEQ ID NO: 1886280 - RNA, 19 nt, Homo sapiens
  misc_RNA (1)...(19): siRNA sense strand
acaaagaaugauggaagua

SEQ ID NO: 1886281 - RNA, 19 nt, Homo sapiens
  misc_RNA (1)...(19): siRNA sense strand
aagaaugauggaaguauug

SEQ ID NO: 1886282 - RNA, 19 nt, Homo sapiens
  misc_RNA (1)...(19): siRNA sense strand
uaccaguuccaguguuuaa

SEQ ID NO: 1886283 - RNA, 19 nt, Homo sapiens
  misc_RNA (1)...(19): siRNA sense strand
cuggaggucuauuacacaa

SEQ ID NO: 1886284 - RNA, 19 nt, Homo sapiens
  misc_RNA (1)...(19): siRNA sense strand
uguggacccucaagcugaa

SEQ ID NO: 1886285 - RNA, 19 nt, Homo sapiens
  misc_RNA (1)...(19): siRNA sense strand
ggauacaaagaaugaugga

SEQ ID NO: 1886286 - RNA, 19 nt, Homo sapiens
  misc_RNA (1)...(19): siRNA sense strand
aaugauggaaguauugaga

SEQ ID NO: 1886287 - RNA, 19 nt, Homo sapiens
  misc_RNA (1)...(19): siRNA sense strand
aucauagucuggaagaaga

SEQ ID NO: 1886288 - RNA, 19 nt, Homo sapiens
  misc_RNA (1)...(19): siRNA sense strand
uuccaguguuuaagagaaa

SEQ ID NO: 1886289 - RNA, 19 nt, Homo sapiens
  misc_RNA (1)...(19): siRNA sense strand
agagagcucagucuuuauc

SEQ ID NO: 1886290 - RNA, 19 nt, Homo sapiens
  misc_RNA (1)...(19): siRNA sense strand
aagguguucuggaggucua

SEQ ID NO: 1886291 - RNA, 19 nt, Homo sapiens
  misc_RNA (1)...(19): siRNA sense strand
ugaauggauacaaagaaug

SEQ ID NO: 1886292 - RNA, 19 nt, Homo sapiens
  misc_RNA (1)...(19): siRNA sense strand
gaaguucaucucgacaucu

SEQ ID NO: 1886293 - RNA, 19 nt, Homo sapiens
  misc_RNA (1)...(19): siRNA sense strand
gaaauucucucuaagugua

SEQ ID NO: 1886294 - RNA, 19 nt, Homo sapiens
  misc_RNA (1)...(19): siRNA sense strand
ugaaaugccuguucuuuga

SEQ ID NO: 1886295 - RNA, 19 nt, Homo sapiens
  misc_RNA (1)...(19): siRNA sense strand
ggaagugccugaagacguu

SEQ ID NO: 1886296 - RNA, 19 nt, Homo sapiens
  misc_RNA (1)...(19): siRNA sense strand
gcaaauaccuagacuucau

SEQ ID NO: 1886297 - RNA, 19 nt, Homo sapiens
  misc_RNA (1)...(19): siRNA sense strand
ccaaguacauucuaaguau

SEQ ID NO: 1886298 - RNA, 19 nt, Homo sapiens
  misc_RNA (1)...(19): siRNA sense strand
gaacagaagaugaaagaga

SEQ ID NO: 1886299 - RNA, 19 nt, Homo sapiens
  misc_RNA (1)...(19): siRNA sense strand
gaacgaagaaugaguacaa

SEQ ID NO: 1886300 - RNA, 19 nt, Homo sapiens
  misc_RNA (1)...(19): siRNA sense strand
cagaggagguuucuaguug

SEQ ID NO: 1886301 - RNA, 19 nt, Homo sapiens
  misc_RNA (1)...(19): siRNA sense strand
gcucguaucuggaggaaga

SEQ ID NO: 1886302 - RNA, 19 nt, Homo sapiens
  misc_RNA (1)...(19): siRNA sense strand
ggaauucacuccgguguau

SEQ ID NO: 1886303 - RNA, 19 nt, Homo sapiens
  misc_RNA (1)...(19): siRNA sense strand
ggaagagauugccagguaa

SEQ ID NO: 1886304 - RNA, 19 nt, Homo sapiens
  misc_RNA (1)...(19): siRNA sense strand
gaauuugccuaucccugua

SEQ ID NO: 1886305 - RNA, 19 nt, Homo sapiens
  misc_RNA (1)...(19): siRNA sense strand
gcacacaucccuuccuuug

SEQ ID NO: 1886306 - RNA, 19 nt, Homo sapiens
  misc_RNA (1)...(19): siRNA sense strand
gagagucuguauccaguaa

SEQ ID NO: 1886307 - RNA, 19 nt, Homo sapiens
  misc_RNA (1)...(19): siRNA sense strand
ccagacaccucccaucuug

SEQ ID NO: 1886308 - RNA, 19 nt, Homo sapiens
  misc_RNA (1)...(19): siRNA sense strand
gaggaaccauggaggaauu

SEQ ID NO: 1886309 - RNA, 19 nt, Homo sapiens
  misc_RNA (1)...(19): siRNA sense strand
gagcaauccuccuauagau

SEQ ID NO: 1886310 - RNA, 19 nt, Homo sapiens
  misc_RNA (1)...(19): siRNA sense strand
gcgcacggcuucauucaga

SEQ ID NO: 1886311 - RNA, 19 nt, Homo sapiens
  misc_RNA (1)...(19): siRNA sense strand
gggaagagcaugcguguga

SEQ ID NO: 1886312 - RNA, 19 nt, Homo sapiens
  misc_RNA (1)...(19): siRNA sense strand
aagccaagaugaaggaaua

SEQ ID NO: 1886313 - RNA, 19 nt, Homo sapiens
  misc_RNA (1)...(19): siRNA sense strand
caagugaccaguucaauug

SEQ ID NO: 1886314 - RNA, 19 nt, Homo sapiens
  misc_RNA (1)...(19): siRNA sense strand
ucauggaaauucucucuaa

SEQ ID NO: 1886315 - RNA, 19 nt, Homo sapiens
  misc_RNA (1)...(19): siRNA sense strand
cagguucucuggcagcuua

SEQ ID NO: 1886316 - RNA, 19 nt, Homo sapiens
  misc_RNA (1)...(19): siRNA sense strand
aggaagagauugccaggua

SEQ ID NO: 1886317 - RNA, 19 nt, Homo sapiens
  misc_RNA (1)...(19): siRNA sense strand
gaagacguuuagacacaaa

SEQ ID NO: 1886318 - RNA, 19 nt, Homo sapiens
  misc_RNA (1)...(19): siRNA sense strand
gaauuauacucucuuacug

SEQ ID NO: 1886319 - RNA, 19 nt, Homo sapiens
  misc_RNA (1)...(19): siRNA sense strand
caaguucucuucagaugau

SEQ ID NO: 1886320 - RNA, 19 nt, Homo sapiens
  misc_RNA (1)...(19): siRNA sense strand
guugaucgguugagauuga

SEQ ID NO: 1886321 - RNA, 19 nt, Homo sapiens
  misc_RNA (1)...(19): siRNA sense strand
auacagcccuugauccuuu

SEQ ID NO: 1886322 - RNA, 19 nt, Homo sapiens
  misc_RNA (1)...(19): siRNA sense strand
ucucagggcucaaucaaga

SEQ ID NO: 1886323 - RNA, 19 nt, Homo sapiens
  misc_RNA (1)...(19): siRNA sense strand
gagcaauguucucauguuc

SEQ ID NO: 1886324 - RNA, 19 nt, Homo sapiens
  misc_RNA (1)...(19): siRNA sense strand
gaaccagauuaccuucuug

SEQ ID NO: 1886325 - RNA, 19 nt, Homo sapiens
  misc_RNA (1)...(19): siRNA sense strand
cgaaaugaauaggcuguuu

SEQ ID NO: 1886326 - RNA, 19 nt, Homo sapiens
  misc_RNA (1)...(19): siRNA sense strand
ugauagcugugucaucuaa

SEQ ID NO: 1886327 - RNA, 19 nt, Homo sapiens
  misc_RNA (1)...(19): siRNA sense strand
gaaaauagucucauggaaa

SEQ ID NO: 1886328 - RNA, 19 nt, Homo sapiens
  misc_RNA (1)...(19): siRNA sense strand
gaacggccucgcaucuaua

SEQ ID NO: 1886329 - RNA, 19 nt, Homo sapiens
  misc_RNA (1)...(19): siRNA sense strand
gaugugaaacgaaccagua

SEQ ID NO: 1886330 - RNA, 19 nt, Homo sapiens
  misc_RNA (1)...(19): siRNA sense strand
ggaucaaccucagcaagaa

SEQ ID NO: 1886331 - RNA, 19 nt, Homo sapiens
  misc_RNA (1)...(19): siRNA sense strand
uaaacaaacugugauccaa

SEQ ID NO: 1886332 - RNA, 19 nt, Homo sapiens
  misc_RNA (1)...(19): siRNA sense strand
caggaucaaugacauauca

SEQ ID NO: 1886333 - RNA, 19 nt, Homo sapiens
  misc_RNA (1)...(19): siRNA sense strand
ggaacuguaugaagguguu

SEQ ID NO: 1886334 - RNA, 19 nt, Homo sapiens
  misc_RNA (1)...(19): siRNA sense strand
ugaaagcgauacccguuga

SEQ ID NO: 1886335 - RNA, 19 nt, Homo sapiens
  misc_RNA (1)...(19): siRNA sense strand
ggaccaaggcgaauuauac

SEQ ID NO: 1886336 - RNA, 19 nt, Homo sapiens
  misc_RNA (1)...(19): siRNA sense strand
gaagagauugccagguaaa

SEQ ID NO: 1886337 - RNA, 19 nt, Homo sapiens
  misc_RNA (1)...(19): siRNA sense strand
uauaacaggucccggauca

SEQ ID NO: 1886338 - RNA, 19 nt, Homo sapiens
  misc_RNA (1)...(19): siRNA sense strand
caugcuagcuccacaagug

SEQ ID NO: 1886339 - RNA, 19 nt, Homo sapiens
  misc_RNA (1)...(19): siRNA sense strand
caauuccuccugacuguua

SEQ ID NO: 1886340 - RNA, 19 nt, Homo sapiens
  misc_RNA (1)...(19): siRNA sense strand
ggacaucauacaagugaaa

SEQ ID NO: 1886341 - RNA, 19 nt, Homo sapiens
  misc_RNA (1)...(19): siRNA sense strand
ugagagaggagaacaauau

SEQ ID NO: 1886342 - RNA, 19 nt, Homo sapiens
  misc_RNA (1)...(19): siRNA sense strand
aaucaaggcucaagaaugc

SEQ ID NO: 1886343 - RNA, 19 nt, Homo sapiens
  misc_RNA (1)...(19): siRNA sense strand
gcacauaaaguggcaguau

SEQ ID NO: 1886344 - RNA, 19 nt, Homo sapiens
  misc_RNA (1)...(19): siRNA sense strand
gcaacaggaugguggucaa

SEQ ID NO: 1886345 - RNA, 19 nt, Homo sapiens
  misc_RNA (1)...(19): siRNA sense strand
gaaucaaggcucaagaaug

SEQ ID NO: 1886346 - RNA, 19 nt, Homo sapiens
  misc_RNA (1)...(19): siRNA sense strand
gauccuaauuaugccaaua

SEQ ID NO: 1886347 - RNA, 19 nt, Homo sapiens
  misc_RNA (1)...(19): siRNA sense strand
ccauccaccucuccaagua

SEQ ID NO: 1886348 - RNA, 19 nt, Homo sapiens
  misc_RNA (1)...(19): siRNA sense strand
gcaauccuccuauagaugu

SEQ ID NO: 1886349 - RNA, 19 nt, Homo sapiens
  misc_RNA (1)...(19): siRNA sense strand
ugaaacauccgaaguggaa

SEQ ID NO: 1886350 - RNA, 19 nt, Homo sapiens
  misc_RNA (1)...(19): siRNA sense strand
ggcgaauuauacucucuua

SEQ ID NO: 1886351 - RNA, 19 nt, Homo sapiens
  misc_RNA (1)...(19): siRNA sense strand
cagccacccugucucuuaa

SEQ ID NO: 1886352 - RNA, 19 nt, Homo sapiens
  misc_RNA (1)...(19): siRNA sense strand
gaaagggcugugugcagua

SEQ ID NO: 1886353 - RNA, 19 nt, Homo sapiens
  misc_RNA (1)...(19): siRNA sense strand
gcaauguucucauguucca

SEQ ID NO: 1886354 - RNA, 19 nt, Homo sapiens
  misc_RNA (1)...(19): siRNA sense strand
gaagagcaugcgugugaaa

SEQ ID NO: 1886355 - RNA, 19 nt, Homo sapiens
  misc_RNA (1)...(19): siRNA sense strand
gccaaguucucuucagaug

SEQ ID NO: 1886356 - RNA, 19 nt, Homo sapiens
  misc_RNA (1)...(19): siRNA sense strand
gugcuguccuucuuuauuc

SEQ ID NO: 1886357 - RNA, 19 nt, Homo sapiens
  misc_RNA (1)...(19): siRNA sense strand
gcauggacuuguguaagaa

SEQ ID NO: 1886358 - RNA, 19 nt, Homo sapiens
  misc_RNA (1)...(19): siRNA sense strand
ccacacagggaaaggauuu

SEQ ID NO: 1886359 - RNA, 19 nt, Homo sapiens
  misc_RNA (1)...(19): siRNA sense strand
aaacaaggacaauuggaaa

SEQ ID NO: 1886360 - RNA, 19 nt, Homo sapiens
  misc_RNA (1)...(19): siRNA sense strand
gacacacccugaacaagug

SEQ ID NO: 1886361 - RNA, 19 nt, Homo sapiens
  misc_RNA (1)...(19): siRNA sense strand
caaguacauucuaaguaug

SEQ ID NO: 1886362 - RNA, 19 nt, Homo sapiens
  misc_RNA (1)...(19): siRNA sense strand
acacaucccuuccuuuguc

SEQ ID NO: 1886363 - RNA, 19 nt, Homo sapiens
  misc_RNA (1)...(19): siRNA sense strand
ggagaaggagcaccaggaa

SEQ ID NO: 1886364 - RNA, 19 nt, Homo sapiens
  misc_RNA (1)...(19): siRNA sense strand
gagaccaagugaccaguuc

SEQ ID NO: 1886365 - RNA, 19 nt, Homo sapiens
  misc_RNA (1)...(19): siRNA sense strand
ggaugguggucaacacaga

SEQ ID NO: 1886366 - RNA, 19 nt, Homo sapiens
  misc_RNA (1)...(19): siRNA sense strand
ggaagagcaugcgugugaa

SEQ ID NO: 1886367 - RNA, 19 nt, Homo sapiens
  misc_RNA (1)...(19): siRNA sense strand
cagcaaauaccuagacuuc

SEQ ID NO: 1886368 - RNA, 19 nt, Homo sapiens
  misc_RNA (1)...(19): siRNA sense strand
ugagaacgaagaaugagua

SEQ ID NO: 1886369 - RNA, 19 nt, Homo sapiens
  misc_RNA (1)...(19): siRNA sense strand
cacccugucucuuaagaaa

SEQ ID NO: 1886370 - RNA, 19 nt, Homo sapiens
  misc_RNA (1)...(19): siRNA sense strand
ccaagugaccaguucaauu

SEQ ID NO: 1886371 - RNA, 19 nt, Homo sapiens
  misc_RNA (1)...(19): siRNA sense strand
ccugugcuguccuucuuua

SEQ ID NO: 1886372 - RNA, 19 nt, Homo sapiens
  misc_RNA (1)...(19): siRNA sense strand
ggcaagauccgaauuuaca

SEQ ID NO: 1886373 - RNA, 19 nt, Homo sapiens
  misc_RNA (1)...(19): siRNA sense strand
gauggcaagauccgaauuu

SEQ ID NO: 1886374 - RNA, 19 nt, Homo sapiens
  misc_RNA (1)...(19): siRNA sense strand
gcucacugcugccaaugug

SEQ ID NO: 1886375 - RNA, 19 nt, Homo sapiens
  misc_RNA (1)...(19): siRNA sense strand
acacugaguucgugcuguu

SEQ ID NO: 1886376 - RNA, 19 nt, Homo sapiens
  misc_RNA (1)...(19): siRNA sense strand
gaaacugcagcccaacuug

SEQ ID NO: 1886377 - RNA, 19 nt, Homo sapiens
  misc_RNA (1)...(19): siRNA sense strand
caggaaugcuggauagaca

SEQ ID NO: 1886378 - RNA, 19 nt, Homo sapiens
  misc_RNA (1)...(19): siRNA sense strand
uacgaucccugcaaucuau

SEQ ID NO: 1886379 - RNA, 19 nt, Homo sapiens
  misc_RNA (1)...(19): siRNA sense strand
guugugaaguccuccuuga

SEQ ID NO: 1886380 - RNA, 19 nt, Homo sapiens
  misc_RNA (1)...(19): siRNA sense strand
ucacagaggagguuucuag

SEQ ID NO: 1886381 - RNA, 19 nt, Homo sapiens
  misc_RNA (1)...(19): siRNA sense strand
guucucauguuccaguuug

SEQ ID NO: 1886382 - RNA, 19 nt, Homo sapiens
  misc_RNA (1)...(19): siRNA sense strand
uagaacagaagaugaaaga

SEQ ID NO: 1886383 - RNA, 19 nt, Homo sapiens
  misc_RNA (1)...(19): siRNA sense strand
agaacggccucgcaucuau

SEQ ID NO: 1886384 - RNA, 19 nt, Homo sapiens
  misc_RNA (1)...(19): siRNA sense strand
ccaguaugcaggucauuaa

SEQ ID NO: 1886385 - RNA, 19 nt, Homo sapiens
  misc_RNA (1)...(19): siRNA sense strand
uggaaauucucucuaagug

SEQ ID NO: 1886386 - RNA, 19 nt, Homo sapiens
  misc_RNA (1)...(19): siRNA sense strand
gagcaugcgugugaaacau

SEQ ID NO: 1886387 - RNA, 19 nt, Homo sapiens
  misc_RNA (1)...(19): siRNA sense strand
uaagguuucuaucccaguu

SEQ ID NO: 1886388 - RNA, 19 nt, Homo sapiens
  misc_RNA (1)...(19): siRNA sense strand
cagcacacaucccuuccuu

SEQ ID NO: 1886389 - RNA, 19 nt, Homo sapiens
  misc_RNA (1)...(19): siRNA sense strand
guacgaucccugcaaucua

SEQ ID NO: 1886390 - RNA, 19 nt, Homo sapiens
  misc_RNA (1)...(19): siRNA sense strand
ggaaucaaggcucaagaau

SEQ ID NO: 1886391 - RNA, 19 nt, Homo sapiens
  misc_RNA (1)...(19): siRNA sense strand
gugaaaugccuguucuuug

SEQ ID NO: 1886392 - RNA, 19 nt, Homo sapiens
  misc_RNA (1)...(19): siRNA sense strand
ggaaauucucucuaagugu

SEQ ID NO: 1886393 - RNA, 19 nt, Homo sapiens
  misc_RNA (1)...(19): siRNA sense strand
gaaagcggcuguuuaggaa

SEQ ID NO: 1886394 - RNA, 19 nt, Homo sapiens
  misc_RNA (1)...(19): siRNA sense strand
gcacucugaucuacaaauu

SEQ ID NO: 1886395 - RNA, 19 nt, Homo sapiens
  misc_RNA (1)...(19): siRNA sense strand
ggugagaggugauagcuau

SEQ ID NO: 1886396 - RNA, 19 nt, Homo sapiens
  misc_RNA (1)...(19): siRNA sense strand
cacauuggcuuucuucaug

SEQ ID NO: 1886397 - RNA, 19 nt, Homo sapiens
  misc_RNA (1)...(19): siRNA sense strand
gccagaaugugaauguauu

SEQ ID NO: 1886398 - RNA, 19 nt, Homo sapiens
  misc_RNA (1)...(19): siRNA sense strand
gcugguggauaaugauuga

SEQ ID NO: 1886399 - RNA, 19 nt, Homo sapiens
  misc_RNA (1)...(19): siRNA sense strand
gaaugugaauguauugacu

SEQ ID NO: 1886400 - RNA, 19 nt, Homo sapiens
  misc_RNA (1)...(19): siRNA sense strand
acucugaucuacaaauuug

SEQ ID NO: 1886401 - RNA, 19 nt, Homo sapiens
  misc_RNA (1)...(19): siRNA sense strand
gaacaggugcucgaguuug

SEQ ID NO: 1886402 - RNA, 19 nt, Homo sapiens
  misc_RNA (1)...(19): siRNA sense strand
gagaggugauagcuaugaa

SEQ ID NO: 1886403 - RNA, 19 nt, Homo sapiens
  misc_RNA (1)...(19): siRNA sense strand
cagcugugguguauccuaa

SEQ ID NO: 1886404 - RNA, 19 nt, Homo sapiens
  misc_RNA (1)...(19): siRNA sense strand
gaaccaugccuuucacaca

SEQ ID NO: 1886405 - RNA, 19 nt, Homo sapiens
  misc_RNA (1)...(19): siRNA sense strand
aagaacaggugcucgaguu

SEQ ID NO: 1886406 - RNA, 19 nt, Homo sapiens
  misc_RNA (1)...(19): siRNA sense strand
ugucgcagguauauuguuu

SEQ ID NO: 1886407 - RNA, 19 nt, Homo sapiens
  misc_RNA (1)...(19): siRNA sense strand
ugaaagcggcuguuuagga

SEQ ID NO: 1886408 - RNA, 19 nt, Homo sapiens
  misc_RNA (1)...(19): siRNA sense strand
uuuacaggcugguggauaa

SEQ ID NO: 1886409 - RNA, 19 nt, Homo sapiens
  misc_RNA (1)...(19): siRNA sense strand
uguauugacuggagugaga

SEQ ID NO: 1886410 - RNA, 19 nt, Homo sapiens
  misc_RNA (1)...(19): siRNA sense strand
uggaagaaccgaagagcua

SEQ ID NO: 1886411 - RNA, 19 nt, Homo sapiens
  misc_RNA (1)...(19): siRNA sense strand
uaaaugcuguauccaaugc

SEQ ID NO: 1886412 - RNA, 19 nt, Homo sapiens
  misc_RNA (1)...(19): siRNA sense strand
gaucuacaaauuuggaaga

SEQ ID NO: 1886413 - RNA, 19 nt, Homo sapiens
  misc_RNA (1)...(19): siRNA sense strand
gugcauauguuacccaaaa

SEQ ID NO: 1886414 - RNA, 19 nt, Homo sapiens
  misc_RNA (1)...(19): siRNA sense strand
caggcuuccuagauaauuu

SEQ ID NO: 1886415 - RNA, 19 nt, Homo sapiens
  misc_RNA (1)...(19): siRNA sense strand
uaugaaagcggcuguuuag

SEQ ID NO: 1886416 - RNA, 19 nt, Homo sapiens
  misc_RNA (1)...(19): siRNA sense strand
gguuucauguugauguuug

SEQ ID NO: 1886417 - RNA, 19 nt, Homo sapiens
  misc_RNA (1)...(19): siRNA sense strand
uuucauugguuucauguug

SEQ ID NO: 1886418 - RNA, 19 nt, Homo sapiens
  misc_RNA (1)...(19): siRNA sense strand
ugaugcagcugugguguau

SEQ ID NO: 1886419 - RNA, 19 nt, Homo sapiens
  misc_RNA (1)...(19): siRNA sense strand
cuaugaaagcggcuguuua

SEQ ID NO: 1886420 - RNA, 19 nt, Homo sapiens
  misc_RNA (1)...(19): siRNA sense strand
ggaagaaccgaagagcuau

SEQ ID NO: 1886421 - RNA, 19 nt, Homo sapiens
  misc_RNA (1)...(19): siRNA sense strand
uuagcacucugaucuacaa

SEQ ID NO: 1886422 - RNA, 19 nt, Homo sapiens
  misc_RNA (1)...(19): siRNA sense strand
ugacuggagugagagaaga

SEQ ID NO: 1886423 - RNA, 19 nt, Homo sapiens
  misc_RNA (1)...(19): siRNA sense strand
acaggcugguggauaauga

SEQ ID NO: 1886424 - RNA, 19 nt, Homo sapiens
  misc_RNA (1)...(19): siRNA sense strand
gcuaugaaagcggcuguuu

SEQ ID NO: 1886425 - RNA, 19 nt, Homo sapiens
  misc_RNA (1)...(19): siRNA sense strand
aagcggcuguuuaggaaga

SEQ ID NO: 1886426 - RNA, 19 nt, Homo sapiens
  misc_RNA (1)...(19): siRNA sense strand
gaagaaccgaagagcuaug

SEQ ID NO: 1886427 - RNA, 19 nt, Homo sapiens
  misc_RNA (1)...(19): siRNA sense strand
gcaggcuuccuagauaauu

SEQ ID NO: 1886428 - RNA, 19 nt, Homo sapiens
  misc_RNA (1)...(19): siRNA sense strand
gauguuugggucacuuauu

SEQ ID NO: 1886429 - RNA, 19 nt, Homo sapiens
  misc_RNA (1)...(19): siRNA sense strand
caucuguugucgcagguau

SEQ ID NO: 1886430 - RNA, 19 nt, Homo sapiens
  misc_RNA (1)...(19): siRNA sense strand
ggccagaaugugaauguau

SEQ ID NO: 1886431 - RNA, 19 nt, Homo sapiens
  misc_RNA (1)...(19): siRNA sense strand
acauuggcuuucuucauga

SEQ ID NO: 1886432 - RNA, 19 nt, Homo sapiens
  misc_RNA (1)...(19): siRNA sense strand
gaggugauagcuaugaaag

SEQ ID NO: 1886433 - RNA, 19 nt, Homo sapiens
  misc_RNA (1)...(19): siRNA sense strand
aaccaugccuuucacacau

SEQ ID NO: 1886434 - RNA, 19 nt, Homo sapiens
  misc_RNA (1)...(19): siRNA sense strand
gcagcugugguguauccua

SEQ ID NO: 1886435 - RNA, 19 nt, Homo sapiens
  misc_RNA (1)...(19): siRNA sense strand
ccacauuggcuuucuucau

SEQ ID NO: 1886436 - RNA, 19 nt, Homo sapiens
  misc_RNA (1)...(19): siRNA sense strand
acaguugaaccaugccuuu

SEQ ID NO: 1886437 - RNA, 19 nt, Homo sapiens
  misc_RNA (1)...(19): siRNA sense strand
gcauauguuacccaaaaua

SEQ ID NO: 1886438 - RNA, 19 nt, Homo sapiens
  misc_RNA (1)...(19): siRNA sense strand
ucacuuauugcuuccaugu

SEQ ID NO: 1886439 - RNA, 19 nt, Homo sapiens
  misc_RNA (1)...(19): siRNA sense strand
gaguuuggcuuuucauugg

SEQ ID NO: 1886440 - RNA, 19 nt, Homo sapiens
  misc_RNA (1)...(19): siRNA sense strand
ccagaaugugaauguauug

SEQ ID NO: 1886441 - RNA, 19 nt, Homo sapiens
  misc_RNA (1)...(19): siRNA sense strand
uggcuuucuucaugauaaa

SEQ ID NO: 1886442 - RNA, 19 nt, Homo sapiens
  misc_RNA (1)...(19): siRNA sense strand
ggucacuuauugcuuccau

SEQ ID NO: 1886443 - RNA, 19 nt, Homo sapiens
  misc_RNA (1)...(19): siRNA sense strand
uuggcuuucuucaugauaa

SEQ ID NO: 1886444 - RNA, 19 nt, Homo sapiens
  misc_RNA (1)...(19): siRNA sense strand
auguuugggucacuuauug

SEQ ID NO: 1886445 - RNA, 19 nt, Homo sapiens
  misc_RNA (1)...(19): siRNA sense strand
ugagaggugauagcuauga

SEQ ID NO: 1886446 - RNA, 19 nt, Homo sapiens
  misc_RNA (1)...(19): siRNA sense strand
cccaaaauacugauguuua

SEQ ID NO: 1886447 - RNA, 19 nt, Homo sapiens
  misc_RNA (1)...(19): siRNA sense strand
uguugucgcagguauauug

SEQ ID NO: 1886448 - RNA, 19 nt, Homo sapiens
  misc_RNA (1)...(19): siRNA sense strand
ggagugagagaagaaaugc

SEQ ID NO: 1886449 - RNA, 19 nt, Homo sapiens
  misc_RNA (1)...(19): siRNA sense strand
ggugcucgaguuuggcuuu

SEQ ID NO: 1886450 - RNA, 19 nt, Homo sapiens
  misc_RNA (1)...(19): siRNA sense strand
gguguauccuaagccagaa

SEQ ID NO: 1886451 - RNA, 19 nt, Homo sapiens
  misc_RNA (1)...(19): siRNA sense strand
uucauugguuucauguuga

SEQ ID NO: 1886452 - RNA, 19 nt, Homo sapiens
  misc_RNA (1)...(19): siRNA sense strand
uggccagaaugugaaugua

SEQ ID NO: 1886453 - RNA, 19 nt, Homo sapiens
  misc_RNA (1)...(19): siRNA sense strand
ucauugguuucauguugau

SEQ ID NO: 1886454 - RNA, 19 nt, Homo sapiens
  misc_RNA (1)...(19): siRNA sense strand
ggaaauaccuggaaagaaa

SEQ ID NO: 1886455 - RNA, 19 nt, Homo sapiens
  misc_RNA (1)...(19): siRNA sense strand
gagaagaacuggaauagaa

SEQ ID NO: 1886456 - RNA, 19 nt, Homo sapiens
  misc_RNA (1)...(19): siRNA sense strand
gaaccaggauguaugaaua

SEQ ID NO: 1886457 - RNA, 19 nt, Homo sapiens
  misc_RNA (1)...(19): siRNA sense strand
uaaagaagcuggucagaga

SEQ ID NO: 1886458 - RNA, 19 nt, Homo sapiens
  misc_RNA (1)...(19): siRNA sense strand
aaccacagcuuuagaauua

SEQ ID NO: 1886459 - RNA, 19 nt, Homo sapiens
  misc_RNA (1)...(19): siRNA sense strand
gaacgacucuacaauguug

SEQ ID NO: 1886460 - RNA, 19 nt, Homo sapiens
  misc_RNA (1)...(19): siRNA sense strand
gagcacauguggaaguuua

SEQ ID NO: 1886461 - RNA, 19 nt, Homo sapiens
  misc_RNA (1)...(19): siRNA sense strand
ggaauuagcaggucuuaaa

SEQ ID NO: 1886462 - RNA, 19 nt, Homo sapiens
  misc_RNA (1)...(19): siRNA sense strand
gcaaugacuugaugaagaa

SEQ ID NO: 1886463 - RNA, 19 nt, Homo sapiens
  misc_RNA (1)...(19): siRNA sense strand
gauaaugacuagaacugua

SEQ ID NO: 1886464 - RNA, 19 nt, Homo sapiens
  misc_RNA (1)...(19): siRNA sense strand
ucaaagauguucaggauga

SEQ ID NO: 1886465 - RNA, 19 nt, Homo sapiens
  misc_RNA (1)...(19): siRNA sense strand
gaagaaaugucaauaugag

SEQ ID NO: 1886466 - RNA, 19 nt, Homo sapiens
  misc_RNA (1)...(19): siRNA sense strand
gcauacaucuuacaaacaa

SEQ ID NO: 1886467 - RNA, 19 nt, Homo sapiens
  misc_RNA (1)...(19): siRNA sense strand
ggaaagaucguccuacuug

SEQ ID NO: 1886468 - RNA, 19 nt, Homo sapiens
  misc_RNA (1)...(19): siRNA sense strand
ugaagaggcagauuuauua

SEQ ID NO: 1886469 - RNA, 19 nt, Homo sapiens
  misc_RNA (1)...(19): siRNA sense strand
aaacgucgauacacuauaa

SEQ ID NO: 1886470 - RNA, 19 nt, Homo sapiens
  misc_RNA (1)...(19): siRNA sense strand
cagcaaagcucauaucaca

SEQ ID NO: 1886471 - RNA, 19 nt, Homo sapiens
  misc_RNA (1)...(19): siRNA sense strand
ggaccgaagucaaugguuu

SEQ ID NO: 1886472 - RNA, 19 nt, Homo sapiens
  misc_RNA (1)...(19): siRNA sense strand
gaaauuaagacgauacuug

SEQ ID NO: 1886473 - RNA, 19 nt, Homo sapiens
  misc_RNA (1)...(19): siRNA sense strand
agaauuagaugcccuuaaa

SEQ ID NO: 1886474 - RNA, 19 nt, Homo sapiens
  misc_RNA (1)...(19): siRNA sense strand
gaacugagaaucaaagaga

SEQ ID NO: 1886475 - RNA, 19 nt, Homo sapiens
  misc_RNA (1)...(19): siRNA sense strand
gagaacgacucuacaaugu

SEQ ID NO: 1886476 - RNA, 19 nt, Homo sapiens
  misc_RNA (1)...(19): siRNA sense strand
gaaagauuaugacuggauu

SEQ ID NO: 1886477 - RNA, 19 nt, Homo sapiens
  misc_RNA (1)...(19): siRNA sense strand
gcaagaagaugaaagaaaa

SEQ ID NO: 1886478 - RNA, 19 nt, Homo sapiens
  misc_RNA (1)...(19): siRNA sense strand
uaaacaagcugaaguuaag

SEQ ID NO: 1886479 - RNA, 19 nt, Homo sapiens
  misc_RNA (1)...(19): siRNA sense strand
agagagagcauacaucuua

SEQ ID NO: 1886480 - RNA, 19 nt, Homo sapiens
  misc_RNA (1)...(19): siRNA sense strand
gaacuggaauagaaauugu

SEQ ID NO: 1886481 - RNA, 19 nt, Homo sapiens
  misc_RNA (1)...(19): siRNA sense strand
gauaagaggauaaugacua

SEQ ID NO: 1886482 - RNA, 19 nt, Homo sapiens
  misc_RNA (1)...(19): siRNA sense strand
uagaagaccuugaccagaa

SEQ ID NO: 1886483 - RNA, 19 nt, Homo sapiens
  misc_RNA (1)...(19): siRNA sense strand
gguucgggcuucuaauuua

SEQ ID NO: 1886484 - RNA, 19 nt, Homo sapiens
  misc_RNA (1)...(19): siRNA sense strand
gaagcaugcucaacaggaa

SEQ ID NO: 1886485 - RNA, 19 nt, Homo sapiens
  misc_RNA (1)...(19): siRNA sense strand
aaauaaagcucaagaagag

SEQ ID NO: 1886486 - RNA, 19 nt, Homo sapiens
  misc_RNA (1)...(19): siRNA sense strand
uggaagagcucaagagaga

SEQ ID NO: 1886487 - RNA, 19 nt, Homo sapiens
  misc_RNA (1)...(19): siRNA sense strand
gcagcugucucgugauauu

SEQ ID NO: 1886488 - RNA, 19 nt, Homo sapiens
  misc_RNA (1)...(19): siRNA sense strand
gaagagcgaugcaaugacu

SEQ ID NO: 1886489 - RNA, 19 nt, Homo sapiens
  misc_RNA (1)...(19): siRNA sense strand
gcuaucaaauccuaugaaa

SEQ ID NO: 1886490 - RNA, 19 nt, Homo sapiens
  misc_RNA (1)...(19): siRNA sense strand
gagcauacaucuuacaaac

SEQ ID NO: 1886491 - RNA, 19 nt, Homo sapiens
  misc_RNA (1)...(19): siRNA sense strand
ggaagaaaugucaauauga

SEQ ID NO: 1886492 - RNA, 19 nt, Homo sapiens
  misc_RNA (1)...(19): siRNA sense strand
caagcaacaagaagaauua

SEQ ID NO: 1886493 - RNA, 19 nt, Homo sapiens
  misc_RNA (1)...(19): siRNA sense strand
caaaggagcacauguggaa

SEQ ID NO: 1886494 - RNA, 19 nt, Homo sapiens
  misc_RNA (1)...(19): siRNA sense strand
gaauaaacaagcugaaguu

SEQ ID NO: 1886495 - RNA, 19 nt, Homo sapiens
  misc_RNA (1)...(19): siRNA sense strand
aaaccaagcccuaaauauu

SEQ ID NO: 1886496 - RNA, 19 nt, Homo sapiens
  misc_RNA (1)...(19): siRNA sense strand
uaaugaagauggagcagaa

SEQ ID NO: 1886497 - RNA, 19 nt, Homo sapiens
  misc_RNA (1)...(19): siRNA sense strand
cuucaaaccugcuccaauu

SEQ ID NO: 1886498 - RNA, 19 nt, Homo sapiens
  misc_RNA (1)...(19): siRNA sense strand
gauaacagauggacugcau

SEQ ID NO: 1886499 - RNA, 19 nt, Homo sapiens
  misc_RNA (1)...(19): siRNA sense strand
uaugagagcuaugaaugua

SEQ ID NO: 1886500 - RNA, 19 nt, Homo sapiens
  misc_RNA (1)...(19): siRNA sense strand
ggaauuagaccaccacauc

SEQ ID NO: 1886501 - RNA, 19 nt, Homo sapiens
  misc_RNA (1)...(19): siRNA sense strand
gaacugaaacgucgauaca

SEQ ID NO: 1886502 - RNA, 19 nt, Homo sapiens
  misc_RNA (1)...(19): siRNA sense strand
gaaguuaagaagauggaua

SEQ ID NO: 1886503 - RNA, 19 nt, Homo sapiens
  misc_RNA (1)...(19): siRNA sense strand
ucucggaggugauguguuu

SEQ ID NO: 1886504 - RNA, 19 nt, Homo sapiens
  misc_RNA (1)...(19): siRNA sense strand
caauauggauaaugccaaa

SEQ ID NO: 1886505 - RNA, 19 nt, Homo sapiens
  misc_RNA (1)...(19): siRNA sense strand
gaaagaaacauaugaagcu

SEQ ID NO: 1886506 - RNA, 19 nt, Homo sapiens
  misc_RNA (1)...(19): siRNA sense strand
ccaagacacuguaauuaag

SEQ ID NO: 1886507 - RNA, 19 nt, Homo sapiens
  misc_RNA (1)...(19): siRNA sense strand
ggagaacgacucuacaaug

SEQ ID NO: 1886508 - RNA, 19 nt, Homo sapiens
  misc_RNA (1)...(19): siRNA sense strand
gaagaagaagagaauugua

SEQ ID NO: 1886509 - RNA, 19 nt, Homo sapiens
  misc_RNA (1)...(19): siRNA sense strand
aaaccaagcuccagcaaag

SEQ ID NO: 1886510 - RNA, 19 nt, Homo sapiens
  misc_RNA (1)...(19): siRNA sense strand
ccaggcagcuuccauuuua

SEQ ID NO: 1886511 - RNA, 19 nt, Homo sapiens
  misc_RNA (1)...(19): siRNA sense strand
gaucucuucuguucuguug

SEQ ID NO: 1886512 - RNA, 19 nt, Homo sapiens
  misc_RNA (1)...(19): siRNA sense strand
caaaccugcuccaauuuau

SEQ ID NO: 1886513 - RNA, 19 nt, Homo sapiens
  misc_RNA (1)...(19): siRNA sense strand
uuaguggccuugucauuaa

SEQ ID NO: 1886514 - RNA, 19 nt, Homo sapiens
  misc_RNA (1)...(19): siRNA sense strand
gaaagucagauugaaguaa

SEQ ID NO: 1886515 - RNA, 19 nt, Homo sapiens
  misc_RNA (1)...(19): siRNA sense strand
gcaauggaguuugucuuug

SEQ ID NO: 1886516 - RNA, 19 nt, Homo sapiens
  misc_RNA (1)...(19): siRNA sense strand
gaagaauugucugagaaug

SEQ ID NO: 1886517 - RNA, 19 nt, Homo sapiens
  misc_RNA (1)...(19): siRNA sense strand
uaacaacccucacuuucuc

SEQ ID NO: 1886518 - RNA, 19 nt, Homo sapiens
  misc_RNA (1)...(19): siRNA sense strand
gcaaagguauccaaaaugu

SEQ ID NO: 1886519 - RNA, 19 nt, Homo sapiens
  misc_RNA (1)...(19): siRNA sense strand
gaacauuugagucguuuau

SEQ ID NO: 1886520 - RNA, 19 nt, Homo sapiens
  misc_RNA (1)...(19): siRNA sense strand
aggcuaagcugaaagaaau

SEQ ID NO: 1886521 - RNA, 19 nt, Homo sapiens
  misc_RNA (1)...(19): siRNA sense strand
guacucauuucacacauuc

SEQ ID NO: 1886522 - RNA, 19 nt, Homo sapiens
  misc_RNA (1)...(19): siRNA sense strand
ucaaaccugcuccaauuua

SEQ ID NO: 1886523 - RNA, 19 nt, Homo sapiens
  misc_RNA (1)...(19): siRNA sense strand
gaagaagagaauuguagaa

SEQ ID NO: 1886524 - RNA, 19 nt, Homo sapiens
  misc_RNA (1)...(19): siRNA sense strand
ugagagcuaugaauguauu

SEQ ID NO: 1886525 - RNA, 19 nt, Homo sapiens
  misc_RNA (1)...(19): siRNA sense strand
gcaacaagaagaauuagau

SEQ ID NO: 1886526 - RNA, 19 nt, Homo sapiens
  misc_RNA (1)...(19): siRNA sense strand
agaaacauaugaagcucua

SEQ ID NO: 1886527 - RNA, 19 nt, Homo sapiens
  misc_RNA (1)...(19): siRNA sense strand
gcucagcgaguuaauacua

SEQ ID NO: 1886528 - RNA, 19 nt, Homo sapiens
  misc_RNA (1)...(19): siRNA sense strand
guucaacaaugcaaacguu

SEQ ID NO: 1886529 - RNA, 19 nt, Homo sapiens
  misc_RNA (1)...(19): siRNA sense strand
uaauaaagaugcugaagcu

SEQ ID NO: 1886530 - RNA, 19 nt, Homo sapiens
  misc_RNA (1)...(19): siRNA sense strand
gaauauaaaccagaacuuc

SEQ ID NO: 1886531 - RNA, 19 nt, Homo sapiens
  misc_RNA (1)...(19): siRNA sense strand
ggaugguguuucuacagua

SEQ ID NO: 1886532 - RNA, 19 nt, Homo sapiens
  misc_RNA (1)...(19): siRNA sense strand
gaaaugaaggagaaacuag

SEQ ID NO: 1886533 - RNA, 19 nt, Homo sapiens
  misc_RNA (1)...(19): siRNA sense strand
gcaaagcucauaucacaag

SEQ ID NO: 1886534 - RNA, 19 nt, Homo sapiens
  misc_RNA (1)...(19): siRNA sense strand
ucuguuggccuuaauguua

SEQ ID NO: 1886535 - RNA, 19 nt, Homo sapiens
  misc_RNA (1)...(19): siRNA sense strand
gagaaacuaggaagaaaug

SEQ ID NO: 1886536 - RNA, 19 nt, Homo sapiens
  misc_RNA (1)...(19): siRNA sense strand
gaaagagagcgagaacuga

SEQ ID NO: 1886537 - RNA, 19 nt, Homo sapiens
  misc_RNA (1)...(19): siRNA sense strand
ccaaacaggcucagaugaa

SEQ ID NO: 1886538 - RNA, 19 nt, Homo sapiens
  misc_RNA (1)...(19): siRNA sense strand
gucaaaugauggccuguaa

SEQ ID NO: 1886539 - RNA, 19 nt, Homo sapiens
  misc_RNA (1)...(19): siRNA sense strand
ggcugaagauaccaaagua

SEQ ID NO: 1886540 - RNA, 19 nt, Homo sapiens
  misc_RNA (1)...(19): siRNA sense strand
acuugaagcugaaaugaaa

SEQ ID NO: 1886541 - RNA, 19 nt, Homo sapiens
  misc_RNA (1)...(19): siRNA sense strand
guagccagauuuacucaau

SEQ ID NO: 1886542 - RNA, 19 nt, Homo sapiens
  misc_RNA (1)...(19): siRNA sense strand
gaugcagccuuggaucuuu

SEQ ID NO: 1886543 - RNA, 19 nt, Homo sapiens
  misc_RNA (1)...(19): siRNA sense strand
gcgaugcaaugacuugaug

SEQ ID NO: 1886544 - RNA, 19 nt, Homo sapiens
  misc_RNA (1)...(19): siRNA sense strand
uaacaacccuaaagaagcu

SEQ ID NO: 1886545 - RNA, 19 nt, Homo sapiens
  misc_RNA (1)...(19): siRNA sense strand
gcccaagacacuguaauua

SEQ ID NO: 1886546 - RNA, 19 nt, Homo sapiens
  misc_RNA (1)...(19): siRNA sense strand
gcagauuuauuacaaacca

SEQ ID NO: 1886547 - RNA, 19 nt, Homo sapiens
  misc_RNA (1)...(19): siRNA sense strand
agaggcagauuuauuacaa

SEQ ID NO: 1886548 - RNA, 19 nt, Homo sapiens
  misc_RNA (1)...(19): siRNA sense strand
aaacagcagugggagauga

SEQ ID NO: 1886549 - RNA, 19 nt, Homo sapiens
  misc_RNA (1)...(19): siRNA sense strand
agaaagcaauggaguuugu

SEQ ID NO: 1886550 - RNA, 19 nt, Homo sapiens
  misc_RNA (1)...(19): siRNA sense strand
caaggcaggugguuauugg

SEQ ID NO: 1886551 - RNA, 19 nt, Homo sapiens
  misc_RNA (1)...(19): siRNA sense strand
gaagaggugaccaagcaaa

SEQ ID NO: 1886552 - RNA, 19 nt, Homo sapiens
  misc_RNA (1)...(19): siRNA sense strand
aagaagaggugaccaagca

SEQ ID NO: 1886553 - RNA, 19 nt, Homo sapiens
  misc_RNA (1)...(19): siRNA sense strand
aaacugaagaggcagauuu

SEQ ID NO: 1886554 - RNA, 19 nt, Homo sapiens
  misc_RNA (1)...(19): siRNA sense strand
caaagaagcuguugcaaug

SEQ ID NO: 1886555 - RNA, 19 nt, Homo sapiens
  misc_RNA (1)...(19): siRNA sense strand
gaaauugccucuaccuuug

SEQ ID NO: 1886556 - RNA, 19 nt, Homo sapiens
  misc_RNA (1)...(19): siRNA sense strand
ggagaaaguugaacguauu

SEQ ID NO: 1886557 - RNA, 19 nt, Homo sapiens
  misc_RNA (1)...(19): siRNA sense strand
gaagcagaaucuuuaauug

SEQ ID NO: 1886558 - RNA, 19 nt, Homo sapiens
  misc_RNA (1)...(19): siRNA sense strand
ugacacagcuugccaauag

SEQ ID NO: 1886559 - RNA, 19 nt, Homo sapiens
  misc_RNA (1)...(19): siRNA sense strand
ggaggaggcuguucugaga

SEQ ID NO: 1886560 - RNA, 19 nt, Homo sapiens
  misc_RNA (1)...(19): siRNA sense strand
gcaauggagucuuaugcua

SEQ ID NO: 1886561 - RNA, 19 nt, Homo sapiens
  misc_RNA (1)...(19): siRNA sense strand
gaaguuaaauuccgucaag

SEQ ID NO: 1886562 - RNA, 19 nt, Homo sapiens
  misc_RNA (1)...(19): siRNA sense strand
ggaagcagaaucuuuaauu

SEQ ID NO: 1886563 - RNA, 19 nt, Homo sapiens
  misc_RNA (1)...(19): siRNA sense strand
gcacaacauuauccucaaa

SEQ ID NO: 1886564 - RNA, 19 nt, Homo sapiens
  misc_RNA (1)...(19): siRNA sense strand
caucauagcugacaaugca

SEQ ID NO: 1886565 - RNA, 19 nt, Homo sapiens
  misc_RNA (1)...(19): siRNA sense strand
aaaguuagcuguagaagca

SEQ ID NO: 1886566 - RNA, 19 nt, Homo sapiens
  misc_RNA (1)...(19): siRNA sense strand
gcagauuccuauuuagaug

SEQ ID NO: 1886567 - RNA, 19 nt, Homo sapiens
  misc_RNA (1)...(19): siRNA sense strand
ggaggaaguuuggcagauu

SEQ ID NO: 1886568 - RNA, 19 nt, Homo sapiens
  misc_RNA (1)...(19): siRNA sense strand
ggaaacgugucccugauca

SEQ ID NO: 1886569 - RNA, 19 nt, Homo sapiens
  misc_RNA (1)...(19): siRNA sense strand
guaaaggacucuagaacag

SEQ ID NO: 1886570 - RNA, 19 nt, Homo sapiens
  misc_RNA (1)...(19): siRNA sense strand
gcucagggcugcucacagu

SEQ ID NO: 1886571 - RNA, 19 nt, Homo sapiens
  misc_RNA (1)...(19): siRNA sense strand
cagcucgucugacuucuuu

SEQ ID NO: 1886572 - RNA, 19 nt, Homo sapiens
  misc_RNA (1)...(19): siRNA sense strand
ugucaaggguucaagauga

SEQ ID NO: 1886573 - RNA, 19 nt, Homo sapiens
  misc_RNA (1)...(19): siRNA sense strand
ugaaauugccucuaccuuu

SEQ ID NO: 1886574 - RNA, 19 nt, Homo sapiens
  misc_RNA (1)...(19): siRNA sense strand
ggcaggagcugaugaagag

SEQ ID NO: 1886575 - RNA, 19 nt, Homo sapiens
  misc_RNA (1)...(19): siRNA sense strand
gaaggcaccauuggagaua

SEQ ID NO: 1886576 - RNA, 19 nt, Homo sapiens
  misc_RNA (1)...(19): siRNA sense strand
cuaaagcacugagaauguu

SEQ ID NO: 1886577 - RNA, 19 nt, Homo sapiens
  misc_RNA (1)...(19): siRNA sense strand
gauggugccacuauucuaa

SEQ ID NO: 1886578 - RNA, 19 nt, Homo sapiens
  misc_RNA (1)...(19): siRNA sense strand
uuuggcagauuccuauuua

SEQ ID NO: 1886579 - RNA, 19 nt, Homo sapiens
  misc_RNA (1)...(19): siRNA sense strand
gcagaaucuuuaauugcaa

SEQ ID NO: 1886580 - RNA, 19 nt, Homo sapiens
  misc_RNA (1)...(19): siRNA sense strand
ggaggcaauucauauuauc

SEQ ID NO: 1886581 - RNA, 19 nt, Homo sapiens
  misc_RNA (1)...(19): siRNA sense strand
gcaauaccacugcuggauu

SEQ ID NO: 1886582 - RNA, 19 nt, Homo sapiens
  misc_RNA (1)...(19): siRNA sense strand
gaggaaguuuggcagauuc

SEQ ID NO: 1886583 - RNA, 19 nt, Homo sapiens
  misc_RNA (1)...(19): siRNA sense strand
gaagcuaggaggaaguuug

SEQ ID NO: 1886584 - RNA, 19 nt, Homo sapiens
  misc_RNA (1)...(19): siRNA sense strand
caauagaacaccaggcaaa

SEQ ID NO: 1886585 - RNA, 19 nt, Homo sapiens
  misc_RNA (1)...(19): siRNA sense strand
caauggagucuuaugcuaa

SEQ ID NO: 1886586 - RNA, 19 nt, Homo sapiens
  misc_RNA (1)...(19): siRNA sense strand
aagggaagcagaaucuuua

SEQ ID NO: 1886587 - RNA, 19 nt, Homo sapiens
  misc_RNA (1)...(19): siRNA sense strand
aaaggacucuagaacaguu

SEQ ID NO: 1886588 - RNA, 19 nt, Homo sapiens
  misc_RNA (1)...(19): siRNA sense strand
uaagggaagcagaaucuuu

SEQ ID NO: 1886589 - RNA, 19 nt, Homo sapiens
  misc_RNA (1)...(19): siRNA sense strand
gaaaguugaacguauucuu

SEQ ID NO: 1886590 - RNA, 19 nt, Homo sapiens
  misc_RNA (1)...(19): siRNA sense strand
cuauugagcaugcagauuu

SEQ ID NO: 1886591 - RNA, 19 nt, Homo sapiens
  misc_RNA (1)...(19): siRNA sense strand
gcuaaagcacugagaaugu

SEQ ID NO: 1886592 - RNA, 19 nt, Homo sapiens
  misc_RNA (1)...(19): siRNA sense strand
ggugaggcuuguaccauug

SEQ ID NO: 1886593 - RNA, 19 nt, Homo sapiens
  misc_RNA (1)...(19): siRNA sense strand
ggagaagacaaacucauuc

SEQ ID NO: 1886594 - RNA, 19 nt, Homo sapiens
  misc_RNA (1)...(19): siRNA sense strand
gaagacaaacucauucacu

SEQ ID NO: 1886595 - RNA, 19 nt, Homo sapiens
  misc_RNA (1)...(19): siRNA sense strand
gaaguuuggcagauuccua

SEQ ID NO: 1886596 - RNA, 19 nt, Homo sapiens
  misc_RNA (1)...(19): siRNA sense strand
aagacaaacucauucacuu

SEQ ID NO: 1886597 - RNA, 19 nt, Homo sapiens
  misc_RNA (1)...(19): siRNA sense strand
caaugauggugccacuauu

SEQ ID NO: 1886598 - RNA, 19 nt, Homo sapiens
  misc_RNA (1)...(19): siRNA sense strand
aauggagucuuaugcuaaa

SEQ ID NO: 1886599 - RNA, 19 nt, Homo sapiens
  misc_RNA (1)...(19): siRNA sense strand
agacaaacucauucacuuu

SEQ ID NO: 1886600 - RNA, 19 nt, Homo sapiens
  misc_RNA (1)...(19): siRNA sense strand
gagaagacaaacucauuca

SEQ ID NO: 1886601 - RNA, 19 nt, Homo sapiens
  misc_RNA (1)...(19): siRNA sense strand
guuaaauuccgucaagauu

SEQ ID NO: 1886602 - RNA, 19 nt, Homo sapiens
  misc_RNA (1)...(19): siRNA sense strand
gcuguugaguucugcaguu

SEQ ID NO: 1886603 - RNA, 19 nt, Homo sapiens
  misc_RNA (1)...(19): siRNA sense strand
gaaauagaacaugcggaaa

SEQ ID NO: 1886604 - RNA, 19 nt, Homo sapiens
  misc_RNA (1)...(19): siRNA sense strand
ccaaugauggugccacuau

SEQ ID NO: 1886605 - RNA, 19 nt, Homo sapiens
  misc_RNA (1)...(19): siRNA sense strand
gaacuggugaagcuuggaa

SEQ ID NO: 1886606 - RNA, 19 nt, Homo sapiens
  misc_RNA (1)...(19): siRNA sense strand
uggaggcaauucauauuau

SEQ ID NO: 1886607 - RNA, 19 nt, Homo sapiens
  misc_RNA (1)...(19): siRNA sense strand
ccucaaaacuucuuacuca

SEQ ID NO: 1886608 - RNA, 19 nt, Homo sapiens
  misc_RNA (1)...(19): siRNA sense strand
gaauauugcgggcacaaca

SEQ ID NO: 1886609 - RNA, 19 nt, Homo sapiens
  misc_RNA (1)...(19): siRNA sense strand
caaagcggcacccaggaaa

SEQ ID NO: 1886610 - RNA, 19 nt, Homo sapiens
  misc_RNA (1)...(19): siRNA sense strand
agaugccucucuuauggua

SEQ ID NO: 1886611 - RNA, 19 nt, Homo sapiens
  misc_RNA (1)...(19): siRNA sense strand
ggaaggcaccauuggagau

SEQ ID NO: 1886612 - RNA, 19 nt, Homo sapiens
  misc_RNA (1)...(19): siRNA sense strand
uagaacaccaggcaaagaa

SEQ ID NO: 1886613 - RNA, 19 nt, Homo sapiens
  misc_RNA (1)...(19): siRNA sense strand
gauggcacuaccucuguua

SEQ ID NO: 1886614 - RNA, 19 nt, Homo sapiens
  misc_RNA (1)...(19): siRNA sense strand
caaaacuucuuacucauca

SEQ ID NO: 1886615 - RNA, 19 nt, Homo sapiens
  misc_RNA (1)...(19): siRNA sense strand
aaagguugcagaaauagaa

SEQ ID NO: 1886616 - RNA, 19 nt, Homo sapiens
  misc_RNA (1)...(19): siRNA sense strand
ggacaaaauucuucuaagc

SEQ ID NO: 1886617 - RNA, 19 nt, Homo sapiens
  misc_RNA (1)...(19): siRNA sense strand
ccaaaggcauggacaaaau

SEQ ID NO: 1886618 - RNA, 19 nt, Homo sapiens
  misc_RNA (1)...(19): siRNA sense strand
aggagaaaguugaacguau

SEQ ID NO: 1886619 - RNA, 19 nt, Homo sapiens
  misc_RNA (1)...(19): siRNA sense strand
aagaagcuguugcaaugga

SEQ ID NO: 1886620 - RNA, 19 nt, Homo sapiens
  misc_RNA (1)...(19): siRNA sense strand
gaacgccuagcucuuguca

SEQ ID NO: 1886621 - RNA, 19 nt, Homo sapiens
  misc_RNA (1)...(19): siRNA sense strand
caauccagcagcuaaaguu

SEQ ID NO: 1886622 - RNA, 19 nt, Homo sapiens
  misc_RNA (1)...(19): siRNA sense strand
gcaccuguuaacaucuuua

SEQ ID NO: 1886623 - RNA, 19 nt, Homo sapiens
  misc_RNA (1)...(19): siRNA sense strand
uggugaagcuuggaaguug

SEQ ID NO: 1886624 - RNA, 19 nt, Homo sapiens
  misc_RNA (1)...(19): siRNA sense strand
cuguugcaauggagucuua

SEQ ID NO: 1886625 - RNA, 19 nt, Homo sapiens
  misc_RNA (1)...(19): siRNA sense strand
ucaagaugaugaaguuggu

SEQ ID NO: 1886626 - RNA, 19 nt, Homo sapiens
  misc_RNA (1)...(19): siRNA sense strand
ugucauggcuauugagcau

SEQ ID NO: 1886627 - RNA, 19 nt, Homo sapiens
  misc_RNA (1)...(19): siRNA sense strand
gagaaaguugaacguauuc

SEQ ID NO: 1886628 - RNA, 19 nt, Homo sapiens
  misc_RNA (1)...(19): siRNA sense strand
cuggaggcaauucauauua

SEQ ID NO: 1886629 - RNA, 19 nt, Homo sapiens
  misc_RNA (1)...(19): siRNA sense strand
ccgucaagauuuaaugaau

SEQ ID NO: 1886630 - RNA, 19 nt, Homo sapiens
  misc_RNA (1)...(19): siRNA sense strand
guggugaaauugccucuac

SEQ ID NO: 1886631 - RNA, 19 nt, Homo sapiens
  misc_RNA (1)...(19): siRNA sense strand
acgccuagcucuugucaca

SEQ ID NO: 1886632 - RNA, 19 nt, Homo sapiens
  misc_RNA (1)...(19): siRNA sense strand
aaaugaaggagaaaguuga

SEQ ID NO: 1886633 - RNA, 19 nt, Homo sapiens
  misc_RNA (1)...(19): siRNA sense strand
guugaguucugcaguugau

SEQ ID NO: 1886634 - RNA, 19 nt, Homo sapiens
  misc_RNA (1)...(19): siRNA sense strand
ugaagcagcagaggugauu

SEQ ID NO: 1886635 - RNA, 19 nt, Homo sapiens
  misc_RNA (1)...(19): siRNA sense strand
ugaagcagaaagaucauug

SEQ ID NO: 1886636 - RNA, 19 nt, Homo sapiens
  misc_RNA (1)...(19): siRNA sense strand
uggagaagacaaacucauu

SEQ ID NO: 1886637 - RNA, 19 nt, Homo sapiens
  misc_RNA (1)...(19): siRNA sense strand
ggcacaacauuauccucaa

SEQ ID NO: 1886638 - RNA, 19 nt, Homo sapiens
  misc_RNA (1)...(19): siRNA sense strand
gucaaggguucaagaugau

SEQ ID NO: 1886639 - RNA, 19 nt, Homo sapiens
  misc_RNA (1)...(19): siRNA sense strand
ucaaagcggcacccaggaa

SEQ ID NO: 1886640 - RNA, 19 nt, Homo sapiens
  misc_RNA (1)...(19): siRNA sense strand
gacacagcuugccaauaga

SEQ ID NO: 1886641 - RNA, 19 nt, Homo sapiens
  misc_RNA (1)...(19): siRNA sense strand
agaugaagcagaaagauca

SEQ ID NO: 1886642 - RNA, 19 nt, Homo sapiens
  misc_RNA (1)...(19): siRNA sense strand
uaucgaggaagucaugauu

SEQ ID NO: 1886643 - RNA, 19 nt, Homo sapiens
  misc_RNA (1)...(19): siRNA sense strand
gcauggaauaaauugcuuu

SEQ ID NO: 1886644 - RNA, 19 nt, Homo sapiens
  misc_RNA (1)...(19): siRNA sense strand
ugacaauccagcagcuaaa

SEQ ID NO: 1886645 - RNA, 19 nt, Homo sapiens
  misc_RNA (1)...(19): siRNA sense strand
gagggaaggcaccauugga

SEQ ID NO: 1886646 - RNA, 19 nt, Homo sapiens
  misc_RNA (1)...(19): siRNA sense strand
caucgccauuggagacuug

SEQ ID NO: 1886647 - RNA, 19 nt, Homo sapiens
  misc_RNA (1)...(19): siRNA sense strand
ucgaggaagucaugauugg

SEQ ID NO: 1886648 - RNA, 19 nt, Homo sapiens
  misc_RNA (1)...(19): siRNA sense strand
caaaacgaauugaaaaugc

SEQ ID NO: 1886649 - RNA, 19 nt, Homo sapiens
  misc_RNA (1)...(19): siRNA sense strand
caaccaaaacgaauugaaa

SEQ ID NO: 1886650 - RNA, 19 nt, Homo sapiens
  misc_RNA (1)...(19): siRNA sense strand
aaggcuuccuguuggauaa

SEQ ID NO: 1886651 - RNA, 19 nt, Homo sapiens
  misc_RNA (1)...(19): siRNA sense strand
uaccuuugaucacccagaa

SEQ ID NO: 1886652 - RNA, 19 nt, Homo sapiens
  misc_RNA (1)...(19): siRNA sense strand
guucuugcgcaaacuguaa

SEQ ID NO: 1886653 - RNA, 19 nt, Homo sapiens
  misc_RNA (1)...(19): siRNA sense strand
gaugcucuuuguguucuug

SEQ ID NO: 1886654 - RNA, 19 nt, Homo sapiens
  misc_RNA (1)...(19): siRNA sense strand
ggaccgcgcuuugggagua

SEQ ID NO: 1886655 - RNA, 19 nt, Homo sapiens
  misc_RNA (1)...(19): siRNA sense strand
gcaaggaugagcucuuuga

SEQ ID NO: 1886656 - RNA, 19 nt, Homo sapiens
  misc_RNA (1)...(19): siRNA sense strand
gcugagagcuucggcuuca

SEQ ID NO: 1886657 - RNA, 19 nt, Homo sapiens
  misc_RNA (1)...(19): siRNA sense strand
ccaaccagcuggacaccaa

SEQ ID NO: 1886658 - RNA, 19 nt, Homo sapiens
  misc_RNA (1)...(19): siRNA sense strand
gcuacacgcuggaguucaa

SEQ ID NO: 1886659 - RNA, 19 nt, Homo sapiens
  misc_RNA (1)...(19): siRNA sense strand
ggacuucgucuucgaguuc

SEQ ID NO: 1886660 - RNA, 19 nt, Homo sapiens
  misc_RNA (1)...(19): siRNA sense strand
uggcaaggaugagcucuuu

SEQ ID NO: 1886661 - RNA, 19 nt, Homo sapiens
  misc_RNA (1)...(19): siRNA sense strand
aggaugagcucuuugaucu

SEQ ID NO: 1886662 - RNA, 19 nt, Homo sapiens
  misc_RNA (1)...(19): siRNA sense strand
ccacgagaccuuccugaug

SEQ ID NO: 1886663 - RNA, 19 nt, Homo sapiens
  misc_RNA (1)...(19): siRNA sense strand
cgacgguacugccucaagu

SEQ ID NO: 1886664 - RNA, 19 nt, Homo sapiens
  misc_RNA (1)...(19): siRNA sense strand
aaauugaccaggagacaaa

SEQ ID NO: 1886665 - RNA, 19 nt, Homo sapiens
  misc_RNA (1)...(19): siRNA sense strand
gcaaauugaccaggagaca

SEQ ID NO: 1886666 - RNA, 19 nt, Homo sapiens
  misc_RNA (1)...(19): siRNA sense strand
cgggcaagcuggccuucaa

SEQ ID NO: 1886667 - RNA, 19 nt, Homo sapiens
  misc_RNA (1)...(19): siRNA sense strand
agaccuuccugaugcaaau

SEQ ID NO: 1886668 - RNA, 19 nt, Homo sapiens
  misc_RNA (1)...(19): siRNA sense strand
gacggaggguucugguaca

SEQ ID NO: 1886669 - RNA, 19 nt, Homo sapiens
  misc_RNA (1)...(19): siRNA sense strand
cggcaaggacgaagaguuc

SEQ ID NO: 1886670 - RNA, 19 nt, Homo sapiens
  misc_RNA (1)...(19): siRNA sense strand
acgaagaguucacccucaa

SEQ ID NO: 1886671 - RNA, 19 nt, Homo sapiens
  misc_RNA (1)...(19): siRNA sense strand
ggucaacgucucagccaau

SEQ ID NO: 1886672 - RNA, 19 nt, Homo sapiens
  misc_RNA (1)...(19): siRNA sense strand
caaauugaccaggagacaa

SEQ ID NO: 1886673 - RNA, 19 nt, Homo sapiens
  misc_RNA (1)...(19): siRNA sense strand
cgccacagccacacaaguu

SEQ ID NO: 1886674 - RNA, 19 nt, Homo sapiens
  misc_RNA (1)...(19): siRNA sense strand
uggcggcuaucagcgauuu

SEQ ID NO: 1886675 - RNA, 19 nt, Homo sapiens
  misc_RNA (1)...(19): siRNA sense strand
ggaacccgacccaggacaa

SEQ ID NO: 1886676 - RNA, 19 nt, Homo sapiens
  misc_RNA (1)...(19): siRNA sense strand
gccacagccacacaaguuu

SEQ ID NO: 1886677 - RNA, 19 nt, Homo sapiens
  misc_RNA (1)...(19): siRNA sense strand
ccacagccacacaaguuuc

SEQ ID NO: 1886678 - RNA, 19 nt, Homo sapiens
  misc_RNA (1)...(19): siRNA sense strand
ucaggaugaugaacuagac

SEQ ID NO: 1886679 - RNA, 19 nt, Homo sapiens
  misc_RNA (1)...(19): siRNA sense strand
gugcugaagauccaguuug

SEQ ID NO: 1886680 - RNA, 19 nt, Homo sapiens
  misc_RNA (1)...(19): siRNA sense strand
agacaaagaagugcaccuu

SEQ ID NO: 1886681 - RNA, 19 nt, Homo sapiens
  misc_RNA (1)...(19): siRNA sense strand
acacaaguuucugccaaca

SEQ ID NO: 1886682 - RNA, 19 nt, Homo sapiens
  misc_RNA (1)...(19): siRNA sense strand
gagaccuuccugaugcaaa

SEQ ID NO: 1886683 - RNA, 19 nt, Homo sapiens
  misc_RNA (1)...(19): siRNA sense strand
gaccaggagacaaagaagu

SEQ ID NO: 1886684 - RNA, 19 nt, Homo sapiens
  misc_RNA (1)...(19): siRNA sense strand
cacgcgaccuggcaaggau

SEQ ID NO: 1886685 - RNA, 19 nt, Homo sapiens
  misc_RNA (1)...(19): siRNA sense strand
ccgaggacuucgucuucga

SEQ ID NO: 1886686 - RNA, 19 nt, Homo sapiens
  misc_RNA (1)...(19): siRNA sense strand
caacgucucagccaaucag

SEQ ID NO: 1886687 - RNA, 19 nt, Homo sapiens
  misc_RNA (1)...(19): siRNA sense strand
gaggaucucauaacauuua

SEQ ID NO: 1886688 - RNA, 19 nt, Homo sapiens
  misc_RNA (1)...(19): siRNA sense strand
gaauguacuucaucugguu

SEQ ID NO: 1886689 - RNA, 19 nt, Homo sapiens
  misc_RNA (1)...(19): siRNA sense strand
gaaauuccaugaucuugcu

SEQ ID NO: 1886690 - RNA, 19 nt, Homo sapiens
  misc_RNA (1)...(19): siRNA sense strand
uccaugaucuugcuuauuc

SEQ ID NO: 1886691 - RNA, 19 nt, Homo sapiens
  misc_RNA (1)...(19): siRNA sense strand
caggagaaauuccaugauc

SEQ ID NO: 1886692 - RNA, 19 nt, Homo sapiens
  misc_RNA (1)...(19): siRNA sense strand
ggagaaauuccaugaucuu

SEQ ID NO: 1886693 - RNA, 19 nt, Homo sapiens
  misc_RNA (1)...(19): siRNA sense strand
gagaaauuccaugaucuug

SEQ ID NO: 1886694 - RNA, 19 nt, Homo sapiens
  misc_RNA (1)...(19): siRNA sense strand
acauuuaacuugaggaacu

SEQ ID NO: 1886695 - RNA, 19 nt, Homo sapiens
  misc_RNA (1)...(19): siRNA sense strand
ccaggcagcacaagccauu

SEQ ID NO: 1886696 - RNA, 19 nt, Homo sapiens
  misc_RNA (1)...(19): siRNA sense strand
ugucuaaccaagaucuaua

SEQ ID NO: 1886697 - RNA, 19 nt, Homo sapiens
  misc_RNA (1)...(19): siRNA sense strand
gcuauagcaccagcucuuu

SEQ ID NO: 1886698 - RNA, 19 nt, Homo sapiens
  misc_RNA (1)...(19): siRNA sense strand
ugugauggcuccucagcau

SEQ ID NO: 1886699 - RNA, 19 nt, Homo sapiens
  misc_RNA (1)...(19): siRNA sense strand
ugauggcuccucagcauga

SEQ ID NO: 1886700 - RNA, 19 nt, Homo sapiens
  misc_RNA (1)...(19): siRNA sense strand
ggcuuggcauggcuaaguu

SEQ ID NO: 1886701 - RNA, 19 nt, Homo sapiens
  misc_RNA (1)...(19): siRNA sense strand
agcaugaucaggagaaauu

SEQ ID NO: 1886702 - RNA, 19 nt, Homo sapiens
  misc_RNA (1)...(19): siRNA sense strand
cuccaugucuaaccaagau

SEQ ID NO: 1886703 - RNA, 19 nt, Homo sapiens
  misc_RNA (1)...(19): siRNA sense strand
ucagcaugaucaggagaaa

SEQ ID NO: 1886704 - RNA, 19 nt, Homo sapiens
  misc_RNA (1)...(19): siRNA sense strand
ugggcuggauucccucuga

SEQ ID NO: 1886705 - RNA, 19 nt, Homo sapiens
  misc_RNA (1)...(19): siRNA sense strand
caccagcucuuuggcucuu

SEQ ID NO: 1886706 - RNA, 19 nt, Homo sapiens
  misc_RNA (1)...(19): siRNA sense strand
cauuuaacuugaggaacuu

SEQ ID NO: 1886707 - RNA, 19 nt, Homo sapiens
  misc_RNA (1)...(19): siRNA sense strand
ccacucaggaccucucaag

SEQ ID NO: 1886708 - RNA, 19 nt, Homo sapiens
  misc_RNA (1)...(19): siRNA sense strand
aggagaaauuccaugaucu

SEQ ID NO: 1886709 - RNA, 19 nt, Homo sapiens
  misc_RNA (1)...(19): siRNA sense strand
aaacaacccucaugacuaa

SEQ ID NO: 1886710 - RNA, 19 nt, Homo sapiens
  misc_RNA (1)...(19): siRNA sense strand
gaaaugggcuaguguuuua

SEQ ID NO: 1886711 - RNA, 19 nt, Homo sapiens
  misc_RNA (1)...(19): siRNA sense strand
gagcagguguuccuaauga

SEQ ID NO: 1886712 - RNA, 19 nt, Homo sapiens
  misc_RNA (1)...(19): siRNA sense strand
gaagaagguugucaagguu

SEQ ID NO: 1886713 - RNA, 19 nt, Homo sapiens
  misc_RNA (1)...(19): siRNA sense strand
ggaaguuugugaaagauuu

SEQ ID NO: 1886714 - RNA, 19 nt, Homo sapiens
  misc_RNA (1)...(19): siRNA sense strand
guauggagcugccuugauu

SEQ ID NO: 1886715 - RNA, 19 nt, Homo sapiens
  misc_RNA (1)...(19): siRNA sense strand
gaagaggccuagaauaucu

SEQ ID NO: 1886716 - RNA, 19 nt, Homo sapiens
  misc_RNA (1)...(19): siRNA sense strand
acaaaggccugcugaaauu

SEQ ID NO: 1886717 - RNA, 19 nt, Homo sapiens
  misc_RNA (1)...(19): siRNA sense strand
acaaugugcugacucauaa

SEQ ID NO: 1886718 - RNA, 19 nt, Homo sapiens
  misc_RNA (1)...(19): siRNA sense strand
gauggaaucucugcagaaa

SEQ ID NO: 1886719 - RNA, 19 nt, Homo sapiens
  misc_RNA (1)...(19): siRNA sense strand
gaacggaaguuugugaaag

SEQ ID NO: 1886720 - RNA, 19 nt, Homo sapiens
  misc_RNA (1)...(19): siRNA sense strand
gaagaacuggauagaauga

SEQ ID NO: 1886721 - RNA, 19 nt, Homo sapiens
  misc_RNA (1)...(19): siRNA sense strand
ugaagaagguugucaaggu

SEQ ID NO: 1886722 - RNA, 19 nt, Homo sapiens
  misc_RNA (1)...(19): siRNA sense strand
gaugagcauuuggacuuua

SEQ ID NO: 1886723 - RNA, 19 nt, Homo sapiens
  misc_RNA (1)...(19): siRNA sense strand
gacaaugugcugacucaua

SEQ ID NO: 1886724 - RNA, 19 nt, Homo sapiens
  misc_RNA (1)...(19): siRNA sense strand
guaacaaacucuucaacag

SEQ ID NO: 1886725 - RNA, 19 nt, Homo sapiens
  misc_RNA (1)...(19): siRNA sense strand
cacgagagcuucugaaucu

SEQ ID NO: 1886726 - RNA, 19 nt, Homo sapiens
  misc_RNA (1)...(19): siRNA sense strand
uggaaucucugcagaaaug

SEQ ID NO: 1886727 - RNA, 19 nt, Homo sapiens
  misc_RNA (1)...(19): siRNA sense strand
acacaucagugaaagaaga

SEQ ID NO: 1886728 - RNA, 19 nt, Homo sapiens
  misc_RNA (1)...(19): siRNA sense strand
caccacaccugccuuaguu

SEQ ID NO: 1886729 - RNA, 19 nt, Homo sapiens
  misc_RNA (1)...(19): siRNA sense strand
gaaagcugguccacgacaa

SEQ ID NO: 1886730 - RNA, 19 nt, Homo sapiens
  misc_RNA (1)...(19): siRNA sense strand
uaacaaacucuucaacaga

SEQ ID NO: 1886731 - RNA, 19 nt, Homo sapiens
  misc_RNA (1)...(19): siRNA sense strand
ggacugugauggaaucucu

SEQ ID NO: 1886732 - RNA, 19 nt, Homo sapiens
  misc_RNA (1)...(19): siRNA sense strand
aggaagaacuggauagaau

SEQ ID NO: 1886733 - RNA, 19 nt, Homo sapiens
  misc_RNA (1)...(19): siRNA sense strand
ugucaaauguucaggaaga

SEQ ID NO: 1886734 - RNA, 19 nt, Homo sapiens
  misc_RNA (1)...(19): siRNA sense strand
ggaugagcauuuggacuuu

SEQ ID NO: 1886735 - RNA, 19 nt, Homo sapiens
  misc_RNA (1)...(19): siRNA sense strand
ggagcugccuugauuuaca

SEQ ID NO: 1886736 - RNA, 19 nt, Homo sapiens
  misc_RNA (1)...(19): siRNA sense strand
ccacaaaggccugcugaaa

SEQ ID NO: 1886737 - RNA, 19 nt, Homo sapiens
  misc_RNA (1)...(19): siRNA sense strand
gccaagaagucaggacaaa

SEQ ID NO: 1886738 - RNA, 19 nt, Homo sapiens
  misc_RNA (1)...(19): siRNA sense strand
gccggaagaugcauaugaa

SEQ ID NO: 1886739 - RNA, 19 nt, Homo sapiens
  misc_RNA (1)...(19): siRNA sense strand
gaagaugguucugguaaaa

SEQ ID NO: 1886740 - RNA, 19 nt, Homo sapiens
  misc_RNA (1)...(19): siRNA sense strand
ccagagacccucgucauuu

SEQ ID NO: 1886741 - RNA, 19 nt, Homo sapiens
  misc_RNA (1)...(19): siRNA sense strand
ccucaugacuaaacuacaa

SEQ ID NO: 1886742 - RNA, 19 nt, Homo sapiens
  misc_RNA (1)...(19): siRNA sense strand
ugaagaugguucugguaaa

SEQ ID NO: 1886743 - RNA, 19 nt, Homo sapiens
  misc_RNA (1)...(19): siRNA sense strand
aacaaacucuucaacagaa

SEQ ID NO: 1886744 - RNA, 19 nt, Homo sapiens
  misc_RNA (1)...(19): siRNA sense strand
ggaagaggccuagaauauc

SEQ ID NO: 1886745 - RNA, 19 nt, Homo sapiens
  misc_RNA (1)...(19): siRNA sense strand
ugugaaaccucccgugaga

SEQ ID NO: 1886746 - RNA, 19 nt, Homo sapiens
  misc_RNA (1)...(19): siRNA sense strand
uuacagggaugagcauuug

SEQ ID NO: 1886747 - RNA, 19 nt, Homo sapiens
  misc_RNA (1)...(19): siRNA sense strand
gcugaauccuugccagaga

SEQ ID NO: 1886748 - RNA, 19 nt, Homo sapiens
  misc_RNA (1)...(19): siRNA sense strand
gauucuggauggagacuug

SEQ ID NO: 1886749 - RNA, 19 nt, Homo sapiens
  misc_RNA (1)...(19): siRNA sense strand
cagacucuaugguaacaaa

SEQ ID NO: 1886750 - RNA, 19 nt, Homo sapiens
  misc_RNA (1)...(19): siRNA sense strand
gggaugagcauuuggacuu

SEQ ID NO: 1886751 - RNA, 19 nt, Homo sapiens
  misc_RNA (1)...(19): siRNA sense strand
ggaagaacuggauagaaug

SEQ ID NO: 1886752 - RNA, 19 nt, Homo sapiens
  misc_RNA (1)...(19): siRNA sense strand
gcagaaaugggcuaguguu

SEQ ID NO: 1886753 - RNA, 19 nt, Homo sapiens
  misc_RNA (1)...(19): siRNA sense strand
agaugcauaugaagacuuu

SEQ ID NO: 1886754 - RNA, 19 nt, Homo sapiens
  misc_RNA (1)...(19): siRNA sense strand
uggagaaggagcacgauua

SEQ ID NO: 1886755 - RNA, 19 nt, Homo sapiens
  misc_RNA (1)...(19): siRNA sense strand
ugaaaccucccgugagaaa

SEQ ID NO: 1886756 - RNA, 19 nt, Homo sapiens
  misc_RNA (1)...(19): siRNA sense strand
gcauaugaagacuuuauug

SEQ ID NO: 1886757 - RNA, 19 nt, Homo sapiens
  misc_RNA (1)...(19): siRNA sense strand
aagccagacucuaugguaa

SEQ ID NO: 1886758 - RNA, 19 nt, Homo sapiens
  misc_RNA (1)...(19): siRNA sense strand
aggaagaggccuagaauau

SEQ ID NO: 1886759 - RNA, 19 nt, Homo sapiens
  misc_RNA (1)...(19): siRNA sense strand
ggaacggaaguuugugaaa

SEQ ID NO: 1886760 - RNA, 19 nt, Homo sapiens
  misc_RNA (1)...(19): siRNA sense strand
gugaagaugguucugguaa

SEQ ID NO: 1886761 - RNA, 19 nt, Homo sapiens
  misc_RNA (1)...(19): siRNA sense strand
uacgugagcacauugauaa

SEQ ID NO: 1886762 - RNA, 19 nt, Homo sapiens
  misc_RNA (1)...(19): siRNA sense strand
gauuuacacaucagugaaa

SEQ ID NO: 1886763 - RNA, 19 nt, Homo sapiens
  misc_RNA (1)...(19): siRNA sense strand
gagcacagccaagaaguca

SEQ ID NO: 1886764 - RNA, 19 nt, Homo sapiens
  misc_RNA (1)...(19): siRNA sense strand
gaugagcagguguuccuaa

SEQ ID NO: 1886765 - RNA, 19 nt, Homo sapiens
  misc_RNA (1)...(19): siRNA sense strand
gaagaugcauaugaagacu

SEQ ID NO: 1886766 - RNA, 19 nt, Homo sapiens
  misc_RNA (1)...(19): siRNA sense strand
cacaaaggccugcugaaau

SEQ ID NO: 1886767 - RNA, 19 nt, Homo sapiens
  misc_RNA (1)...(19): siRNA sense strand
guugucaaauguucaggaa

SEQ ID NO: 1886768 - RNA, 19 nt, Homo sapiens
  misc_RNA (1)...(19): siRNA sense strand
gugacaaugugcugacuca

SEQ ID NO: 1886769 - RNA, 19 nt, Homo sapiens
  misc_RNA (1)...(19): siRNA sense strand
cagaaaugggcuaguguuu

SEQ ID NO: 1886770 - RNA, 19 nt, Homo sapiens
  misc_RNA (1)...(19): siRNA sense strand
gguaacaaacucuucaaca

SEQ ID NO: 1886771 - RNA, 19 nt, Homo sapiens
  misc_RNA (1)...(19): siRNA sense strand
agacuguguugucaaaugu

SEQ ID NO: 1886772 - RNA, 19 nt, Homo sapiens
  misc_RNA (1)...(19): siRNA sense strand
aaccucgacuuguuguaua

SEQ ID NO: 1886773 - RNA, 19 nt, Homo sapiens
  misc_RNA (1)...(19): siRNA sense strand
cagagacccucgucauuuu

SEQ ID NO: 1886774 - RNA, 19 nt, Homo sapiens
  misc_RNA (1)...(19): siRNA sense strand
ggagaaggagcacgauuac

SEQ ID NO: 1886775 - RNA, 19 nt, Homo sapiens
  misc_RNA (1)...(19): siRNA sense strand
gagcuggaacggaaguuug

SEQ ID NO: 1886776 - RNA, 19 nt, Homo sapiens
  misc_RNA (1)...(19): siRNA sense strand
aacggaaguuugugaaaga

SEQ ID NO: 1886777 - RNA, 19 nt, Homo sapiens
  misc_RNA (1)...(19): siRNA sense strand
uggauagaaugacucgaaa

SEQ ID NO: 1886778 - RNA, 19 nt, Homo sapiens
  misc_RNA (1)...(19): siRNA sense strand
gcagagcacagccaagaag

SEQ ID NO: 1886779 - RNA, 19 nt, Homo sapiens
  misc_RNA (1)...(19): siRNA sense strand
gagguucugccuucaguau

SEQ ID NO: 1886780 - RNA, 19 nt, Homo sapiens
  misc_RNA (1)...(19): siRNA sense strand
aaagccagacucuauggua

SEQ ID NO: 1886781 - RNA, 19 nt, Homo sapiens
  misc_RNA (1)...(19): siRNA sense strand
aaaagacuguguugucaaa

SEQ ID NO: 1886782 - RNA, 19 nt, Homo sapiens
  misc_RNA (1)...(19): siRNA sense strand
gaagcaacagucacuccuu

SEQ ID NO: 1886783 - RNA, 19 nt, Homo sapiens
  misc_RNA (1)...(19): siRNA sense strand
ggaagaugcauaugaagac

SEQ ID NO: 1886784 - RNA, 19 nt, Homo sapiens
  misc_RNA (1)...(19): siRNA sense strand
caaaggccugcugaaauuu

SEQ ID NO: 1886785 - RNA, 19 nt, Homo sapiens
  misc_RNA (1)...(19): siRNA sense strand
acaaacucuucaacagaaa

SEQ ID NO: 1886786 - RNA, 19 nt, Homo sapiens
  misc_RNA (1)...(19): siRNA sense strand
gccagagacccucgucauu

SEQ ID NO: 1886787 - RNA, 19 nt, Homo sapiens
  misc_RNA (1)...(19): siRNA sense strand
aagacuguguugucaaaug

SEQ ID NO: 1886788 - RNA, 19 nt, Homo sapiens
  misc_RNA (1)...(19): siRNA sense strand
gaagccggaagaugcauau

SEQ ID NO: 1886789 - RNA, 19 nt, Homo sapiens
  misc_RNA (1)...(19): siRNA sense strand
aacauacgguuuccacuuc

SEQ ID NO: 1886790 - RNA, 19 nt, Homo sapiens
  misc_RNA (1)...(19): siRNA sense strand
gaccucaggcuccgaugaa

SEQ ID NO: 1886791 - RNA, 19 nt, Homo sapiens
  misc_RNA (1)...(19): siRNA sense strand
aaaggaagaggccuagaau

SEQ ID NO: 1886792 - RNA, 19 nt, Homo sapiens
  misc_RNA (1)...(19): siRNA sense strand
gaccuuggacugugaugga

SEQ ID NO: 1886793 - RNA, 19 nt, Homo sapiens
  misc_RNA (1)...(19): siRNA sense strand
uuacgugagcacauugaua

SEQ ID NO: 1886794 - RNA, 19 nt, Homo sapiens
  misc_RNA (1)...(19): siRNA sense strand
uuacacaucagugaaagaa

SEQ ID NO: 1886795 - RNA, 19 nt, Homo sapiens
  misc_RNA (1)...(19): siRNA sense strand
ggagaagaagcugcugcua

SEQ ID NO: 1886796 - RNA, 19 nt, Homo sapiens
  misc_RNA (1)...(19): siRNA sense strand
cggaagaugcauaugaaga

SEQ ID NO: 1886797 - RNA, 19 nt, Homo sapiens
  misc_RNA (1)...(19): siRNA sense strand
ucuagaccuuggacuguga

SEQ ID NO: 1886798 - RNA, 19 nt, Homo sapiens
  misc_RNA (1)...(19): siRNA sense strand
gguguuggccagcuucuuc

SEQ ID NO: 1886799 - RNA, 19 nt, Homo sapiens
  misc_RNA (1)...(19): siRNA sense strand
gguucugccuucaguaugg

SEQ ID NO: 1886800 - RNA, 19 nt, Homo sapiens
  misc_RNA (1)...(19): siRNA sense strand
ggagcuggaacggaaguuu

SEQ ID NO: 1886801 - RNA, 19 nt, Homo sapiens
  misc_RNA (1)...(19): siRNA sense strand
cuauauggaaccugaagaa

SEQ ID NO: 1886802 - RNA, 19 nt, Homo sapiens
  misc_RNA (1)...(19): siRNA sense strand
gauagaaugacucgaaagc

SEQ ID NO: 1886803 - RNA, 19 nt, Homo sapiens
  misc_RNA (1)...(19): siRNA sense strand
gaugaggaccgagaugauc

SEQ ID NO: 1886804 - RNA, 19 nt, Homo sapiens
  misc_RNA (1)...(19): siRNA sense strand
cagaagaugagcagguguu

SEQ ID NO: 1886805 - RNA, 19 nt, Homo sapiens
  misc_RNA (1)...(19): siRNA sense strand
caaagaguuggcagcagaa

SEQ ID NO: 1886806 - RNA, 19 nt, Homo sapiens
  misc_RNA (1)...(19): siRNA sense strand
agaaggagcacgauuacag

SEQ ID NO: 1886807 - RNA, 19 nt, Homo sapiens
  misc_RNA (1)...(19): siRNA sense strand
gccagacucuaugguaaca

SEQ ID NO: 1886808 - RNA, 19 nt, Homo sapiens
  misc_RNA (1)...(19): siRNA sense strand
gagcugccuugauuuacac

SEQ ID NO: 1886809 - RNA, 19 nt, Homo sapiens
  misc_RNA (1)...(19): siRNA sense strand
gggaaaggcuucagaugua

SEQ ID NO: 1886810 - RNA, 19 nt, Homo sapiens
  misc_RNA (1)...(19): siRNA sense strand
ggagagaaaccuuauauuu

SEQ ID NO: 1886811 - RNA, 19 nt, Homo sapiens
  misc_RNA (1)...(19): siRNA sense strand
ggaaaaggcuucacugaua

SEQ ID NO: 1886812 - RNA, 19 nt, Homo sapiens
  misc_RNA (1)...(19): siRNA sense strand
ggagagagaccuuauaauu

SEQ ID NO: 1886813 - RNA, 19 nt, Homo sapiens
  misc_RNA (1)...(19): siRNA sense strand
gggaagggcuacauuagua

SEQ ID NO: 1886814 - RNA, 19 nt, Homo sapiens
  misc_RNA (1)...(19): siRNA sense strand
ggacagaaaccguacaauu

SEQ ID NO: 1886815 - RNA, 19 nt, Homo sapiens
  misc_RNA (1)...(19): siRNA sense strand
gagagaaaccuuauauuug

SEQ ID NO: 1886816 - RNA, 19 nt, Homo sapiens
  misc_RNA (1)...(19): siRNA sense strand
gcaggacuaucuauaauuc

SEQ ID NO: 1886817 - RNA, 19 nt, Homo sapiens
  misc_RNA (1)...(19): siRNA sense strand
gagagagaccuuauaauug

SEQ ID NO: 1886818 - RNA, 19 nt, Homo sapiens
  misc_RNA (1)...(19): siRNA sense strand
cagcaaaucugggaacaaa

SEQ ID NO: 1886819 - RNA, 19 nt, Homo sapiens
  misc_RNA (1)...(19): siRNA sense strand
gcucaugucugcaaacuca

SEQ ID NO: 1886820 - RNA, 19 nt, Homo sapiens
  misc_RNA (1)...(19): siRNA sense strand
ggacagaaaccuucacaga

SEQ ID NO: 1886821 - RNA, 19 nt, Homo sapiens
  misc_RNA (1)...(19): siRNA sense strand
ucucaagacuccaucauaa

SEQ ID NO: 1886822 - RNA, 19 nt, Homo sapiens
  misc_RNA (1)...(19): siRNA sense strand
gacagaaaccguacaauug

SEQ ID NO: 1886823 - RNA, 19 nt, Homo sapiens
  misc_RNA (1)...(19): siRNA sense strand
agagagaccuuauaauugu

SEQ ID NO: 1886824 - RNA, 19 nt, Homo sapiens
  misc_RNA (1)...(19): siRNA sense strand
caucucagcucuucguauu

SEQ ID NO: 1886825 - RNA, 19 nt, Homo sapiens
  misc_RNA (1)...(19): siRNA sense strand
gcauaagcaucagauaauu

SEQ ID NO: 1886826 - RNA, 19 nt, Homo sapiens
  misc_RNA (1)...(19): siRNA sense strand
ccagagaguucacuugaga

SEQ ID NO: 1886827 - RNA, 19 nt, Homo sapiens
  misc_RNA (1)...(19): siRNA sense strand
ugccuuaggucaagucuua

SEQ ID NO: 1886828 - RNA, 19 nt, Homo sapiens
  misc_RNA (1)...(19): siRNA sense strand
agaggaagcuguaccaaga

SEQ ID NO: 1886829 - RNA, 19 nt, Homo sapiens
  misc_RNA (1)...(19): siRNA sense strand
acagaaaccuucacagaau

SEQ ID NO: 1886830 - RNA, 19 nt, Homo sapiens
  misc_RNA (1)...(19): siRNA sense strand
gguaaggaauucagucaga

SEQ ID NO: 1886831 - RNA, 19 nt, Homo sapiens
  misc_RNA (1)...(19): siRNA sense strand
ggagaaaacucauccaaau

SEQ ID NO: 1886832 - RNA, 19 nt, Homo sapiens
  misc_RNA (1)...(19): siRNA sense strand
aaacaguccuucagugaug

SEQ ID NO: 1886833 - RNA, 19 nt, Homo sapiens
  misc_RNA (1)...(19): siRNA sense strand
gagagaccuuauaauugua

SEQ ID NO: 1886834 - RNA, 19 nt, Homo sapiens
  misc_RNA (1)...(19): siRNA sense strand
ugacaugugugguaaggaa

SEQ ID NO: 1886835 - RNA, 19 nt, Homo sapiens
  misc_RNA (1)...(19): siRNA sense strand
guaaacaguccuucaguga

SEQ ID NO: 1886836 - RNA, 19 nt, Homo sapiens
  misc_RNA (1)...(19): siRNA sense strand
gcuugaaucuggauauaau

SEQ ID NO: 1886837 - RNA, 19 nt, Homo sapiens
  misc_RNA (1)...(19): siRNA sense strand
ggccuucauucacgauuua

SEQ ID NO: 1886838 - RNA, 19 nt, Homo sapiens
  misc_RNA (1)...(19): siRNA sense strand
ccaaagagaaggaaauuca

SEQ ID NO: 1886839 - RNA, 19 nt, Homo sapiens
  misc_RNA (1)...(19): siRNA sense strand
gcgcuugaaucuggauaua

SEQ ID NO: 1886840 - RNA, 19 nt, Homo sapiens
  misc_RNA (1)...(19): siRNA sense strand
ucacgaaccugcugucagu

SEQ ID NO: 1886841 - RNA, 19 nt, Homo sapiens
  misc_RNA (1)...(19): siRNA sense strand
gacagaaaccuucacagaa

SEQ ID NO: 1886842 - RNA, 19 nt, Homo sapiens
  misc_RNA (1)...(19): siRNA sense strand
caagacuccaucauaaaua

SEQ ID NO: 1886843 - RNA, 19 nt, Homo sapiens
  misc_RNA (1)...(19): siRNA sense strand
ggagacagcaacccaaaga

SEQ ID NO: 1886844 - RNA, 19 nt, Homo sapiens
  misc_RNA (1)...(19): siRNA sense strand
gaggcaggacuaucuauaa

SEQ ID NO: 1886845 - RNA, 19 nt, Homo sapiens
  misc_RNA (1)...(19): siRNA sense strand
ggauguggcuguguucuuc

SEQ ID NO: 1886846 - RNA, 19 nt, Homo sapiens
  misc_RNA (1)...(19): siRNA sense strand
ggaaaggcuucagauguag

SEQ ID NO: 1886847 - RNA, 19 nt, Homo sapiens
  misc_RNA (1)...(19): siRNA sense strand
caaguucacugcaaguuac

SEQ ID NO: 1886848 - RNA, 19 nt, Homo sapiens
  misc_RNA (1)...(19): siRNA sense strand
gagaaaccuuauauuugug

SEQ ID NO: 1886849 - RNA, 19 nt, Homo sapiens
  misc_RNA (1)...(19): siRNA sense strand
gaaugugggaagagcuuua

SEQ ID NO: 1886850 - RNA, 19 nt, Homo sapiens
  misc_RNA (1)...(19): siRNA sense strand
ucaaggauguggcuguguu

SEQ ID NO: 1886851 - RNA, 19 nt, Homo sapiens
  misc_RNA (1)...(19): siRNA sense strand
ucacugauagccuagauuu

SEQ ID NO: 1886852 - RNA, 19 nt, Homo sapiens
  misc_RNA (1)...(19): siRNA sense strand
ggaagggcuacauuaguaa

SEQ ID NO: 1886853 - RNA, 19 nt, Homo sapiens
  misc_RNA (1)...(19): siRNA sense strand
gggaacaaacugcaaguga

SEQ ID NO: 1886854 - RNA, 19 nt, Homo sapiens
  misc_RNA (1)...(19): siRNA sense strand
agaguucacuugagagaga

SEQ ID NO: 1886855 - RNA, 19 nt, Homo sapiens
  misc_RNA (1)...(19): siRNA sense strand
ggaagcaggaccacaugaa

SEQ ID NO: 1886856 - RNA, 19 nt, Homo sapiens
  misc_RNA (1)...(19): siRNA sense strand
cuucagauguagagcgaua

SEQ ID NO: 1886857 - RNA, 19 nt, Homo sapiens
  misc_RNA (1)...(19): siRNA sense strand
cagaaaccuucacagaaug

SEQ ID NO: 1886858 - RNA, 19 nt, Homo sapiens
  misc_RNA (1)...(19): siRNA sense strand
gaaacuccacugccggaaa

SEQ ID NO: 1886859 - RNA, 19 nt, Homo sapiens
  misc_RNA (1)...(19): siRNA sense strand
gaaaaggcuucacugauag

SEQ ID NO: 1886860 - RNA, 19 nt, Homo sapiens
  misc_RNA (1)...(19): siRNA sense strand
ucaaguucacugcaaguua

SEQ ID NO: 1886861 - RNA, 19 nt, Homo sapiens
  misc_RNA (1)...(19): siRNA sense strand
gaacaaacugcaagugacu

SEQ ID NO: 1886862 - RNA, 19 nt, Homo sapiens
  misc_RNA (1)...(19): siRNA sense strand
cagcagagaaacugucaaa

SEQ ID NO: 1886863 - RNA, 19 nt, Homo sapiens
  misc_RNA (1)...(19): siRNA sense strand
gacagcaacccaaagagaa

SEQ ID NO: 1886864 - RNA, 19 nt, Homo sapiens
  misc_RNA (1)...(19): siRNA sense strand
gggccuucauucacgauuu

SEQ ID NO: 1886865 - RNA, 19 nt, Homo sapiens
  misc_RNA (1)...(19): siRNA sense strand
acacaggagagaaaccuua

SEQ ID NO: 1886866 - RNA, 19 nt, Homo sapiens
  misc_RNA (1)...(19): siRNA sense strand
ugugaaauaugugguaaga

SEQ ID NO: 1886867 - RNA, 19 nt, Homo sapiens
  misc_RNA (1)...(19): siRNA sense strand
agacugcccuguccagcaa

SEQ ID NO: 1886868 - RNA, 19 nt, Homo sapiens
  misc_RNA (1)...(19): siRNA sense strand
caggagagaaaccuuauau

SEQ ID NO: 1886869 - RNA, 19 nt, Homo sapiens
  misc_RNA (1)...(19): siRNA sense strand
caugagagaguccacacua

SEQ ID NO: 1886870 - RNA, 19 nt, Homo sapiens
  misc_RNA (1)...(19): siRNA sense strand
ucaagacuccaucauaaau

SEQ ID NO: 1886871 - RNA, 19 nt, Homo sapiens
  misc_RNA (1)...(19): siRNA sense strand
gcaaaucugggaacaaacu

SEQ ID NO: 1886872 - RNA, 19 nt, Homo sapiens
  misc_RNA (1)...(19): siRNA sense strand
gcagagaaacugucaaaau

SEQ ID NO: 1886873 - RNA, 19 nt, Homo sapiens
  misc_RNA (1)...(19): siRNA sense strand
guucuucacugaggaggaa

SEQ ID NO: 1886874 - RNA, 19 nt, Homo sapiens
  misc_RNA (1)...(19): siRNA sense strand
agagagaaaccauucaaau

SEQ ID NO: 1886875 - RNA, 19 nt, Homo sapiens
  misc_RNA (1)...(19): siRNA sense strand
acagaaaccguacaauugu

SEQ ID NO: 1886876 - RNA, 19 nt, Homo sapiens
  misc_RNA (1)...(19): siRNA sense strand
cuucagaaacaucagauaa

SEQ ID NO: 1886877 - RNA, 19 nt, Homo sapiens
  misc_RNA (1)...(19): siRNA sense strand
gaagcaggaccacaugaag

SEQ ID NO: 1886878 - RNA, 19 nt, Homo sapiens
  misc_RNA (1)...(19): siRNA sense strand
gaaaggcuucagauguaga

SEQ ID NO: 1886879 - RNA, 19 nt, Homo sapiens
  misc_RNA (1)...(19): siRNA sense strand
ucugcaaacucaugagaga

SEQ ID NO: 1886880 - RNA, 19 nt, Homo sapiens
  misc_RNA (1)...(19): siRNA sense strand
aagcuucuguuacaucuca

SEQ ID NO: 1886881 - RNA, 19 nt, Homo sapiens
  misc_RNA (1)...(19): siRNA sense strand
ucacagaaugggaagugua

SEQ ID NO: 1886882 - RNA, 19 nt, Homo sapiens
  misc_RNA (1)...(19): siRNA sense strand
ucucagcucuucguauuca

SEQ ID NO: 1886883 - RNA, 19 nt, Homo sapiens
  misc_RNA (1)...(19): siRNA sense strand
cgauuuaaagcuucagaaa

SEQ ID NO: 1886884 - RNA, 19 nt, Homo sapiens
  misc_RNA (1)...(19): siRNA sense strand
caccagagaguucacuuga

SEQ ID NO: 1886885 - RNA, 19 nt, Homo sapiens
  misc_RNA (1)...(19): siRNA sense strand
ucacuucuuugaacaaggu

SEQ ID NO: 1886886 - RNA, 19 nt, Homo sapiens
  misc_RNA (1)...(19): siRNA sense strand
gggcuacauuaguaaguca

SEQ ID NO: 1886887 - RNA, 19 nt, Homo sapiens
  misc_RNA (1)...(19): siRNA sense strand
auacagaugugaggagugu

SEQ ID NO: 1886888 - RNA, 19 nt, Homo sapiens
  misc_RNA (1)...(19): siRNA sense strand
cacagaaugggaaguguaa

SEQ ID NO: 1886889 - RNA, 19 nt, Homo sapiens
  misc_RNA (1)...(19): siRNA sense strand
ugaggcaggacuaucuaua

SEQ ID NO: 1886890 - RNA, 19 nt, Homo sapiens
  misc_RNA (1)...(19): siRNA sense strand
gaagucucauacaugcaau

SEQ ID NO: 1886891 - RNA, 19 nt, Homo sapiens
  misc_RNA (1)...(19): siRNA sense strand
aggcaggacuaucuauaau

SEQ ID NO: 1886892 - RNA, 19 nt, Homo sapiens
  misc_RNA (1)...(19): siRNA sense strand
ggcaggacuaucuauaauu

SEQ ID NO: 1886893 - RNA, 19 nt, Homo sapiens
  misc_RNA (1)...(19): siRNA sense strand
gaaaacucauccaaaugug

SEQ ID NO: 1886894 - RNA, 19 nt, Homo sapiens
  misc_RNA (1)...(19): siRNA sense strand
ugagagaguccacacuaga

SEQ ID NO: 1886895 - RNA, 19 nt, Homo sapiens
  misc_RNA (1)...(19): siRNA sense strand
gagcucaugucugcaaacu

SEQ ID NO: 1886896 - RNA, 19 nt, Homo sapiens
  misc_RNA (1)...(19): siRNA sense strand
agacagcaacccaaagaga

SEQ ID NO: 1886897 - RNA, 19 nt, Homo sapiens
  misc_RNA (1)...(19): siRNA sense strand
cuucaaaugugaggauugu

SEQ ID NO: 1886898 - RNA, 19 nt, Homo sapiens
  misc_RNA (1)...(19): siRNA sense strand
ccacacagcagagaaacug

SEQ ID NO: 1886899 - RNA, 19 nt, Homo sapiens
  misc_RNA (1)...(19): siRNA sense strand
agucaggucuuaacuugca

SEQ ID NO: 1886900 - RNA, 19 nt, Homo sapiens
  misc_RNA (1)...(19): siRNA sense strand
uguaaagaaugugggaaga

SEQ ID NO: 1886901 - RNA, 19 nt, Homo sapiens
  misc_RNA (1)...(19): siRNA sense strand
uugcauaagcaucagauaa

SEQ ID NO: 1886902 - RNA, 19 nt, Homo sapiens
  misc_RNA (1)...(19): siRNA sense strand
aaugggaaguguaaacagu

SEQ ID NO: 1886903 - RNA, 19 nt, Homo sapiens
  misc_RNA (1)...(19): siRNA sense strand
cauaagcaucagauaauuc

SEQ ID NO: 1886904 - RNA, 19 nt, Homo sapiens
  misc_RNA (1)...(19): siRNA sense strand
gauagccuagauuugcaua

SEQ ID NO: 1886905 - RNA, 19 nt, Homo sapiens
  misc_RNA (1)...(19): siRNA sense strand
cagaaacaucagauaauuc

SEQ ID NO: 1886906 - RNA, 19 nt, Homo sapiens
  misc_RNA (1)...(19): siRNA sense strand
auucaaaugugagcaaugu

SEQ ID NO: 1886907 - RNA, 19 nt, Homo sapiens
  misc_RNA (1)...(19): siRNA sense strand
ugugggaagggcuacauua

SEQ ID NO: 1886908 - RNA, 19 nt, Homo sapiens
  misc_RNA (1)...(19): siRNA sense strand
gguccacacagcagagaaa

SEQ ID NO: 1886909 - RNA, 19 nt, Homo sapiens
  misc_RNA (1)...(19): siRNA sense strand
gcaauucccugguuuguuu

SEQ ID NO: 1886910 - RNA, 19 nt, Homo sapiens
  misc_RNA (1)...(19): siRNA sense strand
aaacagaccuucacuaugu

SEQ ID NO: 1886911 - RNA, 19 nt, Homo sapiens
  misc_RNA (1)...(19): siRNA sense strand
gccaauaccugauggaauu

SEQ ID NO: 1886912 - RNA, 19 nt, Homo sapiens
  misc_RNA (1)...(19): siRNA sense strand
ggacagucauuguaacuau

SEQ ID NO: 1886913 - RNA, 19 nt, Homo sapiens
  misc_RNA (1)...(19): siRNA sense strand
ggacaaaagugaaaacuau

SEQ ID NO: 1886914 - RNA, 19 nt, Homo sapiens
  misc_RNA (1)...(19): siRNA sense strand
gaucuuugaugcaggcuuu

SEQ ID NO: 1886915 - RNA, 19 nt, Homo sapiens
  misc_RNA (1)...(19): siRNA sense strand
gcaagguugugcgauauuu

SEQ ID NO: 1886916 - RNA, 19 nt, Homo sapiens
  misc_RNA (1)...(19): siRNA sense strand
gauuccaucuguccucaua

SEQ ID NO: 1886917 - RNA, 19 nt, Homo sapiens
  misc_RNA (1)...(19): siRNA sense strand
ccaaagacucgaucuauga

SEQ ID NO: 1886918 - RNA, 19 nt, Homo sapiens
  misc_RNA (1)...(19): siRNA sense strand
uaacucaaauccaccaaau

SEQ ID NO: 1886919 - RNA, 19 nt, Homo sapiens
  misc_RNA (1)...(19): siRNA sense strand
gaagcaaugccuauacuau

SEQ ID NO: 1886920 - RNA, 19 nt, Homo sapiens
  misc_RNA (1)...(19): siRNA sense strand
ccaaacagaccuucacuau

SEQ ID NO: 1886921 - RNA, 19 nt, Homo sapiens
  misc_RNA (1)...(19): siRNA sense strand
gauaacagcaagccacauu

SEQ ID NO: 1886922 - RNA, 19 nt, Homo sapiens
  misc_RNA (1)...(19): siRNA sense strand
ucacauggauauccuuuag

SEQ ID NO: 1886923 - RNA, 19 nt, Homo sapiens
  misc_RNA (1)...(19): siRNA sense strand
caaauccaccaaauacuuu

SEQ ID NO: 1886924 - RNA, 19 nt, Homo sapiens
  misc_RNA (1)...(19): siRNA sense strand
aaacuacguuggcauuuca

SEQ ID NO: 1886925 - RNA, 19 nt, Homo sapiens
  misc_RNA (1)...(19): siRNA sense strand
uguccucuaugaaauguua

SEQ ID NO: 1886926 - RNA, 19 nt, Homo sapiens
  misc_RNA (1)...(19): siRNA sense strand
gcaagccacauuugauuau

SEQ ID NO: 1886927 - RNA, 19 nt, Homo sapiens
  misc_RNA (1)...(19): siRNA sense strand
gacagucauuguaacuauu

SEQ ID NO: 1886928 - RNA, 19 nt, Homo sapiens
  misc_RNA (1)...(19): siRNA sense strand
ccaaaacuauuaccaaaga

SEQ ID NO: 1886929 - RNA, 19 nt, Homo sapiens
  misc_RNA (1)...(19): siRNA sense strand
acauggauauccuuuaguu

SEQ ID NO: 1886930 - RNA, 19 nt, Homo sapiens
  misc_RNA (1)...(19): siRNA sense strand
ucacagcuaucacauggau

SEQ ID NO: 1886931 - RNA, 19 nt, Homo sapiens
  misc_RNA (1)...(19): siRNA sense strand
gaggagcacaguuggauga

SEQ ID NO: 1886932 - RNA, 19 nt, Homo sapiens
  misc_RNA (1)...(19): siRNA sense strand
ugacagagaagccaaggaa

SEQ ID NO: 1886933 - RNA, 19 nt, Homo sapiens
  misc_RNA (1)...(19): siRNA sense strand
aaccgcagcugcacugaaa

SEQ ID NO: 1886934 - RNA, 19 nt, Homo sapiens
  misc_RNA (1)...(19): siRNA sense strand
ugacucauuugacagagaa

SEQ ID NO: 1886935 - RNA, 19 nt, Homo sapiens
  misc_RNA (1)...(19): siRNA sense strand
uaacagcaagccacauuug

SEQ ID NO: 1886936 - RNA, 19 nt, Homo sapiens
  misc_RNA (1)...(19): siRNA sense strand
ccucuaaaccuacucugua

SEQ ID NO: 1886937 - RNA, 19 nt, Homo sapiens
  misc_RNA (1)...(19): siRNA sense strand
cgugcaagguugugcgaua

SEQ ID NO: 1886938 - RNA, 19 nt, Homo sapiens
  misc_RNA (1)...(19): siRNA sense strand
uaagugaggagcacaguug

SEQ ID NO: 1886939 - RNA, 19 nt, Homo sapiens
  misc_RNA (1)...(19): siRNA sense strand
ccuacucuguauucaauuu

SEQ ID NO: 1886940 - RNA, 19 nt, Homo sapiens
  misc_RNA (1)...(19): siRNA sense strand
cagcaagccacauuugauu

SEQ ID NO: 1886941 - RNA, 19 nt, Homo sapiens
  misc_RNA (1)...(19): siRNA sense strand
ucaaauccaccaaauacuu

SEQ ID NO: 1886942 - RNA, 19 nt, Homo sapiens
  misc_RNA (1)...(19): siRNA sense strand
caagccacauuugauuauu

SEQ ID NO: 1886943 - RNA, 19 nt, Homo sapiens
  misc_RNA (1)...(19): siRNA sense strand
ccaucuguccucauaauuu

SEQ ID NO: 1886944 - RNA, 19 nt, Homo sapiens
  misc_RNA (1)...(19): siRNA sense strand
uaagaaaaguucccuuguu

SEQ ID NO: 1886945 - RNA, 19 nt, Homo sapiens
  misc_RNA (1)...(19): siRNA sense strand
aucaagauguuccucauuu

SEQ ID NO: 1886946 - RNA, 19 nt, Homo sapiens
  misc_RNA (1)...(19): siRNA sense strand
gaaauguuaccgaagcaau

SEQ ID NO: 1886947 - RNA, 19 nt, Homo sapiens
  misc_RNA (1)...(19): siRNA sense strand
ggauauccuuuaguucuuc

SEQ ID NO: 1886948 - RNA, 19 nt, Homo sapiens
  misc_RNA (1)...(19): siRNA sense strand
aagaaaaguucccuuguuu

SEQ ID NO: 1886949 - RNA, 19 nt, Homo sapiens
  misc_RNA (1)...(19): siRNA sense strand
caaacagaccuucacuaug

SEQ ID NO: 1886950 - RNA, 19 nt, Homo sapiens
  misc_RNA (1)...(19): siRNA sense strand
gcuucaagguguccagaga

SEQ ID NO: 1886951 - RNA, 19 nt, Homo sapiens
  misc_RNA (1)...(19): siRNA sense strand
gugcaagguugugcgauau

SEQ ID NO: 1886952 - RNA, 19 nt, Homo sapiens
  misc_RNA (1)...(19): siRNA sense strand
ggccaaaacuauuaccaaa

SEQ ID NO: 1886953 - RNA, 19 nt, Homo sapiens
  misc_RNA (1)...(19): siRNA sense strand
aaccuacucuguauucaau

SEQ ID NO: 1886954 - RNA, 19 nt, Homo sapiens
  misc_RNA (1)...(19): siRNA sense strand
caagauguuccucauuuua

SEQ ID NO: 1886955 - RNA, 19 nt, Homo sapiens
  misc_RNA (1)...(19): siRNA sense strand
cccaugaacaagacuauaa

SEQ ID NO: 1886956 - RNA, 19 nt, Homo sapiens
  misc_RNA (1)...(19): siRNA sense strand
ccacauuugauuauuccua

SEQ ID NO: 1886957 - RNA, 19 nt, Homo sapiens
  misc_RNA (1)...(19): siRNA sense strand
caucuguccucauaauuuu

SEQ ID NO: 1886958 - RNA, 19 nt, Homo sapiens
  misc_RNA (1)...(19): siRNA sense strand
cuaaaccuacucuguauuc

SEQ ID NO: 1886959 - RNA, 19 nt, Homo sapiens
  misc_RNA (1)...(19): siRNA sense strand
agcaaugccuauacuauca

SEQ ID NO: 1886960 - RNA, 19 nt, Homo sapiens
  misc_RNA (1)...(19): siRNA sense strand
gcauguccucuaugaaaug

SEQ ID NO: 1886961 - RNA, 19 nt, Homo sapiens
  misc_RNA (1)...(19): siRNA sense strand
ccuauacuaucacaacaag

SEQ ID NO: 1886962 - RNA, 19 nt, Homo sapiens
  misc_RNA (1)...(19): siRNA sense strand
ggccacagccagcaucuuc

SEQ ID NO: 1886963 - RNA, 19 nt, Homo sapiens
  misc_RNA (1)...(19): siRNA sense strand
cgaagcaaugccuauacua

SEQ ID NO: 1886964 - RNA, 19 nt, Homo sapiens
  misc_RNA (1)...(19): siRNA sense strand
uugcauguccucuaugaaa

SEQ ID NO: 1886965 - RNA, 19 nt, Homo sapiens
  misc_RNA (1)...(19): siRNA sense strand
gauauccuuuaguucuuca

SEQ ID NO: 1886966 - RNA, 19 nt, Homo sapiens
  misc_RNA (1)...(19): siRNA sense strand
gggauucugugguuguuuu

SEQ ID NO: 1886967 - RNA, 19 nt, Homo sapiens
  misc_RNA (1)...(19): siRNA sense strand
gauuauuccuacacuucug

SEQ ID NO: 1886968 - RNA, 19 nt, Homo sapiens
  misc_RNA (1)...(19): siRNA sense strand
uaccaaagacucgaucuau

SEQ ID NO: 1886969 - RNA, 19 nt, Homo sapiens
  misc_RNA (1)...(19): siRNA sense strand
ccaauaccugauggaauua

SEQ ID NO: 1886970 - RNA, 19 nt, Homo sapiens
  misc_RNA (1)...(19): siRNA sense strand
gcuuugugauuccaucugu

SEQ ID NO: 1886971 - RNA, 19 nt, Homo sapiens
  misc_RNA (1)...(19): siRNA sense strand
uggauauccuuuaguucuu

SEQ ID NO: 1886972 - RNA, 19 nt, Homo sapiens
  misc_RNA (1)...(19): siRNA sense strand
guucuacaccaucgucuau

SEQ ID NO: 1886973 - RNA, 19 nt, Homo sapiens
  misc_RNA (1)...(19): siRNA sense strand
accaaagacucgaucuaug

SEQ ID NO: 1886974 - RNA, 19 nt, Homo sapiens
  misc_RNA (1)...(19): siRNA sense strand
cagcaucuucuuugggauu

SEQ ID NO: 1886975 - RNA, 19 nt, Homo sapiens
  misc_RNA (1)...(19): siRNA sense strand
aagccacauuugauuauuc

SEQ ID NO: 1886976 - RNA, 19 nt, Homo sapiens
  misc_RNA (1)...(19): siRNA sense strand
uaaaccuacucuguauuca

SEQ ID NO: 1886977 - RNA, 19 nt, Homo sapiens
  misc_RNA (1)...(19): siRNA sense strand
gcucacagaauggauaaca

SEQ ID NO: 1886978 - RNA, 19 nt, Homo sapiens
  misc_RNA (1)...(19): siRNA sense strand
uucaagguguccagagaaa

SEQ ID NO: 1886979 - RNA, 19 nt, Homo sapiens
  misc_RNA (1)...(19): siRNA sense strand
ucaagauguuccucauuuu

SEQ ID NO: 1886980 - RNA, 19 nt, Homo sapiens
  misc_RNA (1)...(19): siRNA sense strand
gaacggugaggaggacaau

SEQ ID NO: 1886981 - RNA, 19 nt, Homo sapiens
  misc_RNA (1)...(19): siRNA sense strand
cucuaaaccuacucuguau

SEQ ID NO: 1886982 - RNA, 19 nt, Homo sapiens
  misc_RNA (1)...(19): siRNA sense strand
acucaaauccaccaaauac

SEQ ID NO: 1886983 - RNA, 19 nt, Homo sapiens
  misc_RNA (1)...(19): siRNA sense strand
acacugucauccacuucuu

SEQ ID NO: 1886984 - RNA, 19 nt, Homo sapiens
  misc_RNA (1)...(19): siRNA sense strand
ucacaacaaguucaaggau

SEQ ID NO: 1886985 - RNA, 19 nt, Homo sapiens
  misc_RNA (1)...(19): siRNA sense strand
ccacagccagcaucuucuu

SEQ ID NO: 1886986 - RNA, 19 nt, Homo sapiens
  misc_RNA (1)...(19): siRNA sense strand
ccgaagcaaugccuauacu

SEQ ID NO: 1886987 - RNA, 19 nt, Homo sapiens
  misc_RNA (1)...(19): siRNA sense strand
ggaugagcaaccaaacaga

SEQ ID NO: 1886988 - RNA, 19 nt, Homo sapiens
  misc_RNA (1)...(19): siRNA sense strand
uaucaagauguuccucauu

SEQ ID NO: 1886989 - RNA, 19 nt, Homo sapiens
  misc_RNA (1)...(19): siRNA sense strand
cuccagguguccagaucua

SEQ ID NO: 1886990 - RNA, 19 nt, Homo sapiens
  misc_RNA (1)...(19): siRNA sense strand
gacagagaagccaaggaaa

SEQ ID NO: 1886991 - RNA, 19 nt, Homo sapiens
  misc_RNA (1)...(19): siRNA sense strand
aaaccuacucuguauucaa

SEQ ID NO: 1886992 - RNA, 19 nt, Homo sapiens
  misc_RNA (1)...(19): siRNA sense strand
caugaacaagacuauaaga

SEQ ID NO: 1886993 - RNA, 19 nt, Homo sapiens
  misc_RNA (1)...(19): siRNA sense strand
gugaggaggacaaugaaca

SEQ ID NO: 1886994 - RNA, 19 nt, Homo sapiens
  misc_RNA (1)...(19): siRNA sense strand
ucuuugggauucugugguu

SEQ ID NO: 1886995 - RNA, 19 nt, Homo sapiens
  misc_RNA (1)...(19): siRNA sense strand
gggacagucauuguaacua

SEQ ID NO: 1886996 - RNA, 19 nt, Homo sapiens
  misc_RNA (1)...(19): siRNA sense strand
cuucggcaauucccugguu

SEQ ID NO: 1886997 - RNA, 19 nt, Homo sapiens
  misc_RNA (1)...(19): siRNA sense strand
gagcaaccaaacagaccuu

SEQ ID NO: 1886998 - RNA, 19 nt, Homo sapiens
  misc_RNA (1)...(19): siRNA sense strand
caaugccuauacuaucaca

SEQ ID NO: 1886999 - RNA, 19 nt, Homo sapiens
  misc_RNA (1)...(19): siRNA sense strand
cauguccucuaugaaaugu

SEQ ID NO: 1887000 - RNA, 19 nt, Homo sapiens
  misc_RNA (1)...(19): siRNA sense strand
caauaccugauggaauuaa

SEQ ID NO: 1887001 - RNA, 19 nt, Homo sapiens
  misc_RNA (1)...(19): siRNA sense strand
agcaagccacauuugauua

SEQ ID NO: 1887002 - RNA, 19 nt, Homo sapiens
  misc_RNA (1)...(19): siRNA sense strand
gcaaccaaacagaccuuca

SEQ ID NO: 1887003 - RNA, 19 nt, Homo sapiens
  misc_RNA (1)...(19): siRNA sense strand
ggcaugugcugaccuucuc

SEQ ID NO: 1887004 - RNA, 19 nt, Homo sapiens
  misc_RNA (1)...(19): siRNA sense strand
cggcaucguggaucuuuga

SEQ ID NO: 1887005 - RNA, 19 nt, Homo sapiens
  misc_RNA (1)...(19): siRNA sense strand
cagccagcaucuucuuugg

SEQ ID NO: 1887006 - RNA, 19 nt, Homo sapiens
  misc_RNA (1)...(19): siRNA sense strand
ugcauguccucuaugaaau

SEQ ID NO: 1887007 - RNA, 19 nt, Homo sapiens
  misc_RNA (1)...(19): siRNA sense strand
aagcaaugccuauacuauc

SEQ ID NO: 1887008 - RNA, 19 nt, Homo sapiens
  misc_RNA (1)...(19): siRNA sense strand
ucuucagccucuaaaccua

SEQ ID NO: 1887009 - RNA, 19 nt, Homo sapiens
  misc_RNA (1)...(19): siRNA sense strand
ccaaaguucuugaucaaua

SEQ ID NO: 1887010 - RNA, 19 nt, Homo sapiens
  misc_RNA (1)...(19): siRNA sense strand
agaagaagcugaacgagua

SEQ ID NO: 1887011 - RNA, 19 nt, Homo sapiens
  misc_RNA (1)...(19): siRNA sense strand
ccaaggacauuaaggguua

SEQ ID NO: 1887012 - RNA, 19 nt, Homo sapiens
  misc_RNA (1)...(19): siRNA sense strand
ggagauugguuccuacuuu

SEQ ID NO: 1887013 - RNA, 19 nt, Homo sapiens
  misc_RNA (1)...(19): siRNA sense strand
gagauugguuccuacuuua

SEQ ID NO: 1887014 - RNA, 19 nt, Homo sapiens
  misc_RNA (1)...(19): siRNA sense strand
gaucaaagguuuucacuaa

SEQ ID NO: 1887015 - RNA, 19 nt, Homo sapiens
  misc_RNA (1)...(19): siRNA sense strand
gaagauaacaauuggugua

SEQ ID NO: 1887016 - RNA, 19 nt, Homo sapiens
  misc_RNA (1)...(19): siRNA sense strand
ggacgaagauaacaauugg

SEQ ID NO: 1887017 - RNA, 19 nt, Homo sapiens
  misc_RNA (1)...(19): siRNA sense strand
caacaucccugguuacaag

SEQ ID NO: 1887018 - RNA, 19 nt, Homo sapiens
  misc_RNA (1)...(19): siRNA sense strand
ccaacacacucgagucuuu

SEQ ID NO: 1887019 - RNA, 19 nt, Homo sapiens
  misc_RNA (1)...(19): siRNA sense strand
ucacagcucuuccuuacuu

SEQ ID NO: 1887020 - RNA, 19 nt, Homo sapiens
  misc_RNA (1)...(19): siRNA sense strand
ggucaaaggacgaagauaa

SEQ ID NO: 1887021 - RNA, 19 nt, Homo sapiens
  misc_RNA (1)...(19): siRNA sense strand
agagaaagcuggucaucaa

SEQ ID NO: 1887022 - RNA, 19 nt, Homo sapiens
  misc_RNA (1)...(19): siRNA sense strand
gaauugaugguaucuguuu

SEQ ID NO: 1887023 - RNA, 19 nt, Homo sapiens
  misc_RNA (1)...(19): siRNA sense strand
uugcagaucuaaagaagua

SEQ ID NO: 1887024 - RNA, 19 nt, Homo sapiens
  misc_RNA (1)...(19): siRNA sense strand
gcugagaucugggacauga

SEQ ID NO: 1887025 - RNA, 19 nt, Homo sapiens
  misc_RNA (1)...(19): siRNA sense strand
gaaccucagugaauguaug

SEQ ID NO: 1887026 - RNA, 19 nt, Homo sapiens
  misc_RNA (1)...(19): siRNA sense strand
gaacaagcagcaaaugaga

SEQ ID NO: 1887027 - RNA, 19 nt, Homo sapiens
  misc_RNA (1)...(19): siRNA sense strand
gaugucgucuuccuauuga

SEQ ID NO: 1887028 - RNA, 19 nt, Homo sapiens
  misc_RNA (1)...(19): siRNA sense strand
gugaauguauggacccuaa

SEQ ID NO: 1887029 - RNA, 19 nt, Homo sapiens
  misc_RNA (1)...(19): siRNA sense strand
ggucaucaaugcugcuuug

SEQ ID NO: 1887030 - RNA, 19 nt, Homo sapiens
  misc_RNA (1)...(19): siRNA sense strand
gaucuaaaucucaaacuga

SEQ ID NO: 1887031 - RNA, 19 nt, Homo sapiens
  misc_RNA (1)...(19): siRNA sense strand
uagccaagguguuuaauuc

SEQ ID NO: 1887032 - RNA, 19 nt, Homo sapiens
  misc_RNA (1)...(19): siRNA sense strand
gccagaggauucaacauga

SEQ ID NO: 1887033 - RNA, 19 nt, Homo sapiens
  misc_RNA (1)...(19): siRNA sense strand
gcagagauguggagcaacu

SEQ ID NO: 1887034 - RNA, 19 nt, Homo sapiens
  misc_RNA (1)...(19): siRNA sense strand
caaaugagauaugggaauc

SEQ ID NO: 1887035 - RNA, 19 nt, Homo sapiens
  misc_RNA (1)...(19): siRNA sense strand
aaacugauguguuggagau

SEQ ID NO: 1887036 - RNA, 19 nt, Homo sapiens
  misc_RNA (1)...(19): siRNA sense strand
ucuaugaguuugaagauug

SEQ ID NO: 1887037 - RNA, 19 nt, Homo sapiens
  misc_RNA (1)...(19): siRNA sense strand
gaaagcuggucaucaaugc

SEQ ID NO: 1887038 - RNA, 19 nt, Homo sapiens
  misc_RNA (1)...(19): siRNA sense strand
caccuuggguugcaaugua

SEQ ID NO: 1887039 - RNA, 19 nt, Homo sapiens
  misc_RNA (1)...(19): siRNA sense strand
gcagauaagaagcuccuuu

SEQ ID NO: 1887040 - RNA, 19 nt, Homo sapiens
  misc_RNA (1)...(19): siRNA sense strand
gaacgaguaucggcuggau

SEQ ID NO: 1887041 - RNA, 19 nt, Homo sapiens
  misc_RNA (1)...(19): siRNA sense strand
guuacaagcuuggcugcua

SEQ ID NO: 1887042 - RNA, 19 nt, Homo sapiens
  misc_RNA (1)...(19): siRNA sense strand
gagcaagcccgcagagaug

SEQ ID NO: 1887043 - RNA, 19 nt, Homo sapiens
  misc_RNA (1)...(19): siRNA sense strand
gguugugucugucaaaugu

SEQ ID NO: 1887044 - RNA, 19 nt, Homo sapiens
  misc_RNA (1)...(19): siRNA sense strand
ggaucuaaaucucaaacug

SEQ ID NO: 1887045 - RNA, 19 nt, Homo sapiens
  misc_RNA (1)...(19): siRNA sense strand
ggcaugaguugacccagaa

SEQ ID NO: 1887046 - RNA, 19 nt, Homo sapiens
  misc_RNA (1)...(19): siRNA sense strand
ugagacacaucacauuugu

SEQ ID NO: 1887047 - RNA, 19 nt, Homo sapiens
  misc_RNA (1)...(19): siRNA sense strand
gugcugguuuccuugcuua

SEQ ID NO: 1887048 - RNA, 19 nt, Homo sapiens
  misc_RNA (1)...(19): siRNA sense strand
gcuauuggaacacuguaua

SEQ ID NO: 1887049 - RNA, 19 nt, Homo sapiens
  misc_RNA (1)...(19): siRNA sense strand
ccaagguguuuaauucuuc

SEQ ID NO: 1887050 - RNA, 19 nt, Homo sapiens
  misc_RNA (1)...(19): siRNA sense strand
ggauggccuuugaggaauu

SEQ ID NO: 1887051 - RNA, 19 nt, Homo sapiens
  misc_RNA (1)...(19): siRNA sense strand
cuacagugauuucuuccaa

SEQ ID NO: 1887052 - RNA, 19 nt, Homo sapiens
  misc_RNA (1)...(19): siRNA sense strand
ccacuucuacuauugguuu

SEQ ID NO: 1887053 - RNA, 19 nt, Homo sapiens
  misc_RNA (1)...(19): siRNA sense strand
gagaacauggugcugguuu

SEQ ID NO: 1887054 - RNA, 19 nt, Homo sapiens
  misc_RNA (1)...(19): siRNA sense strand
gccaagguguuuaauucuu

SEQ ID NO: 1887055 - RNA, 19 nt, Homo sapiens
  misc_RNA (1)...(19): siRNA sense strand
ggauuugacacauuuguug

SEQ ID NO: 1887056 - RNA, 19 nt, Homo sapiens
  misc_RNA (1)...(19): siRNA sense strand
caagaucuccuacuccaau

SEQ ID NO: 1887057 - RNA, 19 nt, Homo sapiens
  misc_RNA (1)...(19): siRNA sense strand
acaagcagcaaaugagaua

SEQ ID NO: 1887058 - RNA, 19 nt, Homo sapiens
  misc_RNA (1)...(19): siRNA sense strand
gcaaaugagauaugggaau

SEQ ID NO: 1887059 - RNA, 19 nt, Homo sapiens
  misc_RNA (1)...(19): siRNA sense strand
ggauuucuuucacgguuug

SEQ ID NO: 1887060 - RNA, 19 nt, Homo sapiens
  misc_RNA (1)...(19): siRNA sense strand
aagugaagcuuccagaaau

SEQ ID NO: 1887061 - RNA, 19 nt, Homo sapiens
  misc_RNA (1)...(19): siRNA sense strand
gcucuuccuuacuucuuaa

SEQ ID NO: 1887062 - RNA, 19 nt, Homo sapiens
  misc_RNA (1)...(19): siRNA sense strand
ggaacaagcagcaaaugag

SEQ ID NO: 1887063 - RNA, 19 nt, Homo sapiens
  misc_RNA (1)...(19): siRNA sense strand
caaugcugcuuugggauuu

SEQ ID NO: 1887064 - RNA, 19 nt, Homo sapiens
  misc_RNA (1)...(19): siRNA sense strand
gcccacagauggaguagca

SEQ ID NO: 1887065 - RNA, 19 nt, Homo sapiens
  misc_RNA (1)...(19): siRNA sense strand
uaugaucccuguaacuuag

SEQ ID NO: 1887066 - RNA, 19 nt, Homo sapiens
  misc_RNA (1)...(19): siRNA sense strand
ccagcucgcuuaacauugg

SEQ ID NO: 1887067 - RNA, 19 nt, Homo sapiens
  misc_RNA (1)...(19): siRNA sense strand
gaacgagaaggauuuaacu

SEQ ID NO: 1887068 - RNA, 19 nt, Homo sapiens
  misc_RNA (1)...(19): siRNA sense strand
gaagaaaccaaagcagcaa

SEQ ID NO: 1887069 - RNA, 19 nt, Homo sapiens
  misc_RNA (1)...(19): siRNA sense strand
ggagcaagcccgcagagau

SEQ ID NO: 1887070 - RNA, 19 nt, Homo sapiens
  misc_RNA (1)...(19): siRNA sense strand
caaguaugaugagaacaug

SEQ ID NO: 1887071 - RNA, 19 nt, Homo sapiens
  misc_RNA (1)...(19): siRNA sense strand
cauuaaggguuauuacuac

SEQ ID NO: 1887072 - RNA, 19 nt, Homo sapiens
  misc_RNA (1)...(19): siRNA sense strand
gaagcucccaaggacauua

SEQ ID NO: 1887073 - RNA, 19 nt, Homo sapiens
  misc_RNA (1)...(19): siRNA sense strand
gaguuuaccucucauucag

SEQ ID NO: 1887074 - RNA, 19 nt, Homo sapiens
  misc_RNA (1)...(19): siRNA sense strand
aagguuagcugagucauca

SEQ ID NO: 1887075 - RNA, 19 nt, Homo sapiens
  misc_RNA (1)...(19): siRNA sense strand
caaaggacgaagauaacaa

SEQ ID NO: 1887076 - RNA, 19 nt, Homo sapiens
  misc_RNA (1)...(19): siRNA sense strand
gggauuucuuucacgguuu

SEQ ID NO: 1887077 - RNA, 19 nt, Homo sapiens
  misc_RNA (1)...(19): siRNA sense strand
gauggccuuugaggaauuu

SEQ ID NO: 1887078 - RNA, 19 nt, Homo sapiens
  misc_RNA (1)...(19): siRNA sense strand
gugcauaugauaaucuuug

SEQ ID NO: 1887079 - RNA, 19 nt, Homo sapiens
  misc_RNA (1)...(19): siRNA sense strand
ugaucaauaugaacgagaa

SEQ ID NO: 1887080 - RNA, 19 nt, Homo sapiens
  misc_RNA (1)...(19): siRNA sense strand
ggcagccucucuaugaguu

SEQ ID NO: 1887081 - RNA, 19 nt, Homo sapiens
  misc_RNA (1)...(19): siRNA sense strand
uagcccagauuguccuaaa

SEQ ID NO: 1887082 - RNA, 19 nt, Homo sapiens
  misc_RNA (1)...(19): siRNA sense strand
gugacgaucggaugaauga

SEQ ID NO: 1887083 - RNA, 19 nt, Homo sapiens
  misc_RNA (1)...(19): siRNA sense strand
gaagaagcugaacgaguau

SEQ ID NO: 1887084 - RNA, 19 nt, Homo sapiens
  misc_RNA (1)...(19): siRNA sense strand
uggaauugaugguaucugu

SEQ ID NO: 1887085 - RNA, 19 nt, Homo sapiens
  misc_RNA (1)...(19): siRNA sense strand
ccgcagagauguggagcaa

SEQ ID NO: 1887086 - RNA, 19 nt, Homo sapiens
  misc_RNA (1)...(19): siRNA sense strand
agucaucaguggaucuaaa

SEQ ID NO: 1887087 - RNA, 19 nt, Homo sapiens
  misc_RNA (1)...(19): siRNA sense strand
gaguagcaguuuccagucu

SEQ ID NO: 1887088 - RNA, 19 nt, Homo sapiens
  misc_RNA (1)...(19): siRNA sense strand
ucaacaaguuccuccucuu

SEQ ID NO: 1887089 - RNA, 19 nt, Homo sapiens
  misc_RNA (1)...(19): siRNA sense strand
caagguguuuaauucuuca

SEQ ID NO: 1887090 - RNA, 19 nt, Homo sapiens
  misc_RNA (1)...(19): siRNA sense strand
caaccucucuugggcuugu

SEQ ID NO: 1887091 - RNA, 19 nt, Homo sapiens
  misc_RNA (1)...(19): siRNA sense strand
uugccaacaucccugguua

SEQ ID NO: 1887092 - RNA, 19 nt, Homo sapiens
  misc_RNA (1)...(19): siRNA sense strand
cuccugggcucaucgcuuu

SEQ ID NO: 1887093 - RNA, 19 nt, Homo sapiens
  misc_RNA (1)...(19): siRNA sense strand
gugaacuucuccaguguca

SEQ ID NO: 1887094 - RNA, 19 nt, Homo sapiens
  misc_RNA (1)...(19): siRNA sense strand
gaacacuguauaacaccaa

SEQ ID NO: 1887095 - RNA, 19 nt, Homo sapiens
  misc_RNA (1)...(19): siRNA sense strand
ugacuggucuuacauugcu

SEQ ID NO: 1887096 - RNA, 19 nt, Homo sapiens
  misc_RNA (1)...(19): siRNA sense strand
ugccuuggauguuggguuu

SEQ ID NO: 1887097 - RNA, 19 nt, Homo sapiens
  misc_RNA (1)...(19): siRNA sense strand
gguccuagcagcccacaga

SEQ ID NO: 1887098 - RNA, 19 nt, Homo sapiens
  misc_RNA (1)...(19): siRNA sense strand
agucacagcucuuccuuac

SEQ ID NO: 1887099 - RNA, 19 nt, Homo sapiens
  misc_RNA (1)...(19): siRNA sense strand
gcugcuacuucugcaauga

SEQ ID NO: 1887100 - RNA, 19 nt, Homo sapiens
  misc_RNA (1)...(19): siRNA sense strand
gacauggucugaagaaacc

SEQ ID NO: 1887101 - RNA, 19 nt, Homo sapiens
  misc_RNA (1)...(19): siRNA sense strand
gcauuuagcccagauuguc

SEQ ID NO: 1887102 - RNA, 19 nt, Homo sapiens
  misc_RNA (1)...(19): siRNA sense strand
uauaugaucccuguaacuu

SEQ ID NO: 1887103 - RNA, 19 nt, Homo sapiens
  misc_RNA (1)...(19): siRNA sense strand
ccagagaccggaccuugga

SEQ ID NO: 1887104 - RNA, 19 nt, Homo sapiens
  misc_RNA (1)...(19): siRNA sense strand
uuugggauuugacacauuu

SEQ ID NO: 1887105 - RNA, 19 nt, Homo sapiens
  misc_RNA (1)...(19): siRNA sense strand
ggacauuaaggguuauuac

SEQ ID NO: 1887106 - RNA, 19 nt, Homo sapiens
  misc_RNA (1)...(19): siRNA sense strand
gcaguuggaugggaaaaga

SEQ ID NO: 1887107 - RNA, 19 nt, Homo sapiens
  misc_RNA (1)...(19): siRNA sense strand
gcaguuuccagucuguuga

SEQ ID NO: 1887108 - RNA, 19 nt, Homo sapiens
  misc_RNA (1)...(19): siRNA sense strand
ggaauugaugguaucuguu

SEQ ID NO: 1887109 - RNA, 19 nt, Homo sapiens
  misc_RNA (1)...(19): siRNA sense strand
gcaagaaccucuccaagua

SEQ ID NO: 1887110 - RNA, 19 nt, Homo sapiens
  misc_RNA (1)...(19): siRNA sense strand
gagaaaggcuauuuagaaa

SEQ ID NO: 1887111 - RNA, 19 nt, Homo sapiens
  misc_RNA (1)...(19): siRNA sense strand
cuagagaccuuuaugcuua

SEQ ID NO: 1887112 - RNA, 19 nt, Homo sapiens
  misc_RNA (1)...(19): siRNA sense strand
ccacaaauguucagaaaga

SEQ ID NO: 1887113 - RNA, 19 nt, Homo sapiens
  misc_RNA (1)...(19): siRNA sense strand
gaccaaauguuacaagaaa

SEQ ID NO: 1887114 - RNA, 19 nt, Homo sapiens
  misc_RNA (1)...(19): siRNA sense strand
caaaguacacucagaauaa

SEQ ID NO: 1887115 - RNA, 19 nt, Homo sapiens
  misc_RNA (1)...(19): siRNA sense strand
gaucagauguggaagcaaa

SEQ ID NO: 1887116 - RNA, 19 nt, Homo sapiens
  misc_RNA (1)...(19): siRNA sense strand
gaacucaaagcuccacuua

SEQ ID NO: 1887117 - RNA, 19 nt, Homo sapiens
  misc_RNA (1)...(19): siRNA sense strand
gagaaugacccaucaguaa

SEQ ID NO: 1887118 - RNA, 19 nt, Homo sapiens
  misc_RNA (1)...(19): siRNA sense strand
uaacacagaagcacucuua

SEQ ID NO: 1887119 - RNA, 19 nt, Homo sapiens
  misc_RNA (1)...(19): siRNA sense strand
gggauuagguaaaguaaga

SEQ ID NO: 1887120 - RNA, 19 nt, Homo sapiens
  misc_RNA (1)...(19): siRNA sense strand
uaaaugaacuucguaggaa

SEQ ID NO: 1887121 - RNA, 19 nt, Homo sapiens
  misc_RNA (1)...(19): siRNA sense strand
caaauccagugaucuagaa

SEQ ID NO: 1887122 - RNA, 19 nt, Homo sapiens
  misc_RNA (1)...(19): siRNA sense strand
gcaugggccuuacuucuau

SEQ ID NO: 1887123 - RNA, 19 nt, Homo sapiens
  misc_RNA (1)...(19): siRNA sense strand
uaaggaagcagaaauagaa

SEQ ID NO: 1887124 - RNA, 19 nt, Homo sapiens
  misc_RNA (1)...(19): siRNA sense strand
ugaaacagcagaagguaua

SEQ ID NO: 1887125 - RNA, 19 nt, Homo sapiens
  misc_RNA (1)...(19): siRNA sense strand
gaagaacuagagaccuuua

SEQ ID NO: 1887126 - RNA, 19 nt, Homo sapiens
  misc_RNA (1)...(19): siRNA sense strand
gugcaggacuaucuuggua

SEQ ID NO: 1887127 - RNA, 19 nt, Homo sapiens
  misc_RNA (1)...(19): siRNA sense strand
gaaaacuccugaagaacua

SEQ ID NO: 1887128 - RNA, 19 nt, Homo sapiens
  misc_RNA (1)...(19): siRNA sense strand
gaaagucgugauccuagua

SEQ ID NO: 1887129 - RNA, 19 nt, Homo sapiens
  misc_RNA (1)...(19): siRNA sense strand
ggacagggaucacaaacac

SEQ ID NO: 1887130 - RNA, 19 nt, Homo sapiens
  misc_RNA (1)...(19): siRNA sense strand
ggagaaugacccaucagua

SEQ ID NO: 1887131 - RNA, 19 nt, Homo sapiens
  misc_RNA (1)...(19): siRNA sense strand
agagaaaggcuauuuagaa

SEQ ID NO: 1887132 - RNA, 19 nt, Homo sapiens
  misc_RNA (1)...(19): siRNA sense strand
gaaaggcuauuuagaaacc

SEQ ID NO: 1887133 - RNA, 19 nt, Homo sapiens
  misc_RNA (1)...(19): siRNA sense strand
cagcaaguauguucucaga

SEQ ID NO: 1887134 - RNA, 19 nt, Homo sapiens
  misc_RNA (1)...(19): siRNA sense strand
uagauagacuugagaagga

SEQ ID NO: 1887135 - RNA, 19 nt, Homo sapiens
  misc_RNA (1)...(19): siRNA sense strand
uuucuugccuggauuuaua

SEQ ID NO: 1887136 - RNA, 19 nt, Homo sapiens
  misc_RNA (1)...(19): siRNA sense strand
acauguagauuuggagaua

SEQ ID NO: 1887137 - RNA, 19 nt, Homo sapiens
  misc_RNA (1)...(19): siRNA sense strand
guaaaugaacuucguagga

SEQ ID NO: 1887138 - RNA, 19 nt, Homo sapiens
  misc_RNA (1)...(19): siRNA sense strand
caugaugggugcaggacua

SEQ ID NO: 1887139 - RNA, 19 nt, Homo sapiens
  misc_RNA (1)...(19): siRNA sense strand
gcuauacacucauuaucug

SEQ ID NO: 1887140 - RNA, 19 nt, Homo sapiens
  misc_RNA (1)...(19): siRNA sense strand
cagaagcuauacacucauu

SEQ ID NO: 1887141 - RNA, 19 nt, Homo sapiens
  misc_RNA (1)...(19): siRNA sense strand
gaaagaaggacagggauca

SEQ ID NO: 1887142 - RNA, 19 nt, Homo sapiens
  misc_RNA (1)...(19): siRNA sense strand
gaucugggauuagguaaag

SEQ ID NO: 1887143 - RNA, 19 nt, Homo sapiens
  misc_RNA (1)...(19): siRNA sense strand
caauuugcaucaauggauu

SEQ ID NO: 1887144 - RNA, 19 nt, Homo sapiens
  misc_RNA (1)...(19): siRNA sense strand
acucaaagcuccacuuaag

SEQ ID NO: 1887145 - RNA, 19 nt, Homo sapiens
  misc_RNA (1)...(19): siRNA sense strand
uaaagcaguccuuaagaaa

SEQ ID NO: 1887146 - RNA, 19 nt, Homo sapiens
  misc_RNA (1)...(19): siRNA sense strand
ggcaauucaugauguuaaa

SEQ ID NO: 1887147 - RNA, 19 nt, Homo sapiens
  misc_RNA (1)...(19): siRNA sense strand
caucuacacuaacacagaa

SEQ ID NO: 1887148 - RNA, 19 nt, Homo sapiens
  misc_RNA (1)...(19): siRNA sense strand
ucagagcgauaaaugaguu

SEQ ID NO: 1887149 - RNA, 19 nt, Homo sapiens
  misc_RNA (1)...(19): siRNA sense strand
ucaaaguacacucagaaua

SEQ ID NO: 1887150 - RNA, 19 nt, Homo sapiens
  misc_RNA (1)...(19): siRNA sense strand
caagaaccucuccaaguaa

SEQ ID NO: 1887151 - RNA, 19 nt, Homo sapiens
  misc_RNA (1)...(19): siRNA sense strand
acaagaaauucaagaagug

SEQ ID NO: 1887152 - RNA, 19 nt, Homo sapiens
  misc_RNA (1)...(19): siRNA sense strand
gcugcagucuugggaguua

SEQ ID NO: 1887153 - RNA, 19 nt, Homo sapiens
  misc_RNA (1)...(19): siRNA sense strand
gaagcuauacacucauuau

SEQ ID NO: 1887154 - RNA, 19 nt, Homo sapiens
  misc_RNA (1)...(19): siRNA sense strand
gggaagcccugaagcucuu

SEQ ID NO: 1887155 - RNA, 19 nt, Homo sapiens
  misc_RNA (1)...(19): siRNA sense strand
uuuaggagcugaaguagau

SEQ ID NO: 1887156 - RNA, 19 nt, Homo sapiens
  misc_RNA (1)...(19): siRNA sense strand
uaagggcaauucaugaugu

SEQ ID NO: 1887157 - RNA, 19 nt, Homo sapiens
  misc_RNA (1)...(19): siRNA sense strand
gaaggacagggaucacaaa

SEQ ID NO: 1887158 - RNA, 19 nt, Homo sapiens
  misc_RNA (1)...(19): siRNA sense strand
ccacagaucugggauuagg

SEQ ID NO: 1887159 - RNA, 19 nt, Homo sapiens
  misc_RNA (1)...(19): siRNA sense strand
ggagucagagcgauaaaug

SEQ ID NO: 1887160 - RNA, 19 nt, Homo sapiens
  misc_RNA (1)...(19): siRNA sense strand
gcguaaggaagcagaaaua

SEQ ID NO: 1887161 - RNA, 19 nt, Homo sapiens
  misc_RNA (1)...(19): siRNA sense strand
guuacaagaucauauuugg

SEQ ID NO: 1887162 - RNA, 19 nt, Homo sapiens
  misc_RNA (1)...(19): siRNA sense strand
ggaaagucgugauccuagu

SEQ ID NO: 1887163 - RNA, 19 nt, Homo sapiens
  misc_RNA (1)...(19): siRNA sense strand
ugagucaaguaaaguugua

SEQ ID NO: 1887164 - RNA, 19 nt, Homo sapiens
  misc_RNA (1)...(19): siRNA sense strand
gaaguucgacauguagauu

SEQ ID NO: 1887165 - RNA, 19 nt, Homo sapiens
  misc_RNA (1)...(19): siRNA sense strand
gagaucagauguggaagca

SEQ ID NO: 1887166 - RNA, 19 nt, Homo sapiens
  misc_RNA (1)...(19): siRNA sense strand
guaaggaagcagaaauaga

SEQ ID NO: 1887167 - RNA, 19 nt, Homo sapiens
  misc_RNA (1)...(19): siRNA sense strand
gauccuaguacaaauguga

SEQ ID NO: 1887168 - RNA, 19 nt, Homo sapiens
  misc_RNA (1)...(19): siRNA sense strand
ggcagaauuuagugacauu

SEQ ID NO: 1887169 - RNA, 19 nt, Homo sapiens
  misc_RNA (1)...(19): siRNA sense strand
uagagaccuuuaugcuuaa

SEQ ID NO: 1887170 - RNA, 19 nt, Homo sapiens
  misc_RNA (1)...(19): siRNA sense strand
caaacgugguucccuguag

SEQ ID NO: 1887171 - RNA, 19 nt, Homo sapiens
  misc_RNA (1)...(19): siRNA sense strand
gagcugaaguagauagacu

SEQ ID NO: 1887172 - RNA, 19 nt, Homo sapiens
  misc_RNA (1)...(19): siRNA sense strand
gggcaauucaugauguuaa

SEQ ID NO: 1887173 - RNA, 19 nt, Homo sapiens
  misc_RNA (1)...(19): siRNA sense strand
uaaauuucuugccuggauu

SEQ ID NO: 1887174 - RNA, 19 nt, Homo sapiens
  misc_RNA (1)...(19): siRNA sense strand
ccucaaauccagugaucua

SEQ ID NO: 1887175 - RNA, 19 nt, Homo sapiens
  misc_RNA (1)...(19): siRNA sense strand
gaacuagagaccuuuaugc

SEQ ID NO: 1887176 - RNA, 19 nt, Homo sapiens
  misc_RNA (1)...(19): siRNA sense strand
gcuucauccucaaccaaua

SEQ ID NO: 1887177 - RNA, 19 nt, Homo sapiens
  misc_RNA (1)...(19): siRNA sense strand
uuaaauuucuugccuggau

SEQ ID NO: 1887178 - RNA, 19 nt, Homo sapiens
  misc_RNA (1)...(19): siRNA sense strand
uggauuaaacugcuucuuu

SEQ ID NO: 1887179 - RNA, 19 nt, Homo sapiens
  misc_RNA (1)...(19): siRNA sense strand
gaauacagagaaaggcuau

SEQ ID NO: 1887180 - RNA, 19 nt, Homo sapiens
  misc_RNA (1)...(19): siRNA sense strand
ggaagcagaaauagaauac

SEQ ID NO: 1887181 - RNA, 19 nt, Homo sapiens
  misc_RNA (1)...(19): siRNA sense strand
uuucaucacuggagucaga

SEQ ID NO: 1887182 - RNA, 19 nt, Homo sapiens
  misc_RNA (1)...(19): siRNA sense strand
gggccuuacuucuauaaca

SEQ ID NO: 1887183 - RNA, 19 nt, Homo sapiens
  misc_RNA (1)...(19): siRNA sense strand
ccagugaucuagaacaacu

SEQ ID NO: 1887184 - RNA, 19 nt, Homo sapiens
  misc_RNA (1)...(19): siRNA sense strand
agucauccauauauuggua

SEQ ID NO: 1887185 - RNA, 19 nt, Homo sapiens
  misc_RNA (1)...(19): siRNA sense strand
acaaguauguaauggaaag

SEQ ID NO: 1887186 - RNA, 19 nt, Homo sapiens
  misc_RNA (1)...(19): siRNA sense strand
cugaagaacuagagaccuu

SEQ ID NO: 1887187 - RNA, 19 nt, Homo sapiens
  misc_RNA (1)...(19): siRNA sense strand
agccacagaucugggauua

SEQ ID NO: 1887188 - RNA, 19 nt, Homo sapiens
  misc_RNA (1)...(19): siRNA sense strand
uauaggcgcagaacucaaa

SEQ ID NO: 1887189 - RNA, 19 nt, Homo sapiens
  misc_RNA (1)...(19): siRNA sense strand
gcauugggcaucaguaagu

SEQ ID NO: 1887190 - RNA, 19 nt, Homo sapiens
  misc_RNA (1)...(19): siRNA sense strand
gaucuagaacaacuucgaa

SEQ ID NO: 1887191 - RNA, 19 nt, Homo sapiens
  misc_RNA (1)...(19): siRNA sense strand
caagaaauucaagaaguga

SEQ ID NO: 1887192 - RNA, 19 nt, Homo sapiens
  misc_RNA (1)...(19): siRNA sense strand
ggaaugcucgggcuaaagg

SEQ ID NO: 1887193 - RNA, 19 nt, Homo sapiens
  misc_RNA (1)...(19): siRNA sense strand
cucagaagcuauacacuca

SEQ ID NO: 1887194 - RNA, 19 nt, Homo sapiens
  misc_RNA (1)...(19): siRNA sense strand
aagcuccacuuaagcaaga

SEQ ID NO: 1887195 - RNA, 19 nt, Homo sapiens
  misc_RNA (1)...(19): siRNA sense strand
guacaacggcucacugaac

SEQ ID NO: 1887196 - RNA, 19 nt, Homo sapiens
  misc_RNA (1)...(19): siRNA sense strand
agucuugggaguuauaaua

SEQ ID NO: 1887197 - RNA, 19 nt, Homo sapiens
  misc_RNA (1)...(19): siRNA sense strand
cuccacaaauguucagaaa

SEQ ID NO: 1887198 - RNA, 19 nt, Homo sapiens
  misc_RNA (1)...(19): siRNA sense strand
ccaugaagauacugagucu

SEQ ID NO: 1887199 - RNA, 19 nt, Homo sapiens
  misc_RNA (1)...(19): siRNA sense strand
gaauuuagugacauuugga

SEQ ID NO: 1887200 - RNA, 19 nt, Homo sapiens
  misc_RNA (1)...(19): siRNA sense strand
ccaaguaagaguuaaagca

SEQ ID NO: 1887201 - RNA, 19 nt, Homo sapiens
  misc_RNA (1)...(19): siRNA sense strand
aaaacgaaauccugaaguu

SEQ ID NO: 1887202 - RNA, 19 nt, Homo sapiens
  misc_RNA (1)...(19): siRNA sense strand
ucaguaagggcaauucaug

SEQ ID NO: 1887203 - RNA, 19 nt, Homo sapiens
  misc_RNA (1)...(19): siRNA sense strand
cauccagccagaacaagua

SEQ ID NO: 1887204 - RNA, 19 nt, Homo sapiens
  misc_RNA (1)...(19): siRNA sense strand
ucucagcauuccucaucua

SEQ ID NO: 1887205 - RNA, 19 nt, Homo sapiens
  misc_RNA (1)...(19): siRNA sense strand
gugauauuauuggaggaua

SEQ ID NO: 1887206 - RNA, 19 nt, Homo sapiens
  misc_RNA (1)...(19): siRNA sense strand
uaaucaggguuuacuagca

SEQ ID NO: 1887207 - RNA, 19 nt, Homo sapiens
  misc_RNA (1)...(19): siRNA sense strand
ggucucagcauuccucauc

SEQ ID NO: 1887208 - RNA, 19 nt, Homo sapiens
  misc_RNA (1)...(19): siRNA sense strand
guaagggcaauucaugaug

SEQ ID NO: 1887209 - RNA, 19 nt, Homo sapiens
  misc_RNA (1)...(19): siRNA sense strand
gcaaagagcugagcacauu

SEQ ID NO: 1887210 - RNA, 19 nt, Homo sapiens
  misc_RNA (1)...(19): siRNA sense strand
gggagaaccuaaagaagua

SEQ ID NO: 1887211 - RNA, 19 nt, Homo sapiens
  misc_RNA (1)...(19): siRNA sense strand
caacugcgcucacugcaaa

SEQ ID NO: 1887212 - RNA, 19 nt, Homo sapiens
  misc_RNA (1)...(19): siRNA sense strand
gaauaugacucugcaaaga

SEQ ID NO: 1887213 - RNA, 19 nt, Homo sapiens
  misc_RNA (1)...(19): siRNA sense strand
ggacugaacauuugaaaga

SEQ ID NO: 1887214 - RNA, 19 nt, Homo sapiens
  misc_RNA (1)...(19): siRNA sense strand
gcaugacacuugcuuugua

SEQ ID NO: 1887215 - RNA, 19 nt, Homo sapiens
  misc_RNA (1)...(19): siRNA sense strand
cauagaagcuggugacaug

SEQ ID NO: 1887216 - RNA, 19 nt, Homo sapiens
  misc_RNA (1)...(19): siRNA sense strand
caucagaggaccauucuua

SEQ ID NO: 1887217 - RNA, 19 nt, Homo sapiens
  misc_RNA (1)...(19): siRNA sense strand
gaaaggagcccuguauugu

SEQ ID NO: 1887218 - RNA, 19 nt, Homo sapiens
  misc_RNA (1)...(19): siRNA sense strand
ccaggcaaauguaagaaua

SEQ ID NO: 1887219 - RNA, 19 nt, Homo sapiens
  misc_RNA (1)...(19): siRNA sense strand
aaacagcgcuacuuacuca

SEQ ID NO: 1887220 - RNA, 19 nt, Homo sapiens
  misc_RNA (1)...(19): siRNA sense strand
caaacaacauggccuacaa

SEQ ID NO: 1887221 - RNA, 19 nt, Homo sapiens
  misc_RNA (1)...(19): siRNA sense strand
caacauggccuacaauaag

SEQ ID NO: 1887222 - RNA, 19 nt, Homo sapiens
  misc_RNA (1)...(19): siRNA sense strand
ggacaaacccagccaagug

SEQ ID NO: 1887223 - RNA, 19 nt, Homo sapiens
  misc_RNA (1)...(19): siRNA sense strand
caucuggacugcaugcuaa

SEQ ID NO: 1887224 - RNA, 19 nt, Homo sapiens
  misc_RNA (1)...(19): siRNA sense strand
uguacaggcucuuugaaua

SEQ ID NO: 1887225 - RNA, 19 nt, Homo sapiens
  misc_RNA (1)...(19): siRNA sense strand
caacucagcuuugggacaa

SEQ ID NO: 1887226 - RNA, 19 nt, Homo sapiens
  misc_RNA (1)...(19): siRNA sense strand
gcaagaagagacugauuga

SEQ ID NO: 1887227 - RNA, 19 nt, Homo sapiens
  misc_RNA (1)...(19): siRNA sense strand
gaagauccuuggagaaguc

SEQ ID NO: 1887228 - RNA, 19 nt, Homo sapiens
  misc_RNA (1)...(19): siRNA sense strand
cagcauugauggaauaaau

SEQ ID NO: 1887229 - RNA, 19 nt, Homo sapiens
  misc_RNA (1)...(19): siRNA sense strand
ggagaaaggagcccuguau

SEQ ID NO: 1887230 - RNA, 19 nt, Homo sapiens
  misc_RNA (1)...(19): siRNA sense strand
caacaugccucugacaauc

SEQ ID NO: 1887231 - RNA, 19 nt, Homo sapiens
  misc_RNA (1)...(19): siRNA sense strand
gaaccuaaagaaguaguua

SEQ ID NO: 1887232 - RNA, 19 nt, Homo sapiens
  misc_RNA (1)...(19): siRNA sense strand
gaugugaauuucccauaga

SEQ ID NO: 1887233 - RNA, 19 nt, Homo sapiens
  misc_RNA (1)...(19): siRNA sense strand
guaagaaacaugcucauuc

SEQ ID NO: 1887234 - RNA, 19 nt, Homo sapiens
  misc_RNA (1)...(19): siRNA sense strand
cugacaaucucuagucuaa

SEQ ID NO: 1887235 - RNA, 19 nt, Homo sapiens
  misc_RNA (1)...(19): siRNA sense strand
uggaauaaaugcacaagga

SEQ ID NO: 1887236 - RNA, 19 nt, Homo sapiens
  misc_RNA (1)...(19): siRNA sense strand
acugugagacugauuauua

SEQ ID NO: 1887237 - RNA, 19 nt, Homo sapiens
  misc_RNA (1)...(19): siRNA sense strand
ggagcgcuauacagaguuu

SEQ ID NO: 1887238 - RNA, 19 nt, Homo sapiens
  misc_RNA (1)...(19): siRNA sense strand
guacaggcucuuugaauau

SEQ ID NO: 1887239 - RNA, 19 nt, Homo sapiens
  misc_RNA (1)...(19): siRNA sense strand
gaaagcccauucggaacaa

SEQ ID NO: 1887240 - RNA, 19 nt, Homo sapiens
  misc_RNA (1)...(19): siRNA sense strand
ucacugggacugaacauuu

SEQ ID NO: 1887241 - RNA, 19 nt, Homo sapiens
  misc_RNA (1)...(19): siRNA sense strand
ucucagcauugauggaaua

SEQ ID NO: 1887242 - RNA, 19 nt, Homo sapiens
  misc_RNA (1)...(19): siRNA sense strand
ggaugugaauuucccauag

SEQ ID NO: 1887243 - RNA, 19 nt, Homo sapiens
  misc_RNA (1)...(19): siRNA sense strand
gacaaucucuagucuaaaa

SEQ ID NO: 1887244 - RNA, 19 nt, Homo sapiens
  misc_RNA (1)...(19): siRNA sense strand
ggugaacccuacugugaga

SEQ ID NO: 1887245 - RNA, 19 nt, Homo sapiens
  misc_RNA (1)...(19): siRNA sense strand
aaggagcccuguauuguga

SEQ ID NO: 1887246 - RNA, 19 nt, Homo sapiens
  misc_RNA (1)...(19): siRNA sense strand
ggaauaaaugcacaaggaa

SEQ ID NO: 1887247 - RNA, 19 nt, Homo sapiens
  misc_RNA (1)...(19): siRNA sense strand
gaagacuggcguccaagaa

SEQ ID NO: 1887248 - RNA, 19 nt, Homo sapiens
  misc_RNA (1)...(19): siRNA sense strand
ggaaagcccauucggaaca

SEQ ID NO: 1887249 - RNA, 19 nt, Homo sapiens
  misc_RNA (1)...(19): siRNA sense strand
caaaauggcccaccaagaa

SEQ ID NO: 1887250 - RNA, 19 nt, Homo sapiens
  misc_RNA (1)...(19): siRNA sense strand
gagaaaggagcccuguauu

SEQ ID NO: 1887251 - RNA, 19 nt, Homo sapiens
  misc_RNA (1)...(19): siRNA sense strand
gaauaaaugcacaaggaau

SEQ ID NO: 1887252 - RNA, 19 nt, Homo sapiens
  misc_RNA (1)...(19): siRNA sense strand
ucucaaacagcgcuacuua

SEQ ID NO: 1887253 - RNA, 19 nt, Homo sapiens
  misc_RNA (1)...(19): siRNA sense strand
gcgaccaccucaucacaug

SEQ ID NO: 1887254 - RNA, 19 nt, Homo sapiens
  misc_RNA (1)...(19): siRNA sense strand
aaagggagaaccuaaagaa

SEQ ID NO: 1887255 - RNA, 19 nt, Homo sapiens
  misc_RNA (1)...(19): siRNA sense strand
gacaaacccagccaaguga

SEQ ID NO: 1887256 - RNA, 19 nt, Homo sapiens
  misc_RNA (1)...(19): siRNA sense strand
caaagaaggcaaauaacuc

SEQ ID NO: 1887257 - RNA, 19 nt, Homo sapiens
  misc_RNA (1)...(19): siRNA sense strand
caugacacuugcuuuguau

SEQ ID NO: 1887258 - RNA, 19 nt, Homo sapiens
  misc_RNA (1)...(19): siRNA sense strand
gguacuauaugccauggau

SEQ ID NO: 1887259 - RNA, 19 nt, Homo sapiens
  misc_RNA (1)...(19): siRNA sense strand
ggaagauccuuggagaagu

SEQ ID NO: 1887260 - RNA, 19 nt, Homo sapiens
  misc_RNA (1)...(19): siRNA sense strand
gacugaacauuugaaagaa

SEQ ID NO: 1887261 - RNA, 19 nt, Homo sapiens
  misc_RNA (1)...(19): siRNA sense strand
agaaaggagcccuguauug

SEQ ID NO: 1887262 - RNA, 19 nt, Homo sapiens
  misc_RNA (1)...(19): siRNA sense strand
gcaaggcagcccaggcaaa

SEQ ID NO: 1887263 - RNA, 19 nt, Homo sapiens
  misc_RNA (1)...(19): siRNA sense strand
gagcugugcuaugagaaau

SEQ ID NO: 1887264 - RNA, 19 nt, Homo sapiens
  misc_RNA (1)...(19): siRNA sense strand
caacucagucucgcucuuu

SEQ ID NO: 1887265 - RNA, 19 nt, Homo sapiens
  misc_RNA (1)...(19): siRNA sense strand
aagaauaggcgaugugguu

SEQ ID NO: 1887266 - RNA, 19 nt, Homo sapiens
  misc_RNA (1)...(19): siRNA sense strand
gaagcccagaauaagauua

SEQ ID NO: 1887267 - RNA, 19 nt, Homo sapiens
  misc_RNA (1)...(19): siRNA sense strand
gaauguggucgaugccaaa

SEQ ID NO: 1887268 - RNA, 19 nt, Homo sapiens
  misc_RNA (1)...(19): siRNA sense strand
ccacuggcgucaucaaguc

SEQ ID NO: 1887269 - RNA, 19 nt, Homo sapiens
  misc_RNA (1)...(19): siRNA sense strand
guuaaaccugugcccauua

SEQ ID NO: 1887270 - RNA, 19 nt, Homo sapiens
  misc_RNA (1)...(19): siRNA sense strand
ugauuauuaugcccucuuu

SEQ ID NO: 1887271 - RNA, 19 nt, Homo sapiens
  misc_RNA (1)...(19): siRNA sense strand
gcagggcgguaaggauuuc

SEQ ID NO: 1887272 - RNA, 19 nt, Homo sapiens
  misc_RNA (1)...(19): siRNA sense strand
cgguaaggauuucaacaug

SEQ ID NO: 1887273 - RNA, 19 nt, Homo sapiens
  misc_RNA (1)...(19): siRNA sense strand
gcugugcuaugagaaauuc

SEQ ID NO: 1887274 - RNA, 19 nt, Homo sapiens
  misc_RNA (1)...(19): siRNA sense strand
ggaaacgaacuccgaugug

SEQ ID NO: 1887275 - RNA, 19 nt, Homo sapiens
  misc_RNA (1)...(19): siRNA sense strand
gcacugagcgcugguaaaa

SEQ ID NO: 1887276 - RNA, 19 nt, Homo sapiens
  misc_RNA (1)...(19): siRNA sense strand
caucuugaagcccagaaua

SEQ ID NO: 1887277 - RNA, 19 nt, Homo sapiens
  misc_RNA (1)...(19): siRNA sense strand
uauaugccauggaugugaa

SEQ ID NO: 1887278 - RNA, 19 nt, Homo sapiens
  misc_RNA (1)...(19): siRNA sense strand
auugugagcugugcuauga

SEQ ID NO: 1887279 - RNA, 19 nt, Homo sapiens
  misc_RNA (1)...(19): siRNA sense strand
gaauucaacugcgcucacu

SEQ ID NO: 1887280 - RNA, 19 nt, Homo sapiens
  misc_RNA (1)...(19): siRNA sense strand
cagaggaccauucuuagug

SEQ ID NO: 1887281 - RNA, 19 nt, Homo sapiens
  misc_RNA (1)...(19): siRNA sense strand
gagcaacuacaguguguca

SEQ ID NO: 1887282 - RNA, 19 nt, Homo sapiens
  misc_RNA (1)...(19): siRNA sense strand
gaaucugaagccgauaaua

SEQ ID NO: 1887283 - RNA, 19 nt, Homo sapiens
  misc_RNA (1)...(19): siRNA sense strand
guggagcgcuauacagagu

SEQ ID NO: 1887284 - RNA, 19 nt, Homo sapiens
  misc_RNA (1)...(19): siRNA sense strand
cgaugugguucucagcauu

SEQ ID NO: 1887285 - RNA, 19 nt, Homo sapiens
  misc_RNA (1)...(19): siRNA sense strand
uauuaugcccucuuuggua

SEQ ID NO: 1887286 - RNA, 19 nt, Homo sapiens
  misc_RNA (1)...(19): siRNA sense strand
acaacauggccuacaauaa

SEQ ID NO: 1887287 - RNA, 19 nt, Homo sapiens
  misc_RNA (1)...(19): siRNA sense strand
gaaauucuuugccccugaa

SEQ ID NO: 1887288 - RNA, 19 nt, Homo sapiens
  misc_RNA (1)...(19): siRNA sense strand
gauuucaacaugccucuga

SEQ ID NO: 1887289 - RNA, 19 nt, Homo sapiens
  misc_RNA (1)...(19): siRNA sense strand
cuaaagaaguaguuaaacc

SEQ ID NO: 1887290 - RNA, 19 nt, Homo sapiens
  misc_RNA (1)...(19): siRNA sense strand
gggaaacgaacuccgaugu

SEQ ID NO: 1887291 - RNA, 19 nt, Homo sapiens
  misc_RNA (1)...(19): siRNA sense strand
gaagagacugauugaggau

SEQ ID NO: 1887292 - RNA, 19 nt, Homo sapiens
  misc_RNA (1)...(19): siRNA sense strand
gcagagggacagagaagag

SEQ ID NO: 1887293 - RNA, 19 nt, Homo sapiens
  misc_RNA (1)...(19): siRNA sense strand
aaacaugcucauucuguga

SEQ ID NO: 1887294 - RNA, 19 nt, Homo sapiens
  misc_RNA (1)...(19): siRNA sense strand
cuuggcauguuuccuguuu

SEQ ID NO: 1887295 - RNA, 19 nt, Homo sapiens
  misc_RNA (1)...(19): siRNA sense strand
caacugcagcugccuucaa

SEQ ID NO: 1887296 - RNA, 19 nt, Homo sapiens
  misc_RNA (1)...(19): siRNA sense strand
gaauaagauuaaggguugu

SEQ ID NO: 1887297 - RNA, 19 nt, Homo sapiens
  misc_RNA (1)...(19): siRNA sense strand
cacugggacugaacauuug

SEQ ID NO: 1887298 - RNA, 19 nt, Homo sapiens
  misc_RNA (1)...(19): siRNA sense strand
ugaagccgauaauacaaag

SEQ ID NO: 1887299 - RNA, 19 nt, Homo sapiens
  misc_RNA (1)...(19): siRNA sense strand
ucaaacagcgcuacuuacu

SEQ ID NO: 1887300 - RNA, 19 nt, Homo sapiens
  misc_RNA (1)...(19): siRNA sense strand
caaggcagcccaggcaaau

SEQ ID NO: 1887301 - RNA, 19 nt, Homo sapiens
  misc_RNA (1)...(19): siRNA sense strand
caugcuaaugccaaucuua

SEQ ID NO: 1887302 - RNA, 19 nt, Homo sapiens
  misc_RNA (1)...(19): siRNA sense strand
ugugagcugugcuaugaga

SEQ ID NO: 1887303 - RNA, 19 nt, Homo sapiens
  misc_RNA (1)...(19): siRNA sense strand
gaugugguucucagcauug

SEQ ID NO: 1887304 - RNA, 19 nt, Homo sapiens
  misc_RNA (1)...(19): siRNA sense strand
uacaggcucuuugaauaug

SEQ ID NO: 1887305 - RNA, 19 nt, Homo sapiens
  misc_RNA (1)...(19): siRNA sense strand
cugugagacugauuauuau

SEQ ID NO: 1887306 - RNA, 19 nt, Homo sapiens
  misc_RNA (1)...(19): siRNA sense strand
gaaaucuuggcacccagaa

SEQ ID NO: 1887307 - RNA, 19 nt, Homo sapiens
  misc_RNA (1)...(19): siRNA sense strand
agaagcuggugacauguuc

SEQ ID NO: 1887308 - RNA, 19 nt, Homo sapiens
  misc_RNA (1)...(19): siRNA sense strand
ggcuacaccuggcaugaca

SEQ ID NO: 1887309 - RNA, 19 nt, Homo sapiens
  misc_RNA (1)...(19): siRNA sense strand
gcaaagagaugagcuuauu

SEQ ID NO: 1887310 - RNA, 19 nt, Homo sapiens
  misc_RNA (1)...(19): siRNA sense strand
gaacagcacuggacaagau

SEQ ID NO: 1887311 - RNA, 19 nt, Homo sapiens
  misc_RNA (1)...(19): siRNA sense strand
gcagagagaugccaauaga

SEQ ID NO: 1887312 - RNA, 19 nt, Homo sapiens
  misc_RNA (1)...(19): siRNA sense strand
gaagggccauuagauguaa

SEQ ID NO: 1887313 - RNA, 19 nt, Homo sapiens
  misc_RNA (1)...(19): siRNA sense strand
gaaacauggcuuaguuaua

SEQ ID NO: 1887314 - RNA, 19 nt, Homo sapiens
  misc_RNA (1)...(19): siRNA sense strand
gaacuggaacgacaacaaa

SEQ ID NO: 1887315 - RNA, 19 nt, Homo sapiens
  misc_RNA (1)...(19): siRNA sense strand
gaagcuacaacgagaguua

SEQ ID NO: 1887316 - RNA, 19 nt, Homo sapiens
  misc_RNA (1)...(19): siRNA sense strand
gaaaguugaagaugaauug

SEQ ID NO: 1887317 - RNA, 19 nt, Homo sapiens
  misc_RNA (1)...(19): siRNA sense strand
ggacagguucugagauaua

SEQ ID NO: 1887318 - RNA, 19 nt, Homo sapiens
  misc_RNA (1)...(19): siRNA sense strand
gaagaugaagcuuugagua

SEQ ID NO: 1887319 - RNA, 19 nt, Homo sapiens
  misc_RNA (1)...(19): siRNA sense strand
ugagaaaguugaagaugaa

SEQ ID NO: 1887320 - RNA, 19 nt, Homo sapiens
  misc_RNA (1)...(19): siRNA sense strand
gaagaacaauuugaucuac

SEQ ID NO: 1887321 - RNA, 19 nt, Homo sapiens
  misc_RNA (1)...(19): siRNA sense strand
gaaggaagaacuacuguca

SEQ ID NO: 1887322 - RNA, 19 nt, Homo sapiens
  misc_RNA (1)...(19): siRNA sense strand
ggacaccagcagcuuaaua

SEQ ID NO: 1887323 - RNA, 19 nt, Homo sapiens
  misc_RNA (1)...(19): siRNA sense strand
gaaaagaacaccugugaaa

SEQ ID NO: 1887324 - RNA, 19 nt, Homo sapiens
  misc_RNA (1)...(19): siRNA sense strand
gagaaacauggcuuaguua

SEQ ID NO: 1887325 - RNA, 19 nt, Homo sapiens
  misc_RNA (1)...(19): siRNA sense strand
cagaaaugcuccaggaaug

SEQ ID NO: 1887326 - RNA, 19 nt, Homo sapiens
  misc_RNA (1)...(19): siRNA sense strand
gacagguucugagauauaa

SEQ ID NO: 1887327 - RNA, 19 nt, Homo sapiens
  misc_RNA (1)...(19): siRNA sense strand
gauggaagaacuuaaagaa

SEQ ID NO: 1887328 - RNA, 19 nt, Homo sapiens
  misc_RNA (1)...(19): siRNA sense strand
ggagaagggccauuagaug

SEQ ID NO: 1887329 - RNA, 19 nt, Homo sapiens
  misc_RNA (1)...(19): siRNA sense strand
gagaagggccauuagaugu

SEQ ID NO: 1887330 - RNA, 19 nt, Homo sapiens
  misc_RNA (1)...(19): siRNA sense strand
ggaagcugcucaggucuug

SEQ ID NO: 1887331 - RNA, 19 nt, Homo sapiens
  misc_RNA (1)...(19): siRNA sense strand
ccaagcggcuggagaagau

SEQ ID NO: 1887332 - RNA, 19 nt, Homo sapiens
  misc_RNA (1)...(19): siRNA sense strand
ggacaagauugaggagaug

SEQ ID NO: 1887333 - RNA, 19 nt, Homo sapiens
  misc_RNA (1)...(19): siRNA sense strand
aaagaacaccugugaaaga

SEQ ID NO: 1887334 - RNA, 19 nt, Homo sapiens
  misc_RNA (1)...(19): siRNA sense strand
gaugaagcuuugaguaaca

SEQ ID NO: 1887335 - RNA, 19 nt, Homo sapiens
  misc_RNA (1)...(19): siRNA sense strand
ugaguaacauugccagaga

SEQ ID NO: 1887336 - RNA, 19 nt, Homo sapiens
  misc_RNA (1)...(19): siRNA sense strand
ugagaaugcugagaaaguu

SEQ ID NO: 1887337 - RNA, 19 nt, Homo sapiens
  misc_RNA (1)...(19): siRNA sense strand
ggcagaagcaagagauaua

SEQ ID NO: 1887338 - RNA, 19 nt, Homo sapiens
  misc_RNA (1)...(19): siRNA sense strand
uuagaaaggcagaaacaua

SEQ ID NO: 1887339 - RNA, 19 nt, Homo sapiens
  misc_RNA (1)...(19): siRNA sense strand
gauccagacacuucauuaa

SEQ ID NO: 1887340 - RNA, 19 nt, Homo sapiens
  misc_RNA (1)...(19): siRNA sense strand
gcagaauggcucagacuug

SEQ ID NO: 1887341 - RNA, 19 nt, Homo sapiens
  misc_RNA (1)...(19): siRNA sense strand
gguuuccaaugcacaguua

SEQ ID NO: 1887342 - RNA, 19 nt, Homo sapiens
  misc_RNA (1)...(19): siRNA sense strand
aggaacagauggcagaauu

SEQ ID NO: 1887343 - RNA, 19 nt, Homo sapiens
  misc_RNA (1)...(19): siRNA sense strand
cugagaaaguugaagauga

SEQ ID NO: 1887344 - RNA, 19 nt, Homo sapiens
  misc_RNA (1)...(19): siRNA sense strand
agggacagguucugagaua

SEQ ID NO: 1887345 - RNA, 19 nt, Homo sapiens
  misc_RNA (1)...(19): siRNA sense strand
uagaaaggcagaaacauau

SEQ ID NO: 1887346 - RNA, 19 nt, Homo sapiens
  misc_RNA (1)...(19): siRNA sense strand
gaaaggcagaaacauaugu

SEQ ID NO: 1887347 - RNA, 19 nt, Homo sapiens
  misc_RNA (1)...(19): siRNA sense strand
gcagaacaggauauaacua

SEQ ID NO: 1887348 - RNA, 19 nt, Homo sapiens
  misc_RNA (1)...(19): siRNA sense strand
aaagaaggccugcggcaaa

SEQ ID NO: 1887349 - RNA, 19 nt, Homo sapiens
  misc_RNA (1)...(19): siRNA sense strand
gagaagaacaauuugaucu

SEQ ID NO: 1887350 - RNA, 19 nt, Homo sapiens
  misc_RNA (1)...(19): siRNA sense strand
aaagagaugagcuuauuga

SEQ ID NO: 1887351 - RNA, 19 nt, Homo sapiens
  misc_RNA (1)...(19): siRNA sense strand
gacaaacaguaugcugaaa

SEQ ID NO: 1887352 - RNA, 19 nt, Homo sapiens
  misc_RNA (1)...(19): siRNA sense strand
ggaacagauggcagaauuu

SEQ ID NO: 1887353 - RNA, 19 nt, Homo sapiens
  misc_RNA (1)...(19): siRNA sense strand
gagaagaugaaggccaaua

SEQ ID NO: 1887354 - RNA, 19 nt, Homo sapiens
  misc_RNA (1)...(19): siRNA sense strand
caacgagaguuacgaacag

SEQ ID NO: 1887355 - RNA, 19 nt, Homo sapiens
  misc_RNA (1)...(19): siRNA sense strand
aagaugaagcuuugaguaa

SEQ ID NO: 1887356 - RNA, 19 nt, Homo sapiens
  misc_RNA (1)...(19): siRNA sense strand
gcagaaacauauguguagu

SEQ ID NO: 1887357 - RNA, 19 nt, Homo sapiens
  misc_RNA (1)...(19): siRNA sense strand
uaauagauccagacacuuc

SEQ ID NO: 1887358 - RNA, 19 nt, Homo sapiens
  misc_RNA (1)...(19): siRNA sense strand
gaugccaauagacaaauua

SEQ ID NO: 1887359 - RNA, 19 nt, Homo sapiens
  misc_RNA (1)...(19): siRNA sense strand
gcaagagauauacgcauga

SEQ ID NO: 1887360 - RNA, 19 nt, Homo sapiens
  misc_RNA (1)...(19): siRNA sense strand
caauuugaucuaccaagua

SEQ ID NO: 1887361 - RNA, 19 nt, Homo sapiens
  misc_RNA (1)...(19): siRNA sense strand
gcucagacuugcaguucau

SEQ ID NO: 1887362 - RNA, 19 nt, Homo sapiens
  misc_RNA (1)...(19): siRNA sense strand
gaacagauggcagaauuuu

SEQ ID NO: 1887363 - RNA, 19 nt, Homo sapiens
  misc_RNA (1)...(19): siRNA sense strand
agaaacauauguguagugu

SEQ ID NO: 1887364 - RNA, 19 nt, Homo sapiens
  misc_RNA (1)...(19): siRNA sense strand
ugcagaagaugaagcuuug

SEQ ID NO: 1887365 - RNA, 19 nt, Homo sapiens
  misc_RNA (1)...(19): siRNA sense strand
cuuaauagauccagacacu

SEQ ID NO: 1887366 - RNA, 19 nt, Homo sapiens
  misc_RNA (1)...(19): siRNA sense strand
uaacuaccuuggagcaaag

SEQ ID NO: 1887367 - RNA, 19 nt, Homo sapiens
  misc_RNA (1)...(19): siRNA sense strand
uagacacacucaaggaugu

SEQ ID NO: 1887368 - RNA, 19 nt, Homo sapiens
  misc_RNA (1)...(19): siRNA sense strand
ugacaaacaguaugcugaa

SEQ ID NO: 1887369 - RNA, 19 nt, Homo sapiens
  misc_RNA (1)...(19): siRNA sense strand
ggaguuagaaaggcagaaa

SEQ ID NO: 1887370 - RNA, 19 nt, Homo sapiens
  misc_RNA (1)...(19): siRNA sense strand
acaauuugaucuaccaagu

SEQ ID NO: 1887371 - RNA, 19 nt, Homo sapiens
  misc_RNA (1)...(19): siRNA sense strand
gauauacgcaugagagaac

SEQ ID NO: 1887372 - RNA, 19 nt, Homo sapiens
  misc_RNA (1)...(19): siRNA sense strand
gaaaugcuccaggaaugau

SEQ ID NO: 1887373 - RNA, 19 nt, Homo sapiens
  misc_RNA (1)...(19): siRNA sense strand
agaccuucaucucgaaauu

SEQ ID NO: 1887374 - RNA, 19 nt, Homo sapiens
  misc_RNA (1)...(19): siRNA sense strand
aggaagaacuacugucaca

SEQ ID NO: 1887375 - RNA, 19 nt, Homo sapiens
  misc_RNA (1)...(19): siRNA sense strand
agaagggccauuagaugua

SEQ ID NO: 1887376 - RNA, 19 nt, Homo sapiens
  misc_RNA (1)...(19): siRNA sense strand
acaagaccuucaucucgaa

SEQ ID NO: 1887377 - RNA, 19 nt, Homo sapiens
  misc_RNA (1)...(19): siRNA sense strand
gaggaggaacgacagaaau

SEQ ID NO: 1887378 - RNA, 19 nt, Homo sapiens
  misc_RNA (1)...(19): siRNA sense strand
gagauauacgcaugagaga

SEQ ID NO: 1887379 - RNA, 19 nt, Homo sapiens
  misc_RNA (1)...(19): siRNA sense strand
gagagaugccaauagacaa

SEQ ID NO: 1887380 - RNA, 19 nt, Homo sapiens
  misc_RNA (1)...(19): siRNA sense strand
gacuugcaguucaucgaaa

SEQ ID NO: 1887381 - RNA, 19 nt, Homo sapiens
  misc_RNA (1)...(19): siRNA sense strand
caaagagaugagcuuauug

SEQ ID NO: 1887382 - RNA, 19 nt, Homo sapiens
  misc_RNA (1)...(19): siRNA sense strand
gacaccagcagcuuaauag

SEQ ID NO: 1887383 - RNA, 19 nt, Homo sapiens
  misc_RNA (1)...(19): siRNA sense strand
caagagauauacgcaugag

SEQ ID NO: 1887384 - RNA, 19 nt, Homo sapiens
  misc_RNA (1)...(19): siRNA sense strand
auaacuaccuuggagcaaa

SEQ ID NO: 1887385 - RNA, 19 nt, Homo sapiens
  misc_RNA (1)...(19): siRNA sense strand
ggcagaaacauauguguag

SEQ ID NO: 1887386 - RNA, 19 nt, Homo sapiens
  misc_RNA (1)...(19): siRNA sense strand
ccaaguagacacacucaag

SEQ ID NO: 1887387 - RNA, 19 nt, Homo sapiens
  misc_RNA (1)...(19): siRNA sense strand
gacaaugagaagaacaauu

SEQ ID NO: 1887388 - RNA, 19 nt, Homo sapiens
  misc_RNA (1)...(19): siRNA sense strand
ccaaugcacaguuagacaa

SEQ ID NO: 1887389 - RNA, 19 nt, Homo sapiens
  misc_RNA (1)...(19): siRNA sense strand
caaacaguaugcugaaaau

SEQ ID NO: 1887390 - RNA, 19 nt, Homo sapiens
  misc_RNA (1)...(19): siRNA sense strand
gaagaugaaggccaauagg

SEQ ID NO: 1887391 - RNA, 19 nt, Homo sapiens
  misc_RNA (1)...(19): siRNA sense strand
uaaaacugcugcugagaau

SEQ ID NO: 1887392 - RNA, 19 nt, Homo sapiens
  misc_RNA (1)...(19): siRNA sense strand
ucaucgaaaugcagagaga

SEQ ID NO: 1887393 - RNA, 19 nt, Homo sapiens
  misc_RNA (1)...(19): siRNA sense strand
gcacaguuagacaaugaga

SEQ ID NO: 1887394 - RNA, 19 nt, Homo sapiens
  misc_RNA (1)...(19): siRNA sense strand
gaagcuuugaguaacauug

SEQ ID NO: 1887395 - RNA, 19 nt, Homo sapiens
  misc_RNA (1)...(19): siRNA sense strand
uacaagaaagccaugguuu

SEQ ID NO: 1887396 - RNA, 19 nt, Homo sapiens
  misc_RNA (1)...(19): siRNA sense strand
uggacaagauugaggagau

SEQ ID NO: 1887397 - RNA, 19 nt, Homo sapiens
  misc_RNA (1)...(19): siRNA sense strand
gagaaugcugagaaaguug

SEQ ID NO: 1887398 - RNA, 19 nt, Homo sapiens
  misc_RNA (1)...(19): siRNA sense strand
augcacaguuagacaauga

SEQ ID NO: 1887399 - RNA, 19 nt, Homo sapiens
  misc_RNA (1)...(19): siRNA sense strand
gggacagguucugagauau

SEQ ID NO: 1887400 - RNA, 19 nt, Homo sapiens
  misc_RNA (1)...(19): siRNA sense strand
gagaaggaagaacuacugu

SEQ ID NO: 1887401 - RNA, 19 nt, Homo sapiens
  misc_RNA (1)...(19): siRNA sense strand
cggcaaagagaugagcuua

SEQ ID NO: 1887402 - RNA, 19 nt, Homo sapiens
  misc_RNA (1)...(19): siRNA sense strand
gaacaauuugaucuaccaa

SEQ ID NO: 1887403 - RNA, 19 nt, Homo sapiens
  misc_RNA (1)...(19): siRNA sense strand
aaucaaaggaguuagaaag

SEQ ID NO: 1887404 - RNA, 19 nt, Homo sapiens
  misc_RNA (1)...(19): siRNA sense strand
cagaacaggauauaacuac

SEQ ID NO: 1887405 - RNA, 19 nt, Homo sapiens
  misc_RNA (1)...(19): siRNA sense strand
accagcagcuuaauagauc

SEQ ID NO: 1887406 - RNA, 19 nt, Homo sapiens
  misc_RNA (1)...(19): siRNA sense strand
gggcagaagcaagagauau

SEQ ID NO: 1887407 - RNA, 19 nt, Homo sapiens
  misc_RNA (1)...(19): siRNA sense strand
gaacaggauauaacuaccu

SEQ ID NO: 1887408 - RNA, 19 nt, Homo sapiens
  misc_RNA (1)...(19): siRNA sense strand
gcaacaaccccucuaagug

SEQ ID NO: 1887409 - RNA, 19 nt, Homo sapiens
  misc_RNA (1)...(19): siRNA sense strand
gcaaagagaugagcuuauu

SEQ ID NO: 1887410 - RNA, 19 nt, Homo sapiens
  misc_RNA (1)...(19): siRNA sense strand
gaacagcacuggacaagau

SEQ ID NO: 1887411 - RNA, 19 nt, Homo sapiens
  misc_RNA (1)...(19): siRNA sense strand
gcagagagaugccaauaga

SEQ ID NO: 1887412 - RNA, 19 nt, Homo sapiens
  misc_RNA (1)...(19): siRNA sense strand
gaagggccauuagauguaa

SEQ ID NO: 1887413 - RNA, 19 nt, Homo sapiens
  misc_RNA (1)...(19): siRNA sense strand
gaaacauggcuuaguuaua

SEQ ID NO: 1887414 - RNA, 19 nt, Homo sapiens
  misc_RNA (1)...(19): siRNA sense strand
gaacuggaacgacaacaaa

SEQ ID NO: 1887415 - RNA, 19 nt, Homo sapiens
  misc_RNA (1)...(19): siRNA sense strand
gaagcuacaacgagaguua

SEQ ID NO: 1887416 - RNA, 19 nt, Homo sapiens
  misc_RNA (1)...(19): siRNA sense strand
gaaaguugaagaugaauug

SEQ ID NO: 1887417 - RNA, 19 nt, Homo sapiens
  misc_RNA (1)...(19): siRNA sense strand
ggacagguucugagauaua

SEQ ID NO: 1887418 - RNA, 19 nt, Homo sapiens
  misc_RNA (1)...(19): siRNA sense strand
gaagaugaagcuuugagua

SEQ ID NO: 1887419 - RNA, 19 nt, Homo sapiens
  misc_RNA (1)...(19): siRNA sense strand
ugagaaaguugaagaugaa

SEQ ID NO: 1887420 - RNA, 19 nt, Homo sapiens
  misc_RNA (1)...(19): siRNA sense strand
gaagaacaauuugaucuac

SEQ ID NO: 1887421 - RNA, 19 nt, Homo sapiens
  misc_RNA (1)...(19): siRNA sense strand
gaaggaagaacuacuguca

SEQ ID NO: 1887422 - RNA, 19 nt, Homo sapiens
  misc_RNA (1)...(19): siRNA sense strand
ggacaccagcagcuuaaua

SEQ ID NO: 1887423 - RNA, 19 nt, Homo sapiens
  misc_RNA (1)...(19): siRNA sense strand
gaaaagaacaccugugaaa

SEQ ID NO: 1887424 - RNA, 19 nt, Homo sapiens
  misc_RNA (1)...(19): siRNA sense strand
gagaaacauggcuuaguua

SEQ ID NO: 1887425 - RNA, 19 nt, Homo sapiens
  misc_RNA (1)...(19): siRNA sense strand
cagaaaugcuccaggaaug

SEQ ID NO: 1887426 - RNA, 19 nt, Homo sapiens
  misc_RNA (1)...(19): siRNA sense strand
gacagguucugagauauaa

SEQ ID NO: 1887427 - RNA, 19 nt, Homo sapiens
  misc_RNA (1)...(19): siRNA sense strand
gauggaagaacuuaaagaa

SEQ ID NO: 1887428 - RNA, 19 nt, Homo sapiens
  misc_RNA (1)...(19): siRNA sense strand
ggagaagggccauuagaug

SEQ ID NO: 1887429 - RNA, 19 nt, Homo sapiens
  misc_RNA (1)...(19): siRNA sense strand
gagaagggccauuagaugu

SEQ ID NO: 1887430 - RNA, 19 nt, Homo sapiens
  misc_RNA (1)...(19): siRNA sense strand
ggaagcugcucaggucuug

SEQ ID NO: 1887431 - RNA, 19 nt, Homo sapiens
  misc_RNA (1)...(19): siRNA sense strand
ccaagcggcuggagaagau

SEQ ID NO: 1887432 - RNA, 19 nt, Homo sapiens
  misc_RNA (1)...(19): siRNA sense strand
ggacaagauugaggagaug

SEQ ID NO: 1887433 - RNA, 19 nt, Homo sapiens
  misc_RNA (1)...(19): siRNA sense strand
aaagaacaccugugaaaga

SEQ ID NO: 1887434 - RNA, 19 nt, Homo sapiens
  misc_RNA (1)...(19): siRNA sense strand
gaugaagcuuugaguaaca

SEQ ID NO: 1887435 - RNA, 19 nt, Homo sapiens
  misc_RNA (1)...(19): siRNA sense strand
ugaguaacauugccagaga

SEQ ID NO: 1887436 - RNA, 19 nt, Homo sapiens
  misc_RNA (1)...(19): siRNA sense strand
ugagaaugcugagaaaguu

SEQ ID NO: 1887437 - RNA, 19 nt, Homo sapiens
  misc_RNA (1)...(19): siRNA sense strand
ggcagaagcaagagauaua

SEQ ID NO: 1887438 - RNA, 19 nt, Homo sapiens
  misc_RNA (1)...(19): siRNA sense strand
uuagaaaggcagaaacaua

SEQ ID NO: 1887439 - RNA, 19 nt, Homo sapiens
  misc_RNA (1)...(19): siRNA sense strand
gauccagacacuucauuaa

SEQ ID NO: 1887440 - RNA, 19 nt, Homo sapiens
  misc_RNA (1)...(19): siRNA sense strand
gcagaauggcucagacuug

SEQ ID NO: 1887441 - RNA, 19 nt, Homo sapiens
  misc_RNA (1)...(19): siRNA sense strand
gguuuccaaugcacaguua

SEQ ID NO: 1887442 - RNA, 19 nt, Homo sapiens
  misc_RNA (1)...(19): siRNA sense strand
aggaacagauggcagaauu

SEQ ID NO: 1887443 - RNA, 19 nt, Homo sapiens
  misc_RNA (1)...(19): siRNA sense strand
cugagaaaguugaagauga

SEQ ID NO: 1887444 - RNA, 19 nt, Homo sapiens
  misc_RNA (1)...(19): siRNA sense strand
agggacagguucugagaua

SEQ ID NO: 1887445 - RNA, 19 nt, Homo sapiens
  misc_RNA (1)...(19): siRNA sense strand
uagaaaggcagaaacauau

SEQ ID NO: 1887446 - RNA, 19 nt, Homo sapiens
  misc_RNA (1)...(19): siRNA sense strand
gaaaggcagaaacauaugu

SEQ ID NO: 1887447 - RNA, 19 nt, Homo sapiens
  misc_RNA (1)...(19): siRNA sense strand
gcagaacaggauauaacua

SEQ ID NO: 1887448 - RNA, 19 nt, Homo sapiens
  misc_RNA (1)...(19): siRNA sense strand
aaagaaggccugcggcaaa

SEQ ID NO: 1887449 - RNA, 19 nt, Homo sapiens
  misc_RNA (1)...(19): siRNA sense strand
gagaagaacaauuugaucu

SEQ ID NO: 1887450 - RNA, 19 nt, Homo sapiens
  misc_RNA (1)...(19): siRNA sense strand
aaagagaugagcuuauuga

SEQ ID NO: 1887451 - RNA, 19 nt, Homo sapiens
  misc_RNA (1)...(19): siRNA sense strand
gacaaacaguaugcugaaa

SEQ ID NO: 1887452 - RNA, 19 nt, Homo sapiens
  misc_RNA (1)...(19): siRNA sense strand
ggaacagauggcagaauuu

SEQ ID NO: 1887453 - RNA, 19 nt, Homo sapiens
  misc_RNA (1)...(19): siRNA sense strand
gagaagaugaaggccaaua

SEQ ID NO: 1887454 - RNA, 19 nt, Homo sapiens
  misc_RNA (1)...(19): siRNA sense strand
caacgagaguuacgaacag

SEQ ID NO: 1887455 - RNA, 19 nt, Homo sapiens
  misc_RNA (1)...(19): siRNA sense strand
aagaugaagcuuugaguaa

SEQ ID NO: 1887456 - RNA, 19 nt, Homo sapiens
  misc_RNA (1)...(19): siRNA sense strand
gcagaaacauauguguagu

SEQ ID NO: 1887457 - RNA, 19 nt, Homo sapiens
  misc_RNA (1)...(19): siRNA sense strand
uaauagauccagacacuuc

SEQ ID NO: 1887458 - RNA, 19 nt, Homo sapiens
  misc_RNA (1)...(19): siRNA sense strand
gaugccaauagacaaauua

SEQ ID NO: 1887459 - RNA, 19 nt, Homo sapiens
  misc_RNA (1)...(19): siRNA sense strand
gcaagagauauacgcauga

SEQ ID NO: 1887460 - RNA, 19 nt, Homo sapiens
  misc_RNA (1)...(19): siRNA sense strand
caauuugaucuaccaagua

SEQ ID NO: 1887461 - RNA, 19 nt, Homo sapiens
  misc_RNA (1)...(19): siRNA sense strand
gcucagacuugcaguucau

SEQ ID NO: 1887462 - RNA, 19 nt, Homo sapiens
  misc_RNA (1)...(19): siRNA sense strand
gaacagauggcagaauuuu

SEQ ID NO: 1887463 - RNA, 19 nt, Homo sapiens
  misc_RNA (1)...(19): siRNA sense strand
agaaacauauguguagugu

SEQ ID NO: 1887464 - RNA, 19 nt, Homo sapiens
  misc_RNA (1)...(19): siRNA sense strand
ugcagaagaugaagcuuug

SEQ ID NO: 1887465 - RNA, 19 nt, Homo sapiens
  misc_RNA (1)...(19): siRNA sense strand
cuuaauagauccagacacu

SEQ ID NO: 1887466 - RNA, 19 nt, Homo sapiens
  misc_RNA (1)...(19): siRNA sense strand
uaacuaccuuggagcaaag

SEQ ID NO: 1887467 - RNA, 19 nt, Homo sapiens
  misc_RNA (1)...(19): siRNA sense strand
uagacacacucaaggaugu

SEQ ID NO: 1887468 - RNA, 19 nt, Homo sapiens
  misc_RNA (1)...(19): siRNA sense strand
ugacaaacaguaugcugaa

SEQ ID NO: 1887469 - RNA, 19 nt, Homo sapiens
  misc_RNA (1)...(19): siRNA sense strand
ggaguuagaaaggcagaaa

SEQ ID NO: 1887470 - RNA, 19 nt, Homo sapiens
  misc_RNA (1)...(19): siRNA sense strand
acaauuugaucuaccaagu

SEQ ID NO: 1887471 - RNA, 19 nt, Homo sapiens
  misc_RNA (1)...(19): siRNA sense strand
gauauacgcaugagagaac

SEQ ID NO: 1887472 - RNA, 19 nt, Homo sapiens
  misc_RNA (1)...(19): siRNA sense strand
gaaaugcuccaggaaugau

SEQ ID NO: 1887473 - RNA, 19 nt, Homo sapiens
  misc_RNA (1)...(19): siRNA sense strand
agaccuucaucucgaaauu

SEQ ID NO: 1887474 - RNA, 19 nt, Homo sapiens
  misc_RNA (1)...(19): siRNA sense strand
aggaagaacuacugucaca

SEQ ID NO: 1887475 - RNA, 19 nt, Homo sapiens
  misc_RNA (1)...(19): siRNA sense strand
agaagggccauuagaugua

SEQ ID NO: 1887476 - RNA, 19 nt, Homo sapiens
  misc_RNA (1)...(19): siRNA sense strand
acaagaccuucaucucgaa

SEQ ID NO: 1887477 - RNA, 19 nt, Homo sapiens
  misc_RNA (1)...(19): siRNA sense strand
gaggaggaacgacagaaau

SEQ ID NO: 1887478 - RNA, 19 nt, Homo sapiens
  misc_RNA (1)...(19): siRNA sense strand
gagauauacgcaugagaga

SEQ ID NO: 1887479 - RNA, 19 nt, Homo sapiens
  misc_RNA (1)...(19): siRNA sense strand
gagagaugccaauagacaa

SEQ ID NO: 1887480 - RNA, 19 nt, Homo sapiens
  misc_RNA (1)...(19): siRNA sense strand
gacuugcaguucaucgaaa

SEQ ID NO: 1887481 - RNA, 19 nt, Homo sapiens
  misc_RNA (1)...(19): siRNA sense strand
caaagagaugagcuuauug

SEQ ID NO: 1887482 - RNA, 19 nt, Homo sapiens
  misc_RNA (1)...(19): siRNA sense strand
gacaccagcagcuuaauag

SEQ ID NO: 1887483 - RNA, 19 nt, Homo sapiens
  misc_RNA (1)...(19): siRNA sense strand
caagagauauacgcaugag

SEQ ID NO: 1887484 - RNA, 19 nt, Homo sapiens
  misc_RNA (1)...(19): siRNA sense strand
auaacuaccuuggagcaaa

SEQ ID NO: 1887485 - RNA, 19 nt, Homo sapiens
  misc_RNA (1)...(19): siRNA sense strand
ggcagaaacauauguguag

SEQ ID NO: 1887486 - RNA, 19 nt, Homo sapiens
  misc_RNA (1)...(19): siRNA sense strand
ccaaguagacacacucaag

SEQ ID NO: 1887487 - RNA, 19 nt, Homo sapiens
  misc_RNA (1)...(19): siRNA sense strand
gacaaugagaagaacaauu

SEQ ID NO: 1887488 - RNA, 19 nt, Homo sapiens
  misc_RNA (1)...(19): siRNA sense strand
ccaaugcacaguuagacaa

SEQ ID NO: 1887489 - RNA, 19 nt, Homo sapiens
  misc_RNA (1)...(19): siRNA sense strand
caaacaguaugcugaaaau

SEQ ID NO: 1887490 - RNA, 19 nt, Homo sapiens
  misc_RNA (1)...(19): siRNA sense strand
gaagaugaaggccaauagg

SEQ ID NO: 1887491 - RNA, 19 nt, Homo sapiens
  misc_RNA (1)...(19): siRNA sense strand
uaaaacugcugcugagaau

SEQ ID NO: 1887492 - RNA, 19 nt, Homo sapiens
  misc_RNA (1)...(19): siRNA sense strand
ucaucgaaaugcagagaga

SEQ ID NO: 1887493 - RNA, 19 nt, Homo sapiens
  misc_RNA (1)...(19): siRNA sense strand
gcacaguuagacaaugaga

SEQ ID NO: 1887494 - RNA, 19 nt, Homo sapiens
  misc_RNA (1)...(19): siRNA sense strand
gaagcuuugaguaacauug

SEQ ID NO: 1887495 - RNA, 19 nt, Homo sapiens
  misc_RNA (1)...(19): siRNA sense strand
uacaagaaagccaugguuu

SEQ ID NO: 1887496 - RNA, 19 nt, Homo sapiens
  misc_RNA (1)...(19): siRNA sense strand
uggacaagauugaggagau

SEQ ID NO: 1887497 - RNA, 19 nt, Homo sapiens
  misc_RNA (1)...(19): siRNA sense strand
gagaaugcugagaaaguug

SEQ ID NO: 1887498 - RNA, 19 nt, Homo sapiens
  misc_RNA (1)...(19): siRNA sense strand
augcacaguuagacaauga

SEQ ID NO: 1887499 - RNA, 19 nt, Homo sapiens
  misc_RNA (1)...(19): siRNA sense strand
gggacagguucugagauau

SEQ ID NO: 1887500 - RNA, 19 nt, Homo sapiens
  misc_RNA (1)...(19): siRNA sense strand
gagaaggaagaacuacugu

SEQ ID NO: 1887501 - RNA, 19 nt, Homo sapiens
  misc_RNA (1)...(19): siRNA sense strand
cggcaaagagaugagcuua

SEQ ID NO: 1887502 - RNA, 19 nt, Homo sapiens
  misc_RNA (1)...(19): siRNA sense strand
gaacaauuugaucuaccaa

SEQ ID NO: 1887503 - RNA, 19 nt, Homo sapiens
  misc_RNA (1)...(19): siRNA sense strand
aaucaaaggaguuagaaag

SEQ ID NO: 1887504 - RNA, 19 nt, Homo sapiens
  misc_RNA (1)...(19): siRNA sense strand
cagaacaggauauaacuac

SEQ ID NO: 1887505 - RNA, 19 nt, Homo sapiens
  misc_RNA (1)...(19): siRNA sense strand
accagcagcuuaauagauc

SEQ ID NO: 1887506 - RNA, 19 nt, Homo sapiens
  misc_RNA (1)...(19): siRNA sense strand
gggcagaagcaagagauau

SEQ ID NO: 1887507 - RNA, 19 nt, Homo sapiens
  misc_RNA (1)...(19): siRNA sense strand
gaacaggauauaacuaccu

SEQ ID NO: 1887508 - RNA, 19 nt, Homo sapiens
  misc_RNA (1)...(19): siRNA sense strand
gcaacaaccccucuaagug

SEQ ID NO: 1887509 - RNA, 19 nt, Homo sapiens
  misc_RNA (1)...(19): siRNA sense strand
gaacuuaccuuacauagcu

SEQ ID NO: 1887510 - RNA, 19 nt, Homo sapiens
  misc_RNA (1)...(19): siRNA sense strand
ugacaggaaucuucuaauu

SEQ ID NO: 1887511 - RNA, 19 nt, Homo sapiens
  misc_RNA (1)...(19): siRNA sense strand
ggaccugcauacuuacuua

SEQ ID NO: 1887512 - RNA, 19 nt, Homo sapiens
  misc_RNA (1)...(19): siRNA sense strand
cagcaaaccucaugaagga

SEQ ID NO: 1887513 - RNA, 19 nt, Homo sapiens
  misc_RNA (1)...(19): siRNA sense strand
gguaauggcucagucauga

SEQ ID NO: 1887514 - RNA, 19 nt, Homo sapiens
  misc_RNA (1)...(19): siRNA sense strand
gcaugaaugucaccagaaa

SEQ ID NO: 1887515 - RNA, 19 nt, Homo sapiens
  misc_RNA (1)...(19): siRNA sense strand
uagaagauguugugauuga

SEQ ID NO: 1887516 - RNA, 19 nt, Homo sapiens
  misc_RNA (1)...(19): siRNA sense strand
acacacaguuggacacaua

SEQ ID NO: 1887517 - RNA, 19 nt, Homo sapiens
  misc_RNA (1)...(19): siRNA sense strand
uaagaugccuguuaaaugg

SEQ ID NO: 1887518 - RNA, 19 nt, Homo sapiens
  misc_RNA (1)...(19): siRNA sense strand
ggaaagaugggaaggaauu

SEQ ID NO: 1887519 - RNA, 19 nt, Homo sapiens
  misc_RNA (1)...(19): siRNA sense strand
gaccgagucuacacaagua

SEQ ID NO: 1887520 - RNA, 19 nt, Homo sapiens
  misc_RNA (1)...(19): siRNA sense strand
gcagugagcccuuggauuc

SEQ ID NO: 1887521 - RNA, 19 nt, Homo sapiens
  misc_RNA (1)...(19): siRNA sense strand
gacccugacucuauaauug

SEQ ID NO: 1887522 - RNA, 19 nt, Homo sapiens
  misc_RNA (1)...(19): siRNA sense strand
gggaagaagccaagccuua

SEQ ID NO: 1887523 - RNA, 19 nt, Homo sapiens
  misc_RNA (1)...(19): siRNA sense strand
caucgacccugacucuaua

SEQ ID NO: 1887524 - RNA, 19 nt, Homo sapiens
  misc_RNA (1)...(19): siRNA sense strand
gugcagggauuuccaaaga

SEQ ID NO: 1887525 - RNA, 19 nt, Homo sapiens
  misc_RNA (1)...(19): siRNA sense strand
guaauggaaggaaaucuua

SEQ ID NO: 1887526 - RNA, 19 nt, Homo sapiens
  misc_RNA (1)...(19): siRNA sense strand
ggaggaaguuggccagaau

SEQ ID NO: 1887527 - RNA, 19 nt, Homo sapiens
  misc_RNA (1)...(19): siRNA sense strand
gacaaugggucguauaucu

SEQ ID NO: 1887528 - RNA, 19 nt, Homo sapiens
  misc_RNA (1)...(19): siRNA sense strand
ggagagacuuguuaggaau

SEQ ID NO: 1887529 - RNA, 19 nt, Homo sapiens
  misc_RNA (1)...(19): siRNA sense strand
gggagagacuuguuaggaa

SEQ ID NO: 1887530 - RNA, 19 nt, Homo sapiens
  misc_RNA (1)...(19): siRNA sense strand
gaagaugggaccucucuga

SEQ ID NO: 1887531 - RNA, 19 nt, Homo sapiens
  misc_RNA (1)...(19): siRNA sense strand
uuacauagcuugggaguca

SEQ ID NO: 1887532 - RNA, 19 nt, Homo sapiens
  misc_RNA (1)...(19): siRNA sense strand
ccacaucuguaccaaauca

SEQ ID NO: 1887533 - RNA, 19 nt, Homo sapiens
  misc_RNA (1)...(19): siRNA sense strand
gaacaucgacccugacucu

SEQ ID NO: 1887534 - RNA, 19 nt, Homo sapiens
  misc_RNA (1)...(19): siRNA sense strand
gaaauaauguacucuugcu

SEQ ID NO: 1887535 - RNA, 19 nt, Homo sapiens
  misc_RNA (1)...(19): siRNA sense strand
gaacauaaaggugucaaau

SEQ ID NO: 1887536 - RNA, 19 nt, Homo sapiens
  misc_RNA (1)...(19): siRNA sense strand
gaugggaccucucugaaag

SEQ ID NO: 1887537 - RNA, 19 nt, Homo sapiens
  misc_RNA (1)...(19): siRNA sense strand
cugaaugaaucuagugaua

SEQ ID NO: 1887538 - RNA, 19 nt, Homo sapiens
  misc_RNA (1)...(19): siRNA sense strand
gaagucagcauccguaaca

SEQ ID NO: 1887539 - RNA, 19 nt, Homo sapiens
  misc_RNA (1)...(19): siRNA sense strand
gcaauaaucgcuuccuuca

SEQ ID NO: 1887540 - RNA, 19 nt, Homo sapiens
  misc_RNA (1)...(19): siRNA sense strand
gcacacagcauucugaucu

SEQ ID NO: 1887541 - RNA, 19 nt, Homo sapiens
  misc_RNA (1)...(19): siRNA sense strand
ggaugaacuguaugaaaua

SEQ ID NO: 1887542 - RNA, 19 nt, Homo sapiens
  misc_RNA (1)...(19): siRNA sense strand
acuagaagauguugugauu

SEQ ID NO: 1887543 - RNA, 19 nt, Homo sapiens
  misc_RNA (1)...(19): siRNA sense strand
gcacacgguuggguagauu

SEQ ID NO: 1887544 - RNA, 19 nt, Homo sapiens
  misc_RNA (1)...(19): siRNA sense strand
ugaugaaguuacagcaaua

SEQ ID NO: 1887545 - RNA, 19 nt, Homo sapiens
  misc_RNA (1)...(19): siRNA sense strand
uggaugaacuguaugaaau

SEQ ID NO: 1887546 - RNA, 19 nt, Homo sapiens
  misc_RNA (1)...(19): siRNA sense strand
ucacuguguuucugaauga

SEQ ID NO: 1887547 - RNA, 19 nt, Homo sapiens
  misc_RNA (1)...(19): siRNA sense strand
gaagaccacauacaggaaa

SEQ ID NO: 1887548 - RNA, 19 nt, Homo sapiens
  misc_RNA (1)...(19): siRNA sense strand
ccauugaacuuaccuuaca

SEQ ID NO: 1887549 - RNA, 19 nt, Homo sapiens
  misc_RNA (1)...(19): siRNA sense strand
ggugaccucugucgaauca

SEQ ID NO: 1887550 - RNA, 19 nt, Homo sapiens
  misc_RNA (1)...(19): siRNA sense strand
guaccagccugccuugaug

SEQ ID NO: 1887551 - RNA, 19 nt, Homo sapiens
  misc_RNA (1)...(19): siRNA sense strand
ccaaagcccaugguaauuu

SEQ ID NO: 1887552 - RNA, 19 nt, Homo sapiens
  misc_RNA (1)...(19): siRNA sense strand
caucaucuuuggcugcuuu

SEQ ID NO: 1887553 - RNA, 19 nt, Homo sapiens
  misc_RNA (1)...(19): siRNA sense strand
guucaggaauugcagcauu

SEQ ID NO: 1887554 - RNA, 19 nt, Homo sapiens
  misc_RNA (1)...(19): siRNA sense strand
augaagagaucgugucuga

SEQ ID NO: 1887555 - RNA, 19 nt, Homo sapiens
  misc_RNA (1)...(19): siRNA sense strand
uugcuaagaugccuguuaa

SEQ ID NO: 1887556 - RNA, 19 nt, Homo sapiens
  misc_RNA (1)...(19): siRNA sense strand
gagacaggaccaaagcaua

SEQ ID NO: 1887557 - RNA, 19 nt, Homo sapiens
  misc_RNA (1)...(19): siRNA sense strand
gugaggaacuacaaaauaa

SEQ ID NO: 1887558 - RNA, 19 nt, Homo sapiens
  misc_RNA (1)...(19): siRNA sense strand
uaacaccucugccuuacca

SEQ ID NO: 1887559 - RNA, 19 nt, Homo sapiens
  misc_RNA (1)...(19): siRNA sense strand
gauuuacaguggcgauuau

SEQ ID NO: 1887560 - RNA, 19 nt, Homo sapiens
  misc_RNA (1)...(19): siRNA sense strand
uaccacaucuguaccaaau

SEQ ID NO: 1887561 - RNA, 19 nt, Homo sapiens
  misc_RNA (1)...(19): siRNA sense strand
cuagguguguguauagaaa

SEQ ID NO: 1887562 - RNA, 19 nt, Homo sapiens
  misc_RNA (1)...(19): siRNA sense strand
gcagcaggauggagaacug

SEQ ID NO: 1887563 - RNA, 19 nt, Homo sapiens
  misc_RNA (1)...(19): siRNA sense strand
ucgaggaguuucucaguga

SEQ ID NO: 1887564 - RNA, 19 nt, Homo sapiens
  misc_RNA (1)...(19): siRNA sense strand
ugaccucugucgaaucaaa

SEQ ID NO: 1887565 - RNA, 19 nt, Homo sapiens
  misc_RNA (1)...(19): siRNA sense strand
gagcucggaucucuguuca

SEQ ID NO: 1887566 - RNA, 19 nt, Homo sapiens
  misc_RNA (1)...(19): siRNA sense strand
guggaaagaugggaaggaa

SEQ ID NO: 1887567 - RNA, 19 nt, Homo sapiens
  misc_RNA (1)...(19): siRNA sense strand
gagaaccgaucccuuagac

SEQ ID NO: 1887568 - RNA, 19 nt, Homo sapiens
  misc_RNA (1)...(19): siRNA sense strand
ccagaaccaugagauguau

SEQ ID NO: 1887569 - RNA, 19 nt, Homo sapiens
  misc_RNA (1)...(19): siRNA sense strand
cugcauacuuacuuacuuu

SEQ ID NO: 1887570 - RNA, 19 nt, Homo sapiens
  misc_RNA (1)...(19): siRNA sense strand
gagugcagaucaacaucaa

SEQ ID NO: 1887571 - RNA, 19 nt, Homo sapiens
  misc_RNA (1)...(19): siRNA sense strand
ggagauggcggucuucagu

SEQ ID NO: 1887572 - RNA, 19 nt, Homo sapiens
  misc_RNA (1)...(19): siRNA sense strand
ugacggagauggcggucuu

SEQ ID NO: 1887573 - RNA, 19 nt, Homo sapiens
  misc_RNA (1)...(19): siRNA sense strand
gaaguuacagcaauaaucg

SEQ ID NO: 1887574 - RNA, 19 nt, Homo sapiens
  misc_RNA (1)...(19): siRNA sense strand
gcucggaucucuguucaag

SEQ ID NO: 1887575 - RNA, 19 nt, Homo sapiens
  misc_RNA (1)...(19): siRNA sense strand
gacgguacauccugaaugg

SEQ ID NO: 1887576 - RNA, 19 nt, Homo sapiens
  misc_RNA (1)...(19): siRNA sense strand
ggacuuccucacuuuacua

SEQ ID NO: 1887577 - RNA, 19 nt, Homo sapiens
  misc_RNA (1)...(19): siRNA sense strand
cuaagaugccuguuaaaug

SEQ ID NO: 1887578 - RNA, 19 nt, Homo sapiens
  misc_RNA (1)...(19): siRNA sense strand
gcuaagaugccuguuaaau

SEQ ID NO: 1887579 - RNA, 19 nt, Homo sapiens
  misc_RNA (1)...(19): siRNA sense strand
ugaagaccaugaaguugga

SEQ ID NO: 1887580 - RNA, 19 nt, Homo sapiens
  misc_RNA (1)...(19): siRNA sense strand
gggagucagugaggaacua

SEQ ID NO: 1887581 - RNA, 19 nt, Homo sapiens
  misc_RNA (1)...(19): siRNA sense strand
gaguugggcccuucaguga

SEQ ID NO: 1887582 - RNA, 19 nt, Homo sapiens
  misc_RNA (1)...(19): siRNA sense strand
gaucaacaucaaagcaauu

SEQ ID NO: 1887583 - RNA, 19 nt, Homo sapiens
  misc_RNA (1)...(19): siRNA sense strand
ggucuguaauggaaggaaa

SEQ ID NO: 1887584 - RNA, 19 nt, Homo sapiens
  misc_RNA (1)...(19): siRNA sense strand
gguguuuccugcaugaaug

SEQ ID NO: 1887585 - RNA, 19 nt, Homo sapiens
  misc_RNA (1)...(19): siRNA sense strand
cuggagaaccgaucccuua

SEQ ID NO: 1887586 - RNA, 19 nt, Homo sapiens
  misc_RNA (1)...(19): siRNA sense strand
accaugagauguaugacua

SEQ ID NO: 1887587 - RNA, 19 nt, Homo sapiens
  misc_RNA (1)...(19): siRNA sense strand
ggacacauaauacuuucug

SEQ ID NO: 1887588 - RNA, 19 nt, Homo sapiens
  misc_RNA (1)...(19): siRNA sense strand
uaucugagcaacaggaauu

SEQ ID NO: 1887589 - RNA, 19 nt, Homo sapiens
  misc_RNA (1)...(19): siRNA sense strand
ggaagaccacauacaggaa

SEQ ID NO: 1887590 - RNA, 19 nt, Homo sapiens
  misc_RNA (1)...(19): siRNA sense strand
uaccaggacaccacaauuu

SEQ ID NO: 1887591 - RNA, 19 nt, Homo sapiens
  misc_RNA (1)...(19): siRNA sense strand
aaagugaugugugggcauu

SEQ ID NO: 1887592 - RNA, 19 nt, Homo sapiens
  misc_RNA (1)...(19): siRNA sense strand
caaagcccaugguaauuuu

SEQ ID NO: 1887593 - RNA, 19 nt, Homo sapiens
  misc_RNA (1)...(19): siRNA sense strand
ccucuugccuucaaacaca

SEQ ID NO: 1887594 - RNA, 19 nt, Homo sapiens
  misc_RNA (1)...(19): siRNA sense strand
uuacgucaauacacaguug

SEQ ID NO: 1887595 - RNA, 19 nt, Homo sapiens
  misc_RNA (1)...(19): siRNA sense strand
agauuuagcugcucgaaac

SEQ ID NO: 1887596 - RNA, 19 nt, Homo sapiens
  misc_RNA (1)...(19): siRNA sense strand
gaagauguugugauugaca

SEQ ID NO: 1887597 - RNA, 19 nt, Homo sapiens
  misc_RNA (1)...(19): siRNA sense strand
gaaagaugggaaggaauug

SEQ ID NO: 1887598 - RNA, 19 nt, Homo sapiens
  misc_RNA (1)...(19): siRNA sense strand
gcaauucccuccccaccaa

SEQ ID NO: 1887599 - RNA, 19 nt, Homo sapiens
  misc_RNA (1)...(19): siRNA sense strand
ggagaaccgaucccuuaga

SEQ ID NO: 1887600 - RNA, 19 nt, Homo sapiens
  misc_RNA (1)...(19): siRNA sense strand
gcauuuggcgugaccaugu

SEQ ID NO: 1887601 - RNA, 19 nt, Homo sapiens
  misc_RNA (1)...(19): siRNA sense strand
gaauggaguaucugagcaa

SEQ ID NO: 1887602 - RNA, 19 nt, Homo sapiens
  misc_RNA (1)...(19): siRNA sense strand
uaaacuagaagauguugug

SEQ ID NO: 1887603 - RNA, 19 nt, Homo sapiens
  misc_RNA (1)...(19): siRNA sense strand
aagcugauccgcuggguaa

SEQ ID NO: 1887604 - RNA, 19 nt, Homo sapiens
  misc_RNA (1)...(19): siRNA sense strand
guucaaguccacaaugcua

SEQ ID NO: 1887605 - RNA, 19 nt, Homo sapiens
  misc_RNA (1)...(19): siRNA sense strand
ggacgguacauccugaaug

SEQ ID NO: 1887606 - RNA, 19 nt, Homo sapiens
  misc_RNA (1)...(19): siRNA sense strand
agacaggaccaaagcauau

SEQ ID NO: 1887607 - RNA, 19 nt, Homo sapiens
  misc_RNA (1)...(19): siRNA sense strand
cagcgugcaugaaagacuu

SEQ ID NO: 1887608 - RNA, 19 nt, Homo sapiens
  misc_RNA (1)...(19): siRNA sense strand
guuugggucuguaauggaa

SEQ ID NO: 1887609 - RNA, 19 nt, Homo sapiens
  misc_RNA (1)...(19): siRNA sense strand
cagaagagaucaucaagga

SEQ ID NO: 1887610 - RNA, 19 nt, Homo sapiens
  misc_RNA (1)...(19): siRNA sense strand
gaggaaauuucuuuacuuc

SEQ ID NO: 1887611 - RNA, 19 nt, Homo sapiens
  misc_RNA (1)...(19): siRNA sense strand
gagcaugcaagaugaaauu

SEQ ID NO: 1887612 - RNA, 19 nt, Homo sapiens
  misc_RNA (1)...(19): siRNA sense strand
ggcaagggcuacuaugaug

SEQ ID NO: 1887613 - RNA, 19 nt, Homo sapiens
  misc_RNA (1)...(19): siRNA sense strand
gcaaucacauggauauggu

SEQ ID NO: 1887614 - RNA, 19 nt, Homo sapiens
  misc_RNA (1)...(19): siRNA sense strand
aagaugaaauugagacaga

SEQ ID NO: 1887615 - RNA, 19 nt, Homo sapiens
  misc_RNA (1)...(19): siRNA sense strand
gggcuacuaugaugccuau

SEQ ID NO: 1887616 - RNA, 19 nt, Homo sapiens
  misc_RNA (1)...(19): siRNA sense strand
gaaggugauugcccacagu

SEQ ID NO: 1887617 - RNA, 19 nt, Homo sapiens
  misc_RNA (1)...(19): siRNA sense strand
uagaugaaguccuuuacga

SEQ ID NO: 1887618 - RNA, 19 nt, Homo sapiens
  misc_RNA (1)...(19): siRNA sense strand
ccagagcaaucacauggau

SEQ ID NO: 1887619 - RNA, 19 nt, Homo sapiens
  misc_RNA (1)...(19): siRNA sense strand
cagaggaaauuucuuuacu

SEQ ID NO: 1887620 - RNA, 19 nt, Homo sapiens
  misc_RNA (1)...(19): siRNA sense strand
gaaauugagacagaagaga

SEQ ID NO: 1887621 - RNA, 19 nt, Homo sapiens
  misc_RNA (1)...(19): siRNA sense strand
caccagaggaaauuucuuu

SEQ ID NO: 1887622 - RNA, 19 nt, Homo sapiens
  misc_RNA (1)...(19): siRNA sense strand
gacuugaucucaucuucau

SEQ ID NO: 1887623 - RNA, 19 nt, Homo sapiens
  misc_RNA (1)...(19): siRNA sense strand
gggacuugaucucaucuuc

SEQ ID NO: 1887624 - RNA, 19 nt, Homo sapiens
  misc_RNA (1)...(19): siRNA sense strand
cgacaugaagguagaugaa

SEQ ID NO: 1887625 - RNA, 19 nt, Homo sapiens
  misc_RNA (1)...(19): siRNA sense strand
gagaucaucaaggacauuu

SEQ ID NO: 1887626 - RNA, 19 nt, Homo sapiens
  misc_RNA (1)...(19): siRNA sense strand
gcaugcaagaugaaauuga

SEQ ID NO: 1887627 - RNA, 19 nt, Homo sapiens
  misc_RNA (1)...(19): siRNA sense strand
ggacuugaucucaucuuca

SEQ ID NO: 1887628 - RNA, 19 nt, Homo sapiens
  misc_RNA (1)...(19): siRNA sense strand
gauauggugagaauagaau

SEQ ID NO: 1887629 - RNA, 19 nt, Homo sapiens
  misc_RNA (1)...(19): siRNA sense strand
acauggauauggugagaau

SEQ ID NO: 1887630 - RNA, 19 nt, Homo sapiens
  misc_RNA (1)...(19): siRNA sense strand
gggcaagggcuacuaugau

SEQ ID NO: 1887631 - RNA, 19 nt, Homo sapiens
  misc_RNA (1)...(19): siRNA sense strand
ggauauggugagaauagaa

SEQ ID NO: 1887632 - RNA, 19 nt, Homo sapiens
  misc_RNA (1)...(19): siRNA sense strand
caugcaagaugaaauugag

SEQ ID NO: 1887633 - RNA, 19 nt, Homo sapiens
  misc_RNA (1)...(19): siRNA sense strand
cccaaaacauccuggaaua

SEQ ID NO: 1887634 - RNA, 19 nt, Homo sapiens
  misc_RNA (1)...(19): siRNA sense strand
aauagaaucaccagaggaa

SEQ ID NO: 1887635 - RNA, 19 nt, Homo sapiens
  misc_RNA (1)...(19): siRNA sense strand
agacagaagagaucaucaa

SEQ ID NO: 1887636 - RNA, 19 nt, Homo sapiens
  misc_RNA (1)...(19): siRNA sense strand
uagaaucaccagaggaaau

SEQ ID NO: 1887637 - RNA, 19 nt, Homo sapiens
  misc_RNA (1)...(19): siRNA sense strand
cuacuaugaugccuaucug

SEQ ID NO: 1887638 - RNA, 19 nt, Homo sapiens
  misc_RNA (1)...(19): siRNA sense strand
agaaucaccagaggaaauu

SEQ ID NO: 1887639 - RNA, 19 nt, Homo sapiens
  misc_RNA (1)...(19): siRNA sense strand
acaugaagguagaugaagu

SEQ ID NO: 1887640 - RNA, 19 nt, Homo sapiens
  misc_RNA (1)...(19): siRNA sense strand
gcaagaugaaauugagaca

SEQ ID NO: 1887641 - RNA, 19 nt, Homo sapiens
  misc_RNA (1)...(19): siRNA sense strand
augaaguccuuuacgaaga

SEQ ID NO: 1887642 - RNA, 19 nt, Homo sapiens
  misc_RNA (1)...(19): siRNA sense strand
agagcaaucacauggauau

SEQ ID NO: 1887643 - RNA, 19 nt, Homo sapiens
  misc_RNA (1)...(19): siRNA sense strand
ugccaggccuuggguuuga

SEQ ID NO: 1887644 - RNA, 19 nt, Homo sapiens
  misc_RNA (1)...(19): siRNA sense strand
gacagaagagaucaucaag

SEQ ID NO: 1887645 - RNA, 19 nt, Homo sapiens
  misc_RNA (1)...(19): siRNA sense strand
ugaaguccuuuacgaagac

SEQ ID NO: 1887646 - RNA, 19 nt, Homo sapiens
  misc_RNA (1)...(19): siRNA sense strand
uuucugagcaugcaagaug

SEQ ID NO: 1887647 - RNA, 19 nt, Homo sapiens
  misc_RNA (1)...(19): siRNA sense strand
gaaucaccagaggaaauuu

SEQ ID NO: 1887648 - RNA, 19 nt, Homo sapiens
  misc_RNA (1)...(19): siRNA sense strand
ccagaggaaauuucuuuac

SEQ ID NO: 1887649 - RNA, 19 nt, Homo sapiens
  misc_RNA (1)...(19): siRNA sense strand
agaugaaguccuuuacgaa

SEQ ID NO: 1887650 - RNA, 19 nt, Homo sapiens
  misc_RNA (1)...(19): siRNA sense strand
agaugaaauugagacagaa

SEQ ID NO: 1887651 - RNA, 19 nt, Homo sapiens
  misc_RNA (1)...(19): siRNA sense strand
gcuacuaugaugccuaucu

SEQ ID NO: 1887652 - RNA, 19 nt, Homo sapiens
  misc_RNA (1)...(19): siRNA sense strand
cagagcaaucacauggaua

SEQ ID NO: 1887653 - RNA, 19 nt, Homo sapiens
  misc_RNA (1)...(19): siRNA sense strand
aaauugagacagaagagau

SEQ ID NO: 1887654 - RNA, 19 nt, Homo sapiens
  misc_RNA (1)...(19): siRNA sense strand
gaugaaauugagacagaag

SEQ ID NO: 1887655 - RNA, 19 nt, Homo sapiens
  misc_RNA (1)...(19): siRNA sense strand
aaaacgacaugaagguaga

SEQ ID NO: 1887656 - RNA, 19 nt, Homo sapiens
  misc_RNA (1)...(19): siRNA sense strand
gguaccgguuccagagcaa

SEQ ID NO: 1887657 - RNA, 19 nt, Homo sapiens
  misc_RNA (1)...(19): siRNA sense strand
gcccacagugaguaucaaa

SEQ ID NO: 1887658 - RNA, 19 nt, Homo sapiens
  misc_RNA (1)...(19): siRNA sense strand
uggauauggugagaauaga

SEQ ID NO: 1887659 - RNA, 19 nt, Homo sapiens
  misc_RNA (1)...(19): siRNA sense strand
caacaucucugccaaguau

SEQ ID NO: 1887660 - RNA, 19 nt, Homo sapiens
  misc_RNA (1)...(19): siRNA sense strand
cagcauaucuuugugaauu

SEQ ID NO: 1887661 - RNA, 19 nt, Homo sapiens
  misc_RNA (1)...(19): siRNA sense strand
ggacaguucuucagcaaca

SEQ ID NO: 1887662 - RNA, 19 nt, Homo sapiens
  misc_RNA (1)...(19): siRNA sense strand
cgaagaaacuccagaacug

SEQ ID NO: 1887663 - RNA, 19 nt, Homo sapiens
  misc_RNA (1)...(19): siRNA sense strand
ucacuaagcccuucacaaa

SEQ ID NO: 1887664 - RNA, 19 nt, Homo sapiens
  misc_RNA (1)...(19): siRNA sense strand
caacaucuccggcaucuug

SEQ ID NO: 1887665 - RNA, 19 nt, Homo sapiens
  misc_RNA (1)...(19): siRNA sense strand
ugaagaaugugaccuacaa

SEQ ID NO: 1887666 - RNA, 19 nt, Homo sapiens
  misc_RNA (1)...(19): siRNA sense strand
aagggaagauucucuguuu

SEQ ID NO: 1887667 - RNA, 19 nt, Homo sapiens
  misc_RNA (1)...(19): siRNA sense strand
ccaacaagacccagauuaa

SEQ ID NO: 1887668 - RNA, 19 nt, Homo sapiens
  misc_RNA (1)...(19): siRNA sense strand
aaaguuaucagccaaauug

SEQ ID NO: 1887669 - RNA, 19 nt, Homo sapiens
  misc_RNA (1)...(19): siRNA sense strand
cggcuacacugauagauga

SEQ ID NO: 1887670 - RNA, 19 nt, Homo sapiens
  misc_RNA (1)...(19): siRNA sense strand
uaaccaagauugaacuucu

SEQ ID NO: 1887671 - RNA, 19 nt, Homo sapiens
  misc_RNA (1)...(19): siRNA sense strand
ugagaccuuugauaacaua

SEQ ID NO: 1887672 - RNA, 19 nt, Homo sapiens
  misc_RNA (1)...(19): siRNA sense strand
gaacgucaaucaccaacac

SEQ ID NO: 1887673 - RNA, 19 nt, Homo sapiens
  misc_RNA (1)...(19): siRNA sense strand
gagaucauaacccagcuua

SEQ ID NO: 1887674 - RNA, 19 nt, Homo sapiens
  misc_RNA (1)...(19): siRNA sense strand
agaagaccaucaacacuga

SEQ ID NO: 1887675 - RNA, 19 nt, Homo sapiens
  misc_RNA (1)...(19): siRNA sense strand
agcaacagcucuauuaugu

SEQ ID NO: 1887676 - RNA, 19 nt, Homo sapiens
  misc_RNA (1)...(19): siRNA sense strand
gggaucaaguggucagaga

SEQ ID NO: 1887677 - RNA, 19 nt, Homo sapiens
  misc_RNA (1)...(19): siRNA sense strand
ucucggauuucucuacuuu

SEQ ID NO: 1887678 - RNA, 19 nt, Homo sapiens
  misc_RNA (1)...(19): siRNA sense strand
gggauugggagauugauuu

SEQ ID NO: 1887679 - RNA, 19 nt, Homo sapiens
  misc_RNA (1)...(19): siRNA sense strand
aaauugcaaugaacgauga

SEQ ID NO: 1887680 - RNA, 19 nt, Homo sapiens
  misc_RNA (1)...(19): siRNA sense strand
ucaacuggcuguccguguu

SEQ ID NO: 1887681 - RNA, 19 nt, Homo sapiens
  misc_RNA (1)...(19): siRNA sense strand
gcauaucuuugugaauuuc

SEQ ID NO: 1887682 - RNA, 19 nt, Homo sapiens
  misc_RNA (1)...(19): siRNA sense strand
ccugagaccuuugauaaca

SEQ ID NO: 1887683 - RNA, 19 nt, Homo sapiens
  misc_RNA (1)...(19): siRNA sense strand
gaucaaguggucagagaga

SEQ ID NO: 1887684 - RNA, 19 nt, Homo sapiens
  misc_RNA (1)...(19): siRNA sense strand
cagauuaacgucacuguuc

SEQ ID NO: 1887685 - RNA, 19 nt, Homo sapiens
  misc_RNA (1)...(19): siRNA sense strand
gauaacauaaccauuagca

SEQ ID NO: 1887686 - RNA, 19 nt, Homo sapiens
  misc_RNA (1)...(19): siRNA sense strand
gcaaagagaccaacaaaac

SEQ ID NO: 1887687 - RNA, 19 nt, Homo sapiens
  misc_RNA (1)...(19): siRNA sense strand
aggagaacaucgccaaaug

SEQ ID NO: 1887688 - RNA, 19 nt, Homo sapiens
  misc_RNA (1)...(19): siRNA sense strand
gagcuuccacuucaagaau

SEQ ID NO: 1887689 - RNA, 19 nt, Homo sapiens
  misc_RNA (1)...(19): siRNA sense strand
gagccacuguccaugacuu

SEQ ID NO: 1887690 - RNA, 19 nt, Homo sapiens
  misc_RNA (1)...(19): siRNA sense strand
gcaccuguaaccaagauug

SEQ ID NO: 1887691 - RNA, 19 nt, Homo sapiens
  misc_RNA (1)...(19): siRNA sense strand
gccagcauaucuuugugaa

SEQ ID NO: 1887692 - RNA, 19 nt, Homo sapiens
  misc_RNA (1)...(19): siRNA sense strand
caggacaguucuucagcaa

SEQ ID NO: 1887693 - RNA, 19 nt, Homo sapiens
  misc_RNA (1)...(19): siRNA sense strand
cuccacggcuacacugaua

SEQ ID NO: 1887694 - RNA, 19 nt, Homo sapiens
  misc_RNA (1)...(19): siRNA sense strand
caacacugauuuccccuuu

SEQ ID NO: 1887695 - RNA, 19 nt, Homo sapiens
  misc_RNA (1)...(19): siRNA sense strand
gcaggucgccacugucauc

SEQ ID NO: 1887696 - RNA, 19 nt, Homo sapiens
  misc_RNA (1)...(19): siRNA sense strand
gggaugccgucgucuccaa

SEQ ID NO: 1887697 - RNA, 19 nt, Homo sapiens
  misc_RNA (1)...(19): siRNA sense strand
gcaacaucucugccaagua

SEQ ID NO: 1887698 - RNA, 19 nt, Homo sapiens
  misc_RNA (1)...(19): siRNA sense strand
gagagggcuuauccacuca

SEQ ID NO: 1887699 - RNA, 19 nt, Homo sapiens
  misc_RNA (1)...(19): siRNA sense strand
ggucgccacugucaucaag

SEQ ID NO: 1887700 - RNA, 19 nt, Homo sapiens
  misc_RNA (1)...(19): siRNA sense strand
caagggauugggagauuga

SEQ ID NO: 1887701 - RNA, 19 nt, Homo sapiens
  misc_RNA (1)...(19): siRNA sense strand
ucagccaaauugcaaugaa

SEQ ID NO: 1887702 - RNA, 19 nt, Homo sapiens
  misc_RNA (1)...(19): siRNA sense strand
caugguguccucuucauug

SEQ ID NO: 1887703 - RNA, 19 nt, Homo sapiens
  misc_RNA (1)...(19): siRNA sense strand
cagcaacagcucuauuaug

SEQ ID NO: 1887704 - RNA, 19 nt, Homo sapiens
  misc_RNA (1)...(19): siRNA sense strand
gauuuuacuucucggauuu

SEQ ID NO: 1887705 - RNA, 19 nt, Homo sapiens
  misc_RNA (1)...(19): siRNA sense strand
ggaaucggcgugauaacca

SEQ ID NO: 1887706 - RNA, 19 nt, Homo sapiens
  misc_RNA (1)...(19): siRNA sense strand
aagcaaagagaccaacaaa

SEQ ID NO: 1887707 - RNA, 19 nt, Homo sapiens
  misc_RNA (1)...(19): siRNA sense strand
ccaugaagaaugugaccua

SEQ ID NO: 1887708 - RNA, 19 nt, Homo sapiens
  misc_RNA (1)...(19): siRNA sense strand
gaucggagugaguucagaa

SEQ ID NO: 1887709 - RNA, 19 nt, Homo sapiens
  misc_RNA (1)...(19): siRNA sense strand
caacaagacccagauuaac

SEQ ID NO: 1887710 - RNA, 19 nt, Homo sapiens
  misc_RNA (1)...(19): siRNA sense strand
guccaugacuucuucaacu

SEQ ID NO: 1887711 - RNA, 19 nt, Homo sapiens
  misc_RNA (1)...(19): siRNA sense strand
gaaccuacccacucuucag

SEQ ID NO: 1887712 - RNA, 19 nt, Homo sapiens
  misc_RNA (1)...(19): siRNA sense strand
cuccugagaccuuugauaa

SEQ ID NO: 1887713 - RNA, 19 nt, Homo sapiens
  misc_RNA (1)...(19): siRNA sense strand
cagaugcgcugcugcuacu

SEQ ID NO: 1887714 - RNA, 19 nt, Homo sapiens
  misc_RNA (1)...(19): siRNA sense strand
gaaucggcgugauaaccau

SEQ ID NO: 1887715 - RNA, 19 nt, Homo sapiens
  misc_RNA (1)...(19): siRNA sense strand
gugguugccugaucaugau

SEQ ID NO: 1887716 - RNA, 19 nt, Homo sapiens
  misc_RNA (1)...(19): siRNA sense strand
ggucagagagagacaccaa

SEQ ID NO: 1887717 - RNA, 19 nt, Homo sapiens
  misc_RNA (1)...(19): siRNA sense strand
gggaagauucucuguuucu

SEQ ID NO: 1887718 - RNA, 19 nt, Homo sapiens
  misc_RNA (1)...(19): siRNA sense strand
guuaucagccaaauugcaa

SEQ ID NO: 1887719 - RNA, 19 nt, Homo sapiens
  misc_RNA (1)...(19): siRNA sense strand
gauucucuguuucuuccaa

SEQ ID NO: 1887720 - RNA, 19 nt, Homo sapiens
  misc_RNA (1)...(19): siRNA sense strand
gcuccugagaccuuugaua

SEQ ID NO: 1887721 - RNA, 19 nt, Homo sapiens
  misc_RNA (1)...(19): siRNA sense strand
gaacuucugccguccuacu

SEQ ID NO: 1887722 - RNA, 19 nt, Homo sapiens
  misc_RNA (1)...(19): siRNA sense strand
cgaaugcacggccuuguag

SEQ ID NO: 1887723 - RNA, 19 nt, Homo sapiens
  misc_RNA (1)...(19): siRNA sense strand
ccgaaugcacggccuugua

SEQ ID NO: 1887724 - RNA, 19 nt, Homo sapiens
  misc_RNA (1)...(19): siRNA sense strand
ggcaccaucuugcucauac

SEQ ID NO: 1887725 - RNA, 19 nt, Homo sapiens
  misc_RNA (1)...(19): siRNA sense strand
cccauuaccucgagaucau

SEQ ID NO: 1887726 - RNA, 19 nt, Homo sapiens
  misc_RNA (1)...(19): siRNA sense strand
ggagagcuuccacuucaag

SEQ ID NO: 1887727 - RNA, 19 nt, Homo sapiens
  misc_RNA (1)...(19): siRNA sense strand
caagaagaccaucaacacu

SEQ ID NO: 1887728 - RNA, 19 nt, Homo sapiens
  misc_RNA (1)...(19): siRNA sense strand
ggagaacaucgccaaaugc

SEQ ID NO: 1887729 - RNA, 19 nt, Homo sapiens
  misc_RNA (1)...(19): siRNA sense strand
ugauagaugagcccacuga

SEQ ID NO: 1887730 - RNA, 19 nt, Homo sapiens
  misc_RNA (1)...(19): siRNA sense strand
acuguucccucgacugcua

SEQ ID NO: 1887731 - RNA, 19 nt, Homo sapiens
  misc_RNA (1)...(19): siRNA sense strand
uaacacugaggcaccugua

SEQ ID NO: 1887732 - RNA, 19 nt, Homo sapiens
  misc_RNA (1)...(19): siRNA sense strand
caggagccacuguccauga

SEQ ID NO: 1887733 - RNA, 19 nt, Homo sapiens
  misc_RNA (1)...(19): siRNA sense strand
uucagcaacagcucuauua

SEQ ID NO: 1887734 - RNA, 19 nt, Homo sapiens
  misc_RNA (1)...(19): siRNA sense strand
ggagauugauuuuacuucu

SEQ ID NO: 1887735 - RNA, 19 nt, Homo sapiens
  misc_RNA (1)...(19): siRNA sense strand
ucaagaagaccaucaacac

SEQ ID NO: 1887736 - RNA, 19 nt, Homo sapiens
  misc_RNA (1)...(19): siRNA sense strand
ucgccacugucaucaagaa

SEQ ID NO: 1887737 - RNA, 19 nt, Homo sapiens
  misc_RNA (1)...(19): siRNA sense strand
ucaagauccugggcucugu

SEQ ID NO: 1887738 - RNA, 19 nt, Homo sapiens
  misc_RNA (1)...(19): siRNA sense strand
caaggagaacaucgccaaa

SEQ ID NO: 1887739 - RNA, 19 nt, Homo sapiens
  misc_RNA (1)...(19): siRNA sense strand
gcaugguguccucuucauu

SEQ ID NO: 1887740 - RNA, 19 nt, Homo sapiens
  misc_RNA (1)...(19): siRNA sense strand
caaagggaagauucucugu

SEQ ID NO: 1887741 - RNA, 19 nt, Homo sapiens
  misc_RNA (1)...(19): siRNA sense strand
ccacugucaucaagaagac

SEQ ID NO: 1887742 - RNA, 19 nt, Homo sapiens
  misc_RNA (1)...(19): siRNA sense strand
acuaagcccuucacaaagc

SEQ ID NO: 1887743 - RNA, 19 nt, Homo sapiens
  misc_RNA (1)...(19): siRNA sense strand
ggagaucggagugaguuca

SEQ ID NO: 1887744 - RNA, 19 nt, Homo sapiens
  misc_RNA (1)...(19): siRNA sense strand
gucaaucaccaacacuauu

SEQ ID NO: 1887745 - RNA, 19 nt, Homo sapiens
  misc_RNA (1)...(19): siRNA sense strand
ccucuucauugcucacugu

SEQ ID NO: 1887746 - RNA, 19 nt, Homo sapiens
  misc_RNA (1)...(19): siRNA sense strand
acauaaccauuagcagaga

SEQ ID NO: 1887747 - RNA, 19 nt, Homo sapiens
  misc_RNA (1)...(19): siRNA sense strand
acagcucuauuauguccaa

SEQ ID NO: 1887748 - RNA, 19 nt, Homo sapiens
  misc_RNA (1)...(19): siRNA sense strand
caacaaaacagauaacacu

SEQ ID NO: 1887749 - RNA, 19 nt, Homo sapiens
  misc_RNA (1)...(19): siRNA sense strand
agaaugugaccuacaagga

SEQ ID NO: 1887750 - RNA, 19 nt, Homo sapiens
  misc_RNA (1)...(19): siRNA sense strand
uucugaaagucaucacuaa

SEQ ID NO: 1887751 - RNA, 19 nt, Homo sapiens
  misc_RNA (1)...(19): siRNA sense strand
cggagugaguucagaagag

SEQ ID NO: 1887752 - RNA, 19 nt, Homo sapiens
  misc_RNA (1)...(19): siRNA sense strand
ucagcaugguguccucuuc

SEQ ID NO: 1887753 - RNA, 19 nt, Homo sapiens
  misc_RNA (1)...(19): siRNA sense strand
aaagggaagauucucuguu

SEQ ID NO: 1887754 - RNA, 19 nt, Homo sapiens
  misc_RNA (1)...(19): siRNA sense strand
ccacggcuacacugauaga

SEQ ID NO: 1887755 - RNA, 19 nt, Homo sapiens
  misc_RNA (1)...(19): siRNA sense strand
gaagaaugugaccuacaag

SEQ ID NO: 1887756 - RNA, 19 nt, Homo sapiens
  misc_RNA (1)...(19): siRNA sense strand
ugaucaugauugucaagau

SEQ ID NO: 1887757 - RNA, 19 nt, Homo sapiens
  misc_RNA (1)...(19): siRNA sense strand
gggcaccaucuugcucaua

SEQ ID NO: 1887758 - RNA, 19 nt, Homo sapiens
  misc_RNA (1)...(19): siRNA sense strand
ccuggaaccuacccacucu

SEQ ID NO: 1887759 - RNA, 19 nt, Homo sapiens
  misc_RNA (1)...(19): siRNA sense strand
caagaaggcugcagagaua

SEQ ID NO: 1887760 - RNA, 19 nt, Homo sapiens
  misc_RNA (1)...(19): siRNA sense strand
gggaagagcuaccacuuua

SEQ ID NO: 1887761 - RNA, 19 nt, Homo sapiens
  misc_RNA (1)...(19): siRNA sense strand
ggaaaggaauggaacuuaa

SEQ ID NO: 1887762 - RNA, 19 nt, Homo sapiens
  misc_RNA (1)...(19): siRNA sense strand
agacaagacuccagaauuu

SEQ ID NO: 1887763 - RNA, 19 nt, Homo sapiens
  misc_RNA (1)...(19): siRNA sense strand
gaccuggagucaauaauua

SEQ ID NO: 1887764 - RNA, 19 nt, Homo sapiens
  misc_RNA (1)...(19): siRNA sense strand
ggacaaggaauaaugaaua

SEQ ID NO: 1887765 - RNA, 19 nt, Homo sapiens
  misc_RNA (1)...(19): siRNA sense strand
ccaaaggauucucagauua

SEQ ID NO: 1887766 - RNA, 19 nt, Homo sapiens
  misc_RNA (1)...(19): siRNA sense strand
aaagagaucuggagacuga

SEQ ID NO: 1887767 - RNA, 19 nt, Homo sapiens
  misc_RNA (1)...(19): siRNA sense strand
gaagaugcuuucuaacuau

SEQ ID NO: 1887768 - RNA, 19 nt, Homo sapiens
  misc_RNA (1)...(19): siRNA sense strand
gaggacaucugaaaucuau

SEQ ID NO: 1887769 - RNA, 19 nt, Homo sapiens
  misc_RNA (1)...(19): siRNA sense strand
caagaaaggacaaggaaua

SEQ ID NO: 1887770 - RNA, 19 nt, Homo sapiens
  misc_RNA (1)...(19): siRNA sense strand
ucagcaaucuccaguauaa

SEQ ID NO: 1887771 - RNA, 19 nt, Homo sapiens
  misc_RNA (1)...(19): siRNA sense strand
uuucagaucucccaaauuu

SEQ ID NO: 1887772 - RNA, 19 nt, Homo sapiens
  misc_RNA (1)...(19): siRNA sense strand
ggucaucacuggauuuaga

SEQ ID NO: 1887773 - RNA, 19 nt, Homo sapiens
  misc_RNA (1)...(19): siRNA sense strand
uuacacagcuccagaguga

SEQ ID NO: 1887774 - RNA, 19 nt, Homo sapiens
  misc_RNA (1)...(19): siRNA sense strand
gaaaggacaaggaauaaug

SEQ ID NO: 1887775 - RNA, 19 nt, Homo sapiens
  misc_RNA (1)...(19): siRNA sense strand
gaaauuaaagggaaaggaa

SEQ ID NO: 1887776 - RNA, 19 nt, Homo sapiens
  misc_RNA (1)...(19): siRNA sense strand
agaaagaccuggagucaau

SEQ ID NO: 1887777 - RNA, 19 nt, Homo sapiens
  misc_RNA (1)...(19): siRNA sense strand
cgaauuacauugaguuugu

SEQ ID NO: 1887778 - RNA, 19 nt, Homo sapiens
  misc_RNA (1)...(19): siRNA sense strand
gaaacaugaugcugccaaa

SEQ ID NO: 1887779 - RNA, 19 nt, Homo sapiens
  misc_RNA (1)...(19): siRNA sense strand
gccaaaggauucucagauu

SEQ ID NO: 1887780 - RNA, 19 nt, Homo sapiens
  misc_RNA (1)...(19): siRNA sense strand
uggaacaucugcaccauaa

SEQ ID NO: 1887781 - RNA, 19 nt, Homo sapiens
  misc_RNA (1)...(19): siRNA sense strand
gcacagacacucuugaugu

SEQ ID NO: 1887782 - RNA, 19 nt, Homo sapiens
  misc_RNA (1)...(19): siRNA sense strand
aagcugaccuuucuaauuc

SEQ ID NO: 1887783 - RNA, 19 nt, Homo sapiens
  misc_RNA (1)...(19): siRNA sense strand
ucaauaaacaccagaguaa

SEQ ID NO: 1887784 - RNA, 19 nt, Homo sapiens
  misc_RNA (1)...(19): siRNA sense strand
gaauaaagagcccgcugua

SEQ ID NO: 1887785 - RNA, 19 nt, Homo sapiens
  misc_RNA (1)...(19): siRNA sense strand
uaaagagcccgcuguaauu

SEQ ID NO: 1887786 - RNA, 19 nt, Homo sapiens
  misc_RNA (1)...(19): siRNA sense strand
gaugaaagguagaccaagu

SEQ ID NO: 1887787 - RNA, 19 nt, Homo sapiens
  misc_RNA (1)...(19): siRNA sense strand
cgauauccguuauaaagaa

SEQ ID NO: 1887788 - RNA, 19 nt, Homo sapiens
  misc_RNA (1)...(19): siRNA sense strand
agaugaaacugaagaagaa

SEQ ID NO: 1887789 - RNA, 19 nt, Homo sapiens
  misc_RNA (1)...(19): siRNA sense strand
caaagucaggugaaauaua

SEQ ID NO: 1887790 - RNA, 19 nt, Homo sapiens
  misc_RNA (1)...(19): siRNA sense strand
cguggaagcuucuaaacuu

SEQ ID NO: 1887791 - RNA, 19 nt, Homo sapiens
  misc_RNA (1)...(19): siRNA sense strand
gcauggaauuggccagaaa

SEQ ID NO: 1887792 - RNA, 19 nt, Homo sapiens
  misc_RNA (1)...(19): siRNA sense strand
aaacauuagugcgguauuu

SEQ ID NO: 1887793 - RNA, 19 nt, Homo sapiens
  misc_RNA (1)...(19): siRNA sense strand
gaacuugaccgaccagaca

SEQ ID NO: 1887794 - RNA, 19 nt, Homo sapiens
  misc_RNA (1)...(19): siRNA sense strand
caucagcaaucuccaguau

SEQ ID NO: 1887795 - RNA, 19 nt, Homo sapiens
  misc_RNA (1)...(19): siRNA sense strand
ggaaggucaucacuggauu

SEQ ID NO: 1887796 - RNA, 19 nt, Homo sapiens
  misc_RNA (1)...(19): siRNA sense strand
aaggauaaguguacauuug

SEQ ID NO: 1887797 - RNA, 19 nt, Homo sapiens
  misc_RNA (1)...(19): siRNA sense strand
gagcauggauaucccagau

SEQ ID NO: 1887798 - RNA, 19 nt, Homo sapiens
  misc_RNA (1)...(19): siRNA sense strand
gcacugacacccuugaaau

SEQ ID NO: 1887799 - RNA, 19 nt, Homo sapiens
  misc_RNA (1)...(19): siRNA sense strand
gagaaagaauacaagaaag

SEQ ID NO: 1887800 - RNA, 19 nt, Homo sapiens
  misc_RNA (1)...(19): siRNA sense strand
ccauggaggucaauaaaca

SEQ ID NO: 1887801 - RNA, 19 nt, Homo sapiens
  misc_RNA (1)...(19): siRNA sense strand
caaaggauucucagauuau

SEQ ID NO: 1887802 - RNA, 19 nt, Homo sapiens
  misc_RNA (1)...(19): siRNA sense strand
gaaaggaauggaacuuaau

SEQ ID NO: 1887803 - RNA, 19 nt, Homo sapiens
  misc_RNA (1)...(19): siRNA sense strand
gaacaucugcaccauaaag

SEQ ID NO: 1887804 - RNA, 19 nt, Homo sapiens
  misc_RNA (1)...(19): siRNA sense strand
gaucauaagcaaugcagaa

SEQ ID NO: 1887805 - RNA, 19 nt, Homo sapiens
  misc_RNA (1)...(19): siRNA sense strand
cauaagcaaugcagaauac

SEQ ID NO: 1887806 - RNA, 19 nt, Homo sapiens
  misc_RNA (1)...(19): siRNA sense strand
ccucugaaauggcaaguga

SEQ ID NO: 1887807 - RNA, 19 nt, Homo sapiens
  misc_RNA (1)...(19): siRNA sense strand
cuucuaaacuuucuaguca

SEQ ID NO: 1887808 - RNA, 19 nt, Homo sapiens
  misc_RNA (1)...(19): siRNA sense strand
gcaaugccguccuccaaag

SEQ ID NO: 1887809 - RNA, 19 nt, Homo sapiens
  misc_RNA (1)...(19): siRNA sense strand
gaccuggaaucauuguuga

SEQ ID NO: 1887810 - RNA, 19 nt, Homo sapiens
  misc_RNA (1)...(19): siRNA sense strand
cagagaaaguauaaagaug

SEQ ID NO: 1887811 - RNA, 19 nt, Homo sapiens
  misc_RNA (1)...(19): siRNA sense strand
gaucuggagacugaaauua

SEQ ID NO: 1887812 - RNA, 19 nt, Homo sapiens
  misc_RNA (1)...(19): siRNA sense strand
cgagugagaaagacuauaa

SEQ ID NO: 1887813 - RNA, 19 nt, Homo sapiens
  misc_RNA (1)...(19): siRNA sense strand
gggaaaggaauggaacuua

SEQ ID NO: 1887814 - RNA, 19 nt, Homo sapiens
  misc_RNA (1)...(19): siRNA sense strand
ccagagagcuaagaaagca

SEQ ID NO: 1887815 - RNA, 19 nt, Homo sapiens
  misc_RNA (1)...(19): siRNA sense strand
ugaaaucuauagccagaga

SEQ ID NO: 1887816 - RNA, 19 nt, Homo sapiens
  misc_RNA (1)...(19): siRNA sense strand
ucucuaagaucauaagcaa

SEQ ID NO: 1887817 - RNA, 19 nt, Homo sapiens
  misc_RNA (1)...(19): siRNA sense strand
ccaaggcuauggcuacaug

SEQ ID NO: 1887818 - RNA, 19 nt, Homo sapiens
  misc_RNA (1)...(19): siRNA sense strand
caucauaucaagcuucaaa

SEQ ID NO: 1887819 - RNA, 19 nt, Homo sapiens
  misc_RNA (1)...(19): siRNA sense strand
gcaaugugaaguacaagaa

SEQ ID NO: 1887820 - RNA, 19 nt, Homo sapiens
  misc_RNA (1)...(19): siRNA sense strand
guaauuggaagaccagauu

SEQ ID NO: 1887821 - RNA, 19 nt, Homo sapiens
  misc_RNA (1)...(19): siRNA sense strand
guggaagcuucuaaacuuu

SEQ ID NO: 1887822 - RNA, 19 nt, Homo sapiens
  misc_RNA (1)...(19): siRNA sense strand
ggaaugcucccagcgaauu

SEQ ID NO: 1887823 - RNA, 19 nt, Homo sapiens
  misc_RNA (1)...(19): siRNA sense strand
uggaaagagugaagaagaa

SEQ ID NO: 1887824 - RNA, 19 nt, Homo sapiens
  misc_RNA (1)...(19): siRNA sense strand
gaagagcuaccacuuuaag

SEQ ID NO: 1887825 - RNA, 19 nt, Homo sapiens
  misc_RNA (1)...(19): siRNA sense strand
cagcaauguuuauuacaga

SEQ ID NO: 1887826 - RNA, 19 nt, Homo sapiens
  misc_RNA (1)...(19): siRNA sense strand
caucagcaauguuuauuac

SEQ ID NO: 1887827 - RNA, 19 nt, Homo sapiens
  misc_RNA (1)...(19): siRNA sense strand
gaauuaagacaacucaaca

SEQ ID NO: 1887828 - RNA, 19 nt, Homo sapiens
  misc_RNA (1)...(19): siRNA sense strand
gcagagauagcgagugaga

SEQ ID NO: 1887829 - RNA, 19 nt, Homo sapiens
  misc_RNA (1)...(19): siRNA sense strand
ugaaauggcaagugagaaa

SEQ ID NO: 1887830 - RNA, 19 nt, Homo sapiens
  misc_RNA (1)...(19): siRNA sense strand
agagugagguggccuacaa

SEQ ID NO: 1887831 - RNA, 19 nt, Homo sapiens
  misc_RNA (1)...(19): siRNA sense strand
gaaugcucccagcgaauua

SEQ ID NO: 1887832 - RNA, 19 nt, Homo sapiens
  misc_RNA (1)...(19): siRNA sense strand
ugagggagaaagaauauaa

SEQ ID NO: 1887833 - RNA, 19 nt, Homo sapiens
  misc_RNA (1)...(19): siRNA sense strand
cgagcaaugugaaguacaa

SEQ ID NO: 1887834 - RNA, 19 nt, Homo sapiens
  misc_RNA (1)...(19): siRNA sense strand
ggauaaguguacauuugug

SEQ ID NO: 1887835 - RNA, 19 nt, Homo sapiens
  misc_RNA (1)...(19): siRNA sense strand
ggaagagcuaccacuuuaa

SEQ ID NO: 1887836 - RNA, 19 nt, Homo sapiens
  misc_RNA (1)...(19): siRNA sense strand
ggacaucugaaaucuauag

SEQ ID NO: 1887837 - RNA, 19 nt, Homo sapiens
  misc_RNA (1)...(19): siRNA sense strand
gggaaaggaaugcaaguga

SEQ ID NO: 1887838 - RNA, 19 nt, Homo sapiens
  misc_RNA (1)...(19): siRNA sense strand
aaauaugcaugauccaguu

SEQ ID NO: 1887839 - RNA, 19 nt, Homo sapiens
  misc_RNA (1)...(19): siRNA sense strand
uuacaauccucuugaaagu

SEQ ID NO: 1887840 - RNA, 19 nt, Homo sapiens
  misc_RNA (1)...(19): siRNA sense strand
gaaguacaagaaagacauu

SEQ ID NO: 1887841 - RNA, 19 nt, Homo sapiens
  misc_RNA (1)...(19): siRNA sense strand
gaacagggagaacaggaau

SEQ ID NO: 1887842 - RNA, 19 nt, Homo sapiens
  misc_RNA (1)...(19): siRNA sense strand
gacgaggucuccuuuagag

SEQ ID NO: 1887843 - RNA, 19 nt, Homo sapiens
  misc_RNA (1)...(19): siRNA sense strand
ggaccuaccgagccaugua

SEQ ID NO: 1887844 - RNA, 19 nt, Homo sapiens
  misc_RNA (1)...(19): siRNA sense strand
caagaggacaucugaaauc

SEQ ID NO: 1887845 - RNA, 19 nt, Homo sapiens
  misc_RNA (1)...(19): siRNA sense strand
gccaagaggacaucugaaa

SEQ ID NO: 1887846 - RNA, 19 nt, Homo sapiens
  misc_RNA (1)...(19): siRNA sense strand
ucuggagacugaaauuaaa

SEQ ID NO: 1887847 - RNA, 19 nt, Homo sapiens
  misc_RNA (1)...(19): siRNA sense strand
cugcagagauagcgaguga

SEQ ID NO: 1887848 - RNA, 19 nt, Homo sapiens
  misc_RNA (1)...(19): siRNA sense strand
gaaagaccuggagucaaua

SEQ ID NO: 1887849 - RNA, 19 nt, Homo sapiens
  misc_RNA (1)...(19): siRNA sense strand
caagaaagaccuggaguca

SEQ ID NO: 1887850 - RNA, 19 nt, Homo sapiens
  misc_RNA (1)...(19): siRNA sense strand
gaaggucaucacuggauuu

SEQ ID NO: 1887851 - RNA, 19 nt, Homo sapiens
  misc_RNA (1)...(19): siRNA sense strand
gagaaggagauuaaaggaa

SEQ ID NO: 1887852 - RNA, 19 nt, Homo sapiens
  misc_RNA (1)...(19): siRNA sense strand
caccaaaucuaaggaccua

SEQ ID NO: 1887853 - RNA, 19 nt, Homo sapiens
  misc_RNA (1)...(19): siRNA sense strand
ggagacgacaggucagaaa

SEQ ID NO: 1887854 - RNA, 19 nt, Homo sapiens
  misc_RNA (1)...(19): siRNA sense strand
agauacaccugcuaugaga

SEQ ID NO: 1887855 - RNA, 19 nt, Homo sapiens
  misc_RNA (1)...(19): siRNA sense strand
aaguguaacuccugaaaug

SEQ ID NO: 1887856 - RNA, 19 nt, Homo sapiens
  misc_RNA (1)...(19): siRNA sense strand
gcagauacuccugaaauuc

SEQ ID NO: 1887857 - RNA, 19 nt, Homo sapiens
  misc_RNA (1)...(19): siRNA sense strand
gagccaagaggacaucuga

SEQ ID NO: 1887858 - RNA, 19 nt, Homo sapiens
  misc_RNA (1)...(19): siRNA sense strand
gacaauauucagucuagaa

SEQ ID NO: 1887859 - RNA, 19 nt, Homo sapiens
  misc_RNA (1)...(19): siRNA sense strand
ggacauugcugacaacuuu

SEQ ID NO: 1887860 - RNA, 19 nt, Homo sapiens
  misc_RNA (1)...(19): siRNA sense strand
gaaagacaaugcugagaua

SEQ ID NO: 1887861 - RNA, 19 nt, Homo sapiens
  misc_RNA (1)...(19): siRNA sense strand
ccaaguaccugcgggauua

SEQ ID NO: 1887862 - RNA, 19 nt, Homo sapiens
  misc_RNA (1)...(19): siRNA sense strand
ccacaaacauucucaacaa

SEQ ID NO: 1887863 - RNA, 19 nt, Homo sapiens
  misc_RNA (1)...(19): siRNA sense strand
gaucgugucuguagaugaa

SEQ ID NO: 1887864 - RNA, 19 nt, Homo sapiens
  misc_RNA (1)...(19): siRNA sense strand
gaagaaggcagauaaagug

SEQ ID NO: 1887865 - RNA, 19 nt, Homo sapiens
  misc_RNA (1)...(19): siRNA sense strand
ggagggccaucaagaauga

SEQ ID NO: 1887866 - RNA, 19 nt, Homo sapiens
  misc_RNA (1)...(19): siRNA sense strand
gcaaagcaacaauuucuaa

SEQ ID NO: 1887867 - RNA, 19 nt, Homo sapiens
  misc_RNA (1)...(19): siRNA sense strand
gcaacaauuucuaaugaug

SEQ ID NO: 1887868 - RNA, 19 nt, Homo sapiens
  misc_RNA (1)...(19): siRNA sense strand
ccacccagcuggcaguuaa

SEQ ID NO: 1887869 - RNA, 19 nt, Homo sapiens
  misc_RNA (1)...(19): siRNA sense strand
uagagaagauccaucauuc

SEQ ID NO: 1887870 - RNA, 19 nt, Homo sapiens
  misc_RNA (1)...(19): siRNA sense strand
gauaagaguccacacaguu

SEQ ID NO: 1887871 - RNA, 19 nt, Homo sapiens
  misc_RNA (1)...(19): siRNA sense strand
ggaacauucucuaugacaa

SEQ ID NO: 1887872 - RNA, 19 nt, Homo sapiens
  misc_RNA (1)...(19): siRNA sense strand
gaucugaagaggacaauga

SEQ ID NO: 1887873 - RNA, 19 nt, Homo sapiens
  misc_RNA (1)...(19): siRNA sense strand
ugaugaugcucgaugauuu

SEQ ID NO: 1887874 - RNA, 19 nt, Homo sapiens
  misc_RNA (1)...(19): siRNA sense strand
gaguagacaucaacaacga

SEQ ID NO: 1887875 - RNA, 19 nt, Homo sapiens
  misc_RNA (1)...(19): siRNA sense strand
agacaaugcugagauaaga

SEQ ID NO: 1887876 - RNA, 19 nt, Homo sapiens
  misc_RNA (1)...(19): siRNA sense strand
ugacaaugcuggcuuugau

SEQ ID NO: 1887877 - RNA, 19 nt, Homo sapiens
  misc_RNA (1)...(19): siRNA sense strand
gaucaucauucgagcuuuc

SEQ ID NO: 1887878 - RNA, 19 nt, Homo sapiens
  misc_RNA (1)...(19): siRNA sense strand
ccacaccaguuauccuauu

SEQ ID NO: 1887879 - RNA, 19 nt, Homo sapiens
  misc_RNA (1)...(19): siRNA sense strand
ccacacaguugaggauuau

SEQ ID NO: 1887880 - RNA, 19 nt, Homo sapiens
  misc_RNA (1)...(19): siRNA sense strand
guucugugcuggccgagua

SEQ ID NO: 1887881 - RNA, 19 nt, Homo sapiens
  misc_RNA (1)...(19): siRNA sense strand
gcugguagcugguguugca

SEQ ID NO: 1887882 - RNA, 19 nt, Homo sapiens
  misc_RNA (1)...(19): siRNA sense strand
gaggcgagagguacaauuu

SEQ ID NO: 1887883 - RNA, 19 nt, Homo sapiens
  misc_RNA (1)...(19): siRNA sense strand
gaugccagguguuugaaga

SEQ ID NO: 1887884 - RNA, 19 nt, Homo sapiens
  misc_RNA (1)...(19): siRNA sense strand
gaugauuugcugcagcuua

SEQ ID NO: 1887885 - RNA, 19 nt, Homo sapiens
  misc_RNA (1)...(19): siRNA sense strand
cauucucuaugacaaguua

SEQ ID NO: 1887886 - RNA, 19 nt, Homo sapiens
  misc_RNA (1)...(19): siRNA sense strand
ccacaauucugaaacuucu

SEQ ID NO: 1887887 - RNA, 19 nt, Homo sapiens
  misc_RNA (1)...(19): siRNA sense strand
gccaagacaugcaccuuca

SEQ ID NO: 1887888 - RNA, 19 nt, Homo sapiens
  misc_RNA (1)...(19): siRNA sense strand
gguguugcauucaagaaga

SEQ ID NO: 1887889 - RNA, 19 nt, Homo sapiens
  misc_RNA (1)...(19): siRNA sense strand
ccaaaguugucuuguccaa

SEQ ID NO: 1887890 - RNA, 19 nt, Homo sapiens
  misc_RNA (1)...(19): siRNA sense strand
ggugguggaugcagugaug

SEQ ID NO: 1887891 - RNA, 19 nt, Homo sapiens
  misc_RNA (1)...(19): siRNA sense strand
ggugauugcugaggcugua

SEQ ID NO: 1887892 - RNA, 19 nt, Homo sapiens
  misc_RNA (1)...(19): siRNA sense strand
aguggaacauucucuauga

SEQ ID NO: 1887893 - RNA, 19 nt, Homo sapiens
  misc_RNA (1)...(19): siRNA sense strand
gagccaaaguugucuuguc

SEQ ID NO: 1887894 - RNA, 19 nt, Homo sapiens
  misc_RNA (1)...(19): siRNA sense strand
gaaacccuauguggaggaa

SEQ ID NO: 1887895 - RNA, 19 nt, Homo sapiens
  misc_RNA (1)...(19): siRNA sense strand
gcugacaacuuugaagcuu

SEQ ID NO: 1887896 - RNA, 19 nt, Homo sapiens
  misc_RNA (1)...(19): siRNA sense strand
ccaguuauccuauugaaag

SEQ ID NO: 1887897 - RNA, 19 nt, Homo sapiens
  misc_RNA (1)...(19): siRNA sense strand
ugaaacuucuugauguugu

SEQ ID NO: 1887898 - RNA, 19 nt, Homo sapiens
  misc_RNA (1)...(19): siRNA sense strand
guggagcccucgaggauuc

SEQ ID NO: 1887899 - RNA, 19 nt, Homo sapiens
  misc_RNA (1)...(19): siRNA sense strand
caagacaugcaccuucauu

SEQ ID NO: 1887900 - RNA, 19 nt, Homo sapiens
  misc_RNA (1)...(19): siRNA sense strand
guugaaagcugagaaagac

SEQ ID NO: 1887901 - RNA, 19 nt, Homo sapiens
  misc_RNA (1)...(19): siRNA sense strand
gaugcugaguggaacauuc

SEQ ID NO: 1887902 - RNA, 19 nt, Homo sapiens
  misc_RNA (1)...(19): siRNA sense strand
aaaguugucuuguccaaac

SEQ ID NO: 1887903 - RNA, 19 nt, Homo sapiens
  misc_RNA (1)...(19): siRNA sense strand
gaacauucucuaugacaag

SEQ ID NO: 1887904 - RNA, 19 nt, Homo sapiens
  misc_RNA (1)...(19): siRNA sense strand
gcaguuaacaagaucaaag

SEQ ID NO: 1887905 - RNA, 19 nt, Homo sapiens
  misc_RNA (1)...(19): siRNA sense strand
gaugaugcucgaugauuug

SEQ ID NO: 1887906 - RNA, 19 nt, Homo sapiens
  misc_RNA (1)...(19): siRNA sense strand
agaggaagcugcuggaaaa

SEQ ID NO: 1887907 - RNA, 19 nt, Homo sapiens
  misc_RNA (1)...(19): siRNA sense strand
ugaagaaggcagauaaagu

SEQ ID NO: 1887908 - RNA, 19 nt, Homo sapiens
  misc_RNA (1)...(19): siRNA sense strand
cgggauuacucaaggacua

SEQ ID NO: 1887909 - RNA, 19 nt, Homo sapiens
  misc_RNA (1)...(19): siRNA sense strand
cgaggauucucagcuggua

SEQ ID NO: 1887910 - RNA, 19 nt, Homo sapiens
  misc_RNA (1)...(19): siRNA sense strand
ucugaaacuucuugauguu

SEQ ID NO: 1887911 - RNA, 19 nt, Homo sapiens
  misc_RNA (1)...(19): siRNA sense strand
caaacauucucaacaagcu

SEQ ID NO: 1887912 - RNA, 19 nt, Homo sapiens
  misc_RNA (1)...(19): siRNA sense strand
gaaacuucuugauguuguc

SEQ ID NO: 1887913 - RNA, 19 nt, Homo sapiens
  misc_RNA (1)...(19): siRNA sense strand
cuugcuggcugcagaguuu

SEQ ID NO: 1887914 - RNA, 19 nt, Homo sapiens
  misc_RNA (1)...(19): siRNA sense strand
gguauggaguagacaucaa

SEQ ID NO: 1887915 - RNA, 19 nt, Homo sapiens
  misc_RNA (1)...(19): siRNA sense strand
gauggcaccaccucaguga

SEQ ID NO: 1887916 - RNA, 19 nt, Homo sapiens
  misc_RNA (1)...(19): siRNA sense strand
uccacacaguugaggauua

SEQ ID NO: 1887917 - RNA, 19 nt, Homo sapiens
  misc_RNA (1)...(19): siRNA sense strand
caccaguuauccuauugaa

SEQ ID NO: 1887918 - RNA, 19 nt, Homo sapiens
  misc_RNA (1)...(19): siRNA sense strand
gguagcugguguugcauuc

SEQ ID NO: 1887919 - RNA, 19 nt, Homo sapiens
  misc_RNA (1)...(19): siRNA sense strand
gauuaucaggcaauuguug

SEQ ID NO: 1887920 - RNA, 19 nt, Homo sapiens
  misc_RNA (1)...(19): siRNA sense strand
ggaagcugcuggaaaagug

SEQ ID NO: 1887921 - RNA, 19 nt, Homo sapiens
  misc_RNA (1)...(19): siRNA sense strand
cagaggaagcugcuggaaa

SEQ ID NO: 1887922 - RNA, 19 nt, Homo sapiens
  misc_RNA (1)...(19): siRNA sense strand
gcccacaccaguuauccua

SEQ ID NO: 1887923 - RNA, 19 nt, Homo sapiens
  misc_RNA (1)...(19): siRNA sense strand
ucaggagggccaucaagaa

SEQ ID NO: 1887924 - RNA, 19 nt, Homo sapiens
  misc_RNA (1)...(19): siRNA sense strand
uuagagaagauccaucauu

SEQ ID NO: 1887925 - RNA, 19 nt, Homo sapiens
  misc_RNA (1)...(19): siRNA sense strand
uaugacaaguuagagaaga

SEQ ID NO: 1887926 - RNA, 19 nt, Homo sapiens
  misc_RNA (1)...(19): siRNA sense strand
uagcugguguugcauucaa

SEQ ID NO: 1887927 - RNA, 19 nt, Homo sapiens
  misc_RNA (1)...(19): siRNA sense strand
augauuugcugcagcuuaa

SEQ ID NO: 1887928 - RNA, 19 nt, Homo sapiens
  misc_RNA (1)...(19): siRNA sense strand
ugguagacauugccaaauc

SEQ ID NO: 1887929 - RNA, 19 nt, Homo sapiens
  misc_RNA (1)...(19): siRNA sense strand
gcgccgagcaguuuaugga

SEQ ID NO: 1887930 - RNA, 19 nt, Homo sapiens
  misc_RNA (1)...(19): siRNA sense strand
gggauguggccacccagua

SEQ ID NO: 1887931 - RNA, 19 nt, Homo sapiens
  misc_RNA (1)...(19): siRNA sense strand
caguuauccuauugaaaga

SEQ ID NO: 1887932 - RNA, 19 nt, Homo sapiens
  misc_RNA (1)...(19): siRNA sense strand
cagugaugaugcucgauga

SEQ ID NO: 1887933 - RNA, 19 nt, Homo sapiens
  misc_RNA (1)...(19): siRNA sense strand
agaggcaaagcaacaauuu

SEQ ID NO: 1887934 - RNA, 19 nt, Homo sapiens
  misc_RNA (1)...(19): siRNA sense strand
guuaacaagaucaaagaga

SEQ ID NO: 1887935 - RNA, 19 nt, Homo sapiens
  misc_RNA (1)...(19): siRNA sense strand
gagcggucccugcaugaug

SEQ ID NO: 1887936 - RNA, 19 nt, Homo sapiens
  misc_RNA (1)...(19): siRNA sense strand
ggcaaagcaacaauuucua

SEQ ID NO: 1887937 - RNA, 19 nt, Homo sapiens
  misc_RNA (1)...(19): siRNA sense strand
gaguggaacauucucuaug

SEQ ID NO: 1887938 - RNA, 19 nt, Homo sapiens
  misc_RNA (1)...(19): siRNA sense strand
uaagaguccacacaguuga

SEQ ID NO: 1887939 - RNA, 19 nt, Homo sapiens
  misc_RNA (1)...(19): siRNA sense strand
gagaaagacaaugcugaga

SEQ ID NO: 1887940 - RNA, 19 nt, Homo sapiens
  misc_RNA (1)...(19): siRNA sense strand
cacaccaguuauccuauug

SEQ ID NO: 1887941 - RNA, 19 nt, Homo sapiens
  misc_RNA (1)...(19): siRNA sense strand
gaaagcugagaaagacaau

SEQ ID NO: 1887942 - RNA, 19 nt, Homo sapiens
  misc_RNA (1)...(19): siRNA sense strand
gcuauggugcggaucaaug

SEQ ID NO: 1887943 - RNA, 19 nt, Homo sapiens
  misc_RNA (1)...(19): siRNA sense strand
cugacaacuuugaagcuuu

SEQ ID NO: 1887944 - RNA, 19 nt, Homo sapiens
  misc_RNA (1)...(19): siRNA sense strand
cacaaacauucucaacaag

SEQ ID NO: 1887945 - RNA, 19 nt, Homo sapiens
  misc_RNA (1)...(19): siRNA sense strand
gugugacaaugcuggcuuu

SEQ ID NO: 1887946 - RNA, 19 nt, Homo sapiens
  misc_RNA (1)...(19): siRNA sense strand
ggccacaauucugaaacuu

SEQ ID NO: 1887947 - RNA, 19 nt, Homo sapiens
  misc_RNA (1)...(19): siRNA sense strand
caucaacaacgaggacauu

SEQ ID NO: 1887948 - RNA, 19 nt, Homo sapiens
  misc_RNA (1)...(19): siRNA sense strand
caggagggccaucaagaau

SEQ ID NO: 1887949 - RNA, 19 nt, Homo sapiens
  misc_RNA (1)...(19): siRNA sense strand
cgaguugaaagcugagaaa

SEQ ID NO: 1887950 - RNA, 19 nt, Homo sapiens
  misc_RNA (1)...(19): siRNA sense strand
gggccacaauucugaaacu

SEQ ID NO: 1887951 - RNA, 19 nt, Homo sapiens
  misc_RNA (1)...(19): siRNA sense strand
cuauguggaggaagguuua

SEQ ID NO: 1887952 - RNA, 19 nt, Homo sapiens
  misc_RNA (1)...(19): siRNA sense strand
acgaggacauugcugacaa

SEQ ID NO: 1887953 - RNA, 19 nt, Homo sapiens
  misc_RNA (1)...(19): siRNA sense strand
gcagaggcaaagcaacaau

SEQ ID NO: 1887954 - RNA, 19 nt, Homo sapiens
  misc_RNA (1)...(19): siRNA sense strand
ccgaguaccugaggaggau

SEQ ID NO: 1887955 - RNA, 19 nt, Homo sapiens
  misc_RNA (1)...(19): siRNA sense strand
agaaagacaaugcugagau

SEQ ID NO: 1887956 - RNA, 19 nt, Homo sapiens
  misc_RNA (1)...(19): siRNA sense strand
ugaaagcugagaaagacaa

SEQ ID NO: 1887957 - RNA, 19 nt, Homo sapiens
  misc_RNA (1)...(19): siRNA sense strand
ggcauggacaagcuuauug

SEQ ID NO: 1887958 - RNA, 19 nt, Homo sapiens
  misc_RNA (1)...(19): siRNA sense strand
caacaacgaggacauugcu

SEQ ID NO: 1887959 - RNA, 19 nt, Homo sapiens
  misc_RNA (1)...(19): siRNA sense strand
ucagggagauuacuaugga

SEQ ID NO: 1887960 - RNA, 19 nt, Homo sapiens
  misc_RNA (1)...(19): siRNA sense strand
caaagucgaugugaagaca

SEQ ID NO: 1887961 - RNA, 19 nt, Homo sapiens
  misc_RNA (1)...(19): siRNA sense strand
ccugaaaccuggcaaaguc

SEQ ID NO: 1887962 - RNA, 19 nt, Homo sapiens
  misc_RNA (1)...(19): siRNA sense strand
ggagauuacuauggagauc

SEQ ID NO: 1887963 - RNA, 19 nt, Homo sapiens
  misc_RNA (1)...(19): siRNA sense strand
gagaggaccagacccugaa

SEQ ID NO: 1887964 - RNA, 19 nt, Homo sapiens
  misc_RNA (1)...(19): siRNA sense strand
gccgauuccugaccauuca

SEQ ID NO: 1887965 - RNA, 19 nt, Homo sapiens
  misc_RNA (1)...(19): siRNA sense strand
gccaagugguguaugucuu

SEQ ID NO: 1887966 - RNA, 19 nt, Homo sapiens
  misc_RNA (1)...(19): siRNA sense strand
gcagcguucagggagauua

SEQ ID NO: 1887967 - RNA, 19 nt, Homo sapiens
  misc_RNA (1)...(19): siRNA sense strand
ccaagugguguaugucuuc

SEQ ID NO: 1887968 - RNA, 19 nt, Homo sapiens
  misc_RNA (1)...(19): siRNA sense strand
cugcucgccugggcuauuu

SEQ ID NO: 1887969 - RNA, 19 nt, Homo sapiens
  misc_RNA (1)...(19): siRNA sense strand
ggugugccuuggugucauc

SEQ ID NO: 1887970 - RNA, 19 nt, Homo sapiens
  misc_RNA (1)...(19): siRNA sense strand
gaugugaagacagacaaau

SEQ ID NO: 1887971 - RNA, 19 nt, Homo sapiens
  misc_RNA (1)...(19): siRNA sense strand
gagugcagccacccuaucu

SEQ ID NO: 1887972 - RNA, 19 nt, Homo sapiens
  misc_RNA (1)...(19): siRNA sense strand
gcaaagucgaugugaagac

SEQ ID NO: 1887973 - RNA, 19 nt, Homo sapiens
  misc_RNA (1)...(19): siRNA sense strand
gcagccacccuaucuccau

SEQ ID NO: 1887974 - RNA, 19 nt, Homo sapiens
  misc_RNA (1)...(19): siRNA sense strand
ggagugcagccacccuauc

SEQ ID NO: 1887975 - RNA, 19 nt, Homo sapiens
  misc_RNA (1)...(19): siRNA sense strand
ccauggcuguggcccuuca

SEQ ID NO: 1887976 - RNA, 19 nt, Homo sapiens
  misc_RNA (1)...(19): siRNA sense strand
ugguguaugucuucuccaa

SEQ ID NO: 1887977 - RNA, 19 nt, Homo sapiens
  misc_RNA (1)...(19): siRNA sense strand
uggcaaagucgaugugaag

SEQ ID NO: 1887978 - RNA, 19 nt, Homo sapiens
  misc_RNA (1)...(19): siRNA sense strand
gcaucagccuaaagaaguu

SEQ ID NO: 1887979 - RNA, 19 nt, Homo sapiens
  misc_RNA (1)...(19): siRNA sense strand
ucacuggccucaccugcaa

SEQ ID NO: 1887980 - RNA, 19 nt, Homo sapiens
  misc_RNA (1)...(19): siRNA sense strand
uggaggccgucgucccuua

SEQ ID NO: 1887981 - RNA, 19 nt, Homo sapiens
  misc_RNA (1)...(19): siRNA sense strand
gcuucaacauggagcugua

SEQ ID NO: 1887982 - RNA, 19 nt, Homo sapiens
  misc_RNA (1)...(19): siRNA sense strand
gcucaagucucaggaccau

SEQ ID NO: 1887983 - RNA, 19 nt, Homo sapiens
  misc_RNA (1)...(19): siRNA sense strand
gcagcccagugcuccaaga

SEQ ID NO: 1887984 - RNA, 19 nt, Homo sapiens
  misc_RNA (1)...(19): siRNA sense strand
gcugcaagcccuucuacug

SEQ ID NO: 1887985 - RNA, 19 nt, Homo sapiens
  misc_RNA (1)...(19): siRNA sense strand
acugugaccuggacuaugg

SEQ ID NO: 1887986 - RNA, 19 nt, Homo sapiens
  misc_RNA (1)...(19): siRNA sense strand
cguggcagcuaccgcauca

SEQ ID NO: 1887987 - RNA, 19 nt, Homo sapiens
  misc_RNA (1)...(19): siRNA sense strand
ccacugugaccuggacuau

SEQ ID NO: 1887988 - RNA, 19 nt, Homo sapiens
  misc_RNA (1)...(19): siRNA sense strand
gaaaggagcuggaagaaga

SEQ ID NO: 1887989 - RNA, 19 nt, Homo sapiens
  misc_RNA (1)...(19): siRNA sense strand
gggaacaguuugaauauaa

SEQ ID NO: 1887990 - RNA, 19 nt, Homo sapiens
  misc_RNA (1)...(19): siRNA sense strand
cgagaaggaugcacagaua

SEQ ID NO: 1887991 - RNA, 19 nt, Homo sapiens
  misc_RNA (1)...(19): siRNA sense strand
gcaagaggcugagaggaaa

SEQ ID NO: 1887992 - RNA, 19 nt, Homo sapiens
  misc_RNA (1)...(19): siRNA sense strand
gguggcaacugaugcuuua

SEQ ID NO: 1887993 - RNA, 19 nt, Homo sapiens
  misc_RNA (1)...(19): siRNA sense strand
gcaguagccugaagcagaa

SEQ ID NO: 1887994 - RNA, 19 nt, Homo sapiens
  misc_RNA (1)...(19): siRNA sense strand
gaauggagaccuuuccuuu

SEQ ID NO: 1887995 - RNA, 19 nt, Homo sapiens
  misc_RNA (1)...(19): siRNA sense strand
gaaccagccucaccuaucu

SEQ ID NO: 1887996 - RNA, 19 nt, Homo sapiens
  misc_RNA (1)...(19): siRNA sense strand
cuagagaacuuccuacaga

SEQ ID NO: 1887997 - RNA, 19 nt, Homo sapiens
  misc_RNA (1)...(19): siRNA sense strand
cagcuggacuugaguauug

SEQ ID NO: 1887998 - RNA, 19 nt, Homo sapiens
  misc_RNA (1)...(19): siRNA sense strand
agaaaugccuugaagagaa

SEQ ID NO: 1887999 - RNA, 19 nt, Homo sapiens
  misc_RNA (1)...(19): siRNA sense strand
gcaaacagagcacuacuga

SEQ ID NO: 1888000 - RNA, 19 nt, Homo sapiens
  misc_RNA (1)...(19): siRNA sense strand
gaacagcugaugacuuuga

SEQ ID NO: 1888001 - RNA, 19 nt, Homo sapiens
  misc_RNA (1)...(19): siRNA sense strand
aggaacagcugaugacuuu

SEQ ID NO: 1888002 - RNA, 19 nt, Homo sapiens
  misc_RNA (1)...(19): siRNA sense strand
gaagagaggcagaaacuca

SEQ ID NO: 1888003 - RNA, 19 nt, Homo sapiens
  misc_RNA (1)...(19): siRNA sense strand
gaagguggcaggcauagaa

SEQ ID NO: 1888004 - RNA, 19 nt, Homo sapiens
  misc_RNA (1)...(19): siRNA sense strand
ggugaugacugccaaguau

SEQ ID NO: 1888005 - RNA, 19 nt, Homo sapiens
  misc_RNA (1)...(19): siRNA sense strand
ugaccaugcugcucuuaua

SEQ ID NO: 1888006 - RNA, 19 nt, Homo sapiens
  misc_RNA (1)...(19): siRNA sense strand
gcaaacgggucucccuaga

SEQ ID NO: 1888007 - RNA, 19 nt, Homo sapiens
  misc_RNA (1)...(19): siRNA sense strand
gcaggcagcugagcacuau

SEQ ID NO: 1888008 - RNA, 19 nt, Homo sapiens
  misc_RNA (1)...(19): siRNA sense strand
gaaaugccuugaagagaag

SEQ ID NO: 1888009 - RNA, 19 nt, Homo sapiens
  misc_RNA (1)...(19): siRNA sense strand
cccagaagcuugcagauga

SEQ ID NO: 1888010 - RNA, 19 nt, Homo sapiens
  misc_RNA (1)...(19): siRNA sense strand
gcaacaggaucaagaacug

SEQ ID NO: 1888011 - RNA, 19 nt, Homo sapiens
  misc_RNA (1)...(19): siRNA sense strand
gggcugcacuccucucuug

SEQ ID NO: 1888012 - RNA, 19 nt, Homo sapiens
  misc_RNA (1)...(19): siRNA sense strand
ggaguucgcuacccugcaa

SEQ ID NO: 1888013 - RNA, 19 nt, Homo sapiens
  misc_RNA (1)...(19): siRNA sense strand
aggaacagcuggcuaagaa

SEQ ID NO: 1888014 - RNA, 19 nt, Homo sapiens
  misc_RNA (1)...(19): siRNA sense strand
uggaagaacugaguaagaa

SEQ ID NO: 1888015 - RNA, 19 nt, Homo sapiens
  misc_RNA (1)...(19): siRNA sense strand
gaagagcucuccccaccua

SEQ ID NO: 1888016 - RNA, 19 nt, Homo sapiens
  misc_RNA (1)...(19): siRNA sense strand
gaagagcagcagcguugua

SEQ ID NO: 1888017 - RNA, 19 nt, Homo sapiens
  misc_RNA (1)...(19): siRNA sense strand
ccacagcgagcuccagaua

SEQ ID NO: 1888018 - RNA, 19 nt, Homo sapiens
  misc_RNA (1)...(19): siRNA sense strand
ugaguuggcugucauucuu

SEQ ID NO: 1888019 - RNA, 19 nt, Homo sapiens
  misc_RNA (1)...(19): siRNA sense strand
gaagcuagauguggaagag

SEQ ID NO: 1888020 - RNA, 19 nt, Homo sapiens
  misc_RNA (1)...(19): siRNA sense strand
ggcaggagcugaccucaca

SEQ ID NO: 1888021 - RNA, 19 nt, Homo sapiens
  misc_RNA (1)...(19): siRNA sense strand
ugaaggagguagcggagaa

SEQ ID NO: 1888022 - RNA, 19 nt, Homo sapiens
  misc_RNA (1)...(19): siRNA sense strand
gaggacgggcuaaaccuua

SEQ ID NO: 1888023 - RNA, 19 nt, Homo sapiens
  misc_RNA (1)...(19): siRNA sense strand
gcaagcuccucaccgagaa

SEQ ID NO: 1888024 - RNA, 19 nt, Homo sapiens
  misc_RNA (1)...(19): siRNA sense strand
caaagaaggcccuguccaa

SEQ ID NO: 1888025 - RNA, 19 nt, Homo sapiens
  misc_RNA (1)...(19): siRNA sense strand
ggagggaggcugagaaaca

SEQ ID NO: 1888026 - RNA, 19 nt, Homo sapiens
  misc_RNA (1)...(19): siRNA sense strand
ugaagcaacugaaggaaca

SEQ ID NO: 1888027 - RNA, 19 nt, Homo sapiens
  misc_RNA (1)...(19): siRNA sense strand
uagagaugcuggagacuga

SEQ ID NO: 1888028 - RNA, 19 nt, Homo sapiens
  misc_RNA (1)...(19): siRNA sense strand
gcugaugagagaaguaaua

SEQ ID NO: 1888029 - RNA, 19 nt, Homo sapiens
  misc_RNA (1)...(19): siRNA sense strand
ccacgcagaucaucaacau

SEQ ID NO: 1888030 - RNA, 19 nt, Homo sapiens
  misc_RNA (1)...(19): siRNA sense strand
caagaucauugacagaauc

SEQ ID NO: 1888031 - RNA, 19 nt, Homo sapiens
  misc_RNA (1)...(19): siRNA sense strand
auggagaccuuuccuuuaa

SEQ ID NO: 1888032 - RNA, 19 nt, Homo sapiens
  misc_RNA (1)...(19): siRNA sense strand
cagagagacuggacuuugu

SEQ ID NO: 1888033 - RNA, 19 nt, Homo sapiens
  misc_RNA (1)...(19): siRNA sense strand
gaagagggacagcaaaucu

SEQ ID NO: 1888034 - RNA, 19 nt, Homo sapiens
  misc_RNA (1)...(19): siRNA sense strand
ggagaaggcccaggagcua

SEQ ID NO: 1888035 - RNA, 19 nt, Homo sapiens
  misc_RNA (1)...(19): siRNA sense strand
gcaagaggaggcacaguau

SEQ ID NO: 1888036 - RNA, 19 nt, Homo sapiens
  misc_RNA (1)...(19): siRNA sense strand
ggaggagaauggagaccuu

SEQ ID NO: 1888037 - RNA, 19 nt, Homo sapiens
  misc_RNA (1)...(19): siRNA sense strand
gccuagcccugcugaauga

SEQ ID NO: 1888038 - RNA, 19 nt, Homo sapiens
  misc_RNA (1)...(19): siRNA sense strand
acuauaagcugcagaugga

SEQ ID NO: 1888039 - RNA, 19 nt, Homo sapiens
  misc_RNA (1)...(19): siRNA sense strand
cagagcagaugggcaauga

SEQ ID NO: 1888040 - RNA, 19 nt, Homo sapiens
  misc_RNA (1)...(19): siRNA sense strand
cagaugaccucuccacucu

SEQ ID NO: 1888041 - RNA, 19 nt, Homo sapiens
  misc_RNA (1)...(19): siRNA sense strand
ugucccagcugcaggauaa

SEQ ID NO: 1888042 - RNA, 19 nt, Homo sapiens
  misc_RNA (1)...(19): siRNA sense strand
caacugaugcuuuaaagag

SEQ ID NO: 1888043 - RNA, 19 nt, Homo sapiens
  misc_RNA (1)...(19): siRNA sense strand
ugucuagccugaucacuga

SEQ ID NO: 1888044 - RNA, 19 nt, Homo sapiens
  misc_RNA (1)...(19): siRNA sense strand
ggagcugggccaagaauug

SEQ ID NO: 1888045 - RNA, 19 nt, Homo sapiens
  misc_RNA (1)...(19): siRNA sense strand
gaacagcuggcuaagaaag

SEQ ID NO: 1888046 - RNA, 19 nt, Homo sapiens
  misc_RNA (1)...(19): siRNA sense strand
ugaaggaacagcuggcuaa

SEQ ID NO: 1888047 - RNA, 19 nt, Homo sapiens
  misc_RNA (1)...(19): siRNA sense strand
ggagaagguggcaggcaua

SEQ ID NO: 1888048 - RNA, 19 nt, Homo sapiens
  misc_RNA (1)...(19): siRNA sense strand
cuacugaggcccagaagaa

SEQ ID NO: 1888049 - RNA, 19 nt, Homo sapiens
  misc_RNA (1)...(19): siRNA sense strand
uaaaagagcuggaggaacu

SEQ ID NO: 1888050 - RNA, 19 nt, Homo sapiens
  misc_RNA (1)...(19): siRNA sense strand
cagaauccauggcacugaa

SEQ ID NO: 1888051 - RNA, 19 nt, Homo sapiens
  misc_RNA (1)...(19): siRNA sense strand
ggaagaacugaguaagaaa

SEQ ID NO: 1888052 - RNA, 19 nt, Homo sapiens
  misc_RNA (1)...(19): siRNA sense strand
ggacagugcucuggagacu

SEQ ID NO: 1888053 - RNA, 19 nt, Homo sapiens
  misc_RNA (1)...(19): siRNA sense strand
gcucaugcccugacggaaa

SEQ ID NO: 1888054 - RNA, 19 nt, Homo sapiens
  misc_RNA (1)...(19): siRNA sense strand
gcaggaccaugcccagcaa

SEQ ID NO: 1888055 - RNA, 19 nt, Homo sapiens
  misc_RNA (1)...(19): siRNA sense strand
ugagacggcugaagaagca

SEQ ID NO: 1888056 - RNA, 19 nt, Homo sapiens
  misc_RNA (1)...(19): siRNA sense strand
ggaccuagagaacuuccua

SEQ ID NO: 1888057 - RNA, 19 nt, Homo sapiens
  misc_RNA (1)...(19): siRNA sense strand
gggcagagaaggccagcua

SEQ ID NO: 1888058 - RNA, 19 nt, Homo sapiens
  misc_RNA (1)...(19): siRNA sense strand
uagagaacuuccuacagaa

SEQ ID NO: 1888059 - RNA, 19 nt, Homo sapiens
  misc_RNA (1)...(19): siRNA sense strand
ggagcugcgugacaagaau

SEQ ID NO: 1888060 - RNA, 19 nt, Homo sapiens
  misc_RNA (1)...(19): siRNA sense strand
gacagcaaaucuugaagca

SEQ ID NO: 1888061 - RNA, 19 nt, Homo sapiens
  misc_RNA (1)...(19): siRNA sense strand
uagaaucccuggagagucu

SEQ ID NO: 1888062 - RNA, 19 nt, Homo sapiens
  misc_RNA (1)...(19): siRNA sense strand
uggagcagcugcagaagga

SEQ ID NO: 1888063 - RNA, 19 nt, Homo sapiens
  misc_RNA (1)...(19): siRNA sense strand
gcaaggugcagcagcagaa

SEQ ID NO: 1888064 - RNA, 19 nt, Homo sapiens
  misc_RNA (1)...(19): siRNA sense strand
ggcaagaggcugagaggaa

SEQ ID NO: 1888065 - RNA, 19 nt, Homo sapiens
  misc_RNA (1)...(19): siRNA sense strand
gagggagauucgcuuccua

SEQ ID NO: 1888066 - RNA, 19 nt, Homo sapiens
  misc_RNA (1)...(19): siRNA sense strand
agaaggagcagcaguugaa

SEQ ID NO: 1888067 - RNA, 19 nt, Homo sapiens
  misc_RNA (1)...(19): siRNA sense strand
ugaagcagcaggccaaaga

SEQ ID NO: 1888068 - RNA, 19 nt, Homo sapiens
  misc_RNA (1)...(19): siRNA sense strand
ggugcugggugaugucuug

SEQ ID NO: 1888069 - RNA, 19 nt, Homo sapiens
  misc_RNA (1)...(19): siRNA sense strand
gcuacaggaugcccucaau

SEQ ID NO: 1888070 - RNA, 19 nt, Homo sapiens
  misc_RNA (1)...(19): siRNA sense strand
ugaagcagccggugucaga

SEQ ID NO: 1888071 - RNA, 19 nt, Homo sapiens
  misc_RNA (1)...(19): siRNA sense strand
ggcugucauucuuaaauuu

SEQ ID NO: 1888072 - RNA, 19 nt, Homo sapiens
  misc_RNA (1)...(19): siRNA sense strand
caacacacccaagaagcua

SEQ ID NO: 1888073 - RNA, 19 nt, Homo sapiens
  misc_RNA (1)...(19): siRNA sense strand
gcagauggagaaagccaaa

SEQ ID NO: 1888074 - RNA, 19 nt, Homo sapiens
  misc_RNA (1)...(19): siRNA sense strand
gacaagaaugagagccuua

SEQ ID NO: 1888075 - RNA, 19 nt, Homo sapiens
  misc_RNA (1)...(19): siRNA sense strand
cagaugagacggcugaaga

SEQ ID NO: 1888076 - RNA, 19 nt, Homo sapiens
  misc_RNA (1)...(19): siRNA sense strand
uuucacagcuggaagaaca

SEQ ID NO: 1888077 - RNA, 19 nt, Homo sapiens
  misc_RNA (1)...(19): siRNA sense strand
gcaccacgcagaucaucaa

SEQ ID NO: 1888078 - RNA, 19 nt, Homo sapiens
  misc_RNA (1)...(19): siRNA sense strand
cagcugagagugaguguga

SEQ ID NO: 1888079 - RNA, 19 nt, Homo sapiens
  misc_RNA (1)...(19): siRNA sense strand
uuauaccacucuaccauga

SEQ ID NO: 1888080 - RNA, 19 nt, Homo sapiens
  misc_RNA (1)...(19): siRNA sense strand
gaacuccaggccuguguug

SEQ ID NO: 1888081 - RNA, 19 nt, Homo sapiens
  misc_RNA (1)...(19): siRNA sense strand
ccucugagcucaccacacu

SEQ ID NO: 1888082 - RNA, 19 nt, Homo sapiens
  misc_RNA (1)...(19): siRNA sense strand
ugggaacaguuugaauaua

SEQ ID NO: 1888083 - RNA, 19 nt, Homo sapiens
  misc_RNA (1)...(19): siRNA sense strand
ccaagaagcuagggaacag

SEQ ID NO: 1888084 - RNA, 19 nt, Homo sapiens
  misc_RNA (1)...(19): siRNA sense strand
ucacagaugaggagaugaa

SEQ ID NO: 1888085 - RNA, 19 nt, Homo sapiens
  misc_RNA (1)...(19): siRNA sense strand
ggagaaccagccucaccua

SEQ ID NO: 1888086 - RNA, 19 nt, Homo sapiens
  misc_RNA (1)...(19): siRNA sense strand
gagcugggccaagaauuga

SEQ ID NO: 1888087 - RNA, 19 nt, Homo sapiens
  misc_RNA (1)...(19): siRNA sense strand
gaaggaggaaugugagaag

SEQ ID NO: 1888088 - RNA, 19 nt, Homo sapiens
  misc_RNA (1)...(19): siRNA sense strand
ggaaccagauugcaacaaa

SEQ ID NO: 1888089 - RNA, 19 nt, Homo sapiens
  misc_RNA (1)...(19): siRNA sense strand
gacaacaaaugguguaauu

SEQ ID NO: 1888090 - RNA, 19 nt, Homo sapiens
  misc_RNA (1)...(19): siRNA sense strand
ugaaagagcuccugacaca

SEQ ID NO: 1888091 - RNA, 19 nt, Homo sapiens
  misc_RNA (1)...(19): siRNA sense strand
ccgaagcucuuaugaagua

SEQ ID NO: 1888092 - RNA, 19 nt, Homo sapiens
  misc_RNA (1)...(19): siRNA sense strand
uaaauacucuccaguguuc

SEQ ID NO: 1888093 - RNA, 19 nt, Homo sapiens
  misc_RNA (1)...(19): siRNA sense strand
gguagcaccuucaaagaaa

SEQ ID NO: 1888094 - RNA, 19 nt, Homo sapiens
  misc_RNA (1)...(19): siRNA sense strand
ucaccaaggucaccaaauu

SEQ ID NO: 1888095 - RNA, 19 nt, Homo sapiens
  misc_RNA (1)...(19): siRNA sense strand
gggaaugacuagugaagaa

SEQ ID NO: 1888096 - RNA, 19 nt, Homo sapiens
  misc_RNA (1)...(19): siRNA sense strand
caacuuggauucugauauc

SEQ ID NO: 1888097 - RNA, 19 nt, Homo sapiens
  misc_RNA (1)...(19): siRNA sense strand
gcaaacagcucagagucuu

SEQ ID NO: 1888098 - RNA, 19 nt, Homo sapiens
  misc_RNA (1)...(19): siRNA sense strand
gaaauacaauugagauagg

SEQ ID NO: 1888099 - RNA, 19 nt, Homo sapiens
  misc_RNA (1)...(19): siRNA sense strand
gggaggagaucgagggaaa

SEQ ID NO: 1888100 - RNA, 19 nt, Homo sapiens
  misc_RNA (1)...(19): siRNA sense strand
cgagaagaacgaaucauua

SEQ ID NO: 1888101 - RNA, 19 nt, Homo sapiens
  misc_RNA (1)...(19): siRNA sense strand
agaagaaacucugaagaaa

SEQ ID NO: 1888102 - RNA, 19 nt, Homo sapiens
  misc_RNA (1)...(19): siRNA sense strand
gaagaaacucugaagaaau

SEQ ID NO: 1888103 - RNA, 19 nt, Homo sapiens
  misc_RNA (1)...(19): siRNA sense strand
gcucagagucuucguauau

SEQ ID NO: 1888104 - RNA, 19 nt, Homo sapiens
  misc_RNA (1)...(19): siRNA sense strand
ggaaggucguucucaguga

SEQ ID NO: 1888105 - RNA, 19 nt, Homo sapiens
  misc_RNA (1)...(19): siRNA sense strand
gagaauggaaggaaugaaa

SEQ ID NO: 1888106 - RNA, 19 nt, Homo sapiens
  misc_RNA (1)...(19): siRNA sense strand
caacgcagcgcuauucuga

SEQ ID NO: 1888107 - RNA, 19 nt, Homo sapiens
  misc_RNA (1)...(19): siRNA sense strand
caacaaaugguguaauuca

SEQ ID NO: 1888108 - RNA, 19 nt, Homo sapiens
  misc_RNA (1)...(19): siRNA sense strand
gaaccagauugcaacaaau

SEQ ID NO: 1888109 - RNA, 19 nt, Homo sapiens
  misc_RNA (1)...(19): siRNA sense strand
guacagcugucugcauuga

SEQ ID NO: 1888110 - RNA, 19 nt, Homo sapiens
  misc_RNA (1)...(19): siRNA sense strand
agacacaccuguuggaaau

SEQ ID NO: 1888111 - RNA, 19 nt, Homo sapiens
  misc_RNA (1)...(19): siRNA sense strand
ggaaggaaauacaauugag

SEQ ID NO: 1888112 - RNA, 19 nt, Homo sapiens
  misc_RNA (1)...(19): siRNA sense strand
caaaugguguaauucaugu

SEQ ID NO: 1888113 - RNA, 19 nt, Homo sapiens
  misc_RNA (1)...(19): siRNA sense strand
gagaaaucccuccaugaaa

SEQ ID NO: 1888114 - RNA, 19 nt, Homo sapiens
  misc_RNA (1)...(19): siRNA sense strand
gcacuuguaagaacuggua

SEQ ID NO: 1888115 - RNA, 19 nt, Homo sapiens
  misc_RNA (1)...(19): siRNA sense strand
caacugcuggaaauacuua

SEQ ID NO: 1888116 - RNA, 19 nt, Homo sapiens
  misc_RNA (1)...(19): siRNA sense strand
ugaaguaccacaucuuaaa

SEQ ID NO: 1888117 - RNA, 19 nt, Homo sapiens
  misc_RNA (1)...(19): siRNA sense strand
ccaaaguuguggaaccaaa

SEQ ID NO: 1888118 - RNA, 19 nt, Homo sapiens
  misc_RNA (1)...(19): siRNA sense strand
gaauguugcccugguuaua

SEQ ID NO: 1888119 - RNA, 19 nt, Homo sapiens
  misc_RNA (1)...(19): siRNA sense strand
ucucuacuauugcugcuua

SEQ ID NO: 1888120 - RNA, 19 nt, Homo sapiens
  misc_RNA (1)...(19): siRNA sense strand
cauggagagccaauuauua

SEQ ID NO: 1888121 - RNA, 19 nt, Homo sapiens
  misc_RNA (1)...(19): siRNA sense strand
caauugagauaggauguga

SEQ ID NO: 1888122 - RNA, 19 nt, Homo sapiens
  misc_RNA (1)...(19): siRNA sense strand
caucacaucggacauauug

SEQ ID NO: 1888123 - RNA, 19 nt, Homo sapiens
  misc_RNA (1)...(19): siRNA sense strand
aacaauaacugaagugauc

SEQ ID NO: 1888124 - RNA, 19 nt, Homo sapiens
  misc_RNA (1)...(19): siRNA sense strand
gaaacaauaacugaaguga

SEQ ID NO: 1888125 - RNA, 19 nt, Homo sapiens
  misc_RNA (1)...(19): siRNA sense strand
gaaggacccacacuaacaa

SEQ ID NO: 1888126 - RNA, 19 nt, Homo sapiens
  misc_RNA (1)...(19): siRNA sense strand
uuauugagcuggcuggaaa

SEQ ID NO: 1888127 - RNA, 19 nt, Homo sapiens
  misc_RNA (1)...(19): siRNA sense strand
gaaggaaauacaauugaga

SEQ ID NO: 1888128 - RNA, 19 nt, Homo sapiens
  misc_RNA (1)...(19): siRNA sense strand
uaugaaguaccacaucuua

SEQ ID NO: 1888129 - RNA, 19 nt, Homo sapiens
  misc_RNA (1)...(19): siRNA sense strand
ggaaauacaauugagauag

SEQ ID NO: 1888130 - RNA, 19 nt, Homo sapiens
  misc_RNA (1)...(19): siRNA sense strand
gaaguaccacaucuuaaau

SEQ ID NO: 1888131 - RNA, 19 nt, Homo sapiens
  misc_RNA (1)...(19): siRNA sense strand
gggacaacuuggauucuga

SEQ ID NO: 1888132 - RNA, 19 nt, Homo sapiens
  misc_RNA (1)...(19): siRNA sense strand
uaaacgccaacaaucauua

SEQ ID NO: 1888133 - RNA, 19 nt, Homo sapiens
  misc_RNA (1)...(19): siRNA sense strand
uuaagggaaugacuaguga

SEQ ID NO: 1888134 - RNA, 19 nt, Homo sapiens
  misc_RNA (1)...(19): siRNA sense strand
agaaauacuucagcacuug

SEQ ID NO: 1888135 - RNA, 19 nt, Homo sapiens
  misc_RNA (1)...(19): siRNA sense strand
uggagugccuguggaaaua

SEQ ID NO: 1888136 - RNA, 19 nt, Homo sapiens
  misc_RNA (1)...(19): siRNA sense strand
aaaagaaucugacaucaug

SEQ ID NO: 1888137 - RNA, 19 nt, Homo sapiens
  misc_RNA (1)...(19): siRNA sense strand
caagauaagcgcuuuagca

SEQ ID NO: 1888138 - RNA, 19 nt, Homo sapiens
  misc_RNA (1)...(19): siRNA sense strand
caaggucaccaaauucauu

SEQ ID NO: 1888139 - RNA, 19 nt, Homo sapiens
  misc_RNA (1)...(19): siRNA sense strand
aagaagaggucaccaaggu

SEQ ID NO: 1888140 - RNA, 19 nt, Homo sapiens
  misc_RNA (1)...(19): siRNA sense strand
guaccucaauucaagacuu

SEQ ID NO: 1888141 - RNA, 19 nt, Homo sapiens
  misc_RNA (1)...(19): siRNA sense strand
gaagaacgaaucauuacag

SEQ ID NO: 1888142 - RNA, 19 nt, Homo sapiens
  misc_RNA (1)...(19): siRNA sense strand
gauuaaagaaggugaaaca

SEQ ID NO: 1888143 - RNA, 19 nt, Homo sapiens
  misc_RNA (1)...(19): siRNA sense strand
gugacugucuauacaacua

SEQ ID NO: 1888144 - RNA, 19 nt, Homo sapiens
  misc_RNA (1)...(19): siRNA sense strand
auacacuucuggugaauga

SEQ ID NO: 1888145 - RNA, 19 nt, Homo sapiens
  misc_RNA (1)...(19): siRNA sense strand
ggagaaacggugcgauuca

SEQ ID NO: 1888146 - RNA, 19 nt, Homo sapiens
  misc_RNA (1)...(19): siRNA sense strand
caaugaggcuuuugagaaa

SEQ ID NO: 1888147 - RNA, 19 nt, Homo sapiens
  misc_RNA (1)...(19): siRNA sense strand
gguugucacuguuaauugu

SEQ ID NO: 1888148 - RNA, 19 nt, Homo sapiens
  misc_RNA (1)...(19): siRNA sense strand
gagaagaacgaaucauuac

SEQ ID NO: 1888149 - RNA, 19 nt, Homo sapiens
  misc_RNA (1)...(19): siRNA sense strand
agagaaaucccuccaugaa

SEQ ID NO: 1888150 - RNA, 19 nt, Homo sapiens
  misc_RNA (1)...(19): siRNA sense strand
ggaguaagcaagggagaaa

SEQ ID NO: 1888151 - RNA, 19 nt, Homo sapiens
  misc_RNA (1)...(19): siRNA sense strand
uagagcagcugccaucaca

SEQ ID NO: 1888152 - RNA, 19 nt, Homo sapiens
  misc_RNA (1)...(19): siRNA sense strand
ggugugauccauuugauug

SEQ ID NO: 1888153 - RNA, 19 nt, Homo sapiens
  misc_RNA (1)...(19): siRNA sense strand
ggauuugaaccugguguua

SEQ ID NO: 1888154 - RNA, 19 nt, Homo sapiens
  misc_RNA (1)...(19): siRNA sense strand
ggagaaagggaguaagcaa

SEQ ID NO: 1888155 - RNA, 19 nt, Homo sapiens
  misc_RNA (1)...(19): siRNA sense strand
gcaugauuauuccuucaau

SEQ ID NO: 1888156 - RNA, 19 nt, Homo sapiens
  misc_RNA (1)...(19): siRNA sense strand
uuaaagaccacacaaggaa

SEQ ID NO: 1888157 - RNA, 19 nt, Homo sapiens
  misc_RNA (1)...(19): siRNA sense strand
acagcugucugcauugaaa

SEQ ID NO: 1888158 - RNA, 19 nt, Homo sapiens
  misc_RNA (1)...(19): siRNA sense strand
gcagaaucacauauugaaa

SEQ ID NO: 1888159 - RNA, 19 nt, Homo sapiens
  misc_RNA (1)...(19): siRNA sense strand
gacaaauaauggugugauc

SEQ ID NO: 1888160 - RNA, 19 nt, Homo sapiens
  misc_RNA (1)...(19): siRNA sense strand
uaauugugcucgaaucauc

SEQ ID NO: 1888161 - RNA, 19 nt, Homo sapiens
  misc_RNA (1)...(19): siRNA sense strand
guagagguuuggagagcaa

SEQ ID NO: 1888162 - RNA, 19 nt, Homo sapiens
  misc_RNA (1)...(19): siRNA sense strand
gaccaaggcccaaaugucu

SEQ ID NO: 1888163 - RNA, 19 nt, Homo sapiens
  misc_RNA (1)...(19): siRNA sense strand
agaaaucccuccaugaaaa

SEQ ID NO: 1888164 - RNA, 19 nt, Homo sapiens
  misc_RNA (1)...(19): siRNA sense strand
gaggccagauggagaauac

SEQ ID NO: 1888165 - RNA, 19 nt, Homo sapiens
  misc_RNA (1)...(19): siRNA sense strand
ggugacaguauaacaguaa

SEQ ID NO: 1888166 - RNA, 19 nt, Homo sapiens
  misc_RNA (1)...(19): siRNA sense strand
caucaagccagcagagaaa

SEQ ID NO: 1888167 - RNA, 19 nt, Homo sapiens
  misc_RNA (1)...(19): siRNA sense strand
ggucauuuauuugaagaug

SEQ ID NO: 1888168 - RNA, 19 nt, Homo sapiens
  misc_RNA (1)...(19): siRNA sense strand
acacaccuguuggaaauga

SEQ ID NO: 1888169 - RNA, 19 nt, Homo sapiens
  misc_RNA (1)...(19): siRNA sense strand
gaagcaaaaucuuucugaa

SEQ ID NO: 1888170 - RNA, 19 nt, Homo sapiens
  misc_RNA (1)...(19): siRNA sense strand
acuugaagcugcagacuug

SEQ ID NO: 1888171 - RNA, 19 nt, Homo sapiens
  misc_RNA (1)...(19): siRNA sense strand
uaccacaucuuaaauacuc

SEQ ID NO: 1888172 - RNA, 19 nt, Homo sapiens
  misc_RNA (1)...(19): siRNA sense strand
gauggucauuuauuugaag

SEQ ID NO: 1888173 - RNA, 19 nt, Homo sapiens
  misc_RNA (1)...(19): siRNA sense strand
ggaaugacuagugaagaaa

SEQ ID NO: 1888174 - RNA, 19 nt, Homo sapiens
  misc_RNA (1)...(19): siRNA sense strand
ccuggagacuggacauuau

SEQ ID NO: 1888175 - RNA, 19 nt, Homo sapiens
  misc_RNA (1)...(19): siRNA sense strand
ccacaacgcagcgcuauuc

SEQ ID NO: 1888176 - RNA, 19 nt, Homo sapiens
  misc_RNA (1)...(19): siRNA sense strand
gaaggugaaacaauaacug

SEQ ID NO: 1888177 - RNA, 19 nt, Homo sapiens
  misc_RNA (1)...(19): siRNA sense strand
aagaaauacuucagcacuu

SEQ ID NO: 1888178 - RNA, 19 nt, Homo sapiens
  misc_RNA (1)...(19): siRNA sense strand
aaacggugcgauucacaua

SEQ ID NO: 1888179 - RNA, 19 nt, Homo sapiens
  misc_RNA (1)...(19): siRNA sense strand
cuauugcugcuuauuguua

SEQ ID NO: 1888180 - RNA, 19 nt, Homo sapiens
  misc_RNA (1)...(19): siRNA sense strand
gugauggucauuuauuuga

SEQ ID NO: 1888181 - RNA, 19 nt, Homo sapiens
  misc_RNA (1)...(19): siRNA sense strand
ggaccaaggcccaaauguc

SEQ ID NO: 1888182 - RNA, 19 nt, Homo sapiens
  misc_RNA (1)...(19): siRNA sense strand
ucguacagcugucugcauu

SEQ ID NO: 1888183 - RNA, 19 nt, Homo sapiens
  misc_RNA (1)...(19): siRNA sense strand
uugagacgcuggaaggaaa

SEQ ID NO: 1888184 - RNA, 19 nt, Homo sapiens
  misc_RNA (1)...(19): siRNA sense strand
guaaugaggcuugggacaa

SEQ ID NO: 1888185 - RNA, 19 nt, Homo sapiens
  misc_RNA (1)...(19): siRNA sense strand
gcuuauuguuaacccuaua

SEQ ID NO: 1888186 - RNA, 19 nt, Homo sapiens
  misc_RNA (1)...(19): siRNA sense strand
gaaucaaaauggugaacaa

SEQ ID NO: 1888187 - RNA, 19 nt, Homo sapiens
  misc_RNA (1)...(19): siRNA sense strand
gugcuuacacaaauuggua

SEQ ID NO: 1888188 - RNA, 19 nt, Homo sapiens
  misc_RNA (1)...(19): siRNA sense strand
ggacgauccuccuccaaga

SEQ ID NO: 1888189 - RNA, 19 nt, Homo sapiens
  misc_RNA (1)...(19): siRNA sense strand
agacagcccucuugcagaa

SEQ ID NO: 1888190 - RNA, 19 nt, Homo sapiens
  misc_RNA (1)...(19): siRNA sense strand
acucagacguggauaaaga

SEQ ID NO: 1888191 - RNA, 19 nt, Homo sapiens
  misc_RNA (1)...(19): siRNA sense strand
gucaggaacucgacucaga

SEQ ID NO: 1888192 - RNA, 19 nt, Homo sapiens
  misc_RNA (1)...(19): siRNA sense strand
cgacugaggcggagacgaa

SEQ ID NO: 1888193 - RNA, 19 nt, Homo sapiens
  misc_RNA (1)...(19): siRNA sense strand
agacguggauaaagauaau

SEQ ID NO: 1888194 - RNA, 19 nt, Homo sapiens
  misc_RNA (1)...(19): siRNA sense strand
cugcguggcuugucaggaa

SEQ ID NO: 1888195 - RNA, 19 nt, Homo sapiens
  misc_RNA (1)...(19): siRNA sense strand
gcacacagacagcccucuu

SEQ ID NO: 1888196 - RNA, 19 nt, Homo sapiens
  misc_RNA (1)...(19): siRNA sense strand
cgacucagacguggauaaa

SEQ ID NO: 1888197 - RNA, 19 nt, Homo sapiens
  misc_RNA (1)...(19): siRNA sense strand
gucauggccugcacacaga

SEQ ID NO: 1888198 - RNA, 19 nt, Homo sapiens
  misc_RNA (1)...(19): siRNA sense strand
ugcagcagcuacagcacua

SEQ ID NO: 1888199 - RNA, 19 nt, Homo sapiens
  misc_RNA (1)...(19): siRNA sense strand
gauccuccuccaagacaaa

SEQ ID NO: 1888200 - RNA, 19 nt, Homo sapiens
  misc_RNA (1)...(19): siRNA sense strand
ucagacguggauaaagaua

SEQ ID NO: 1888201 - RNA, 19 nt, Homo sapiens
  misc_RNA (1)...(19): siRNA sense strand
cagacguggauaaagauaa

SEQ ID NO: 1888202 - RNA, 19 nt, Homo sapiens
  misc_RNA (1)...(19): siRNA sense strand
acuaucugcugcgcgguua

SEQ ID NO: 1888203 - RNA, 19 nt, Homo sapiens
  misc_RNA (1)...(19): siRNA sense strand
ccagcuguguggccuuauc

SEQ ID NO: 1888204 - RNA, 19 nt, Homo sapiens
  misc_RNA (1)...(19): siRNA sense strand
acaaacagcggaaaaucua

SEQ ID NO: 1888205 - RNA, 19 nt, Homo sapiens
  misc_RNA (1)...(19): siRNA sense strand
ccugcugugccuccaaaua

SEQ ID NO: 1888206 - RNA, 19 nt, Homo sapiens
  misc_RNA (1)...(19): siRNA sense strand
gaacaaaguugcccacuca

SEQ ID NO: 1888207 - RNA, 19 nt, Homo sapiens
  misc_RNA (1)...(19): siRNA sense strand
ggacagagaaccacuauuu

SEQ ID NO: 1888208 - RNA, 19 nt, Homo sapiens
  misc_RNA (1)...(19): siRNA sense strand
gaaagcagauguuauuaag

SEQ ID NO: 1888209 - RNA, 19 nt, Homo sapiens
  misc_RNA (1)...(19): siRNA sense strand
gaaaggugaugccaugauu

SEQ ID NO: 1888210 - RNA, 19 nt, Homo sapiens
  misc_RNA (1)...(19): siRNA sense strand
gaaggagggugaauuuguu

SEQ ID NO: 1888211 - RNA, 19 nt, Homo sapiens
  misc_RNA (1)...(19): siRNA sense strand
gagaaccacuauuuacaaa

SEQ ID NO: 1888212 - RNA, 19 nt, Homo sapiens
  misc_RNA (1)...(19): siRNA sense strand
gaacugcugcaaccauuua

SEQ ID NO: 1888213 - RNA, 19 nt, Homo sapiens
  misc_RNA (1)...(19): siRNA sense strand
gaggaaagcagauguuauu

SEQ ID NO: 1888214 - RNA, 19 nt, Homo sapiens
  misc_RNA (1)...(19): siRNA sense strand
ggaaagcagauguuauuaa

SEQ ID NO: 1888215 - RNA, 19 nt, Homo sapiens
  misc_RNA (1)...(19): siRNA sense strand
guaaauaacuguguauguc

SEQ ID NO: 1888216 - RNA, 19 nt, Homo sapiens
  misc_RNA (1)...(19): siRNA sense strand
caaaguugcccacucauuu

SEQ ID NO: 1888217 - RNA, 19 nt, Homo sapiens
  misc_RNA (1)...(19): siRNA sense strand
ugagguacaugaaguauau

SEQ ID NO: 1888218 - RNA, 19 nt, Homo sapiens
  misc_RNA (1)...(19): siRNA sense strand
uaagagcauuugaagauga

SEQ ID NO: 1888219 - RNA, 19 nt, Homo sapiens
  misc_RNA (1)...(19): siRNA sense strand
ccacagaccagcagaagaa

SEQ ID NO: 1888220 - RNA, 19 nt, Homo sapiens
  misc_RNA (1)...(19): siRNA sense strand
gacagagaaccacuauuua

SEQ ID NO: 1888221 - RNA, 19 nt, Homo sapiens
  misc_RNA (1)...(19): siRNA sense strand
gaaaugaagaaagguauug

SEQ ID NO: 1888222 - RNA, 19 nt, Homo sapiens
  misc_RNA (1)...(19): siRNA sense strand
gccaugccguuuacuuuaa

SEQ ID NO: 1888223 - RNA, 19 nt, Homo sapiens
  misc_RNA (1)...(19): siRNA sense strand
ggucaaaccuggaaaucag

SEQ ID NO: 1888224 - RNA, 19 nt, Homo sapiens
  misc_RNA (1)...(19): siRNA sense strand
gaagagcgaccaggauuau

SEQ ID NO: 1888225 - RNA, 19 nt, Homo sapiens
  misc_RNA (1)...(19): siRNA sense strand
gaaaucagaacacacaagu

SEQ ID NO: 1888226 - RNA, 19 nt, Homo sapiens
  misc_RNA (1)...(19): siRNA sense strand
ugaauuuguugcccaguuu

SEQ ID NO: 1888227 - RNA, 19 nt, Homo sapiens
  misc_RNA (1)...(19): siRNA sense strand
gaaccacuauuuacaaacg

SEQ ID NO: 1888228 - RNA, 19 nt, Homo sapiens
  misc_RNA (1)...(19): siRNA sense strand
gacagaagccuggaacaaa

SEQ ID NO: 1888229 - RNA, 19 nt, Homo sapiens
  misc_RNA (1)...(19): siRNA sense strand
ugaaguauaugcuguggau

SEQ ID NO: 1888230 - RNA, 19 nt, Homo sapiens
  misc_RNA (1)...(19): siRNA sense strand
uaauguagcucacacuuuu

SEQ ID NO: 1888231 - RNA, 19 nt, Homo sapiens
  misc_RNA (1)...(19): siRNA sense strand
aaaguugcccacucauuua

SEQ ID NO: 1888232 - RNA, 19 nt, Homo sapiens
  misc_RNA (1)...(19): siRNA sense strand
gcaucuagcucaggugugu

SEQ ID NO: 1888233 - RNA, 19 nt, Homo sapiens
  misc_RNA (1)...(19): siRNA sense strand
ugagaaggagggugaauuu

SEQ ID NO: 1888234 - RNA, 19 nt, Homo sapiens
  misc_RNA (1)...(19): siRNA sense strand
uaacugcacgccaauagaa

SEQ ID NO: 1888235 - RNA, 19 nt, Homo sapiens
  misc_RNA (1)...(19): siRNA sense strand
ggagugcgccaaacaugaa

SEQ ID NO: 1888236 - RNA, 19 nt, Homo sapiens
  misc_RNA (1)...(19): siRNA sense strand
gaagcagcaugucaucgau

SEQ ID NO: 1888237 - RNA, 19 nt, Homo sapiens
  misc_RNA (1)...(19): siRNA sense strand
ggaaaugaagaaagguauu

SEQ ID NO: 1888238 - RNA, 19 nt, Homo sapiens
  misc_RNA (1)...(19): siRNA sense strand
gguccaggaugcagagcua

SEQ ID NO: 1888239 - RNA, 19 nt, Homo sapiens
  misc_RNA (1)...(19): siRNA sense strand
gaacacacaagugacagaa

SEQ ID NO: 1888240 - RNA, 19 nt, Homo sapiens
  misc_RNA (1)...(19): siRNA sense strand
aaucagaacacacaaguga

SEQ ID NO: 1888241 - RNA, 19 nt, Homo sapiens
  misc_RNA (1)...(19): siRNA sense strand
gaauuuguugcccaguuua

SEQ ID NO: 1888242 - RNA, 19 nt, Homo sapiens
  misc_RNA (1)...(19): siRNA sense strand
gcacgccaauagaagguau

SEQ ID NO: 1888243 - RNA, 19 nt, Homo sapiens
  misc_RNA (1)...(19): siRNA sense strand
ccaccagcauuucgguaaa

SEQ ID NO: 1888244 - RNA, 19 nt, Homo sapiens
  misc_RNA (1)...(19): siRNA sense strand
guugcccaguuuaaauuua

SEQ ID NO: 1888245 - RNA, 19 nt, Homo sapiens
  misc_RNA (1)...(19): siRNA sense strand
gggaggaaagcagauguua

SEQ ID NO: 1888246 - RNA, 19 nt, Homo sapiens
  misc_RNA (1)...(19): siRNA sense strand
ugaagagcgaccaggauua

SEQ ID NO: 1888247 - RNA, 19 nt, Homo sapiens
  misc_RNA (1)...(19): siRNA sense strand
aggauuauauucucaagga

SEQ ID NO: 1888248 - RNA, 19 nt, Homo sapiens
  misc_RNA (1)...(19): siRNA sense strand
gaccaggauuauauucuca

SEQ ID NO: 1888249 - RNA, 19 nt, Homo sapiens
  misc_RNA (1)...(19): siRNA sense strand
acagaagccuggaacaaag

SEQ ID NO: 1888250 - RNA, 19 nt, Homo sapiens
  misc_RNA (1)...(19): siRNA sense strand
gcagaagaaggaccaugaa

SEQ ID NO: 1888251 - RNA, 19 nt, Homo sapiens
  misc_RNA (1)...(19): siRNA sense strand
ggaggaaagcagauguuau

SEQ ID NO: 1888252 - RNA, 19 nt, Homo sapiens
  misc_RNA (1)...(19): siRNA sense strand
gguaaauaacuguguaugu

SEQ ID NO: 1888253 - RNA, 19 nt, Homo sapiens
  misc_RNA (1)...(19): siRNA sense strand
gagcaacaggagcaaacua

SEQ ID NO: 1888254 - RNA, 19 nt, Homo sapiens
  misc_RNA (1)...(19): siRNA sense strand
uagaagguaugcugucaca

SEQ ID NO: 1888255 - RNA, 19 nt, Homo sapiens
  misc_RNA (1)...(19): siRNA sense strand
ggauuauauucucaaggaa

SEQ ID NO: 1888256 - RNA, 19 nt, Homo sapiens
  misc_RNA (1)...(19): siRNA sense strand
gagcgaccaggauuauauu

SEQ ID NO: 1888257 - RNA, 19 nt, Homo sapiens
  misc_RNA (1)...(19): siRNA sense strand
gugaauuuguugcccaguu

SEQ ID NO: 1888258 - RNA, 19 nt, Homo sapiens
  misc_RNA (1)...(19): siRNA sense strand
cgaccaggauuauauucuc

SEQ ID NO: 1888259 - RNA, 19 nt, Homo sapiens
  misc_RNA (1)...(19): siRNA sense strand
cagaagaaggaccaugaaa

SEQ ID NO: 1888260 - RNA, 19 nt, Homo sapiens
  misc_RNA (1)...(19): siRNA sense strand
aaaggugaugccaugauua

SEQ ID NO: 1888261 - RNA, 19 nt, Homo sapiens
  misc_RNA (1)...(19): siRNA sense strand
ccaaguaacagggaggaaa

SEQ ID NO: 1888262 - RNA, 19 nt, Homo sapiens
  misc_RNA (1)...(19): siRNA sense strand
cagagaaccacuauuuaca

SEQ ID NO: 1888263 - RNA, 19 nt, Homo sapiens
  misc_RNA (1)...(19): siRNA sense strand
gcaggacagagaaccacua

SEQ ID NO: 1888264 - RNA, 19 nt, Homo sapiens
  misc_RNA (1)...(19): siRNA sense strand
ggaaaucagaacacacaag

SEQ ID NO: 1888265 - RNA, 19 nt, Homo sapiens
  misc_RNA (1)...(19): siRNA sense strand
agaaggagggugaauuugu

SEQ ID NO: 1888266 - RNA, 19 nt, Homo sapiens
  misc_RNA (1)...(19): siRNA sense strand
gagaaggagggugaauuug

SEQ ID NO: 1888267 - RNA, 19 nt, Homo sapiens
  misc_RNA (1)...(19): siRNA sense strand
caaggaugcaggacagaga

SEQ ID NO: 1888268 - RNA, 19 nt, Homo sapiens
  misc_RNA (1)...(19): siRNA sense strand
ugacagaagccuggaacaa

SEQ ID NO: 1888269 - RNA, 19 nt, Homo sapiens
  misc_RNA (1)...(19): siRNA sense strand
cuaauguagcucacacuuu

SEQ ID NO: 1888270 - RNA, 19 nt, Homo sapiens
  misc_RNA (1)...(19): siRNA sense strand
aaagaaggccuccaagacu

SEQ ID NO: 1888271 - RNA, 19 nt, Homo sapiens
  misc_RNA (1)...(19): siRNA sense strand
uuaagagcauuugaagaug

SEQ ID NO: 1888272 - RNA, 19 nt, Homo sapiens
  misc_RNA (1)...(19): siRNA sense strand
ugccaugccguuuacuuua

SEQ ID NO: 1888273 - RNA, 19 nt, Homo sapiens
  misc_RNA (1)...(19): siRNA sense strand
agagaaccacuauuuacaa

SEQ ID NO: 1888274 - RNA, 19 nt, Homo sapiens
  misc_RNA (1)...(19): siRNA sense strand
aauagaagguaugcuguca

SEQ ID NO: 1888275 - RNA, 19 nt, Homo sapiens
  misc_RNA (1)...(19): siRNA sense strand
gaagaaacagggaaaaucu

SEQ ID NO: 1888276 - RNA, 19 nt, Homo sapiens
  misc_RNA (1)...(19): siRNA sense strand
ggggaaacauuagaagaaa

SEQ ID NO: 1888277 - RNA, 19 nt, Homo sapiens
  misc_RNA (1)...(19): siRNA sense strand
cuccaagacugcagagaau

SEQ ID NO: 1888278 - RNA, 19 nt, Homo sapiens
  misc_RNA (1)...(19): siRNA sense strand
caacaggagcaaacuaucg

SEQ ID NO: 1888279 - RNA, 19 nt, Homo sapiens
  misc_RNA (1)...(19): siRNA sense strand
ggacugaaaaugaaaacuu

SEQ ID NO: 1888280 - RNA, 19 nt, Homo sapiens
  misc_RNA (1)...(19): siRNA sense strand
gaaagaaaaggaaaugaag

SEQ ID NO: 1888281 - RNA, 19 nt, Homo sapiens
  misc_RNA (1)...(19): siRNA sense strand
agagcgaccaggauuauau

SEQ ID NO: 1888282 - RNA, 19 nt, Homo sapiens
  misc_RNA (1)...(19): siRNA sense strand
gagccugaccucuacaagu

SEQ ID NO: 1888283 - RNA, 19 nt, Homo sapiens
  misc_RNA (1)...(19): siRNA sense strand
aaacuucacgugccuucuu

SEQ ID NO: 1888284 - RNA, 19 nt, Homo sapiens
  misc_RNA (1)...(19): siRNA sense strand
acagagaaccacuauuuac

SEQ ID NO: 1888285 - RNA, 19 nt, Homo sapiens
  misc_RNA (1)...(19): siRNA sense strand
gaauuugagguacaugaag

SEQ ID NO: 1888286 - RNA, 19 nt, Homo sapiens
  misc_RNA (1)...(19): siRNA sense strand
aaaaggaaaugaagaaagg

SEQ ID NO: 1888287 - RNA, 19 nt, Homo sapiens
  misc_RNA (1)...(19): siRNA sense strand
caaguaacagggaggaaag

SEQ ID NO: 1888288 - RNA, 19 nt, Homo sapiens
  misc_RNA (1)...(19): siRNA sense strand
gcaacaggagcaaacuauc

SEQ ID NO: 1888289 - RNA, 19 nt, Homo sapiens
  misc_RNA (1)...(19): siRNA sense strand
gcucaggugugucgguacu

SEQ ID NO: 1888290 - RNA, 19 nt, Homo sapiens
  misc_RNA (1)...(19): siRNA sense strand
acaaaguugcccacucauu

SEQ ID NO: 1888291 - RNA, 19 nt, Homo sapiens
  misc_RNA (1)...(19): siRNA sense strand
gaaaaggaaaugaagaaag

SEQ ID NO: 1888292 - RNA, 19 nt, Homo sapiens
  misc_RNA (1)...(19): siRNA sense strand
gggaaacauuagaagaaaa

SEQ ID NO: 1888293 - RNA, 19 nt, Homo sapiens
  misc_RNA (1)...(19): siRNA sense strand
ugaauuugagguacaugaa

SEQ ID NO: 1888294 - RNA, 19 nt, Homo sapiens
  misc_RNA (1)...(19): siRNA sense strand
ugaagcagcaugucaucga

SEQ ID NO: 1888295 - RNA, 19 nt, Homo sapiens
  misc_RNA (1)...(19): siRNA sense strand
ucagaacacacaagugaca

SEQ ID NO: 1888296 - RNA, 19 nt, Homo sapiens
  misc_RNA (1)...(19): siRNA sense strand
aaaugaagcuggggacuga

SEQ ID NO: 1888297 - RNA, 19 nt, Homo sapiens
  misc_RNA (1)...(19): siRNA sense strand
gagaaaggugaugccauga

SEQ ID NO: 1888298 - RNA, 19 nt, Homo sapiens
  misc_RNA (1)...(19): siRNA sense strand
ccuccaagacugcagagaa

SEQ ID NO: 1888299 - RNA, 19 nt, Homo sapiens
  misc_RNA (1)...(19): siRNA sense strand
agccugaccucuacaaguc

SEQ ID NO: 1888300 - RNA, 19 nt, Homo sapiens
  misc_RNA (1)...(19): siRNA sense strand
cauuugaagaugagaagaa

SEQ ID NO: 1888301 - RNA, 19 nt, Homo sapiens
  misc_RNA (1)...(19): siRNA sense strand
gagcauuugaagaugagaa

SEQ ID NO: 1888302 - RNA, 19 nt, Homo sapiens
  misc_RNA (1)...(19): siRNA sense strand
uauaugcuguggauguucu

SEQ ID NO: 1888303 - RNA, 19 nt, Homo sapiens
  misc_RNA (1)...(19): siRNA sense strand
cagaccagcagaagaagga

SEQ ID NO: 1888304 - RNA, 19 nt, Homo sapiens
  misc_RNA (1)...(19): siRNA sense strand
gcaugucaucgauggagaa

SEQ ID NO: 1888305 - RNA, 19 nt, Homo sapiens
  misc_RNA (1)...(19): siRNA sense strand
aaggaaaugaagaaaggua

SEQ ID NO: 1888306 - RNA, 19 nt, Homo sapiens
  misc_RNA (1)...(19): siRNA sense strand
ccaccacacuuccuuuauu

SEQ ID NO: 1888307 - RNA, 19 nt, Homo sapiens
  misc_RNA (1)...(19): siRNA sense strand
agagaaaccugccuuagag

SEQ ID NO: 1888308 - RNA, 19 nt, Homo sapiens
  misc_RNA (1)...(19): siRNA sense strand
gccauccgcuugcgcauug

SEQ ID NO: 1888309 - RNA, 19 nt, Homo sapiens
  misc_RNA (1)...(19): siRNA sense strand
caccacacuuccuuuauug

SEQ ID NO: 1888310 - RNA, 19 nt, Homo sapiens
  misc_RNA (1)...(19): siRNA sense strand
caacgagaccggcuccauu

SEQ ID NO: 1888311 - RNA, 19 nt, Homo sapiens
  misc_RNA (1)...(19): siRNA sense strand
gacauuaaauacacucagu

SEQ ID NO: 1888312 - RNA, 19 nt, Homo sapiens
  misc_RNA (1)...(19): siRNA sense strand
acaaccacaucuaccagua

SEQ ID NO: 1888313 - RNA, 19 nt, Homo sapiens
  misc_RNA (1)...(19): siRNA sense strand
aggagacccuggcaucuuu

SEQ ID NO: 1888314 - RNA, 19 nt, Homo sapiens
  misc_RNA (1)...(19): siRNA sense strand
ggaacucgcggcagcaaug

SEQ ID NO: 1888315 - RNA, 19 nt, Homo sapiens
  misc_RNA (1)...(19): siRNA sense strand
gaccguacgaggcaaguaa

SEQ ID NO: 1888316 - RNA, 19 nt, Homo sapiens
  misc_RNA (1)...(19): siRNA sense strand
uagagaaaccugccuuaga

SEQ ID NO: 1888317 - RNA, 19 nt, Homo sapiens
  misc_RNA (1)...(19): siRNA sense strand
gcuagagaaaccugccuua

SEQ ID NO: 1888318 - RNA, 19 nt, Homo sapiens
  misc_RNA (1)...(19): siRNA sense strand
uagaggcagacauuaaaua

SEQ ID NO: 1888319 - RNA, 19 nt, Homo sapiens
  misc_RNA (1)...(19): siRNA sense strand
ucucugaacuuggguuuua

SEQ ID NO: 1888320 - RNA, 19 nt, Homo sapiens
  misc_RNA (1)...(19): siRNA sense strand
ucaagcacauccgggacua

SEQ ID NO: 1888321 - RNA, 19 nt, Homo sapiens
  misc_RNA (1)...(19): siRNA sense strand
cggcagcaaugaccuucaa

SEQ ID NO: 1888322 - RNA, 19 nt, Homo sapiens
  misc_RNA (1)...(19): siRNA sense strand
gaacucgcggcagcaauga

SEQ ID NO: 1888323 - RNA, 19 nt, Homo sapiens
  misc_RNA (1)...(19): siRNA sense strand
gcacauccgggacuacaag

SEQ ID NO: 1888324 - RNA, 19 nt, Homo sapiens
  misc_RNA (1)...(19): siRNA sense strand
gcagugaaugggcuagaga

SEQ ID NO: 1888325 - RNA, 19 nt, Homo sapiens
  misc_RNA (1)...(19): siRNA sense strand
ggacgcccucaguagcuua

SEQ ID NO: 1888326 - RNA, 19 nt, Homo sapiens
  misc_RNA (1)...(19): siRNA sense strand
ccuuagaggcagacauuaa

SEQ ID NO: 1888327 - RNA, 19 nt, Homo sapiens
  misc_RNA (1)...(19): siRNA sense strand
ugaaugggcuagagaaacc

SEQ ID NO: 1888328 - RNA, 19 nt, Homo sapiens
  misc_RNA (1)...(19): siRNA sense strand
cuuagaggcagacauuaaa

SEQ ID NO: 1888329 - RNA, 19 nt, Homo sapiens
  misc_RNA (1)...(19): siRNA sense strand
ggacccaccacacuuccuu

SEQ ID NO: 1888330 - RNA, 19 nt, Homo sapiens
  misc_RNA (1)...(19): siRNA sense strand
cgaaggcaccgcuuacucu

SEQ ID NO: 1888331 - RNA, 19 nt, Homo sapiens
  misc_RNA (1)...(19): siRNA sense strand
agccuacgcugcccuacaa

SEQ ID NO: 1888332 - RNA, 19 nt, Homo sapiens
  misc_RNA (1)...(19): siRNA sense strand
aggcagacauuaaauacac

SEQ ID NO: 1888333 - RNA, 19 nt, Homo sapiens
  misc_RNA (1)...(19): siRNA sense strand
cauccgacccugugacauc

SEQ ID NO: 1888334 - RNA, 19 nt, Homo sapiens
  misc_RNA (1)...(19): siRNA sense strand
cagcaaugaccuucaagca

SEQ ID NO: 1888335 - RNA, 19 nt, Homo sapiens
  misc_RNA (1)...(19): siRNA sense strand
ccaacguggucaagcacau

SEQ ID NO: 1888336 - RNA, 19 nt, Homo sapiens
  misc_RNA (1)...(19): siRNA sense strand
gaggcagacauuaaauaca

SEQ ID NO: 1888337 - RNA, 19 nt, Homo sapiens
  misc_RNA (1)...(19): siRNA sense strand
cggcgucugugacaaguac

SEQ ID NO: 1888338 - RNA, 19 nt, Homo sapiens
  misc_RNA (1)...(19): siRNA sense strand
cugggcauccggacguuua

SEQ ID NO: 1888339 - RNA, 19 nt, Homo sapiens
  misc_RNA (1)...(19): siRNA sense strand
ggaccguacgaggcaagua

SEQ ID NO: 1888340 - RNA, 19 nt, Homo sapiens
  misc_RNA (1)...(19): siRNA sense strand
ccacacuuccuuuauuggu

SEQ ID NO: 1888341 - RNA, 19 nt, Homo sapiens
  misc_RNA (1)...(19): siRNA sense strand
ucaaagaggucccgaggaa

SEQ ID NO: 1888342 - RNA, 19 nt, Homo sapiens
  misc_RNA (1)...(19): siRNA sense strand
uaugagggcuuugagcuua

SEQ ID NO: 1888343 - RNA, 19 nt, Homo sapiens
  misc_RNA (1)...(19): siRNA sense strand
guaugaaguuuccaucuga

SEQ ID NO: 1888344 - RNA, 19 nt, Homo sapiens
  misc_RNA (1)...(19): siRNA sense strand
gcaguggcguuuacaucua

SEQ ID NO: 1888345 - RNA, 19 nt, Homo sapiens
  misc_RNA (1)...(19): siRNA sense strand
acaccaagcuucagggaaa

SEQ ID NO: 1888346 - RNA, 19 nt, Homo sapiens
  misc_RNA (1)...(19): siRNA sense strand
ccaaaugcgccuugaagua

SEQ ID NO: 1888347 - RNA, 19 nt, Homo sapiens
  misc_RNA (1)...(19): siRNA sense strand
gcccaguucuguguaauaa

SEQ ID NO: 1888348 - RNA, 19 nt, Homo sapiens
  misc_RNA (1)...(19): siRNA sense strand
gcuccgacauucucacuug

SEQ ID NO: 1888349 - RNA, 19 nt, Homo sapiens
  misc_RNA (1)...(19): siRNA sense strand
gcuccaaguugagauauug

SEQ ID NO: 1888350 - RNA, 19 nt, Homo sapiens
  misc_RNA (1)...(19): siRNA sense strand
cgacaacuguuaccacuac

SEQ ID NO: 1888351 - RNA, 19 nt, Homo sapiens
  misc_RNA (1)...(19): siRNA sense strand
ccaaugccaucgaaugugu

SEQ ID NO: 1888352 - RNA, 19 nt, Homo sapiens
  misc_RNA (1)...(19): siRNA sense strand
ccaguucuguguaauaaca

SEQ ID NO: 1888353 - RNA, 19 nt, Homo sapiens
  misc_RNA (1)...(19): siRNA sense strand
gaaggaggaggagauauug

SEQ ID NO: 1888354 - RNA, 19 nt, Homo sapiens
  misc_RNA (1)...(19): siRNA sense strand
gcuguuaagccuucgauuu

SEQ ID NO: 1888355 - RNA, 19 nt, Homo sapiens
  misc_RNA (1)...(19): siRNA sense strand
gcacuuacagcauccaugu

SEQ ID NO: 1888356 - RNA, 19 nt, Homo sapiens
  misc_RNA (1)...(19): siRNA sense strand
gccaaaagaucaugacuug

SEQ ID NO: 1888357 - RNA, 19 nt, Homo sapiens
  misc_RNA (1)...(19): siRNA sense strand
ugaaggaggaggagauauu

SEQ ID NO: 1888358 - RNA, 19 nt, Homo sapiens
  misc_RNA (1)...(19): siRNA sense strand
ccucuaggcuuggucauug

SEQ ID NO: 1888359 - RNA, 19 nt, Homo sapiens
  misc_RNA (1)...(19): siRNA sense strand
gaucuaugauucggacaug

SEQ ID NO: 1888360 - RNA, 19 nt, Homo sapiens
  misc_RNA (1)...(19): siRNA sense strand
ucucgugccucccaggaua

SEQ ID NO: 1888361 - RNA, 19 nt, Homo sapiens
  misc_RNA (1)...(19): siRNA sense strand
guuaagccuucgauuugaa

SEQ ID NO: 1888362 - RNA, 19 nt, Homo sapiens
  misc_RNA (1)...(19): siRNA sense strand
cagccaugcucaccugcua

SEQ ID NO: 1888363 - RNA, 19 nt, Homo sapiens
  misc_RNA (1)...(19): siRNA sense strand
acacccaaguggagcgaua

SEQ ID NO: 1888364 - RNA, 19 nt, Homo sapiens
  misc_RNA (1)...(19): siRNA sense strand
caaaugcgccuugaaguac

SEQ ID NO: 1888365 - RNA, 19 nt, Homo sapiens
  misc_RNA (1)...(19): siRNA sense strand
ccagcccaguucuguguaa

SEQ ID NO: 1888366 - RNA, 19 nt, Homo sapiens
  misc_RNA (1)...(19): siRNA sense strand
gcuucaggauccacuauca

SEQ ID NO: 1888367 - RNA, 19 nt, Homo sapiens
  misc_RNA (1)...(19): siRNA sense strand
gggacaugcugacgcuguu

SEQ ID NO: 1888368 - RNA, 19 nt, Homo sapiens
  misc_RNA (1)...(19): siRNA sense strand
ggcccuggcugaacugcuu

SEQ ID NO: 1888369 - RNA, 19 nt, Homo sapiens
  misc_RNA (1)...(19): siRNA sense strand
gggccagggcuucguauug

SEQ ID NO: 1888370 - RNA, 19 nt, Homo sapiens
  misc_RNA (1)...(19): siRNA sense strand
caaguugagauauugaaug

SEQ ID NO: 1888371 - RNA, 19 nt, Homo sapiens
  misc_RNA (1)...(19): siRNA sense strand
ccacggacccugaguaucg

SEQ ID NO: 1888372 - RNA, 19 nt, Homo sapiens
  misc_RNA (1)...(19): siRNA sense strand
ggacaaugaccggcugaug

SEQ ID NO: 1888373 - RNA, 19 nt, Homo sapiens
  misc_RNA (1)...(19): siRNA sense strand
gcgagucucugcgcuucuu

SEQ ID NO: 1888374 - RNA, 19 nt, Homo sapiens
  misc_RNA (1)...(19): siRNA sense strand
gcugcuaggcuccgacauu

SEQ ID NO: 1888375 - RNA, 19 nt, Homo sapiens
  misc_RNA (1)...(19): siRNA sense strand
caaaagaucaugacuugug

SEQ ID NO: 1888376 - RNA, 19 nt, Homo sapiens
  misc_RNA (1)...(19): siRNA sense strand
gaccagcccaguucugugu

SEQ ID NO: 1888377 - RNA, 19 nt, Homo sapiens
  misc_RNA (1)...(19): siRNA sense strand
acguggagcugcugucaga

SEQ ID NO: 1888378 - RNA, 19 nt, Homo sapiens
  misc_RNA (1)...(19): siRNA sense strand
gcgauaggguccccaaaug

SEQ ID NO: 1888379 - RNA, 19 nt, Homo sapiens
  misc_RNA (1)...(19): siRNA sense strand
uguuaagccuucgauuuga

SEQ ID NO: 1888380 - RNA, 19 nt, Homo sapiens
  misc_RNA (1)...(19): siRNA sense strand
ggccagggcuucguauugc

SEQ ID NO: 1888381 - RNA, 19 nt, Homo sapiens
  misc_RNA (1)...(19): siRNA sense strand
ccacagaaccccacuggaa

SEQ ID NO: 1888382 - RNA, 19 nt, Homo sapiens
  misc_RNA (1)...(19): siRNA sense strand
gcuaccagacgcuguacaa

SEQ ID NO: 1888383 - RNA, 19 nt, Homo sapiens
  misc_RNA (1)...(19): siRNA sense strand
cuguuaagccuucgauuug

SEQ ID NO: 1888384 - RNA, 19 nt, Homo sapiens
  misc_RNA (1)...(19): siRNA sense strand
gcacguccaggaagagaag

SEQ ID NO: 1888385 - RNA, 19 nt, Homo sapiens
  misc_RNA (1)...(19): siRNA sense strand
cgaaggguauguggagucu

SEQ ID NO: 1888386 - RNA, 19 nt, Homo sapiens
  misc_RNA (1)...(19): siRNA sense strand
aguaugaaguuuccaucug

SEQ ID NO: 1888387 - RNA, 19 nt, Homo sapiens
  misc_RNA (1)...(19): siRNA sense strand
cugcuaggcuccgacauuc

SEQ ID NO: 1888388 - RNA, 19 nt, Homo sapiens
  misc_RNA (1)...(19): siRNA sense strand
gcgugcacguccaggaaga

SEQ ID NO: 1888389 - RNA, 19 nt, Homo sapiens
  misc_RNA (1)...(19): siRNA sense strand
gagacgacgaccaccauca

SEQ ID NO: 1888390 - RNA, 19 nt, Homo sapiens
  misc_RNA (1)...(19): siRNA sense strand
cgaccucacacugcaguuu

SEQ ID NO: 1888391 - RNA, 19 nt, Homo sapiens
  misc_RNA (1)...(19): siRNA sense strand
ccagaccacagauccauca

SEQ ID NO: 1888392 - RNA, 19 nt, Homo sapiens
  misc_RNA (1)...(19): siRNA sense strand
ggccaacucauccaugcuu

SEQ ID NO: 1888393 - RNA, 19 nt, Homo sapiens
  misc_RNA (1)...(19): siRNA sense strand
gcguuuacaucuacuacac

SEQ ID NO: 1888394 - RNA, 19 nt, Homo sapiens
  misc_RNA (1)...(19): siRNA sense strand
accagacgcuguacaagca

SEQ ID NO: 1888395 - RNA, 19 nt, Homo sapiens
  misc_RNA (1)...(19): siRNA sense strand
caaccaaccggcugcuucu

SEQ ID NO: 1888396 - RNA, 19 nt, Homo sapiens
  misc_RNA (1)...(19): siRNA sense strand
acccucaucugccucaaug

SEQ ID NO: 1888397 - RNA, 19 nt, Homo sapiens
  misc_RNA (1)...(19): siRNA sense strand
caccugccguugggucauu

SEQ ID NO: 1888398 - RNA, 19 nt, Homo sapiens
  misc_RNA (1)...(19): siRNA sense strand
gccagugggaccugucuug

SEQ ID NO: 1888399 - RNA, 19 nt, Homo sapiens
  misc_RNA (1)...(19): siRNA sense strand
gaccucacacugcaguuuc

SEQ ID NO: 1888400 - RNA, 19 nt, Homo sapiens
  misc_RNA (1)...(19): siRNA sense strand
cuaccacggacccugagua

SEQ ID NO: 1888401 - RNA, 19 nt, Homo sapiens
  misc_RNA (1)...(19): siRNA sense strand
ggcaguggcguuuacaucu

SEQ ID NO: 1888402 - RNA, 19 nt, Homo sapiens
  misc_RNA (1)...(19): siRNA sense strand
ccaaguugagauauugaau

SEQ ID NO: 1888403 - RNA, 19 nt, Homo sapiens
  misc_RNA (1)...(19): siRNA sense strand
ccugaaggaggaggagaua

SEQ ID NO: 1888404 - RNA, 19 nt, Homo sapiens
  misc_RNA (1)...(19): siRNA sense strand
cuucugcuaugagggcuuu

SEQ ID NO: 1888405 - RNA, 19 nt, Homo sapiens
  misc_RNA (1)...(19): siRNA sense strand
acacagaacuggagaaaua

SEQ ID NO: 1888406 - RNA, 19 nt, Homo sapiens
  misc_RNA (1)...(19): siRNA sense strand
ccacagaaaucuugaauga

SEQ ID NO: 1888407 - RNA, 19 nt, Homo sapiens
  misc_RNA (1)...(19): siRNA sense strand
gaacaggcauguaaugaau

SEQ ID NO: 1888408 - RNA, 19 nt, Homo sapiens
  misc_RNA (1)...(19): siRNA sense strand
gaagaacauuggcaaguuu

SEQ ID NO: 1888409 - RNA, 19 nt, Homo sapiens
  misc_RNA (1)...(19): siRNA sense strand
ggaagaagccaaccucuau

SEQ ID NO: 1888410 - RNA, 19 nt, Homo sapiens
  misc_RNA (1)...(19): siRNA sense strand
guacaguccacauaauuua

SEQ ID NO: 1888411 - RNA, 19 nt, Homo sapiens
  misc_RNA (1)...(19): siRNA sense strand
uaaugagacuggacaauau

SEQ ID NO: 1888412 - RNA, 19 nt, Homo sapiens
  misc_RNA (1)...(19): siRNA sense strand
aagaggagcuggccaagaa

SEQ ID NO: 1888413 - RNA, 19 nt, Homo sapiens
  misc_RNA (1)...(19): siRNA sense strand
ucagauaacucuauugaac

SEQ ID NO: 1888414 - RNA, 19 nt, Homo sapiens
  misc_RNA (1)...(19): siRNA sense strand
acaaaucuaucacacagaa

SEQ ID NO: 1888415 - RNA, 19 nt, Homo sapiens
  misc_RNA (1)...(19): siRNA sense strand
gcaacaaacgaaucaggua

SEQ ID NO: 1888416 - RNA, 19 nt, Homo sapiens
  misc_RNA (1)...(19): siRNA sense strand
cgaaucagguacaagaaga

SEQ ID NO: 1888417 - RNA, 19 nt, Homo sapiens
  misc_RNA (1)...(19): siRNA sense strand
guaaacaggccacagaaau

SEQ ID NO: 1888418 - RNA, 19 nt, Homo sapiens
  misc_RNA (1)...(19): siRNA sense strand
gauacccuccgucauguua

SEQ ID NO: 1888419 - RNA, 19 nt, Homo sapiens
  misc_RNA (1)...(19): siRNA sense strand
caaagaaacaugcccugaa

SEQ ID NO: 1888420 - RNA, 19 nt, Homo sapiens
  misc_RNA (1)...(19): siRNA sense strand
caacaacuccaucuucugu

SEQ ID NO: 1888421 - RNA, 19 nt, Homo sapiens
  misc_RNA (1)...(19): siRNA sense strand
ugucacagguauccaauug

SEQ ID NO: 1888422 - RNA, 19 nt, Homo sapiens
  misc_RNA (1)...(19): siRNA sense strand
cuaaugagacuggacaaua

SEQ ID NO: 1888423 - RNA, 19 nt, Homo sapiens
  misc_RNA (1)...(19): siRNA sense strand
cuauugaacacucagauua

SEQ ID NO: 1888424 - RNA, 19 nt, Homo sapiens
  misc_RNA (1)...(19): siRNA sense strand
acaggcauguaaugaauuu

SEQ ID NO: 1888425 - RNA, 19 nt, Homo sapiens
  misc_RNA (1)...(19): siRNA sense strand
caucauccaucgaaaauuu

SEQ ID NO: 1888426 - RNA, 19 nt, Homo sapiens
  misc_RNA (1)...(19): siRNA sense strand
gaauuuacuacacauguga

SEQ ID NO: 1888427 - RNA, 19 nt, Homo sapiens
  misc_RNA (1)...(19): siRNA sense strand
agaagaacauuggcaaguu

SEQ ID NO: 1888428 - RNA, 19 nt, Homo sapiens
  misc_RNA (1)...(19): siRNA sense strand
aaacgaaucagguacaaga

SEQ ID NO: 1888429 - RNA, 19 nt, Homo sapiens
  misc_RNA (1)...(19): siRNA sense strand
ugugugagaucaaagagaa

SEQ ID NO: 1888430 - RNA, 19 nt, Homo sapiens
  misc_RNA (1)...(19): siRNA sense strand
aauaugaacaggcauguaa

SEQ ID NO: 1888431 - RNA, 19 nt, Homo sapiens
  misc_RNA (1)...(19): siRNA sense strand
aaagaaacaugcccugaac

SEQ ID NO: 1888432 - RNA, 19 nt, Homo sapiens
  misc_RNA (1)...(19): siRNA sense strand
gaaagaauggugggcauca

SEQ ID NO: 1888433 - RNA, 19 nt, Homo sapiens
  misc_RNA (1)...(19): siRNA sense strand
gauuacagagccaaauuga

SEQ ID NO: 1888434 - RNA, 19 nt, Homo sapiens
  misc_RNA (1)...(19): siRNA sense strand
caaauugacccagaucaga

SEQ ID NO: 1888435 - RNA, 19 nt, Homo sapiens
  misc_RNA (1)...(19): siRNA sense strand
ggacgaggcgcaagcaaag

SEQ ID NO: 1888436 - RNA, 19 nt, Homo sapiens
  misc_RNA (1)...(19): siRNA sense strand
cagaacaaccagaccaauu

SEQ ID NO: 1888437 - RNA, 19 nt, Homo sapiens
  misc_RNA (1)...(19): siRNA sense strand
gaagaagccaaccucuaug

SEQ ID NO: 1888438 - RNA, 19 nt, Homo sapiens
  misc_RNA (1)...(19): siRNA sense strand
gaguagaacacgucccauu

SEQ ID NO: 1888439 - RNA, 19 nt, Homo sapiens
  misc_RNA (1)...(19): siRNA sense strand
acaacuccaucuucuguga

SEQ ID NO: 1888440 - RNA, 19 nt, Homo sapiens
  misc_RNA (1)...(19): siRNA sense strand
caaccucuaugcugcaaag

SEQ ID NO: 1888441 - RNA, 19 nt, Homo sapiens
  misc_RNA (1)...(19): siRNA sense strand
guagaacacgucccauuuc

SEQ ID NO: 1888442 - RNA, 19 nt, Homo sapiens
  misc_RNA (1)...(19): siRNA sense strand
ucacagguauccaauuggu

SEQ ID NO: 1888443 - RNA, 19 nt, Homo sapiens
  misc_RNA (1)...(19): siRNA sense strand
gagccaaauugacccagau

SEQ ID NO: 1888444 - RNA, 19 nt, Homo sapiens
  misc_RNA (1)...(19): siRNA sense strand
gugaagcaguuaugauuuu

SEQ ID NO: 1888445 - RNA, 19 nt, Homo sapiens
  misc_RNA (1)...(19): siRNA sense strand
gaaacaugcccugaacugu

SEQ ID NO: 1888446 - RNA, 19 nt, Homo sapiens
  misc_RNA (1)...(19): siRNA sense strand
ugaauuuacuacacaugug

SEQ ID NO: 1888447 - RNA, 19 nt, Homo sapiens
  misc_RNA (1)...(19): siRNA sense strand
acagguauccaauugguuu

SEQ ID NO: 1888448 - RNA, 19 nt, Homo sapiens
  misc_RNA (1)...(19): siRNA sense strand
uaaacaggccacagaaauc

SEQ ID NO: 1888449 - RNA, 19 nt, Homo sapiens
  misc_RNA (1)...(19): siRNA sense strand
gaaaaggcguaacuucagu

SEQ ID NO: 1888450 - RNA, 19 nt, Homo sapiens
  misc_RNA (1)...(19): siRNA sense strand
gaaugaaaccagcgcucuu

SEQ ID NO: 1888451 - RNA, 19 nt, Homo sapiens
  misc_RNA (1)...(19): siRNA sense strand
ccaggaugcugcagacucu

SEQ ID NO: 1888452 - RNA, 19 nt, Homo sapiens
  misc_RNA (1)...(19): siRNA sense strand
guggauacccuccgucaug

SEQ ID NO: 1888453 - RNA, 19 nt, Homo sapiens
  misc_RNA (1)...(19): siRNA sense strand
caucacagugucacaggua

SEQ ID NO: 1888454 - RNA, 19 nt, Homo sapiens
  misc_RNA (1)...(19): siRNA sense strand
aggcguaacuucaguaaac

SEQ ID NO: 1888455 - RNA, 19 nt, Homo sapiens
  misc_RNA (1)...(19): siRNA sense strand
agaugcagcucaaacaaag

SEQ ID NO: 1888456 - RNA, 19 nt, Homo sapiens
  misc_RNA (1)...(19): siRNA sense strand
cagauuacagagccaaauu

SEQ ID NO: 1888457 - RNA, 19 nt, Homo sapiens
  misc_RNA (1)...(19): siRNA sense strand
cagaugcagcucaaacaaa

SEQ ID NO: 1888458 - RNA, 19 nt, Homo sapiens
  misc_RNA (1)...(19): siRNA sense strand
ugaacaggcauguaaugaa

SEQ ID NO: 1888459 - RNA, 19 nt, Homo sapiens
  misc_RNA (1)...(19): siRNA sense strand
gaaauaugaacaggcaugu

SEQ ID NO: 1888460 - RNA, 19 nt, Homo sapiens
  misc_RNA (1)...(19): siRNA sense strand
caccagaucaugaccauca

SEQ ID NO: 1888461 - RNA, 19 nt, Homo sapiens
  misc_RNA (1)...(19): siRNA sense strand
gaaucagguacaagaagaa

SEQ ID NO: 1888462 - RNA, 19 nt, Homo sapiens
  misc_RNA (1)...(19): siRNA sense strand
ucaguaaacaggccacaga

SEQ ID NO: 1888463 - RNA, 19 nt, Homo sapiens
  misc_RNA (1)...(19): siRNA sense strand
agaacaaccagaccaauuc

SEQ ID NO: 1888464 - RNA, 19 nt, Homo sapiens
  misc_RNA (1)...(19): siRNA sense strand
uaacucuauugaacacuca

SEQ ID NO: 1888465 - RNA, 19 nt, Homo sapiens
  misc_RNA (1)...(19): siRNA sense strand
ccauucagaugcagcucaa

SEQ ID NO: 1888466 - RNA, 19 nt, Homo sapiens
  misc_RNA (1)...(19): siRNA sense strand
ucacacagaacuggagaaa

SEQ ID NO: 1888467 - RNA, 19 nt, Homo sapiens
  misc_RNA (1)...(19): siRNA sense strand
cuucagauaacucuauuga

SEQ ID NO: 1888468 - RNA, 19 nt, Homo sapiens
  misc_RNA (1)...(19): siRNA sense strand
gcacucggauaccucuaac

SEQ ID NO: 1888469 - RNA, 19 nt, Homo sapiens
  misc_RNA (1)...(19): siRNA sense strand
acaaacgaaucagguacaa

SEQ ID NO: 1888470 - RNA, 19 nt, Homo sapiens
  misc_RNA (1)...(19): siRNA sense strand
cagaacuggagaaauauga

SEQ ID NO: 1888471 - RNA, 19 nt, Homo sapiens
  misc_RNA (1)...(19): siRNA sense strand
ugacccagaucagacaaau

SEQ ID NO: 1888472 - RNA, 19 nt, Homo sapiens
  misc_RNA (1)...(19): siRNA sense strand
aacaugcccugaacuguca

SEQ ID NO: 1888473 - RNA, 19 nt, Homo sapiens
  misc_RNA (1)...(19): siRNA sense strand
aguagaacacgucccauuu

SEQ ID NO: 1888474 - RNA, 19 nt, Homo sapiens
  misc_RNA (1)...(19): siRNA sense strand
aaacaggucucagcaucag

SEQ ID NO: 1888475 - RNA, 19 nt, Homo sapiens
  misc_RNA (1)...(19): siRNA sense strand
gcacuugugaagcaguuau

SEQ ID NO: 1888476 - RNA, 19 nt, Homo sapiens
  misc_RNA (1)...(19): siRNA sense strand
gaacaaccagaccaauucg

SEQ ID NO: 1888477 - RNA, 19 nt, Homo sapiens
  misc_RNA (1)...(19): siRNA sense strand
uguacaguccacauaauuu

SEQ ID NO: 1888478 - RNA, 19 nt, Homo sapiens
  misc_RNA (1)...(19): siRNA sense strand
gaacuggagaaauaugaac

SEQ ID NO: 1888479 - RNA, 19 nt, Homo sapiens
  misc_RNA (1)...(19): siRNA sense strand
cuacacaugugaugaaccu

SEQ ID NO: 1888480 - RNA, 19 nt, Homo sapiens
  misc_RNA (1)...(19): siRNA sense strand
uuacuacacaugugaugaa

SEQ ID NO: 1888481 - RNA, 19 nt, Homo sapiens
  misc_RNA (1)...(19): siRNA sense strand
cagauaacucuauugaaca

SEQ ID NO: 1888482 - RNA, 19 nt, Homo sapiens
  misc_RNA (1)...(19): siRNA sense strand
acucggauaccucuaacua

SEQ ID NO: 1888483 - RNA, 19 nt, Homo sapiens
  misc_RNA (1)...(19): siRNA sense strand
gcaacaacuccaucuucug

SEQ ID NO: 1888484 - RNA, 19 nt, Homo sapiens
  misc_RNA (1)...(19): siRNA sense strand
ggacgcaacaacuccaucu

SEQ ID NO: 1888485 - RNA, 19 nt, Homo sapiens
  misc_RNA (1)...(19): siRNA sense strand
agacuggacaauaugcuuu

SEQ ID NO: 1888486 - RNA, 19 nt, Homo sapiens
  misc_RNA (1)...(19): siRNA sense strand
ugaacacucagauuacaga

SEQ ID NO: 1888487 - RNA, 19 nt, Homo sapiens
  misc_RNA (1)...(19): siRNA sense strand
gcagaacaaccagaccaau

SEQ ID NO: 1888488 - RNA, 19 nt, Homo sapiens
  misc_RNA (1)...(19): siRNA sense strand
cgcaacaacuccaucuucu

SEQ ID NO: 1888489 - RNA, 19 nt, Homo sapiens
  misc_RNA (1)...(19): siRNA sense strand
ccagugaagaagccaaaga

SEQ ID NO: 1888490 - RNA, 19 nt, Homo sapiens
  misc_RNA (1)...(19): siRNA sense strand
gagacuggacaauaugcuu

SEQ ID NO: 1888491 - RNA, 19 nt, Homo sapiens
  misc_RNA (1)...(19): siRNA sense strand
gguacaagaagaacauugg

SEQ ID NO: 1888492 - RNA, 19 nt, Homo sapiens
  misc_RNA (1)...(19): siRNA sense strand
gaggagcuggccaagaaau

SEQ ID NO: 1888493 - RNA, 19 nt, Homo sapiens
  misc_RNA (1)...(19): siRNA sense strand
ugugaagcaguuaugauuu

SEQ ID NO: 1888494 - RNA, 19 nt, Homo sapiens
  misc_RNA (1)...(19): siRNA sense strand
gcgacauccuccaccagau

SEQ ID NO: 1888495 - RNA, 19 nt, Homo sapiens
  misc_RNA (1)...(19): siRNA sense strand
uggcaaguuucaggaagaa

SEQ ID NO: 1888496 - RNA, 19 nt, Homo sapiens
  misc_RNA (1)...(19): siRNA sense strand
guucuucagauaacucuau

SEQ ID NO: 1888497 - RNA, 19 nt, Homo sapiens
  misc_RNA (1)...(19): siRNA sense strand
ucagaugcagcucaaacaa

SEQ ID NO: 1888498 - RNA, 19 nt, Homo sapiens
  misc_RNA (1)...(19): siRNA sense strand
agaaacaugcccugaacug

SEQ ID NO: 1888499 - RNA, 19 nt, Homo sapiens
  misc_RNA (1)...(19): siRNA sense strand
gcucuucagcguccugugu

SEQ ID NO: 1888500 - RNA, 19 nt, Homo sapiens
  misc_RNA (1)...(19): siRNA sense strand
aaacaggccacagaaaucu

SEQ ID NO: 1888501 - RNA, 19 nt, Homo sapiens
  misc_RNA (1)...(19): siRNA sense strand
aaaggcguaacuucaguaa

SEQ ID NO: 1888502 - RNA, 19 nt, Homo sapiens
  misc_RNA (1)...(19): siRNA sense strand
ccaagucggagccaaugug

SEQ ID NO: 1888503 - RNA, 19 nt, Homo sapiens
  misc_RNA (1)...(19): siRNA sense strand
acagaaggcccaggaagug

SEQ ID NO: 1888504 - RNA, 19 nt, Homo sapiens
  misc_RNA (1)...(19): siRNA sense strand
uccgucauguuaucaauca

SEQ ID NO: 1888505 - RNA, 19 nt, Homo sapiens
  misc_RNA (1)...(19): siRNA sense strand
gaagaaaguucaagaagaa

SEQ ID NO: 1888506 - RNA, 19 nt, Homo sapiens
  misc_RNA (1)...(19): siRNA sense strand
caagaagaauuugacauug

SEQ ID NO: 1888507 - RNA, 19 nt, Homo sapiens
  misc_RNA (1)...(19): siRNA sense strand
gacaagacaucuggugaaa

SEQ ID NO: 1888508 - RNA, 19 nt, Homo sapiens
  misc_RNA (1)...(19): siRNA sense strand
agaagaaaguucaagaaga

SEQ ID NO: 1888509 - RNA, 19 nt, Homo sapiens
  misc_RNA (1)...(19): siRNA sense strand
caagacaucuggugaaaau

SEQ ID NO: 1888510 - RNA, 19 nt, Homo sapiens
  misc_RNA (1)...(19): siRNA sense strand
gugcagcgguggccauuca

SEQ ID NO: 1888511 - RNA, 19 nt, Homo sapiens
  misc_RNA (1)...(19): siRNA sense strand
gaaaauuccagaagaagaa

SEQ ID NO: 1888512 - RNA, 19 nt, Homo sapiens
  misc_RNA (1)...(19): siRNA sense strand
gacagaagaaaguucaaga

SEQ ID NO: 1888513 - RNA, 19 nt, Homo sapiens
  misc_RNA (1)...(19): siRNA sense strand
ucagaaaauuccagaagaa

SEQ ID NO: 1888514 - RNA, 19 nt, Homo sapiens
  misc_RNA (1)...(19): siRNA sense strand
gccauucagucucaguuca

SEQ ID NO: 1888515 - RNA, 19 nt, Homo sapiens
  misc_RNA (1)...(19): siRNA sense strand
cagaagaaaguucaagaag

SEQ ID NO: 1888516 - RNA, 19 nt, Homo sapiens
  misc_RNA (1)...(19): siRNA sense strand
agacaagacaucuggugaa

SEQ ID NO: 1888517 - RNA, 19 nt, Homo sapiens
  misc_RNA (1)...(19): siRNA sense strand
acagaagaaaguucaagaa

SEQ ID NO: 1888518 - RNA, 19 nt, Homo sapiens
  misc_RNA (1)...(19): siRNA sense strand
ggacagaagaaaguucaag

SEQ ID NO: 1888519 - RNA, 19 nt, Homo sapiens
  misc_RNA (1)...(19): siRNA sense strand
agaagaauuugacauugac

SEQ ID NO: 1888520 - RNA, 19 nt, Homo sapiens
  misc_RNA (1)...(19): siRNA sense strand
gaaaaugauggacagaaga

SEQ ID NO: 1888521 - RNA, 19 nt, Homo sapiens
  misc_RNA (1)...(19): siRNA sense strand
aauuugacauugacaugga

SEQ ID NO: 1888522 - RNA, 19 nt, Homo sapiens
  misc_RNA (1)...(19): siRNA sense strand
agaagaaggcugggucuca

SEQ ID NO: 1888523 - RNA, 19 nt, Homo sapiens
  misc_RNA (1)...(19): siRNA sense strand
gaagaauuugacauugaca

SEQ ID NO: 1888524 - RNA, 19 nt, Homo sapiens
  misc_RNA (1)...(19): siRNA sense strand
gugcugggccaaccaaugg

SEQ ID NO: 1888525 - RNA, 19 nt, Homo sapiens
  misc_RNA (1)...(19): siRNA sense strand
ugaaaaugauggacagaag

SEQ ID NO: 1888526 - RNA, 19 nt, Homo sapiens
  misc_RNA (1)...(19): siRNA sense strand
ggaugcaccagagacagaa

SEQ ID NO: 1888527 - RNA, 19 nt, Homo sapiens
  misc_RNA (1)...(19): siRNA sense strand
agaauuugacauugacaug

SEQ ID NO: 1888528 - RNA, 19 nt, Homo sapiens
  misc_RNA (1)...(19): siRNA sense strand
gaaccaguuugugcuauuu

SEQ ID NO: 1888529 - RNA, 19 nt, Homo sapiens
  misc_RNA (1)...(19): siRNA sense strand
ggacugggcucgauuugag

SEQ ID NO: 1888530 - RNA, 19 nt, Homo sapiens
  misc_RNA (1)...(19): siRNA sense strand
ggaaagugauggagaaggu

SEQ ID NO: 1888531 - RNA, 19 nt, Homo sapiens
  misc_RNA (1)...(19): siRNA sense strand
caaagagacugugaggaaa

SEQ ID NO: 1888532 - RNA, 19 nt, Homo sapiens
  misc_RNA (1)...(19): siRNA sense strand
ggaauuuggugaacuccuu

SEQ ID NO: 1888533 - RNA, 19 nt, Homo sapiens
  misc_RNA (1)...(19): siRNA sense strand
ccacagugccuuccucuuu

SEQ ID NO: 1888534 - RNA, 19 nt, Homo sapiens
  misc_RNA (1)...(19): siRNA sense strand
ggaaccaguuugugcuauu

SEQ ID NO: 1888535 - RNA, 19 nt, Homo sapiens
  misc_RNA (1)...(19): siRNA sense strand
ucaaagagacugugaggaa

SEQ ID NO: 1888536 - RNA, 19 nt, Homo sapiens
  misc_RNA (1)...(19): siRNA sense strand
gggcugagcuagcuguguu

SEQ ID NO: 1888537 - RNA, 19 nt, Homo sapiens
  misc_RNA (1)...(19): siRNA sense strand
gaagccaugugccauuaug

SEQ ID NO: 1888538 - RNA, 19 nt, Homo sapiens
  misc_RNA (1)...(19): siRNA sense strand
gaagaugugcucugaguuc

SEQ ID NO: 1888539 - RNA, 19 nt, Homo sapiens
  misc_RNA (1)...(19): siRNA sense strand
guacacagccaaucagaug

SEQ ID NO: 1888540 - RNA, 19 nt, Homo sapiens
  misc_RNA (1)...(19): siRNA sense strand
gggaagaugugcucugagu

SEQ ID NO: 1888541 - RNA, 19 nt, Homo sapiens
  misc_RNA (1)...(19): siRNA sense strand
ggacaccuuuggcuacuca

SEQ ID NO: 1888542 - RNA, 19 nt, Homo sapiens
  misc_RNA (1)...(19): siRNA sense strand
cgaccuacccacuacaaua

SEQ ID NO: 1888543 - RNA, 19 nt, Homo sapiens
  misc_RNA (1)...(19): siRNA sense strand
gcucaacgacugcaaguau

SEQ ID NO: 1888544 - RNA, 19 nt, Homo sapiens
  misc_RNA (1)...(19): siRNA sense strand
caagggcucuuuccaggau

SEQ ID NO: 1888545 - RNA, 19 nt, Homo sapiens
  misc_RNA (1)...(19): siRNA sense strand
ccagcuauguccugacuga

SEQ ID NO: 1888546 - RNA, 19 nt, Homo sapiens
  misc_RNA (1)...(19): siRNA sense strand
gcagugcccaguuccuaua

SEQ ID NO: 1888547 - RNA, 19 nt, Homo sapiens
  misc_RNA (1)...(19): siRNA sense strand
gccaggaaguucaccuuug

SEQ ID NO: 1888548 - RNA, 19 nt, Homo sapiens
  misc_RNA (1)...(19): siRNA sense strand
ggaagcggaucgaagugau

SEQ ID NO: 1888549 - RNA, 19 nt, Homo sapiens
  misc_RNA (1)...(19): siRNA sense strand
cugaagcgccugagcaaua

SEQ ID NO: 1888550 - RNA, 19 nt, Homo sapiens
  misc_RNA (1)...(19): siRNA sense strand
ccaaucagauggugaacgu

SEQ ID NO: 1888551 - RNA, 19 nt, Homo sapiens
  misc_RNA (1)...(19): siRNA sense strand
gcaugaggcccacaaguuc

SEQ ID NO: 1888552 - RNA, 19 nt, Homo sapiens
  misc_RNA (1)...(19): siRNA sense strand
ucaacacacugcccuggaa

SEQ ID NO: 1888553 - RNA, 19 nt, Homo sapiens
  misc_RNA (1)...(19): siRNA sense strand
ccuaugagauccaguuugg

SEQ ID NO: 1888554 - RNA, 19 nt, Homo sapiens
  misc_RNA (1)...(19): siRNA sense strand
gggaagggaagcaugauug

SEQ ID NO: 1888555 - RNA, 19 nt, Homo sapiens
  misc_RNA (1)...(19): siRNA sense strand
ugaagaccguggccaacaa

SEQ ID NO: 1888556 - RNA, 19 nt, Homo sapiens
  misc_RNA (1)...(19): siRNA sense strand
gcagcgaccuacccacuac

SEQ ID NO: 1888557 - RNA, 19 nt, Homo sapiens
  misc_RNA (1)...(19): siRNA sense strand
ggucugguguggcgugaug

SEQ ID NO: 1888558 - RNA, 19 nt, Homo sapiens
  misc_RNA (1)...(19): siRNA sense strand
ccacuugacuucgggacaa

SEQ ID NO: 1888559 - RNA, 19 nt, Homo sapiens
  misc_RNA (1)...(19): siRNA sense strand
gugcagcuaucuucuccaa

SEQ ID NO: 1888560 - RNA, 19 nt, Homo sapiens
  misc_RNA (1)...(19): siRNA sense strand
cacagugccuuccucuuug

SEQ ID NO: 1888561 - RNA, 19 nt, Homo sapiens
  misc_RNA (1)...(19): siRNA sense strand
aggaagccaugugccauua

SEQ ID NO: 1888562 - RNA, 19 nt, Homo sapiens
  misc_RNA (1)...(19): siRNA sense strand
ggcaugaggcccacaaguu

SEQ ID NO: 1888563 - RNA, 19 nt, Homo sapiens
  misc_RNA (1)...(19): siRNA sense strand
gaggaagccaugugccauu

SEQ ID NO: 1888564 - RNA, 19 nt, Homo sapiens
  misc_RNA (1)...(19): siRNA sense strand
ggaguucccaggccaccua

SEQ ID NO: 1888565 - RNA, 19 nt, Homo sapiens
  misc_RNA (1)...(19): siRNA sense strand
gguguggcgugauggagaa

SEQ ID NO: 1888566 - RNA, 19 nt, Homo sapiens
  misc_RNA (1)...(19): siRNA sense strand
guucaccuaugcacugaug

SEQ ID NO: 1888567 - RNA, 19 nt, Homo sapiens
  misc_RNA (1)...(19): siRNA sense strand
ccagcagccuguguucgua

SEQ ID NO: 1888568 - RNA, 19 nt, Homo sapiens
  misc_RNA (1)...(19): siRNA sense strand
gaaagccaacacaccauuc

SEQ ID NO: 1888569 - RNA, 19 nt, Homo sapiens
  misc_RNA (1)...(19): siRNA sense strand
ccaggaaguucaccuuugc

SEQ ID NO: 1888570 - RNA, 19 nt, Homo sapiens
  misc_RNA (1)...(19): siRNA sense strand
gaguucaccuaugcacuga

SEQ ID NO: 1888571 - RNA, 19 nt, Homo sapiens
  misc_RNA (1)...(19): siRNA sense strand
gcaaguauggcgcgucagu

SEQ ID NO: 1888572 - RNA, 19 nt, Homo sapiens
  misc_RNA (1)...(19): siRNA sense strand
gaccagcuauguccugacu

SEQ ID NO: 1888573 - RNA, 19 nt, Homo sapiens
  misc_RNA (1)...(19): siRNA sense strand
ucuuggagcugcacaaugg

SEQ ID NO: 1888574 - RNA, 19 nt, Homo sapiens
  misc_RNA (1)...(19): siRNA sense strand
gcaggaguuugggaagaug

SEQ ID NO: 1888575 - RNA, 19 nt, Homo sapiens
  misc_RNA (1)...(19): siRNA sense strand
ccaaagagggugagaagac

SEQ ID NO: 1888576 - RNA, 19 nt, Homo sapiens
  misc_RNA (1)...(19): siRNA sense strand
gggaaccaguuugugcuau

SEQ ID NO: 1888577 - RNA, 19 nt, Homo sapiens
  misc_RNA (1)...(19): siRNA sense strand
gcacugccacauugauaca

SEQ ID NO: 1888578 - RNA, 19 nt, Homo sapiens
  misc_RNA (1)...(19): siRNA sense strand
ugaaagccaacacaccauu

SEQ ID NO: 1888579 - RNA, 19 nt, Homo sapiens
  misc_RNA (1)...(19): siRNA sense strand
gcuggaauuuggugaacuc

SEQ ID NO: 1888580 - RNA, 19 nt, Homo sapiens
  misc_RNA (1)...(19): siRNA sense strand
ggaagaugugcucugaguu

SEQ ID NO: 1888581 - RNA, 19 nt, Homo sapiens
  misc_RNA (1)...(19): siRNA sense strand
guucaccuuugcugggaaa

SEQ ID NO: 1888582 - RNA, 19 nt, Homo sapiens
  misc_RNA (1)...(19): siRNA sense strand
gugagaagaccagcuaugu

SEQ ID NO: 1888583 - RNA, 19 nt, Homo sapiens
  misc_RNA (1)...(19): siRNA sense strand
cccgaagccucacucucua

SEQ ID NO: 1888584 - RNA, 19 nt, Homo sapiens
  misc_RNA (1)...(19): siRNA sense strand
gaccuacccacuacaauac

SEQ ID NO: 1888585 - RNA, 19 nt, Homo sapiens
  misc_RNA (1)...(19): siRNA sense strand
guucccaggccaccuauga

SEQ ID NO: 1888586 - RNA, 19 nt, Homo sapiens
  misc_RNA (1)...(19): siRNA sense strand
gaagcggaucgaagugaug

SEQ ID NO: 1888587 - RNA, 19 nt, Homo sapiens
  misc_RNA (1)...(19): siRNA sense strand
gagcuggaauuuggugaac

SEQ ID NO: 1888588 - RNA, 19 nt, Homo sapiens
  misc_RNA (1)...(19): siRNA sense strand
cugggaaagugauggagaa

SEQ ID NO: 1888589 - RNA, 19 nt, Homo sapiens
  misc_RNA (1)...(19): siRNA sense strand
cagcuggaaugggugaaga

SEQ ID NO: 1888590 - RNA, 19 nt, Homo sapiens
  misc_RNA (1)...(19): siRNA sense strand
ggauggcucccguguacug

SEQ ID NO: 1888591 - RNA, 19 nt, Homo sapiens
  misc_RNA (1)...(19): siRNA sense strand
agacccugcuggccacuug

SEQ ID NO: 1888592 - RNA, 19 nt, Homo sapiens
  misc_RNA (1)...(19): siRNA sense strand
ugaagcgccugagcaauac

SEQ ID NO: 1888593 - RNA, 19 nt, Homo sapiens
  misc_RNA (1)...(19): siRNA sense strand
aagagacugugaggaaaug

SEQ ID NO: 1888594 - RNA, 19 nt, Homo sapiens
  misc_RNA (1)...(19): siRNA sense strand
ggacugcuggcugcacuug

SEQ ID NO: 1888595 - RNA, 19 nt, Homo sapiens
  misc_RNA (1)...(19): siRNA sense strand
ccaccuaugagauccaguu

SEQ ID NO: 1888596 - RNA, 19 nt, Homo sapiens
  misc_RNA (1)...(19): siRNA sense strand
cggagagacuucccuacca

SEQ ID NO: 1888597 - RNA, 19 nt, Homo sapiens
  misc_RNA (1)...(19): siRNA sense strand
caugggcuaugcuccuguu

SEQ ID NO: 1888598 - RNA, 19 nt, Homo sapiens
  misc_RNA (1)...(19): siRNA sense strand
cuggauggcucccguguac

SEQ ID NO: 1888599 - RNA, 19 nt, Homo sapiens
  misc_RNA (1)...(19): siRNA sense strand
ggccaggaaguucaccuuu

SEQ ID NO: 1888600 - RNA, 19 nt, Homo sapiens
  misc_RNA (1)...(19): siRNA sense strand
aagccucacucucuaugug

SEQ ID NO: 1888601 - RNA, 19 nt, Homo sapiens
  misc_RNA (1)...(19): siRNA sense strand
uccaagugcugucccuguu

SEQ ID NO: 1888602 - RNA, 19 nt, Homo sapiens
  misc_RNA (1)...(19): siRNA sense strand
gccacgaguucaccuaugc

SEQ ID NO: 1888603 - RNA, 19 nt, Homo sapiens
  misc_RNA (1)...(19): siRNA sense strand
ggaagccaugugccauuau

SEQ ID NO: 1888604 - RNA, 19 nt, Homo sapiens
  misc_RNA (1)...(19): siRNA sense strand
uggaggaggugcugaagac

SEQ ID NO: 1888605 - RNA, 19 nt, Homo sapiens
  misc_RNA (1)...(19): siRNA sense strand
aaagagacugugaggaaau

SEQ ID NO: 1888606 - RNA, 19 nt, Homo sapiens
  misc_RNA (1)...(19): siRNA sense strand
ggcaucaggcgcuuucuca

SEQ ID NO: 1888607 - RNA, 19 nt, Homo sapiens
  misc_RNA (1)...(19): siRNA sense strand
uugggaagaugugcucuga

SEQ ID NO: 1888608 - RNA, 19 nt, Homo sapiens
  misc_RNA (1)...(19): siRNA sense strand
gggcugggguuuuguuugu

SEQ ID NO: 1888609 - RNA, 19 nt, Homo sapiens
  misc_RNA (1)...(19): siRNA sense strand
ggugagaagaccagcuaug

SEQ ID NO: 1888610 - RNA, 19 nt, Homo sapiens
  misc_RNA (1)...(19): siRNA sense strand
gccuagcccuggugacagu

SEQ ID NO: 1888611 - RNA, 19 nt, Homo sapiens
  misc_RNA (1)...(19): siRNA sense strand
ccaugugccauuaugaaga

SEQ ID NO: 1888612 - RNA, 19 nt, Homo sapiens
  misc_RNA (1)...(19): siRNA sense strand
ggaagggaagcaugauugc

SEQ ID NO: 1888613 - RNA, 19 nt, Homo sapiens
  misc_RNA (1)...(19): siRNA sense strand
ggacuaccaccuggagaca

SEQ ID NO: 1888614 - RNA, 19 nt, Homo sapiens
  misc_RNA (1)...(19): siRNA sense strand
caugugccauuaugaagac

SEQ ID NO: 1888615 - RNA, 19 nt, Homo sapiens
  misc_RNA (1)...(19): siRNA sense strand
ccagaugguggcagaggaa

SEQ ID NO: 1888616 - RNA, 19 nt, Homo sapiens
  misc_RNA (1)...(19): siRNA sense strand
gaagggaagcaugauugca

SEQ ID NO: 1888617 - RNA, 19 nt, Homo sapiens
  misc_RNA (1)...(19): siRNA sense strand
gaagccucacucucuaugu

SEQ ID NO: 1888618 - RNA, 19 nt, Homo sapiens
  misc_RNA (1)...(19): siRNA sense strand
cagccaaucagauggugaa

SEQ ID NO: 1888619 - RNA, 19 nt, Homo sapiens
  misc_RNA (1)...(19): siRNA sense strand
uugagcggguggagaaguu

SEQ ID NO: 1888620 - RNA, 19 nt, Homo sapiens
  misc_RNA (1)...(19): siRNA sense strand
cagcgccguucuugaagca

SEQ ID NO: 1888621 - RNA, 19 nt, Homo sapiens
  misc_RNA (1)...(19): siRNA sense strand
gccugguucuugcuacaga

SEQ ID NO: 1888622 - RNA, 19 nt, Homo sapiens
  misc_RNA (1)...(19): siRNA sense strand
gcgccugguucuugcuaca

SEQ ID NO: 1888623 - RNA, 19 nt, Homo sapiens
  misc_RNA (1)...(19): siRNA sense strand
aguuugugcuauuugauga

SEQ ID NO: 1888624 - RNA, 19 nt, Homo sapiens
  misc_RNA (1)...(19): siRNA sense strand
ccgugacucuggacaaugg

SEQ ID NO: 1888625 - RNA, 19 nt, Homo sapiens
  misc_RNA (1)...(19): siRNA sense strand
gggcuaugcuccuguuccu

SEQ ID NO: 1888626 - RNA, 19 nt, Homo sapiens
  misc_RNA (1)...(19): siRNA sense strand
gcugcacaauggcacauac

SEQ ID NO: 1888627 - RNA, 19 nt, Homo sapiens
  misc_RNA (1)...(19): siRNA sense strand
ccagggugcagcuaucuuc

SEQ ID NO: 1888628 - RNA, 19 nt, Homo sapiens
  misc_RNA (1)...(19): siRNA sense strand
gaguaaaccuccaaagaaa

SEQ ID NO: 1888629 - RNA, 19 nt, Homo sapiens
  misc_RNA (1)...(19): siRNA sense strand
gcaaaggcccucccaaguu

SEQ ID NO: 1888630 - RNA, 19 nt, Homo sapiens
  misc_RNA (1)...(19): siRNA sense strand
caaaggcccucccaaguuc

SEQ ID NO: 1888631 - RNA, 19 nt, Homo sapiens
  misc_RNA (1)...(19): siRNA sense strand
aaagaaaggugugaaagga

SEQ ID NO: 1888632 - RNA, 19 nt, Homo sapiens
  misc_RNA (1)...(19): siRNA sense strand
gaaaggauuuggagaugac

SEQ ID NO: 1888633 - RNA, 19 nt, Homo sapiens
  misc_RNA (1)...(19): siRNA sense strand
agaaaggugugaaaggauu

SEQ ID NO: 1888634 - RNA, 19 nt, Homo sapiens
  misc_RNA (1)...(19): siRNA sense strand
gaggcagacucgccaauuc

SEQ ID NO: 1888635 - RNA, 19 nt, Homo sapiens
  misc_RNA (1)...(19): siRNA sense strand
agaguaaaccuccaaagaa

SEQ ID NO: 1888636 - RNA, 19 nt, Homo sapiens
  misc_RNA (1)...(19): siRNA sense strand
gaaaggugugaaaggauuu

SEQ ID NO: 1888637 - RNA, 19 nt, Homo sapiens
  misc_RNA (1)...(19): siRNA sense strand
gugaaaggauuuggagaug

SEQ ID NO: 1888638 - RNA, 19 nt, Homo sapiens
  misc_RNA (1)...(19): siRNA sense strand
ugaaaggauuuggagauga

SEQ ID NO: 1888639 - RNA, 19 nt, Homo sapiens
  misc_RNA (1)...(19): siRNA sense strand
gcuaggaacagauaucaca

SEQ ID NO: 1888640 - RNA, 19 nt, Homo sapiens
  misc_RNA (1)...(19): siRNA sense strand
caaagaaaggugugaaagg

SEQ ID NO: 1888641 - RNA, 19 nt, Homo sapiens
  misc_RNA (1)...(19): siRNA sense strand
aagaguaaaccuccaaaga

SEQ ID NO: 1888642 - RNA, 19 nt, Homo sapiens
  misc_RNA (1)...(19): siRNA sense strand
guaaaccuccaaagaaagg

SEQ ID NO: 1888643 - RNA, 19 nt, Homo sapiens
  misc_RNA (1)...(19): siRNA sense strand
cagacucgccaauucaaga

SEQ ID NO: 1888644 - RNA, 19 nt, Homo sapiens
  misc_RNA (1)...(19): siRNA sense strand
ccaaagaaaggugugaaag

SEQ ID NO: 1888645 - RNA, 19 nt, Homo sapiens
  misc_RNA (1)...(19): siRNA sense strand
gggcuaggaacagauauca

SEQ ID NO: 1888646 - RNA, 19 nt, Homo sapiens
  misc_RNA (1)...(19): siRNA sense strand
ucagccaccuggaauugca

SEQ ID NO: 1888647 - RNA, 19 nt, Homo sapiens
  misc_RNA (1)...(19): siRNA sense strand
ucgcucaguuugggauuau

SEQ ID NO: 1888648 - RNA, 19 nt, Homo sapiens
  misc_RNA (1)...(19): siRNA sense strand
caaagaaguuccugaaaug

SEQ ID NO: 1888649 - RNA, 19 nt, Homo sapiens
  misc_RNA (1)...(19): siRNA sense strand
ccaaagaaguuccugaaau

SEQ ID NO: 1888650 - RNA, 19 nt, Homo sapiens
  misc_RNA (1)...(19): siRNA sense strand
gaaaguuacuccaaagaag

SEQ ID NO: 1888651 - RNA, 19 nt, Homo sapiens
  misc_RNA (1)...(19): siRNA sense strand
uaaacugccuucucugaaa

SEQ ID NO: 1888652 - RNA, 19 nt, Homo sapiens
  misc_RNA (1)...(19): siRNA sense strand
ggaagaaagccauuugcua

SEQ ID NO: 1888653 - RNA, 19 nt, Homo sapiens
  misc_RNA (1)...(19): siRNA sense strand
gaagugagcaagagauaug

SEQ ID NO: 1888654 - RNA, 19 nt, Homo sapiens
  misc_RNA (1)...(19): siRNA sense strand
guaauggaaugugaaggua

SEQ ID NO: 1888655 - RNA, 19 nt, Homo sapiens
  misc_RNA (1)...(19): siRNA sense strand
gaaaauggaugagcuuuau

SEQ ID NO: 1888656 - RNA, 19 nt, Homo sapiens
  misc_RNA (1)...(19): siRNA sense strand
aaccagagcuuccucaaga

SEQ ID NO: 1888657 - RNA, 19 nt, Homo sapiens
  misc_RNA (1)...(19): siRNA sense strand
gcacuuggcugcuguugcu

SEQ ID NO: 1888658 - RNA, 19 nt, Homo sapiens
  misc_RNA (1)...(19): siRNA sense strand
uaaaagagcuucuggaaac

SEQ ID NO: 1888659 - RNA, 19 nt, Homo sapiens
  misc_RNA (1)...(19): siRNA sense strand
gaagaagaggccaauggaa

SEQ ID NO: 1888660 - RNA, 19 nt, Homo sapiens
  misc_RNA (1)...(19): siRNA sense strand
guauggagguuuccugaag

SEQ ID NO: 1888661 - RNA, 19 nt, Homo sapiens
  misc_RNA (1)...(19): siRNA sense strand
gguaaacugccuucucuga

SEQ ID NO: 1888662 - RNA, 19 nt, Homo sapiens
  misc_RNA (1)...(19): siRNA sense strand
caugagaggcuuaaagaga

SEQ ID NO: 1888663 - RNA, 19 nt, Homo sapiens
  misc_RNA (1)...(19): siRNA sense strand
gcagugauaaugaggaaga

SEQ ID NO: 1888664 - RNA, 19 nt, Homo sapiens
  misc_RNA (1)...(19): siRNA sense strand
cgaaaguuacuccaaagaa

SEQ ID NO: 1888665 - RNA, 19 nt, Homo sapiens
  misc_RNA (1)...(19): siRNA sense strand
ggaagaagugagcaagaga

SEQ ID NO: 1888666 - RNA, 19 nt, Homo sapiens
  misc_RNA (1)...(19): siRNA sense strand
gaagaaggcgaaaguuacu

SEQ ID NO: 1888667 - RNA, 19 nt, Homo sapiens
  misc_RNA (1)...(19): siRNA sense strand
aauggaaugugaagguaaa

SEQ ID NO: 1888668 - RNA, 19 nt, Homo sapiens
  misc_RNA (1)...(19): siRNA sense strand
gaagaagugagcaagagau

SEQ ID NO: 1888669 - RNA, 19 nt, Homo sapiens
  misc_RNA (1)...(19): siRNA sense strand
ccucagaccugcuaaaaga

SEQ ID NO: 1888670 - RNA, 19 nt, Homo sapiens
  misc_RNA (1)...(19): siRNA sense strand
guaaacugccuucucugaa

SEQ ID NO: 1888671 - RNA, 19 nt, Homo sapiens
  misc_RNA (1)...(19): siRNA sense strand
acgaagaaggcgaaaguua

SEQ ID NO: 1888672 - RNA, 19 nt, Homo sapiens
  misc_RNA (1)...(19): siRNA sense strand
augagaggcuuaaagagaa

SEQ ID NO: 1888673 - RNA, 19 nt, Homo sapiens
  misc_RNA (1)...(19): siRNA sense strand
cuuccuggcuugcguaaug

SEQ ID NO: 1888674 - RNA, 19 nt, Homo sapiens
  misc_RNA (1)...(19): siRNA sense strand
gcgcgguuccugacacuuu

SEQ ID NO: 1888675 - RNA, 19 nt, Homo sapiens
  misc_RNA (1)...(19): siRNA sense strand
cgacgaagaaggcgaaagu

SEQ ID NO: 1888676 - RNA, 19 nt, Homo sapiens
  misc_RNA (1)...(19): siRNA sense strand
acuggaagaugaagccaaa

SEQ ID NO: 1888677 - RNA, 19 nt, Homo sapiens
  misc_RNA (1)...(19): siRNA sense strand
guggauggacuaccagaaa

SEQ ID NO: 1888678 - RNA, 19 nt, Homo sapiens
  misc_RNA (1)...(19): siRNA sense strand
aggcgaaaguuacuccaaa

SEQ ID NO: 1888679 - RNA, 19 nt, Homo sapiens
  misc_RNA (1)...(19): siRNA sense strand
cgaagaaggcgaaaguuac

SEQ ID NO: 1888680 - RNA, 19 nt, Homo sapiens
  misc_RNA (1)...(19): siRNA sense strand
cagaaacgguauggagguu

SEQ ID NO: 1888681 - RNA, 19 nt, Homo sapiens
  misc_RNA (1)...(19): siRNA sense strand
ccauggagccagaagaaga

SEQ ID NO: 1888682 - RNA, 19 nt, Homo sapiens
  misc_RNA (1)...(19): siRNA sense strand
ggaaugugaagguaaacug

SEQ ID NO: 1888683 - RNA, 19 nt, Homo sapiens
  misc_RNA (1)...(19): siRNA sense strand
ggauggcagugauaaugag

SEQ ID NO: 1888684 - RNA, 19 nt, Homo sapiens
  misc_RNA (1)...(19): siRNA sense strand
gaagaggccaauggaagug

SEQ ID NO: 1888685 - RNA, 19 nt, Homo sapiens
  misc_RNA (1)...(19): siRNA sense strand
gaggaagaagugagcaaga

SEQ ID NO: 1888686 - RNA, 19 nt, Homo sapiens
  misc_RNA (1)...(19): siRNA sense strand
acgacucgcuggccaauuc

SEQ ID NO: 1888687 - RNA, 19 nt, Homo sapiens
  misc_RNA (1)...(19): siRNA sense strand
gcaccagcacccucagaga

SEQ ID NO: 1888688 - RNA, 19 nt, Homo sapiens
  misc_RNA (1)...(19): siRNA sense strand
cggaggauuuaugagauuu

SEQ ID NO: 1888689 - RNA, 19 nt, Homo sapiens
  misc_RNA (1)...(19): siRNA sense strand
gcgaaaguuacuccaaaga

SEQ ID NO: 1888690 - RNA, 19 nt, Homo sapiens
  misc_RNA (1)...(19): siRNA sense strand
aagaagugagcaagagaua

SEQ ID NO: 1888691 - RNA, 19 nt, Homo sapiens
  misc_RNA (1)...(19): siRNA sense strand
ggcgaaaguuacuccaaag

SEQ ID NO: 1888692 - RNA, 19 nt, Homo sapiens
  misc_RNA (1)...(19): siRNA sense strand
ccaccaggauggcagugau

SEQ ID NO: 1888693 - RNA, 19 nt, Homo sapiens
  misc_RNA (1)...(19): siRNA sense strand
gauaaugaggaagaaguga

SEQ ID NO: 1888694 - RNA, 19 nt, Homo sapiens
  misc_RNA (1)...(19): siRNA sense strand
caccagcacccucagagaa

SEQ ID NO: 1888695 - RNA, 19 nt, Homo sapiens
  misc_RNA (1)...(19): siRNA sense strand
cagaagaagaggccaaugg

SEQ ID NO: 1888696 - RNA, 19 nt, Homo sapiens
  misc_RNA (1)...(19): siRNA sense strand
auacggaggauuuaugaga

SEQ ID NO: 1888697 - RNA, 19 nt, Homo sapiens
  misc_RNA (1)...(19): siRNA sense strand
uaauggaaugugaagguaa

SEQ ID NO: 1888698 - RNA, 19 nt, Homo sapiens
  misc_RNA (1)...(19): siRNA sense strand
ggaagaugaagccaaagag

SEQ ID NO: 1888699 - RNA, 19 nt, Homo sapiens
  misc_RNA (1)...(19): siRNA sense strand
uggcagugauaaugaggaa

SEQ ID NO: 1888700 - RNA, 19 nt, Homo sapiens
  misc_RNA (1)...(19): siRNA sense strand
caggauggcagugauaaug

SEQ ID NO: 1888701 - RNA, 19 nt, Homo sapiens
  misc_RNA (1)...(19): siRNA sense strand
agaagaagaggccaaugga

SEQ ID NO: 1888702 - RNA, 19 nt, Homo sapiens
  misc_RNA (1)...(19): siRNA sense strand
acggaggauuuaugagauu

SEQ ID NO: 1888703 - RNA, 19 nt, Homo sapiens
  misc_RNA (1)...(19): siRNA sense strand
gcuaaaagagcuucuggaa

SEQ ID NO: 1888704 - RNA, 19 nt, Homo sapiens
  misc_RNA (1)...(19): siRNA sense strand
gguauggaggcuucaugaa

SEQ ID NO: 1888705 - RNA, 19 nt, Homo sapiens
  misc_RNA (1)...(19): siRNA sense strand
uacggaggauuuaugagau

SEQ ID NO: 1888706 - RNA, 19 nt, Homo sapiens
  misc_RNA (1)...(19): siRNA sense strand
ccagagcuuccucaagaug

SEQ ID NO: 1888707 - RNA, 19 nt, Homo sapiens
  misc_RNA (1)...(19): siRNA sense strand
agauacggaggauuuauga

SEQ ID NO: 1888708 - RNA, 19 nt, Homo sapiens
  misc_RNA (1)...(19): siRNA sense strand
aaacugccuucucugaaaa

SEQ ID NO: 1888709 - RNA, 19 nt, Homo sapiens
  misc_RNA (1)...(19): siRNA sense strand
uagcaaaccggaagaaagc

SEQ ID NO: 1888710 - RNA, 19 nt, Homo sapiens
  misc_RNA (1)...(19): siRNA sense strand
aaaguuacuccaaagaagu

SEQ ID NO: 1888711 - RNA, 19 nt, Homo sapiens
  misc_RNA (1)...(19): siRNA sense strand
agaagaggccaauggaagu

SEQ ID NO: 1888712 - RNA, 19 nt, Homo sapiens
  misc_RNA (1)...(19): siRNA sense strand
caauuccucagaccugcua

SEQ ID NO: 1888713 - RNA, 19 nt, Homo sapiens
  misc_RNA (1)...(19): siRNA sense strand
caaaccagagcuuccucaa

SEQ ID NO: 1888714 - RNA, 19 nt, Homo sapiens
  misc_RNA (1)...(19): siRNA sense strand
ugagaggcuuaaagagaag

SEQ ID NO: 1888715 - RNA, 19 nt, Homo sapiens
  misc_RNA (1)...(19): siRNA sense strand
gaagaaaauggaugagcuu

SEQ ID NO: 1888716 - RNA, 19 nt, Homo sapiens
  misc_RNA (1)...(19): siRNA sense strand
gggcuucaugagaggcuua

SEQ ID NO: 1888717 - RNA, 19 nt, Homo sapiens
  misc_RNA (1)...(19): siRNA sense strand
gugcagcuaccgccuagug

SEQ ID NO: 1888718 - RNA, 19 nt, Homo sapiens
  misc_RNA (1)...(19): siRNA sense strand
caccaggauggcagugaua

SEQ ID NO: 1888719 - RNA, 19 nt, Homo sapiens
  misc_RNA (1)...(19): siRNA sense strand
ggacgacucgcuggccaau

SEQ ID NO: 1888720 - RNA, 19 nt, Homo sapiens
  misc_RNA (1)...(19): siRNA sense strand
uggcuugcguaauggaaug

SEQ ID NO: 1888721 - RNA, 19 nt, Homo sapiens
  misc_RNA (1)...(19): siRNA sense strand
aaagauacggaggauuuau

SEQ ID NO: 1888722 - RNA, 19 nt, Homo sapiens
  misc_RNA (1)...(19): siRNA sense strand
aagaaguuccugaaaugga

SEQ ID NO: 1888723 - RNA, 19 nt, Homo sapiens
  misc_RNA (1)...(19): siRNA sense strand
uggaagaugaagccaaaga

SEQ ID NO: 1888724 - RNA, 19 nt, Homo sapiens
  misc_RNA (1)...(19): siRNA sense strand
ccgaaugcagccaggauug

SEQ ID NO: 1888725 - RNA, 19 nt, Homo sapiens
  misc_RNA (1)...(19): siRNA sense strand
cguaauggaaugugaaggu

SEQ ID NO: 1888726 - RNA, 19 nt, Homo sapiens
  misc_RNA (1)...(19): siRNA sense strand
gguauggagguuuccugaa

SEQ ID NO: 1888727 - RNA, 19 nt, Homo sapiens
  misc_RNA (1)...(19): siRNA sense strand
cagagugguggauggacua

SEQ ID NO: 1888728 - RNA, 19 nt, Homo sapiens
  misc_RNA (1)...(19): siRNA sense strand
gugauaaugaggaagaagu

SEQ ID NO: 1888729 - RNA, 19 nt, Homo sapiens
  misc_RNA (1)...(19): siRNA sense strand
ugacggaucugaacacgua

SEQ ID NO: 1888730 - RNA, 19 nt, Homo sapiens
  misc_RNA (1)...(19): siRNA sense strand
gcaaggaugugcuggagaa

SEQ ID NO: 1888731 - RNA, 19 nt, Homo sapiens
  misc_RNA (1)...(19): siRNA sense strand
ggagauggaugacgaggaa

SEQ ID NO: 1888732 - RNA, 19 nt, Homo sapiens
  misc_RNA (1)...(19): siRNA sense strand
gaacacguaccucaacaaa

SEQ ID NO: 1888733 - RNA, 19 nt, Homo sapiens
  misc_RNA (1)...(19): siRNA sense strand
gcagaaggaugcucagaac

SEQ ID NO: 1888734 - RNA, 19 nt, Homo sapiens
  misc_RNA (1)...(19): siRNA sense strand
agaaguaccuggacgugaa

SEQ ID NO: 1888735 - RNA, 19 nt, Homo sapiens
  misc_RNA (1)...(19): siRNA sense strand
acaaagggaugacggaaca

SEQ ID NO: 1888736 - RNA, 19 nt, Homo sapiens
  misc_RNA (1)...(19): siRNA sense strand
agacuuggauuaugacauc

SEQ ID NO: 1888737 - RNA, 19 nt, Homo sapiens
  misc_RNA (1)...(19): siRNA sense strand
gguggaagcuggugugacu

SEQ ID NO: 1888738 - RNA, 19 nt, Homo sapiens
  misc_RNA (1)...(19): siRNA sense strand
ugacggaacacaccaagaa

SEQ ID NO: 1888739 - RNA, 19 nt, Homo sapiens
  misc_RNA (1)...(19): siRNA sense strand
uugcagacuuggauuauga

SEQ ID NO: 1888740 - RNA, 19 nt, Homo sapiens
  misc_RNA (1)...(19): siRNA sense strand
gacauuguguugaagaaag

SEQ ID NO: 1888741 - RNA, 19 nt, Homo sapiens
  misc_RNA (1)...(19): siRNA sense strand
acacguaccucaacaaagc

SEQ ID NO: 1888742 - RNA, 19 nt, Homo sapiens
  misc_RNA (1)...(19): siRNA sense strand
ccgcugagcuauacaaagg

SEQ ID NO: 1888743 - RNA, 19 nt, Homo sapiens
  misc_RNA (1)...(19): siRNA sense strand
ggaaggugacccugcagaa

SEQ ID NO: 1888744 - RNA, 19 nt, Homo sapiens
  misc_RNA (1)...(19): siRNA sense strand
caggaggaguucacagaug

SEQ ID NO: 1888745 - RNA, 19 nt, Homo sapiens
  misc_RNA (1)...(19): siRNA sense strand
gcaaugaugggcuugucaa

SEQ ID NO: 1888746 - RNA, 19 nt, Homo sapiens
  misc_RNA (1)...(19): siRNA sense strand
gcaccggcaacuaugagua

SEQ ID NO: 1888747 - RNA, 19 nt, Homo sapiens
  misc_RNA (1)...(19): siRNA sense strand
guacugucccugccucuau

SEQ ID NO: 1888748 - RNA, 19 nt, Homo sapiens
  misc_RNA (1)...(19): siRNA sense strand
ggacauuguguugaagaaa

SEQ ID NO: 1888749 - RNA, 19 nt, Homo sapiens
  misc_RNA (1)...(19): siRNA sense strand
gaggaauacagcugcauug

SEQ ID NO: 1888750 - RNA, 19 nt, Homo sapiens
  misc_RNA (1)...(19): siRNA sense strand
guaccuggacgugaaguuu

SEQ ID NO: 1888751 - RNA, 19 nt, Homo sapiens
  misc_RNA (1)...(19): siRNA sense strand
gagcgaggcuuuugugaag

SEQ ID NO: 1888752 - RNA, 19 nt, Homo sapiens
  misc_RNA (1)...(19): siRNA sense strand
uguccaccauguccaagua

SEQ ID NO: 1888753 - RNA, 19 nt, Homo sapiens
  misc_RNA (1)...(19): siRNA sense strand
ugagaucaccggugucaau

SEQ ID NO: 1888754 - RNA, 19 nt, Homo sapiens
  misc_RNA (1)...(19): siRNA sense strand
gucaauggcaggucaauca

SEQ ID NO: 1888755 - RNA, 19 nt, Homo sapiens
  misc_RNA (1)...(19): siRNA sense strand
gaugagaucaccgguguca

SEQ ID NO: 1888756 - RNA, 19 nt, Homo sapiens
  misc_RNA (1)...(19): siRNA sense strand
gggccauccugugcaauga

SEQ ID NO: 1888757 - RNA, 19 nt, Homo sapiens
  misc_RNA (1)...(19): siRNA sense strand
ugacaucgaagaggauaaa

SEQ ID NO: 1888758 - RNA, 19 nt, Homo sapiens
  misc_RNA (1)...(19): siRNA sense strand
ggagguggcgaagaugauu

SEQ ID NO: 1888759 - RNA, 19 nt, Homo sapiens
  misc_RNA (1)...(19): siRNA sense strand
gacacucgccucaccauca

SEQ ID NO: 1888760 - RNA, 19 nt, Homo sapiens
  misc_RNA (1)...(19): siRNA sense strand
acacucgccucaccaucaa

SEQ ID NO: 1888761 - RNA, 19 nt, Homo sapiens
  misc_RNA (1)...(19): siRNA sense strand
ggacgugaaguuugaguac

SEQ ID NO: 1888762 - RNA, 19 nt, Homo sapiens
  misc_RNA (1)...(19): siRNA sense strand
gaaggugacccugcagaag

SEQ ID NO: 1888763 - RNA, 19 nt, Homo sapiens
  misc_RNA (1)...(19): siRNA sense strand
uacugucccugccucuaua

SEQ ID NO: 1888764 - RNA, 19 nt, Homo sapiens
  misc_RNA (1)...(19): siRNA sense strand
gcacaccacauuggccuau

SEQ ID NO: 1888765 - RNA, 19 nt, Homo sapiens
  misc_RNA (1)...(19): siRNA sense strand
gccucaccaucaagaagua

SEQ ID NO: 1888766 - RNA, 19 nt, Homo sapiens
  misc_RNA (1)...(19): siRNA sense strand
gccugaaggugaaggagau

SEQ ID NO: 1888767 - RNA, 19 nt, Homo sapiens
  misc_RNA (1)...(19): siRNA sense strand
gaccauccacuacaacaag

SEQ ID NO: 1888768 - RNA, 19 nt, Homo sapiens
  misc_RNA (1)...(19): siRNA sense strand
cguacugccugaaggugaa

SEQ ID NO: 1888769 - RNA, 19 nt, Homo sapiens
  misc_RNA (1)...(19): siRNA sense strand
ggacguguucuccgugauc

SEQ ID NO: 1888770 - RNA, 19 nt, Homo sapiens
  misc_RNA (1)...(19): siRNA sense strand
ggaccgcugagcuauacaa

SEQ ID NO: 1888771 - RNA, 19 nt, Homo sapiens
  misc_RNA (1)...(19): siRNA sense strand
caauggcaggucaaucaaa

SEQ ID NO: 1888772 - RNA, 19 nt, Homo sapiens
  misc_RNA (1)...(19): siRNA sense strand
aggaugugcuggagaagau

SEQ ID NO: 1888773 - RNA, 19 nt, Homo sapiens
  misc_RNA (1)...(19): siRNA sense strand
cgaggaauacagcugcauu

SEQ ID NO: 1888774 - RNA, 19 nt, Homo sapiens
  misc_RNA (1)...(19): siRNA sense strand
ggaggugaccauccacuac

SEQ ID NO: 1888775 - RNA, 19 nt, Homo sapiens
  misc_RNA (1)...(19): siRNA sense strand
gggaggugaccauccacua

SEQ ID NO: 1888776 - RNA, 19 nt, Homo sapiens
  misc_RNA (1)...(19): siRNA sense strand
gagaucaccggugucaaug

SEQ ID NO: 1888777 - RNA, 19 nt, Homo sapiens
  misc_RNA (1)...(19): siRNA sense strand
gaggugaccauccacuaca

SEQ ID NO: 1888778 - RNA, 19 nt, Homo sapiens
  misc_RNA (1)...(19): siRNA sense strand
aauggcaggucaaucaaag

SEQ ID NO: 1888779 - RNA, 19 nt, Homo sapiens
  misc_RNA (1)...(19): siRNA sense strand
agauggaugacgaggaaua

SEQ ID NO: 1888780 - RNA, 19 nt, Homo sapiens
  misc_RNA (1)...(19): siRNA sense strand
cuauaucguccagguauuu

SEQ ID NO: 1888781 - RNA, 19 nt, Homo sapiens
  misc_RNA (1)...(19): siRNA sense strand
caucgaagaggauaaacuc

SEQ ID NO: 1888782 - RNA, 19 nt, Homo sapiens
  misc_RNA (1)...(19): siRNA sense strand
cagcugcgagcgaggcuuu

SEQ ID NO: 1888783 - RNA, 19 nt, Homo sapiens
  misc_RNA (1)...(19): siRNA sense strand
ccaccauguccaaguacua

SEQ ID NO: 1888784 - RNA, 19 nt, Homo sapiens
  misc_RNA (1)...(19): siRNA sense strand
ucuauaucguccagguauu

SEQ ID NO: 1888785 - RNA, 19 nt, Homo sapiens
  misc_RNA (1)...(19): siRNA sense strand
ggaggaggaggaggaggaa

SEQ ID NO: 1888786 - RNA, 19 nt, Homo sapiens
  misc_RNA (1)...(19): siRNA sense strand
uggacauuguguugaagaa

SEQ ID NO: 1888787 - RNA, 19 nt, Homo sapiens
  misc_RNA (1)...(19): siRNA sense strand
gaaguaccuggacgugaag

SEQ ID NO: 1888788 - RNA, 19 nt, Homo sapiens
  misc_RNA (1)...(19): siRNA sense strand
gcauucggcuucugaaaac

SEQ ID NO: 1888789 - RNA, 19 nt, Homo sapiens
  misc_RNA (1)...(19): siRNA sense strand
guccagguauuugacaaca

SEQ ID NO: 1888790 - RNA, 19 nt, Homo sapiens
  misc_RNA (1)...(19): siRNA sense strand
cccuggacauuguguugaa

SEQ ID NO: 1888791 - RNA, 19 nt, Homo sapiens
  misc_RNA (1)...(19): siRNA sense strand
uggauuaugacaucgaaga

SEQ ID NO: 1888792 - RNA, 19 nt, Homo sapiens
  misc_RNA (1)...(19): siRNA sense strand
gaaggugaaggagauggau

SEQ ID NO: 1888793 - RNA, 19 nt, Homo sapiens
  misc_RNA (1)...(19): siRNA sense strand
gcgaggcuuuugugaaguu

SEQ ID NO: 1888794 - RNA, 19 nt, Homo sapiens
  misc_RNA (1)...(19): siRNA sense strand
gaacuuugcugaacagaau

SEQ ID NO: 1888795 - RNA, 19 nt, Homo sapiens
  misc_RNA (1)...(19): siRNA sense strand
ggaaauaacagaccucaaa

SEQ ID NO: 1888796 - RNA, 19 nt, Homo sapiens
  misc_RNA (1)...(19): siRNA sense strand
cauaccaucuucaaacuua

SEQ ID NO: 1888797 - RNA, 19 nt, Homo sapiens
  misc_RNA (1)...(19): siRNA sense strand
caacagcuaugaaaccaaa

SEQ ID NO: 1888798 - RNA, 19 nt, Homo sapiens
  misc_RNA (1)...(19): siRNA sense strand
ggaaauuucuggaggaaca

SEQ ID NO: 1888799 - RNA, 19 nt, Homo sapiens
  misc_RNA (1)...(19): siRNA sense strand
gaacagagagaacgugaug

SEQ ID NO: 1888800 - RNA, 19 nt, Homo sapiens
  misc_RNA (1)...(19): siRNA sense strand
ccaauauucuggagguuaa

SEQ ID NO: 1888801 - RNA, 19 nt, Homo sapiens
  misc_RNA (1)...(19): siRNA sense strand
cagaugagcuaccauacuu

SEQ ID NO: 1888802 - RNA, 19 nt, Homo sapiens
  misc_RNA (1)...(19): siRNA sense strand
ugacaaggaucuuucuuuc

SEQ ID NO: 1888803 - RNA, 19 nt, Homo sapiens
  misc_RNA (1)...(19): siRNA sense strand
gaacaacaacagcuaugaa

SEQ ID NO: 1888804 - RNA, 19 nt, Homo sapiens
  misc_RNA (1)...(19): siRNA sense strand
gcagucaaguccuauaagu

SEQ ID NO: 1888805 - RNA, 19 nt, Homo sapiens
  misc_RNA (1)...(19): siRNA sense strand
ugaagagaauugaaugcua

SEQ ID NO: 1888806 - RNA, 19 nt, Homo sapiens
  misc_RNA (1)...(19): siRNA sense strand
aaaccuacguguccaagaa

SEQ ID NO: 1888807 - RNA, 19 nt, Homo sapiens
  misc_RNA (1)...(19): siRNA sense strand
ucuacuaccucaugaauau

SEQ ID NO: 1888808 - RNA, 19 nt, Homo sapiens
  misc_RNA (1)...(19): siRNA sense strand
ccaagaaauuacaguguug

SEQ ID NO: 1888809 - RNA, 19 nt, Homo sapiens
  misc_RNA (1)...(19): siRNA sense strand
gcaaaguggaaacaauuaa

SEQ ID NO: 1888810 - RNA, 19 nt, Homo sapiens
  misc_RNA (1)...(19): siRNA sense strand
gaugaccuaugcagagauu

SEQ ID NO: 1888811 - RNA, 19 nt, Homo sapiens
  misc_RNA (1)...(19): siRNA sense strand
gaaagcgaguucaaucucu

SEQ ID NO: 1888812 - RNA, 19 nt, Homo sapiens
  misc_RNA (1)...(19): siRNA sense strand
gugaagagaugaccuaugc

SEQ ID NO: 1888813 - RNA, 19 nt, Homo sapiens
  misc_RNA (1)...(19): siRNA sense strand
gagaugaccuaugcagaga

SEQ ID NO: 1888814 - RNA, 19 nt, Homo sapiens
  misc_RNA (1)...(19): siRNA sense strand
ggagaaagcgaguucaauc

SEQ ID NO: 1888815 - RNA, 19 nt, Homo sapiens
  misc_RNA (1)...(19): siRNA sense strand
caauaaggcguccaagaaa

SEQ ID NO: 1888816 - RNA, 19 nt, Homo sapiens
  misc_RNA (1)...(19): siRNA sense strand
ccaccaaaguguuuaaucu

SEQ ID NO: 1888817 - RNA, 19 nt, Homo sapiens
  misc_RNA (1)...(19): siRNA sense strand
caagagaaguaucuguauc

SEQ ID NO: 1888818 - RNA, 19 nt, Homo sapiens
  misc_RNA (1)...(19): siRNA sense strand
gagaggagggacaugauuu

SEQ ID NO: 1888819 - RNA, 19 nt, Homo sapiens
  misc_RNA (1)...(19): siRNA sense strand
acaaggaucuuucuuucau

SEQ ID NO: 1888820 - RNA, 19 nt, Homo sapiens
  misc_RNA (1)...(19): siRNA sense strand
gagaaacgguacccagaag

SEQ ID NO: 1888821 - RNA, 19 nt, Homo sapiens
  misc_RNA (1)...(19): siRNA sense strand
gugaagcagucaaguccua

SEQ ID NO: 1888822 - RNA, 19 nt, Homo sapiens
  misc_RNA (1)...(19): siRNA sense strand
gagaauugaaugcuacaaa

SEQ ID NO: 1888823 - RNA, 19 nt, Homo sapiens
  misc_RNA (1)...(19): siRNA sense strand
acaauaaggcguccaagaa

SEQ ID NO: 1888824 - RNA, 19 nt, Homo sapiens
  misc_RNA (1)...(19): siRNA sense strand
ugaggagaauggucagauu

SEQ ID NO: 1888825 - RNA, 19 nt, Homo sapiens
  misc_RNA (1)...(19): siRNA sense strand
caagccaacuaacaacuuc

SEQ ID NO: 1888826 - RNA, 19 nt, Homo sapiens
  misc_RNA (1)...(19): siRNA sense strand
gcuggagccugucaucaug

SEQ ID NO: 1888827 - RNA, 19 nt, Homo sapiens
  misc_RNA (1)...(19): siRNA sense strand
ggacaagccaugugaagag

SEQ ID NO: 1888828 - RNA, 19 nt, Homo sapiens
  misc_RNA (1)...(19): siRNA sense strand
ggacaugauuuugaacuuu

SEQ ID NO: 1888829 - RNA, 19 nt, Homo sapiens
  misc_RNA (1)...(19): siRNA sense strand
gauugaugcuggugugugu

SEQ ID NO: 1888830 - RNA, 19 nt, Homo sapiens
  misc_RNA (1)...(19): siRNA sense strand
gaaauaacagaccucaaag

SEQ ID NO: 1888831 - RNA, 19 nt, Homo sapiens
  misc_RNA (1)...(19): siRNA sense strand
gaagcagucaaguccuaua

SEQ ID NO: 1888832 - RNA, 19 nt, Homo sapiens
  misc_RNA (1)...(19): siRNA sense strand
ggaggaacaggaaauaaca

SEQ ID NO: 1888833 - RNA, 19 nt, Homo sapiens
  misc_RNA (1)...(19): siRNA sense strand
agacaacuaugacaaggau

SEQ ID NO: 1888834 - RNA, 19 nt, Homo sapiens
  misc_RNA (1)...(19): siRNA sense strand
ggagaggagggacaugauu

SEQ ID NO: 1888835 - RNA, 19 nt, Homo sapiens
  misc_RNA (1)...(19): siRNA sense strand
gaagauccgcaaacagugu

SEQ ID NO: 1888836 - RNA, 19 nt, Homo sapiens
  misc_RNA (1)...(19): siRNA sense strand
ggagggacaugauuuugaa

SEQ ID NO: 1888837 - RNA, 19 nt, Homo sapiens
  misc_RNA (1)...(19): siRNA sense strand
gaugagcuaccauacuuga

SEQ ID NO: 1888838 - RNA, 19 nt, Homo sapiens
  misc_RNA (1)...(19): siRNA sense strand
gcaauguccucgucaucuc

SEQ ID NO: 1888839 - RNA, 19 nt, Homo sapiens
  misc_RNA (1)...(19): siRNA sense strand
gcaguuugcccaagcucua

SEQ ID NO: 1888840 - RNA, 19 nt, Homo sapiens
  misc_RNA (1)...(19): siRNA sense strand
gaaugucagagaagaaaug

SEQ ID NO: 1888841 - RNA, 19 nt, Homo sapiens
  misc_RNA (1)...(19): siRNA sense strand
gugcaaaguggaaacaauu

SEQ ID NO: 1888842 - RNA, 19 nt, Homo sapiens
  misc_RNA (1)...(19): siRNA sense strand
ggacgcagaugagcuacca

SEQ ID NO: 1888843 - RNA, 19 nt, Homo sapiens
  misc_RNA (1)...(19): siRNA sense strand
uaaggacgcagaugagcua

SEQ ID NO: 1888844 - RNA, 19 nt, Homo sapiens
  misc_RNA (1)...(19): siRNA sense strand
caagguauucuuuguggaa

SEQ ID NO: 1888845 - RNA, 19 nt, Homo sapiens
  misc_RNA (1)...(19): siRNA sense strand
cauacagacugcugaaucu

SEQ ID NO: 1888846 - RNA, 19 nt, Homo sapiens
  misc_RNA (1)...(19): siRNA sense strand
gaugagaaggaacagcuuu

SEQ ID NO: 1888847 - RNA, 19 nt, Homo sapiens
  misc_RNA (1)...(19): siRNA sense strand
ggugcaaaguggaaacaau

SEQ ID NO: 1888848 - RNA, 19 nt, Homo sapiens
  misc_RNA (1)...(19): siRNA sense strand
gagcuaccauacuugagau

SEQ ID NO: 1888849 - RNA, 19 nt, Homo sapiens
  misc_RNA (1)...(19): siRNA sense strand
gcacuucgagaucaagaga

SEQ ID NO: 1888850 - RNA, 19 nt, Homo sapiens
  misc_RNA (1)...(19): siRNA sense strand
aauaaggcguccaagaaau

SEQ ID NO: 1888851 - RNA, 19 nt, Homo sapiens
  misc_RNA (1)...(19): siRNA sense strand
uaaggcguccaagaaauua

SEQ ID NO: 1888852 - RNA, 19 nt, Homo sapiens
  misc_RNA (1)...(19): siRNA sense strand
ccucagaacagaacaacaa

SEQ ID NO: 1888853 - RNA, 19 nt, Homo sapiens
  misc_RNA (1)...(19): siRNA sense strand
uaugagcaguggaagauuc

SEQ ID NO: 1888854 - RNA, 19 nt, Homo sapiens
  misc_RNA (1)...(19): siRNA sense strand
gaagaggaccauacagacu

SEQ ID NO: 1888855 - RNA, 19 nt, Homo sapiens
  misc_RNA (1)...(19): siRNA sense strand
gugaagaggaccauacaga

SEQ ID NO: 1888856 - RNA, 19 nt, Homo sapiens
  misc_RNA (1)...(19): siRNA sense strand
ugcccaagcucuaaggaaa

SEQ ID NO: 1888857 - RNA, 19 nt, Homo sapiens
  misc_RNA (1)...(19): siRNA sense strand
agaauugaaugcuacaaag

SEQ ID NO: 1888858 - RNA, 19 nt, Homo sapiens
  misc_RNA (1)...(19): siRNA sense strand
gaggagaauggucagauug

SEQ ID NO: 1888859 - RNA, 19 nt, Homo sapiens
  misc_RNA (1)...(19): siRNA sense strand
ccaugaagauccgcaaaca

SEQ ID NO: 1888860 - RNA, 19 nt, Homo sapiens
  misc_RNA (1)...(19): siRNA sense strand
uccaagaaauuacaguguu

SEQ ID NO: 1888861 - RNA, 19 nt, Homo sapiens
  misc_RNA (1)...(19): siRNA sense strand
gccaauauucuggagguua

SEQ ID NO: 1888862 - RNA, 19 nt, Homo sapiens
  misc_RNA (1)...(19): siRNA sense strand
gaauugaaugcuacaaagu

SEQ ID NO: 1888863 - RNA, 19 nt, Homo sapiens
  misc_RNA (1)...(19): siRNA sense strand
accaaaguguuuaaucuug

SEQ ID NO: 1888864 - RNA, 19 nt, Homo sapiens
  misc_RNA (1)...(19): siRNA sense strand
uggccuacuucuuggauaa

SEQ ID NO: 1888865 - RNA, 19 nt, Homo sapiens
  misc_RNA (1)...(19): siRNA sense strand
gauguuaaggcguaucuca

SEQ ID NO: 1888866 - RNA, 19 nt, Homo sapiens
  misc_RNA (1)...(19): siRNA sense strand
cccaagcucuaaggaaauu

SEQ ID NO: 1888867 - RNA, 19 nt, Homo sapiens
  misc_RNA (1)...(19): siRNA sense strand
gagaaagcgaguucaaucu

SEQ ID NO: 1888868 - RNA, 19 nt, Homo sapiens
  misc_RNA (1)...(19): siRNA sense strand
ggaucuuucuuucaucaag

SEQ ID NO: 1888869 - RNA, 19 nt, Homo sapiens
  misc_RNA (1)...(19): siRNA sense strand
gguaucaagcccugacuau

SEQ ID NO: 1888870 - RNA, 19 nt, Homo sapiens
  misc_RNA (1)...(19): siRNA sense strand
guaaggaugagaaggaaca

SEQ ID NO: 1888871 - RNA, 19 nt, Homo sapiens
  misc_RNA (1)...(19): siRNA sense strand
gaaacgguacccagaagag

SEQ ID NO: 1888872 - RNA, 19 nt, Homo sapiens
  misc_RNA (1)...(19): siRNA sense strand
aauaacagaccucaaagug

SEQ ID NO: 1888873 - RNA, 19 nt, Homo sapiens
  misc_RNA (1)...(19): siRNA sense strand
aaacgugggccagcgauuu

SEQ ID NO: 1888874 - RNA, 19 nt, Homo sapiens
  misc_RNA (1)...(19): siRNA sense strand
cuacauccagagcaagaua

SEQ ID NO: 1888875 - RNA, 19 nt, Homo sapiens
  misc_RNA (1)...(19): siRNA sense strand
uuacgccucuguccaguuc

SEQ ID NO: 1888876 - RNA, 19 nt, Homo sapiens
  misc_RNA (1)...(19): siRNA sense strand
gugacaagccaacuaacaa

SEQ ID NO: 1888877 - RNA, 19 nt, Homo sapiens
  misc_RNA (1)...(19): siRNA sense strand
ugucagagaagaaauguuc

SEQ ID NO: 1888878 - RNA, 19 nt, Homo sapiens
  misc_RNA (1)...(19): siRNA sense strand
gagcaguggaagauucuga

SEQ ID NO: 1888879 - RNA, 19 nt, Homo sapiens
  misc_RNA (1)...(19): siRNA sense strand
ggaagauguuaaggcguau

SEQ ID NO: 1888880 - RNA, 19 nt, Homo sapiens
  misc_RNA (1)...(19): siRNA sense strand
aaagcgaguucaaucucuu

SEQ ID NO: 1888881 - RNA, 19 nt, Homo sapiens
  misc_RNA (1)...(19): siRNA sense strand
cgacucugaucguuaugau

SEQ ID NO: 1888882 - RNA, 19 nt, Homo sapiens
  misc_RNA (1)...(19): siRNA sense strand
gacaaggaucuuucuuuca

SEQ ID NO: 1888883 - RNA, 19 nt, Homo sapiens
  misc_RNA (1)...(19): siRNA sense strand
acaaugaggaggccaugaa

SEQ ID NO: 1888884 - RNA, 19 nt, Homo sapiens
  misc_RNA (1)...(19): siRNA sense strand
ucaagagaaguaucuguau

SEQ ID NO: 1888885 - RNA, 19 nt, Homo sapiens
  misc_RNA (1)...(19): siRNA sense strand
gaucaagagaaguaucugu

SEQ ID NO: 1888886 - RNA, 19 nt, Homo sapiens
  misc_RNA (1)...(19): siRNA sense strand
caaggaucuuucuuucauc

SEQ ID NO: 1888887 - RNA, 19 nt, Homo sapiens
  misc_RNA (1)...(19): siRNA sense strand
uggaauccgucugugauga

SEQ ID NO: 1888888 - RNA, 19 nt, Homo sapiens
  misc_RNA (1)...(19): siRNA sense strand
ugagaaacgguacccagaa

SEQ ID NO: 1888889 - RNA, 19 nt, Homo sapiens
  misc_RNA (1)...(19): siRNA sense strand
acucugaucguuaugauug

SEQ ID NO: 1888890 - RNA, 19 nt, Homo sapiens
  misc_RNA (1)...(19): siRNA sense strand
gcagaugagcuaccauacu

SEQ ID NO: 1888891 - RNA, 19 nt, Homo sapiens
  misc_RNA (1)...(19): siRNA sense strand
aaggaucuuucuuucauca

SEQ ID NO: 1888892 - RNA, 19 nt, Homo sapiens
  misc_RNA (1)...(19): siRNA sense strand
ugcaaaguggaaacaauua

SEQ ID NO: 1888893 - RNA, 19 nt, Homo sapiens
  misc_RNA (1)...(19): siRNA sense strand
auaaggcguccaagaaauu

SEQ ID NO: 1888894 - RNA, 19 nt, Homo sapiens
  misc_RNA (1)...(19): siRNA sense strand
caaauuagaugucaacguu

SEQ ID NO: 1888895 - RNA, 19 nt, Homo sapiens
  misc_RNA (1)...(19): siRNA sense strand
gaaaguggauuaucuuaca

SEQ ID NO: 1888896 - RNA, 19 nt, Homo sapiens
  misc_RNA (1)...(19): siRNA sense strand
ggaaauguaugaacgagaa

SEQ ID NO: 1888897 - RNA, 19 nt, Homo sapiens
  misc_RNA (1)...(19): siRNA sense strand
ggaaaucugugaacuacaa

SEQ ID NO: 1888898 - RNA, 19 nt, Homo sapiens
  misc_RNA (1)...(19): siRNA sense strand
ucagagagauucuaagauu

SEQ ID NO: 1888899 - RNA, 19 nt, Homo sapiens
  misc_RNA (1)...(19): siRNA sense strand
ugaaacagauucucguuaa

SEQ ID NO: 1888900 - RNA, 19 nt, Homo sapiens
  misc_RNA (1)...(19): siRNA sense strand
gcagaagaauuaaguacaa

SEQ ID NO: 1888901 - RNA, 19 nt, Homo sapiens
  misc_RNA (1)...(19): siRNA sense strand
aagcaaggcuagacauuua

SEQ ID NO: 1888902 - RNA, 19 nt, Homo sapiens
  misc_RNA (1)...(19): siRNA sense strand
cgaaaugccucuagggaaa

SEQ ID NO: 1888903 - RNA, 19 nt, Homo sapiens
  misc_RNA (1)...(19): siRNA sense strand
gagaagagauguaugaaaa

SEQ ID NO: 1888904 - RNA, 19 nt, Homo sapiens
  misc_RNA (1)...(19): siRNA sense strand
gaaagaugccagcaaauau

SEQ ID NO: 1888905 - RNA, 19 nt, Homo sapiens
  misc_RNA (1)...(19): siRNA sense strand
gaagaucagcuuucuauuc

SEQ ID NO: 1888906 - RNA, 19 nt, Homo sapiens
  misc_RNA (1)...(19): siRNA sense strand
agagcaaacuguuacuuua

SEQ ID NO: 1888907 - RNA, 19 nt, Homo sapiens
  misc_RNA (1)...(19): siRNA sense strand
uaauugagcuuaggagaaa

SEQ ID NO: 1888908 - RNA, 19 nt, Homo sapiens
  misc_RNA (1)...(19): siRNA sense strand
ggcauuagauuuagaacaa

SEQ ID NO: 1888909 - RNA, 19 nt, Homo sapiens
  misc_RNA (1)...(19): siRNA sense strand
gagauuagacaaccaauug

SEQ ID NO: 1888910 - RNA, 19 nt, Homo sapiens
  misc_RNA (1)...(19): siRNA sense strand
uauccuagcagaagaauua

SEQ ID NO: 1888911 - RNA, 19 nt, Homo sapiens
  misc_RNA (1)...(19): siRNA sense strand
gaauuucuccaucaaagua

SEQ ID NO: 1888912 - RNA, 19 nt, Homo sapiens
  misc_RNA (1)...(19): siRNA sense strand
gaaagaugucagcaacuua

SEQ ID NO: 1888913 - RNA, 19 nt, Homo sapiens
  misc_RNA (1)...(19): siRNA sense strand
gaugucagcaacuuaaaua

SEQ ID NO: 1888914 - RNA, 19 nt, Homo sapiens
  misc_RNA (1)...(19): siRNA sense strand
acagaaagaugccagcaaa

SEQ ID NO: 1888915 - RNA, 19 nt, Homo sapiens
  misc_RNA (1)...(19): siRNA sense strand
caagagaacuaugauaaag

SEQ ID NO: 1888916 - RNA, 19 nt, Homo sapiens
  misc_RNA (1)...(19): siRNA sense strand
gcuagugaauccauuaaga

SEQ ID NO: 1888917 - RNA, 19 nt, Homo sapiens
  misc_RNA (1)...(19): siRNA sense strand
agaagcagcuacuaacauu

SEQ ID NO: 1888918 - RNA, 19 nt, Homo sapiens
  misc_RNA (1)...(19): siRNA sense strand
gcaccugaguggucuaaga

SEQ ID NO: 1888919 - RNA, 19 nt, Homo sapiens
  misc_RNA (1)...(19): siRNA sense strand
aaccaacacucuuuacuaa

SEQ ID NO: 1888920 - RNA, 19 nt, Homo sapiens
  misc_RNA (1)...(19): siRNA sense strand
ccaagaaauugaucaacuu

SEQ ID NO: 1888921 - RNA, 19 nt, Homo sapiens
  misc_RNA (1)...(19): siRNA sense strand
gaacuaugauaaagucaag

SEQ ID NO: 1888922 - RNA, 19 nt, Homo sapiens
  misc_RNA (1)...(19): siRNA sense strand
guacagagaacuacaacuu

SEQ ID NO: 1888923 - RNA, 19 nt, Homo sapiens
  misc_RNA (1)...(19): siRNA sense strand
gaaaggaaaucugugaacu

SEQ ID NO: 1888924 - RNA, 19 nt, Homo sapiens
  misc_RNA (1)...(19): siRNA sense strand
uaaagagcaugaagacaau

SEQ ID NO: 1888925 - RNA, 19 nt, Homo sapiens
  misc_RNA (1)...(19): siRNA sense strand
agacaaaucuucagcuaag

SEQ ID NO: 1888926 - RNA, 19 nt, Homo sapiens
  misc_RNA (1)...(19): siRNA sense strand
gaacaacuucuaaaucauc

SEQ ID NO: 1888927 - RNA, 19 nt, Homo sapiens
  misc_RNA (1)...(19): siRNA sense strand
aaauugagcuaucccagaa

SEQ ID NO: 1888928 - RNA, 19 nt, Homo sapiens
  misc_RNA (1)...(19): siRNA sense strand
caacaguuccuacggauga

SEQ ID NO: 1888929 - RNA, 19 nt, Homo sapiens
  misc_RNA (1)...(19): siRNA sense strand
gcuagacauuuaugagaaa

SEQ ID NO: 1888930 - RNA, 19 nt, Homo sapiens
  misc_RNA (1)...(19): siRNA sense strand
gaaacuuaaugaugcacuu

SEQ ID NO: 1888931 - RNA, 19 nt, Homo sapiens
  misc_RNA (1)...(19): siRNA sense strand
ugaagccucucacaugauu

SEQ ID NO: 1888932 - RNA, 19 nt, Homo sapiens
  misc_RNA (1)...(19): siRNA sense strand
cuaguucucuggaaucuga

SEQ ID NO: 1888933 - RNA, 19 nt, Homo sapiens
  misc_RNA (1)...(19): siRNA sense strand
gaggagaaacuuaaugaug

SEQ ID NO: 1888934 - RNA, 19 nt, Homo sapiens
  misc_RNA (1)...(19): siRNA sense strand
caaaacaugugacagaaaa

SEQ ID NO: 1888935 - RNA, 19 nt, Homo sapiens
  misc_RNA (1)...(19): siRNA sense strand
gaagaggaucgccuugaaa

SEQ ID NO: 1888936 - RNA, 19 nt, Homo sapiens
  misc_RNA (1)...(19): siRNA sense strand
ugaagaggaucgccuugaa

SEQ ID NO: 1888937 - RNA, 19 nt, Homo sapiens
  misc_RNA (1)...(19): siRNA sense strand
gaugaucgacaauuugaaa

SEQ ID NO: 1888938 - RNA, 19 nt, Homo sapiens
  misc_RNA (1)...(19): siRNA sense strand
ccaauucgcuauuaaacca

SEQ ID NO: 1888939 - RNA, 19 nt, Homo sapiens
  misc_RNA (1)...(19): siRNA sense strand
gaaaggaccaaguaacaca

SEQ ID NO: 1888940 - RNA, 19 nt, Homo sapiens
  misc_RNA (1)...(19): siRNA sense strand
gaaagcaaaguaacagaau

SEQ ID NO: 1888941 - RNA, 19 nt, Homo sapiens
  misc_RNA (1)...(19): siRNA sense strand
agaacgaagugaauuauca

SEQ ID NO: 1888942 - RNA, 19 nt, Homo sapiens
  misc_RNA (1)...(19): siRNA sense strand
gacagaagagcaauauauu

SEQ ID NO: 1888943 - RNA, 19 nt, Homo sapiens
  misc_RNA (1)...(19): siRNA sense strand
ugacagaagagcaauauau

SEQ ID NO: 1888944 - RNA, 19 nt, Homo sapiens
  misc_RNA (1)...(19): siRNA sense strand
agaaagaugccagcaaaua

SEQ ID NO: 1888945 - RNA, 19 nt, Homo sapiens
  misc_RNA (1)...(19): siRNA sense strand
gauauuuccucaucagaag

SEQ ID NO: 1888946 - RNA, 19 nt, Homo sapiens
  misc_RNA (1)...(19): siRNA sense strand
uaaaucaucgugaggaauu

SEQ ID NO: 1888947 - RNA, 19 nt, Homo sapiens
  misc_RNA (1)...(19): siRNA sense strand
gcuacuaacauugagauua

SEQ ID NO: 1888948 - RNA, 19 nt, Homo sapiens
  misc_RNA (1)...(19): siRNA sense strand
cuaaagagcaugaagacaa

SEQ ID NO: 1888949 - RNA, 19 nt, Homo sapiens
  misc_RNA (1)...(19): siRNA sense strand
ucguuaagaugcauaguaa

SEQ ID NO: 1888950 - RNA, 19 nt, Homo sapiens
  misc_RNA (1)...(19): siRNA sense strand
gaaacagauucucguuaag

SEQ ID NO: 1888951 - RNA, 19 nt, Homo sapiens
  misc_RNA (1)...(19): siRNA sense strand
acagguaucucauugaauc

SEQ ID NO: 1888952 - RNA, 19 nt, Homo sapiens
  misc_RNA (1)...(19): siRNA sense strand
uuacagguaucucauugaa

SEQ ID NO: 1888953 - RNA, 19 nt, Homo sapiens
  misc_RNA (1)...(19): siRNA sense strand
gcaaacugcagaaauugaa

SEQ ID NO: 1888954 - RNA, 19 nt, Homo sapiens
  misc_RNA (1)...(19): siRNA sense strand
uaagaaaggaaaucuguga

SEQ ID NO: 1888955 - RNA, 19 nt, Homo sapiens
  misc_RNA (1)...(19): siRNA sense strand
gaauuggaggagaaacuua

SEQ ID NO: 1888956 - RNA, 19 nt, Homo sapiens
  misc_RNA (1)...(19): siRNA sense strand
gaacgaagugaauuaucaa

SEQ ID NO: 1888957 - RNA, 19 nt, Homo sapiens
  misc_RNA (1)...(19): siRNA sense strand
gucaagagaacuaugauaa

SEQ ID NO: 1888958 - RNA, 19 nt, Homo sapiens
  misc_RNA (1)...(19): siRNA sense strand
gaucgacaauuugaaagug

SEQ ID NO: 1888959 - RNA, 19 nt, Homo sapiens
  misc_RNA (1)...(19): siRNA sense strand
cagcuuacuucucacuaaa

SEQ ID NO: 1888960 - RNA, 19 nt, Homo sapiens
  misc_RNA (1)...(19): siRNA sense strand
gaacucagagcaucaagca

SEQ ID NO: 1888961 - RNA, 19 nt, Homo sapiens
  misc_RNA (1)...(19): siRNA sense strand
guagucaccuuagagcaaa

SEQ ID NO: 1888962 - RNA, 19 nt, Homo sapiens
  misc_RNA (1)...(19): siRNA sense strand
agagacaaaucuucagcua

SEQ ID NO: 1888963 - RNA, 19 nt, Homo sapiens
  misc_RNA (1)...(19): siRNA sense strand
ggagaaacuuaaugaugca

SEQ ID NO: 1888964 - RNA, 19 nt, Homo sapiens
  misc_RNA (1)...(19): siRNA sense strand
cuaugaugaucgacaauuu

SEQ ID NO: 1888965 - RNA, 19 nt, Homo sapiens
  misc_RNA (1)...(19): siRNA sense strand
agaaagaugucagcaacuu

SEQ ID NO: 1888966 - RNA, 19 nt, Homo sapiens
  misc_RNA (1)...(19): siRNA sense strand
uugcacaacuugagaaaga

SEQ ID NO: 1888967 - RNA, 19 nt, Homo sapiens
  misc_RNA (1)...(19): siRNA sense strand
aaagugaacaucucuaguu

SEQ ID NO: 1888968 - RNA, 19 nt, Homo sapiens
  misc_RNA (1)...(19): siRNA sense strand
aaaccaacacucuuuacua

SEQ ID NO: 1888969 - RNA, 19 nt, Homo sapiens
  misc_RNA (1)...(19): siRNA sense strand
gacggaaucuauugcacaa

SEQ ID NO: 1888970 - RNA, 19 nt, Homo sapiens
  misc_RNA (1)...(19): siRNA sense strand
aaacuaugaugaucgacaa

SEQ ID NO: 1888971 - RNA, 19 nt, Homo sapiens
  misc_RNA (1)...(19): siRNA sense strand
gaaauugaucaacuucgaa

SEQ ID NO: 1888972 - RNA, 19 nt, Homo sapiens
  misc_RNA (1)...(19): siRNA sense strand
acagagaacuacaacuuag

SEQ ID NO: 1888973 - RNA, 19 nt, Homo sapiens
  misc_RNA (1)...(19): siRNA sense strand
gagcaugaagacaauauau

SEQ ID NO: 1888974 - RNA, 19 nt, Homo sapiens
  misc_RNA (1)...(19): siRNA sense strand
aaagaugucagcaacuuaa

SEQ ID NO: 1888975 - RNA, 19 nt, Homo sapiens
  misc_RNA (1)...(19): siRNA sense strand
cagagagauucuaagauug

SEQ ID NO: 1888976 - RNA, 19 nt, Homo sapiens
  misc_RNA (1)...(19): siRNA sense strand
ucaacagccuuacagguau

SEQ ID NO: 1888977 - RNA, 19 nt, Homo sapiens
  misc_RNA (1)...(19): siRNA sense strand
gaggccaauucgcuauuaa

SEQ ID NO: 1888978 - RNA, 19 nt, Homo sapiens
  misc_RNA (1)...(19): siRNA sense strand
ggcuagacauuuaugagaa

SEQ ID NO: 1888979 - RNA, 19 nt, Homo sapiens
  misc_RNA (1)...(19): siRNA sense strand
gaacuagaacaaaucagau

SEQ ID NO: 1888980 - RNA, 19 nt, Homo sapiens
  misc_RNA (1)...(19): siRNA sense strand
ggauaaugcuguggcugaa

SEQ ID NO: 1888981 - RNA, 19 nt, Homo sapiens
  misc_RNA (1)...(19): siRNA sense strand
gaaaaccaaccaagaaauu

SEQ ID NO: 1888982 - RNA, 19 nt, Homo sapiens
  misc_RNA (1)...(19): siRNA sense strand
guaauugagcuuaggagaa

SEQ ID NO: 1888983 - RNA, 19 nt, Homo sapiens
  misc_RNA (1)...(19): siRNA sense strand
gaaugugccuaaagagcau

SEQ ID NO: 1888984 - RNA, 19 nt, Homo sapiens
  misc_RNA (1)...(19): siRNA sense strand
gucagcaacuuaaauaaag

SEQ ID NO: 1888985 - RNA, 19 nt, Homo sapiens
  misc_RNA (1)...(19): siRNA sense strand
caagcaaggcuagacauuu

SEQ ID NO: 1888986 - RNA, 19 nt, Homo sapiens
  misc_RNA (1)...(19): siRNA sense strand
gagacaaaucuucagcuaa

SEQ ID NO: 1888987 - RNA, 19 nt, Homo sapiens
  misc_RNA (1)...(19): siRNA sense strand
cuagagaagagauguauga

SEQ ID NO: 1888988 - RNA, 19 nt, Homo sapiens
  misc_RNA (1)...(19): siRNA sense strand
gugaauccauuaagaaagg

SEQ ID NO: 1888989 - RNA, 19 nt, Homo sapiens
  misc_RNA (1)...(19): siRNA sense strand
gcaagaaaucucacacagu

SEQ ID NO: 1888990 - RNA, 19 nt, Homo sapiens
  misc_RNA (1)...(19): siRNA sense strand
gaaacagcaagaaaucuca

SEQ ID NO: 1888991 - RNA, 19 nt, Homo sapiens
  misc_RNA (1)...(19): siRNA sense strand
gaggaaacagcaagaaauc

SEQ ID NO: 1888992 - RNA, 19 nt, Homo sapiens
  misc_RNA (1)...(19): siRNA sense strand
gcaaacuguuacuuuacug

SEQ ID NO: 1888993 - RNA, 19 nt, Homo sapiens
  misc_RNA (1)...(19): siRNA sense strand
cuugaagccucucacauga

SEQ ID NO: 1888994 - RNA, 19 nt, Homo sapiens
  misc_RNA (1)...(19): siRNA sense strand
uaaagaaacuccaugcuua

SEQ ID NO: 1888995 - RNA, 19 nt, Homo sapiens
  misc_RNA (1)...(19): siRNA sense strand
gcuaucaucugaacaauua

SEQ ID NO: 1888996 - RNA, 19 nt, Homo sapiens
  misc_RNA (1)...(19): siRNA sense strand
ggauagaggccaaauaaua

SEQ ID NO: 1888997 - RNA, 19 nt, Homo sapiens
  misc_RNA (1)...(19): siRNA sense strand
gccaguaccucauggauua

SEQ ID NO: 1888998 - RNA, 19 nt, Homo sapiens
  misc_RNA (1)...(19): siRNA sense strand
ggacaacuguuucauauag

SEQ ID NO: 1888999 - RNA, 19 nt, Homo sapiens
  misc_RNA (1)...(19): siRNA sense strand
gaaaauaucuggcaaaauc

SEQ ID NO: 1889000 - RNA, 19 nt, Homo sapiens
  misc_RNA (1)...(19): siRNA sense strand
gguuaaagauccugaagua

SEQ ID NO: 1889001 - RNA, 19 nt, Homo sapiens
  misc_RNA (1)...(19): siRNA sense strand
gacacaggauuucuuaaua

SEQ ID NO: 1889002 - RNA, 19 nt, Homo sapiens
  misc_RNA (1)...(19): siRNA sense strand
ggaaugaauggcugaauua

SEQ ID NO: 1889003 - RNA, 19 nt, Homo sapiens
  misc_RNA (1)...(19): siRNA sense strand
gaaagacgauggacaacug

SEQ ID NO: 1889004 - RNA, 19 nt, Homo sapiens
  misc_RNA (1)...(19): siRNA sense strand
gaaagacccuagccuuaga

SEQ ID NO: 1889005 - RNA, 19 nt, Homo sapiens
  misc_RNA (1)...(19): siRNA sense strand
gcaagaggcuuuggaguau

SEQ ID NO: 1889006 - RNA, 19 nt, Homo sapiens
  misc_RNA (1)...(19): siRNA sense strand
gguaauaguuucuccaaau

SEQ ID NO: 1889007 - RNA, 19 nt, Homo sapiens
  misc_RNA (1)...(19): siRNA sense strand
gaacgugugccauuuguuu

SEQ ID NO: 1889008 - RNA, 19 nt, Homo sapiens
  misc_RNA (1)...(19): siRNA sense strand
gaugaauacuuccuagaaa

SEQ ID NO: 1889009 - RNA, 19 nt, Homo sapiens
  misc_RNA (1)...(19): siRNA sense strand
gaagcaggauuuagcuauu

SEQ ID NO: 1889010 - RNA, 19 nt, Homo sapiens
  misc_RNA (1)...(19): siRNA sense strand
ggagaacccuuaugugaca

SEQ ID NO: 1889011 - RNA, 19 nt, Homo sapiens
  misc_RNA (1)...(19): siRNA sense strand
cuuaaagagugucgaauua

SEQ ID NO: 1889012 - RNA, 19 nt, Homo sapiens
  misc_RNA (1)...(19): siRNA sense strand
uaacugacauucucaaaca

SEQ ID NO: 1889013 - RNA, 19 nt, Homo sapiens
  misc_RNA (1)...(19): siRNA sense strand
ccaaauugcuucugucugu

SEQ ID NO: 1889014 - RNA, 19 nt, Homo sapiens
  misc_RNA (1)...(19): siRNA sense strand
gaggagaacccuuauguga

SEQ ID NO: 1889015 - RNA, 19 nt, Homo sapiens
  misc_RNA (1)...(19): siRNA sense strand
caagagaauuugagagguu

SEQ ID NO: 1889016 - RNA, 19 nt, Homo sapiens
  misc_RNA (1)...(19): siRNA sense strand
gaacagcucaaagcaauuu

SEQ ID NO: 1889017 - RNA, 19 nt, Homo sapiens
  misc_RNA (1)...(19): siRNA sense strand
ccagauguauugcuuggua

SEQ ID NO: 1889018 - RNA, 19 nt, Homo sapiens
  misc_RNA (1)...(19): siRNA sense strand
caaaugaggcgaccagauu

SEQ ID NO: 1889019 - RNA, 19 nt, Homo sapiens
  misc_RNA (1)...(19): siRNA sense strand
ugacaaacuuucucaguau

SEQ ID NO: 1889020 - RNA, 19 nt, Homo sapiens
  misc_RNA (1)...(19): siRNA sense strand
gauccucaaucgagaaauu

SEQ ID NO: 1889021 - RNA, 19 nt, Homo sapiens
  misc_RNA (1)...(19): siRNA sense strand
gacaaugaauuaagggaaa

SEQ ID NO: 1889022 - RNA, 19 nt, Homo sapiens
  misc_RNA (1)...(19): siRNA sense strand
gauagugacuuuagaaugc

SEQ ID NO: 1889023 - RNA, 19 nt, Homo sapiens
  misc_RNA (1)...(19): siRNA sense strand
caagaacaaaggagaaaua

SEQ ID NO: 1889024 - RNA, 19 nt, Homo sapiens
  misc_RNA (1)...(19): siRNA sense strand
gaggaaggaugaaacacaa

SEQ ID NO: 1889025 - RNA, 19 nt, Homo sapiens
  misc_RNA (1)...(19): siRNA sense strand
gccaaucucuucauaaauc

SEQ ID NO: 1889026 - RNA, 19 nt, Homo sapiens
  misc_RNA (1)...(19): siRNA sense strand
gcacaaagacaagagaauu

SEQ ID NO: 1889027 - RNA, 19 nt, Homo sapiens
  misc_RNA (1)...(19): siRNA sense strand
uaacuuaacugacauucuc

SEQ ID NO: 1889028 - RNA, 19 nt, Homo sapiens
  misc_RNA (1)...(19): siRNA sense strand
cgaauuaugucuucugcaa

SEQ ID NO: 1889029 - RNA, 19 nt, Homo sapiens
  misc_RNA (1)...(19): siRNA sense strand
augaauggcugaauuauga

SEQ ID NO: 1889030 - RNA, 19 nt, Homo sapiens
  misc_RNA (1)...(19): siRNA sense strand
gcgaaauucucacacuauu

SEQ ID NO: 1889031 - RNA, 19 nt, Homo sapiens
  misc_RNA (1)...(19): siRNA sense strand
uaaagagugucgaauuaug

SEQ ID NO: 1889032 - RNA, 19 nt, Homo sapiens
  misc_RNA (1)...(19): siRNA sense strand
gaagaaagcauugacuaau

SEQ ID NO: 1889033 - RNA, 19 nt, Homo sapiens
  misc_RNA (1)...(19): siRNA sense strand
gugguaaaguucccagaua

SEQ ID NO: 1889034 - RNA, 19 nt, Homo sapiens
  misc_RNA (1)...(19): siRNA sense strand
gcuuagaguuggaguuuga

SEQ ID NO: 1889035 - RNA, 19 nt, Homo sapiens
  misc_RNA (1)...(19): siRNA sense strand
gcaugccaaucucuucaua

SEQ ID NO: 1889036 - RNA, 19 nt, Homo sapiens
  misc_RNA (1)...(19): siRNA sense strand
gaugaaacaagacgacuuu

SEQ ID NO: 1889037 - RNA, 19 nt, Homo sapiens
  misc_RNA (1)...(19): siRNA sense strand
caggauuucuuaauaguga

SEQ ID NO: 1889038 - RNA, 19 nt, Homo sapiens
  misc_RNA (1)...(19): siRNA sense strand
ggagaucgucacaauagua

SEQ ID NO: 1889039 - RNA, 19 nt, Homo sapiens
  misc_RNA (1)...(19): siRNA sense strand
ccagauaugucagugauug

SEQ ID NO: 1889040 - RNA, 19 nt, Homo sapiens
  misc_RNA (1)...(19): siRNA sense strand
ggagaaacaucuacaaaau

SEQ ID NO: 1889041 - RNA, 19 nt, Homo sapiens
  misc_RNA (1)...(19): siRNA sense strand
gauagaggccaaauaauag

SEQ ID NO: 1889042 - RNA, 19 nt, Homo sapiens
  misc_RNA (1)...(19): siRNA sense strand
gacccuagccuuagauaaa

SEQ ID NO: 1889043 - RNA, 19 nt, Homo sapiens
  misc_RNA (1)...(19): siRNA sense strand
gaaaauacccucuccauca

SEQ ID NO: 1889044 - RNA, 19 nt, Homo sapiens
  misc_RNA (1)...(19): siRNA sense strand
caagauaugcuaacacuuc

SEQ ID NO: 1889045 - RNA, 19 nt, Homo sapiens
  misc_RNA (1)...(19): siRNA sense strand
cgacuuugccuuuccauuu

SEQ ID NO: 1889046 - RNA, 19 nt, Homo sapiens
  misc_RNA (1)...(19): siRNA sense strand
auaagaagcuguauaaugc

SEQ ID NO: 1889047 - RNA, 19 nt, Homo sapiens
  misc_RNA (1)...(19): siRNA sense strand
caccagagcugccaaagca

SEQ ID NO: 1889048 - RNA, 19 nt, Homo sapiens
  misc_RNA (1)...(19): siRNA sense strand
gaacuucuggacuguaauu

SEQ ID NO: 1889049 - RNA, 19 nt, Homo sapiens
  misc_RNA (1)...(19): siRNA sense strand
ugccaaagcacauauauaa

SEQ ID NO: 1889050 - RNA, 19 nt, Homo sapiens
  misc_RNA (1)...(19): siRNA sense strand
ugaagaugauggcuaaaga

SEQ ID NO: 1889051 - RNA, 19 nt, Homo sapiens
  misc_RNA (1)...(19): siRNA sense strand
ugccagaacuacaaucuuu

SEQ ID NO: 1889052 - RNA, 19 nt, Homo sapiens
  misc_RNA (1)...(19): siRNA sense strand
ccaaauggaaugauaguga

SEQ ID NO: 1889053 - RNA, 19 nt, Homo sapiens
  misc_RNA (1)...(19): siRNA sense strand
gaggaacacuguccauugg

SEQ ID NO: 1889054 - RNA, 19 nt, Homo sapiens
  misc_RNA (1)...(19): siRNA sense strand
gaaguauguugcuaucauc

SEQ ID NO: 1889055 - RNA, 19 nt, Homo sapiens
  misc_RNA (1)...(19): siRNA sense strand
gaacuacaaucuuuugaug

SEQ ID NO: 1889056 - RNA, 19 nt, Homo sapiens
  misc_RNA (1)...(19): siRNA sense strand
gcccaagaaugcacaaaga

SEQ ID NO: 1889057 - RNA, 19 nt, Homo sapiens
  misc_RNA (1)...(19): siRNA sense strand
uaaaggagcccaagaaugc

SEQ ID NO: 1889058 - RNA, 19 nt, Homo sapiens
  misc_RNA (1)...(19): siRNA sense strand
gacaaacuuucucaguauu

SEQ ID NO: 1889059 - RNA, 19 nt, Homo sapiens
  misc_RNA (1)...(19): siRNA sense strand
ucacugagcaggagaaaga

SEQ ID NO: 1889060 - RNA, 19 nt, Homo sapiens
  misc_RNA (1)...(19): siRNA sense strand
gaaugauagugacuuuaga

SEQ ID NO: 1889061 - RNA, 19 nt, Homo sapiens
  misc_RNA (1)...(19): siRNA sense strand
gaugauggcuaaagaaagc

SEQ ID NO: 1889062 - RNA, 19 nt, Homo sapiens
  misc_RNA (1)...(19): siRNA sense strand
gauggacaacuguuucaua

SEQ ID NO: 1889063 - RNA, 19 nt, Homo sapiens
  misc_RNA (1)...(19): siRNA sense strand
cuaggaaaccucaggcuua

SEQ ID NO: 1889064 - RNA, 19 nt, Homo sapiens
  misc_RNA (1)...(19): siRNA sense strand
aagaacagcucaaagcaau

SEQ ID NO: 1889065 - RNA, 19 nt, Homo sapiens
  misc_RNA (1)...(19): siRNA sense strand
caaauaaugacaagcagaa

SEQ ID NO: 1889066 - RNA, 19 nt, Homo sapiens
  misc_RNA (1)...(19): siRNA sense strand
uaggaaaccucaggcuuaa

SEQ ID NO: 1889067 - RNA, 19 nt, Homo sapiens
  misc_RNA (1)...(19): siRNA sense strand
agaaagcauugacuaauca

SEQ ID NO: 1889068 - RNA, 19 nt, Homo sapiens
  misc_RNA (1)...(19): siRNA sense strand
uaacuugcuugugagauuu

SEQ ID NO: 1889069 - RNA, 19 nt, Homo sapiens
  misc_RNA (1)...(19): siRNA sense strand
ggaaugauagugacuuuag

SEQ ID NO: 1889070 - RNA, 19 nt, Homo sapiens
  misc_RNA (1)...(19): siRNA sense strand
gauccucucucugaaauca

SEQ ID NO: 1889071 - RNA, 19 nt, Homo sapiens
  misc_RNA (1)...(19): siRNA sense strand
gaagaugauggcuaaagaa

SEQ ID NO: 1889072 - RNA, 19 nt, Homo sapiens
  misc_RNA (1)...(19): siRNA sense strand
guaacagacuagcuagaga

SEQ ID NO: 1889073 - RNA, 19 nt, Homo sapiens
  misc_RNA (1)...(19): siRNA sense strand
caugguggcuggacaacaa

SEQ ID NO: 1889074 - RNA, 19 nt, Homo sapiens
  misc_RNA (1)...(19): siRNA sense strand
gagaacgugugccauuugu

SEQ ID NO: 1889075 - RNA, 19 nt, Homo sapiens
  misc_RNA (1)...(19): siRNA sense strand
uuggauaacuugcuuguga

SEQ ID NO: 1889076 - RNA, 19 nt, Homo sapiens
  misc_RNA (1)...(19): siRNA sense strand
guaauuacccagauccuau

SEQ ID NO: 1889077 - RNA, 19 nt, Homo sapiens
  misc_RNA (1)...(19): siRNA sense strand
gaaguagcccagauguauu

SEQ ID NO: 1889078 - RNA, 19 nt, Homo sapiens
  misc_RNA (1)...(19): siRNA sense strand
cagacuagcuagagacaau

SEQ ID NO: 1889079 - RNA, 19 nt, Homo sapiens
  misc_RNA (1)...(19): siRNA sense strand
guauguugcuaucaucuga

SEQ ID NO: 1889080 - RNA, 19 nt, Homo sapiens
  misc_RNA (1)...(19): siRNA sense strand
acacaggauuucuuaauag

SEQ ID NO: 1889081 - RNA, 19 nt, Homo sapiens
  misc_RNA (1)...(19): siRNA sense strand
gagaucgucacaauaguaa

SEQ ID NO: 1889082 - RNA, 19 nt, Homo sapiens
  misc_RNA (1)...(19): siRNA sense strand
gugcaaaggcggcuugaaa

SEQ ID NO: 1889083 - RNA, 19 nt, Homo sapiens
  misc_RNA (1)...(19): siRNA sense strand
uaauucaccucauaguaga

SEQ ID NO: 1889084 - RNA, 19 nt, Homo sapiens
  misc_RNA (1)...(19): siRNA sense strand
aaacugagcaagaggcuuu

SEQ ID NO: 1889085 - RNA, 19 nt, Homo sapiens
  misc_RNA (1)...(19): siRNA sense strand
uuacaaggcuuaucuagcu

SEQ ID NO: 1889086 - RNA, 19 nt, Homo sapiens
  misc_RNA (1)...(19): siRNA sense strand
cgaaauucucacacuauua

SEQ ID NO: 1889087 - RNA, 19 nt, Homo sapiens
  misc_RNA (1)...(19): siRNA sense strand
gaugauuuacggcaagaua

SEQ ID NO: 1889088 - RNA, 19 nt, Homo sapiens
  misc_RNA (1)...(19): siRNA sense strand
caugugggauguauuugaa

SEQ ID NO: 1889089 - RNA, 19 nt, Homo sapiens
  misc_RNA (1)...(19): siRNA sense strand
ugaagaaagcauugacuaa

SEQ ID NO: 1889090 - RNA, 19 nt, Homo sapiens
  misc_RNA (1)...(19): siRNA sense strand
ccucauggauuagaagauu

SEQ ID NO: 1889091 - RNA, 19 nt, Homo sapiens
  misc_RNA (1)...(19): siRNA sense strand
gacuuugccuuuccauuug

SEQ ID NO: 1889092 - RNA, 19 nt, Homo sapiens
  misc_RNA (1)...(19): siRNA sense strand
aaacccugcucaucaacua

SEQ ID NO: 1889093 - RNA, 19 nt, Homo sapiens
  misc_RNA (1)...(19): siRNA sense strand
cagaguuacuguuucagaa

SEQ ID NO: 1889094 - RNA, 19 nt, Homo sapiens
  misc_RNA (1)...(19): siRNA sense strand
ggaagcaaguucacaauua

SEQ ID NO: 1889095 - RNA, 19 nt, Homo sapiens
  misc_RNA (1)...(19): siRNA sense strand
guacugagcuccuguguaa

SEQ ID NO: 1889096 - RNA, 19 nt, Homo sapiens
  misc_RNA (1)...(19): siRNA sense strand
gaaagaagcugguuuggau

SEQ ID NO: 1889097 - RNA, 19 nt, Homo sapiens
  misc_RNA (1)...(19): siRNA sense strand
uaacaacccuuuccaaauu

SEQ ID NO: 1889098 - RNA, 19 nt, Homo sapiens
  misc_RNA (1)...(19): siRNA sense strand
ggaauaaacuugaggaugu

SEQ ID NO: 1889099 - RNA, 19 nt, Homo sapiens
  misc_RNA (1)...(19): siRNA sense strand
gaagaaauguugaauccaa

SEQ ID NO: 1889100 - RNA, 19 nt, Homo sapiens
  misc_RNA (1)...(19): siRNA sense strand
uaaggacucucuugcauua

SEQ ID NO: 1889101 - RNA, 19 nt, Homo sapiens
  misc_RNA (1)...(19): siRNA sense strand
ugaacuggcuuaaagaaua

SEQ ID NO: 1889102 - RNA, 19 nt, Homo sapiens
  misc_RNA (1)...(19): siRNA sense strand
ccacuggaauuugauauua

SEQ ID NO: 1889103 - RNA, 19 nt, Homo sapiens
  misc_RNA (1)...(19): siRNA sense strand
gaaaaggucugcaugaauu

SEQ ID NO: 1889104 - RNA, 19 nt, Homo sapiens
  misc_RNA (1)...(19): siRNA sense strand
gaagcuaccauuucuuaua

SEQ ID NO: 1889105 - RNA, 19 nt, Homo sapiens
  misc_RNA (1)...(19): siRNA sense strand
gagcaccucugaaacaauu

SEQ ID NO: 1889106 - RNA, 19 nt, Homo sapiens
  misc_RNA (1)...(19): siRNA sense strand
gaaggauccugaaguaaau

SEQ ID NO: 1889107 - RNA, 19 nt, Homo sapiens
  misc_RNA (1)...(19): siRNA sense strand
gaaucagacugcuguauau

SEQ ID NO: 1889108 - RNA, 19 nt, Homo sapiens
  misc_RNA (1)...(19): siRNA sense strand
caacaaagaugcccuucug

SEQ ID NO: 1889109 - RNA, 19 nt, Homo sapiens
  misc_RNA (1)...(19): siRNA sense strand
gcacauuccugcugucuca

SEQ ID NO: 1889110 - RNA, 19 nt, Homo sapiens
  misc_RNA (1)...(19): siRNA sense strand
ggaaugaaccacuggaauu

SEQ ID NO: 1889111 - RNA, 19 nt, Homo sapiens
  misc_RNA (1)...(19): siRNA sense strand
cauagaggcugccauaaau

SEQ ID NO: 1889112 - RNA, 19 nt, Homo sapiens
  misc_RNA (1)...(19): siRNA sense strand
aagaauggcucgauuaugu

SEQ ID NO: 1889113 - RNA, 19 nt, Homo sapiens
  misc_RNA (1)...(19): siRNA sense strand
gaggaugcauaucugauuu

SEQ ID NO: 1889114 - RNA, 19 nt, Homo sapiens
  misc_RNA (1)...(19): siRNA sense strand
cgacaagacugccgagaga

SEQ ID NO: 1889115 - RNA, 19 nt, Homo sapiens
  misc_RNA (1)...(19): siRNA sense strand
gggaagcuaccauuucuua

SEQ ID NO: 1889116 - RNA, 19 nt, Homo sapiens
  misc_RNA (1)...(19): siRNA sense strand
ucacaucagucaaagauau

SEQ ID NO: 1889117 - RNA, 19 nt, Homo sapiens
  misc_RNA (1)...(19): siRNA sense strand
gaaggaagaugaaguuagc

SEQ ID NO: 1889118 - RNA, 19 nt, Homo sapiens
  misc_RNA (1)...(19): siRNA sense strand
ggacauauucuuggaaauu

SEQ ID NO: 1889119 - RNA, 19 nt, Homo sapiens
  misc_RNA (1)...(19): siRNA sense strand
ucucagaacucuauguuga

SEQ ID NO: 1889120 - RNA, 19 nt, Homo sapiens
  misc_RNA (1)...(19): siRNA sense strand
gaagcaaguucacaauuac

SEQ ID NO: 1889121 - RNA, 19 nt, Homo sapiens
  misc_RNA (1)...(19): siRNA sense strand
ucaagugucuccuaauaug

SEQ ID NO: 1889122 - RNA, 19 nt, Homo sapiens
  misc_RNA (1)...(19): siRNA sense strand
agggaaagcuggacuacua

SEQ ID NO: 1889123 - RNA, 19 nt, Homo sapiens
  misc_RNA (1)...(19): siRNA sense strand
gaacuggagacauaauauu

SEQ ID NO: 1889124 - RNA, 19 nt, Homo sapiens
  misc_RNA (1)...(19): siRNA sense strand
gaaugaaccacuggaauuu

SEQ ID NO: 1889125 - RNA, 19 nt, Homo sapiens
  misc_RNA (1)...(19): siRNA sense strand
caucguagcuguucauuuu

SEQ ID NO: 1889126 - RNA, 19 nt, Homo sapiens
  misc_RNA (1)...(19): siRNA sense strand
gaauaaacuugaggauguu

SEQ ID NO: 1889127 - RNA, 19 nt, Homo sapiens
  misc_RNA (1)...(19): siRNA sense strand
cuaauucaguuccaguaua

SEQ ID NO: 1889128 - RNA, 19 nt, Homo sapiens
  misc_RNA (1)...(19): siRNA sense strand
gaugagugaugaagaacuu

SEQ ID NO: 1889129 - RNA, 19 nt, Homo sapiens
  misc_RNA (1)...(19): siRNA sense strand
ggccagcucuuccacauug

SEQ ID NO: 1889130 - RNA, 19 nt, Homo sapiens
  misc_RNA (1)...(19): siRNA sense strand
ugaaacaauugcugacauu

SEQ ID NO: 1889131 - RNA, 19 nt, Homo sapiens
  misc_RNA (1)...(19): siRNA sense strand
gguauacaauaacaaggua

SEQ ID NO: 1889132 - RNA, 19 nt, Homo sapiens
  misc_RNA (1)...(19): siRNA sense strand
ggauucaguuggagugauu

SEQ ID NO: 1889133 - RNA, 19 nt, Homo sapiens
  misc_RNA (1)...(19): siRNA sense strand
gaacuggcuuaaagaauac

SEQ ID NO: 1889134 - RNA, 19 nt, Homo sapiens
  misc_RNA (1)...(19): siRNA sense strand
gaaguuagccccuaugauu

SEQ ID NO: 1889135 - RNA, 19 nt, Homo sapiens
  misc_RNA (1)...(19): siRNA sense strand
ugaaugccgugaaguuaaa

SEQ ID NO: 1889136 - RNA, 19 nt, Homo sapiens
  misc_RNA (1)...(19): siRNA sense strand
cccuagagcuucuggauuu

SEQ ID NO: 1889137 - RNA, 19 nt, Homo sapiens
  misc_RNA (1)...(19): siRNA sense strand
cgaaauucaucuaaucuuc

SEQ ID NO: 1889138 - RNA, 19 nt, Homo sapiens
  misc_RNA (1)...(19): siRNA sense strand
uuucaagugucuccuaaua

SEQ ID NO: 1889139 - RNA, 19 nt, Homo sapiens
  misc_RNA (1)...(19): siRNA sense strand
ccaguacguucgagaauau

SEQ ID NO: 1889140 - RNA, 19 nt, Homo sapiens
  misc_RNA (1)...(19): siRNA sense strand
gaaguuaaacagagccaaa

SEQ ID NO: 1889141 - RNA, 19 nt, Homo sapiens
  misc_RNA (1)...(19): siRNA sense strand
ggcgguggauucacagaua

SEQ ID NO: 1889142 - RNA, 19 nt, Homo sapiens
  misc_RNA (1)...(19): siRNA sense strand
aagaagcacucaaacaguu

SEQ ID NO: 1889143 - RNA, 19 nt, Homo sapiens
  misc_RNA (1)...(19): siRNA sense strand
gaacucacaucagucaaag

SEQ ID NO: 1889144 - RNA, 19 nt, Homo sapiens
  misc_RNA (1)...(19): siRNA sense strand
ggccaugcauaccuguuua

SEQ ID NO: 1889145 - RNA, 19 nt, Homo sapiens
  misc_RNA (1)...(19): siRNA sense strand
cauguuaaauuuccagaga

SEQ ID NO: 1889146 - RNA, 19 nt, Homo sapiens
  misc_RNA (1)...(19): siRNA sense strand
auugagaacuggagacaua

SEQ ID NO: 1889147 - RNA, 19 nt, Homo sapiens
  misc_RNA (1)...(19): siRNA sense strand
ugaaggauccugaaguaaa

SEQ ID NO: 1889148 - RNA, 19 nt, Homo sapiens
  misc_RNA (1)...(19): siRNA sense strand
ggaccgagccauugaggaa

SEQ ID NO: 1889149 - RNA, 19 nt, Homo sapiens
  misc_RNA (1)...(19): siRNA sense strand
gagaacuggagacauaaua

SEQ ID NO: 1889150 - RNA, 19 nt, Homo sapiens
  misc_RNA (1)...(19): siRNA sense strand
caaauugucuugguuaagg

SEQ ID NO: 1889151 - RNA, 19 nt, Homo sapiens
  misc_RNA (1)...(19): siRNA sense strand
uuaagcagauguuauggaa

SEQ ID NO: 1889152 - RNA, 19 nt, Homo sapiens
  misc_RNA (1)...(19): siRNA sense strand
guguuuagcuuucaagugu

SEQ ID NO: 1889153 - RNA, 19 nt, Homo sapiens
  misc_RNA (1)...(19): siRNA sense strand
cuugaaggauccugaagua

SEQ ID NO: 1889154 - RNA, 19 nt, Homo sapiens
  misc_RNA (1)...(19): siRNA sense strand
cacauugacuuuggacaua

SEQ ID NO: 1889155 - RNA, 19 nt, Homo sapiens
  misc_RNA (1)...(19): siRNA sense strand
acagaugagugaugaagaa

SEQ ID NO: 1889156 - RNA, 19 nt, Homo sapiens
  misc_RNA (1)...(19): siRNA sense strand
gauuauguguugcaaguca

SEQ ID NO: 1889157 - RNA, 19 nt, Homo sapiens
  misc_RNA (1)...(19): siRNA sense strand
ugaaucagacugcuguaua

SEQ ID NO: 1889158 - RNA, 19 nt, Homo sapiens
  misc_RNA (1)...(19): siRNA sense strand
ggaaggaggccaugcauac

SEQ ID NO: 1889159 - RNA, 19 nt, Homo sapiens
  misc_RNA (1)...(19): siRNA sense strand
gaaccacuggaauuugaua

SEQ ID NO: 1889160 - RNA, 19 nt, Homo sapiens
  misc_RNA (1)...(19): siRNA sense strand
ccaaagaaaacacgaauua

SEQ ID NO: 1889161 - RNA, 19 nt, Homo sapiens
  misc_RNA (1)...(19): siRNA sense strand
gugcuucaguuucauaaug

SEQ ID NO: 1889162 - RNA, 19 nt, Homo sapiens
  misc_RNA (1)...(19): siRNA sense strand
gaauggcucgauuauguuu

SEQ ID NO: 1889163 - RNA, 19 nt, Homo sapiens
  misc_RNA (1)...(19): siRNA sense strand
gagauugcaagcagugaua

SEQ ID NO: 1889164 - RNA, 19 nt, Homo sapiens
  misc_RNA (1)...(19): siRNA sense strand
gaagaagcacucaaacagu

SEQ ID NO: 1889165 - RNA, 19 nt, Homo sapiens
  misc_RNA (1)...(19): siRNA sense strand
ugaagaagaagcacucaaa

SEQ ID NO: 1889166 - RNA, 19 nt, Homo sapiens
  misc_RNA (1)...(19): siRNA sense strand
cgaagacucugugauguca

SEQ ID NO: 1889167 - RNA, 19 nt, Homo sapiens
  misc_RNA (1)...(19): siRNA sense strand
cagcagccuucaacaaaga

SEQ ID NO: 1889168 - RNA, 19 nt, Homo sapiens
  misc_RNA (1)...(19): siRNA sense strand
ucagaacucuauguugaaa

SEQ ID NO: 1889169 - RNA, 19 nt, Homo sapiens
  misc_RNA (1)...(19): siRNA sense strand
gcagugauagugcuaaugu

SEQ ID NO: 1889170 - RNA, 19 nt, Homo sapiens
  misc_RNA (1)...(19): siRNA sense strand
ccauagaggcugccauaaa

SEQ ID NO: 1889171 - RNA, 19 nt, Homo sapiens
  misc_RNA (1)...(19): siRNA sense strand
uuacacagcuggucuucau

SEQ ID NO: 1889172 - RNA, 19 nt, Homo sapiens
  misc_RNA (1)...(19): siRNA sense strand
cuacuaaagugaacuggau

SEQ ID NO: 1889173 - RNA, 19 nt, Homo sapiens
  misc_RNA (1)...(19): siRNA sense strand
gcagcagccuucaacaaag

SEQ ID NO: 1889174 - RNA, 19 nt, Homo sapiens
  misc_RNA (1)...(19): siRNA sense strand
gcucuggccucauugaagu

SEQ ID NO: 1889175 - RNA, 19 nt, Homo sapiens
  misc_RNA (1)...(19): siRNA sense strand
gaucuuauuuggacuuugc

SEQ ID NO: 1889176 - RNA, 19 nt, Homo sapiens
  misc_RNA (1)...(19): siRNA sense strand
cugaugaacucgaagaaau

SEQ ID NO: 1889177 - RNA, 19 nt, Homo sapiens
  misc_RNA (1)...(19): siRNA sense strand
ggaaagaagcugguuugga

SEQ ID NO: 1889178 - RNA, 19 nt, Homo sapiens
  misc_RNA (1)...(19): siRNA sense strand
gauuuacucuggaaagaag

SEQ ID NO: 1889179 - RNA, 19 nt, Homo sapiens
  misc_RNA (1)...(19): siRNA sense strand
caagguauuuggugaggau

SEQ ID NO: 1889180 - RNA, 19 nt, Homo sapiens
  misc_RNA (1)...(19): siRNA sense strand
gaagcacucaauaaguuaa

SEQ ID NO: 1889181 - RNA, 19 nt, Homo sapiens
  misc_RNA (1)...(19): siRNA sense strand
guggaaugcugcaagauca

SEQ ID NO: 1889182 - RNA, 19 nt, Homo sapiens
  misc_RNA (1)...(19): siRNA sense strand
ggacguguuuagcuuucaa

SEQ ID NO: 1889183 - RNA, 19 nt, Homo sapiens
  misc_RNA (1)...(19): siRNA sense strand
gaaagagcacuugguaauc

SEQ ID NO: 1889184 - RNA, 19 nt, Homo sapiens
  misc_RNA (1)...(19): siRNA sense strand
agaaagagcacuugguaau

SEQ ID NO: 1889185 - RNA, 19 nt, Homo sapiens
  misc_RNA (1)...(19): siRNA sense strand
caucguaagcucagaggua

SEQ ID NO: 1889186 - RNA, 19 nt, Homo sapiens
  misc_RNA (1)...(19): siRNA sense strand
gaaccauccaucccugaaa

SEQ ID NO: 1889187 - RNA, 19 nt, Homo sapiens
  misc_RNA (1)...(19): siRNA sense strand
cuucugaacuggcuuaaag

SEQ ID NO: 1889188 - RNA, 19 nt, Homo sapiens
  misc_RNA (1)...(19): siRNA sense strand
gaugauuuacgacaggaua

SEQ ID NO: 1889189 - RNA, 19 nt, Homo sapiens
  misc_RNA (1)...(19): siRNA sense strand
uuagaaagagcacuuggua

SEQ ID NO: 1889190 - RNA, 19 nt, Homo sapiens
  misc_RNA (1)...(19): siRNA sense strand
ucaaucaaguggaauaaac

SEQ ID NO: 1889191 - RNA, 19 nt, Homo sapiens
  misc_RNA (1)...(19): siRNA sense strand
cagcuuugcauguuaaauu

SEQ ID NO: 1889192 - RNA, 19 nt, Homo sapiens
  misc_RNA (1)...(19): siRNA sense strand
aagaaaugauugccauaga

SEQ ID NO: 1889193 - RNA, 19 nt, Homo sapiens
  misc_RNA (1)...(19): siRNA sense strand
gcaugggaaucucuucauc

SEQ ID NO: 1889194 - RNA, 19 nt, Homo sapiens
  misc_RNA (1)...(19): siRNA sense strand
gcagaggucagaugcagaa

SEQ ID NO: 1889195 - RNA, 19 nt, Homo sapiens
  misc_RNA (1)...(19): siRNA sense strand
cagcagcagugguggcaaa

SEQ ID NO: 1889196 - RNA, 19 nt, Homo sapiens
  misc_RNA (1)...(19): siRNA sense strand
gcucaggccgaguguacua

SEQ ID NO: 1889197 - RNA, 19 nt, Homo sapiens
  misc_RNA (1)...(19): siRNA sense strand
gcagaagccauuugaagac

SEQ ID NO: 1889198 - RNA, 19 nt, Homo sapiens
  misc_RNA (1)...(19): siRNA sense strand
ucucuggccucacaguuca

SEQ ID NO: 1889199 - RNA, 19 nt, Homo sapiens
  misc_RNA (1)...(19): siRNA sense strand
cgggagaggaggacuuuga

SEQ ID NO: 1889200 - RNA, 19 nt, Homo sapiens
  misc_RNA (1)...(19): siRNA sense strand
ugcagaagccauuugaaga

SEQ ID NO: 1889201 - RNA, 19 nt, Homo sapiens
  misc_RNA (1)...(19): siRNA sense strand
gcugaucaacggcuacauc

SEQ ID NO: 1889202 - RNA, 19 nt, Homo sapiens
  misc_RNA (1)...(19): siRNA sense strand
ggccgaguguacuacuuca

SEQ ID NO: 1889203 - RNA, 19 nt, Homo sapiens
  misc_RNA (1)...(19): siRNA sense strand
caacggcuacauccagaag

SEQ ID NO: 1889204 - RNA, 19 nt, Homo sapiens
  misc_RNA (1)...(19): siRNA sense strand
ggagaggaggacuuugagu

SEQ ID NO: 1889205 - RNA, 19 nt, Homo sapiens
  misc_RNA (1)...(19): siRNA sense strand
gcucgcaccugcuagugaa

SEQ ID NO: 1889206 - RNA, 19 nt, Homo sapiens
  misc_RNA (1)...(19): siRNA sense strand
gaucaaggcaggagagaag

SEQ ID NO: 1889207 - RNA, 19 nt, Homo sapiens
  misc_RNA (1)...(19): siRNA sense strand
cagcagcaguggcggcaaa

SEQ ID NO: 1889208 - RNA, 19 nt, Homo sapiens
  misc_RNA (1)...(19): siRNA sense strand
caggagagaaggacuuuga

SEQ ID NO: 1889209 - RNA, 19 nt, Homo sapiens
  misc_RNA (1)...(19): siRNA sense strand
gcggcuacauccagaagau

SEQ ID NO: 1889210 - RNA, 19 nt, Homo sapiens
  misc_RNA (1)...(19): siRNA sense strand
gguacuacuucaaccacau

SEQ ID NO: 1889211 - RNA, 19 nt, Homo sapiens
  misc_RNA (1)...(19): siRNA sense strand
ggccgaggguacuacuuca

SEQ ID NO: 1889212 - RNA, 19 nt, Homo sapiens
  misc_RNA (1)...(19): siRNA sense strand
ggcaggagagaaggacuuu

SEQ ID NO: 1889213 - RNA, 19 nt, Homo sapiens
  misc_RNA (1)...(19): siRNA sense strand
gaggagauauucaagauua

SEQ ID NO: 1889214 - RNA, 19 nt, Homo sapiens
  misc_RNA (1)...(19): siRNA sense strand
caagaaagauguaugauga

SEQ ID NO: 1889215 - RNA, 19 nt, Homo sapiens
  misc_RNA (1)...(19): siRNA sense strand
gaagaacgucugagaaaua

SEQ ID NO: 1889216 - RNA, 19 nt, Homo sapiens
  misc_RNA (1)...(19): siRNA sense strand
gaagucaacauucgauuua

SEQ ID NO: 1889217 - RNA, 19 nt, Homo sapiens
  misc_RNA (1)...(19): siRNA sense strand
caaauggucuuuauccaaa

SEQ ID NO: 1889218 - RNA, 19 nt, Homo sapiens
  misc_RNA (1)...(19): siRNA sense strand
gagcagaaauucagacaga

SEQ ID NO: 1889219 - RNA, 19 nt, Homo sapiens
  misc_RNA (1)...(19): siRNA sense strand
ggaccugacuuacuacaaa

SEQ ID NO: 1889220 - RNA, 19 nt, Homo sapiens
  misc_RNA (1)...(19): siRNA sense strand
ugacagaacugcauuaaag

SEQ ID NO: 1889221 - RNA, 19 nt, Homo sapiens
  misc_RNA (1)...(19): siRNA sense strand
gagaggagauauucaagau

SEQ ID NO: 1889222 - RNA, 19 nt, Homo sapiens
  misc_RNA (1)...(19): siRNA sense strand
gggcaaagauggauugaag

SEQ ID NO: 1889223 - RNA, 19 nt, Homo sapiens
  misc_RNA (1)...(19): siRNA sense strand
uaacacaccuacugggauu

SEQ ID NO: 1889224 - RNA, 19 nt, Homo sapiens
  misc_RNA (1)...(19): siRNA sense strand
gaaacuccuuccugccuuu

SEQ ID NO: 1889225 - RNA, 19 nt, Homo sapiens
  misc_RNA (1)...(19): siRNA sense strand
ggaagaacgucugagaaau

SEQ ID NO: 1889226 - RNA, 19 nt, Homo sapiens
  misc_RNA (1)...(19): siRNA sense strand
gaaaaguauugccgaguua

SEQ ID NO: 1889227 - RNA, 19 nt, Homo sapiens
  misc_RNA (1)...(19): siRNA sense strand
gaacucagaccuauugcaa

SEQ ID NO: 1889228 - RNA, 19 nt, Homo sapiens
  misc_RNA (1)...(19): siRNA sense strand
ucacagggcuaccuugaga

SEQ ID NO: 1889229 - RNA, 19 nt, Homo sapiens
  misc_RNA (1)...(19): siRNA sense strand
aaagauggauugaagacaa

SEQ ID NO: 1889230 - RNA, 19 nt, Homo sapiens
  misc_RNA (1)...(19): siRNA sense strand
gcaauuggcugagaaacuc

SEQ ID NO: 1889231 - RNA, 19 nt, Homo sapiens
  misc_RNA (1)...(19): siRNA sense strand
gauaaugacauaagagaga

SEQ ID NO: 1889232 - RNA, 19 nt, Homo sapiens
  misc_RNA (1)...(19): siRNA sense strand
gcacguacuugucaugagu

SEQ ID NO: 1889233 - RNA, 19 nt, Homo sapiens
  misc_RNA (1)...(19): siRNA sense strand
cauaguagaugcuuuggau

SEQ ID NO: 1889234 - RNA, 19 nt, Homo sapiens
  misc_RNA (1)...(19): siRNA sense strand
gggcaauggugaauuugaa

SEQ ID NO: 1889235 - RNA, 19 nt, Homo sapiens
  misc_RNA (1)...(19): siRNA sense strand
gaagacaaccuugauuuca

SEQ ID NO: 1889236 - RNA, 19 nt, Homo sapiens
  misc_RNA (1)...(19): siRNA sense strand
cccagaagauaaugacaua

SEQ ID NO: 1889237 - RNA, 19 nt, Homo sapiens
  misc_RNA (1)...(19): siRNA sense strand
aaagcuagguccugaauca

SEQ ID NO: 1889238 - RNA, 19 nt, Homo sapiens
  misc_RNA (1)...(19): siRNA sense strand
gaauuugguacacuacaua

SEQ ID NO: 1889239 - RNA, 19 nt, Homo sapiens
  misc_RNA (1)...(19): siRNA sense strand
guauauuccucuacuccua

SEQ ID NO: 1889240 - RNA, 19 nt, Homo sapiens
  misc_RNA (1)...(19): siRNA sense strand
gcaagaaagauguaugaug

SEQ ID NO: 1889241 - RNA, 19 nt, Homo sapiens
  misc_RNA (1)...(19): siRNA sense strand
gauuaaagcagugcaauug

SEQ ID NO: 1889242 - RNA, 19 nt, Homo sapiens
  misc_RNA (1)...(19): siRNA sense strand
gauguaugaugaugcuauu

SEQ ID NO: 1889243 - RNA, 19 nt, Homo sapiens
  misc_RNA (1)...(19): siRNA sense strand
aagaacgucugagaaauaa

SEQ ID NO: 1889244 - RNA, 19 nt, Homo sapiens
  misc_RNA (1)...(19): siRNA sense strand
ggguuuagaagauguguua

SEQ ID NO: 1889245 - RNA, 19 nt, Homo sapiens
  misc_RNA (1)...(19): siRNA sense strand
aagcagcacuggccauuga

SEQ ID NO: 1889246 - RNA, 19 nt, Homo sapiens
  misc_RNA (1)...(19): siRNA sense strand
caugguugaugucagauaa

SEQ ID NO: 1889247 - RNA, 19 nt, Homo sapiens
  misc_RNA (1)...(19): siRNA sense strand
acaccacacuuucagguaa

SEQ ID NO: 1889248 - RNA, 19 nt, Homo sapiens
  misc_RNA (1)...(19): siRNA sense strand
cagaaguaauugaaaccua

SEQ ID NO: 1889249 - RNA, 19 nt, Homo sapiens
  misc_RNA (1)...(19): siRNA sense strand
gagaaggccuuggaagaag

SEQ ID NO: 1889250 - RNA, 19 nt, Homo sapiens
  misc_RNA (1)...(19): siRNA sense strand
cagauaaagcuggucauua

SEQ ID NO: 1889251 - RNA, 19 nt, Homo sapiens
  misc_RNA (1)...(19): siRNA sense strand
gggaauguuugcacuagga

SEQ ID NO: 1889252 - RNA, 19 nt, Homo sapiens
  misc_RNA (1)...(19): siRNA sense strand
uaagguaguccaagaaaug

SEQ ID NO: 1889253 - RNA, 19 nt, Homo sapiens
  misc_RNA (1)...(19): siRNA sense strand
caugaugaauuccuagaug

SEQ ID NO: 1889254 - RNA, 19 nt, Homo sapiens
  misc_RNA (1)...(19): siRNA sense strand
gaagaggaagaacgucuga

SEQ ID NO: 1889255 - RNA, 19 nt, Homo sapiens
  misc_RNA (1)...(19): siRNA sense strand
gaagaaugggcacuuggaa

SEQ ID NO: 1889256 - RNA, 19 nt, Homo sapiens
  misc_RNA (1)...(19): siRNA sense strand
ggauaacuauaggacauau

SEQ ID NO: 1889257 - RNA, 19 nt, Homo sapiens
  misc_RNA (1)...(19): siRNA sense strand
gaaauugcacguacuuguc

SEQ ID NO: 1889258 - RNA, 19 nt, Homo sapiens
  misc_RNA (1)...(19): siRNA sense strand
gcagauaaagcuggucauu

SEQ ID NO: 1889259 - RNA, 19 nt, Homo sapiens
  misc_RNA (1)...(19): siRNA sense strand
ggaaacuacuucagaaaau

SEQ ID NO: 1889260 - RNA, 19 nt, Homo sapiens
  misc_RNA (1)...(19): siRNA sense strand
guggagacccagaagauaa

SEQ ID NO: 1889261 - RNA, 19 nt, Homo sapiens
  misc_RNA (1)...(19): siRNA sense strand
gaaacaugcuugggauaac

SEQ ID NO: 1889262 - RNA, 19 nt, Homo sapiens
  misc_RNA (1)...(19): siRNA sense strand
acauguagaugccgguaaa

SEQ ID NO: 1889263 - RNA, 19 nt, Homo sapiens
  misc_RNA (1)...(19): siRNA sense strand
gcagaaauugcacguacuu

SEQ ID NO: 1889264 - RNA, 19 nt, Homo sapiens
  misc_RNA (1)...(19): siRNA sense strand
gcagugcaauuggcugaga

SEQ ID NO: 1889265 - RNA, 19 nt, Homo sapiens
  misc_RNA (1)...(19): siRNA sense strand
ggagaggagauauucaaga

SEQ ID NO: 1889266 - RNA, 19 nt, Homo sapiens
  misc_RNA (1)...(19): siRNA sense strand
ccuaacauauuuggaaguu

SEQ ID NO: 1889267 - RNA, 19 nt, Homo sapiens
  misc_RNA (1)...(19): siRNA sense strand
gcagaaauucagacagaga

SEQ ID NO: 1889268 - RNA, 19 nt, Homo sapiens
  misc_RNA (1)...(19): siRNA sense strand
agaaagauguaugaugaug

SEQ ID NO: 1889269 - RNA, 19 nt, Homo sapiens
  misc_RNA (1)...(19): siRNA sense strand
gugaugaccuuuuaccuuu

SEQ ID NO: 1889270 - RNA, 19 nt, Homo sapiens
  misc_RNA (1)...(19): siRNA sense strand
uauccuccguccagaagua

SEQ ID NO: 1889271 - RNA, 19 nt, Homo sapiens
  misc_RNA (1)...(19): siRNA sense strand
ugauuuggguuuagaagau

SEQ ID NO: 1889272 - RNA, 19 nt, Homo sapiens
  misc_RNA (1)...(19): siRNA sense strand
gaccacuggguguuuaaua

SEQ ID NO: 1889273 - RNA, 19 nt, Homo sapiens
  misc_RNA (1)...(19): siRNA sense strand
uuagaccacuggguguuua

SEQ ID NO: 1889274 - RNA, 19 nt, Homo sapiens
  misc_RNA (1)...(19): siRNA sense strand
ggaagaaugggcacuugga

SEQ ID NO: 1889275 - RNA, 19 nt, Homo sapiens
  misc_RNA (1)...(19): siRNA sense strand
aagcaugguugaugucaga

SEQ ID NO: 1889276 - RNA, 19 nt, Homo sapiens
  misc_RNA (1)...(19): siRNA sense strand
ccaaauggucuuuauccaa

SEQ ID NO: 1889277 - RNA, 19 nt, Homo sapiens
  misc_RNA (1)...(19): siRNA sense strand
auaaugaacucagaccuau

SEQ ID NO: 1889278 - RNA, 19 nt, Homo sapiens
  misc_RNA (1)...(19): siRNA sense strand
cauaaugaacucagaccua

SEQ ID NO: 1889279 - RNA, 19 nt, Homo sapiens
  misc_RNA (1)...(19): siRNA sense strand
gaaagucaagagaggaaau

SEQ ID NO: 1889280 - RNA, 19 nt, Homo sapiens
  misc_RNA (1)...(19): siRNA sense strand
ugaaacaugcuugggauaa

SEQ ID NO: 1889281 - RNA, 19 nt, Homo sapiens
  misc_RNA (1)...(19): siRNA sense strand
gaggaagaacgucugagaa

SEQ ID NO: 1889282 - RNA, 19 nt, Homo sapiens
  misc_RNA (1)...(19): siRNA sense strand
ggaagcagcacuggccauu

SEQ ID NO: 1889283 - RNA, 19 nt, Homo sapiens
  misc_RNA (1)...(19): siRNA sense strand
ugaaaccuauugguaccua

SEQ ID NO: 1889284 - RNA, 19 nt, Homo sapiens
  misc_RNA (1)...(19): siRNA sense strand
ucagaccuauugcaaggaa

SEQ ID NO: 1889285 - RNA, 19 nt, Homo sapiens
  misc_RNA (1)...(19): siRNA sense strand
ugagaaggccuuggaagaa

SEQ ID NO: 1889286 - RNA, 19 nt, Homo sapiens
  misc_RNA (1)...(19): siRNA sense strand
gaacgucugagaaauaaaa

SEQ ID NO: 1889287 - RNA, 19 nt, Homo sapiens
  misc_RNA (1)...(19): siRNA sense strand
gaagauaaugacauaagag

SEQ ID NO: 1889288 - RNA, 19 nt, Homo sapiens
  misc_RNA (1)...(19): siRNA sense strand
ugaagucaacauucgauuu

SEQ ID NO: 1889289 - RNA, 19 nt, Homo sapiens
  misc_RNA (1)...(19): siRNA sense strand
aaagagaugaugaaacaug

SEQ ID NO: 1889290 - RNA, 19 nt, Homo sapiens
  misc_RNA (1)...(19): siRNA sense strand
cuugggcaauggugaauuu

SEQ ID NO: 1889291 - RNA, 19 nt, Homo sapiens
  misc_RNA (1)...(19): siRNA sense strand
ucacucacgauccaagaua

SEQ ID NO: 1889292 - RNA, 19 nt, Homo sapiens
  misc_RNA (1)...(19): siRNA sense strand
gaaaccuauugguaccuau

SEQ ID NO: 1889293 - RNA, 19 nt, Homo sapiens
  misc_RNA (1)...(19): siRNA sense strand
agggcuaccuugagacuuu

SEQ ID NO: 1889294 - RNA, 19 nt, Homo sapiens
  misc_RNA (1)...(19): siRNA sense strand
gaaacuacuucagaaaaug

SEQ ID NO: 1889295 - RNA, 19 nt, Homo sapiens
  misc_RNA (1)...(19): siRNA sense strand
agaggaaauucgagcagaa

SEQ ID NO: 1889296 - RNA, 19 nt, Homo sapiens
  misc_RNA (1)...(19): siRNA sense strand
uagaagauguguuaauucc

SEQ ID NO: 1889297 - RNA, 19 nt, Homo sapiens
  misc_RNA (1)...(19): siRNA sense strand
gaaagcaugguugauguca

SEQ ID NO: 1889298 - RNA, 19 nt, Homo sapiens
  misc_RNA (1)...(19): siRNA sense strand
gaggccuacuugcagcaua

SEQ ID NO: 1889299 - RNA, 19 nt, Homo sapiens
  misc_RNA (1)...(19): siRNA sense strand
ucccaaccuuguaggaaua

SEQ ID NO: 1889300 - RNA, 19 nt, Homo sapiens
  misc_RNA (1)...(19): siRNA sense strand
aaaauaagguaguccaaga

SEQ ID NO: 1889301 - RNA, 19 nt, Homo sapiens
  misc_RNA (1)...(19): siRNA sense strand
gaggaaauucgagcagaaa

SEQ ID NO: 1889302 - RNA, 19 nt, Homo sapiens
  misc_RNA (1)...(19): siRNA sense strand
gcgauucacucacgaucca

SEQ ID NO: 1889303 - RNA, 19 nt, Homo sapiens
  misc_RNA (1)...(19): siRNA sense strand
gaccaugaggcaagaaaga

SEQ ID NO: 1889304 - RNA, 19 nt, Homo sapiens
  misc_RNA (1)...(19): siRNA sense strand
ggauugaagacaaccuuga

SEQ ID NO: 1889305 - RNA, 19 nt, Homo sapiens
  misc_RNA (1)...(19): siRNA sense strand
gcaaagauggauugaagac

SEQ ID NO: 1889306 - RNA, 19 nt, Homo sapiens
  misc_RNA (1)...(19): siRNA sense strand
uaauccugcuguucgauga

SEQ ID NO: 1889307 - RNA, 19 nt, Homo sapiens
  misc_RNA (1)...(19): siRNA sense strand
ccucuacuccuacacauga

SEQ ID NO: 1889308 - RNA, 19 nt, Homo sapiens
  misc_RNA (1)...(19): siRNA sense strand
agacaaccuugauuucagu

SEQ ID NO: 1889309 - RNA, 19 nt, Homo sapiens
  misc_RNA (1)...(19): siRNA sense strand
aggaagaacgucugagaaa

SEQ ID NO: 1889310 - RNA, 19 nt, Homo sapiens
  misc_RNA (1)...(19): siRNA sense strand
ggaaaggacacuccccuaa

SEQ ID NO: 1889311 - RNA, 19 nt, Homo sapiens
  misc_RNA (1)...(19): siRNA sense strand
gguggagacccagaagaua

SEQ ID NO: 1889312 - RNA, 19 nt, Homo sapiens
  misc_RNA (1)...(19): siRNA sense strand
gcacuaggagcagaugguu

SEQ ID NO: 1889313 - RNA, 19 nt, Homo sapiens
  misc_RNA (1)...(19): siRNA sense strand
ugacggaccucuaccauua

SEQ ID NO: 1889314 - RNA, 19 nt, Homo sapiens
  misc_RNA (1)...(19): siRNA sense strand
gaguauucuuggacaauua

SEQ ID NO: 1889315 - RNA, 19 nt, Homo sapiens
  misc_RNA (1)...(19): siRNA sense strand
gaaacaguauauuccaaug

SEQ ID NO: 1889316 - RNA, 19 nt, Homo sapiens
  misc_RNA (1)...(19): siRNA sense strand
caacaggacccucuaucua

SEQ ID NO: 1889317 - RNA, 19 nt, Homo sapiens
  misc_RNA (1)...(19): siRNA sense strand
gaacuacaccuacauuugg

SEQ ID NO: 1889318 - RNA, 19 nt, Homo sapiens
  misc_RNA (1)...(19): siRNA sense strand
gagaaacaguauauuccaa

SEQ ID NO: 1889319 - RNA, 19 nt, Homo sapiens
  misc_RNA (1)...(19): siRNA sense strand
ggaacuacaccuacauuug

SEQ ID NO: 1889320 - RNA, 19 nt, Homo sapiens
  misc_RNA (1)...(19): siRNA sense strand
gcccaccacugcccaagua

SEQ ID NO: 1889321 - RNA, 19 nt, Homo sapiens
  misc_RNA (1)...(19): siRNA sense strand
gaaacaggacccuaucaau

SEQ ID NO: 1889322 - RNA, 19 nt, Homo sapiens
  misc_RNA (1)...(19): siRNA sense strand
ccaaauccaugauagucaa

SEQ ID NO: 1889323 - RNA, 19 nt, Homo sapiens
  misc_RNA (1)...(19): siRNA sense strand
gacaauuaaugggaaguuu

SEQ ID NO: 1889324 - RNA, 19 nt, Homo sapiens
  misc_RNA (1)...(19): siRNA sense strand
cgaugggacuggaggagua

SEQ ID NO: 1889325 - RNA, 19 nt, Homo sapiens
  misc_RNA (1)...(19): siRNA sense strand
aaacaggacccuaucaaug

SEQ ID NO: 1889326 - RNA, 19 nt, Homo sapiens
  misc_RNA (1)...(19): siRNA sense strand
auauuucacugucaccuua

SEQ ID NO: 1889327 - RNA, 19 nt, Homo sapiens
  misc_RNA (1)...(19): siRNA sense strand
ggaccucuaccauuacauu

SEQ ID NO: 1889328 - RNA, 19 nt, Homo sapiens
  misc_RNA (1)...(19): siRNA sense strand
aggaguaacuggauauuuc

SEQ ID NO: 1889329 - RNA, 19 nt, Homo sapiens
  misc_RNA (1)...(19): siRNA sense strand
gcaaaugacggaccucuac

SEQ ID NO: 1889330 - RNA, 19 nt, Homo sapiens
  misc_RNA (1)...(19): siRNA sense strand
gcucacagcaucacuuuua

SEQ ID NO: 1889331 - RNA, 19 nt, Homo sapiens
  misc_RNA (1)...(19): siRNA sense strand
acaggacccucuaucuauu

SEQ ID NO: 1889332 - RNA, 19 nt, Homo sapiens
  misc_RNA (1)...(19): siRNA sense strand
gcagaguauucuuggacaa

SEQ ID NO: 1889333 - RNA, 19 nt, Homo sapiens
  misc_RNA (1)...(19): siRNA sense strand
gacgagaaacaguauauuc

SEQ ID NO: 1889334 - RNA, 19 nt, Homo sapiens
  misc_RNA (1)...(19): siRNA sense strand
gaaaacaggauacucauuc

SEQ ID NO: 1889335 - RNA, 19 nt, Homo sapiens
  misc_RNA (1)...(19): siRNA sense strand
cagcaucacuuuuaaacuu

SEQ ID NO: 1889336 - RNA, 19 nt, Homo sapiens
  misc_RNA (1)...(19): siRNA sense strand
gaccucuaccauuacauua

SEQ ID NO: 1889337 - RNA, 19 nt, Homo sapiens
  misc_RNA (1)...(19): siRNA sense strand
ggaguaacuggauauuuca

SEQ ID NO: 1889338 - RNA, 19 nt, Homo sapiens
  misc_RNA (1)...(19): siRNA sense strand
gaggaguaacuggauauuu

SEQ ID NO: 1889339 - RNA, 19 nt, Homo sapiens
  misc_RNA (1)...(19): siRNA sense strand
ugcaggauccuacaccuua

SEQ ID NO: 1889340 - RNA, 19 nt, Homo sapiens
  misc_RNA (1)...(19): siRNA sense strand
ggacgagaaacaguauauu

SEQ ID NO: 1889341 - RNA, 19 nt, Homo sapiens
  misc_RNA (1)...(19): siRNA sense strand
ggacaauuaaugggaaguu

SEQ ID NO: 1889342 - RNA, 19 nt, Homo sapiens
  misc_RNA (1)...(19): siRNA sense strand
caauuaaugggaaguuuca

SEQ ID NO: 1889343 - RNA, 19 nt, Homo sapiens
  misc_RNA (1)...(19): siRNA sense strand
ccucuaccauuacauuaca

SEQ ID NO: 1889344 - RNA, 19 nt, Homo sapiens
  misc_RNA (1)...(19): siRNA sense strand
agaguauucuuggacaauu

SEQ ID NO: 1889345 - RNA, 19 nt, Homo sapiens
  misc_RNA (1)...(19): siRNA sense strand
ggcuacaucugguacaaag

SEQ ID NO: 1889346 - RNA, 19 nt, Homo sapiens
  misc_RNA (1)...(19): siRNA sense strand
ugaaacaggacccuaucaa

SEQ ID NO: 1889347 - RNA, 19 nt, Homo sapiens
  misc_RNA (1)...(19): siRNA sense strand
aaacaggauacucauucua

SEQ ID NO: 1889348 - RNA, 19 nt, Homo sapiens
  misc_RNA (1)...(19): siRNA sense strand
caucccugcugauccagaa

SEQ ID NO: 1889349 - RNA, 19 nt, Homo sapiens
  misc_RNA (1)...(19): siRNA sense strand
gaaccuaagagucggaacu

SEQ ID NO: 1889350 - RNA, 19 nt, Homo sapiens
  misc_RNA (1)...(19): siRNA sense strand
gcaggauccuacaccuuac

SEQ ID NO: 1889351 - RNA, 19 nt, Homo sapiens
  misc_RNA (1)...(19): siRNA sense strand
aacaggacccucuaucuau

SEQ ID NO: 1889352 - RNA, 19 nt, Homo sapiens
  misc_RNA (1)...(19): siRNA sense strand
uaacccaccggcagaguau

SEQ ID NO: 1889353 - RNA, 19 nt, Homo sapiens
  misc_RNA (1)...(19): siRNA sense strand
aacaggacccuaucaaugu

SEQ ID NO: 1889354 - RNA, 19 nt, Homo sapiens
  misc_RNA (1)...(19): siRNA sense strand
cuacaccuuacacaucaua

SEQ ID NO: 1889355 - RNA, 19 nt, Homo sapiens
  misc_RNA (1)...(19): siRNA sense strand
acaggacccuaucaaugug

SEQ ID NO: 1889356 - RNA, 19 nt, Homo sapiens
  misc_RNA (1)...(19): siRNA sense strand
aaaugaaacaggacccuau

SEQ ID NO: 1889357 - RNA, 19 nt, Homo sapiens
  misc_RNA (1)...(19): siRNA sense strand
gauauuucacugucaccuu

SEQ ID NO: 1889358 - RNA, 19 nt, Homo sapiens
  misc_RNA (1)...(19): siRNA sense strand
ggaggaguaacuggauauu

SEQ ID NO: 1889359 - RNA, 19 nt, Homo sapiens
  misc_RNA (1)...(19): siRNA sense strand
gauccuacaccuuacacau

SEQ ID NO: 1889360 - RNA, 19 nt, Homo sapiens
  misc_RNA (1)...(19): siRNA sense strand
cuggaggaguaacuggaua

SEQ ID NO: 1889361 - RNA, 19 nt, Homo sapiens
  misc_RNA (1)...(19): siRNA sense strand
aacaguauauuccaaugca

SEQ ID NO: 1889362 - RNA, 19 nt, Homo sapiens
  misc_RNA (1)...(19): siRNA sense strand
ugccuuacaucaccaucaa

SEQ ID NO: 1889363 - RNA, 19 nt, Homo sapiens
  misc_RNA (1)...(19): siRNA sense strand
ccaacaggacccucuaucu

SEQ ID NO: 1889364 - RNA, 19 nt, Homo sapiens
  misc_RNA (1)...(19): siRNA sense strand
uaacuggauauuucacugu

SEQ ID NO: 1889365 - RNA, 19 nt, Homo sapiens
  misc_RNA (1)...(19): siRNA sense strand
gacagcaucuccccagguu

SEQ ID NO: 1889366 - RNA, 19 nt, Homo sapiens
  misc_RNA (1)...(19): siRNA sense strand
gaagccaagccacccaaag

SEQ ID NO: 1889367 - RNA, 19 nt, Homo sapiens
  misc_RNA (1)...(19): siRNA sense strand
uccuacaccuuacacauca

SEQ ID NO: 1889368 - RNA, 19 nt, Homo sapiens
  misc_RNA (1)...(19): siRNA sense strand
caaauccaugauagucaaa

SEQ ID NO: 1889369 - RNA, 19 nt, Homo sapiens
  misc_RNA (1)...(19): siRNA sense strand
ccagaccuccccagaauuu

SEQ ID NO: 1889370 - RNA, 19 nt, Homo sapiens
  misc_RNA (1)...(19): siRNA sense strand
gaugggacuggaggaguaa

SEQ ID NO: 1889371 - RNA, 19 nt, Homo sapiens
  misc_RNA (1)...(19): siRNA sense strand
cgagaaacaguauauucca

SEQ ID NO: 1889372 - RNA, 19 nt, Homo sapiens
  misc_RNA (1)...(19): siRNA sense strand
acggucaaauuauauaugg

SEQ ID NO: 1889373 - RNA, 19 nt, Homo sapiens
  misc_RNA (1)...(19): siRNA sense strand
ggcaaaugacggaccucua

SEQ ID NO: 1889374 - RNA, 19 nt, Homo sapiens
  misc_RNA (1)...(19): siRNA sense strand
cggaacuacaccuacauuu

SEQ ID NO: 1889375 - RNA, 19 nt, Homo sapiens
  misc_RNA (1)...(19): siRNA sense strand
ccuaagagucggaacuaca

SEQ ID NO: 1889376 - RNA, 19 nt, Homo sapiens
  misc_RNA (1)...(19): siRNA sense strand
cuaacccaccggcagagua

SEQ ID NO: 1889377 - RNA, 19 nt, Homo sapiens
  misc_RNA (1)...(19): siRNA sense strand
ggauguucuucuacuuguc

SEQ ID NO: 1889378 - RNA, 19 nt, Homo sapiens
  misc_RNA (1)...(19): siRNA sense strand
caugauagucaaagucucu

SEQ ID NO: 1889379 - RNA, 19 nt, Homo sapiens
  misc_RNA (1)...(19): siRNA sense strand
caguggacgagaaacagua

SEQ ID NO: 1889380 - RNA, 19 nt, Homo sapiens
  misc_RNA (1)...(19): siRNA sense strand
guccagaccuccccagaau

SEQ ID NO: 1889381 - RNA, 19 nt, Homo sapiens
  misc_RNA (1)...(19): siRNA sense strand
agucggaacuacaccuaca

SEQ ID NO: 1889382 - RNA, 19 nt, Homo sapiens
  misc_RNA (1)...(19): siRNA sense strand
aaaccaacaggacccucua

SEQ ID NO: 1889383 - RNA, 19 nt, Homo sapiens
  misc_RNA (1)...(19): siRNA sense strand
gaaugucacacaggaggau

SEQ ID NO: 1889384 - RNA, 19 nt, Homo sapiens
  misc_RNA (1)...(19): siRNA sense strand
uaccuaugcugguccaaac

SEQ ID NO: 1889385 - RNA, 19 nt, Homo sapiens
  misc_RNA (1)...(19): siRNA sense strand
aggauguucuucuacuugu

SEQ ID NO: 1889386 - RNA, 19 nt, Homo sapiens
  misc_RNA (1)...(19): siRNA sense strand
cuacaguggacgagaaaca

SEQ ID NO: 1889387 - RNA, 19 nt, Homo sapiens
  misc_RNA (1)...(19): siRNA sense strand
uauaugggccugccuacag

SEQ ID NO: 1889388 - RNA, 19 nt, Homo sapiens
  misc_RNA (1)...(19): siRNA sense strand
gcauuugccuugccuguaa

SEQ ID NO: 1889389 - RNA, 19 nt, Homo sapiens
  misc_RNA (1)...(19): siRNA sense strand
acaacaagcuuccaagaug

SEQ ID NO: 1889390 - RNA, 19 nt, Homo sapiens
  misc_RNA (1)...(19): siRNA sense strand
gaaguggccgcacaguaua

SEQ ID NO: 1889391 - RNA, 19 nt, Homo sapiens
  misc_RNA (1)...(19): siRNA sense strand
ugacagugcugacaagaag

SEQ ID NO: 1889392 - RNA, 19 nt, Homo sapiens
  misc_RNA (1)...(19): siRNA sense strand
guaaaggucagacacauuc

SEQ ID NO: 1889393 - RNA, 19 nt, Homo sapiens
  misc_RNA (1)...(19): siRNA sense strand
guucagcguucaacaacaa

SEQ ID NO: 1889394 - RNA, 19 nt, Homo sapiens
  misc_RNA (1)...(19): siRNA sense strand
ggauaagccuguguuuaca

SEQ ID NO: 1889395 - RNA, 19 nt, Homo sapiens
  misc_RNA (1)...(19): siRNA sense strand
guuaaagucugggaugaga

SEQ ID NO: 1889396 - RNA, 19 nt, Homo sapiens
  misc_RNA (1)...(19): siRNA sense strand
ugaaguggccgcacaguau

SEQ ID NO: 1889397 - RNA, 19 nt, Homo sapiens
  misc_RNA (1)...(19): siRNA sense strand
caacaacaagcuuccaaga

SEQ ID NO: 1889398 - RNA, 19 nt, Homo sapiens
  misc_RNA (1)...(19): siRNA sense strand
ggugggaccauuucaagaa

SEQ ID NO: 1889399 - RNA, 19 nt, Homo sapiens
  misc_RNA (1)...(19): siRNA sense strand
uuacagacccaccgguuaa

SEQ ID NO: 1889400 - RNA, 19 nt, Homo sapiens
  misc_RNA (1)...(19): siRNA sense strand
caaaggugguggcaaugca

SEQ ID NO: 1889401 - RNA, 19 nt, Homo sapiens
  misc_RNA (1)...(19): siRNA sense strand
uaaagucugggaugagauu

SEQ ID NO: 1889402 - RNA, 19 nt, Homo sapiens
  misc_RNA (1)...(19): siRNA sense strand
cacaguauagugaagauaa

SEQ ID NO: 1889403 - RNA, 19 nt, Homo sapiens
  misc_RNA (1)...(19): siRNA sense strand
gcacaguauagugaagaua

SEQ ID NO: 1889404 - RNA, 19 nt, Homo sapiens
  misc_RNA (1)...(19): siRNA sense strand
gcaguaaaggucagacaca

SEQ ID NO: 1889405 - RNA, 19 nt, Homo sapiens
  misc_RNA (1)...(19): siRNA sense strand
ggagugacagugcugacaa

SEQ ID NO: 1889406 - RNA, 19 nt, Homo sapiens
  misc_RNA (1)...(19): siRNA sense strand
ucccaaaggugguggcaau

SEQ ID NO: 1889407 - RNA, 19 nt, Homo sapiens
  misc_RNA (1)...(19): siRNA sense strand
uggauaagccuguguuuac

SEQ ID NO: 1889408 - RNA, 19 nt, Homo sapiens
  misc_RNA (1)...(19): siRNA sense strand
gagugacagugcugacaag

SEQ ID NO: 1889409 - RNA, 19 nt, Homo sapiens
  misc_RNA (1)...(19): siRNA sense strand
ggucgaaggaagaaaauaa

SEQ ID NO: 1889410 - RNA, 19 nt, Homo sapiens
  misc_RNA (1)...(19): siRNA sense strand
gauggauaagccuguguuu

SEQ ID NO: 1889411 - RNA, 19 nt, Homo sapiens
  misc_RNA (1)...(19): siRNA sense strand
acccaccgguuaagacaaa

SEQ ID NO: 1889412 - RNA, 19 nt, Homo sapiens
  misc_RNA (1)...(19): siRNA sense strand
ggauggauaagccuguguu

SEQ ID NO: 1889413 - RNA, 19 nt, Homo sapiens
  misc_RNA (1)...(19): siRNA sense strand
caguaaaggucagacacau

SEQ ID NO: 1889414 - RNA, 19 nt, Homo sapiens
  misc_RNA (1)...(19): siRNA sense strand
gagcagccucugggaguga

SEQ ID NO: 1889415 - RNA, 19 nt, Homo sapiens
  misc_RNA (1)...(19): siRNA sense strand
gggaccauuucaagaagca

SEQ ID NO: 1889416 - RNA, 19 nt, Homo sapiens
  misc_RNA (1)...(19): siRNA sense strand
aaguuaaagucugggauga

SEQ ID NO: 1889417 - RNA, 19 nt, Homo sapiens
  misc_RNA (1)...(19): siRNA sense strand
ggugguggcaaugcaguaa

SEQ ID NO: 1889418 - RNA, 19 nt, Homo sapiens
  misc_RNA (1)...(19): siRNA sense strand
ccuguaagugggauggaua

SEQ ID NO: 1889419 - RNA, 19 nt, Homo sapiens
  misc_RNA (1)...(19): siRNA sense strand
gugggaccauuucaagaag

SEQ ID NO: 1889420 - RNA, 19 nt, Homo sapiens
  misc_RNA (1)...(19): siRNA sense strand
aaaggucagacacauucua

SEQ ID NO: 1889421 - RNA, 19 nt, Homo sapiens
  misc_RNA (1)...(19): siRNA sense strand
gcgguucagcguucaacaa

SEQ ID NO: 1889422 - RNA, 19 nt, Homo sapiens
  misc_RNA (1)...(19): siRNA sense strand
ggaagccauggaaaaguua

SEQ ID NO: 1889423 - RNA, 19 nt, Homo sapiens
  misc_RNA (1)...(19): siRNA sense strand
ugacaagaaggcucaaggu

SEQ ID NO: 1889424 - RNA, 19 nt, Homo sapiens
  misc_RNA (1)...(19): siRNA sense strand
uuuacagacccaccgguua

SEQ ID NO: 1889425 - RNA, 19 nt, Homo sapiens
  misc_RNA (1)...(19): siRNA sense strand
gugacagugcugacaagaa

SEQ ID NO: 1889426 - RNA, 19 nt, Homo sapiens
  misc_RNA (1)...(19): siRNA sense strand
gaacagacuccuccaacua

SEQ ID NO: 1889427 - RNA, 19 nt, Homo sapiens
  misc_RNA (1)...(19): siRNA sense strand
ucaaggagcugcagaacuu

SEQ ID NO: 1889428 - RNA, 19 nt, Homo sapiens
  misc_RNA (1)...(19): siRNA sense strand
ggagagagcgguucuacaa

SEQ ID NO: 1889429 - RNA, 19 nt, Homo sapiens
  misc_RNA (1)...(19): siRNA sense strand
ggccagagauggacgugua

SEQ ID NO: 1889430 - RNA, 19 nt, Homo sapiens
  misc_RNA (1)...(19): siRNA sense strand
gacaugggccagccacuua

SEQ ID NO: 1889431 - RNA, 19 nt, Homo sapiens
  misc_RNA (1)...(19): siRNA sense strand
acacggaguuugcguuuga

SEQ ID NO: 1889432 - RNA, 19 nt, Homo sapiens
  misc_RNA (1)...(19): siRNA sense strand
gaaguucgcccgugaugug

SEQ ID NO: 1889433 - RNA, 19 nt, Homo sapiens
  misc_RNA (1)...(19): siRNA sense strand
gagagcgguucuacaaguu

SEQ ID NO: 1889434 - RNA, 19 nt, Homo sapiens
  misc_RNA (1)...(19): siRNA sense strand
agacgaggcugcugagaug

SEQ ID NO: 1889435 - RNA, 19 nt, Homo sapiens
  misc_RNA (1)...(19): siRNA sense strand
ugaaggagcucaacaucca

SEQ ID NO: 1889436 - RNA, 19 nt, Homo sapiens
  misc_RNA (1)...(19): siRNA sense strand
gcacggagggucuggagaa

SEQ ID NO: 1889437 - RNA, 19 nt, Homo sapiens
  misc_RNA (1)...(19): siRNA sense strand
ggaguuugcguuugaggua

SEQ ID NO: 1889438 - RNA, 19 nt, Homo sapiens
  misc_RNA (1)...(19): siRNA sense strand
ggacacggaguuugcguuu

SEQ ID NO: 1889439 - RNA, 19 nt, Homo sapiens
  misc_RNA (1)...(19): siRNA sense strand
gcagccagcuccugaaggu

SEQ ID NO: 1889440 - RNA, 19 nt, Homo sapiens
  misc_RNA (1)...(19): siRNA sense strand
gcaauacacuagaccucau

SEQ ID NO: 1889441 - RNA, 19 nt, Homo sapiens
  misc_RNA (1)...(19): siRNA sense strand
uaugaugccuccuccaaga

SEQ ID NO: 1889442 - RNA, 19 nt, Homo sapiens
  misc_RNA (1)...(19): siRNA sense strand
ggaagcggcucaacaucag

SEQ ID NO: 1889443 - RNA, 19 nt, Homo sapiens
  misc_RNA (1)...(19): siRNA sense strand
cugcugagauggaggauga

SEQ ID NO: 1889444 - RNA, 19 nt, Homo sapiens
  misc_RNA (1)...(19): siRNA sense strand
gaccgcugcuucuccauug

SEQ ID NO: 1889445 - RNA, 19 nt, Homo sapiens
  misc_RNA (1)...(19): siRNA sense strand
cggagggucuggagaaguu

SEQ ID NO: 1889446 - RNA, 19 nt, Homo sapiens
  misc_RNA (1)...(19): siRNA sense strand
gccgaugccuggagcuuga

SEQ ID NO: 1889447 - RNA, 19 nt, Homo sapiens
  misc_RNA (1)...(19): siRNA sense strand
cacaggagcucucugacau

SEQ ID NO: 1889448 - RNA, 19 nt, Homo sapiens
  misc_RNA (1)...(19): siRNA sense strand
gcacaggagcucucugaca

SEQ ID NO: 1889449 - RNA, 19 nt, Homo sapiens
  misc_RNA (1)...(19): siRNA sense strand
ggaccagcgucagaagcua

SEQ ID NO: 1889450 - RNA, 19 nt, Homo sapiens
  misc_RNA (1)...(19): siRNA sense strand
gcacggaagcggcucaaca

SEQ ID NO: 1889451 - RNA, 19 nt, Homo sapiens
  misc_RNA (1)...(19): siRNA sense strand
aaacaaggacaacaagaug

SEQ ID NO: 1889452 - RNA, 19 nt, Homo sapiens
  misc_RNA (1)...(19): siRNA sense strand
cuacagcacuggauucacu

SEQ ID NO: 1889453 - RNA, 19 nt, Homo sapiens
  misc_RNA (1)...(19): siRNA sense strand
gaagcuacagcacuggauu

SEQ ID NO: 1889454 - RNA, 19 nt, Homo sapiens
  misc_RNA (1)...(19): siRNA sense strand
gaucguggcccugaauuuc

SEQ ID NO: 1889455 - RNA, 19 nt, Homo sapiens
  misc_RNA (1)...(19): siRNA sense strand
gcuauacuuucacuuccaa

SEQ ID NO: 1889456 - RNA, 19 nt, Homo sapiens
  misc_RNA (1)...(19): siRNA sense strand
agagagcgguucuacaagu

SEQ ID NO: 1889457 - RNA, 19 nt, Homo sapiens
  misc_RNA (1)...(19): siRNA sense strand
gcaaggauaccgccauguc

SEQ ID NO: 1889458 - RNA, 19 nt, Homo sapiens
  misc_RNA (1)...(19): siRNA sense strand
ggacaugggccagccacuu

SEQ ID NO: 1889459 - RNA, 19 nt, Homo sapiens
  misc_RNA (1)...(19): siRNA sense strand
uaccacggcuauacuuuca

SEQ ID NO: 1889460 - RNA, 19 nt, Homo sapiens
  misc_RNA (1)...(19): siRNA sense strand
cagccacccucuuugugaa

SEQ ID NO: 1889461 - RNA, 19 nt, Homo sapiens
  misc_RNA (1)...(19): siRNA sense strand
acaacaagaugagcuucaa

SEQ ID NO: 1889462 - RNA, 19 nt, Homo sapiens
  misc_RNA (1)...(19): siRNA sense strand
agacugcugucaucaccaa

SEQ ID NO: 1889463 - RNA, 19 nt, Homo sapiens
  misc_RNA (1)...(19): siRNA sense strand
ggaccgcugcuucuccauu

SEQ ID NO: 1889464 - RNA, 19 nt, Homo sapiens
  misc_RNA (1)...(19): siRNA sense strand
gagaaguucgcccgugaug

SEQ ID NO: 1889465 - RNA, 19 nt, Homo sapiens
  misc_RNA (1)...(19): siRNA sense strand
caagaucauccaccacuca

SEQ ID NO: 1889466 - RNA, 19 nt, Homo sapiens
  misc_RNA (1)...(19): siRNA sense strand
gaccagcgcaauacacuag

SEQ ID NO: 1889467 - RNA, 19 nt, Homo sapiens
  misc_RNA (1)...(19): siRNA sense strand
gauugaggccuucuacaag

SEQ ID NO: 1889468 - RNA, 19 nt, Homo sapiens
  misc_RNA (1)...(19): siRNA sense strand
ggaccagcgcaauacacua

SEQ ID NO: 1889469 - RNA, 19 nt, Homo sapiens
  misc_RNA (1)...(19): siRNA sense strand
gaacagccucaagcaagga

SEQ ID NO: 1889470 - RNA, 19 nt, Homo sapiens
  misc_RNA (1)...(19): siRNA sense strand
ccaaaagucaacaagaaua

SEQ ID NO: 1889471 - RNA, 19 nt, Homo sapiens
  misc_RNA (1)...(19): siRNA sense strand
uagcacaggagcucucuga

SEQ ID NO: 1889472 - RNA, 19 nt, Homo sapiens
  misc_RNA (1)...(19): siRNA sense strand
ucuacgagauggcguccuu

SEQ ID NO: 1889473 - RNA, 19 nt, Homo sapiens
  misc_RNA (1)...(19): siRNA sense strand
ugacuucauuggccagagu

SEQ ID NO: 1889474 - RNA, 19 nt, Homo sapiens
  misc_RNA (1)...(19): siRNA sense strand
ugagaaccgugcccuucga

SEQ ID NO: 1889475 - RNA, 19 nt, Homo sapiens
  misc_RNA (1)...(19): siRNA sense strand
ccagguggacgacagcuau

SEQ ID NO: 1889476 - RNA, 19 nt, Homo sapiens
  misc_RNA (1)...(19): siRNA sense strand
gaugccuccuccaagaaug

SEQ ID NO: 1889477 - RNA, 19 nt, Homo sapiens
  misc_RNA (1)...(19): siRNA sense strand
cggaagcggcucaacauca

SEQ ID NO: 1889478 - RNA, 19 nt, Homo sapiens
  misc_RNA (1)...(19): siRNA sense strand
gacaggccuucuacgagau

SEQ ID NO: 1889479 - RNA, 19 nt, Homo sapiens
  misc_RNA (1)...(19): siRNA sense strand
auugaggccuucuacaaga

SEQ ID NO: 1889480 - RNA, 19 nt, Homo sapiens
  misc_RNA (1)...(19): siRNA sense strand
ggagauugaggccuucuac

SEQ ID NO: 1889481 - RNA, 19 nt, Homo sapiens
  misc_RNA (1)...(19): siRNA sense strand
ucagccacccucuuuguga

SEQ ID NO: 1889482 - RNA, 19 nt, Homo sapiens
  misc_RNA (1)...(19): siRNA sense strand
caucagccacccucuuugu

SEQ ID NO: 1889483 - RNA, 19 nt, Homo sapiens
  misc_RNA (1)...(19): siRNA sense strand
gcugucaucaccaacaaug

SEQ ID NO: 1889484 - RNA, 19 nt, Homo sapiens
  misc_RNA (1)...(19): siRNA sense strand
caaccaggaaccaaucauc

SEQ ID NO: 1889485 - RNA, 19 nt, Homo sapiens
  misc_RNA (1)...(19): siRNA sense strand
gccagccacuuagccacua

SEQ ID NO: 1889486 - RNA, 19 nt, Homo sapiens
  misc_RNA (1)...(19): siRNA sense strand
agauugaggccuucuacaa

SEQ ID NO: 1889487 - RNA, 19 nt, Homo sapiens
  misc_RNA (1)...(19): siRNA sense strand
ggacggcuuccucauguac

SEQ ID NO: 1889488 - RNA, 19 nt, Homo sapiens
  misc_RNA (1)...(19): siRNA sense strand
agaucucccuccaggacua

SEQ ID NO: 1889489 - RNA, 19 nt, Homo sapiens
  misc_RNA (1)...(19): siRNA sense strand
ccuacaggaugaugaggau

SEQ ID NO: 1889490 - RNA, 19 nt, Homo sapiens
  misc_RNA (1)...(19): siRNA sense strand
ccacggcuauacuuucacu

SEQ ID NO: 1889491 - RNA, 19 nt, Homo sapiens
  misc_RNA (1)...(19): siRNA sense strand
gacaacaagaugagcuuca

SEQ ID NO: 1889492 - RNA, 19 nt, Homo sapiens
  misc_RNA (1)...(19): siRNA sense strand
caaagugacaguggagauc

SEQ ID NO: 1889493 - RNA, 19 nt, Homo sapiens
  misc_RNA (1)...(19): siRNA sense strand
caacaucagggucauuucg

SEQ ID NO: 1889494 - RNA, 19 nt, Homo sapiens
  misc_RNA (1)...(19): siRNA sense strand
gcuaugcccggaagaucuu

SEQ ID NO: 1889495 - RNA, 19 nt, Homo sapiens
  misc_RNA (1)...(19): siRNA sense strand
ccucuucacacaacaccua

SEQ ID NO: 1889496 - RNA, 19 nt, Homo sapiens
  misc_RNA (1)...(19): siRNA sense strand
agaacagacuccuccaacu

SEQ ID NO: 1889497 - RNA, 19 nt, Homo sapiens
  misc_RNA (1)...(19): siRNA sense strand
acaggaugaugaggaucua

SEQ ID NO: 1889498 - RNA, 19 nt, Homo sapiens
  misc_RNA (1)...(19): siRNA sense strand
gacacggaguuugcguuug

SEQ ID NO: 1889499 - RNA, 19 nt, Homo sapiens
  misc_RNA (1)...(19): siRNA sense strand
agaaucaggaaacggcuuu

SEQ ID NO: 1889500 - RNA, 19 nt, Homo sapiens
  misc_RNA (1)...(19): siRNA sense strand
uggaucaguuagugacguu

SEQ ID NO: 1889501 - RNA, 19 nt, Homo sapiens
  misc_RNA (1)...(19): siRNA sense strand
gaggagagagcgguucuac

SEQ ID NO: 1889502 - RNA, 19 nt, Homo sapiens
  misc_RNA (1)...(19): siRNA sense strand
ccgccagacugcugucauc

SEQ ID NO: 1889503 - RNA, 19 nt, Homo sapiens
  misc_RNA (1)...(19): siRNA sense strand
ggucauuuacugcaagagu

SEQ ID NO: 1889504 - RNA, 19 nt, Homo sapiens
  misc_RNA (1)...(19): siRNA sense strand
gaagacgaggcugcugaga

SEQ ID NO: 1889505 - RNA, 19 nt, Homo sapiens
  misc_RNA (1)...(19): siRNA sense strand
aaucaucuaccacggcuau

SEQ ID NO: 1889506 - RNA, 19 nt, Homo sapiens
  misc_RNA (1)...(19): siRNA sense strand
uccaucagccacccucuuu

SEQ ID NO: 1889507 - RNA, 19 nt, Homo sapiens
  misc_RNA (1)...(19): siRNA sense strand
ccaaagugacaguggagau

SEQ ID NO: 1889508 - RNA, 19 nt, Homo sapiens
  misc_RNA (1)...(19): siRNA sense strand
ugccaaaagucaacaagaa

SEQ ID NO: 1889509 - RNA, 19 nt, Homo sapiens
  misc_RNA (1)...(19): siRNA sense strand
ggcccugaauuuccagaca

SEQ ID NO: 1889510 - RNA, 19 nt, Homo sapiens
  misc_RNA (1)...(19): siRNA sense strand
ucagggccauccgggacua

SEQ ID NO: 1889511 - RNA, 19 nt, Homo sapiens
  misc_RNA (1)...(19): siRNA sense strand
ucaaggaccagcgcaauac

SEQ ID NO: 1889512 - RNA, 19 nt, Homo sapiens
  misc_RNA (1)...(19): siRNA sense strand
gcuucuccauugucuucaa

SEQ ID NO: 1889513 - RNA, 19 nt, Homo sapiens
  misc_RNA (1)...(19): siRNA sense strand
uacuuucacuuccaagauc

SEQ ID NO: 1889514 - RNA, 19 nt, Homo sapiens
  misc_RNA (1)...(19): siRNA sense strand
gagagagcgguucuacaag

SEQ ID NO: 1889515 - RNA, 19 nt, Homo sapiens
  misc_RNA (1)...(19): siRNA sense strand
ccaggaaccaaucaucuac

SEQ ID NO: 1889516 - RNA, 19 nt, Homo sapiens
  misc_RNA (1)...(19): siRNA sense strand
ggagaaguucgcccgugau

SEQ ID NO: 1889517 - RNA, 19 nt, Homo sapiens
  misc_RNA (1)...(19): siRNA sense strand
guccaccucaugucuaaga

SEQ ID NO: 1889518 - RNA, 19 nt, Homo sapiens
  misc_RNA (1)...(19): siRNA sense strand
gccagcuccugaaggugaa

SEQ ID NO: 1889519 - RNA, 19 nt, Homo sapiens
  misc_RNA (1)...(19): siRNA sense strand
gaaugaagcugcuggguuu

SEQ ID NO: 1889520 - RNA, 19 nt, Homo sapiens
  misc_RNA (1)...(19): siRNA sense strand
gaaacagccuugaaagcua

SEQ ID NO: 1889521 - RNA, 19 nt, Homo sapiens
  misc_RNA (1)...(19): siRNA sense strand
gaucgaaaccaaaguagua

SEQ ID NO: 1889522 - RNA, 19 nt, Homo sapiens
  misc_RNA (1)...(19): siRNA sense strand
guggucaucucuaggauua

SEQ ID NO: 1889523 - RNA, 19 nt, Homo sapiens
  misc_RNA (1)...(19): siRNA sense strand
uacagaaacugaaccauuu

SEQ ID NO: 1889524 - RNA, 19 nt, Homo sapiens
  misc_RNA (1)...(19): siRNA sense strand
caccaaagaucccauauuc

SEQ ID NO: 1889525 - RNA, 19 nt, Homo sapiens
  misc_RNA (1)...(19): siRNA sense strand
gaaacuagcaccaugucua

SEQ ID NO: 1889526 - RNA, 19 nt, Homo sapiens
  misc_RNA (1)...(19): siRNA sense strand
gaaauuaucaccaccaaag

SEQ ID NO: 1889527 - RNA, 19 nt, Homo sapiens
  misc_RNA (1)...(19): siRNA sense strand
ccaaagaucccauauucaa

SEQ ID NO: 1889528 - RNA, 19 nt, Homo sapiens
  misc_RNA (1)...(19): siRNA sense strand
gaaacugaaccauuuguug

SEQ ID NO: 1889529 - RNA, 19 nt, Homo sapiens
  misc_RNA (1)...(19): siRNA sense strand
cagaagagcuuuccaucca

SEQ ID NO: 1889530 - RNA, 19 nt, Homo sapiens
  misc_RNA (1)...(19): siRNA sense strand
gaggagaaggccaaugaua

SEQ ID NO: 1889531 - RNA, 19 nt, Homo sapiens
  misc_RNA (1)...(19): siRNA sense strand
caggugucaugcagaauua

SEQ ID NO: 1889532 - RNA, 19 nt, Homo sapiens
  misc_RNA (1)...(19): siRNA sense strand
gaaaugaucgaaaccaaag

SEQ ID NO: 1889533 - RNA, 19 nt, Homo sapiens
  misc_RNA (1)...(19): siRNA sense strand
cagaauuuauugucaguga

SEQ ID NO: 1889534 - RNA, 19 nt, Homo sapiens
  misc_RNA (1)...(19): siRNA sense strand
uguuacaacucaucugaua

SEQ ID NO: 1889535 - RNA, 19 nt, Homo sapiens
  misc_RNA (1)...(19): siRNA sense strand
ggaaaugaucgaaaccaaa

SEQ ID NO: 1889536 - RNA, 19 nt, Homo sapiens
  misc_RNA (1)...(19): siRNA sense strand
caacacaaacaacagaauu

SEQ ID NO: 1889537 - RNA, 19 nt, Homo sapiens
  misc_RNA (1)...(19): siRNA sense strand
ccuggaagcugaaguuuag

SEQ ID NO: 1889538 - RNA, 19 nt, Homo sapiens
  misc_RNA (1)...(19): siRNA sense strand
ccagugagccgacaguuug

SEQ ID NO: 1889539 - RNA, 19 nt, Homo sapiens
  misc_RNA (1)...(19): siRNA sense strand
aaacugaaccauuuguuga

SEQ ID NO: 1889540 - RNA, 19 nt, Homo sapiens
  misc_RNA (1)...(19): siRNA sense strand
caaacaagaaucagcagaa

SEQ ID NO: 1889541 - RNA, 19 nt, Homo sapiens
  misc_RNA (1)...(19): siRNA sense strand
uagcaacccuaaugaggaa

SEQ ID NO: 1889542 - RNA, 19 nt, Homo sapiens
  misc_RNA (1)...(19): siRNA sense strand
aaaccaaaguaguaaagga

SEQ ID NO: 1889543 - RNA, 19 nt, Homo sapiens
  misc_RNA (1)...(19): siRNA sense strand
cuacagaaacugaaccauu

SEQ ID NO: 1889544 - RNA, 19 nt, Homo sapiens
  misc_RNA (1)...(19): siRNA sense strand
ccaaugauagcaacccuaa

SEQ ID NO: 1889545 - RNA, 19 nt, Homo sapiens
  misc_RNA (1)...(19): siRNA sense strand
caucugauacuuggacuaa

SEQ ID NO: 1889546 - RNA, 19 nt, Homo sapiens
  misc_RNA (1)...(19): siRNA sense strand
uggacuaacucgugcauuc

SEQ ID NO: 1889547 - RNA, 19 nt, Homo sapiens
  misc_RNA (1)...(19): siRNA sense strand
cuaaugaggaaucaaagaa

SEQ ID NO: 1889548 - RNA, 19 nt, Homo sapiens
  misc_RNA (1)...(19): siRNA sense strand
agaaggaaaugaucgaaac

SEQ ID NO: 1889549 - RNA, 19 nt, Homo sapiens
  misc_RNA (1)...(19): siRNA sense strand
aaauaaagcagcauucaag

SEQ ID NO: 1889550 - RNA, 19 nt, Homo sapiens
  misc_RNA (1)...(19): siRNA sense strand
cagaaauuaucaccaccaa

SEQ ID NO: 1889551 - RNA, 19 nt, Homo sapiens
  misc_RNA (1)...(19): siRNA sense strand
aaacaagaaucagcagaag

SEQ ID NO: 1889552 - RNA, 19 nt, Homo sapiens
  misc_RNA (1)...(19): siRNA sense strand
guccaagaguccaagcaaa

SEQ ID NO: 1889553 - RNA, 19 nt, Homo sapiens
  misc_RNA (1)...(19): siRNA sense strand
acaagaaucagcagaagga

SEQ ID NO: 1889554 - RNA, 19 nt, Homo sapiens
  misc_RNA (1)...(19): siRNA sense strand
gcaaggaccaaguugaaac

SEQ ID NO: 1889555 - RNA, 19 nt, Homo sapiens
  misc_RNA (1)...(19): siRNA sense strand
aaugauagcaacccuaaug

SEQ ID NO: 1889556 - RNA, 19 nt, Homo sapiens
  misc_RNA (1)...(19): siRNA sense strand
agaaucagcagaaggaaau

SEQ ID NO: 1889557 - RNA, 19 nt, Homo sapiens
  misc_RNA (1)...(19): siRNA sense strand
ccaggugucaugcagaauu

SEQ ID NO: 1889558 - RNA, 19 nt, Homo sapiens
  misc_RNA (1)...(19): siRNA sense strand
ccaccaaagaucccauauu

SEQ ID NO: 1889559 - RNA, 19 nt, Homo sapiens
  misc_RNA (1)...(19): siRNA sense strand
ggguggguguccugauuug

SEQ ID NO: 1889560 - RNA, 19 nt, Homo sapiens
  misc_RNA (1)...(19): siRNA sense strand
ggagaaggccaaugauagc

SEQ ID NO: 1889561 - RNA, 19 nt, Homo sapiens
  misc_RNA (1)...(19): siRNA sense strand
caccaugucuacagaaacu

SEQ ID NO: 1889562 - RNA, 19 nt, Homo sapiens
  misc_RNA (1)...(19): siRNA sense strand
gcaacacaaacaacagaau

SEQ ID NO: 1889563 - RNA, 19 nt, Homo sapiens
  misc_RNA (1)...(19): siRNA sense strand
aaagaucccauauucaaca

SEQ ID NO: 1889564 - RNA, 19 nt, Homo sapiens
  misc_RNA (1)...(19): siRNA sense strand
gcuccagcuuccacuucua

SEQ ID NO: 1889565 - RNA, 19 nt, Homo sapiens
  misc_RNA (1)...(19): siRNA sense strand
gaagaguccaagaguccaa

SEQ ID NO: 1889566 - RNA, 19 nt, Homo sapiens
  misc_RNA (1)...(19): siRNA sense strand
cggcaaggaccaaguugaa

SEQ ID NO: 1889567 - RNA, 19 nt, Homo sapiens
  misc_RNA (1)...(19): siRNA sense strand
gccuggaagcugaaguuua

SEQ ID NO: 1889568 - RNA, 19 nt, Homo sapiens
  misc_RNA (1)...(19): siRNA sense strand
cagaaggaaaugaucgaaa

SEQ ID NO: 1889569 - RNA, 19 nt, Homo sapiens
  misc_RNA (1)...(19): siRNA sense strand
gaaaauaaagcagcauuca

SEQ ID NO: 1889570 - RNA, 19 nt, Homo sapiens
  misc_RNA (1)...(19): siRNA sense strand
gaauuucacagaagcuaag

SEQ ID NO: 1889571 - RNA, 19 nt, Homo sapiens
  misc_RNA (1)...(19): siRNA sense strand
cuuugaaacuugcagcuau

SEQ ID NO: 1889572 - RNA, 19 nt, Homo sapiens
  misc_RNA (1)...(19): siRNA sense strand
caaacugcaacacaaacaa

SEQ ID NO: 1889573 - RNA, 19 nt, Homo sapiens
  misc_RNA (1)...(19): siRNA sense strand
gcagaaggaaaugaucgaa

SEQ ID NO: 1889574 - RNA, 19 nt, Homo sapiens
  misc_RNA (1)...(19): siRNA sense strand
ucucuaggauuagcccaaa

SEQ ID NO: 1889575 - RNA, 19 nt, Homo sapiens
  misc_RNA (1)...(19): siRNA sense strand
aaugaucgaaaccaaagua

SEQ ID NO: 1889576 - RNA, 19 nt, Homo sapiens
  misc_RNA (1)...(19): siRNA sense strand
aggaaaugaucgaaaccaa

SEQ ID NO: 1889577 - RNA, 19 nt, Homo sapiens
  misc_RNA (1)...(19): siRNA sense strand
caaggaccaaguugaaaca

SEQ ID NO: 1889578 - RNA, 19 nt, Homo sapiens
  misc_RNA (1)...(19): siRNA sense strand
ugaaacagccuugaaagcu

SEQ ID NO: 1889579 - RNA, 19 nt, Homo sapiens
  misc_RNA (1)...(19): siRNA sense strand
cgaaaccaaaguaguaaag

SEQ ID NO: 1889580 - RNA, 19 nt, Homo sapiens
  misc_RNA (1)...(19): siRNA sense strand
ggucuuggauuuugcuaug

SEQ ID NO: 1889581 - RNA, 19 nt, Homo sapiens
  misc_RNA (1)...(19): siRNA sense strand
cuagcaccaugucuacaga

SEQ ID NO: 1889582 - RNA, 19 nt, Homo sapiens
  misc_RNA (1)...(19): siRNA sense strand
gagauggauucguggucau

SEQ ID NO: 1889583 - RNA, 19 nt, Homo sapiens
  misc_RNA (1)...(19): siRNA sense strand
gauucguggucaucucuag

SEQ ID NO: 1889584 - RNA, 19 nt, Homo sapiens
  misc_RNA (1)...(19): siRNA sense strand
aggaggagaaggccaauga

SEQ ID NO: 1889585 - RNA, 19 nt, Homo sapiens
  misc_RNA (1)...(19): siRNA sense strand
auaaagcagcauucaagaa

SEQ ID NO: 1889586 - RNA, 19 nt, Homo sapiens
  misc_RNA (1)...(19): siRNA sense strand
acugaaccauuuguugaaa

SEQ ID NO: 1889587 - RNA, 19 nt, Homo sapiens
  misc_RNA (1)...(19): siRNA sense strand
cacucaaacugcaacacaa

SEQ ID NO: 1889588 - RNA, 19 nt, Homo sapiens
  misc_RNA (1)...(19): siRNA sense strand
caacccuaaugaggaauca

SEQ ID NO: 1889589 - RNA, 19 nt, Homo sapiens
  misc_RNA (1)...(19): siRNA sense strand
ggcaaggaccaaguugaaa

SEQ ID NO: 1889590 - RNA, 19 nt, Homo sapiens
  misc_RNA (1)...(19): siRNA sense strand
ucugauacuuggacuaacu

SEQ ID NO: 1889591 - RNA, 19 nt, Homo sapiens
  misc_RNA (1)...(19): siRNA sense strand
aaacuagcaccaugucuac

SEQ ID NO: 1889592 - RNA, 19 nt, Homo sapiens
  misc_RNA (1)...(19): siRNA sense strand
ggucaucucuaggauuagc

SEQ ID NO: 1889593 - RNA, 19 nt, Homo sapiens
  misc_RNA (1)...(19): siRNA sense strand
gaaaccaaaguaguaaagg

SEQ ID NO: 1889594 - RNA, 19 nt, Homo sapiens
  misc_RNA (1)...(19): siRNA sense strand
ugaagcugcuggguuugga

SEQ ID NO: 1889595 - RNA, 19 nt, Homo sapiens
  misc_RNA (1)...(19): siRNA sense strand
aauaaagcagcauucaaga

SEQ ID NO: 1889596 - RNA, 19 nt, Homo sapiens
  misc_RNA (1)...(19): siRNA sense strand
acucgugcauuccagaaau

SEQ ID NO: 1889597 - RNA, 19 nt, Homo sapiens
  misc_RNA (1)...(19): siRNA sense strand
uggguguccugauuuggaa

SEQ ID NO: 1889598 - RNA, 19 nt, Homo sapiens
  misc_RNA (1)...(19): siRNA sense strand
caaagaucccauauucaac

SEQ ID NO: 1889599 - RNA, 19 nt, Homo sapiens
  misc_RNA (1)...(19): siRNA sense strand
gacaguuugcagccuauug

SEQ ID NO: 1889600 - RNA, 19 nt, Homo sapiens
  misc_RNA (1)...(19): siRNA sense strand
uaacucgugcauuccagaa

SEQ ID NO: 1889601 - RNA, 19 nt, Homo sapiens
  misc_RNA (1)...(19): siRNA sense strand
ccuaaugaggaaucaaaga

SEQ ID NO: 1889602 - RNA, 19 nt, Homo sapiens
  misc_RNA (1)...(19): siRNA sense strand
aggagaaggccaaugauag

SEQ ID NO: 1889603 - RNA, 19 nt, Homo sapiens
  misc_RNA (1)...(19): siRNA sense strand
ggaggagaaggccaaugau

SEQ ID NO: 1889604 - RNA, 19 nt, Homo sapiens
  misc_RNA (1)...(19): siRNA sense strand
ucaaacugcaacacaaaca

SEQ ID NO: 1889605 - RNA, 19 nt, Homo sapiens
  misc_RNA (1)...(19): siRNA sense strand
ugcagcuggucuuggauuu

SEQ ID NO: 1889606 - RNA, 19 nt, Homo sapiens
  misc_RNA (1)...(19): siRNA sense strand
ugguguugcuucucacuuc

SEQ ID NO: 1889607 - RNA, 19 nt, Homo sapiens
  misc_RNA (1)...(19): siRNA sense strand
gaagcuaaggaggccugua

SEQ ID NO: 1889608 - RNA, 19 nt, Homo sapiens
  misc_RNA (1)...(19): siRNA sense strand
acucaaacugcaacacaaa

SEQ ID NO: 1889609 - RNA, 19 nt, Homo sapiens
  misc_RNA (1)...(19): siRNA sense strand
gagaaggccaaugauagca

SEQ ID NO: 1889610 - RNA, 19 nt, Homo sapiens
  misc_RNA (1)...(19): siRNA sense strand
uuugaaacuugcagcuaug

SEQ ID NO: 1889611 - RNA, 19 nt, Homo sapiens
  misc_RNA (1)...(19): siRNA sense strand
ccaugucuacagaaacuga

SEQ ID NO: 1889612 - RNA, 19 nt, Homo sapiens
  misc_RNA (1)...(19): siRNA sense strand
gcaauaaacucuauacuga

SEQ ID NO: 1889613 - RNA, 19 nt, Homo sapiens
  misc_RNA (1)...(19): siRNA sense strand
guagggagcucucugauuu

SEQ ID NO: 1889614 - RNA, 19 nt, Homo sapiens
  misc_RNA (1)...(19): siRNA sense strand
gaagaaaguucgggaauau

SEQ ID NO: 1889615 - RNA, 19 nt, Homo sapiens
  misc_RNA (1)...(19): siRNA sense strand
ggaagaaaguucgggaaua

SEQ ID NO: 1889616 - RNA, 19 nt, Homo sapiens
  misc_RNA (1)...(19): siRNA sense strand
gguaauggcucaacagaug

SEQ ID NO: 1889617 - RNA, 19 nt, Homo sapiens
  misc_RNA (1)...(19): siRNA sense strand
gcacagaagcgcagucuuu

SEQ ID NO: 1889618 - RNA, 19 nt, Homo sapiens
  misc_RNA (1)...(19): siRNA sense strand
gauacgaacuuucugaaga

SEQ ID NO: 1889619 - RNA, 19 nt, Homo sapiens
  misc_RNA (1)...(19): siRNA sense strand
guaagcagccucuugauuu

SEQ ID NO: 1889620 - RNA, 19 nt, Homo sapiens
  misc_RNA (1)...(19): siRNA sense strand
ggaaugggauuauguugga

SEQ ID NO: 1889621 - RNA, 19 nt, Homo sapiens
  misc_RNA (1)...(19): siRNA sense strand
gaaccaauccuuuguaauc

SEQ ID NO: 1889622 - RNA, 19 nt, Homo sapiens
  misc_RNA (1)...(19): siRNA sense strand
gaaguaagcagccucuuga

SEQ ID NO: 1889623 - RNA, 19 nt, Homo sapiens
  misc_RNA (1)...(19): siRNA sense strand
ggagaucuguugaagaaug

SEQ ID NO: 1889624 - RNA, 19 nt, Homo sapiens
  misc_RNA (1)...(19): siRNA sense strand
gccauuaucucacuacuau

SEQ ID NO: 1889625 - RNA, 19 nt, Homo sapiens
  misc_RNA (1)...(19): siRNA sense strand
ugaagaagcucaaaugucu

SEQ ID NO: 1889626 - RNA, 19 nt, Homo sapiens
  misc_RNA (1)...(19): siRNA sense strand
gcucaaaugucucgaagga

SEQ ID NO: 1889627 - RNA, 19 nt, Homo sapiens
  misc_RNA (1)...(19): siRNA sense strand
ggaccuaguugccaauuca

SEQ ID NO: 1889628 - RNA, 19 nt, Homo sapiens
  misc_RNA (1)...(19): siRNA sense strand
gaggauauaugcuuagaca

SEQ ID NO: 1889629 - RNA, 19 nt, Homo sapiens
  misc_RNA (1)...(19): siRNA sense strand
gaucaucaguggucagaau

SEQ ID NO: 1889630 - RNA, 19 nt, Homo sapiens
  misc_RNA (1)...(19): siRNA sense strand
gaaggaugucgguagauua

SEQ ID NO: 1889631 - RNA, 19 nt, Homo sapiens
  misc_RNA (1)...(19): siRNA sense strand
aaggagaucuguugaagaa

SEQ ID NO: 1889632 - RNA, 19 nt, Homo sapiens
  misc_RNA (1)...(19): siRNA sense strand
gauaaugaaccaauccuuu

SEQ ID NO: 1889633 - RNA, 19 nt, Homo sapiens
  misc_RNA (1)...(19): siRNA sense strand
ucaagaaucuauccaagug

SEQ ID NO: 1889634 - RNA, 19 nt, Homo sapiens
  misc_RNA (1)...(19): siRNA sense strand
guucuaaggccgucuauaa

SEQ ID NO: 1889635 - RNA, 19 nt, Homo sapiens
  misc_RNA (1)...(19): siRNA sense strand
aaagaaagaccucgagaaa

SEQ ID NO: 1889636 - RNA, 19 nt, Homo sapiens
  misc_RNA (1)...(19): siRNA sense strand
gagcuuugcuuggaacauu

SEQ ID NO: 1889637 - RNA, 19 nt, Homo sapiens
  misc_RNA (1)...(19): siRNA sense strand
caacucaacccuacucuga

SEQ ID NO: 1889638 - RNA, 19 nt, Homo sapiens
  misc_RNA (1)...(19): siRNA sense strand
gauauaugcuuagacauca

SEQ ID NO: 1889639 - RNA, 19 nt, Homo sapiens
  misc_RNA (1)...(19): siRNA sense strand
gauuuggugucuauuugua

SEQ ID NO: 1889640 - RNA, 19 nt, Homo sapiens
  misc_RNA (1)...(19): siRNA sense strand
ugaagaaugccaagaauga

SEQ ID NO: 1889641 - RNA, 19 nt, Homo sapiens
  misc_RNA (1)...(19): siRNA sense strand
caagaucagguuaaaguuu

SEQ ID NO: 1889642 - RNA, 19 nt, Homo sapiens
  misc_RNA (1)...(19): siRNA sense strand
gaagaaaacucaacaaagc

SEQ ID NO: 1889643 - RNA, 19 nt, Homo sapiens
  misc_RNA (1)...(19): siRNA sense strand
gacaacccauguuuccuuu

SEQ ID NO: 1889644 - RNA, 19 nt, Homo sapiens
  misc_RNA (1)...(19): siRNA sense strand
gaagguugcccaagauaug

SEQ ID NO: 1889645 - RNA, 19 nt, Homo sapiens
  misc_RNA (1)...(19): siRNA sense strand
gagcaaggagucacccaua

SEQ ID NO: 1889646 - RNA, 19 nt, Homo sapiens
  misc_RNA (1)...(19): siRNA sense strand
gauaugacccagccauuau

SEQ ID NO: 1889647 - RNA, 19 nt, Homo sapiens
  misc_RNA (1)...(19): siRNA sense strand
cgaaggaugucgguagauu

SEQ ID NO: 1889648 - RNA, 19 nt, Homo sapiens
  misc_RNA (1)...(19): siRNA sense strand
gaacauuacaguauugaag

SEQ ID NO: 1889649 - RNA, 19 nt, Homo sapiens
  misc_RNA (1)...(19): siRNA sense strand
caccgaggauauaugcuua

SEQ ID NO: 1889650 - RNA, 19 nt, Homo sapiens
  misc_RNA (1)...(19): siRNA sense strand
aaauagcgguucauccauu

SEQ ID NO: 1889651 - RNA, 19 nt, Homo sapiens
  misc_RNA (1)...(19): siRNA sense strand
gggaugugguuauguucua

SEQ ID NO: 1889652 - RNA, 19 nt, Homo sapiens
  misc_RNA (1)...(19): siRNA sense strand
agaaagaccucgagaaagc

SEQ ID NO: 1889653 - RNA, 19 nt, Homo sapiens
  misc_RNA (1)...(19): siRNA sense strand
cuuaugaucugaugauuca

SEQ ID NO: 1889654 - RNA, 19 nt, Homo sapiens
  misc_RNA (1)...(19): siRNA sense strand
gcaauauacgauaccauuu

SEQ ID NO: 1889655 - RNA, 19 nt, Homo sapiens
  misc_RNA (1)...(19): siRNA sense strand
ggaugucgguagauuacaa

SEQ ID NO: 1889656 - RNA, 19 nt, Homo sapiens
  misc_RNA (1)...(19): siRNA sense strand
uaagugaugguucagauaa

SEQ ID NO: 1889657 - RNA, 19 nt, Homo sapiens
  misc_RNA (1)...(19): siRNA sense strand
ucucauaacaccuaucuaa

SEQ ID NO: 1889658 - RNA, 19 nt, Homo sapiens
  misc_RNA (1)...(19): siRNA sense strand
uuaaagaaauccagaagag

SEQ ID NO: 1889659 - RNA, 19 nt, Homo sapiens
  misc_RNA (1)...(19): siRNA sense strand
gcugugaguugaagaaagu

SEQ ID NO: 1889660 - RNA, 19 nt, Homo sapiens
  misc_RNA (1)...(19): siRNA sense strand
gcaaucgugucuauuaagg

SEQ ID NO: 1889661 - RNA, 19 nt, Homo sapiens
  misc_RNA (1)...(19): siRNA sense strand
ccacauagcaauaacuaau

SEQ ID NO: 1889662 - RNA, 19 nt, Homo sapiens
  misc_RNA (1)...(19): siRNA sense strand
gcugggaaccuucaaagaa

SEQ ID NO: 1889663 - RNA, 19 nt, Homo sapiens
  misc_RNA (1)...(19): siRNA sense strand
ccacaggacuuuuggaauu

SEQ ID NO: 1889664 - RNA, 19 nt, Homo sapiens
  misc_RNA (1)...(19): siRNA sense strand
ggagauacgaacuuucuga

SEQ ID NO: 1889665 - RNA, 19 nt, Homo sapiens
  misc_RNA (1)...(19): siRNA sense strand
aauagcgguucauccauua

SEQ ID NO: 1889666 - RNA, 19 nt, Homo sapiens
  misc_RNA (1)...(19): siRNA sense strand
aaaagaugcugacugcuua

SEQ ID NO: 1889667 - RNA, 19 nt, Homo sapiens
  misc_RNA (1)...(19): siRNA sense strand
agaaugcaaucgugucuau

SEQ ID NO: 1889668 - RNA, 19 nt, Homo sapiens
  misc_RNA (1)...(19): siRNA sense strand
ggaaaguagugaggagaau

SEQ ID NO: 1889669 - RNA, 19 nt, Homo sapiens
  misc_RNA (1)...(19): siRNA sense strand
gaagaaaguccggccaaau

SEQ ID NO: 1889670 - RNA, 19 nt, Homo sapiens
  misc_RNA (1)...(19): siRNA sense strand
ggauauaugcuuagacauc

SEQ ID NO: 1889671 - RNA, 19 nt, Homo sapiens
  misc_RNA (1)...(19): siRNA sense strand
ccaaggagaucuguugaag

SEQ ID NO: 1889672 - RNA, 19 nt, Homo sapiens
  misc_RNA (1)...(19): siRNA sense strand
caauauacgauaccauuug

SEQ ID NO: 1889673 - RNA, 19 nt, Homo sapiens
  misc_RNA (1)...(19): siRNA sense strand
aguaacagaugaagaugaa

SEQ ID NO: 1889674 - RNA, 19 nt, Homo sapiens
  misc_RNA (1)...(19): siRNA sense strand
gcaccaggccagaagugua

SEQ ID NO: 1889675 - RNA, 19 nt, Homo sapiens
  misc_RNA (1)...(19): siRNA sense strand
gaagaaugccaagaaugaa

SEQ ID NO: 1889676 - RNA, 19 nt, Homo sapiens
  misc_RNA (1)...(19): siRNA sense strand
gaucugaugauucaagaga

SEQ ID NO: 1889677 - RNA, 19 nt, Homo sapiens
  misc_RNA (1)...(19): siRNA sense strand
caaagaaagaccucgagaa

SEQ ID NO: 1889678 - RNA, 19 nt, Homo sapiens
  misc_RNA (1)...(19): siRNA sense strand
ucaggaauaucggucuuaa

SEQ ID NO: 1889679 - RNA, 19 nt, Homo sapiens
  misc_RNA (1)...(19): siRNA sense strand
cugggaaccuucaaagaaa

SEQ ID NO: 1889680 - RNA, 19 nt, Homo sapiens
  misc_RNA (1)...(19): siRNA sense strand
gaacaaagaacuaaaacug

SEQ ID NO: 1889681 - RNA, 19 nt, Homo sapiens
  misc_RNA (1)...(19): siRNA sense strand
aagcaaauccgacucugua

SEQ ID NO: 1889682 - RNA, 19 nt, Homo sapiens
  misc_RNA (1)...(19): siRNA sense strand
caagcuggcugugaguuga

SEQ ID NO: 1889683 - RNA, 19 nt, Homo sapiens
  misc_RNA (1)...(19): siRNA sense strand
aaagaagguugcccaagau

SEQ ID NO: 1889684 - RNA, 19 nt, Homo sapiens
  misc_RNA (1)...(19): siRNA sense strand
auaaggagauacgaacuuu

SEQ ID NO: 1889685 - RNA, 19 nt, Homo sapiens
  misc_RNA (1)...(19): siRNA sense strand
gaaugaagcuauagaaaac

SEQ ID NO: 1889686 - RNA, 19 nt, Homo sapiens
  misc_RNA (1)...(19): siRNA sense strand
caagaaugaagcuauagaa

SEQ ID NO: 1889687 - RNA, 19 nt, Homo sapiens
  misc_RNA (1)...(19): siRNA sense strand
ggaugugguuauguucuaa

SEQ ID NO: 1889688 - RNA, 19 nt, Homo sapiens
  misc_RNA (1)...(19): siRNA sense strand
aagaaaguccggccaaauu

SEQ ID NO: 1889689 - RNA, 19 nt, Homo sapiens
  misc_RNA (1)...(19): siRNA sense strand
aaugcaaucgugucuauua

SEQ ID NO: 1889690 - RNA, 19 nt, Homo sapiens
  misc_RNA (1)...(19): siRNA sense strand
ggcaauauacgauaccauu

SEQ ID NO: 1889691 - RNA, 19 nt, Homo sapiens
  misc_RNA (1)...(19): siRNA sense strand
gaauuguggcugucagauu

SEQ ID NO: 1889692 - RNA, 19 nt, Homo sapiens
  misc_RNA (1)...(19): siRNA sense strand
guaagugaugguucagaua

SEQ ID NO: 1889693 - RNA, 19 nt, Homo sapiens
  misc_RNA (1)...(19): siRNA sense strand
ggacacagaccuucaagcu

SEQ ID NO: 1889694 - RNA, 19 nt, Homo sapiens
  misc_RNA (1)...(19): siRNA sense strand
uaacagaugaagaugaaga

SEQ ID NO: 1889695 - RNA, 19 nt, Homo sapiens
  misc_RNA (1)...(19): siRNA sense strand
aaggagaaguaacagauga

SEQ ID NO: 1889696 - RNA, 19 nt, Homo sapiens
  misc_RNA (1)...(19): siRNA sense strand
gaaggagaaguaacagaug

SEQ ID NO: 1889697 - RNA, 19 nt, Homo sapiens
  misc_RNA (1)...(19): siRNA sense strand
cggaaacauuuacaaacaa

SEQ ID NO: 1889698 - RNA, 19 nt, Homo sapiens
  misc_RNA (1)...(19): siRNA sense strand
ugaagaaaguccggccaaa

SEQ ID NO: 1889699 - RNA, 19 nt, Homo sapiens
  misc_RNA (1)...(19): siRNA sense strand
gaugcugacugcuuaugau

SEQ ID NO: 1889700 - RNA, 19 nt, Homo sapiens
  misc_RNA (1)...(19): siRNA sense strand
gaggaucgauuccaguaac

SEQ ID NO: 1889701 - RNA, 19 nt, Homo sapiens
  misc_RNA (1)...(19): siRNA sense strand
gcucuucgcugggaaccuu

SEQ ID NO: 1889702 - RNA, 19 nt, Homo sapiens
  misc_RNA (1)...(19): siRNA sense strand
gaagaggaauuuugugaag

SEQ ID NO: 1889703 - RNA, 19 nt, Homo sapiens
  misc_RNA (1)...(19): siRNA sense strand
ugccaagaaugaagcuaua

SEQ ID NO: 1889704 - RNA, 19 nt, Homo sapiens
  misc_RNA (1)...(19): siRNA sense strand
caauacuccuucagucuca

SEQ ID NO: 1889705 - RNA, 19 nt, Homo sapiens
  misc_RNA (1)...(19): siRNA sense strand
gagaaaauaugcagaaugc

SEQ ID NO: 1889706 - RNA, 19 nt, Homo sapiens
  misc_RNA (1)...(19): siRNA sense strand
uaccugagcuggccaugau

SEQ ID NO: 1889707 - RNA, 19 nt, Homo sapiens
  misc_RNA (1)...(19): siRNA sense strand
ggucagaauuucccaaagc

SEQ ID NO: 1889708 - RNA, 19 nt, Homo sapiens
  misc_RNA (1)...(19): siRNA sense strand
ccaauccuuuguaaucgaa

SEQ ID NO: 1889709 - RNA, 19 nt, Homo sapiens
  misc_RNA (1)...(19): siRNA sense strand
guugaagaaugccaagaau

SEQ ID NO: 1889710 - RNA, 19 nt, Homo sapiens
  misc_RNA (1)...(19): siRNA sense strand
aaucgugucuauuaaggaa

SEQ ID NO: 1889711 - RNA, 19 nt, Homo sapiens
  misc_RNA (1)...(19): siRNA sense strand
gaagugucauagagguaau

SEQ ID NO: 1889712 - RNA, 19 nt, Homo sapiens
  misc_RNA (1)...(19): siRNA sense strand
gaagaaccaucagaauaua

SEQ ID NO: 1889713 - RNA, 19 nt, Homo sapiens
  misc_RNA (1)...(19): siRNA sense strand
gagaagaaccaucagaaua

SEQ ID NO: 1889714 - RNA, 19 nt, Homo sapiens
  misc_RNA (1)...(19): siRNA sense strand
ggaaaugcaguuuaaagaa

SEQ ID NO: 1889715 - RNA, 19 nt, Homo sapiens
  misc_RNA (1)...(19): siRNA sense strand
agauaaagaugcacuuaga

SEQ ID NO: 1889716 - RNA, 19 nt, Homo sapiens
  misc_RNA (1)...(19): siRNA sense strand
uaccaaggaucacaauaaa

SEQ ID NO: 1889717 - RNA, 19 nt, Homo sapiens
  misc_RNA (1)...(19): siRNA sense strand
aaugggaaaugcaguuuaa

SEQ ID NO: 1889718 - RNA, 19 nt, Homo sapiens
  misc_RNA (1)...(19): siRNA sense strand
gaaugggaaaugcaguuua

SEQ ID NO: 1889719 - RNA, 19 nt, Homo sapiens
  misc_RNA (1)...(19): siRNA sense strand
ugaauaugaugaucucuca

SEQ ID NO: 1889720 - RNA, 19 nt, Homo sapiens
  misc_RNA (1)...(19): siRNA sense strand
ugaagaagauaccaaggau

SEQ ID NO: 1889721 - RNA, 19 nt, Homo sapiens
  misc_RNA (1)...(19): siRNA sense strand
agaagaaccaucagaauau

SEQ ID NO: 1889722 - RNA, 19 nt, Homo sapiens
  misc_RNA (1)...(19): siRNA sense strand
gggaaaugcaguuuaaaga

SEQ ID NO: 1889723 - RNA, 19 nt, Homo sapiens
  misc_RNA (1)...(19): siRNA sense strand
ggagaguguucgagaaugg

SEQ ID NO: 1889724 - RNA, 19 nt, Homo sapiens
  misc_RNA (1)...(19): siRNA sense strand
ccaaggaucacaauaaaca

SEQ ID NO: 1889725 - RNA, 19 nt, Homo sapiens
  misc_RNA (1)...(19): siRNA sense strand
ggagaagaaccaucagaau

SEQ ID NO: 1889726 - RNA, 19 nt, Homo sapiens
  misc_RNA (1)...(19): siRNA sense strand
gggaaaugcugcugaacgu

SEQ ID NO: 1889727 - RNA, 19 nt, Homo sapiens
  misc_RNA (1)...(19): siRNA sense strand
uauggaauauuugcuggua

SEQ ID NO: 1889728 - RNA, 19 nt, Homo sapiens
  misc_RNA (1)...(19): siRNA sense strand
gaccaaaggcagcaaguuc

SEQ ID NO: 1889729 - RNA, 19 nt, Homo sapiens
  misc_RNA (1)...(19): siRNA sense strand
cagaauauacagaugaaga

SEQ ID NO: 1889730 - RNA, 19 nt, Homo sapiens
  misc_RNA (1)...(19): siRNA sense strand
aagaugcacuuagagauga

SEQ ID NO: 1889731 - RNA, 19 nt, Homo sapiens
  misc_RNA (1)...(19): siRNA sense strand
guacaaauggagaguguuc

SEQ ID NO: 1889732 - RNA, 19 nt, Homo sapiens
  misc_RNA (1)...(19): siRNA sense strand
gcacuuagagaugaauaug

SEQ ID NO: 1889733 - RNA, 19 nt, Homo sapiens
  misc_RNA (1)...(19): siRNA sense strand
gagaaugggaaaugcaguu

SEQ ID NO: 1889734 - RNA, 19 nt, Homo sapiens
  misc_RNA (1)...(19): siRNA sense strand
gaagauaccaaggaucaca

SEQ ID NO: 1889735 - RNA, 19 nt, Homo sapiens
  misc_RNA (1)...(19): siRNA sense strand
auaccaaggaucacaauaa

SEQ ID NO: 1889736 - RNA, 19 nt, Homo sapiens
  misc_RNA (1)...(19): siRNA sense strand
ccaaaggcagcaaguucua

SEQ ID NO: 1889737 - RNA, 19 nt, Homo sapiens
  misc_RNA (1)...(19): siRNA sense strand
ugaaugcaguacaaaugga

SEQ ID NO: 1889738 - RNA, 19 nt, Homo sapiens
  misc_RNA (1)...(19): siRNA sense strand
uggagcagcugcgccagua

SEQ ID NO: 1889739 - RNA, 19 nt, Homo sapiens
  misc_RNA (1)...(19): siRNA sense strand
aaagaugcacuuagagaug

SEQ ID NO: 1889740 - RNA, 19 nt, Homo sapiens
  misc_RNA (1)...(19): siRNA sense strand
cuagauaaagaugcacuua

SEQ ID NO: 1889741 - RNA, 19 nt, Homo sapiens
  misc_RNA (1)...(19): siRNA sense strand
gauaccaaggaucacaaua

SEQ ID NO: 1889742 - RNA, 19 nt, Homo sapiens
  misc_RNA (1)...(19): siRNA sense strand
aagaagauaccaaggauca

SEQ ID NO: 1889743 - RNA, 19 nt, Homo sapiens
  misc_RNA (1)...(19): siRNA sense strand
uaaagaugcacuuagagau

SEQ ID NO: 1889744 - RNA, 19 nt, Homo sapiens
  misc_RNA (1)...(19): siRNA sense strand
caguacaaauggagagugu

SEQ ID NO: 1889745 - RNA, 19 nt, Homo sapiens
  misc_RNA (1)...(19): siRNA sense strand
agauuugaaugcaguacaa

SEQ ID NO: 1889746 - RNA, 19 nt, Homo sapiens
  misc_RNA (1)...(19): siRNA sense strand
auaaagaugcacuuagaga

SEQ ID NO: 1889747 - RNA, 19 nt, Homo sapiens
  misc_RNA (1)...(19): siRNA sense strand
gaucacaauaaacaggauu

SEQ ID NO: 1889748 - RNA, 19 nt, Homo sapiens
  misc_RNA (1)...(19): siRNA sense strand
cagaggacuggccacauuu

SEQ ID NO: 1889749 - RNA, 19 nt, Homo sapiens
  misc_RNA (1)...(19): siRNA sense strand
gauaaagaugcacuuagag

SEQ ID NO: 1889750 - RNA, 19 nt, Homo sapiens
  misc_RNA (1)...(19): siRNA sense strand
ggaucacaauaaacaggau

SEQ ID NO: 1889751 - RNA, 19 nt, Homo sapiens
  misc_RNA (1)...(19): siRNA sense strand
aauggagaguguucgagaa

SEQ ID NO: 1889752 - RNA, 19 nt, Homo sapiens
  misc_RNA (1)...(19): siRNA sense strand
gaauauacagaugaagaag

SEQ ID NO: 1889753 - RNA, 19 nt, Homo sapiens
  misc_RNA (1)...(19): siRNA sense strand
aauaugaugaucucucaga

SEQ ID NO: 1889754 - RNA, 19 nt, Homo sapiens
  misc_RNA (1)...(19): siRNA sense strand
agagaugaauaugaugauc

SEQ ID NO: 1889755 - RNA, 19 nt, Homo sapiens
  misc_RNA (1)...(19): siRNA sense strand
ggucaaugggaaagucuuc

SEQ ID NO: 1889756 - RNA, 19 nt, Homo sapiens
  misc_RNA (1)...(19): siRNA sense strand
uagauaaagaugcacuuag

SEQ ID NO: 1889757 - RNA, 19 nt, Homo sapiens
  misc_RNA (1)...(19): siRNA sense strand
gcaugaagaagcgggacuu

SEQ ID NO: 1889758 - RNA, 19 nt, Homo sapiens
  misc_RNA (1)...(19): siRNA sense strand
aggagaagaaccaucagaa

SEQ ID NO: 1889759 - RNA, 19 nt, Homo sapiens
  misc_RNA (1)...(19): siRNA sense strand
ccaaacaacuuucaaauuc

SEQ ID NO: 1889760 - RNA, 19 nt, Homo sapiens
  misc_RNA (1)...(19): siRNA sense strand
gaaaagaaguuugcuauga

SEQ ID NO: 1889761 - RNA, 19 nt, Homo sapiens
  misc_RNA (1)...(19): siRNA sense strand
gaucaaggaugcccacaga

SEQ ID NO: 1889762 - RNA, 19 nt, Homo sapiens
  misc_RNA (1)...(19): siRNA sense strand
caucauccauggcuucaua

SEQ ID NO: 1889763 - RNA, 19 nt, Homo sapiens
  misc_RNA (1)...(19): siRNA sense strand
cuaagaagcuacaaguauu

SEQ ID NO: 1889764 - RNA, 19 nt, Homo sapiens
  misc_RNA (1)...(19): siRNA sense strand
gaagcaaguuucgagagua

SEQ ID NO: 1889765 - RNA, 19 nt, Homo sapiens
  misc_RNA (1)...(19): siRNA sense strand
gugaagagcagcagaaauu

SEQ ID NO: 1889766 - RNA, 19 nt, Homo sapiens
  misc_RNA (1)...(19): siRNA sense strand
gagaagagaagacagugua

SEQ ID NO: 1889767 - RNA, 19 nt, Homo sapiens
  misc_RNA (1)...(19): siRNA sense strand
gaaauaagggaaacacuca

SEQ ID NO: 1889768 - RNA, 19 nt, Homo sapiens
  misc_RNA (1)...(19): siRNA sense strand
gcaaucaccuaagaagcua

SEQ ID NO: 1889769 - RNA, 19 nt, Homo sapiens
  misc_RNA (1)...(19): siRNA sense strand
ugacagacaugugcaagaa

SEQ ID NO: 1889770 - RNA, 19 nt, Homo sapiens
  misc_RNA (1)...(19): siRNA sense strand
aaaccaggcucaacccauu

SEQ ID NO: 1889771 - RNA, 19 nt, Homo sapiens
  misc_RNA (1)...(19): siRNA sense strand
gggaaacacucaccaguac

SEQ ID NO: 1889772 - RNA, 19 nt, Homo sapiens
  misc_RNA (1)...(19): siRNA sense strand
gcucaacccauuccuauga

SEQ ID NO: 1889773 - RNA, 19 nt, Homo sapiens
  misc_RNA (1)...(19): siRNA sense strand
agaaagacccgguucauca

SEQ ID NO: 1889774 - RNA, 19 nt, Homo sapiens
  misc_RNA (1)...(19): siRNA sense strand
caagaagaaugcccugucu

SEQ ID NO: 1889775 - RNA, 19 nt, Homo sapiens
  misc_RNA (1)...(19): siRNA sense strand
ugacuuuguugaugugauu

SEQ ID NO: 1889776 - RNA, 19 nt, Homo sapiens
  misc_RNA (1)...(19): siRNA sense strand
caggagaggcuagcaauuu

SEQ ID NO: 1889777 - RNA, 19 nt, Homo sapiens
  misc_RNA (1)...(19): siRNA sense strand
gaagaggugcgacuugauc

SEQ ID NO: 1889778 - RNA, 19 nt, Homo sapiens
  misc_RNA (1)...(19): siRNA sense strand
agaagacaguguacaacuu

SEQ ID NO: 1889779 - RNA, 19 nt, Homo sapiens
  misc_RNA (1)...(19): siRNA sense strand
ccuaagaagcuacaaguau

SEQ ID NO: 1889780 - RNA, 19 nt, Homo sapiens
  misc_RNA (1)...(19): siRNA sense strand
ccgauggguuugcugcaua

SEQ ID NO: 1889781 - RNA, 19 nt, Homo sapiens
  misc_RNA (1)...(19): siRNA sense strand
gaaagacccgguucaucau

SEQ ID NO: 1889782 - RNA, 19 nt, Homo sapiens
  misc_RNA (1)...(19): siRNA sense strand
acaaguccuuugagucuga

SEQ ID NO: 1889783 - RNA, 19 nt, Homo sapiens
  misc_RNA (1)...(19): siRNA sense strand
agaaugcccugucucagau

SEQ ID NO: 1889784 - RNA, 19 nt, Homo sapiens
  misc_RNA (1)...(19): siRNA sense strand
gaugcugacuuuguugaug

SEQ ID NO: 1889785 - RNA, 19 nt, Homo sapiens
  misc_RNA (1)...(19): siRNA sense strand
cgagaguacuccugaagag

SEQ ID NO: 1889786 - RNA, 19 nt, Homo sapiens
  misc_RNA (1)...(19): siRNA sense strand
gaacagccacuggucagau

SEQ ID NO: 1889787 - RNA, 19 nt, Homo sapiens
  misc_RNA (1)...(19): siRNA sense strand
uuccaaaguucaccucauu

SEQ ID NO: 1889788 - RNA, 19 nt, Homo sapiens
  misc_RNA (1)...(19): siRNA sense strand
ggagaggcaggaagcaaga

SEQ ID NO: 1889789 - RNA, 19 nt, Homo sapiens
  misc_RNA (1)...(19): siRNA sense strand
caagugaagagcagcagaa

SEQ ID NO: 1889790 - RNA, 19 nt, Homo sapiens
  misc_RNA (1)...(19): siRNA sense strand
cccaaacaacuuucaaauu

SEQ ID NO: 1889791 - RNA, 19 nt, Homo sapiens
  misc_RNA (1)...(19): siRNA sense strand
gaaauucuucuugaacaca

SEQ ID NO: 1889792 - RNA, 19 nt, Homo sapiens
  misc_RNA (1)...(19): siRNA sense strand
cugaagaggugcgacuuga

SEQ ID NO: 1889793 - RNA, 19 nt, Homo sapiens
  misc_RNA (1)...(19): siRNA sense strand
acacacaggcugccaacaa

SEQ ID NO: 1889794 - RNA, 19 nt, Homo sapiens
  misc_RNA (1)...(19): siRNA sense strand
gcaucugcguggacuggaa

SEQ ID NO: 1889795 - RNA, 19 nt, Homo sapiens
  misc_RNA (1)...(19): siRNA sense strand
gcacccgcuuccugcugua

SEQ ID NO: 1889796 - RNA, 19 nt, Homo sapiens
  misc_RNA (1)...(19): siRNA sense strand
ccacagaugggucacuaug

SEQ ID NO: 1889797 - RNA, 19 nt, Homo sapiens
  misc_RNA (1)...(19): siRNA sense strand
ucaaggaugcccacagaug

SEQ ID NO: 1889798 - RNA, 19 nt, Homo sapiens
  misc_RNA (1)...(19): siRNA sense strand
agaagcaaguuucgagagu

SEQ ID NO: 1889799 - RNA, 19 nt, Homo sapiens
  misc_RNA (1)...(19): siRNA sense strand
gagaagacaguguacaacu

SEQ ID NO: 1889800 - RNA, 19 nt, Homo sapiens
  misc_RNA (1)...(19): siRNA sense strand
cuacaaguccuuugagucu

SEQ ID NO: 1889801 - RNA, 19 nt, Homo sapiens
  misc_RNA (1)...(19): siRNA sense strand
gcauaucccugcacuuccu

SEQ ID NO: 1889802 - RNA, 19 nt, Homo sapiens
  misc_RNA (1)...(19): siRNA sense strand
ccacuggucagaucaaagu

SEQ ID NO: 1889803 - RNA, 19 nt, Homo sapiens
  misc_RNA (1)...(19): siRNA sense strand
gaagagaagacaguguaca

SEQ ID NO: 1889804 - RNA, 19 nt, Homo sapiens
  misc_RNA (1)...(19): siRNA sense strand
gaaacacucaccaguacag

SEQ ID NO: 1889805 - RNA, 19 nt, Homo sapiens
  misc_RNA (1)...(19): siRNA sense strand
aagaaugcccugucucaga

SEQ ID NO: 1889806 - RNA, 19 nt, Homo sapiens
  misc_RNA (1)...(19): siRNA sense strand
aggagaggcuagcaauuuc

SEQ ID NO: 1889807 - RNA, 19 nt, Homo sapiens
  misc_RNA (1)...(19): siRNA sense strand
gucacuaugcugauaaauu

SEQ ID NO: 1889808 - RNA, 19 nt, Homo sapiens
  misc_RNA (1)...(19): siRNA sense strand
gggucacuaugcugauaaa

SEQ ID NO: 1889809 - RNA, 19 nt, Homo sapiens
  misc_RNA (1)...(19): siRNA sense strand
aaauucuccuccucucuga

SEQ ID NO: 1889810 - RNA, 19 nt, Homo sapiens
  misc_RNA (1)...(19): siRNA sense strand
agaagaaugcccugucuca

SEQ ID NO: 1889811 - RNA, 19 nt, Homo sapiens
  misc_RNA (1)...(19): siRNA sense strand
aggguuggauccuguagaa

SEQ ID NO: 1889812 - RNA, 19 nt, Homo sapiens
  misc_RNA (1)...(19): siRNA sense strand
ggcuugcaaucaccuaaga

SEQ ID NO: 1889813 - RNA, 19 nt, Homo sapiens
  misc_RNA (1)...(19): siRNA sense strand
cgauggguuugcugcauau

SEQ ID NO: 1889814 - RNA, 19 nt, Homo sapiens
  misc_RNA (1)...(19): siRNA sense strand
uggaggaggugaacugcau

SEQ ID NO: 1889815 - RNA, 19 nt, Homo sapiens
  misc_RNA (1)...(19): siRNA sense strand
ggagaagagaagacagugu

SEQ ID NO: 1889816 - RNA, 19 nt, Homo sapiens
  misc_RNA (1)...(19): siRNA sense strand
caagaucacugugcaaaag

SEQ ID NO: 1889817 - RNA, 19 nt, Homo sapiens
  misc_RNA (1)...(19): siRNA sense strand
guugcuuuguuuggaaaua

SEQ ID NO: 1889818 - RNA, 19 nt, Homo sapiens
  misc_RNA (1)...(19): siRNA sense strand
ccucaaucccgauggguuu

SEQ ID NO: 1889819 - RNA, 19 nt, Homo sapiens
  misc_RNA (1)...(19): siRNA sense strand
acagacaugugcaagaaac

SEQ ID NO: 1889820 - RNA, 19 nt, Homo sapiens
  misc_RNA (1)...(19): siRNA sense strand
aagagaagacaguguacaa

SEQ ID NO: 1889821 - RNA, 19 nt, Homo sapiens
  misc_RNA (1)...(19): siRNA sense strand
gcaaagcuggauguuggaa

SEQ ID NO: 1889822 - RNA, 19 nt, Homo sapiens
  misc_RNA (1)...(19): siRNA sense strand
caacccauuccuaugaguu

SEQ ID NO: 1889823 - RNA, 19 nt, Homo sapiens
  misc_RNA (1)...(19): siRNA sense strand
cacacugucuggaagaaca

SEQ ID NO: 1889824 - RNA, 19 nt, Homo sapiens
  misc_RNA (1)...(19): siRNA sense strand
auccauggcuucauagaca

SEQ ID NO: 1889825 - RNA, 19 nt, Homo sapiens
  misc_RNA (1)...(19): siRNA sense strand
gaugcaaagcuggauguug

SEQ ID NO: 1889826 - RNA, 19 nt, Homo sapiens
  misc_RNA (1)...(19): siRNA sense strand
agggaaacacucaccagua

SEQ ID NO: 1889827 - RNA, 19 nt, Homo sapiens
  misc_RNA (1)...(19): siRNA sense strand
ggaugcagcuccccugauc

SEQ ID NO: 1889828 - RNA, 19 nt, Homo sapiens
  misc_RNA (1)...(19): siRNA sense strand
acagaugggucacuaugcu

SEQ ID NO: 1889829 - RNA, 19 nt, Homo sapiens
  misc_RNA (1)...(19): siRNA sense strand
gucaaguuucuuuggaaua

SEQ ID NO: 1889830 - RNA, 19 nt, Homo sapiens
  misc_RNA (1)...(19): siRNA sense strand
ggaaacacucaccaguaca

SEQ ID NO: 1889831 - RNA, 19 nt, Homo sapiens
  misc_RNA (1)...(19): siRNA sense strand
ggucagaucaaaguugcuu

SEQ ID NO: 1889832 - RNA, 19 nt, Homo sapiens
  misc_RNA (1)...(19): siRNA sense strand
gacagacaugugcaagaaa

SEQ ID NO: 1889833 - RNA, 19 nt, Homo sapiens
  misc_RNA (1)...(19): siRNA sense strand
aagucaaguuucuuuggaa

SEQ ID NO: 1889834 - RNA, 19 nt, Homo sapiens
  misc_RNA (1)...(19): siRNA sense strand
ccucugaugcugacuuugu

SEQ ID NO: 1889835 - RNA, 19 nt, Homo sapiens
  misc_RNA (1)...(19): siRNA sense strand
cgacuugaucccucugaug

SEQ ID NO: 1889836 - RNA, 19 nt, Homo sapiens
  misc_RNA (1)...(19): siRNA sense strand
aagcaaguuucgagaguac

SEQ ID NO: 1889837 - RNA, 19 nt, Homo sapiens
  misc_RNA (1)...(19): siRNA sense strand
guuggauccuguagaagca

SEQ ID NO: 1889838 - RNA, 19 nt, Homo sapiens
  misc_RNA (1)...(19): siRNA sense strand
cacacaggcugccaacaac

SEQ ID NO: 1889839 - RNA, 19 nt, Homo sapiens
  misc_RNA (1)...(19): siRNA sense strand
agucaaguuucuuuggaau

SEQ ID NO: 1889840 - RNA, 19 nt, Homo sapiens
  misc_RNA (1)...(19): siRNA sense strand
aaaagaaguuugcuaugag

SEQ ID NO: 1889841 - RNA, 19 nt, Homo sapiens
  misc_RNA (1)...(19): siRNA sense strand
ugaaaacccaaacaacuuu

SEQ ID NO: 1889842 - RNA, 19 nt, Homo sapiens
  misc_RNA (1)...(19): siRNA sense strand
gacagaaagacccgguuca

SEQ ID NO: 1889843 - RNA, 19 nt, Homo sapiens
  misc_RNA (1)...(19): siRNA sense strand
ggacuuuguggcuugcaau

SEQ ID NO: 1889844 - RNA, 19 nt, Homo sapiens
  misc_RNA (1)...(19): siRNA sense strand
gggacuuuguggcuugcaa

SEQ ID NO: 1889845 - RNA, 19 nt, Homo sapiens
  misc_RNA (1)...(19): siRNA sense strand
cagaaagacccgguucauc

SEQ ID NO: 1889846 - RNA, 19 nt, Homo sapiens
  misc_RNA (1)...(19): siRNA sense strand
gacaugugcaagaaacugu

SEQ ID NO: 1889847 - RNA, 19 nt, Homo sapiens
  misc_RNA (1)...(19): siRNA sense strand
ggaaaagaaguuugcuaug

SEQ ID NO: 1889848 - RNA, 19 nt, Homo sapiens
  misc_RNA (1)...(19): siRNA sense strand
cuucauagacaaaggagau

SEQ ID NO: 1889849 - RNA, 19 nt, Homo sapiens
  misc_RNA (1)...(19): siRNA sense strand
ucccucugaugcugacuuu

SEQ ID NO: 1889850 - RNA, 19 nt, Homo sapiens
  misc_RNA (1)...(19): siRNA sense strand
ucgacauccucuugacaga

SEQ ID NO: 1889851 - RNA, 19 nt, Homo sapiens
  misc_RNA (1)...(19): siRNA sense strand
gcgacuugaucccucugau

SEQ ID NO: 1889852 - RNA, 19 nt, Homo sapiens
  misc_RNA (1)...(19): siRNA sense strand
gcaaaagggagaagagaag

SEQ ID NO: 1889853 - RNA, 19 nt, Homo sapiens
  misc_RNA (1)...(19): siRNA sense strand
uggaaagcauccucaaucc

SEQ ID NO: 1889854 - RNA, 19 nt, Homo sapiens
  misc_RNA (1)...(19): siRNA sense strand
caccuaagaagcuacaagu

SEQ ID NO: 1889855 - RNA, 19 nt, Homo sapiens
  misc_RNA (1)...(19): siRNA sense strand
ccaaauaccucaccaagaa

SEQ ID NO: 1889856 - RNA, 19 nt, Homo sapiens
  misc_RNA (1)...(19): siRNA sense strand
gagcagggauucuaucaau

SEQ ID NO: 1889857 - RNA, 19 nt, Homo sapiens
  misc_RNA (1)...(19): siRNA sense strand
gcagggauucuaucaauaa

SEQ ID NO: 1889858 - RNA, 19 nt, Homo sapiens
  misc_RNA (1)...(19): siRNA sense strand
ggacagaacgugagugaca

SEQ ID NO: 1889859 - RNA, 19 nt, Homo sapiens
  misc_RNA (1)...(19): siRNA sense strand
gcaguaugcccacauuuau

SEQ ID NO: 1889860 - RNA, 19 nt, Homo sapiens
  misc_RNA (1)...(19): siRNA sense strand
aagaugaacugcagcguau

SEQ ID NO: 1889861 - RNA, 19 nt, Homo sapiens
  misc_RNA (1)...(19): siRNA sense strand
gaacgugagugacauuuuc

SEQ ID NO: 1889862 - RNA, 19 nt, Homo sapiens
  misc_RNA (1)...(19): siRNA sense strand
ugaagaagcugugugaacu

SEQ ID NO: 1889863 - RNA, 19 nt, Homo sapiens
  misc_RNA (1)...(19): siRNA sense strand
aaacugacccguucaucuu

SEQ ID NO: 1889864 - RNA, 19 nt, Homo sapiens
  misc_RNA (1)...(19): siRNA sense strand
gagagacgacgggaaguuu

SEQ ID NO: 1889865 - RNA, 19 nt, Homo sapiens
  misc_RNA (1)...(19): siRNA sense strand
cguggaggcuguuaagaug

SEQ ID NO: 1889866 - RNA, 19 nt, Homo sapiens
  misc_RNA (1)...(19): siRNA sense strand
gcuaggagagcgcagcuuu

SEQ ID NO: 1889867 - RNA, 19 nt, Homo sapiens
  misc_RNA (1)...(19): siRNA sense strand
aguuugaucccaccaauua

SEQ ID NO: 1889868 - RNA, 19 nt, Homo sapiens
  misc_RNA (1)...(19): siRNA sense strand
gaacugcagcguaucaaac

SEQ ID NO: 1889869 - RNA, 19 nt, Homo sapiens
  misc_RNA (1)...(19): siRNA sense strand
guggaggacuauugcuuug

SEQ ID NO: 1889870 - RNA, 19 nt, Homo sapiens
  misc_RNA (1)...(19): siRNA sense strand
gagugaagaagcuguguga

SEQ ID NO: 1889871 - RNA, 19 nt, Homo sapiens
  misc_RNA (1)...(19): siRNA sense strand
uuaagaugcuggaugagau

SEQ ID NO: 1889872 - RNA, 19 nt, Homo sapiens
  misc_RNA (1)...(19): siRNA sense strand
gguggaggacuauugcuuu

SEQ ID NO: 1889873 - RNA, 19 nt, Homo sapiens
  misc_RNA (1)...(19): siRNA sense strand
cagcauggaggaucacuug

SEQ ID NO: 1889874 - RNA, 19 nt, Homo sapiens
  misc_RNA (1)...(19): siRNA sense strand
caaauaccucaccaagaaa

SEQ ID NO: 1889875 - RNA, 19 nt, Homo sapiens
  misc_RNA (1)...(19): siRNA sense strand
cggacacucuagguuguua

SEQ ID NO: 1889876 - RNA, 19 nt, Homo sapiens
  misc_RNA (1)...(19): siRNA sense strand
cuguuaagaugcuggauga

SEQ ID NO: 1889877 - RNA, 19 nt, Homo sapiens
  misc_RNA (1)...(19): siRNA sense strand
ugagugacauuuuccgaua

SEQ ID NO: 1889878 - RNA, 19 nt, Homo sapiens
  misc_RNA (1)...(19): siRNA sense strand
ccacccgccucauccaaau

SEQ ID NO: 1889879 - RNA, 19 nt, Homo sapiens
  misc_RNA (1)...(19): siRNA sense strand
ggaggacuauugcuuugcu

SEQ ID NO: 1889880 - RNA, 19 nt, Homo sapiens
  misc_RNA (1)...(19): siRNA sense strand
gaugaacugcagcguauca

SEQ ID NO: 1889881 - RNA, 19 nt, Homo sapiens
  misc_RNA (1)...(19): siRNA sense strand
gcaguggagugggagugaa

SEQ ID NO: 1889882 - RNA, 19 nt, Homo sapiens
  misc_RNA (1)...(19): siRNA sense strand
gaagaagcugugugaacug

SEQ ID NO: 1889883 - RNA, 19 nt, Homo sapiens
  misc_RNA (1)...(19): siRNA sense strand
cagaccgccugccuuguga

SEQ ID NO: 1889884 - RNA, 19 nt, Homo sapiens
  misc_RNA (1)...(19): siRNA sense strand
cgaguuugaucccaccaau

SEQ ID NO: 1889885 - RNA, 19 nt, Homo sapiens
  misc_RNA (1)...(19): siRNA sense strand
gcauggaggaucacuugga

SEQ ID NO: 1889886 - RNA, 19 nt, Homo sapiens
  misc_RNA (1)...(19): siRNA sense strand
cuaggagagcgcagcuuua

SEQ ID NO: 1889887 - RNA, 19 nt, Homo sapiens
  misc_RNA (1)...(19): siRNA sense strand
gugcccgcaugucuacuuu

SEQ ID NO: 1889888 - RNA, 19 nt, Homo sapiens
  misc_RNA (1)...(19): siRNA sense strand
caggacagaacgugaguga

SEQ ID NO: 1889889 - RNA, 19 nt, Homo sapiens
  misc_RNA (1)...(19): siRNA sense strand
gccaaauaccucaccaaga

SEQ ID NO: 1889890 - RNA, 19 nt, Homo sapiens
  misc_RNA (1)...(19): siRNA sense strand
cuaucaauaaggccaaaua

SEQ ID NO: 1889891 - RNA, 19 nt, Homo sapiens
  misc_RNA (1)...(19): siRNA sense strand
guuaagaugcuggaugaga

SEQ ID NO: 1889892 - RNA, 19 nt, Homo sapiens
  misc_RNA (1)...(19): siRNA sense strand
gacagaacgugagugacau

SEQ ID NO: 1889893 - RNA, 19 nt, Homo sapiens
  misc_RNA (1)...(19): siRNA sense strand
agccaacaaugccaccuuu

SEQ ID NO: 1889894 - RNA, 19 nt, Homo sapiens
  misc_RNA (1)...(19): siRNA sense strand
agcagggauucuaucaaua

SEQ ID NO: 1889895 - RNA, 19 nt, Homo sapiens
  misc_RNA (1)...(19): siRNA sense strand
cagagugcccgcaugucua

SEQ ID NO: 1889896 - RNA, 19 nt, Homo sapiens
  misc_RNA (1)...(19): siRNA sense strand
ucaauaaggccaaauaccu

SEQ ID NO: 1889897 - RNA, 19 nt, Homo sapiens
  misc_RNA (1)...(19): siRNA sense strand
ugagacccuuccuggagaa

SEQ ID NO: 1889898 - RNA, 19 nt, Homo sapiens
  misc_RNA (1)...(19): siRNA sense strand
cgugaugccaggcgaguuu

SEQ ID NO: 1889899 - RNA, 19 nt, Homo sapiens
  misc_RNA (1)...(19): siRNA sense strand
gcguggaggcuguuaagau

SEQ ID NO: 1889900 - RNA, 19 nt, Homo sapiens
  misc_RNA (1)...(19): siRNA sense strand
ggugggcacucuguucaag

SEQ ID NO: 1889901 - RNA, 19 nt, Homo sapiens
  misc_RNA (1)...(19): siRNA sense strand
augacgagcuggucuugga

SEQ ID NO: 1889902 - RNA, 19 nt, Homo sapiens
  misc_RNA (1)...(19): siRNA sense strand
gugaagaagcugugugaac

SEQ ID NO: 1889903 - RNA, 19 nt, Homo sapiens
  misc_RNA (1)...(19): siRNA sense strand
ccagagugcccgcaugucu

SEQ ID NO: 1889904 - RNA, 19 nt, Homo sapiens
  misc_RNA (1)...(19): siRNA sense strand
gaguuugaucccaccaauu

SEQ ID NO: 1889905 - RNA, 19 nt, Homo sapiens
  misc_RNA (1)...(19): siRNA sense strand
cugcagcguaucaaacuaa

SEQ ID NO: 1889906 - RNA, 19 nt, Homo sapiens
  misc_RNA (1)...(19): siRNA sense strand
cagauagguuugugcuacu

SEQ ID NO: 1889907 - RNA, 19 nt, Homo sapiens
  misc_RNA (1)...(19): siRNA sense strand
cagagcagggauucuauca

SEQ ID NO: 1889908 - RNA, 19 nt, Homo sapiens
  misc_RNA (1)...(19): siRNA sense strand
ugaacugcagcguaucaaa

SEQ ID NO: 1889909 - RNA, 19 nt, Homo sapiens
  misc_RNA (1)...(19): siRNA sense strand
ggacaucaggacagaacgu

SEQ ID NO: 1889910 - RNA, 19 nt, Homo sapiens
  misc_RNA (1)...(19): siRNA sense strand
cagggauucuaucaauaag

SEQ ID NO: 1889911 - RNA, 19 nt, Homo sapiens
  misc_RNA (1)...(19): siRNA sense strand
uaggagagcgcagcuuuag

SEQ ID NO: 1889912 - RNA, 19 nt, Homo sapiens
  misc_RNA (1)...(19): siRNA sense strand
acagcagcauggaggauca

SEQ ID NO: 1889913 - RNA, 19 nt, Homo sapiens
  misc_RNA (1)...(19): siRNA sense strand
gagugggagugaagaagcu

SEQ ID NO: 1889914 - RNA, 19 nt, Homo sapiens
  misc_RNA (1)...(19): siRNA sense strand
ugagagacgacgggaaguu

SEQ ID NO: 1889915 - RNA, 19 nt, Homo sapiens
  misc_RNA (1)...(19): siRNA sense strand
caguaugcccacauuuaug

SEQ ID NO: 1889916 - RNA, 19 nt, Homo sapiens
  misc_RNA (1)...(19): siRNA sense strand
gcacccagagcagggauuc

SEQ ID NO: 1889917 - RNA, 19 nt, Homo sapiens
  misc_RNA (1)...(19): siRNA sense strand
gaagauagcugaccaguug

SEQ ID NO: 1889918 - RNA, 19 nt, Homo sapiens
  misc_RNA (1)...(19): siRNA sense strand
gaaaacaacuggaacauuu

SEQ ID NO: 1889919 - RNA, 19 nt, Homo sapiens
  misc_RNA (1)...(19): siRNA sense strand
ggacacagaugguauaugg

SEQ ID NO: 1889920 - RNA, 19 nt, Homo sapiens
  misc_RNA (1)...(19): siRNA sense strand
agagaaggcuggcggauua

SEQ ID NO: 1889921 - RNA, 19 nt, Homo sapiens
  misc_RNA (1)...(19): siRNA sense strand
ggaaaccucuaagaagaua

SEQ ID NO: 1889922 - RNA, 19 nt, Homo sapiens
  misc_RNA (1)...(19): siRNA sense strand
ugaaggagaucacccagua

SEQ ID NO: 1889923 - RNA, 19 nt, Homo sapiens
  misc_RNA (1)...(19): siRNA sense strand
gaagagguaugcuguguuc

SEQ ID NO: 1889924 - RNA, 19 nt, Homo sapiens
  misc_RNA (1)...(19): siRNA sense strand
gaagaaggcaagaaauuga

SEQ ID NO: 1889925 - RNA, 19 nt, Homo sapiens
  misc_RNA (1)...(19): siRNA sense strand
gcagugcaguggauuacua

SEQ ID NO: 1889926 - RNA, 19 nt, Homo sapiens
  misc_RNA (1)...(19): siRNA sense strand
gaaaggaggcugaugacaa

SEQ ID NO: 1889927 - RNA, 19 nt, Homo sapiens
  misc_RNA (1)...(19): siRNA sense strand
ggacaggcguuacgaguuc

SEQ ID NO: 1889928 - RNA, 19 nt, Homo sapiens
  misc_RNA (1)...(19): siRNA sense strand
gaagaaugaugucuacaag

SEQ ID NO: 1889929 - RNA, 19 nt, Homo sapiens
  misc_RNA (1)...(19): siRNA sense strand
gaucuggacuugccaaauc

SEQ ID NO: 1889930 - RNA, 19 nt, Homo sapiens
  misc_RNA (1)...(19): siRNA sense strand
ugaagaggcuggccaguga

SEQ ID NO: 1889931 - RNA, 19 nt, Homo sapiens
  misc_RNA (1)...(19): siRNA sense strand
gaucaacgcugagcuguca

SEQ ID NO: 1889932 - RNA, 19 nt, Homo sapiens
  misc_RNA (1)...(19): siRNA sense strand
gguaugcuguguucaauga

SEQ ID NO: 1889933 - RNA, 19 nt, Homo sapiens
  misc_RNA (1)...(19): siRNA sense strand
gaacugcagcugauuaaga

SEQ ID NO: 1889934 - RNA, 19 nt, Homo sapiens
  misc_RNA (1)...(19): siRNA sense strand
ggacggauaagauggauuu

SEQ ID NO: 1889935 - RNA, 19 nt, Homo sapiens
  misc_RNA (1)...(19): siRNA sense strand
ggcaagaaauugaagaaga

SEQ ID NO: 1889936 - RNA, 19 nt, Homo sapiens
  misc_RNA (1)...(19): siRNA sense strand
gcaagaaauugaagaagag

SEQ ID NO: 1889937 - RNA, 19 nt, Homo sapiens
  misc_RNA (1)...(19): siRNA sense strand
aagacaggcuggcucauua

SEQ ID NO: 1889938 - RNA, 19 nt, Homo sapiens
  misc_RNA (1)...(19): siRNA sense strand
gaaagugccuguggagcaa

SEQ ID NO: 1889939 - RNA, 19 nt, Homo sapiens
  misc_RNA (1)...(19): siRNA sense strand
cagaugcugucgccacuua

SEQ ID NO: 1889940 - RNA, 19 nt, Homo sapiens
  misc_RNA (1)...(19): siRNA sense strand
gcaguggauuacuacuuua

SEQ ID NO: 1889941 - RNA, 19 nt, Homo sapiens
  misc_RNA (1)...(19): siRNA sense strand
gaaggagccuggugagaag

SEQ ID NO: 1889942 - RNA, 19 nt, Homo sapiens
  misc_RNA (1)...(19): siRNA sense strand
gcgaggaacaggcgaaaua

SEQ ID NO: 1889943 - RNA, 19 nt, Homo sapiens
  misc_RNA (1)...(19): siRNA sense strand
gaagaggugugugaugaga

SEQ ID NO: 1889944 - RNA, 19 nt, Homo sapiens
  misc_RNA (1)...(19): siRNA sense strand
caaagaggaucuggacuug

SEQ ID NO: 1889945 - RNA, 19 nt, Homo sapiens
  misc_RNA (1)...(19): siRNA sense strand
caaaucacuugguggguuu

SEQ ID NO: 1889946 - RNA, 19 nt, Homo sapiens
  misc_RNA (1)...(19): siRNA sense strand
gcagagccauccagcgauu

SEQ ID NO: 1889947 - RNA, 19 nt, Homo sapiens
  misc_RNA (1)...(19): siRNA sense strand
uaagauggauuugcgguuu

SEQ ID NO: 1889948 - RNA, 19 nt, Homo sapiens
  misc_RNA (1)...(19): siRNA sense strand
gagauuguuucagaagaua

SEQ ID NO: 1889949 - RNA, 19 nt, Homo sapiens
  misc_RNA (1)...(19): siRNA sense strand
ggagaagaaugaugucuac

SEQ ID NO: 1889950 - RNA, 19 nt, Homo sapiens
  misc_RNA (1)...(19): siRNA sense strand
ucaaagggcuccacaaggu

SEQ ID NO: 1889951 - RNA, 19 nt, Homo sapiens
  misc_RNA (1)...(19): siRNA sense strand
gaugaauccugccgccuuu

SEQ ID NO: 1889952 - RNA, 19 nt, Homo sapiens
  misc_RNA (1)...(19): siRNA sense strand
ggaagaaggcaagaaauug

SEQ ID NO: 1889953 - RNA, 19 nt, Homo sapiens
  misc_RNA (1)...(19): siRNA sense strand
gaacuacuuccucaugauu

SEQ ID NO: 1889954 - RNA, 19 nt, Homo sapiens
  misc_RNA (1)...(19): siRNA sense strand
ggaggagggugcuucguau

SEQ ID NO: 1889955 - RNA, 19 nt, Homo sapiens
  misc_RNA (1)...(19): siRNA sense strand
cucggaagcuggaagauua

SEQ ID NO: 1889956 - RNA, 19 nt, Homo sapiens
  misc_RNA (1)...(19): siRNA sense strand
ucuacaaucucuaugagua

SEQ ID NO: 1889957 - RNA, 19 nt, Homo sapiens
  misc_RNA (1)...(19): siRNA sense strand
cagaggacaucuccacauu

SEQ ID NO: 1889958 - RNA, 19 nt, Homo sapiens
  misc_RNA (1)...(19): siRNA sense strand
ggagauuguuucagaagau

SEQ ID NO: 1889959 - RNA, 19 nt, Homo sapiens
  misc_RNA (1)...(19): siRNA sense strand
gugaugagauuaagagcaa

SEQ ID NO: 1889960 - RNA, 19 nt, Homo sapiens
  misc_RNA (1)...(19): siRNA sense strand
cgauaucccuugccgguuu

SEQ ID NO: 1889961 - RNA, 19 nt, Homo sapiens
  misc_RNA (1)...(19): siRNA sense strand
cccaacagcuucccagaaa

SEQ ID NO: 1889962 - RNA, 19 nt, Homo sapiens
  misc_RNA (1)...(19): siRNA sense strand
ugaaguacguccacccauu

SEQ ID NO: 1889963 - RNA, 19 nt, Homo sapiens
  misc_RNA (1)...(19): siRNA sense strand
gagcagguacuuucacauu

SEQ ID NO: 1889964 - RNA, 19 nt, Homo sapiens
  misc_RNA (1)...(19): siRNA sense strand
aaacacaccuucgaaguuc

SEQ ID NO: 1889965 - RNA, 19 nt, Homo sapiens
  misc_RNA (1)...(19): siRNA sense strand
gugaagcgcugcaagaaca

SEQ ID NO: 1889966 - RNA, 19 nt, Homo sapiens
  misc_RNA (1)...(19): siRNA sense strand
gauaucccuugccgguuua

SEQ ID NO: 1889967 - RNA, 19 nt, Homo sapiens
  misc_RNA (1)...(19): siRNA sense strand
gaugacggaagcagauuua

SEQ ID NO: 1889968 - RNA, 19 nt, Homo sapiens
  misc_RNA (1)...(19): siRNA sense strand
caacaucuaugcagacaac

SEQ ID NO: 1889969 - RNA, 19 nt, Homo sapiens
  misc_RNA (1)...(19): siRNA sense strand
aaacugaccugaagaccau

SEQ ID NO: 1889970 - RNA, 19 nt, Homo sapiens
  misc_RNA (1)...(19): siRNA sense strand
acauggaggugcuguauga

SEQ ID NO: 1889971 - RNA, 19 nt, Homo sapiens
  misc_RNA (1)...(19): siRNA sense strand
gaacauggaggugcuguau

SEQ ID NO: 1889972 - RNA, 19 nt, Homo sapiens
  misc_RNA (1)...(19): siRNA sense strand
gaagacaggcuggcucauu

SEQ ID NO: 1889973 - RNA, 19 nt, Homo sapiens
  misc_RNA (1)...(19): siRNA sense strand
acagggagauuguuucaga

SEQ ID NO: 1889974 - RNA, 19 nt, Homo sapiens
  misc_RNA (1)...(19): siRNA sense strand
caaggaagaaggcaagaaa

SEQ ID NO: 1889975 - RNA, 19 nt, Homo sapiens
  misc_RNA (1)...(19): siRNA sense strand
gcgcagggcauccgucuuu

SEQ ID NO: 1889976 - RNA, 19 nt, Homo sapiens
  misc_RNA (1)...(19): siRNA sense strand
gagcagaagucuacaucca

SEQ ID NO: 1889977 - RNA, 19 nt, Homo sapiens
  misc_RNA (1)...(19): siRNA sense strand
ccuuagagcuggacacaga

SEQ ID NO: 1889978 - RNA, 19 nt, Homo sapiens
  misc_RNA (1)...(19): siRNA sense strand
gagaugagcagguacuuuc

SEQ ID NO: 1889979 - RNA, 19 nt, Homo sapiens
  misc_RNA (1)...(19): siRNA sense strand
caaagcgccuggccgaguu

SEQ ID NO: 1889980 - RNA, 19 nt, Homo sapiens
  misc_RNA (1)...(19): siRNA sense strand
gaacaucauggucaaggaa

SEQ ID NO: 1889981 - RNA, 19 nt, Homo sapiens
  misc_RNA (1)...(19): siRNA sense strand
aggauuaugucgcaaauga

SEQ ID NO: 1889982 - RNA, 19 nt, Homo sapiens
  misc_RNA (1)...(19): siRNA sense strand
cauccucucugcuucauga

SEQ ID NO: 1889983 - RNA, 19 nt, Homo sapiens
  misc_RNA (1)...(19): siRNA sense strand
caaacacaccuucgaaguu

SEQ ID NO: 1889984 - RNA, 19 nt, Homo sapiens
  misc_RNA (1)...(19): siRNA sense strand
gaccagauuaugaugauuu

SEQ ID NO: 1889985 - RNA, 19 nt, Homo sapiens
  misc_RNA (1)...(19): siRNA sense strand
cagaacuacuuccucauga

SEQ ID NO: 1889986 - RNA, 19 nt, Homo sapiens
  misc_RNA (1)...(19): siRNA sense strand
gaagcgccauccagaagau

SEQ ID NO: 1889987 - RNA, 19 nt, Homo sapiens
  misc_RNA (1)...(19): siRNA sense strand
gauugggacuacuacauug

SEQ ID NO: 1889988 - RNA, 19 nt, Homo sapiens
  misc_RNA (1)...(19): siRNA sense strand
gccaagugcuccugacaug

SEQ ID NO: 1889989 - RNA, 19 nt, Homo sapiens
  misc_RNA (1)...(19): siRNA sense strand
gggaauuucuucucuggau

SEQ ID NO: 1889990 - RNA, 19 nt, Homo sapiens
  misc_RNA (1)...(19): siRNA sense strand
gcuccaacauggucuacaa

SEQ ID NO: 1889991 - RNA, 19 nt, Homo sapiens
  misc_RNA (1)...(19): siRNA sense strand
uaagguggcuuugcccuau

SEQ ID NO: 1889992 - RNA, 19 nt, Homo sapiens
  misc_RNA (1)...(19): siRNA sense strand
gaccuuccguggcagauug

SEQ ID NO: 1889993 - RNA, 19 nt, Homo sapiens
  misc_RNA (1)...(19): siRNA sense strand
ggauugggacuacuacauu

SEQ ID NO: 1889994 - RNA, 19 nt, Homo sapiens
  misc_RNA (1)...(19): siRNA sense strand
uauucgagcucaucucuga

SEQ ID NO: 1889995 - RNA, 19 nt, Homo sapiens
  misc_RNA (1)...(19): siRNA sense strand
gagcaggaguucaauaagc

SEQ ID NO: 1889996 - RNA, 19 nt, Homo sapiens
  misc_RNA (1)...(19): siRNA sense strand
gaagagggacaguuaccuu

SEQ ID NO: 1889997 - RNA, 19 nt, Homo sapiens
  misc_RNA (1)...(19): siRNA sense strand
ccuauaaaccguauuucua

SEQ ID NO: 1889998 - RNA, 19 nt, Homo sapiens
  misc_RNA (1)...(19): siRNA sense strand
ggacuugccaaaucacuug

SEQ ID NO: 1889999 - RNA, 19 nt, Homo sapiens
  misc_RNA (1)...(19): siRNA sense strand
ggcagaaacugaccugaag

SEQ ID NO: 1890000 - RNA, 19 nt, Homo sapiens
  misc_RNA (1)...(19): siRNA sense strand
ggacuucggccucguaaag

SEQ ID NO: 1890001 - RNA, 19 nt, Homo sapiens
  misc_RNA (1)...(19): siRNA sense strand
agaaugaugucuacaagca

SEQ ID NO: 1890002 - RNA, 19 nt, Homo sapiens
  misc_RNA (1)...(19): siRNA sense strand
gacacgugcuggacucuga

SEQ ID NO: 1890003 - RNA, 19 nt, Homo sapiens
  misc_RNA (1)...(19): siRNA sense strand
ggccagggcuaccucauca

SEQ ID NO: 1890004 - RNA, 19 nt, Homo sapiens
  misc_RNA (1)...(19): siRNA sense strand
uggaggaucuugucaaagu

SEQ ID NO: 1890005 - RNA, 19 nt, Homo sapiens
  misc_RNA (1)...(19): siRNA sense strand
gcugagacagaccagauua

SEQ ID NO: 1890006 - RNA, 19 nt, Homo sapiens
  misc_RNA (1)...(19): siRNA sense strand
caccaucacucagaagauu

SEQ ID NO: 1890007 - RNA, 19 nt, Homo sapiens
  misc_RNA (1)...(19): siRNA sense strand
gaggacaucuccacauucg

SEQ ID NO: 1890008 - RNA, 19 nt, Homo sapiens
  misc_RNA (1)...(19): siRNA sense strand
ucaauaagccuggagcaaa

SEQ ID NO: 1890009 - RNA, 19 nt, Homo sapiens
  misc_RNA (1)...(19): siRNA sense strand
gagacagaccagauuauga

SEQ ID NO: 1890010 - RNA, 19 nt, Homo sapiens
  misc_RNA (1)...(19): siRNA sense strand
gaaguacguccacccauuc

SEQ ID NO: 1890011 - RNA, 19 nt, Homo sapiens
  misc_RNA (1)...(19): siRNA sense strand
gaacauugcccagcacuac

SEQ ID NO: 1890012 - RNA, 19 nt, Homo sapiens
  misc_RNA (1)...(19): siRNA sense strand
cucagaagauucagaagaa

SEQ ID NO: 1890013 - RNA, 19 nt, Homo sapiens
  misc_RNA (1)...(19): siRNA sense strand
ugcaguggauuacuacuuu

SEQ ID NO: 1890014 - RNA, 19 nt, Homo sapiens
  misc_RNA (1)...(19): siRNA sense strand
gugaagaagcccaaaguga

SEQ ID NO: 1890015 - RNA, 19 nt, Homo sapiens
  misc_RNA (1)...(19): siRNA sense strand
gagcugaucgagcagauug

SEQ ID NO: 1890016 - RNA, 19 nt, Homo sapiens
  misc_RNA (1)...(19): siRNA sense strand
uaacuauggcggaaucaaa

SEQ ID NO: 1890017 - RNA, 19 nt, Homo sapiens
  misc_RNA (1)...(19): siRNA sense strand
cuacucagcugacauguau

SEQ ID NO: 1890018 - RNA, 19 nt, Homo sapiens
  misc_RNA (1)...(19): siRNA sense strand
ugaaggagccagugaagga

SEQ ID NO: 1890019 - RNA, 19 nt, Homo sapiens
  misc_RNA (1)...(19): siRNA sense strand
cauggaagguucugugucu

SEQ ID NO: 1890020 - RNA, 19 nt, Homo sapiens
  misc_RNA (1)...(19): siRNA sense strand
agaggaggcugcccugugu

SEQ ID NO: 1890021 - RNA, 19 nt, Homo sapiens
  misc_RNA (1)...(19): siRNA sense strand
ggacaccuuacaccgagua

SEQ ID NO: 1890022 - RNA, 19 nt, Homo sapiens
  misc_RNA (1)...(19): siRNA sense strand
gaaggagccagugaaggaa

SEQ ID NO: 1890023 - RNA, 19 nt, Homo sapiens
  misc_RNA (1)...(19): siRNA sense strand
ccacucaucaccaauguca

SEQ ID NO: 1890024 - RNA, 19 nt, Homo sapiens
  misc_RNA (1)...(19): siRNA sense strand
caccuuacaccgaguaugu

SEQ ID NO: 1890025 - RNA, 19 nt, Homo sapiens
  misc_RNA (1)...(19): siRNA sense strand
gcgcuuaaccacacucucu

SEQ ID NO: 1890026 - RNA, 19 nt, Homo sapiens
  misc_RNA (1)...(19): siRNA sense strand
uaccagggcguccguguga

SEQ ID NO: 1890027 - RNA, 19 nt, Homo sapiens
  misc_RNA (1)...(19): siRNA sense strand
ccaccuccacccugcagua

SEQ ID NO: 1890028 - RNA, 19 nt, Homo sapiens
  misc_RNA (1)...(19): siRNA sense strand
gcucguugaccaucgacaa

SEQ ID NO: 1890029 - RNA, 19 nt, Homo sapiens
  misc_RNA (1)...(19): siRNA sense strand
gacauggaagguucugugu

SEQ ID NO: 1890030 - RNA, 19 nt, Homo sapiens
  misc_RNA (1)...(19): siRNA sense strand
ccgaguaugugccccauga

SEQ ID NO: 1890031 - RNA, 19 nt, Homo sapiens
  misc_RNA (1)...(19): siRNA sense strand
aggcaccccucaccuauuu

SEQ ID NO: 1890032 - RNA, 19 nt, Homo sapiens
  misc_RNA (1)...(19): siRNA sense strand
acugauggcuuuguaauua

SEQ ID NO: 1890033 - RNA, 19 nt, Homo sapiens
  misc_RNA (1)...(19): siRNA sense strand
cauguccucuuucaaguua

SEQ ID NO: 1890034 - RNA, 19 nt, Homo sapiens
  misc_RNA (1)...(19): siRNA sense strand
caacauguccucuuucaag

SEQ ID NO: 1890035 - RNA, 19 nt, Homo sapiens
  misc_RNA (1)...(19): siRNA sense strand
cgauggcacugauggcuuu

SEQ ID NO: 1890036 - RNA, 19 nt, Homo sapiens
  misc_RNA (1)...(19): siRNA sense strand
gguucaacauguccucuuu

SEQ ID NO: 1890037 - RNA, 19 nt, Homo sapiens
  misc_RNA (1)...(19): siRNA sense strand
gaacuugagguuaagaaca

SEQ ID NO: 1890038 - RNA, 19 nt, Homo sapiens
  misc_RNA (1)...(19): siRNA sense strand
gcacugauggcuuuguaau

SEQ ID NO: 1890039 - RNA, 19 nt, Homo sapiens
  misc_RNA (1)...(19): siRNA sense strand
ggucagaggucaaguucac

SEQ ID NO: 1890040 - RNA, 19 nt, Homo sapiens
  misc_RNA (1)...(19): siRNA sense strand
gggaagaucaccugugcuu

SEQ ID NO: 1890041 - RNA, 19 nt, Homo sapiens
  misc_RNA (1)...(19): siRNA sense strand
cugauggcuuuguaauuaa

SEQ ID NO: 1890042 - RNA, 19 nt, Homo sapiens
  misc_RNA (1)...(19): siRNA sense strand
ggucaacccugaagaucac

SEQ ID NO: 1890043 - RNA, 19 nt, Homo sapiens
  misc_RNA (1)...(19): siRNA sense strand
uggcacugauggcuuugua

SEQ ID NO: 1890044 - RNA, 19 nt, Homo sapiens
  misc_RNA (1)...(19): siRNA sense strand
gcaagaacaacgggaagau

SEQ ID NO: 1890045 - RNA, 19 nt, Homo sapiens
  misc_RNA (1)...(19): siRNA sense strand
ggacagacaagcugaaccu

SEQ ID NO: 1890046 - RNA, 19 nt, Homo sapiens
  misc_RNA (1)...(19): siRNA sense strand
aagaacaacgggaagauca

SEQ ID NO: 1890047 - RNA, 19 nt, Homo sapiens
  misc_RNA (1)...(19): siRNA sense strand
uguccucuuucaaguuaaa

SEQ ID NO: 1890048 - RNA, 19 nt, Homo sapiens
  misc_RNA (1)...(19): siRNA sense strand
cagugaccuuugagaguga

SEQ ID NO: 1890049 - RNA, 19 nt, Homo sapiens
  misc_RNA (1)...(19): siRNA sense strand
caagaacaacgggaagauc

SEQ ID NO: 1890050 - RNA, 19 nt, Homo sapiens
  misc_RNA (1)...(19): siRNA sense strand
gagcugacuuuucccaaca

SEQ ID NO: 1890051 - RNA, 19 nt, Homo sapiens
  misc_RNA (1)...(19): siRNA sense strand
aacuugagguuaagaacau

SEQ ID NO: 1890052 - RNA, 19 nt, Homo sapiens
  misc_RNA (1)...(19): siRNA sense strand
uucaacauguccucuuuca

SEQ ID NO: 1890053 - RNA, 19 nt, Homo sapiens
  misc_RNA (1)...(19): siRNA sense strand
gacaagcugaaccugcauu

SEQ ID NO: 1890054 - RNA, 19 nt, Homo sapiens
  misc_RNA (1)...(19): siRNA sense strand
gggaacuugagguuaagaa

SEQ ID NO: 1890055 - RNA, 19 nt, Homo sapiens
  misc_RNA (1)...(19): siRNA sense strand
cagcgaauccaccauuguc

SEQ ID NO: 1890056 - RNA, 19 nt, Homo sapiens
  misc_RNA (1)...(19): siRNA sense strand
aauccaccauugucugcaa

SEQ ID NO: 1890057 - RNA, 19 nt, Homo sapiens
  misc_RNA (1)...(19): siRNA sense strand
gcaagaagcggaccucuau

SEQ ID NO: 1890058 - RNA, 19 nt, Homo sapiens
  misc_RNA (1)...(19): siRNA sense strand
ccacaagcaucgacaagau

SEQ ID NO: 1890059 - RNA, 19 nt, Homo sapiens
  misc_RNA (1)...(19): siRNA sense strand
ucaagccgcugcugaacaa

SEQ ID NO: 1890060 - RNA, 19 nt, Homo sapiens
  misc_RNA (1)...(19): siRNA sense strand
gcagacgagcguucaguga

SEQ ID NO: 1890061 - RNA, 19 nt, Homo sapiens
  misc_RNA (1)...(19): siRNA sense strand
cggacgaccuggagcaguu

SEQ ID NO: 1890062 - RNA, 19 nt, Homo sapiens
  misc_RNA (1)...(19): siRNA sense strand
gccugcagcucgagaagga

SEQ ID NO: 1890063 - RNA, 19 nt, Homo sapiens
  misc_RNA (1)...(19): siRNA sense strand
ggagagccacuuccucaag

SEQ ID NO: 1890064 - RNA, 19 nt, Homo sapiens
  misc_RNA (1)...(19): siRNA sense strand
gcaguucgccaagcaguuc

SEQ ID NO: 1890065 - RNA, 19 nt, Homo sapiens
  misc_RNA (1)...(19): siRNA sense strand
gaacaugugcaagcucaag

SEQ ID NO: 1890066 - RNA, 19 nt, Homo sapiens
  misc_RNA (1)...(19): siRNA sense strand
ucaagaacaugugcaagcu

SEQ ID NO: 1890067 - RNA, 19 nt, Homo sapiens
  misc_RNA (1)...(19): siRNA sense strand
gacccguccucugucaaga

SEQ ID NO: 1890068 - RNA, 19 nt, Homo sapiens
  misc_RNA (1)...(19): siRNA sense strand
gggaggagcugcagaugga

SEQ ID NO: 1890069 - RNA, 19 nt, Homo sapiens
  misc_RNA (1)...(19): siRNA sense strand
gcaacuauguguucguguu

SEQ ID NO: 1890070 - RNA, 19 nt, Homo sapiens
  misc_RNA (1)...(19): siRNA sense strand
gcagauggaacccguguga

SEQ ID NO: 1890071 - RNA, 19 nt, Homo sapiens
  misc_RNA (1)...(19): siRNA sense strand
gcagaaggaccagcagaaa

SEQ ID NO: 1890072 - RNA, 19 nt, Homo sapiens
  misc_RNA (1)...(19): siRNA sense strand
agaaggaccagcagaaaga

SEQ ID NO: 1890073 - RNA, 19 nt, Homo sapiens
  misc_RNA (1)...(19): siRNA sense strand
ccuguuacauucucuaucu

SEQ ID NO: 1890074 - RNA, 19 nt, Homo sapiens
  misc_RNA (1)...(19): siRNA sense strand
ccagagcaacuauguguuc

SEQ ID NO: 1890075 - RNA, 19 nt, Homo sapiens
  misc_RNA (1)...(19): siRNA sense strand
gagcccagagcaucaguau

SEQ ID NO: 1890076 - RNA, 19 nt, Homo sapiens
  misc_RNA (1)...(19): siRNA sense strand
uacgcaacguggaguacua

SEQ ID NO: 1890077 - RNA, 19 nt, Homo sapiens
  misc_RNA (1)...(19): siRNA sense strand
aguccaagcuugugcucuu

SEQ ID NO: 1890078 - RNA, 19 nt, Homo sapiens
  misc_RNA (1)...(19): siRNA sense strand
guccaagcuugugcucuuu

SEQ ID NO: 1890079 - RNA, 19 nt, Homo sapiens
  misc_RNA (1)...(19): siRNA sense strand
guacuaccagagcaacuau

SEQ ID NO: 1890080 - RNA, 19 nt, Homo sapiens
  misc_RNA (1)...(19): siRNA sense strand
uaccagagcaacuaugugu

SEQ ID NO: 1890081 - RNA, 19 nt, Homo sapiens
  misc_RNA (1)...(19): siRNA sense strand
caacuauguguucguguuc

SEQ ID NO: 1890082 - RNA, 19 nt, Homo sapiens
  misc_RNA (1)...(19): siRNA sense strand
gaaggaccagcagaaagau

SEQ ID NO: 1890083 - RNA, 19 nt, Homo sapiens
  misc_RNA (1)...(19): siRNA sense strand
ggaccagcagcgcuucuca

SEQ ID NO: 1890084 - RNA, 19 nt, Homo sapiens
  misc_RNA (1)...(19): siRNA sense strand
cagaaggaccagcagaaag

SEQ ID NO: 1890085 - RNA, 19 nt, Homo sapiens
  misc_RNA (1)...(19): siRNA sense strand
gaaaggaugccaccucuua

SEQ ID NO: 1890086 - RNA, 19 nt, Homo sapiens
  misc_RNA (1)...(19): siRNA sense strand
gaugucagauggugaauuu

SEQ ID NO: 1890087 - RNA, 19 nt, Homo sapiens
  misc_RNA (1)...(19): siRNA sense strand
gcagagagccauucacuuu

SEQ ID NO: 1890088 - RNA, 19 nt, Homo sapiens
  misc_RNA (1)...(19): siRNA sense strand
cgacuaagcccaaaucuuu

SEQ ID NO: 1890089 - RNA, 19 nt, Homo sapiens
  misc_RNA (1)...(19): siRNA sense strand
guaccuacguuauuuaaga

SEQ ID NO: 1890090 - RNA, 19 nt, Homo sapiens
  misc_RNA (1)...(19): siRNA sense strand
gcauguaccuacguuauuu

SEQ ID NO: 1890091 - RNA, 19 nt, Homo sapiens
  misc_RNA (1)...(19): siRNA sense strand
acacaugaaugccaagaua

SEQ ID NO: 1890092 - RNA, 19 nt, Homo sapiens
  misc_RNA (1)...(19): siRNA sense strand
gaaacgagcaacuaucaaa

SEQ ID NO: 1890093 - RNA, 19 nt, Homo sapiens
  misc_RNA (1)...(19): siRNA sense strand
ggaagguagugaaugcaua

SEQ ID NO: 1890094 - RNA, 19 nt, Homo sapiens
  misc_RNA (1)...(19): siRNA sense strand
gacagaagauucgcaguuu

SEQ ID NO: 1890095 - RNA, 19 nt, Homo sapiens
  misc_RNA (1)...(19): siRNA sense strand
gagcaaaccguaugacauu

SEQ ID NO: 1890096 - RNA, 19 nt, Homo sapiens
  misc_RNA (1)...(19): siRNA sense strand
gcaguggcuuaucaucuua

SEQ ID NO: 1890097 - RNA, 19 nt, Homo sapiens
  misc_RNA (1)...(19): siRNA sense strand
gaucagcacuccaacagau

SEQ ID NO: 1890098 - RNA, 19 nt, Homo sapiens
  misc_RNA (1)...(19): siRNA sense strand
gagcugugguguuaucuug

SEQ ID NO: 1890099 - RNA, 19 nt, Homo sapiens
  misc_RNA (1)...(19): siRNA sense strand
uaagagagcaugaaugguu

SEQ ID NO: 1890100 - RNA, 19 nt, Homo sapiens
  misc_RNA (1)...(19): siRNA sense strand
gagcaugaaugguuuaaac

SEQ ID NO: 1890101 - RNA, 19 nt, Homo sapiens
  misc_RNA (1)...(19): siRNA sense strand
aagcauugaugaugaagua

SEQ ID NO: 1890102 - RNA, 19 nt, Homo sapiens
  misc_RNA (1)...(19): siRNA sense strand
cagaaguaaugaacaguuu

SEQ ID NO: 1890103 - RNA, 19 nt, Homo sapiens
  misc_RNA (1)...(19): siRNA sense strand
gacaaucggagaauaauga

SEQ ID NO: 1890104 - RNA, 19 nt, Homo sapiens
  misc_RNA (1)...(19): siRNA sense strand
ccugaaaccucauccagaa

SEQ ID NO: 1890105 - RNA, 19 nt, Homo sapiens
  misc_RNA (1)...(19): siRNA sense strand
caaggaauccgaagucaga

SEQ ID NO: 1890106 - RNA, 19 nt, Homo sapiens
  misc_RNA (1)...(19): siRNA sense strand
gucuggaggugaauuauuu

SEQ ID NO: 1890107 - RNA, 19 nt, Homo sapiens
  misc_RNA (1)...(19): siRNA sense strand
gaugauagugccaugcaua

SEQ ID NO: 1890108 - RNA, 19 nt, Homo sapiens
  misc_RNA (1)...(19): siRNA sense strand
gagcaacuaucaaagacau

SEQ ID NO: 1890109 - RNA, 19 nt, Homo sapiens
  misc_RNA (1)...(19): siRNA sense strand
gcugugguguuaucuugua

SEQ ID NO: 1890110 - RNA, 19 nt, Homo sapiens
  misc_RNA (1)...(19): siRNA sense strand
acagaagauucgcaguuua

SEQ ID NO: 1890111 - RNA, 19 nt, Homo sapiens
  misc_RNA (1)...(19): siRNA sense strand
gcagucacaccauggauuu

SEQ ID NO: 1890112 - RNA, 19 nt, Homo sapiens
  misc_RNA (1)...(19): siRNA sense strand
ucaauuaacaggccauaaa

SEQ ID NO: 1890113 - RNA, 19 nt, Homo sapiens
  misc_RNA (1)...(19): siRNA sense strand
gaggugaauuauuugacua

SEQ ID NO: 1890114 - RNA, 19 nt, Homo sapiens
  misc_RNA (1)...(19): siRNA sense strand
gaaguuuaccgagcuauga

SEQ ID NO: 1890115 - RNA, 19 nt, Homo sapiens
  misc_RNA (1)...(19): siRNA sense strand
ccagucugauuacuacuuu

SEQ ID NO: 1890116 - RNA, 19 nt, Homo sapiens
  misc_RNA (1)...(19): siRNA sense strand
gcaacuaucaaagacauaa

SEQ ID NO: 1890117 - RNA, 19 nt, Homo sapiens
  misc_RNA (1)...(19): siRNA sense strand
gauagugccaugcauauuc

SEQ ID NO: 1890118 - RNA, 19 nt, Homo sapiens
  misc_RNA (1)...(19): siRNA sense strand
guuuagauguuguuggaaa

SEQ ID NO: 1890119 - RNA, 19 nt, Homo sapiens
  misc_RNA (1)...(19): siRNA sense strand
gcauaugguuguucaucga

SEQ ID NO: 1890120 - RNA, 19 nt, Homo sapiens
  misc_RNA (1)...(19): siRNA sense strand
cacauugucuucaguuuca

SEQ ID NO: 1890121 - RNA, 19 nt, Homo sapiens
  misc_RNA (1)...(19): siRNA sense strand
cauuauggcugaaguuuac

SEQ ID NO: 1890122 - RNA, 19 nt, Homo sapiens
  misc_RNA (1)...(19): siRNA sense strand
ggaggugaauuauuugacu

SEQ ID NO: 1890123 - RNA, 19 nt, Homo sapiens
  misc_RNA (1)...(19): siRNA sense strand
gaauacgacuaagcccaaa

SEQ ID NO: 1890124 - RNA, 19 nt, Homo sapiens
  misc_RNA (1)...(19): siRNA sense strand
cagagaauguccuguugga

SEQ ID NO: 1890125 - RNA, 19 nt, Homo sapiens
  misc_RNA (1)...(19): siRNA sense strand
uugcggaucuccaaauuau

SEQ ID NO: 1890126 - RNA, 19 nt, Homo sapiens
  misc_RNA (1)...(19): siRNA sense strand
aacuuuaccugguugauaa

SEQ ID NO: 1890127 - RNA, 19 nt, Homo sapiens
  misc_RNA (1)...(19): siRNA sense strand
ugaagcagcuggauuuuga

SEQ ID NO: 1890128 - RNA, 19 nt, Homo sapiens
  misc_RNA (1)...(19): siRNA sense strand
caaaccguaugacauuaug

SEQ ID NO: 1890129 - RNA, 19 nt, Homo sapiens
  misc_RNA (1)...(19): siRNA sense strand
gcaaaccguaugacauuau

SEQ ID NO: 1890130 - RNA, 19 nt, Homo sapiens
  misc_RNA (1)...(19): siRNA sense strand
aacaagguuugcccaguua

SEQ ID NO: 1890131 - RNA, 19 nt, Homo sapiens
  misc_RNA (1)...(19): siRNA sense strand
gagcauguaccuacguuau

SEQ ID NO: 1890132 - RNA, 19 nt, Homo sapiens
  misc_RNA (1)...(19): siRNA sense strand
ccacucuccugaugcauau

SEQ ID NO: 1890133 - RNA, 19 nt, Homo sapiens
  misc_RNA (1)...(19): siRNA sense strand
gaaaugugugccagucuga

SEQ ID NO: 1890134 - RNA, 19 nt, Homo sapiens
  misc_RNA (1)...(19): siRNA sense strand
uggagaacaucaauuaaca

SEQ ID NO: 1890135 - RNA, 19 nt, Homo sapiens
  misc_RNA (1)...(19): siRNA sense strand
caguuuagauguuguugga

SEQ ID NO: 1890136 - RNA, 19 nt, Homo sapiens
  misc_RNA (1)...(19): siRNA sense strand
gaagauuggagaacaucaa

SEQ ID NO: 1890137 - RNA, 19 nt, Homo sapiens
  misc_RNA (1)...(19): siRNA sense strand
ugaugaggcugugaaagaa

SEQ ID NO: 1890138 - RNA, 19 nt, Homo sapiens
  misc_RNA (1)...(19): siRNA sense strand
gcuguggauuacugucaua

SEQ ID NO: 1890139 - RNA, 19 nt, Homo sapiens
  misc_RNA (1)...(19): siRNA sense strand
gaaaaugagcuuacaacuu

SEQ ID NO: 1890140 - RNA, 19 nt, Homo sapiens
  misc_RNA (1)...(19): siRNA sense strand
caaguggcgucaaggaauc

SEQ ID NO: 1890141 - RNA, 19 nt, Homo sapiens
  misc_RNA (1)...(19): siRNA sense strand
gacuaagcccaaaucuuua

SEQ ID NO: 1890142 - RNA, 19 nt, Homo sapiens
  misc_RNA (1)...(19): siRNA sense strand
caaagcaagauguccauug

SEQ ID NO: 1890143 - RNA, 19 nt, Homo sapiens
  misc_RNA (1)...(19): siRNA sense strand
gaugccaccucuuauagca

SEQ ID NO: 1890144 - RNA, 19 nt, Homo sapiens
  misc_RNA (1)...(19): siRNA sense strand
aagagagcaugaaugguuu

SEQ ID NO: 1890145 - RNA, 19 nt, Homo sapiens
  misc_RNA (1)...(19): siRNA sense strand
cauaagagagcaugaaugg

SEQ ID NO: 1890146 - RNA, 19 nt, Homo sapiens
  misc_RNA (1)...(19): siRNA sense strand
gcagguugacccacugaaa

SEQ ID NO: 1890147 - RNA, 19 nt, Homo sapiens
  misc_RNA (1)...(19): siRNA sense strand
cuaugaagcagcuggauuu

SEQ ID NO: 1890148 - RNA, 19 nt, Homo sapiens
  misc_RNA (1)...(19): siRNA sense strand
ccaaaucuuuagcugugaa

SEQ ID NO: 1890149 - RNA, 19 nt, Homo sapiens
  misc_RNA (1)...(19): siRNA sense strand
aaagcaagauguccauugg

SEQ ID NO: 1890150 - RNA, 19 nt, Homo sapiens
  misc_RNA (1)...(19): siRNA sense strand
gcaugaaugguuuaaacaa

SEQ ID NO: 1890151 - RNA, 19 nt, Homo sapiens
  misc_RNA (1)...(19): siRNA sense strand
gcacauugucuucaguuuc

SEQ ID NO: 1890152 - RNA, 19 nt, Homo sapiens
  misc_RNA (1)...(19): siRNA sense strand
ccacugaaacgagcaacua

SEQ ID NO: 1890153 - RNA, 19 nt, Homo sapiens
  misc_RNA (1)...(19): siRNA sense strand
gacuggcaauuacgugaaa

SEQ ID NO: 1890154 - RNA, 19 nt, Homo sapiens
  misc_RNA (1)...(19): siRNA sense strand
gugaaugcauaccaucuuc

SEQ ID NO: 1890155 - RNA, 19 nt, Homo sapiens
  misc_RNA (1)...(19): siRNA sense strand
caugaaugguuuaaacaag

SEQ ID NO: 1890156 - RNA, 19 nt, Homo sapiens
  misc_RNA (1)...(19): siRNA sense strand
gggugaagaucggacacua

SEQ ID NO: 1890157 - RNA, 19 nt, Homo sapiens
  misc_RNA (1)...(19): siRNA sense strand
ccauaaaguggcaguuaaa

SEQ ID NO: 1890158 - RNA, 19 nt, Homo sapiens
  misc_RNA (1)...(19): siRNA sense strand
uaucuuguaugcucuucuu

SEQ ID NO: 1890159 - RNA, 19 nt, Homo sapiens
  misc_RNA (1)...(19): siRNA sense strand
gagaucugguuccucaaca

SEQ ID NO: 1890160 - RNA, 19 nt, Homo sapiens
  misc_RNA (1)...(19): siRNA sense strand
ggagcuaucuuuuggacuu

SEQ ID NO: 1890161 - RNA, 19 nt, Homo sapiens
  misc_RNA (1)...(19): siRNA sense strand
gcaauuacgugaaaaugag

SEQ ID NO: 1890162 - RNA, 19 nt, Homo sapiens
  misc_RNA (1)...(19): siRNA sense strand
gcauaccaucuucguguaa

SEQ ID NO: 1890163 - RNA, 19 nt, Homo sapiens
  misc_RNA (1)...(19): siRNA sense strand
gaagauucgcaguuuagau

SEQ ID NO: 1890164 - RNA, 19 nt, Homo sapiens
  misc_RNA (1)...(19): siRNA sense strand
gaugcuaacgucauugaug

SEQ ID NO: 1890165 - RNA, 19 nt, Homo sapiens
  misc_RNA (1)...(19): siRNA sense strand
ugaaagaagugugugaaaa

SEQ ID NO: 1890166 - RNA, 19 nt, Homo sapiens
  misc_RNA (1)...(19): siRNA sense strand
gacauuauggcugaaguuu

SEQ ID NO: 1890167 - RNA, 19 nt, Homo sapiens
  misc_RNA (1)...(19): siRNA sense strand
gauucgcaguuuagauguu

SEQ ID NO: 1890168 - RNA, 19 nt, Homo sapiens
  misc_RNA (1)...(19): siRNA sense strand
gcugaaguuuaccgagcua

SEQ ID NO: 1890169 - RNA, 19 nt, Homo sapiens
  misc_RNA (1)...(19): siRNA sense strand
guacagaaucagaaguaau

SEQ ID NO: 1890170 - RNA, 19 nt, Homo sapiens
  misc_RNA (1)...(19): siRNA sense strand
uacagaaucagaaguaaug

SEQ ID NO: 1890171 - RNA, 19 nt, Homo sapiens
  misc_RNA (1)...(19): siRNA sense strand
gaagguagugaaugcauac

SEQ ID NO: 1890172 - RNA, 19 nt, Homo sapiens
  misc_RNA (1)...(19): siRNA sense strand
gaaaccucauccagaaagg

SEQ ID NO: 1890173 - RNA, 19 nt, Homo sapiens
  misc_RNA (1)...(19): siRNA sense strand
agacagaagauucgcaguu

SEQ ID NO: 1890174 - RNA, 19 nt, Homo sapiens
  misc_RNA (1)...(19): siRNA sense strand
ccaaguggcgucaaggaau

SEQ ID NO: 1890175 - RNA, 19 nt, Homo sapiens
  misc_RNA (1)...(19): siRNA sense strand
ugcaguggcuuaucaucuu

SEQ ID NO: 1890176 - RNA, 19 nt, Homo sapiens
  misc_RNA (1)...(19): siRNA sense strand
gugaaagaagugugugaaa

SEQ ID NO: 1890177 - RNA, 19 nt, Homo sapiens
  misc_RNA (1)...(19): siRNA sense strand
guggcacccucccauuuga

SEQ ID NO: 1890178 - RNA, 19 nt, Homo sapiens
  misc_RNA (1)...(19): siRNA sense strand
gguaauggaauaugugucu

SEQ ID NO: 1890179 - RNA, 19 nt, Homo sapiens
  misc_RNA (1)...(19): siRNA sense strand
ccuguuggaugcacacaug

SEQ ID NO: 1890180 - RNA, 19 nt, Homo sapiens
  misc_RNA (1)...(19): siRNA sense strand
gagaacuaguugcggaucu

SEQ ID NO: 1890181 - RNA, 19 nt, Homo sapiens
  misc_RNA (1)...(19): siRNA sense strand
uuacacagaccaagaucaa

SEQ ID NO: 1890182 - RNA, 19 nt, Homo sapiens
  misc_RNA (1)...(19): siRNA sense strand
aaggaugccaccucuuaua

SEQ ID NO: 1890183 - RNA, 19 nt, Homo sapiens
  misc_RNA (1)...(19): siRNA sense strand
cagaagauucgcaguuuag

SEQ ID NO: 1890184 - RNA, 19 nt, Homo sapiens
  misc_RNA (1)...(19): siRNA sense strand
gacauaagagagcaugaau

SEQ ID NO: 1890185 - RNA, 19 nt, Homo sapiens
  misc_RNA (1)...(19): siRNA sense strand
cagcaaagguuucaguuua

SEQ ID NO: 1890186 - RNA, 19 nt, Homo sapiens
  misc_RNA (1)...(19): siRNA sense strand
gaaauuggaugauaucaag

SEQ ID NO: 1890187 - RNA, 19 nt, Homo sapiens
  misc_RNA (1)...(19): siRNA sense strand
gaagaacuuucacuuguug

SEQ ID NO: 1890188 - RNA, 19 nt, Homo sapiens
  misc_RNA (1)...(19): siRNA sense strand
cagaagauauuacagauug

SEQ ID NO: 1890189 - RNA, 19 nt, Homo sapiens
  misc_RNA (1)...(19): siRNA sense strand
ggaaugggauauggagaua

SEQ ID NO: 1890190 - RNA, 19 nt, Homo sapiens
  misc_RNA (1)...(19): siRNA sense strand
ucucagagcuccucaaaug

SEQ ID NO: 1890191 - RNA, 19 nt, Homo sapiens
  misc_RNA (1)...(19): siRNA sense strand
gacagaagaucucagcaaa

SEQ ID NO: 1890192 - RNA, 19 nt, Homo sapiens
  misc_RNA (1)...(19): siRNA sense strand
cagcagaaauuggaugaua

SEQ ID NO: 1890193 - RNA, 19 nt, Homo sapiens
  misc_RNA (1)...(19): siRNA sense strand
gaaguaagguauccaaggu

SEQ ID NO: 1890194 - RNA, 19 nt, Homo sapiens
  misc_RNA (1)...(19): siRNA sense strand
ggaaagaacugaaaaucaa

SEQ ID NO: 1890195 - RNA, 19 nt, Homo sapiens
  misc_RNA (1)...(19): siRNA sense strand
ccagaaguauuaacagaaa

SEQ ID NO: 1890196 - RNA, 19 nt, Homo sapiens
  misc_RNA (1)...(19): siRNA sense strand
gaagagcuauuccuacagu

SEQ ID NO: 1890197 - RNA, 19 nt, Homo sapiens
  misc_RNA (1)...(19): siRNA sense strand
caggaaauguucagagauu

SEQ ID NO: 1890198 - RNA, 19 nt, Homo sapiens
  misc_RNA (1)...(19): siRNA sense strand
gaaagucacaacagauaaa

SEQ ID NO: 1890199 - RNA, 19 nt, Homo sapiens
  misc_RNA (1)...(19): siRNA sense strand
gcaaagaaggaaugggaua

SEQ ID NO: 1890200 - RNA, 19 nt, Homo sapiens
  misc_RNA (1)...(19): siRNA sense strand
gccaagauauccuagagaa

SEQ ID NO: 1890201 - RNA, 19 nt, Homo sapiens
  misc_RNA (1)...(19): siRNA sense strand
cgagaaagaugcagaggau

SEQ ID NO: 1890202 - RNA, 19 nt, Homo sapiens
  misc_RNA (1)...(19): siRNA sense strand
gaagaucucagcaaagguu

SEQ ID NO: 1890203 - RNA, 19 nt, Homo sapiens
  misc_RNA (1)...(19): siRNA sense strand
cuuaugggcugccaagaua

SEQ ID NO: 1890204 - RNA, 19 nt, Homo sapiens
  misc_RNA (1)...(19): siRNA sense strand
gcuagugauucuacaguaa

SEQ ID NO: 1890205 - RNA, 19 nt, Homo sapiens
  misc_RNA (1)...(19): siRNA sense strand
gauaucaaggaucgaauua

SEQ ID NO: 1890206 - RNA, 19 nt, Homo sapiens
  misc_RNA (1)...(19): siRNA sense strand
cagaaugacagaaauagua

SEQ ID NO: 1890207 - RNA, 19 nt, Homo sapiens
  misc_RNA (1)...(19): siRNA sense strand
gaagcucaagcaagauuua

SEQ ID NO: 1890208 - RNA, 19 nt, Homo sapiens
  misc_RNA (1)...(19): siRNA sense strand
gaucggaaacuccauggua

SEQ ID NO: 1890209 - RNA, 19 nt, Homo sapiens
  misc_RNA (1)...(19): siRNA sense strand
gaaauaaggaaagaacuga

SEQ ID NO: 1890210 - RNA, 19 nt, Homo sapiens
  misc_RNA (1)...(19): siRNA sense strand
ucaaauggaucuucaaagg

SEQ ID NO: 1890211 - RNA, 19 nt, Homo sapiens
  misc_RNA (1)...(19): siRNA sense strand
ugagaaggcuguuaagaag

SEQ ID NO: 1890212 - RNA, 19 nt, Homo sapiens
  misc_RNA (1)...(19): siRNA sense strand
guaagaagagcuauuccua

SEQ ID NO: 1890213 - RNA, 19 nt, Homo sapiens
  misc_RNA (1)...(19): siRNA sense strand
uagaagaacuacaucacaa

SEQ ID NO: 1890214 - RNA, 19 nt, Homo sapiens
  misc_RNA (1)...(19): siRNA sense strand
gcaugugucucuauuugga

SEQ ID NO: 1890215 - RNA, 19 nt, Homo sapiens
  misc_RNA (1)...(19): siRNA sense strand
gcaggauuauuauugaaga

SEQ ID NO: 1890216 - RNA, 19 nt, Homo sapiens
  misc_RNA (1)...(19): siRNA sense strand
gcaaagguuucaguuuaau

SEQ ID NO: 1890217 - RNA, 19 nt, Homo sapiens
  misc_RNA (1)...(19): siRNA sense strand
uauccaagguucuuaucua

SEQ ID NO: 1890218 - RNA, 19 nt, Homo sapiens
  misc_RNA (1)...(19): siRNA sense strand
caaggauacuuucggaaga

SEQ ID NO: 1890219 - RNA, 19 nt, Homo sapiens
  misc_RNA (1)...(19): siRNA sense strand
ggaaagucacaacagauaa

SEQ ID NO: 1890220 - RNA, 19 nt, Homo sapiens
  misc_RNA (1)...(19): siRNA sense strand
gaaagaugcagaggaugua

SEQ ID NO: 1890221 - RNA, 19 nt, Homo sapiens
  misc_RNA (1)...(19): siRNA sense strand
caagauauccuagagaaug

SEQ ID NO: 1890222 - RNA, 19 nt, Homo sapiens
  misc_RNA (1)...(19): siRNA sense strand
gagaauaugauacagaugu

SEQ ID NO: 1890223 - RNA, 19 nt, Homo sapiens
  misc_RNA (1)...(19): siRNA sense strand
gaaugugagugcuguucaa

SEQ ID NO: 1890224 - RNA, 19 nt, Homo sapiens
  misc_RNA (1)...(19): siRNA sense strand
agaaggcuguuaagaagaa

SEQ ID NO: 1890225 - RNA, 19 nt, Homo sapiens
  misc_RNA (1)...(19): siRNA sense strand
ugaggaaagucacaacaga

SEQ ID NO: 1890226 - RNA, 19 nt, Homo sapiens
  misc_RNA (1)...(19): siRNA sense strand
ggacagaagaucucagcaa

SEQ ID NO: 1890227 - RNA, 19 nt, Homo sapiens
  misc_RNA (1)...(19): siRNA sense strand
cagagaauaugauacagau

SEQ ID NO: 1890228 - RNA, 19 nt, Homo sapiens
  misc_RNA (1)...(19): siRNA sense strand
gaagaauuaaggcaucauu

SEQ ID NO: 1890229 - RNA, 19 nt, Homo sapiens
  misc_RNA (1)...(19): siRNA sense strand
uaucaaggaucgaauuaag

SEQ ID NO: 1890230 - RNA, 19 nt, Homo sapiens
  misc_RNA (1)...(19): siRNA sense strand
gaaacugugaauaguguaa

SEQ ID NO: 1890231 - RNA, 19 nt, Homo sapiens
  misc_RNA (1)...(19): siRNA sense strand
gcuccucaaaugaauauua

SEQ ID NO: 1890232 - RNA, 19 nt, Homo sapiens
  misc_RNA (1)...(19): siRNA sense strand
aaauggaucuucaaaggau

SEQ ID NO: 1890233 - RNA, 19 nt, Homo sapiens
  misc_RNA (1)...(19): siRNA sense strand
gacgagaagauguuaguaa

SEQ ID NO: 1890234 - RNA, 19 nt, Homo sapiens
  misc_RNA (1)...(19): siRNA sense strand
guucuuggguugcaguauu

SEQ ID NO: 1890235 - RNA, 19 nt, Homo sapiens
  misc_RNA (1)...(19): siRNA sense strand
ccgaugacuuguccaauga

SEQ ID NO: 1890236 - RNA, 19 nt, Homo sapiens
  misc_RNA (1)...(19): siRNA sense strand
gaaggugcaaagaauguaa

SEQ ID NO: 1890237 - RNA, 19 nt, Homo sapiens
  misc_RNA (1)...(19): siRNA sense strand
aagaagagcuauuccuaca

SEQ ID NO: 1890238 - RNA, 19 nt, Homo sapiens
  misc_RNA (1)...(19): siRNA sense strand
ggagcgcucugauggacaa

SEQ ID NO: 1890239 - RNA, 19 nt, Homo sapiens
  misc_RNA (1)...(19): siRNA sense strand
cagauacuccaaauaauga

SEQ ID NO: 1890240 - RNA, 19 nt, Homo sapiens
  misc_RNA (1)...(19): siRNA sense strand
gaaguagacagccugaugu

SEQ ID NO: 1890241 - RNA, 19 nt, Homo sapiens
  misc_RNA (1)...(19): siRNA sense strand
cagaagaucucagcaaagg

SEQ ID NO: 1890242 - RNA, 19 nt, Homo sapiens
  misc_RNA (1)...(19): siRNA sense strand
ccacgagcuucuucucuug

SEQ ID NO: 1890243 - RNA, 19 nt, Homo sapiens
  misc_RNA (1)...(19): siRNA sense strand
ggaaccacaggguacuuua

SEQ ID NO: 1890244 - RNA, 19 nt, Homo sapiens
  misc_RNA (1)...(19): siRNA sense strand
cacgugaacuggaaauuuc

SEQ ID NO: 1890245 - RNA, 19 nt, Homo sapiens
  misc_RNA (1)...(19): siRNA sense strand
gcagagaauaugauacaga

SEQ ID NO: 1890246 - RNA, 19 nt, Homo sapiens
  misc_RNA (1)...(19): siRNA sense strand
gacccucguuguucuacua

SEQ ID NO: 1890247 - RNA, 19 nt, Homo sapiens
  misc_RNA (1)...(19): siRNA sense strand
ccagauacuccaaauaaug

SEQ ID NO: 1890248 - RNA, 19 nt, Homo sapiens
  misc_RNA (1)...(19): siRNA sense strand
gugcaaagaauguaaugaa

SEQ ID NO: 1890249 - RNA, 19 nt, Homo sapiens
  misc_RNA (1)...(19): siRNA sense strand
aaugaugucugugcuguuu

SEQ ID NO: 1890250 - RNA, 19 nt, Homo sapiens
  misc_RNA (1)...(19): siRNA sense strand
ggaaauuucaguuuauugg

SEQ ID NO: 1890251 - RNA, 19 nt, Homo sapiens
  misc_RNA (1)...(19): siRNA sense strand
ggacaggucacgugaacug

SEQ ID NO: 1890252 - RNA, 19 nt, Homo sapiens
  misc_RNA (1)...(19): siRNA sense strand
uaggauagaguuugcagua

SEQ ID NO: 1890253 - RNA, 19 nt, Homo sapiens
  misc_RNA (1)...(19): siRNA sense strand
ggagauagaacaagcacau

SEQ ID NO: 1890254 - RNA, 19 nt, Homo sapiens
  misc_RNA (1)...(19): siRNA sense strand
uagacagccugauguguga

SEQ ID NO: 1890255 - RNA, 19 nt, Homo sapiens
  misc_RNA (1)...(19): siRNA sense strand
gaccaaaacuucaaagaca

SEQ ID NO: 1890256 - RNA, 19 nt, Homo sapiens
  misc_RNA (1)...(19): siRNA sense strand
uggcaugugucucuauuug

SEQ ID NO: 1890257 - RNA, 19 nt, Homo sapiens
  misc_RNA (1)...(19): siRNA sense strand
ugaaucaagucagaaguug

SEQ ID NO: 1890258 - RNA, 19 nt, Homo sapiens
  misc_RNA (1)...(19): siRNA sense strand
ugugauaaguccucuugaa

SEQ ID NO: 1890259 - RNA, 19 nt, Homo sapiens
  misc_RNA (1)...(19): siRNA sense strand
ggccuagaauauaguggua

SEQ ID NO: 1890260 - RNA, 19 nt, Homo sapiens
  misc_RNA (1)...(19): siRNA sense strand
gagcuauuccuacaguaaa

SEQ ID NO: 1890261 - RNA, 19 nt, Homo sapiens
  misc_RNA (1)...(19): siRNA sense strand
gaaccacaggguacuuuau

SEQ ID NO: 1890262 - RNA, 19 nt, Homo sapiens
  misc_RNA (1)...(19): siRNA sense strand
gauagaguuugcaguagca

SEQ ID NO: 1890263 - RNA, 19 nt, Homo sapiens
  misc_RNA (1)...(19): siRNA sense strand
acagauguauucaaaugga

SEQ ID NO: 1890264 - RNA, 19 nt, Homo sapiens
  misc_RNA (1)...(19): siRNA sense strand
aaauuggacuuugaucuug

SEQ ID NO: 1890265 - RNA, 19 nt, Homo sapiens
  misc_RNA (1)...(19): siRNA sense strand
guacgcaucccucaacuag

SEQ ID NO: 1890266 - RNA, 19 nt, Homo sapiens
  misc_RNA (1)...(19): siRNA sense strand
cuaaguccacgucaaagua

SEQ ID NO: 1890267 - RNA, 19 nt, Homo sapiens
  misc_RNA (1)...(19): siRNA sense strand
agagagaaauaaggaaaga

SEQ ID NO: 1890268 - RNA, 19 nt, Homo sapiens
  misc_RNA (1)...(19): siRNA sense strand
ugaugcacauucauacuga

SEQ ID NO: 1890269 - RNA, 19 nt, Homo sapiens
  misc_RNA (1)...(19): siRNA sense strand
agcaaagguuucaguuuaa

SEQ ID NO: 1890270 - RNA, 19 nt, Homo sapiens
  misc_RNA (1)...(19): siRNA sense strand
ccacaggguacuuuauuug

SEQ ID NO: 1890271 - RNA, 19 nt, Homo sapiens
  misc_RNA (1)...(19): siRNA sense strand
aguaugauaucuacgcaaa

SEQ ID NO: 1890272 - RNA, 19 nt, Homo sapiens
  misc_RNA (1)...(19): siRNA sense strand
gcucaagcaagauuuaaug

SEQ ID NO: 1890273 - RNA, 19 nt, Homo sapiens
  misc_RNA (1)...(19): siRNA sense strand
gcagaaggugcaaagaaug

SEQ ID NO: 1890274 - RNA, 19 nt, Homo sapiens
  misc_RNA (1)...(19): siRNA sense strand
cgagaaccaaggauacuuu

SEQ ID NO: 1890275 - RNA, 19 nt, Homo sapiens
  misc_RNA (1)...(19): siRNA sense strand
cauaagaggacgagaagau

SEQ ID NO: 1890276 - RNA, 19 nt, Homo sapiens
  misc_RNA (1)...(19): siRNA sense strand
uauuguggcucgagaugaa

SEQ ID NO: 1890277 - RNA, 19 nt, Homo sapiens
  misc_RNA (1)...(19): siRNA sense strand
aaagaaaggagauauugug

SEQ ID NO: 1890278 - RNA, 19 nt, Homo sapiens
  misc_RNA (1)...(19): siRNA sense strand
ggauauaccaggacaggau

SEQ ID NO: 1890279 - RNA, 19 nt, Homo sapiens
  misc_RNA (1)...(19): siRNA sense strand
ucagagcuccucaaaugaa

SEQ ID NO: 1890280 - RNA, 19 nt, Homo sapiens
  misc_RNA (1)...(19): siRNA sense strand
gcacuaacagguacuuugg

SEQ ID NO: 1890281 - RNA, 19 nt, Homo sapiens
  misc_RNA (1)...(19): siRNA sense strand
caaaccagcagcacuaaca

SEQ ID NO: 1890282 - RNA, 19 nt, Homo sapiens
  misc_RNA (1)...(19): siRNA sense strand
acacuaaguccacgucaaa

SEQ ID NO: 1890283 - RNA, 19 nt, Homo sapiens
  misc_RNA (1)...(19): siRNA sense strand
cccaaaagcaggauuauua

SEQ ID NO: 1890284 - RNA, 19 nt, Homo sapiens
  misc_RNA (1)...(19): siRNA sense strand
uucagaagcucaagcaaga

SEQ ID NO: 1890285 - RNA, 19 nt, Homo sapiens
  misc_RNA (1)...(19): siRNA sense strand
caaaggacaugaaugaauu

SEQ ID NO: 1890286 - RNA, 19 nt, Homo sapiens
  misc_RNA (1)...(19): siRNA sense strand
cacaagaaguguauugaua

SEQ ID NO: 1890287 - RNA, 19 nt, Homo sapiens
  misc_RNA (1)...(19): siRNA sense strand
gaagacagaaauaugguua

SEQ ID NO: 1890288 - RNA, 19 nt, Homo sapiens
  misc_RNA (1)...(19): siRNA sense strand
caaagaguaugucgaauca

SEQ ID NO: 1890289 - RNA, 19 nt, Homo sapiens
  misc_RNA (1)...(19): siRNA sense strand
gcagauguauauccagaaa

SEQ ID NO: 1890290 - RNA, 19 nt, Homo sapiens
  misc_RNA (1)...(19): siRNA sense strand
ucaacaggcucgcugcuua

SEQ ID NO: 1890291 - RNA, 19 nt, Homo sapiens
  misc_RNA (1)...(19): siRNA sense strand
ggaaaugagugacacaaag

SEQ ID NO: 1890292 - RNA, 19 nt, Homo sapiens
  misc_RNA (1)...(19): siRNA sense strand
caauaaaggccuuaaagaa

SEQ ID NO: 1890293 - RNA, 19 nt, Homo sapiens
  misc_RNA (1)...(19): siRNA sense strand
gcgaggcuguuaacccuua

SEQ ID NO: 1890294 - RNA, 19 nt, Homo sapiens
  misc_RNA (1)...(19): siRNA sense strand
agacaaagauggacauauc

SEQ ID NO: 1890295 - RNA, 19 nt, Homo sapiens
  misc_RNA (1)...(19): siRNA sense strand
gcucgcugcuuaagagaua

SEQ ID NO: 1890296 - RNA, 19 nt, Homo sapiens
  misc_RNA (1)...(19): siRNA sense strand
ggacaugaaugaauuugag

SEQ ID NO: 1890297 - RNA, 19 nt, Homo sapiens
  misc_RNA (1)...(19): siRNA sense strand
gcugagaggugcaggaaga

SEQ ID NO: 1890298 - RNA, 19 nt, Homo sapiens
  misc_RNA (1)...(19): siRNA sense strand
gcaauaaaggccuuaaaga

SEQ ID NO: 1890299 - RNA, 19 nt, Homo sapiens
  misc_RNA (1)...(19): siRNA sense strand
ggcaaggacucaaguguga

SEQ ID NO: 1890300 - RNA, 19 nt, Homo sapiens
  misc_RNA (1)...(19): siRNA sense strand
ccacacagauuuaaagucu

SEQ ID NO: 1890301 - RNA, 19 nt, Homo sapiens
  misc_RNA (1)...(19): siRNA sense strand
gagaaaccauguuccacaa

SEQ ID NO: 1890302 - RNA, 19 nt, Homo sapiens
  misc_RNA (1)...(19): siRNA sense strand
gcagcaauuucgacaaaga

SEQ ID NO: 1890303 - RNA, 19 nt, Homo sapiens
  misc_RNA (1)...(19): siRNA sense strand
acacaaaggacaugaauga

SEQ ID NO: 1890304 - RNA, 19 nt, Homo sapiens
  misc_RNA (1)...(19): siRNA sense strand
gaacaaagaaagaccaucu

SEQ ID NO: 1890305 - RNA, 19 nt, Homo sapiens
  misc_RNA (1)...(19): siRNA sense strand
ggagaugccaagacgaaua

SEQ ID NO: 1890306 - RNA, 19 nt, Homo sapiens
  misc_RNA (1)...(19): siRNA sense strand
ggucugcaguuccuucauu

SEQ ID NO: 1890307 - RNA, 19 nt, Homo sapiens
  misc_RNA (1)...(19): siRNA sense strand
gcaguuccuucauuccaaa

SEQ ID NO: 1890308 - RNA, 19 nt, Homo sapiens
  misc_RNA (1)...(19): siRNA sense strand
ccauuugacugcagcaauu

SEQ ID NO: 1890309 - RNA, 19 nt, Homo sapiens
  misc_RNA (1)...(19): siRNA sense strand
gagaacauguuaggagaug

SEQ ID NO: 1890310 - RNA, 19 nt, Homo sapiens
  misc_RNA (1)...(19): siRNA sense strand
gcuaaugaaugcaagauac

SEQ ID NO: 1890311 - RNA, 19 nt, Homo sapiens
  misc_RNA (1)...(19): siRNA sense strand
aaccugaacugaacaaaga

SEQ ID NO: 1890312 - RNA, 19 nt, Homo sapiens
  misc_RNA (1)...(19): siRNA sense strand
gagaagguccgguugaaau

SEQ ID NO: 1890313 - RNA, 19 nt, Homo sapiens
  misc_RNA (1)...(19): siRNA sense strand
ugacaugccacacagauuu

SEQ ID NO: 1890314 - RNA, 19 nt, Homo sapiens
  misc_RNA (1)...(19): siRNA sense strand
gauaaaaugugccaucuuc

SEQ ID NO: 1890315 - RNA, 19 nt, Homo sapiens
  misc_RNA (1)...(19): siRNA sense strand
gcaauucacaagaagugua

SEQ ID NO: 1890316 - RNA, 19 nt, Homo sapiens
  misc_RNA (1)...(19): siRNA sense strand
gugcugugcucgucaaaga

SEQ ID NO: 1890317 - RNA, 19 nt, Homo sapiens
  misc_RNA (1)...(19): siRNA sense strand
uaaaggccuuaaagaaaga

SEQ ID NO: 1890318 - RNA, 19 nt, Homo sapiens
  misc_RNA (1)...(19): siRNA sense strand
ggaagagucaugcagauca

SEQ ID NO: 1890319 - RNA, 19 nt, Homo sapiens
  misc_RNA (1)...(19): siRNA sense strand
caacgggaagacagaaaua

SEQ ID NO: 1890320 - RNA, 19 nt, Homo sapiens
  misc_RNA (1)...(19): siRNA sense strand
gaagagucaugcagaucau

SEQ ID NO: 1890321 - RNA, 19 nt, Homo sapiens
  misc_RNA (1)...(19): siRNA sense strand
ccucaaggccgaaugcuaa

SEQ ID NO: 1890322 - RNA, 19 nt, Homo sapiens
  misc_RNA (1)...(19): siRNA sense strand
aagaguaugucgaaucaga

SEQ ID NO: 1890323 - RNA, 19 nt, Homo sapiens
  misc_RNA (1)...(19): siRNA sense strand
auaaaggccuuaaagaaag

SEQ ID NO: 1890324 - RNA, 19 nt, Homo sapiens
  misc_RNA (1)...(19): siRNA sense strand
gagaacgggcagauguaua

SEQ ID NO: 1890325 - RNA, 19 nt, Homo sapiens
  misc_RNA (1)...(19): siRNA sense strand
gugcaaggagaacauguua

SEQ ID NO: 1890326 - RNA, 19 nt, Homo sapiens
  misc_RNA (1)...(19): siRNA sense strand
gcauaaaccagaagcuaau

SEQ ID NO: 1890327 - RNA, 19 nt, Homo sapiens
  misc_RNA (1)...(19): siRNA sense strand
gacaugccacacagauuua

SEQ ID NO: 1890328 - RNA, 19 nt, Homo sapiens
  misc_RNA (1)...(19): siRNA sense strand
gcauggaccagaauauguu

SEQ ID NO: 1890329 - RNA, 19 nt, Homo sapiens
  misc_RNA (1)...(19): siRNA sense strand
cagagaagguccgguugaa

SEQ ID NO: 1890330 - RNA, 19 nt, Homo sapiens
  misc_RNA (1)...(19): siRNA sense strand
caacaggcucgcugcuuaa

SEQ ID NO: 1890331 - RNA, 19 nt, Homo sapiens
  misc_RNA (1)...(19): siRNA sense strand
gaccuucugugaacacugu

SEQ ID NO: 1890332 - RNA, 19 nt, Homo sapiens
  misc_RNA (1)...(19): siRNA sense strand
uaagagauacugaacagau

SEQ ID NO: 1890333 - RNA, 19 nt, Homo sapiens
  misc_RNA (1)...(19): siRNA sense strand
gaacaacgggaagacagaa

SEQ ID NO: 1890334 - RNA, 19 nt, Homo sapiens
  misc_RNA (1)...(19): siRNA sense strand
caacugggaggaacuugaa

SEQ ID NO: 1890335 - RNA, 19 nt, Homo sapiens
  misc_RNA (1)...(19): siRNA sense strand
ggcauaaaccagaagcuaa

SEQ ID NO: 1890336 - RNA, 19 nt, Homo sapiens
  misc_RNA (1)...(19): siRNA sense strand
ccacaaggagagauucaaa

SEQ ID NO: 1890337 - RNA, 19 nt, Homo sapiens
  misc_RNA (1)...(19): siRNA sense strand
agacagaaauaugguuaga

SEQ ID NO: 1890338 - RNA, 19 nt, Homo sapiens
  misc_RNA (1)...(19): siRNA sense strand
gaaaugagugacacaaagg

SEQ ID NO: 1890339 - RNA, 19 nt, Homo sapiens
  misc_RNA (1)...(19): siRNA sense strand
cugcagcaauuucgacaaa

SEQ ID NO: 1890340 - RNA, 19 nt, Homo sapiens
  misc_RNA (1)...(19): siRNA sense strand
gcaaggagaacauguuagg

SEQ ID NO: 1890341 - RNA, 19 nt, Homo sapiens
  misc_RNA (1)...(19): siRNA sense strand
gcacgaugguagagaagag

SEQ ID NO: 1890342 - RNA, 19 nt, Homo sapiens
  misc_RNA (1)...(19): siRNA sense strand
gauggacgaugauguugag

SEQ ID NO: 1890343 - RNA, 19 nt, Homo sapiens
  misc_RNA (1)...(19): siRNA sense strand
aaggagagauucaaaauug

SEQ ID NO: 1890344 - RNA, 19 nt, Homo sapiens
  misc_RNA (1)...(19): siRNA sense strand
caagacgaauaccuucugu

SEQ ID NO: 1890345 - RNA, 19 nt, Homo sapiens
  misc_RNA (1)...(19): siRNA sense strand
caacaagggaagagucaug

SEQ ID NO: 1890346 - RNA, 19 nt, Homo sapiens
  misc_RNA (1)...(19): siRNA sense strand
gaaccugaacugaacaaag

SEQ ID NO: 1890347 - RNA, 19 nt, Homo sapiens
  misc_RNA (1)...(19): siRNA sense strand
gaagguccgguugaaauug

SEQ ID NO: 1890348 - RNA, 19 nt, Homo sapiens
  misc_RNA (1)...(19): siRNA sense strand
cgucaaagaguaugucgaa

SEQ ID NO: 1890349 - RNA, 19 nt, Homo sapiens
  misc_RNA (1)...(19): siRNA sense strand
ggauggagcggcugauauc

SEQ ID NO: 1890350 - RNA, 19 nt, Homo sapiens
  misc_RNA (1)...(19): siRNA sense strand
auaucaagaucgcggauuu

SEQ ID NO: 1890351 - RNA, 19 nt, Homo sapiens
  misc_RNA (1)...(19): siRNA sense strand
ccaaagcugccacaaguuc

SEQ ID NO: 1890352 - RNA, 19 nt, Homo sapiens
  misc_RNA (1)...(19): siRNA sense strand
caaggccgaaugcuaauga

SEQ ID NO: 1890353 - RNA, 19 nt, Homo sapiens
  misc_RNA (1)...(19): siRNA sense strand
aaagauggacauaucaaga

SEQ ID NO: 1890354 - RNA, 19 nt, Homo sapiens
  misc_RNA (1)...(19): siRNA sense strand
acacagauuuaaagucuac

SEQ ID NO: 1890355 - RNA, 19 nt, Homo sapiens
  misc_RNA (1)...(19): siRNA sense strand
ucaugcagaucauugugaa

SEQ ID NO: 1890356 - RNA, 19 nt, Homo sapiens
  misc_RNA (1)...(19): siRNA sense strand
ucaacagcauggaccagaa

SEQ ID NO: 1890357 - RNA, 19 nt, Homo sapiens
  misc_RNA (1)...(19): siRNA sense strand
cacgguggcuggagaagga

SEQ ID NO: 1890358 - RNA, 19 nt, Homo sapiens
  misc_RNA (1)...(19): siRNA sense strand
ccaaaggaauagucuacag

SEQ ID NO: 1890359 - RNA, 19 nt, Homo sapiens
  misc_RNA (1)...(19): siRNA sense strand
guacauuccagaccaagga

SEQ ID NO: 1890360 - RNA, 19 nt, Homo sapiens
  misc_RNA (1)...(19): siRNA sense strand
ggacucaagugugaugcau

SEQ ID NO: 1890361 - RNA, 19 nt, Homo sapiens
  misc_RNA (1)...(19): siRNA sense strand
ggaagacagaaauaugguu

SEQ ID NO: 1890362 - RNA, 19 nt, Homo sapiens
  misc_RNA (1)...(19): siRNA sense strand
gagcacugaucaacagcau

SEQ ID NO: 1890363 - RNA, 19 nt, Homo sapiens
  misc_RNA (1)...(19): siRNA sense strand
gcaaugcagcaauucacaa

SEQ ID NO: 1890364 - RNA, 19 nt, Homo sapiens
  misc_RNA (1)...(19): siRNA sense strand
acaaaggacaugaaugaau

SEQ ID NO: 1890365 - RNA, 19 nt, Homo sapiens
  misc_RNA (1)...(19): siRNA sense strand
gaagaacaacgggaagaca

SEQ ID NO: 1890366 - RNA, 19 nt, Homo sapiens
  misc_RNA (1)...(19): siRNA sense strand
ucaaagaguaugucgaauc

SEQ ID NO: 1890367 - RNA, 19 nt, Homo sapiens
  misc_RNA (1)...(19): siRNA sense strand
cugaagcgcuggccaugau

SEQ ID NO: 1890368 - RNA, 19 nt, Homo sapiens
  misc_RNA (1)...(19): siRNA sense strand
agaacgggcagauguauau

SEQ ID NO: 1890369 - RNA, 19 nt, Homo sapiens
  misc_RNA (1)...(19): siRNA sense strand
acagagcacugaucaacag

SEQ ID NO: 1890370 - RNA, 19 nt, Homo sapiens
  misc_RNA (1)...(19): siRNA sense strand
gaacugaacaaagaaagac

SEQ ID NO: 1890371 - RNA, 19 nt, Homo sapiens
  misc_RNA (1)...(19): siRNA sense strand
ucagagaacgggcagaugu

SEQ ID NO: 1890372 - RNA, 19 nt, Homo sapiens
  misc_RNA (1)...(19): siRNA sense strand
cagagaacgggcagaugua

SEQ ID NO: 1890373 - RNA, 19 nt, Homo sapiens
  misc_RNA (1)...(19): siRNA sense strand
ggagaucaacugggaggaa

SEQ ID NO: 1890374 - RNA, 19 nt, Homo sapiens
  misc_RNA (1)...(19): siRNA sense strand
agaaauacaaccacucugu

SEQ ID NO: 1890375 - RNA, 19 nt, Homo sapiens
  misc_RNA (1)...(19): siRNA sense strand
ggucucccaugcuccauca

SEQ ID NO: 1890376 - RNA, 19 nt, Homo sapiens
  misc_RNA (1)...(19): siRNA sense strand
augcagcaauucacaagaa

SEQ ID NO: 1890377 - RNA, 19 nt, Homo sapiens
  misc_RNA (1)...(19): siRNA sense strand
gaagcgcuggccaugauug

SEQ ID NO: 1890378 - RNA, 19 nt, Homo sapiens
  misc_RNA (1)...(19): siRNA sense strand
aaauaugguuagagcugaa

SEQ ID NO: 1890379 - RNA, 19 nt, Homo sapiens
  misc_RNA (1)...(19): siRNA sense strand
gacaaagauggacauauca

SEQ ID NO: 1890380 - RNA, 19 nt, Homo sapiens
  misc_RNA (1)...(19): siRNA sense strand
gaaauuggucucccaugcu

SEQ ID NO: 1890381 - RNA, 19 nt, Homo sapiens
  misc_RNA (1)...(19): siRNA sense strand
caaccuuuguggcauaaac

SEQ ID NO: 1890382 - RNA, 19 nt, Homo sapiens
  misc_RNA (1)...(19): siRNA sense strand
gcacaggaucagcuaucaa

SEQ ID NO: 1890383 - RNA, 19 nt, Homo sapiens
  misc_RNA (1)...(19): siRNA sense strand
ggccgaaugcuaaugaaug

SEQ ID NO: 1890384 - RNA, 19 nt, Homo sapiens
  misc_RNA (1)...(19): siRNA sense strand
acguggaccucaucucuga

SEQ ID NO: 1890385 - RNA, 19 nt, Homo sapiens
  misc_RNA (1)...(19): siRNA sense strand
gaacaaaggccaugacauu

SEQ ID NO: 1890386 - RNA, 19 nt, Homo sapiens
  misc_RNA (1)...(19): siRNA sense strand
ccaaggaucuuauaaagga

SEQ ID NO: 1890387 - RNA, 19 nt, Homo sapiens
  misc_RNA (1)...(19): siRNA sense strand
gaagagacccacuaugaaa

SEQ ID NO: 1890388 - RNA, 19 nt, Homo sapiens
  misc_RNA (1)...(19): siRNA sense strand
agaacgagcuggacaagua

SEQ ID NO: 1890389 - RNA, 19 nt, Homo sapiens
  misc_RNA (1)...(19): siRNA sense strand
gacaaugacuuuaugaaga

SEQ ID NO: 1890390 - RNA, 19 nt, Homo sapiens
  misc_RNA (1)...(19): siRNA sense strand
ggacaggacucaucaagca

SEQ ID NO: 1890391 - RNA, 19 nt, Homo sapiens
  misc_RNA (1)...(19): siRNA sense strand
ggauugacaugauagaauu

SEQ ID NO: 1890392 - RNA, 19 nt, Homo sapiens
  misc_RNA (1)...(19): siRNA sense strand
ggagagcucuggaccauuc

SEQ ID NO: 1890393 - RNA, 19 nt, Homo sapiens
  misc_RNA (1)...(19): siRNA sense strand
gauggaagcuugucuaggu

SEQ ID NO: 1890394 - RNA, 19 nt, Homo sapiens
  misc_RNA (1)...(19): siRNA sense strand
gcuguaaccugccuuguga

SEQ ID NO: 1890395 - RNA, 19 nt, Homo sapiens
  misc_RNA (1)...(19): siRNA sense strand
gagaacagcaaacguaauu

SEQ ID NO: 1890396 - RNA, 19 nt, Homo sapiens
  misc_RNA (1)...(19): siRNA sense strand
ucagaaagauuagggaauu

SEQ ID NO: 1890397 - RNA, 19 nt, Homo sapiens
  misc_RNA (1)...(19): siRNA sense strand
ggauagagguucguuugaa

SEQ ID NO: 1890398 - RNA, 19 nt, Homo sapiens
  misc_RNA (1)...(19): siRNA sense strand
uaaccugccuugugauuga

SEQ ID NO: 1890399 - RNA, 19 nt, Homo sapiens
  misc_RNA (1)...(19): siRNA sense strand
cuugacaccuccuauaaua

SEQ ID NO: 1890400 - RNA, 19 nt, Homo sapiens
  misc_RNA (1)...(19): siRNA sense strand
gcaaaggaacgguaaaugu

SEQ ID NO: 1890401 - RNA, 19 nt, Homo sapiens
  misc_RNA (1)...(19): siRNA sense strand
caaaggccaugacauuuca

SEQ ID NO: 1890402 - RNA, 19 nt, Homo sapiens
  misc_RNA (1)...(19): siRNA sense strand
gauagaauuuccaaagaag

SEQ ID NO: 1890403 - RNA, 19 nt, Homo sapiens
  misc_RNA (1)...(19): siRNA sense strand
cauggaagaugguaagguu

SEQ ID NO: 1890404 - RNA, 19 nt, Homo sapiens
  misc_RNA (1)...(19): siRNA sense strand
ggacaauccaucagaaaga

SEQ ID NO: 1890405 - RNA, 19 nt, Homo sapiens
  misc_RNA (1)...(19): siRNA sense strand
gcaaugaagauucucaaga

SEQ ID NO: 1890406 - RNA, 19 nt, Homo sapiens
  misc_RNA (1)...(19): siRNA sense strand
aaacguaauugcugcagaa

SEQ ID NO: 1890407 - RNA, 19 nt, Homo sapiens
  misc_RNA (1)...(19): siRNA sense strand
ucaccgagguuaugccaaa

SEQ ID NO: 1890408 - RNA, 19 nt, Homo sapiens
  misc_RNA (1)...(19): siRNA sense strand
gaagcugucugauuucaac

SEQ ID NO: 1890409 - RNA, 19 nt, Homo sapiens
  misc_RNA (1)...(19): siRNA sense strand
gagguucguuugaagauuc

SEQ ID NO: 1890410 - RNA, 19 nt, Homo sapiens
  misc_RNA (1)...(19): siRNA sense strand
ccacagacacaaguaauuu

SEQ ID NO: 1890411 - RNA, 19 nt, Homo sapiens
  misc_RNA (1)...(19): siRNA sense strand
gaaagauuagggaauuuga

SEQ ID NO: 1890412 - RNA, 19 nt, Homo sapiens
  misc_RNA (1)...(19): siRNA sense strand
gauagagguucguuugaag

SEQ ID NO: 1890413 - RNA, 19 nt, Homo sapiens
  misc_RNA (1)...(19): siRNA sense strand
gguagaagcuuuugccuau

SEQ ID NO: 1890414 - RNA, 19 nt, Homo sapiens
  misc_RNA (1)...(19): siRNA sense strand
ccaaaggaaucauuuacag

SEQ ID NO: 1890415 - RNA, 19 nt, Homo sapiens
  misc_RNA (1)...(19): siRNA sense strand
gaagcuauccuugacaaug

SEQ ID NO: 1890416 - RNA, 19 nt, Homo sapiens
  misc_RNA (1)...(19): siRNA sense strand
gaugguaagguugaaguua

SEQ ID NO: 1890417 - RNA, 19 nt, Homo sapiens
  misc_RNA (1)...(19): siRNA sense strand
guauguacccgguggagua

SEQ ID NO: 1890418 - RNA, 19 nt, Homo sapiens
  misc_RNA (1)...(19): siRNA sense strand
aagcuauccuugacaauga

SEQ ID NO: 1890419 - RNA, 19 nt, Homo sapiens
  misc_RNA (1)...(19): siRNA sense strand
guccaaggaucuuauaaag

SEQ ID NO: 1890420 - RNA, 19 nt, Homo sapiens
  misc_RNA (1)...(19): siRNA sense strand
caacucaggaugggauaua

SEQ ID NO: 1890421 - RNA, 19 nt, Homo sapiens
  misc_RNA (1)...(19): siRNA sense strand
caaggacaguugcaucauc

SEQ ID NO: 1890422 - RNA, 19 nt, Homo sapiens
  misc_RNA (1)...(19): siRNA sense strand
cagaaagauuagggaauuu

SEQ ID NO: 1890423 - RNA, 19 nt, Homo sapiens
  misc_RNA (1)...(19): siRNA sense strand
gauuguggauuguauguac

SEQ ID NO: 1890424 - RNA, 19 nt, Homo sapiens
  misc_RNA (1)...(19): siRNA sense strand
uaacugggaaggcuuaaga

SEQ ID NO: 1890425 - RNA, 19 nt, Homo sapiens
  misc_RNA (1)...(19): siRNA sense strand
gaagaugugagaacagcaa

SEQ ID NO: 1890426 - RNA, 19 nt, Homo sapiens
  misc_RNA (1)...(19): siRNA sense strand
acaguugcaucaucaaaga

SEQ ID NO: 1890427 - RNA, 19 nt, Homo sapiens
  misc_RNA (1)...(19): siRNA sense strand
ggacaguugcaucaucaaa

SEQ ID NO: 1890428 - RNA, 19 nt, Homo sapiens
  misc_RNA (1)...(19): siRNA sense strand
ggaagaugguaagguugaa

SEQ ID NO: 1890429 - RNA, 19 nt, Homo sapiens
  misc_RNA (1)...(19): siRNA sense strand
gacaauccaucagaaagau

SEQ ID NO: 1890430 - RNA, 19 nt, Homo sapiens
  misc_RNA (1)...(19): siRNA sense strand
gaacauuuaaggacagcaa

SEQ ID NO: 1890431 - RNA, 19 nt, Homo sapiens
  misc_RNA (1)...(19): siRNA sense strand
caaaggaacgguaaauguc

SEQ ID NO: 1890432 - RNA, 19 nt, Homo sapiens
  misc_RNA (1)...(19): siRNA sense strand
caagcuugcugauguccuu

SEQ ID NO: 1890433 - RNA, 19 nt, Homo sapiens
  misc_RNA (1)...(19): siRNA sense strand
gaucgacaauguuuucaaa

SEQ ID NO: 1890434 - RNA, 19 nt, Homo sapiens
  misc_RNA (1)...(19): siRNA sense strand
agacuguacagaacauuua

SEQ ID NO: 1890435 - RNA, 19 nt, Homo sapiens
  misc_RNA (1)...(19): siRNA sense strand
gagaucauccugaacaaag

SEQ ID NO: 1890436 - RNA, 19 nt, Homo sapiens
  misc_RNA (1)...(19): siRNA sense strand
uugaagagacccacuauga

SEQ ID NO: 1890437 - RNA, 19 nt, Homo sapiens
  misc_RNA (1)...(19): siRNA sense strand
cagaaaaucucauccuaga

SEQ ID NO: 1890438 - RNA, 19 nt, Homo sapiens
  misc_RNA (1)...(19): siRNA sense strand
ucaagaaacgucacauugu

SEQ ID NO: 1890439 - RNA, 19 nt, Homo sapiens
  misc_RNA (1)...(19): siRNA sense strand
gagcuggaguuggaucaga

SEQ ID NO: 1890440 - RNA, 19 nt, Homo sapiens
  misc_RNA (1)...(19): siRNA sense strand
ugaagagacccacuaugaa

SEQ ID NO: 1890441 - RNA, 19 nt, Homo sapiens
  misc_RNA (1)...(19): siRNA sense strand
augccaaacugguugauuu

SEQ ID NO: 1890442 - RNA, 19 nt, Homo sapiens
  misc_RNA (1)...(19): siRNA sense strand
gcacauccgcucagagaag

SEQ ID NO: 1890443 - RNA, 19 nt, Homo sapiens
  misc_RNA (1)...(19): siRNA sense strand
agacugguuuggagagaaa

SEQ ID NO: 1890444 - RNA, 19 nt, Homo sapiens
  misc_RNA (1)...(19): siRNA sense strand
gaaaaguguuuggggaauu

SEQ ID NO: 1890445 - RNA, 19 nt, Homo sapiens
  misc_RNA (1)...(19): siRNA sense strand
gcagggacaauccaucaga

SEQ ID NO: 1890446 - RNA, 19 nt, Homo sapiens
  misc_RNA (1)...(19): siRNA sense strand
accugaagcugucugauuu

SEQ ID NO: 1890447 - RNA, 19 nt, Homo sapiens
  misc_RNA (1)...(19): siRNA sense strand
ggacagcgaccgucaagac

SEQ ID NO: 1890448 - RNA, 19 nt, Homo sapiens
  misc_RNA (1)...(19): siRNA sense strand
guaaaacucugggccauug

SEQ ID NO: 1890449 - RNA, 19 nt, Homo sapiens
  misc_RNA (1)...(19): siRNA sense strand
ccuauaauaccaaguguug

SEQ ID NO: 1890450 - RNA, 19 nt, Homo sapiens
  misc_RNA (1)...(19): siRNA sense strand
uccagaagcugcagaacga

SEQ ID NO: 1890451 - RNA, 19 nt, Homo sapiens
  misc_RNA (1)...(19): siRNA sense strand
ggagacugguuuggagaga

SEQ ID NO: 1890452 - RNA, 19 nt, Homo sapiens
  misc_RNA (1)...(19): siRNA sense strand
gagacuguacagaacauuu

SEQ ID NO: 1890453 - RNA, 19 nt, Homo sapiens
  misc_RNA (1)...(19): siRNA sense strand
ccagagaucauccugaaca

SEQ ID NO: 1890454 - RNA, 19 nt, Homo sapiens
  misc_RNA (1)...(19): siRNA sense strand
gaaggugugaaguugugua

SEQ ID NO: 1890455 - RNA, 19 nt, Homo sapiens
  misc_RNA (1)...(19): siRNA sense strand
ccuauaacaucauauugag

SEQ ID NO: 1890456 - RNA, 19 nt, Homo sapiens
  misc_RNA (1)...(19): siRNA sense strand
ugggaauccuaauguauga

SEQ ID NO: 1890457 - RNA, 19 nt, Homo sapiens
  misc_RNA (1)...(19): siRNA sense strand
ggaccauucucagggauag

SEQ ID NO: 1890458 - RNA, 19 nt, Homo sapiens
  misc_RNA (1)...(19): siRNA sense strand
ggugugaaguuguguacca

SEQ ID NO: 1890459 - RNA, 19 nt, Homo sapiens
  misc_RNA (1)...(19): siRNA sense strand
aaaagaaggugugaaguug

SEQ ID NO: 1890460 - RNA, 19 nt, Homo sapiens
  misc_RNA (1)...(19): siRNA sense strand
gaugaaccaccaccugaug

SEQ ID NO: 1890461 - RNA, 19 nt, Homo sapiens
  misc_RNA (1)...(19): siRNA sense strand
cagggacaauccaucagaa

SEQ ID NO: 1890462 - RNA, 19 nt, Homo sapiens
  misc_RNA (1)...(19): siRNA sense strand
gaauuuccaaagaagauug

SEQ ID NO: 1890463 - RNA, 19 nt, Homo sapiens
  misc_RNA (1)...(19): siRNA sense strand
ggggacaccuucuuuauca

SEQ ID NO: 1890464 - RNA, 19 nt, Homo sapiens
  misc_RNA (1)...(19): siRNA sense strand
gagacugguuuggagagaa

SEQ ID NO: 1890465 - RNA, 19 nt, Homo sapiens
  misc_RNA (1)...(19): siRNA sense strand
gggauugacaugauagaau

SEQ ID NO: 1890466 - RNA, 19 nt, Homo sapiens
  misc_RNA (1)...(19): siRNA sense strand
ugugagaacagcaaacgua

SEQ ID NO: 1890467 - RNA, 19 nt, Homo sapiens
  misc_RNA (1)...(19): siRNA sense strand
aggacgaacugauccagaa

SEQ ID NO: 1890468 - RNA, 19 nt, Homo sapiens
  misc_RNA (1)...(19): siRNA sense strand
cagagaucauccugaacaa

SEQ ID NO: 1890469 - RNA, 19 nt, Homo sapiens
  misc_RNA (1)...(19): siRNA sense strand
gcuggaugauguuucuaau

SEQ ID NO: 1890470 - RNA, 19 nt, Homo sapiens
  misc_RNA (1)...(19): siRNA sense strand
ggacaccuucuuuaucauc

SEQ ID NO: 1890471 - RNA, 19 nt, Homo sapiens
  misc_RNA (1)...(19): siRNA sense strand
ucaucaagcauaccgagua

SEQ ID NO: 1890472 - RNA, 19 nt, Homo sapiens
  misc_RNA (1)...(19): siRNA sense strand
aagaaggugugaaguugug

SEQ ID NO: 1890473 - RNA, 19 nt, Homo sapiens
  misc_RNA (1)...(19): siRNA sense strand
caaaagaaggugugaaguu

SEQ ID NO: 1890474 - RNA, 19 nt, Homo sapiens
  misc_RNA (1)...(19): siRNA sense strand
gugagaacagcaaacguaa

SEQ ID NO: 1890475 - RNA, 19 nt, Homo sapiens
  misc_RNA (1)...(19): siRNA sense strand
caugauagaauuuccaaag

SEQ ID NO: 1890476 - RNA, 19 nt, Homo sapiens
  misc_RNA (1)...(19): siRNA sense strand
ucacugggaauccuaaugu

SEQ ID NO: 1890477 - RNA, 19 nt, Homo sapiens
  misc_RNA (1)...(19): siRNA sense strand
acaaaggccaugacauuuc

SEQ ID NO: 1890478 - RNA, 19 nt, Homo sapiens
  misc_RNA (1)...(19): siRNA sense strand
ucauuccgauuucauagug

SEQ ID NO: 1890479 - RNA, 19 nt, Homo sapiens
  misc_RNA (1)...(19): siRNA sense strand
caagacagcaggagcacau

SEQ ID NO: 1890480 - RNA, 19 nt, Homo sapiens
  misc_RNA (1)...(19): siRNA sense strand
gaaaagugaagaauccaaa

SEQ ID NO: 1890481 - RNA, 19 nt, Homo sapiens
  misc_RNA (1)...(19): siRNA sense strand
ugaagaugcagaagcuaaa

SEQ ID NO: 1890482 - RNA, 19 nt, Homo sapiens
  misc_RNA (1)...(19): siRNA sense strand
caugugugguagaagcuuu

SEQ ID NO: 1890483 - RNA, 19 nt, Homo sapiens
  misc_RNA (1)...(19): siRNA sense strand
guggagagcucuggaccau

SEQ ID NO: 1890484 - RNA, 19 nt, Homo sapiens
  misc_RNA (1)...(19): siRNA sense strand
ccacaguccaaggaucuua

SEQ ID NO: 1890485 - RNA, 19 nt, Homo sapiens
  misc_RNA (1)...(19): siRNA sense strand
caaaggagauuacaucauu

SEQ ID NO: 1890486 - RNA, 19 nt, Homo sapiens
  misc_RNA (1)...(19): siRNA sense strand
caagggaguuacauuauua

SEQ ID NO: 1890487 - RNA, 19 nt, Homo sapiens
  misc_RNA (1)...(19): siRNA sense strand
ugacagagcuggagagaga

SEQ ID NO: 1890488 - RNA, 19 nt, Homo sapiens
  misc_RNA (1)...(19): siRNA sense strand
gcaagggaguuacauuauu

SEQ ID NO: 1890489 - RNA, 19 nt, Homo sapiens
  misc_RNA (1)...(19): siRNA sense strand
gagauuacaucauuagaga

SEQ ID NO: 1890490 - RNA, 19 nt, Homo sapiens
  misc_RNA (1)...(19): siRNA sense strand
agaagaagcucauuacaga

SEQ ID NO: 1890491 - RNA, 19 nt, Homo sapiens
  misc_RNA (1)...(19): siRNA sense strand
aaacacaggugguuaaaug

SEQ ID NO: 1890492 - RNA, 19 nt, Homo sapiens
  misc_RNA (1)...(19): siRNA sense strand
ggaauacuaugacaaagga

SEQ ID NO: 1890493 - RNA, 19 nt, Homo sapiens
  misc_RNA (1)...(19): siRNA sense strand
ggaagaagcacauaguuga

SEQ ID NO: 1890494 - RNA, 19 nt, Homo sapiens
  misc_RNA (1)...(19): siRNA sense strand
ggauuggucucucuccaua

SEQ ID NO: 1890495 - RNA, 19 nt, Homo sapiens
  misc_RNA (1)...(19): siRNA sense strand
gaguugagcuuguuaaagu

SEQ ID NO: 1890496 - RNA, 19 nt, Homo sapiens
  misc_RNA (1)...(19): siRNA sense strand
ggaguuacauuauuaagca

SEQ ID NO: 1890497 - RNA, 19 nt, Homo sapiens
  misc_RNA (1)...(19): siRNA sense strand
gaucacagcuacuuugaca

SEQ ID NO: 1890498 - RNA, 19 nt, Homo sapiens
  misc_RNA (1)...(19): siRNA sense strand
cagaggagcuccagaacaa

SEQ ID NO: 1890499 - RNA, 19 nt, Homo sapiens
  misc_RNA (1)...(19): siRNA sense strand
cgagaaacauucaaccaaa

SEQ ID NO: 1890500 - RNA, 19 nt, Homo sapiens
  misc_RNA (1)...(19): siRNA sense strand
gauguugcaugccugguua

SEQ ID NO: 1890501 - RNA, 19 nt, Homo sapiens
  misc_RNA (1)...(19): siRNA sense strand
ugacagaagcauuugauua

SEQ ID NO: 1890502 - RNA, 19 nt, Homo sapiens
  misc_RNA (1)...(19): siRNA sense strand
gagcaugucuacucagaga

SEQ ID NO: 1890503 - RNA, 19 nt, Homo sapiens
  misc_RNA (1)...(19): siRNA sense strand
ucaaagacaugguggaaug

SEQ ID NO: 1890504 - RNA, 19 nt, Homo sapiens
  misc_RNA (1)...(19): siRNA sense strand
gcuaugaaguguauaagga

SEQ ID NO: 1890505 - RNA, 19 nt, Homo sapiens
  misc_RNA (1)...(19): siRNA sense strand
ugaaagcuauuaccaaugu

SEQ ID NO: 1890506 - RNA, 19 nt, Homo sapiens
  misc_RNA (1)...(19): siRNA sense strand
ggagaauacuuuggagaaa

SEQ ID NO: 1890507 - RNA, 19 nt, Homo sapiens
  misc_RNA (1)...(19): siRNA sense strand
caacaacccggaccuauga

SEQ ID NO: 1890508 - RNA, 19 nt, Homo sapiens
  misc_RNA (1)...(19): siRNA sense strand
ugacaaauauccuccugaa

SEQ ID NO: 1890509 - RNA, 19 nt, Homo sapiens
  misc_RNA (1)...(19): siRNA sense strand
gaacccaccuccaaauucu

SEQ ID NO: 1890510 - RNA, 19 nt, Homo sapiens
  misc_RNA (1)...(19): siRNA sense strand
ugaacaagcugcaggaugu

SEQ ID NO: 1890511 - RNA, 19 nt, Homo sapiens
  misc_RNA (1)...(19): siRNA sense strand
gguuauagaucgagaaaca

SEQ ID NO: 1890512 - RNA, 19 nt, Homo sapiens
  misc_RNA (1)...(19): siRNA sense strand
uuacagaugcccuuaauaa

SEQ ID NO: 1890513 - RNA, 19 nt, Homo sapiens
  misc_RNA (1)...(19): siRNA sense strand
uauccuugcugaagaauuu

SEQ ID NO: 1890514 - RNA, 19 nt, Homo sapiens
  misc_RNA (1)...(19): siRNA sense strand
cagcaagggaguuacauua

SEQ ID NO: 1890515 - RNA, 19 nt, Homo sapiens
  misc_RNA (1)...(19): siRNA sense strand
gcugugcucuccauucauu

SEQ ID NO: 1890516 - RNA, 19 nt, Homo sapiens
  misc_RNA (1)...(19): siRNA sense strand
gcgaagcgguccaugucua

SEQ ID NO: 1890517 - RNA, 19 nt, Homo sapiens
  misc_RNA (1)...(19): siRNA sense strand
caaaugaugaccuacaauu

SEQ ID NO: 1890518 - RNA, 19 nt, Homo sapiens
  misc_RNA (1)...(19): siRNA sense strand
cuucaggccucuccagaua

SEQ ID NO: 1890519 - RNA, 19 nt, Homo sapiens
  misc_RNA (1)...(19): siRNA sense strand
gaaaggcugggaaaucuga

SEQ ID NO: 1890520 - RNA, 19 nt, Homo sapiens
  misc_RNA (1)...(19): siRNA sense strand
uaaauugguugacuuugga

SEQ ID NO: 1890521 - RNA, 19 nt, Homo sapiens
  misc_RNA (1)...(19): siRNA sense strand
caaccaaacugucgguaca

SEQ ID NO: 1890522 - RNA, 19 nt, Homo sapiens
  misc_RNA (1)...(19): siRNA sense strand
gagaugaacaauacagaaa

SEQ ID NO: 1890523 - RNA, 19 nt, Homo sapiens
  misc_RNA (1)...(19): siRNA sense strand
gaggaaggaugcugagauc

SEQ ID NO: 1890524 - RNA, 19 nt, Homo sapiens
  misc_RNA (1)...(19): siRNA sense strand
ggcacuagaucgagaggua

SEQ ID NO: 1890525 - RNA, 19 nt, Homo sapiens
  misc_RNA (1)...(19): siRNA sense strand
cagauaaagugccucuuga

SEQ ID NO: 1890526 - RNA, 19 nt, Homo sapiens
  misc_RNA (1)...(19): siRNA sense strand
gaaguggaauacuaugaca

SEQ ID NO: 1890527 - RNA, 19 nt, Homo sapiens
  misc_RNA (1)...(19): siRNA sense strand
gcaggagcaugucuacuca

SEQ ID NO: 1890528 - RNA, 19 nt, Homo sapiens
  misc_RNA (1)...(19): siRNA sense strand
caggucagcuaacauuauu

SEQ ID NO: 1890529 - RNA, 19 nt, Homo sapiens
  misc_RNA (1)...(19): siRNA sense strand
gcuuggaaguggaauacua

SEQ ID NO: 1890530 - RNA, 19 nt, Homo sapiens
  misc_RNA (1)...(19): siRNA sense strand
gcacagaaggccaugauca

SEQ ID NO: 1890531 - RNA, 19 nt, Homo sapiens
  misc_RNA (1)...(19): siRNA sense strand
uacagaaacuuccucagaa

SEQ ID NO: 1890532 - RNA, 19 nt, Homo sapiens
  misc_RNA (1)...(19): siRNA sense strand
gggagcagcugucgaagca

SEQ ID NO: 1890533 - RNA, 19 nt, Homo sapiens
  misc_RNA (1)...(19): siRNA sense strand
caacagaaaggcugggaaa

SEQ ID NO: 1890534 - RNA, 19 nt, Homo sapiens
  misc_RNA (1)...(19): siRNA sense strand
caagggacaugacuucagu

SEQ ID NO: 1890535 - RNA, 19 nt, Homo sapiens
  misc_RNA (1)...(19): siRNA sense strand
gaagcagacuguggccauu

SEQ ID NO: 1890536 - RNA, 19 nt, Homo sapiens
  misc_RNA (1)...(19): siRNA sense strand
ggacagaggcagcuuugau

SEQ ID NO: 1890537 - RNA, 19 nt, Homo sapiens
  misc_RNA (1)...(19): siRNA sense strand
gagcgggaguaccauuuga

SEQ ID NO: 1890538 - RNA, 19 nt, Homo sapiens
  misc_RNA (1)...(19): siRNA sense strand
ggagaaccaggaaaccaua

SEQ ID NO: 1890539 - RNA, 19 nt, Homo sapiens
  misc_RNA (1)...(19): siRNA sense strand
ggagaagguggccagauuu

SEQ ID NO: 1890540 - RNA, 19 nt, Homo sapiens
  misc_RNA (1)...(19): siRNA sense strand
cagaaaggcugggaaaucu

SEQ ID NO: 1890541 - RNA, 19 nt, Homo sapiens
  misc_RNA (1)...(19): siRNA sense strand
gcugaagaauuuaccugaa

SEQ ID NO: 1890542 - RNA, 19 nt, Homo sapiens
  misc_RNA (1)...(19): siRNA sense strand
caacaagggacaugacuuc

SEQ ID NO: 1890543 - RNA, 19 nt, Homo sapiens
  misc_RNA (1)...(19): siRNA sense strand
guacaaggacugccucugu

SEQ ID NO: 1890544 - RNA, 19 nt, Homo sapiens
  misc_RNA (1)...(19): siRNA sense strand
gcacccagauggacacucu

SEQ ID NO: 1890545 - RNA, 19 nt, Homo sapiens
  misc_RNA (1)...(19): siRNA sense strand
ugggaaaucugaagaaugg

SEQ ID NO: 1890546 - RNA, 19 nt, Homo sapiens
  misc_RNA (1)...(19): siRNA sense strand
gaagaguugagcuuguuaa

SEQ ID NO: 1890547 - RNA, 19 nt, Homo sapiens
  misc_RNA (1)...(19): siRNA sense strand
ggaagaguugagcuuguua

SEQ ID NO: 1890548 - RNA, 19 nt, Homo sapiens
  misc_RNA (1)...(19): siRNA sense strand
gaucauugacugcuuggaa

SEQ ID NO: 1890549 - RNA, 19 nt, Homo sapiens
  misc_RNA (1)...(19): siRNA sense strand
gguauuaucuacagagacu

SEQ ID NO: 1890550 - RNA, 19 nt, Homo sapiens
  misc_RNA (1)...(19): siRNA sense strand
caaggacaauaaguaugua

SEQ ID NO: 1890551 - RNA, 19 nt, Homo sapiens
  misc_RNA (1)...(19): siRNA sense strand
ugugaaagcuauuaccaau

SEQ ID NO: 1890552 - RNA, 19 nt, Homo sapiens
  misc_RNA (1)...(19): siRNA sense strand
uccagaaccuugagauuau

SEQ ID NO: 1890553 - RNA, 19 nt, Homo sapiens
  misc_RNA (1)...(19): siRNA sense strand
ugaagaauuuaccugaaga

SEQ ID NO: 1890554 - RNA, 19 nt, Homo sapiens
  misc_RNA (1)...(19): siRNA sense strand
gaggacagcccaagcuaga

SEQ ID NO: 1890555 - RNA, 19 nt, Homo sapiens
  misc_RNA (1)...(19): siRNA sense strand
gaucaaagacaugguggaa

SEQ ID NO: 1890556 - RNA, 19 nt, Homo sapiens
  misc_RNA (1)...(19): siRNA sense strand
gggaaugccuccagaugag

SEQ ID NO: 1890557 - RNA, 19 nt, Homo sapiens
  misc_RNA (1)...(19): siRNA sense strand
ggagcucuggaguauauua

SEQ ID NO: 1890558 - RNA, 19 nt, Homo sapiens
  misc_RNA (1)...(19): siRNA sense strand
guacuuucaaggacaauaa

SEQ ID NO: 1890559 - RNA, 19 nt, Homo sapiens
  misc_RNA (1)...(19): siRNA sense strand
gagaaacauucaaccaaac

SEQ ID NO: 1890560 - RNA, 19 nt, Homo sapiens
  misc_RNA (1)...(19): siRNA sense strand
ucaggccucuccagauaaa

SEQ ID NO: 1890561 - RNA, 19 nt, Homo sapiens
  misc_RNA (1)...(19): siRNA sense strand
uaagaaacacaggugguua

SEQ ID NO: 1890562 - RNA, 19 nt, Homo sapiens
  misc_RNA (1)...(19): siRNA sense strand
ggaaaucugaagaauggaa

SEQ ID NO: 1890563 - RNA, 19 nt, Homo sapiens
  misc_RNA (1)...(19): siRNA sense strand
gcugaggguuaccuuaaau

SEQ ID NO: 1890564 - RNA, 19 nt, Homo sapiens
  misc_RNA (1)...(19): siRNA sense strand
gacagaagcauuugauuac

SEQ ID NO: 1890565 - RNA, 19 nt, Homo sapiens
  misc_RNA (1)...(19): siRNA sense strand
ggccauugcugaacucaca

SEQ ID NO: 1890566 - RNA, 19 nt, Homo sapiens
  misc_RNA (1)...(19): siRNA sense strand
aaagcacucucucuggaaa

SEQ ID NO: 1890567 - RNA, 19 nt, Homo sapiens
  misc_RNA (1)...(19): siRNA sense strand
gaugaugucaggucagcua

SEQ ID NO: 1890568 - RNA, 19 nt, Homo sapiens
  misc_RNA (1)...(19): siRNA sense strand
ggacagcccaagcuagaga

SEQ ID NO: 1890569 - RNA, 19 nt, Homo sapiens
  misc_RNA (1)...(19): siRNA sense strand
gggaguaccauuugaagga

SEQ ID NO: 1890570 - RNA, 19 nt, Homo sapiens
  misc_RNA (1)...(19): siRNA sense strand
aggagaagguggccagauu

SEQ ID NO: 1890571 - RNA, 19 nt, Homo sapiens
  misc_RNA (1)...(19): siRNA sense strand
ucagugaaaccuaaacauu

SEQ ID NO: 1890572 - RNA, 19 nt, Homo sapiens
  misc_RNA (1)...(19): siRNA sense strand
ugacaaaggagauuacauc

SEQ ID NO: 1890573 - RNA, 19 nt, Homo sapiens
  misc_RNA (1)...(19): siRNA sense strand
gaugaacaauacagaaacu

SEQ ID NO: 1890574 - RNA, 19 nt, Homo sapiens
  misc_RNA (1)...(19): siRNA sense strand
gagaagaagcucauuacag

SEQ ID NO: 1890575 - RNA, 19 nt, Homo sapiens
  misc_RNA (1)...(19): siRNA sense strand
ucacagaggagcuccagaa

SEQ ID NO: 1890576 - RNA, 19 nt, Homo sapiens
  misc_RNA (1)...(19): siRNA sense strand
gaugucaggucagcuaaca

SEQ ID NO: 1890577 - RNA, 19 nt, Homo sapiens
  misc_RNA (1)...(19): siRNA sense strand
ccagauaaagugccucuug

SEQ ID NO: 1890578 - RNA, 19 nt, Homo sapiens
  misc_RNA (1)...(19): siRNA sense strand
gaaagcuauuaccaauguu

SEQ ID NO: 1890579 - RNA, 19 nt, Homo sapiens
  misc_RNA (1)...(19): siRNA sense strand
ugagaaagcaagagucaga

SEQ ID NO: 1890580 - RNA, 19 nt, Homo sapiens
  misc_RNA (1)...(19): siRNA sense strand
agaaauugcuguccuccau

SEQ ID NO: 1890581 - RNA, 19 nt, Homo sapiens
  misc_RNA (1)...(19): siRNA sense strand
ccagaaccuugagauuauu

SEQ ID NO: 1890582 - RNA, 19 nt, Homo sapiens
  misc_RNA (1)...(19): siRNA sense strand
cugcaucgacuagguauua

SEQ ID NO: 1890583 - RNA, 19 nt, Homo sapiens
  misc_RNA (1)...(19): siRNA sense strand
ccaggaaaccauaucuuug

SEQ ID NO: 1890584 - RNA, 19 nt, Homo sapiens
  misc_RNA (1)...(19): siRNA sense strand
ucaaggacaauaaguaugu

SEQ ID NO: 1890585 - RNA, 19 nt, Homo sapiens
  misc_RNA (1)...(19): siRNA sense strand
gcaccaccaccaccaguga

SEQ ID NO: 1890586 - RNA, 19 nt, Homo sapiens
  misc_RNA (1)...(19): siRNA sense strand
ggaggcgccuuugcuuugu

SEQ ID NO: 1890587 - RNA, 19 nt, Homo sapiens
  misc_RNA (1)...(19): siRNA sense strand
gcaagagcgcucacugcuu

SEQ ID NO: 1890588 - RNA, 19 nt, Homo sapiens
  misc_RNA (1)...(19): siRNA sense strand
gaaccgcagagcuaagcaa

SEQ ID NO: 1890589 - RNA, 19 nt, Homo sapiens
  misc_RNA (1)...(19): siRNA sense strand
cuaagcaacggaagcaaga

SEQ ID NO: 1890590 - RNA, 19 nt, Homo sapiens
  misc_RNA (1)...(19): siRNA sense strand
gagcuaagcaacggaagca

SEQ ID NO: 1890591 - RNA, 19 nt, Homo sapiens
  misc_RNA (1)...(19): siRNA sense strand
caggaggcgccuuugcuuu

SEQ ID NO: 1890592 - RNA, 19 nt, Homo sapiens
  misc_RNA (1)...(19): siRNA sense strand
uuccagaaccgcagagcua

SEQ ID NO: 1890593 - RNA, 19 nt, Homo sapiens
  misc_RNA (1)...(19): siRNA sense strand
caccaccagugaccugcuu

SEQ ID NO: 1890594 - RNA, 19 nt, Homo sapiens
  misc_RNA (1)...(19): siRNA sense strand
aggaggcgccuuugcuuug

SEQ ID NO: 1890595 - RNA, 19 nt, Homo sapiens
  misc_RNA (1)...(19): siRNA sense strand
gcaaauagcuccuguguca

SEQ ID NO: 1890596 - RNA, 19 nt, Homo sapiens
  misc_RNA (1)...(19): siRNA sense strand
uaauaucggugguuuacuu

SEQ ID NO: 1890597 - RNA, 19 nt, Homo sapiens
  misc_RNA (1)...(19): siRNA sense strand
aacaccagcuuuaucaaua

SEQ ID NO: 1890598 - RNA, 19 nt, Homo sapiens
  misc_RNA (1)...(19): siRNA sense strand
gcuaacaccagcuuuauca

SEQ ID NO: 1890599 - RNA, 19 nt, Homo sapiens
  misc_RNA (1)...(19): siRNA sense strand
gagaaccaguugggcuuug

SEQ ID NO: 1890600 - RNA, 19 nt, Homo sapiens
  misc_RNA (1)...(19): siRNA sense strand
uaacaccagcuuuaucaau

SEQ ID NO: 1890601 - RNA, 19 nt, Homo sapiens
  misc_RNA (1)...(19): siRNA sense strand
uaaacccuguauccuguga

SEQ ID NO: 1890602 - RNA, 19 nt, Homo sapiens
  misc_RNA (1)...(19): siRNA sense strand
aaauagcuccugugucaga

SEQ ID NO: 1890603 - RNA, 19 nt, Homo sapiens
  misc_RNA (1)...(19): siRNA sense strand
cuuaagguguccagagaug

SEQ ID NO: 1890604 - RNA, 19 nt, Homo sapiens
  misc_RNA (1)...(19): siRNA sense strand
guggagaacaggauugguu

SEQ ID NO: 1890605 - RNA, 19 nt, Homo sapiens
  misc_RNA (1)...(19): siRNA sense strand
uacuuaagguguccagaga

SEQ ID NO: 1890606 - RNA, 19 nt, Homo sapiens
  misc_RNA (1)...(19): siRNA sense strand
gaaccaguugggcuuuguu

SEQ ID NO: 1890607 - RNA, 19 nt, Homo sapiens
  misc_RNA (1)...(19): siRNA sense strand
uaucggugguuuacuuaag

SEQ ID NO: 1890608 - RNA, 19 nt, Homo sapiens
  misc_RNA (1)...(19): siRNA sense strand
ggauugguuuccuccucaa

SEQ ID NO: 1890609 - RNA, 19 nt, Homo sapiens
  misc_RNA (1)...(19): siRNA sense strand
aauaucggugguuuacuua

SEQ ID NO: 1890610 - RNA, 19 nt, Homo sapiens
  misc_RNA (1)...(19): siRNA sense strand
uagcuccugugucagaaau

SEQ ID NO: 1890611 - RNA, 19 nt, Homo sapiens
  misc_RNA (1)...(19): siRNA sense strand
ggagaacaggauugguuuc

SEQ ID NO: 1890612 - RNA, 19 nt, Homo sapiens
  misc_RNA (1)...(19): siRNA sense strand
gaugguggagaacaggauu

SEQ ID NO: 1890613 - RNA, 19 nt, Homo sapiens
  misc_RNA (1)...(19): siRNA sense strand
uaugguucaucaugcaaau

SEQ ID NO: 1890614 - RNA, 19 nt, Homo sapiens
  misc_RNA (1)...(19): siRNA sense strand
uggagaacaggauugguuu

SEQ ID NO: 1890615 - RNA, 19 nt, Homo sapiens
  misc_RNA (1)...(19): siRNA sense strand
cagagaugguggagaacag

SEQ ID NO: 1890616 - RNA, 19 nt, Homo sapiens
  misc_RNA (1)...(19): siRNA sense strand
ccacaggcccagagaacca

SEQ ID NO: 1890617 - RNA, 19 nt, Homo sapiens
  misc_RNA (1)...(19): siRNA sense strand
ucaaugucaaggacucaaa

SEQ ID NO: 1890618 - RNA, 19 nt, Homo sapiens
  misc_RNA (1)...(19): siRNA sense strand
ccacauccuaaacccugua

SEQ ID NO: 1890619 - RNA, 19 nt, Homo sapiens
  misc_RNA (1)...(19): siRNA sense strand
ugcaggcuaugguucauca

SEQ ID NO: 1890620 - RNA, 19 nt, Homo sapiens
  misc_RNA (1)...(19): siRNA sense strand
ggacuuggauacugauuau

SEQ ID NO: 1890621 - RNA, 19 nt, Homo sapiens
  misc_RNA (1)...(19): siRNA sense strand
gaaagaggcggaagauguu

SEQ ID NO: 1890622 - RNA, 19 nt, Homo sapiens
  misc_RNA (1)...(19): siRNA sense strand
ccaaugaucccaagacaaa

SEQ ID NO: 1890623 - RNA, 19 nt, Homo sapiens
  misc_RNA (1)...(19): siRNA sense strand
gaaaguggcagacucaaag

SEQ ID NO: 1890624 - RNA, 19 nt, Homo sapiens
  misc_RNA (1)...(19): siRNA sense strand
gaacgucacccagguauuc

SEQ ID NO: 1890625 - RNA, 19 nt, Homo sapiens
  misc_RNA (1)...(19): siRNA sense strand
caaagcagaugcccucuac

SEQ ID NO: 1890626 - RNA, 19 nt, Homo sapiens
  misc_RNA (1)...(19): siRNA sense strand
ugaacucccugucacauga

SEQ ID NO: 1890627 - RNA, 19 nt, Homo sapiens
  misc_RNA (1)...(19): siRNA sense strand
ggacucagcauccgagaau

SEQ ID NO: 1890628 - RNA, 19 nt, Homo sapiens
  misc_RNA (1)...(19): siRNA sense strand
cauccuacuuccucaauga

SEQ ID NO: 1890629 - RNA, 19 nt, Homo sapiens
  misc_RNA (1)...(19): siRNA sense strand
ggcggaagauguuauaugg

SEQ ID NO: 1890630 - RNA, 19 nt, Homo sapiens
  misc_RNA (1)...(19): siRNA sense strand
ggaccaggccgugaagaaa

SEQ ID NO: 1890631 - RNA, 19 nt, Homo sapiens
  misc_RNA (1)...(19): siRNA sense strand
agaaagaggcggaagaugu

SEQ ID NO: 1890632 - RNA, 19 nt, Homo sapiens
  misc_RNA (1)...(19): siRNA sense strand
gaaaggcuguuugcgaaaa

SEQ ID NO: 1890633 - RNA, 19 nt, Homo sapiens
  misc_RNA (1)...(19): siRNA sense strand
uggagaaacugcaggacuu

SEQ ID NO: 1890634 - RNA, 19 nt, Homo sapiens
  misc_RNA (1)...(19): siRNA sense strand
ggaaaggcuguuugcgaaa

SEQ ID NO: 1890635 - RNA, 19 nt, Homo sapiens
  misc_RNA (1)...(19): siRNA sense strand
gcacguggagccuguguuc

SEQ ID NO: 1890636 - RNA, 19 nt, Homo sapiens
  misc_RNA (1)...(19): siRNA sense strand
ggagaaagaggcggaagau

SEQ ID NO: 1890637 - RNA, 19 nt, Homo sapiens
  misc_RNA (1)...(19): siRNA sense strand
ggucuacgccaucuguuau

SEQ ID NO: 1890638 - RNA, 19 nt, Homo sapiens
  misc_RNA (1)...(19): siRNA sense strand
ggucaaggccaaagcagau

SEQ ID NO: 1890639 - RNA, 19 nt, Homo sapiens
  misc_RNA (1)...(19): siRNA sense strand
agaccauccuggagaaaga

SEQ ID NO: 1890640 - RNA, 19 nt, Homo sapiens
  misc_RNA (1)...(19): siRNA sense strand
gagcuggagagagacaaua

SEQ ID NO: 1890641 - RNA, 19 nt, Homo sapiens
  misc_RNA (1)...(19): siRNA sense strand
gaccaggccgugaagaaau

SEQ ID NO: 1890642 - RNA, 19 nt, Homo sapiens
  misc_RNA (1)...(19): siRNA sense strand
cuccaaaccucaucucuac

SEQ ID NO: 1890643 - RNA, 19 nt, Homo sapiens
  misc_RNA (1)...(19): siRNA sense strand
ugaaaguggcagacucaaa

SEQ ID NO: 1890644 - RNA, 19 nt, Homo sapiens
  misc_RNA (1)...(19): siRNA sense strand
ggagaaacugcaggacuug

SEQ ID NO: 1890645 - RNA, 19 nt, Homo sapiens
  misc_RNA (1)...(19): siRNA sense strand
guucuucccaccgauauuu

SEQ ID NO: 1890646 - RNA, 19 nt, Homo sapiens
  misc_RNA (1)...(19): siRNA sense strand
gcugaaaguggcagacuca

SEQ ID NO: 1890647 - RNA, 19 nt, Homo sapiens
  misc_RNA (1)...(19): siRNA sense strand
ggaagaucacauccuacuu

SEQ ID NO: 1890648 - RNA, 19 nt, Homo sapiens
  misc_RNA (1)...(19): siRNA sense strand
gagggacucaggaagauca

SEQ ID NO: 1890649 - RNA, 19 nt, Homo sapiens
  misc_RNA (1)...(19): siRNA sense strand
gaaacugcaggacuuggau

SEQ ID NO: 1890650 - RNA, 19 nt, Homo sapiens
  misc_RNA (1)...(19): siRNA sense strand
ucaaauacaaccugaacuc

SEQ ID NO: 1890651 - RNA, 19 nt, Homo sapiens
  misc_RNA (1)...(19): siRNA sense strand
caggagggacucaggaaga

SEQ ID NO: 1890652 - RNA, 19 nt, Homo sapiens
  misc_RNA (1)...(19): siRNA sense strand
gggaccaggccgugaagaa

SEQ ID NO: 1890653 - RNA, 19 nt, Homo sapiens
  misc_RNA (1)...(19): siRNA sense strand
caaccugaacucccuguca

SEQ ID NO: 1890654 - RNA, 19 nt, Homo sapiens
  misc_RNA (1)...(19): siRNA sense strand
ccaaagcagaugcccucua

SEQ ID NO: 1890655 - RNA, 19 nt, Homo sapiens
  misc_RNA (1)...(19): siRNA sense strand
acucaaagacccuauugga

SEQ ID NO: 1890656 - RNA, 19 nt, Homo sapiens
  misc_RNA (1)...(19): siRNA sense strand
ugcaggacuuggauacuga

SEQ ID NO: 1890657 - RNA, 19 nt, Homo sapiens
  misc_RNA (1)...(19): siRNA sense strand
ggucaaauacaaccugaac

SEQ ID NO: 1890658 - RNA, 19 nt, Homo sapiens
  misc_RNA (1)...(19): siRNA sense strand
aaacugcaggacuuggaua

SEQ ID NO: 1890659 - RNA, 19 nt, Homo sapiens
  misc_RNA (1)...(19): siRNA sense strand
gcaaaguuuucccgggauu

SEQ ID NO: 1890660 - RNA, 19 nt, Homo sapiens
  misc_RNA (1)...(19): siRNA sense strand
uagggaugccagagacaua

SEQ ID NO: 1890661 - RNA, 19 nt, Homo sapiens
  misc_RNA (1)...(19): siRNA sense strand
aaagaggcggaagauguua

SEQ ID NO: 1890662 - RNA, 19 nt, Homo sapiens
  misc_RNA (1)...(19): siRNA sense strand
gagcgggaaaggcuguuug

SEQ ID NO: 1890663 - RNA, 19 nt, Homo sapiens
  misc_RNA (1)...(19): siRNA sense strand
aauggcaguucguggagaa

SEQ ID NO: 1890664 - RNA, 19 nt, Homo sapiens
  misc_RNA (1)...(19): siRNA sense strand
gagaaagaggcggaagaug

SEQ ID NO: 1890665 - RNA, 19 nt, Homo sapiens
  misc_RNA (1)...(19): siRNA sense strand
ggacucaggaagaucacau

SEQ ID NO: 1890666 - RNA, 19 nt, Homo sapiens
  misc_RNA (1)...(19): siRNA sense strand
agaggcggaagauguuaua

SEQ ID NO: 1890667 - RNA, 19 nt, Homo sapiens
  misc_RNA (1)...(19): siRNA sense strand
gaugugcugucuccaaacc

SEQ ID NO: 1890668 - RNA, 19 nt, Homo sapiens
  misc_RNA (1)...(19): siRNA sense strand
ucuccaaaccucaucucua

SEQ ID NO: 1890669 - RNA, 19 nt, Homo sapiens
  misc_RNA (1)...(19): siRNA sense strand
ucuacgccaucuguuauug

SEQ ID NO: 1890670 - RNA, 19 nt, Homo sapiens
  misc_RNA (1)...(19): siRNA sense strand
ccaaaccucaucucuacca

SEQ ID NO: 1890671 - RNA, 19 nt, Homo sapiens
  misc_RNA (1)...(19): siRNA sense strand
cugcaggacuuggauacug

SEQ ID NO: 1890672 - RNA, 19 nt, Homo sapiens
  misc_RNA (1)...(19): siRNA sense strand
agacucaaagacccuauug

SEQ ID NO: 1890673 - RNA, 19 nt, Homo sapiens
  misc_RNA (1)...(19): siRNA sense strand
gaacucccugucacaugau

SEQ ID NO: 1890674 - RNA, 19 nt, Homo sapiens
  misc_RNA (1)...(19): siRNA sense strand
gaacagaugucauagagaa

SEQ ID NO: 1890675 - RNA, 19 nt, Homo sapiens
  misc_RNA (1)...(19): siRNA sense strand
gaagauagaugacaaagau

SEQ ID NO: 1890676 - RNA, 19 nt, Homo sapiens
  misc_RNA (1)...(19): siRNA sense strand
ugacaaagaugaacucgua

SEQ ID NO: 1890677 - RNA, 19 nt, Homo sapiens
  misc_RNA (1)...(19): siRNA sense strand
gaacuggauucacgccuua

SEQ ID NO: 1890678 - RNA, 19 nt, Homo sapiens
  misc_RNA (1)...(19): siRNA sense strand
cuaagaaacuguagugaaa

SEQ ID NO: 1890679 - RNA, 19 nt, Homo sapiens
  misc_RNA (1)...(19): siRNA sense strand
aaacagacuugucaacauu

SEQ ID NO: 1890680 - RNA, 19 nt, Homo sapiens
  misc_RNA (1)...(19): siRNA sense strand
caaaagaacagaugucaua

SEQ ID NO: 1890681 - RNA, 19 nt, Homo sapiens
  misc_RNA (1)...(19): siRNA sense strand
caaagaugaacucguauuu

SEQ ID NO: 1890682 - RNA, 19 nt, Homo sapiens
  misc_RNA (1)...(19): siRNA sense strand
gaaaacugaugacaaagaa

SEQ ID NO: 1890683 - RNA, 19 nt, Homo sapiens
  misc_RNA (1)...(19): siRNA sense strand
cauuguagaucaucccuuu

SEQ ID NO: 1890684 - RNA, 19 nt, Homo sapiens
  misc_RNA (1)...(19): siRNA sense strand
uaaacagacuugucaacau

SEQ ID NO: 1890685 - RNA, 19 nt, Homo sapiens
  misc_RNA (1)...(19): siRNA sense strand
gaagggauguaaacagacu

SEQ ID NO: 1890686 - RNA, 19 nt, Homo sapiens
  misc_RNA (1)...(19): siRNA sense strand
ggacucuguuucucaaugu

SEQ ID NO: 1890687 - RNA, 19 nt, Homo sapiens
  misc_RNA (1)...(19): siRNA sense strand
gggauccucuguuuacuuc

SEQ ID NO: 1890688 - RNA, 19 nt, Homo sapiens
  misc_RNA (1)...(19): siRNA sense strand
guuguggaguaaacuguua

SEQ ID NO: 1890689 - RNA, 19 nt, Homo sapiens
  misc_RNA (1)...(19): siRNA sense strand
gaugauagucacaguguug

SEQ ID NO: 1890690 - RNA, 19 nt, Homo sapiens
  misc_RNA (1)...(19): siRNA sense strand
gaucaucccuuuugaagau

SEQ ID NO: 1890691 - RNA, 19 nt, Homo sapiens
  misc_RNA (1)...(19): siRNA sense strand
uggaagggauguaaacaga

SEQ ID NO: 1890692 - RNA, 19 nt, Homo sapiens
  misc_RNA (1)...(19): siRNA sense strand
gaucagggagagauuuauu

SEQ ID NO: 1890693 - RNA, 19 nt, Homo sapiens
  misc_RNA (1)...(19): siRNA sense strand
gauguaaacagacuuguca

SEQ ID NO: 1890694 - RNA, 19 nt, Homo sapiens
  misc_RNA (1)...(19): siRNA sense strand
gcaaaaugacaacuacuua

SEQ ID NO: 1890695 - RNA, 19 nt, Homo sapiens
  misc_RNA (1)...(19): siRNA sense strand
gauccucuguuuacuucuu

SEQ ID NO: 1890696 - RNA, 19 nt, Homo sapiens
  misc_RNA (1)...(19): siRNA sense strand
gcagucuccuucagaguca

SEQ ID NO: 1890697 - RNA, 19 nt, Homo sapiens
  misc_RNA (1)...(19): siRNA sense strand
gaacucguauuuuacauuc

SEQ ID NO: 1890698 - RNA, 19 nt, Homo sapiens
  misc_RNA (1)...(19): siRNA sense strand
gauucacgccuuauacaaa

SEQ ID NO: 1890699 - RNA, 19 nt, Homo sapiens
  misc_RNA (1)...(19): siRNA sense strand
aagaacagaugucauagag

SEQ ID NO: 1890700 - RNA, 19 nt, Homo sapiens
  misc_RNA (1)...(19): siRNA sense strand
gauuaaggccugaugauac

SEQ ID NO: 1890701 - RNA, 19 nt, Homo sapiens
  misc_RNA (1)...(19): siRNA sense strand
aaacaucaacggcaggaaa

SEQ ID NO: 1890702 - RNA, 19 nt, Homo sapiens
  misc_RNA (1)...(19): siRNA sense strand
caacggcaggaaauucuaa

SEQ ID NO: 1890703 - RNA, 19 nt, Homo sapiens
  misc_RNA (1)...(19): siRNA sense strand
guaaacagacuugucaaca

SEQ ID NO: 1890704 - RNA, 19 nt, Homo sapiens
  misc_RNA (1)...(19): siRNA sense strand
cagagucacagaauagauu

SEQ ID NO: 1890705 - RNA, 19 nt, Homo sapiens
  misc_RNA (1)...(19): siRNA sense strand
caguguuggugacaaauau

SEQ ID NO: 1890706 - RNA, 19 nt, Homo sapiens
  misc_RNA (1)...(19): siRNA sense strand
gaaacuguagugaaaagua

SEQ ID NO: 1890707 - RNA, 19 nt, Homo sapiens
  misc_RNA (1)...(19): siRNA sense strand
caauguuggaccuaagaua

SEQ ID NO: 1890708 - RNA, 19 nt, Homo sapiens
  misc_RNA (1)...(19): siRNA sense strand
gauagaugacaaagaugaa

SEQ ID NO: 1890709 - RNA, 19 nt, Homo sapiens
  misc_RNA (1)...(19): siRNA sense strand
gaaaaguacaucaugcaaa

SEQ ID NO: 1890710 - RNA, 19 nt, Homo sapiens
  misc_RNA (1)...(19): siRNA sense strand
ggauucacgccuuauacaa

SEQ ID NO: 1890711 - RNA, 19 nt, Homo sapiens
  misc_RNA (1)...(19): siRNA sense strand
ugggaaaacugaugacaaa

SEQ ID NO: 1890712 - RNA, 19 nt, Homo sapiens
  misc_RNA (1)...(19): siRNA sense strand
ggaaaacugaugacaaaga

SEQ ID NO: 1890713 - RNA, 19 nt, Homo sapiens
  misc_RNA (1)...(19): siRNA sense strand
agauuaaggccugaugaua

SEQ ID NO: 1890714 - RNA, 19 nt, Homo sapiens
  misc_RNA (1)...(19): siRNA sense strand
ucuaagaaacuguagugaa

SEQ ID NO: 1890715 - RNA, 19 nt, Homo sapiens
  misc_RNA (1)...(19): siRNA sense strand
agggagagauuuauucaac

SEQ ID NO: 1890716 - RNA, 19 nt, Homo sapiens
  misc_RNA (1)...(19): siRNA sense strand
caggcaaauucucugaaga

SEQ ID NO: 1890717 - RNA, 19 nt, Homo sapiens
  misc_RNA (1)...(19): siRNA sense strand
aaagaacagaugucauaga

SEQ ID NO: 1890718 - RNA, 19 nt, Homo sapiens
  misc_RNA (1)...(19): siRNA sense strand
agauagaugacaaagauga

SEQ ID NO: 1890719 - RNA, 19 nt, Homo sapiens
  misc_RNA (1)...(19): siRNA sense strand
gcaaaauacaggcaaauuc

SEQ ID NO: 1890720 - RNA, 19 nt, Homo sapiens
  misc_RNA (1)...(19): siRNA sense strand
agagucacagaauagauua

SEQ ID NO: 1890721 - RNA, 19 nt, Homo sapiens
  misc_RNA (1)...(19): siRNA sense strand
acaaagaugaacucguauu

SEQ ID NO: 1890722 - RNA, 19 nt, Homo sapiens
  misc_RNA (1)...(19): siRNA sense strand
gaaugaucagggagagauu

SEQ ID NO: 1890723 - RNA, 19 nt, Homo sapiens
  misc_RNA (1)...(19): siRNA sense strand
gcaccucauugcagugacu

SEQ ID NO: 1890724 - RNA, 19 nt, Homo sapiens
  misc_RNA (1)...(19): siRNA sense strand
ccuucagagucacagaaua

SEQ ID NO: 1890725 - RNA, 19 nt, Homo sapiens
  misc_RNA (1)...(19): siRNA sense strand
guuggugacaaauaucuuu

SEQ ID NO: 1890726 - RNA, 19 nt, Homo sapiens
  misc_RNA (1)...(19): siRNA sense strand
uguuggaccuaagauauug

SEQ ID NO: 1890727 - RNA, 19 nt, Homo sapiens
  misc_RNA (1)...(19): siRNA sense strand
acaggcaaauucucugaag

SEQ ID NO: 1890728 - RNA, 19 nt, Homo sapiens
  misc_RNA (1)...(19): siRNA sense strand
guggaguaaacuguuauua

SEQ ID NO: 1890729 - RNA, 19 nt, Homo sapiens
  misc_RNA (1)...(19): siRNA sense strand
aauguuggaccuaagauau

SEQ ID NO: 1890730 - RNA, 19 nt, Homo sapiens
  misc_RNA (1)...(19): siRNA sense strand
ucagggagagauuuauuca

SEQ ID NO: 1890731 - RNA, 19 nt, Homo sapiens
  misc_RNA (1)...(19): siRNA sense strand
caucaacggcaggaaauuc

SEQ ID NO: 1890732 - RNA, 19 nt, Homo sapiens
  misc_RNA (1)...(19): siRNA sense strand
acaguguuggugacaaaua

SEQ ID NO: 1890733 - RNA, 19 nt, Homo sapiens
  misc_RNA (1)...(19): siRNA sense strand
ugaagauagaugacaaaga

SEQ ID NO: 1890734 - RNA, 19 nt, Homo sapiens
  misc_RNA (1)...(19): siRNA sense strand
gaaagacuggaagggaugu

SEQ ID NO: 1890735 - RNA, 19 nt, Homo sapiens
  misc_RNA (1)...(19): siRNA sense strand
cggguccuguuguggagua

SEQ ID NO: 1890736 - RNA, 19 nt, Homo sapiens
  misc_RNA (1)...(19): siRNA sense strand
gacaaauaucuuucagugu

SEQ ID NO: 1890737 - RNA, 19 nt, Homo sapiens
  misc_RNA (1)...(19): siRNA sense strand
ggugacaaauaucuuucag

SEQ ID NO: 1890738 - RNA, 19 nt, Homo sapiens
  misc_RNA (1)...(19): siRNA sense strand
uggacucuguuucucaaug

SEQ ID NO: 1890739 - RNA, 19 nt, Homo sapiens
  misc_RNA (1)...(19): siRNA sense strand
ggauguaaacagacuuguc

SEQ ID NO: 1890740 - RNA, 19 nt, Homo sapiens
  misc_RNA (1)...(19): siRNA sense strand
acagacuugucaacauugu

SEQ ID NO: 1890741 - RNA, 19 nt, Homo sapiens
  misc_RNA (1)...(19): siRNA sense strand
aaaauagcuuucagcagaa

SEQ ID NO: 1890742 - RNA, 19 nt, Homo sapiens
  misc_RNA (1)...(19): siRNA sense strand
cuucagagucacagaauag

SEQ ID NO: 1890743 - RNA, 19 nt, Homo sapiens
  misc_RNA (1)...(19): siRNA sense strand
caaaauacaggcaaauucu

SEQ ID NO: 1890744 - RNA, 19 nt, Homo sapiens
  misc_RNA (1)...(19): siRNA sense strand
ugucaacauuguagaucau

SEQ ID NO: 1890745 - RNA, 19 nt, Homo sapiens
  misc_RNA (1)...(19): siRNA sense strand
uuaccaugcagaagaaaga

SEQ ID NO: 1890746 - RNA, 19 nt, Homo sapiens
  misc_RNA (1)...(19): siRNA sense strand
cucuugggauccucuguuu

SEQ ID NO: 1890747 - RNA, 19 nt, Homo sapiens
  misc_RNA (1)...(19): siRNA sense strand
uuauucaacccugagauuu

SEQ ID NO: 1890748 - RNA, 19 nt, Homo sapiens
  misc_RNA (1)...(19): siRNA sense strand
cuuggacucuguuucucaa

SEQ ID NO: 1890749 - RNA, 19 nt, Homo sapiens
  misc_RNA (1)...(19): siRNA sense strand
gacaagauauugaaaggua

SEQ ID NO: 1890750 - RNA, 19 nt, Homo sapiens
  misc_RNA (1)...(19): siRNA sense strand
ggaggaauaugaugaagaa

SEQ ID NO: 1890751 - RNA, 19 nt, Homo sapiens
  misc_RNA (1)...(19): siRNA sense strand
ugaaacaccugaagaaaga

SEQ ID NO: 1890752 - RNA, 19 nt, Homo sapiens
  misc_RNA (1)...(19): siRNA sense strand
gagaugaugccaagaaaua

SEQ ID NO: 1890753 - RNA, 19 nt, Homo sapiens
  misc_RNA (1)...(19): siRNA sense strand
gaagaggacgugcugcuua

SEQ ID NO: 1890754 - RNA, 19 nt, Homo sapiens
  misc_RNA (1)...(19): siRNA sense strand
gaagaaagacaagauauug

SEQ ID NO: 1890755 - RNA, 19 nt, Homo sapiens
  misc_RNA (1)...(19): siRNA sense strand
gcacaccacucacuaauac

SEQ ID NO: 1890756 - RNA, 19 nt, Homo sapiens
  misc_RNA (1)...(19): siRNA sense strand
aaacaggaguugagagaaa

SEQ ID NO: 1890757 - RNA, 19 nt, Homo sapiens
  misc_RNA (1)...(19): siRNA sense strand
aaaguuaccugauguagug

SEQ ID NO: 1890758 - RNA, 19 nt, Homo sapiens
  misc_RNA (1)...(19): siRNA sense strand
uagcaaaggugaaaaguua

SEQ ID NO: 1890759 - RNA, 19 nt, Homo sapiens
  misc_RNA (1)...(19): siRNA sense strand
gagagaugaugccaagaaa

SEQ ID NO: 1890760 - RNA, 19 nt, Homo sapiens
  misc_RNA (1)...(19): siRNA sense strand
aagaauauaugcuggcuuu

SEQ ID NO: 1890761 - RNA, 19 nt, Homo sapiens
  misc_RNA (1)...(19): siRNA sense strand
guaaagaaggugaugauga

SEQ ID NO: 1890762 - RNA, 19 nt, Homo sapiens
  misc_RNA (1)...(19): siRNA sense strand
ggaauaugaugaagaagag

SEQ ID NO: 1890763 - RNA, 19 nt, Homo sapiens
  misc_RNA (1)...(19): siRNA sense strand
uauugaggcuguuggauuu

SEQ ID NO: 1890764 - RNA, 19 nt, Homo sapiens
  misc_RNA (1)...(19): siRNA sense strand
gaagaauggauaccagauu

SEQ ID NO: 1890765 - RNA, 19 nt, Homo sapiens
  misc_RNA (1)...(19): siRNA sense strand
aggagaaggugaagaauau

SEQ ID NO: 1890766 - RNA, 19 nt, Homo sapiens
  misc_RNA (1)...(19): siRNA sense strand
gaauauaugcuggcuuuga

SEQ ID NO: 1890767 - RNA, 19 nt, Homo sapiens
  misc_RNA (1)...(19): siRNA sense strand
gaagguauaccaggaagaa

SEQ ID NO: 1890768 - RNA, 19 nt, Homo sapiens
  misc_RNA (1)...(19): siRNA sense strand
uaaagaaggugaugaugac

SEQ ID NO: 1890769 - RNA, 19 nt, Homo sapiens
  misc_RNA (1)...(19): siRNA sense strand
uggaugaggcaaccuauua

SEQ ID NO: 1890770 - RNA, 19 nt, Homo sapiens
  misc_RNA (1)...(19): siRNA sense strand
aagaauggauaccagauug

SEQ ID NO: 1890771 - RNA, 19 nt, Homo sapiens
  misc_RNA (1)...(19): siRNA sense strand
gaacaggaggaauaugaug

SEQ ID NO: 1890772 - RNA, 19 nt, Homo sapiens
  misc_RNA (1)...(19): siRNA sense strand
ccgcagaacaggaggaaua

SEQ ID NO: 1890773 - RNA, 19 nt, Homo sapiens
  misc_RNA (1)...(19): siRNA sense strand
gaaagaaggaagcaaagag

SEQ ID NO: 1890774 - RNA, 19 nt, Homo sapiens
  misc_RNA (1)...(19): siRNA sense strand
cagaacaggaggaauauga

SEQ ID NO: 1890775 - RNA, 19 nt, Homo sapiens
  misc_RNA (1)...(19): siRNA sense strand
aauauaugcuggcuuugaa

SEQ ID NO: 1890776 - RNA, 19 nt, Homo sapiens
  misc_RNA (1)...(19): siRNA sense strand
gauaccagauuggagaaga

SEQ ID NO: 1890777 - RNA, 19 nt, Homo sapiens
  misc_RNA (1)...(19): siRNA sense strand
caggagaaggugaagaaua

SEQ ID NO: 1890778 - RNA, 19 nt, Homo sapiens
  misc_RNA (1)...(19): siRNA sense strand
gaugaugccaagaaauaaa

SEQ ID NO: 1890779 - RNA, 19 nt, Homo sapiens
  misc_RNA (1)...(19): siRNA sense strand
gagaaggugaagaauauau

SEQ ID NO: 1890780 - RNA, 19 nt, Homo sapiens
  misc_RNA (1)...(19): siRNA sense strand
gcgcagacgugaugacaac

SEQ ID NO: 1890781 - RNA, 19 nt, Homo sapiens
  misc_RNA (1)...(19): siRNA sense strand
gcuguuggauuuagcaaag

SEQ ID NO: 1890782 - RNA, 19 nt, Homo sapiens
  misc_RNA (1)...(19): siRNA sense strand
ucacuaauacugaagaugu

SEQ ID NO: 1890783 - RNA, 19 nt, Homo sapiens
  misc_RNA (1)...(19): siRNA sense strand
gaguugagagaaacaauga

SEQ ID NO: 1890784 - RNA, 19 nt, Homo sapiens
  misc_RNA (1)...(19): siRNA sense strand
ugacgaugaugccgcagaa

SEQ ID NO: 1890785 - RNA, 19 nt, Homo sapiens
  misc_RNA (1)...(19): siRNA sense strand
ggauuuagcaaaggugaaa

SEQ ID NO: 1890786 - RNA, 19 nt, Homo sapiens
  misc_RNA (1)...(19): siRNA sense strand
ggagaaggugaagaauaua

SEQ ID NO: 1890787 - RNA, 19 nt, Homo sapiens
  misc_RNA (1)...(19): siRNA sense strand
ugaaacaggaguugagaga

SEQ ID NO: 1890788 - RNA, 19 nt, Homo sapiens
  misc_RNA (1)...(19): siRNA sense strand
gaaacaggaguugagagaa

SEQ ID NO: 1890789 - RNA, 19 nt, Homo sapiens
  misc_RNA (1)...(19): siRNA sense strand
agagaaagaaggaagcaaa

SEQ ID NO: 1890790 - RNA, 19 nt, Homo sapiens
  misc_RNA (1)...(19): siRNA sense strand
guugagagaaacaaugaaa

SEQ ID NO: 1890791 - RNA, 19 nt, Homo sapiens
  misc_RNA (1)...(19): siRNA sense strand
aaagaaggaagcaaagaga

SEQ ID NO: 1890792 - RNA, 19 nt, Homo sapiens
  misc_RNA (1)...(19): siRNA sense strand
aagaggacgugcugcuuau

SEQ ID NO: 1890793 - RNA, 19 nt, Homo sapiens
  misc_RNA (1)...(19): siRNA sense strand
ggaguugagagaaacaaug

SEQ ID NO: 1890794 - RNA, 19 nt, Homo sapiens
  misc_RNA (1)...(19): siRNA sense strand
ggaagaauggauaccagau

SEQ ID NO: 1890795 - RNA, 19 nt, Homo sapiens
  misc_RNA (1)...(19): siRNA sense strand
agaaggaagcaaagagaaa

SEQ ID NO: 1890796 - RNA, 19 nt, Homo sapiens
  misc_RNA (1)...(19): siRNA sense strand
ugaggaaaaugaagagaaa

SEQ ID NO: 1890797 - RNA, 19 nt, Homo sapiens
  misc_RNA (1)...(19): siRNA sense strand
ggcacaccacucacuaaua

SEQ ID NO: 1890798 - RNA, 19 nt, Homo sapiens
  misc_RNA (1)...(19): siRNA sense strand
ggcaaaggcacaccacuca

SEQ ID NO: 1890799 - RNA, 19 nt, Homo sapiens
  misc_RNA (1)...(19): siRNA sense strand
gaagcaaagagaaaaguaa

SEQ ID NO: 1890800 - RNA, 19 nt, Homo sapiens
  misc_RNA (1)...(19): siRNA sense strand
ggugaaaaguuaccugaug

SEQ ID NO: 1890801 - RNA, 19 nt, Homo sapiens
  misc_RNA (1)...(19): siRNA sense strand
gaaaacaggagaaggugaa

SEQ ID NO: 1890802 - RNA, 19 nt, Homo sapiens
  misc_RNA (1)...(19): siRNA sense strand
gugaugacaacauggauga

SEQ ID NO: 1890803 - RNA, 19 nt, Homo sapiens
  misc_RNA (1)...(19): siRNA sense strand
uaccugauguaguguugaa

SEQ ID NO: 1890804 - RNA, 19 nt, Homo sapiens
  misc_RNA (1)...(19): siRNA sense strand
gagaaagaaggaagcaaag

SEQ ID NO: 1890805 - RNA, 19 nt, Homo sapiens
  misc_RNA (1)...(19): siRNA sense strand
agagagaugaugccaagaa

SEQ ID NO: 1890806 - RNA, 19 nt, Homo sapiens
  misc_RNA (1)...(19): siRNA sense strand
gaauggauaccagauugga

SEQ ID NO: 1890807 - RNA, 19 nt, Homo sapiens
  misc_RNA (1)...(19): siRNA sense strand
ggaagaggacgugcugcuu

SEQ ID NO: 1890808 - RNA, 19 nt, Homo sapiens
  misc_RNA (1)...(19): siRNA sense strand
ugaagaagagcaagaagag

SEQ ID NO: 1890809 - RNA, 19 nt, Homo sapiens
  misc_RNA (1)...(19): siRNA sense strand
ccugaagaaagacaagaua

SEQ ID NO: 1890810 - RNA, 19 nt, Homo sapiens
  misc_RNA (1)...(19): siRNA sense strand
cagacgugaugacaacaug

SEQ ID NO: 1890811 - RNA, 19 nt, Homo sapiens
  misc_RNA (1)...(19): siRNA sense strand
agaaggugaugaugacgau

SEQ ID NO: 1890812 - RNA, 19 nt, Homo sapiens
  misc_RNA (1)...(19): siRNA sense strand
gaagagaaagaaggaagca

SEQ ID NO: 1890813 - RNA, 19 nt, Homo sapiens
  misc_RNA (1)...(19): siRNA sense strand
uacugaagauguguugaaa

SEQ ID NO: 1890814 - RNA, 19 nt, Homo sapiens
  misc_RNA (1)...(19): siRNA sense strand
gaagagcaagaagaggaaa

SEQ ID NO: 1890815 - RNA, 19 nt, Homo sapiens
  misc_RNA (1)...(19): siRNA sense strand
ugaugacgaugacgaugau

SEQ ID NO: 1890816 - RNA, 19 nt, Homo sapiens
  misc_RNA (1)...(19): siRNA sense strand
gcaaagagaaaaguaaaga

SEQ ID NO: 1890817 - RNA, 19 nt, Homo sapiens
  misc_RNA (1)...(19): siRNA sense strand
gaaggaagcaaagagaaaa

SEQ ID NO: 1890818 - RNA, 19 nt, Homo sapiens
  misc_RNA (1)...(19): siRNA sense strand
aagacaagauauugaaagg

SEQ ID NO: 1890819 - RNA, 19 nt, Homo sapiens
  misc_RNA (1)...(19): siRNA sense strand
ggaugaggcaaccuauuag

SEQ ID NO: 1890820 - RNA, 19 nt, Homo sapiens
  misc_RNA (1)...(19): siRNA sense strand
gaaggugaagaauauaugc

SEQ ID NO: 1890821 - RNA, 19 nt, Homo sapiens
  misc_RNA (1)...(19): siRNA sense strand
uauugaaacaccugaagaa

SEQ ID NO: 1890822 - RNA, 19 nt, Homo sapiens
  misc_RNA (1)...(19): siRNA sense strand
guuaccugauguaguguug

SEQ ID NO: 1890823 - RNA, 19 nt, Homo sapiens
  misc_RNA (1)...(19): siRNA sense strand
aaaggcacaccacucacua

SEQ ID NO: 1890824 - RNA, 19 nt, Homo sapiens
  misc_RNA (1)...(19): siRNA sense strand
ggaagcaaagagaaaagua

SEQ ID NO: 1890825 - RNA, 19 nt, Homo sapiens
  misc_RNA (1)...(19): siRNA sense strand
caaaggcacaccacucacu

SEQ ID NO: 1890826 - RNA, 19 nt, Homo sapiens
  misc_RNA (1)...(19): siRNA sense strand
aggaauaugaugaagaaga

SEQ ID NO: 1890827 - RNA, 19 nt, Homo sapiens
  misc_RNA (1)...(19): siRNA sense strand
aaaugaagagaaagaagga

SEQ ID NO: 1890828 - RNA, 19 nt, Homo sapiens
  misc_RNA (1)...(19): siRNA sense strand
gaggacgugcugcuuauac

SEQ ID NO: 1890829 - RNA, 19 nt, Homo sapiens
  misc_RNA (1)...(19): siRNA sense strand
aacaggagaaggugaagaa

SEQ ID NO: 1890830 - RNA, 19 nt, Homo sapiens
  misc_RNA (1)...(19): siRNA sense strand
gugcugcuuauaccuuuaa

SEQ ID NO: 1890831 - RNA, 19 nt, Homo sapiens
  misc_RNA (1)...(19): siRNA sense strand
cacuaauacugaagaugug

SEQ ID NO: 1890832 - RNA, 19 nt, Homo sapiens
  misc_RNA (1)...(19): siRNA sense strand
gugaaaaguuaccugaugu

SEQ ID NO: 1890833 - RNA, 19 nt, Homo sapiens
  misc_RNA (1)...(19): siRNA sense strand
uugaagauggagaugauuu

SEQ ID NO: 1890834 - RNA, 19 nt, Homo sapiens
  misc_RNA (1)...(19): siRNA sense strand
cuuugaagauggagaugau

SEQ ID NO: 1890835 - RNA, 19 nt, Homo sapiens
  misc_RNA (1)...(19): siRNA sense strand
acuauuuccugauacagau

SEQ ID NO: 1890836 - RNA, 19 nt, Homo sapiens
  misc_RNA (1)...(19): siRNA sense strand
agaaagaaggaagcaaaga

SEQ ID NO: 1890837 - RNA, 19 nt, Homo sapiens
  misc_RNA (1)...(19): siRNA sense strand
auacugaagauguguugaa

SEQ ID NO: 1890838 - RNA, 19 nt, Homo sapiens
  misc_RNA (1)...(19): siRNA sense strand
gguauaccaggaagaaugg

SEQ ID NO: 1890839 - RNA, 19 nt, Homo sapiens
  misc_RNA (1)...(19): siRNA sense strand
caugaagguauaccaggaa

SEQ ID NO: 1890840 - RNA, 19 nt, Homo sapiens
  misc_RNA (1)...(19): siRNA sense strand
gcagacgugaugacaacau

SEQ ID NO: 1890841 - RNA, 19 nt, Homo sapiens
  misc_RNA (1)...(19): siRNA sense strand
acaggaggaauaugaugaa

SEQ ID NO: 1890842 - RNA, 19 nt, Homo sapiens
  misc_RNA (1)...(19): siRNA sense strand
uaauacugaagauguguug

SEQ ID NO: 1890843 - RNA, 19 nt, Homo sapiens
  misc_RNA (1)...(19): siRNA sense strand
cgugcugcuuauaccuuua

SEQ ID NO: 1890844 - RNA, 19 nt, Homo sapiens
  misc_RNA (1)...(19): siRNA sense strand
ugaugaagaagagcaagaa

SEQ ID NO: 1890845 - RNA, 19 nt, Homo sapiens
  misc_RNA (1)...(19): siRNA sense strand
aagaaggaagcaaagagaa

SEQ ID NO: 1890846 - RNA, 19 nt, Homo sapiens
  misc_RNA (1)...(19): siRNA sense strand
auaccaggaagaauggaua

SEQ ID NO: 1890847 - RNA, 19 nt, Homo sapiens
  misc_RNA (1)...(19): siRNA sense strand
agaaggugaagaauauaug

SEQ ID NO: 1890848 - RNA, 19 nt, Homo sapiens
  misc_RNA (1)...(19): siRNA sense strand
ggaaaaugaagagaaagaa

SEQ ID NO: 1890849 - RNA, 19 nt, Homo sapiens
  misc_RNA (1)...(19): siRNA sense strand
gaacaccacugacuuugug

SEQ ID NO: 1890850 - RNA, 19 nt, Homo sapiens
  misc_RNA (1)...(19): siRNA sense strand
gcaggcuucuguaacauua

SEQ ID NO: 1890851 - RNA, 19 nt, Homo sapiens
  misc_RNA (1)...(19): siRNA sense strand
ggagggaacugcuguuagu

SEQ ID NO: 1890852 - RNA, 19 nt, Homo sapiens
  misc_RNA (1)...(19): siRNA sense strand
gaacaacccauacaucauc

SEQ ID NO: 1890853 - RNA, 19 nt, Homo sapiens
  misc_RNA (1)...(19): siRNA sense strand
gaagaucugucaaaaccua

SEQ ID NO: 1890854 - RNA, 19 nt, Homo sapiens
  misc_RNA (1)...(19): siRNA sense strand
uccaaacccuaauaagaua

SEQ ID NO: 1890855 - RNA, 19 nt, Homo sapiens
  misc_RNA (1)...(19): siRNA sense strand
gcauugcuguugauauuag

SEQ ID NO: 1890856 - RNA, 19 nt, Homo sapiens
  misc_RNA (1)...(19): siRNA sense strand
gugaagacgucguugaaca

SEQ ID NO: 1890857 - RNA, 19 nt, Homo sapiens
  misc_RNA (1)...(19): siRNA sense strand
cgagaccucugguugugaa

SEQ ID NO: 1890858 - RNA, 19 nt, Homo sapiens
  misc_RNA (1)...(19): siRNA sense strand
ggaaaccacccaaaaguaa

SEQ ID NO: 1890859 - RNA, 19 nt, Homo sapiens
  misc_RNA (1)...(19): siRNA sense strand
gcgaggauaugcacuucau

SEQ ID NO: 1890860 - RNA, 19 nt, Homo sapiens
  misc_RNA (1)...(19): siRNA sense strand
gauaaggaaaccacccaaa

SEQ ID NO: 1890861 - RNA, 19 nt, Homo sapiens
  misc_RNA (1)...(19): siRNA sense strand
caugaucaccucacacuug

SEQ ID NO: 1890862 - RNA, 19 nt, Homo sapiens
  misc_RNA (1)...(19): siRNA sense strand
gacgagaccucugguugug

SEQ ID NO: 1890863 - RNA, 19 nt, Homo sapiens
  misc_RNA (1)...(19): siRNA sense strand
aaagaaagcagagagaaau

SEQ ID NO: 1890864 - RNA, 19 nt, Homo sapiens
  misc_RNA (1)...(19): siRNA sense strand
gaagugucccugccuguca

SEQ ID NO: 1890865 - RNA, 19 nt, Homo sapiens
  misc_RNA (1)...(19): siRNA sense strand
gagcgaggauaugcacuuc

SEQ ID NO: 1890866 - RNA, 19 nt, Homo sapiens
  misc_RNA (1)...(19): siRNA sense strand
caguuaagccuaagcagaa

SEQ ID NO: 1890867 - RNA, 19 nt, Homo sapiens
  misc_RNA (1)...(19): siRNA sense strand
uguuaguucugguguguaa

SEQ ID NO: 1890868 - RNA, 19 nt, Homo sapiens
  misc_RNA (1)...(19): siRNA sense strand
ccucacacuugauucaguu

SEQ ID NO: 1890869 - RNA, 19 nt, Homo sapiens
  misc_RNA (1)...(19): siRNA sense strand
gaaagcagagagaaaugca

SEQ ID NO: 1890870 - RNA, 19 nt, Homo sapiens
  misc_RNA (1)...(19): siRNA sense strand
gcuguuaguucuggugugu

SEQ ID NO: 1890871 - RNA, 19 nt, Homo sapiens
  misc_RNA (1)...(19): siRNA sense strand
uugauucaguuaagccuaa

SEQ ID NO: 1890872 - RNA, 19 nt, Homo sapiens
  misc_RNA (1)...(19): siRNA sense strand
gggaaaauuuagagacuga

SEQ ID NO: 1890873 - RNA, 19 nt, Homo sapiens
  misc_RNA (1)...(19): siRNA sense strand
agacugaaccucuggaaag

SEQ ID NO: 1890874 - RNA, 19 nt, Homo sapiens
  misc_RNA (1)...(19): siRNA sense strand
agucaagccugccaugauc

SEQ ID NO: 1890875 - RNA, 19 nt, Homo sapiens
  misc_RNA (1)...(19): siRNA sense strand
ggucggcaggcuucuguaa

SEQ ID NO: 1890876 - RNA, 19 nt, Homo sapiens
  misc_RNA (1)...(19): siRNA sense strand
uuaaagcuauuggacuuca

SEQ ID NO: 1890877 - RNA, 19 nt, Homo sapiens
  misc_RNA (1)...(19): siRNA sense strand
ugaagacgucguugaacaa

SEQ ID NO: 1890878 - RNA, 19 nt, Homo sapiens
  misc_RNA (1)...(19): siRNA sense strand
gagacugaaccucuggaaa

SEQ ID NO: 1890879 - RNA, 19 nt, Homo sapiens
  misc_RNA (1)...(19): siRNA sense strand
gaagaaaacagaugcuaag

SEQ ID NO: 1890880 - RNA, 19 nt, Homo sapiens
  misc_RNA (1)...(19): siRNA sense strand
cgaaguaagagccaucauc

SEQ ID NO: 1890881 - RNA, 19 nt, Homo sapiens
  misc_RNA (1)...(19): siRNA sense strand
ccaaacccuaauaagauaa

SEQ ID NO: 1890882 - RNA, 19 nt, Homo sapiens
  misc_RNA (1)...(19): siRNA sense strand
augaucaccucacacuuga

SEQ ID NO: 1890883 - RNA, 19 nt, Homo sapiens
  misc_RNA (1)...(19): siRNA sense strand
ggcugcagcuccucaagca

SEQ ID NO: 1890884 - RNA, 19 nt, Homo sapiens
  misc_RNA (1)...(19): siRNA sense strand
ucggcaggcuucuguaaca

SEQ ID NO: 1890885 - RNA, 19 nt, Homo sapiens
  misc_RNA (1)...(19): siRNA sense strand
cauuggcguuaacgaaguu

SEQ ID NO: 1890886 - RNA, 19 nt, Homo sapiens
  misc_RNA (1)...(19): siRNA sense strand
gaaaccacccaaaaguaaa

SEQ ID NO: 1890887 - RNA, 19 nt, Homo sapiens
  misc_RNA (1)...(19): siRNA sense strand
ugucaaaaccuaagagaaa

SEQ ID NO: 1890888 - RNA, 19 nt, Homo sapiens
  misc_RNA (1)...(19): siRNA sense strand
uugaacaacccauacauca

SEQ ID NO: 1890889 - RNA, 19 nt, Homo sapiens
  misc_RNA (1)...(19): siRNA sense strand
uuccaaacccuaauaagau

SEQ ID NO: 1890890 - RNA, 19 nt, Homo sapiens
  misc_RNA (1)...(19): siRNA sense strand
aaggagggaacugcuguua

SEQ ID NO: 1890891 - RNA, 19 nt, Homo sapiens
  misc_RNA (1)...(19): siRNA sense strand
ucaccucacacuugauuca

SEQ ID NO: 1890892 - RNA, 19 nt, Homo sapiens
  misc_RNA (1)...(19): siRNA sense strand
cuaauaagauaaggaaacc

SEQ ID NO: 1890893 - RNA, 19 nt, Homo sapiens
  misc_RNA (1)...(19): siRNA sense strand
ucacacuugauucaguuaa

SEQ ID NO: 1890894 - RNA, 19 nt, Homo sapiens
  misc_RNA (1)...(19): siRNA sense strand
ugauuccaaacccuaauaa

SEQ ID NO: 1890895 - RNA, 19 nt, Homo sapiens
  misc_RNA (1)...(19): siRNA sense strand
agacgagaccucugguugu

SEQ ID NO: 1890896 - RNA, 19 nt, Homo sapiens
  misc_RNA (1)...(19): siRNA sense strand
auuccaaacccuaauaaga

SEQ ID NO: 1890897 - RNA, 19 nt, Homo sapiens
  misc_RNA (1)...(19): siRNA sense strand
guucugguguguaaaucag

SEQ ID NO: 1890898 - RNA, 19 nt, Homo sapiens
  misc_RNA (1)...(19): siRNA sense strand
ggcaggcuucuguaacauu

SEQ ID NO: 1890899 - RNA, 19 nt, Homo sapiens
  misc_RNA (1)...(19): siRNA sense strand
guaccauggcuucaagaca

SEQ ID NO: 1890900 - RNA, 19 nt, Homo sapiens
  misc_RNA (1)...(19): siRNA sense strand
ccuaauaagauaaggaaac

SEQ ID NO: 1890901 - RNA, 19 nt, Homo sapiens
  misc_RNA (1)...(19): siRNA sense strand
gacugaaccucuggaaagc

SEQ ID NO: 1890902 - RNA, 19 nt, Homo sapiens
  misc_RNA (1)...(19): siRNA sense strand
gaacaccacugacuuugug

SEQ ID NO: 1890903 - RNA, 19 nt, Homo sapiens
  misc_RNA (1)...(19): siRNA sense strand
gcaggcuucuguaacauua

SEQ ID NO: 1890904 - RNA, 19 nt, Homo sapiens
  misc_RNA (1)...(19): siRNA sense strand
ggagggaacugcuguuagu

SEQ ID NO: 1890905 - RNA, 19 nt, Homo sapiens
  misc_RNA (1)...(19): siRNA sense strand
gaacaacccauacaucauc

SEQ ID NO: 1890906 - RNA, 19 nt, Homo sapiens
  misc_RNA (1)...(19): siRNA sense strand
gaagaucugucaaaaccua

SEQ ID NO: 1890907 - RNA, 19 nt, Homo sapiens
  misc_RNA (1)...(19): siRNA sense strand
uccaaacccuaauaagaua

SEQ ID NO: 1890908 - RNA, 19 nt, Homo sapiens
  misc_RNA (1)...(19): siRNA sense strand
gcauugcuguugauauuag

SEQ ID NO: 1890909 - RNA, 19 nt, Homo sapiens
  misc_RNA (1)...(19): siRNA sense strand
gugaagacgucguugaaca

SEQ ID NO: 1890910 - RNA, 19 nt, Homo sapiens
  misc_RNA (1)...(19): siRNA sense strand
cgagaccucugguugugaa

SEQ ID NO: 1890911 - RNA, 19 nt, Homo sapiens
  misc_RNA (1)...(19): siRNA sense strand
ggaaaccacccaaaaguaa

SEQ ID NO: 1890912 - RNA, 19 nt, Homo sapiens
  misc_RNA (1)...(19): siRNA sense strand
gcgaggauaugcacuucau

SEQ ID NO: 1890913 - RNA, 19 nt, Homo sapiens
  misc_RNA (1)...(19): siRNA sense strand
gauaaggaaaccacccaaa

SEQ ID NO: 1890914 - RNA, 19 nt, Homo sapiens
  misc_RNA (1)...(19): siRNA sense strand
caugaucaccucacacuug

SEQ ID NO: 1890915 - RNA, 19 nt, Homo sapiens
  misc_RNA (1)...(19): siRNA sense strand
gacgagaccucugguugug

SEQ ID NO: 1890916 - RNA, 19 nt, Homo sapiens
  misc_RNA (1)...(19): siRNA sense strand
aaagaaagcagagagaaau

SEQ ID NO: 1890917 - RNA, 19 nt, Homo sapiens
  misc_RNA (1)...(19): siRNA sense strand
gaagugucccugccuguca

SEQ ID NO: 1890918 - RNA, 19 nt, Homo sapiens
  misc_RNA (1)...(19): siRNA sense strand
gagcgaggauaugcacuuc

SEQ ID NO: 1890919 - RNA, 19 nt, Homo sapiens
  misc_RNA (1)...(19): siRNA sense strand
caguuaagccuaagcagaa

SEQ ID NO: 1890920 - RNA, 19 nt, Homo sapiens
  misc_RNA (1)...(19): siRNA sense strand
uguuaguucugguguguaa

SEQ ID NO: 1890921 - RNA, 19 nt, Homo sapiens
  misc_RNA (1)...(19): siRNA sense strand
ccucacacuugauucaguu

SEQ ID NO: 1890922 - RNA, 19 nt, Homo sapiens
  misc_RNA (1)...(19): siRNA sense strand
gaaagcagagagaaaugca

SEQ ID NO: 1890923 - RNA, 19 nt, Homo sapiens
  misc_RNA (1)...(19): siRNA sense strand
gcuguuaguucuggugugu

SEQ ID NO: 1890924 - RNA, 19 nt, Homo sapiens
  misc_RNA (1)...(19): siRNA sense strand
uugauucaguuaagccuaa

SEQ ID NO: 1890925 - RNA, 19 nt, Homo sapiens
  misc_RNA (1)...(19): siRNA sense strand
gggaaaauuuagagacuga

SEQ ID NO: 1890926 - RNA, 19 nt, Homo sapiens
  misc_RNA (1)...(19): siRNA sense strand
agacugaaccucuggaaag

SEQ ID NO: 1890927 - RNA, 19 nt, Homo sapiens
  misc_RNA (1)...(19): siRNA sense strand
agucaagccugccaugauc

SEQ ID NO: 1890928 - RNA, 19 nt, Homo sapiens
  misc_RNA (1)...(19): siRNA sense strand
ggucggcaggcuucuguaa

SEQ ID NO: 1890929 - RNA, 19 nt, Homo sapiens
  misc_RNA (1)...(19): siRNA sense strand
uuaaagcuauuggacuuca

SEQ ID NO: 1890930 - RNA, 19 nt, Homo sapiens
  misc_RNA (1)...(19): siRNA sense strand
ugaagacgucguugaacaa

SEQ ID NO: 1890931 - RNA, 19 nt, Homo sapiens
  misc_RNA (1)...(19): siRNA sense strand
gagacugaaccucuggaaa

SEQ ID NO: 1890932 - RNA, 19 nt, Homo sapiens
  misc_RNA (1)...(19): siRNA sense strand
gaagaaaacagaugcuaag

SEQ ID NO: 1890933 - RNA, 19 nt, Homo sapiens
  misc_RNA (1)...(19): siRNA sense strand
cgaaguaagagccaucauc

SEQ ID NO: 1890934 - RNA, 19 nt, Homo sapiens
  misc_RNA (1)...(19): siRNA sense strand
ccaaacccuaauaagauaa

SEQ ID NO: 1890935 - RNA, 19 nt, Homo sapiens
  misc_RNA (1)...(19): siRNA sense strand
augaucaccucacacuuga

SEQ ID NO: 1890936 - RNA, 19 nt, Homo sapiens
  misc_RNA (1)...(19): siRNA sense strand
ggcugcagcuccucaagca

SEQ ID NO: 1890937 - RNA, 19 nt, Homo sapiens
  misc_RNA (1)...(19): siRNA sense strand
ucggcaggcuucuguaaca

SEQ ID NO: 1890938 - RNA, 19 nt, Homo sapiens
  misc_RNA (1)...(19): siRNA sense strand
cauuggcguuaacgaaguu

SEQ ID NO: 1890939 - RNA, 19 nt, Homo sapiens
  misc_RNA (1)...(19): siRNA sense strand
gaaaccacccaaaaguaaa

SEQ ID NO: 1890940 - RNA, 19 nt, Homo sapiens
  misc_RNA (1)...(19): siRNA sense strand
ugucaaaaccuaagagaaa

SEQ ID NO: 1890941 - RNA, 19 nt, Homo sapiens
  misc_RNA (1)...(19): siRNA sense strand
uugaacaacccauacauca

SEQ ID NO: 1890942 - RNA, 19 nt, Homo sapiens
  misc_RNA (1)...(19): siRNA sense strand
uuccaaacccuaauaagau

SEQ ID NO: 1890943 - RNA, 19 nt, Homo sapiens
  misc_RNA (1)...(19): siRNA sense strand
aaggagggaacugcuguua

SEQ ID NO: 1890944 - RNA, 19 nt, Homo sapiens
  misc_RNA (1)...(19): siRNA sense strand
ucaccucacacuugauuca

SEQ ID NO: 1890945 - RNA, 19 nt, Homo sapiens
  misc_RNA (1)...(19): siRNA sense strand
cuaauaagauaaggaaacc

SEQ ID NO: 1890946 - RNA, 19 nt, Homo sapiens
  misc_RNA (1)...(19): siRNA sense strand
ucacacuugauucaguuaa

SEQ ID NO: 1890947 - RNA, 19 nt, Homo sapiens
  misc_RNA (1)...(19): siRNA sense strand
ugauuccaaacccuaauaa

SEQ ID NO: 1890948 - RNA, 19 nt, Homo sapiens
  misc_RNA (1)...(19): siRNA sense strand
agacgagaccucugguugu

SEQ ID NO: 1890949 - RNA, 19 nt, Homo sapiens
  misc_RNA (1)...(19): siRNA sense strand
auuccaaacccuaauaaga

SEQ ID NO: 1890950 - RNA, 19 nt, Homo sapiens
  misc_RNA (1)...(19): siRNA sense strand
guucugguguguaaaucag

SEQ ID NO: 1890951 - RNA, 19 nt, Homo sapiens
  misc_RNA (1)...(19): siRNA sense strand
ggcaggcuucuguaacauu

SEQ ID NO: 1890952 - RNA, 19 nt, Homo sapiens
  misc_RNA (1)...(19): siRNA sense strand
guaccauggcuucaagaca

SEQ ID NO: 1890953 - RNA, 19 nt, Homo sapiens
  misc_RNA (1)...(19): siRNA sense strand
ccuaauaagauaaggaaac

SEQ ID NO: 1890954 - RNA, 19 nt, Homo sapiens
  misc_RNA (1)...(19): siRNA sense strand
gacugaaccucuggaaagc

SEQ ID NO: 1890955 - RNA, 19 nt, Homo sapiens
  misc_RNA (1)...(19): siRNA sense strand
gcgcugcagccucauguga

SEQ ID NO: 1890956 - RNA, 19 nt, Homo sapiens
  misc_RNA (1)...(19): siRNA sense strand
gggcaagacggccaucauc

SEQ ID NO: 1890957 - RNA, 19 nt, Homo sapiens
  misc_RNA (1)...(19): siRNA sense strand
gcacgugcugcgucucuuc

SEQ ID NO: 1890958 - RNA, 19 nt, Homo sapiens
  misc_RNA (1)...(19): siRNA sense strand
gcccggacaguuucgacua

SEQ ID NO: 1890959 - RNA, 19 nt, Homo sapiens
  misc_RNA (1)...(19): siRNA sense strand
cgagugcuccgccaaguac

SEQ ID NO: 1890960 - RNA, 19 nt, Homo sapiens
  misc_RNA (1)...(19): siRNA sense strand
ggaguggccagacgcuaag

SEQ ID NO: 1890961 - RNA, 19 nt, Homo sapiens
  misc_RNA (1)...(19): siRNA sense strand
gcagucagaugaugagaug

SEQ ID NO: 1890962 - RNA, 19 nt, Homo sapiens
  misc_RNA (1)...(19): siRNA sense strand
agcagaaccugguguauua

SEQ ID NO: 1890963 - RNA, 19 nt, Homo sapiens
  misc_RNA (1)...(19): siRNA sense strand
ggccauagcagaucucuuu

SEQ ID NO: 1890964 - RNA, 19 nt, Homo sapiens
  misc_RNA (1)...(19): siRNA sense strand
caauguggguggcuacuuc

SEQ ID NO: 1890965 - RNA, 19 nt, Homo sapiens
  misc_RNA (1)...(19): siRNA sense strand
cagaguaccuggcagucuu

SEQ ID NO: 1890966 - RNA, 19 nt, Homo sapiens
  misc_RNA (1)...(19): siRNA sense strand
acauguaccugcagucaga

SEQ ID NO: 1890967 - RNA, 19 nt, Homo sapiens
  misc_RNA (1)...(19): siRNA sense strand
ggacugugaggccaauuug

SEQ ID NO: 1890968 - RNA, 19 nt, Homo sapiens
  misc_RNA (1)...(19): siRNA sense strand
gcaguuugccuacuauaag

SEQ ID NO: 1890969 - RNA, 19 nt, Homo sapiens
  misc_RNA (1)...(19): siRNA sense strand
cauagcagaucucuuugca

SEQ ID NO: 1890970 - RNA, 19 nt, Homo sapiens
  misc_RNA (1)...(19): siRNA sense strand
ggaguucacccacauguac

SEQ ID NO: 1890971 - RNA, 19 nt, Homo sapiens
  misc_RNA (1)...(19): siRNA sense strand
cagcagaaccugguguauu

SEQ ID NO: 1890972 - RNA, 19 nt, Homo sapiens
  misc_RNA (1)...(19): siRNA sense strand
gggaggaggccaugcucua

SEQ ID NO: 1890973 - RNA, 19 nt, Homo sapiens
  misc_RNA (1)...(19): siRNA sense strand
uaucugacgccgaguuuga

SEQ ID NO: 1890974 - RNA, 19 nt, Homo sapiens
  misc_RNA (1)...(19): siRNA sense strand
gggcgcaguacgagaagua

SEQ ID NO: 1890975 - RNA, 19 nt, Homo sapiens
  misc_RNA (1)...(19): siRNA sense strand
gagcugaccgccaaguauc

SEQ ID NO: 1890976 - RNA, 19 nt, Homo sapiens
  misc_RNA (1)...(19): siRNA sense strand
ggacuucaaggacuucuac

SEQ ID NO: 1890977 - RNA, 19 nt, Homo sapiens
  misc_RNA (1)...(19): siRNA sense strand
gcacuacgcgcuguucaag

SEQ ID NO: 1890978 - RNA, 19 nt, Homo sapiens
  misc_RNA (1)...(19): siRNA sense strand
ugcgggagcugcuggaguu

SEQ ID NO: 1890979 - RNA, 19 nt, Homo sapiens
  misc_RNA (1)...(19): siRNA sense strand
ccuacuauaaguugaauga

SEQ ID NO: 1890980 - RNA, 19 nt, Homo sapiens
  misc_RNA (1)...(19): siRNA sense strand
ccagcuacaugcucuucga

SEQ ID NO: 1890981 - RNA, 19 nt, Homo sapiens
  misc_RNA (1)...(19): siRNA sense strand
agugcaagguggacuguga

SEQ ID NO: 1890982 - RNA, 19 nt, Homo sapiens
  misc_RNA (1)...(19): siRNA sense strand
caguuugccuacuauaagu

SEQ ID NO: 1890983 - RNA, 19 nt, Homo sapiens
  misc_RNA (1)...(19): siRNA sense strand
guaccacuaccugcaguuu

SEQ ID NO: 1890984 - RNA, 19 nt, Homo sapiens
  misc_RNA (1)...(19): siRNA sense strand
gcugugaagcucuacaaca

SEQ ID NO: 1890985 - RNA, 19 nt, Homo sapiens
  misc_RNA (1)...(19): siRNA sense strand
cgagcugaccgccaaguau

SEQ ID NO: 1890986 - RNA, 19 nt, Homo sapiens
  misc_RNA (1)...(19): siRNA sense strand
cuacgaggagggcauguau

SEQ ID NO: 1890987 - RNA, 19 nt, Homo sapiens
  misc_RNA (1)...(19): siRNA sense strand
ccacauguaccugcaguca

SEQ ID NO: 1890988 - RNA, 19 nt, Homo sapiens
  misc_RNA (1)...(19): siRNA sense strand
cgccaaguaucucaacuac

SEQ ID NO: 1890989 - RNA, 19 nt, Homo sapiens
  misc_RNA (1)...(19): siRNA sense strand
cugaggaugcccuaucuga

SEQ ID NO: 1890990 - RNA, 19 nt, Homo sapiens
  misc_RNA (1)...(19): siRNA sense strand
uggccaccauguaccacua

SEQ ID NO: 1890991 - RNA, 19 nt, Homo sapiens
  misc_RNA (1)...(19): siRNA sense strand
gccugaggaugcccuaucu

SEQ ID NO: 1890992 - RNA, 19 nt, Homo sapiens
  misc_RNA (1)...(19): siRNA sense strand
ggaggaggccaugcucuac

SEQ ID NO: 1890993 - RNA, 19 nt, Homo sapiens
  misc_RNA (1)...(19): siRNA sense strand
gcagcagaaccugguguau

SEQ ID NO: 1890994 - RNA, 19 nt, Homo sapiens
  misc_RNA (1)...(19): siRNA sense strand
ccgccaaguaucucaacua

SEQ ID NO: 1890995 - RNA, 19 nt, Homo sapiens
  misc_RNA (1)...(19): siRNA sense strand
caauggaaauguuggauua

SEQ ID NO: 1890996 - RNA, 19 nt, Homo sapiens
  misc_RNA (1)...(19): siRNA sense strand
gcaaggagugcaauucuua

SEQ ID NO: 1890997 - RNA, 19 nt, Homo sapiens
  misc_RNA (1)...(19): siRNA sense strand
cuagaauucugcaucauua

SEQ ID NO: 1890998 - RNA, 19 nt, Homo sapiens
  misc_RNA (1)...(19): siRNA sense strand
caagauaucccuccugaaa

SEQ ID NO: 1890999 - RNA, 19 nt, Homo sapiens
  misc_RNA (1)...(19): siRNA sense strand
ggagagcaguuauuucaga

SEQ ID NO: 1891000 - RNA, 19 nt, Homo sapiens
  misc_RNA (1)...(19): siRNA sense strand
ccaaauggcuccagaaguc

SEQ ID NO: 1891001 - RNA, 19 nt, Homo sapiens
  misc_RNA (1)...(19): siRNA sense strand
uaaagaagcaucucaauuc

SEQ ID NO: 1891002 - RNA, 19 nt, Homo sapiens
  misc_RNA (1)...(19): siRNA sense strand
gagaacaaaucacuuaaag

SEQ ID NO: 1891003 - RNA, 19 nt, Homo sapiens
  misc_RNA (1)...(19): siRNA sense strand
guaauuggaugauguuugu

SEQ ID NO: 1891004 - RNA, 19 nt, Homo sapiens
  misc_RNA (1)...(19): siRNA sense strand
caauaacccuucagcacua

SEQ ID NO: 1891005 - RNA, 19 nt, Homo sapiens
  misc_RNA (1)...(19): siRNA sense strand
ggacagacaaggcaguuaa

SEQ ID NO: 1891006 - RNA, 19 nt, Homo sapiens
  misc_RNA (1)...(19): siRNA sense strand
aggcuuaucuaaccaaaua

SEQ ID NO: 1891007 - RNA, 19 nt, Homo sapiens
  misc_RNA (1)...(19): siRNA sense strand
gaauguaauuggaugaugu

SEQ ID NO: 1891008 - RNA, 19 nt, Homo sapiens
  misc_RNA (1)...(19): siRNA sense strand
ccacaaugguguccuagaa

SEQ ID NO: 1891009 - RNA, 19 nt, Homo sapiens
  misc_RNA (1)...(19): siRNA sense strand
cagaggagcuuacgaugga

SEQ ID NO: 1891010 - RNA, 19 nt, Homo sapiens
  misc_RNA (1)...(19): siRNA sense strand
gcaaagaaaggaaguggaa

SEQ ID NO: 1891011 - RNA, 19 nt, Homo sapiens
  misc_RNA (1)...(19): siRNA sense strand
gaucaagugucccaagugu

SEQ ID NO: 1891012 - RNA, 19 nt, Homo sapiens
  misc_RNA (1)...(19): siRNA sense strand
ggaagaagaggaugacuca

SEQ ID NO: 1891013 - RNA, 19 nt, Homo sapiens
  misc_RNA (1)...(19): siRNA sense strand
ggacccaccucaagauaca

SEQ ID NO: 1891014 - RNA, 19 nt, Homo sapiens
  misc_RNA (1)...(19): siRNA sense strand
cacccuaacucuauaaaug

SEQ ID NO: 1891015 - RNA, 19 nt, Homo sapiens
  misc_RNA (1)...(19): siRNA sense strand
ggacaggucauguagaugu

SEQ ID NO: 1891016 - RNA, 19 nt, Homo sapiens
  misc_RNA (1)...(19): siRNA sense strand
gagagcaguuauuucagaa

SEQ ID NO: 1891017 - RNA, 19 nt, Homo sapiens
  misc_RNA (1)...(19): siRNA sense strand
gugauaagcuguucuugag

SEQ ID NO: 1891018 - RNA, 19 nt, Homo sapiens
  misc_RNA (1)...(19): siRNA sense strand
ggagugcaauucuuacaca

SEQ ID NO: 1891019 - RNA, 19 nt, Homo sapiens
  misc_RNA (1)...(19): siRNA sense strand
gagcagaaguugguguaug

SEQ ID NO: 1891020 - RNA, 19 nt, Homo sapiens
  misc_RNA (1)...(19): siRNA sense strand
gaacauggaccagugacuu

SEQ ID NO: 1891021 - RNA, 19 nt, Homo sapiens
  misc_RNA (1)...(19): siRNA sense strand
agaagaggaugacucagaa

SEQ ID NO: 1891022 - RNA, 19 nt, Homo sapiens
  misc_RNA (1)...(19): siRNA sense strand
gaaccucugucuguggauu

SEQ ID NO: 1891023 - RNA, 19 nt, Homo sapiens
  misc_RNA (1)...(19): siRNA sense strand
acaaugguguccuagaauu

SEQ ID NO: 1891024 - RNA, 19 nt, Homo sapiens
  misc_RNA (1)...(19): siRNA sense strand
cacaguacauccacccuaa

SEQ ID NO: 1891025 - RNA, 19 nt, Homo sapiens
  misc_RNA (1)...(19): siRNA sense strand
ggacacagcaaucacuaug

SEQ ID NO: 1891026 - RNA, 19 nt, Homo sapiens
  misc_RNA (1)...(19): siRNA sense strand
gacaggucauguagaugua

SEQ ID NO: 1891027 - RNA, 19 nt, Homo sapiens
  misc_RNA (1)...(19): siRNA sense strand
acaaggcaguuaaccauau

SEQ ID NO: 1891028 - RNA, 19 nt, Homo sapiens
  misc_RNA (1)...(19): siRNA sense strand
cauccacccuaacucuaua

SEQ ID NO: 1891029 - RNA, 19 nt, Homo sapiens
  misc_RNA (1)...(19): siRNA sense strand
guacaaaggcuuaucuaac

SEQ ID NO: 1891030 - RNA, 19 nt, Homo sapiens
  misc_RNA (1)...(19): siRNA sense strand
ccacauccauaaccaucuu

SEQ ID NO: 1891031 - RNA, 19 nt, Homo sapiens
  misc_RNA (1)...(19): siRNA sense strand
gcaucucaauucucaugaa

SEQ ID NO: 1891032 - RNA, 19 nt, Homo sapiens
  misc_RNA (1)...(19): siRNA sense strand
ucaagugucccaaguguga

SEQ ID NO: 1891033 - RNA, 19 nt, Homo sapiens
  misc_RNA (1)...(19): siRNA sense strand
ccaagucacagcaaagaaa

SEQ ID NO: 1891034 - RNA, 19 nt, Homo sapiens
  misc_RNA (1)...(19): siRNA sense strand
acacagcaaucacuaugga

SEQ ID NO: 1891035 - RNA, 19 nt, Homo sapiens
  misc_RNA (1)...(19): siRNA sense strand
agauuaugcucaacagauu

SEQ ID NO: 1891036 - RNA, 19 nt, Homo sapiens
  misc_RNA (1)...(19): siRNA sense strand
gagauuaugcucaacagau

SEQ ID NO: 1891037 - RNA, 19 nt, Homo sapiens
  misc_RNA (1)...(19): siRNA sense strand
caaccuugccucccuagaa

SEQ ID NO: 1891038 - RNA, 19 nt, Homo sapiens
  misc_RNA (1)...(19): siRNA sense strand
gagagcagagcaaggcuuu

SEQ ID NO: 1891039 - RNA, 19 nt, Homo sapiens
  misc_RNA (1)...(19): siRNA sense strand
gacaaggcaguuaaccaua

SEQ ID NO: 1891040 - RNA, 19 nt, Homo sapiens
  misc_RNA (1)...(19): siRNA sense strand
caaaucacuuaaagaagca

SEQ ID NO: 1891041 - RNA, 19 nt, Homo sapiens
  misc_RNA (1)...(19): siRNA sense strand
gggaagagcagaauuuggu

SEQ ID NO: 1891042 - RNA, 19 nt, Homo sapiens
  misc_RNA (1)...(19): siRNA sense strand
uggaagauauaccacaaug

SEQ ID NO: 1891043 - RNA, 19 nt, Homo sapiens
  misc_RNA (1)...(19): siRNA sense strand
ucucaauucucaugaagga

SEQ ID NO: 1891044 - RNA, 19 nt, Homo sapiens
  misc_RNA (1)...(19): siRNA sense strand
caagaacgccagaucaagu

SEQ ID NO: 1891045 - RNA, 19 nt, Homo sapiens
  misc_RNA (1)...(19): siRNA sense strand
gaaguggaagugcucaaug

SEQ ID NO: 1891046 - RNA, 19 nt, Homo sapiens
  misc_RNA (1)...(19): siRNA sense strand
ugauuacugugacaaguug

SEQ ID NO: 1891047 - RNA, 19 nt, Homo sapiens
  misc_RNA (1)...(19): siRNA sense strand
uggaaauguuggauuagaa

SEQ ID NO: 1891048 - RNA, 19 nt, Homo sapiens
  misc_RNA (1)...(19): siRNA sense strand
cuugagaacaaaucacuua

SEQ ID NO: 1891049 - RNA, 19 nt, Homo sapiens
  misc_RNA (1)...(19): siRNA sense strand
ggcaaggagugcaauucuu

SEQ ID NO: 1891050 - RNA, 19 nt, Homo sapiens
  misc_RNA (1)...(19): siRNA sense strand
acaauuugguguacucugu

SEQ ID NO: 1891051 - RNA, 19 nt, Homo sapiens
  misc_RNA (1)...(19): siRNA sense strand
ggagacagaccacauugca

SEQ ID NO: 1891052 - RNA, 19 nt, Homo sapiens
  misc_RNA (1)...(19): siRNA sense strand
gaaccaggcauuguuucaa

SEQ ID NO: 1891053 - RNA, 19 nt, Homo sapiens
  misc_RNA (1)...(19): siRNA sense strand
ucaauucucaugaaggaaa

SEQ ID NO: 1891054 - RNA, 19 nt, Homo sapiens
  misc_RNA (1)...(19): siRNA sense strand
ggagcucccuguggucaug

SEQ ID NO: 1891055 - RNA, 19 nt, Homo sapiens
  misc_RNA (1)...(19): siRNA sense strand
caaggcaguuaaccauauc

SEQ ID NO: 1891056 - RNA, 19 nt, Homo sapiens
  misc_RNA (1)...(19): siRNA sense strand
caccuucacugcaaaugga

SEQ ID NO: 1891057 - RNA, 19 nt, Homo sapiens
  misc_RNA (1)...(19): siRNA sense strand
gaauucugcaucauuacaa

SEQ ID NO: 1891058 - RNA, 19 nt, Homo sapiens
  misc_RNA (1)...(19): siRNA sense strand
gcaauucuuacacagaguu

SEQ ID NO: 1891059 - RNA, 19 nt, Homo sapiens
  misc_RNA (1)...(19): siRNA sense strand
gcaguuauuucagaaccau

SEQ ID NO: 1891060 - RNA, 19 nt, Homo sapiens
  misc_RNA (1)...(19): siRNA sense strand
cuucugcucugucuuuaau

SEQ ID NO: 1891061 - RNA, 19 nt, Homo sapiens
  misc_RNA (1)...(19): siRNA sense strand
gcucauccacacucaagaa

SEQ ID NO: 1891062 - RNA, 19 nt, Homo sapiens
  misc_RNA (1)...(19): siRNA sense strand
auacaggucagaagaacua

SEQ ID NO: 1891063 - RNA, 19 nt, Homo sapiens
  misc_RNA (1)...(19): siRNA sense strand
ggaagacuccaauucaaac

SEQ ID NO: 1891064 - RNA, 19 nt, Homo sapiens
  misc_RNA (1)...(19): siRNA sense strand
uguaucaccuucacugcaa

SEQ ID NO: 1891065 - RNA, 19 nt, Homo sapiens
  misc_RNA (1)...(19): siRNA sense strand
cauucuaccuggcauuuua

SEQ ID NO: 1891066 - RNA, 19 nt, Homo sapiens
  misc_RNA (1)...(19): siRNA sense strand
acaagucuuucacccagaa

SEQ ID NO: 1891067 - RNA, 19 nt, Homo sapiens
  misc_RNA (1)...(19): siRNA sense strand
uagccgagauuaugcucaa

SEQ ID NO: 1891068 - RNA, 19 nt, Homo sapiens
  misc_RNA (1)...(19): siRNA sense strand
uggcgcagcugacuucauc

SEQ ID NO: 1891069 - RNA, 19 nt, Homo sapiens
  misc_RNA (1)...(19): siRNA sense strand
ccauggaaguagcagaaug

SEQ ID NO: 1891070 - RNA, 19 nt, Homo sapiens
  misc_RNA (1)...(19): siRNA sense strand
guacauccacccuaacucu

SEQ ID NO: 1891071 - RNA, 19 nt, Homo sapiens
  misc_RNA (1)...(19): siRNA sense strand
ggaugacucagaagaggaa

SEQ ID NO: 1891072 - RNA, 19 nt, Homo sapiens
  misc_RNA (1)...(19): siRNA sense strand
uacaaaggcuuaucuaacc

SEQ ID NO: 1891073 - RNA, 19 nt, Homo sapiens
  misc_RNA (1)...(19): siRNA sense strand
acagauugguguuccugaa

SEQ ID NO: 1891074 - RNA, 19 nt, Homo sapiens
  misc_RNA (1)...(19): siRNA sense strand
agcagaauuugguggcuua

SEQ ID NO: 1891075 - RNA, 19 nt, Homo sapiens
  misc_RNA (1)...(19): siRNA sense strand
ggauggcgcagcugacuuc

SEQ ID NO: 1891076 - RNA, 19 nt, Homo sapiens
  misc_RNA (1)...(19): siRNA sense strand
gcggaugagucucuuucug

SEQ ID NO: 1891077 - RNA, 19 nt, Homo sapiens
  misc_RNA (1)...(19): siRNA sense strand
aagaagaggaugacucaga

SEQ ID NO: 1891078 - RNA, 19 nt, Homo sapiens
  misc_RNA (1)...(19): siRNA sense strand
cagaucaagugucccaagu

SEQ ID NO: 1891079 - RNA, 19 nt, Homo sapiens
  misc_RNA (1)...(19): siRNA sense strand
ugaccagccacauccauaa

SEQ ID NO: 1891080 - RNA, 19 nt, Homo sapiens
  misc_RNA (1)...(19): siRNA sense strand
caggaugaaugaaaugaac

SEQ ID NO: 1891081 - RNA, 19 nt, Homo sapiens
  misc_RNA (1)...(19): siRNA sense strand
ccacaugguuauccacacu

SEQ ID NO: 1891082 - RNA, 19 nt, Homo sapiens
  misc_RNA (1)...(19): siRNA sense strand
gcggacccaccucaagaua

SEQ ID NO: 1891083 - RNA, 19 nt, Homo sapiens
  misc_RNA (1)...(19): siRNA sense strand
gggagcagaaguuggugua

SEQ ID NO: 1891084 - RNA, 19 nt, Homo sapiens
  misc_RNA (1)...(19): siRNA sense strand
ccaauucaaacaaggagaa

SEQ ID NO: 1891085 - RNA, 19 nt, Homo sapiens
  misc_RNA (1)...(19): siRNA sense strand
ggaauggcagaggagcuua

SEQ ID NO: 1891086 - RNA, 19 nt, Homo sapiens
  misc_RNA (1)...(19): siRNA sense strand
gaagacuccaauucaaaca

SEQ ID NO: 1891087 - RNA, 19 nt, Homo sapiens
  misc_RNA (1)...(19): siRNA sense strand
ggaaguggaagugcucaau

SEQ ID NO: 1891088 - RNA, 19 nt, Homo sapiens
  misc_RNA (1)...(19): siRNA sense strand
uauuauagccgagauuaug

SEQ ID NO: 1891089 - RNA, 19 nt, Homo sapiens
  misc_RNA (1)...(19): siRNA sense strand
guccuagaauucugcauca

SEQ ID NO: 1891090 - RNA, 19 nt, Homo sapiens
  misc_RNA (1)...(19): siRNA sense strand
guagcagaauggacagaca

SEQ ID NO: 1891091 - RNA, 19 nt, Homo sapiens
  misc_RNA (1)...(19): siRNA sense strand
caccagaggaggaagaaga

SEQ ID NO: 1891092 - RNA, 19 nt, Homo sapiens
  misc_RNA (1)...(19): siRNA sense strand
gaagacuguaggauuaaca

SEQ ID NO: 1891093 - RNA, 19 nt, Homo sapiens
  misc_RNA (1)...(19): siRNA sense strand
cagaagacuguaggauuaa

SEQ ID NO: 1891094 - RNA, 19 nt, Homo sapiens
  misc_RNA (1)...(19): siRNA sense strand
ggaagucaccugggauugg

SEQ ID NO: 1891095 - RNA, 19 nt, Homo sapiens
  misc_RNA (1)...(19): siRNA sense strand
gaacagagaugaugauuca

SEQ ID NO: 1891096 - RNA, 19 nt, Homo sapiens
  misc_RNA (1)...(19): siRNA sense strand
gaagagcacucaggacuua

SEQ ID NO: 1891097 - RNA, 19 nt, Homo sapiens
  misc_RNA (1)...(19): siRNA sense strand
gaucagaacugguaugaag

SEQ ID NO: 1891098 - RNA, 19 nt, Homo sapiens
  misc_RNA (1)...(19): siRNA sense strand
gaacugguaugaaggagaa

SEQ ID NO: 1891099 - RNA, 19 nt, Homo sapiens
  misc_RNA (1)...(19): siRNA sense strand
gagaagcuauugcuaaguu

SEQ ID NO: 1891100 - RNA, 19 nt, Homo sapiens
  misc_RNA (1)...(19): siRNA sense strand
ccaagagcauuuacgaaua

SEQ ID NO: 1891101 - RNA, 19 nt, Homo sapiens
  misc_RNA (1)...(19): siRNA sense strand
guagaaauguccuucagaa

SEQ ID NO: 1891102 - RNA, 19 nt, Homo sapiens
  misc_RNA (1)...(19): siRNA sense strand
gaagggagauauuguuuac

SEQ ID NO: 1891103 - RNA, 19 nt, Homo sapiens
  misc_RNA (1)...(19): siRNA sense strand
gagccaaauuugacuuuaa

SEQ ID NO: 1891104 - RNA, 19 nt, Homo sapiens
  misc_RNA (1)...(19): siRNA sense strand
caagagcauuuacgaauau

SEQ ID NO: 1891105 - RNA, 19 nt, Homo sapiens
  misc_RNA (1)...(19): siRNA sense strand
ggaauccacggaagaauuu

SEQ ID NO: 1891106 - RNA, 19 nt, Homo sapiens
  misc_RNA (1)...(19): siRNA sense strand
gacgauggaugguuuguug

SEQ ID NO: 1891107 - RNA, 19 nt, Homo sapiens
  misc_RNA (1)...(19): siRNA sense strand
agucaaaccucacaagauu

SEQ ID NO: 1891108 - RNA, 19 nt, Homo sapiens
  misc_RNA (1)...(19): siRNA sense strand
gguacaagacuauguuuaa

SEQ ID NO: 1891109 - RNA, 19 nt, Homo sapiens
  misc_RNA (1)...(19): siRNA sense strand
aaacagauccacaaacuga

SEQ ID NO: 1891110 - RNA, 19 nt, Homo sapiens
  misc_RNA (1)...(19): siRNA sense strand
gaagucaagcucagaaaga

SEQ ID NO: 1891111 - RNA, 19 nt, Homo sapiens
  misc_RNA (1)...(19): siRNA sense strand
ucaaaccucacaagauuua

SEQ ID NO: 1891112 - RNA, 19 nt, Homo sapiens
  misc_RNA (1)...(19): siRNA sense strand
uauaccagcugauuacuug

SEQ ID NO: 1891113 - RNA, 19 nt, Homo sapiens
  misc_RNA (1)...(19): siRNA sense strand
gaagcuauugcuaaguuua

SEQ ID NO: 1891114 - RNA, 19 nt, Homo sapiens
  misc_RNA (1)...(19): siRNA sense strand
gcaaugggcaagacaaaga

SEQ ID NO: 1891115 - RNA, 19 nt, Homo sapiens
  misc_RNA (1)...(19): siRNA sense strand
gauccugucucagaaagaa

SEQ ID NO: 1891116 - RNA, 19 nt, Homo sapiens
  misc_RNA (1)...(19): siRNA sense strand
gagcaaaggaugacaguag

SEQ ID NO: 1891117 - RNA, 19 nt, Homo sapiens
  misc_RNA (1)...(19): siRNA sense strand
ucacuagcuuggagaauga

SEQ ID NO: 1891118 - RNA, 19 nt, Homo sapiens
  misc_RNA (1)...(19): siRNA sense strand
gaaaugcccagcccucuuc

SEQ ID NO: 1891119 - RNA, 19 nt, Homo sapiens
  misc_RNA (1)...(19): siRNA sense strand
ccaguccucuacuaaauga

SEQ ID NO: 1891120 - RNA, 19 nt, Homo sapiens
  misc_RNA (1)...(19): siRNA sense strand
gagcaggacucagcaccaa

SEQ ID NO: 1891121 - RNA, 19 nt, Homo sapiens
  misc_RNA (1)...(19): siRNA sense strand
gcagaagggagauauuguu

SEQ ID NO: 1891122 - RNA, 19 nt, Homo sapiens
  misc_RNA (1)...(19): siRNA sense strand
agagacuccuggauauaua

SEQ ID NO: 1891123 - RNA, 19 nt, Homo sapiens
  misc_RNA (1)...(19): siRNA sense strand
gcagagcccaagagcauuu

SEQ ID NO: 1891124 - RNA, 19 nt, Homo sapiens
  misc_RNA (1)...(19): siRNA sense strand
acagaaugaugaugaguug

SEQ ID NO: 1891125 - RNA, 19 nt, Homo sapiens
  misc_RNA (1)...(19): siRNA sense strand
ggagauaucguugauguca

SEQ ID NO: 1891126 - RNA, 19 nt, Homo sapiens
  misc_RNA (1)...(19): siRNA sense strand
uaauggugauacacaagua

SEQ ID NO: 1891127 - RNA, 19 nt, Homo sapiens
  misc_RNA (1)...(19): siRNA sense strand
uuaaacagauccacaaacu

SEQ ID NO: 1891128 - RNA, 19 nt, Homo sapiens
  misc_RNA (1)...(19): siRNA sense strand
gaaugaugaugaguuggaa

SEQ ID NO: 1891129 - RNA, 19 nt, Homo sapiens
  misc_RNA (1)...(19): siRNA sense strand
gauggaugguuuguuggua

SEQ ID NO: 1891130 - RNA, 19 nt, Homo sapiens
  misc_RNA (1)...(19): siRNA sense strand
gcaccuacaucgagcuucu

SEQ ID NO: 1891131 - RNA, 19 nt, Homo sapiens
  misc_RNA (1)...(19): siRNA sense strand
cagaaucgccaagacauuu

SEQ ID NO: 1891132 - RNA, 19 nt, Homo sapiens
  misc_RNA (1)...(19): siRNA sense strand
gcaacuauguaaaaccuuu

SEQ ID NO: 1891133 - RNA, 19 nt, Homo sapiens
  misc_RNA (1)...(19): siRNA sense strand
caagaaggacaaagcaguu

SEQ ID NO: 1891134 - RNA, 19 nt, Homo sapiens
  misc_RNA (1)...(19): siRNA sense strand
gggagauauuguuuacauu

SEQ ID NO: 1891135 - RNA, 19 nt, Homo sapiens
  misc_RNA (1)...(19): siRNA sense strand
uaagcgauguuuccaugga

SEQ ID NO: 1891136 - RNA, 19 nt, Homo sapiens
  misc_RNA (1)...(19): siRNA sense strand
aaauugaucagaacuggua

SEQ ID NO: 1891137 - RNA, 19 nt, Homo sapiens
  misc_RNA (1)...(19): siRNA sense strand
cuucagagacuccuggaua

SEQ ID NO: 1891138 - RNA, 19 nt, Homo sapiens
  misc_RNA (1)...(19): siRNA sense strand
caagaggucggccacacua

SEQ ID NO: 1891139 - RNA, 19 nt, Homo sapiens
  misc_RNA (1)...(19): siRNA sense strand
ucaaaagacugguacaaga

SEQ ID NO: 1891140 - RNA, 19 nt, Homo sapiens
  misc_RNA (1)...(19): siRNA sense strand
ggagucaaaccucacaaga

SEQ ID NO: 1891141 - RNA, 19 nt, Homo sapiens
  misc_RNA (1)...(19): siRNA sense strand
cagaagggagauauuguuu

SEQ ID NO: 1891142 - RNA, 19 nt, Homo sapiens
  misc_RNA (1)...(19): siRNA sense strand
gcaacacaaucgagaacag

SEQ ID NO: 1891143 - RNA, 19 nt, Homo sapiens
  misc_RNA (1)...(19): siRNA sense strand
cagcucugcuuccacuaaa

SEQ ID NO: 1891144 - RNA, 19 nt, Homo sapiens
  misc_RNA (1)...(19): siRNA sense strand
aaacgacucaguagccuuu

SEQ ID NO: 1891145 - RNA, 19 nt, Homo sapiens
  misc_RNA (1)...(19): siRNA sense strand
caaccuuccuucugacaag

SEQ ID NO: 1891146 - RNA, 19 nt, Homo sapiens
  misc_RNA (1)...(19): siRNA sense strand
uaucguugaugucauggaa

SEQ ID NO: 1891147 - RNA, 19 nt, Homo sapiens
  misc_RNA (1)...(19): siRNA sense strand
gcuauauaccacagaauga

SEQ ID NO: 1891148 - RNA, 19 nt, Homo sapiens
  misc_RNA (1)...(19): siRNA sense strand
cuuuaaagcucagacacua

SEQ ID NO: 1891149 - RNA, 19 nt, Homo sapiens
  misc_RNA (1)...(19): siRNA sense strand
agacauggauccuacaaaa

SEQ ID NO: 1891150 - RNA, 19 nt, Homo sapiens
  misc_RNA (1)...(19): siRNA sense strand
aaagugagaugagcuacau

SEQ ID NO: 1891151 - RNA, 19 nt, Homo sapiens
  misc_RNA (1)...(19): siRNA sense strand
ggaaaugcccagcccucuu

SEQ ID NO: 1891152 - RNA, 19 nt, Homo sapiens
  misc_RNA (1)...(19): siRNA sense strand
agaagggagauauuguuua

SEQ ID NO: 1891153 - RNA, 19 nt, Homo sapiens
  misc_RNA (1)...(19): siRNA sense strand
gaugaugauucagaucugu

SEQ ID NO: 1891154 - RNA, 19 nt, Homo sapiens
  misc_RNA (1)...(19): siRNA sense strand
cagagaugaugauucagau

SEQ ID NO: 1891155 - RNA, 19 nt, Homo sapiens
  misc_RNA (1)...(19): siRNA sense strand
agauaucguugaugucaug

SEQ ID NO: 1891156 - RNA, 19 nt, Homo sapiens
  misc_RNA (1)...(19): siRNA sense strand
agaaauguccuucagaaag

SEQ ID NO: 1891157 - RNA, 19 nt, Homo sapiens
  misc_RNA (1)...(19): siRNA sense strand
aaagacugguacaagacua

SEQ ID NO: 1891158 - RNA, 19 nt, Homo sapiens
  misc_RNA (1)...(19): siRNA sense strand
uuaaagcucagacacuaaa

SEQ ID NO: 1891159 - RNA, 19 nt, Homo sapiens
  misc_RNA (1)...(19): siRNA sense strand
gugcagagcccaagagcau

SEQ ID NO: 1891160 - RNA, 19 nt, Homo sapiens
  misc_RNA (1)...(19): siRNA sense strand
gaaacccggcaacacgaaa

SEQ ID NO: 1891161 - RNA, 19 nt, Homo sapiens
  misc_RNA (1)...(19): siRNA sense strand
uggagaagcuauugcuaag

SEQ ID NO: 1891162 - RNA, 19 nt, Homo sapiens
  misc_RNA (1)...(19): siRNA sense strand
ggaaacccggcaacacgaa

SEQ ID NO: 1891163 - RNA, 19 nt, Homo sapiens
  misc_RNA (1)...(19): siRNA sense strand
agagccaaauuugacuuua

SEQ ID NO: 1891164 - RNA, 19 nt, Homo sapiens
  misc_RNA (1)...(19): siRNA sense strand
gcaagacaaagacauggau

SEQ ID NO: 1891165 - RNA, 19 nt, Homo sapiens
  misc_RNA (1)...(19): siRNA sense strand
cagagacuccuggauauau

SEQ ID NO: 1891166 - RNA, 19 nt, Homo sapiens
  misc_RNA (1)...(19): siRNA sense strand
ucagagacuccuggauaua

SEQ ID NO: 1891167 - RNA, 19 nt, Homo sapiens
  misc_RNA (1)...(19): siRNA sense strand
aaacugaacagagaugaug

SEQ ID NO: 1891168 - RNA, 19 nt, Homo sapiens
  misc_RNA (1)...(19): siRNA sense strand
uccacaaacugaacagaga

SEQ ID NO: 1891169 - RNA, 19 nt, Homo sapiens
  misc_RNA (1)...(19): siRNA sense strand
ggacuuaagcgauguuucc

SEQ ID NO: 1891170 - RNA, 19 nt, Homo sapiens
  misc_RNA (1)...(19): siRNA sense strand
gacaaagacauggauccua

SEQ ID NO: 1891171 - RNA, 19 nt, Homo sapiens
  misc_RNA (1)...(19): siRNA sense strand
uuucagauccugucucaga

SEQ ID NO: 1891172 - RNA, 19 nt, Homo sapiens
  misc_RNA (1)...(19): siRNA sense strand
gagucaaaccucacaagau

SEQ ID NO: 1891173 - RNA, 19 nt, Homo sapiens
  misc_RNA (1)...(19): siRNA sense strand
agaagcuauugcuaaguuu

SEQ ID NO: 1891174 - RNA, 19 nt, Homo sapiens
  misc_RNA (1)...(19): siRNA sense strand
aagucaagcucagaaagaa

SEQ ID NO: 1891175 - RNA, 19 nt, Homo sapiens
  misc_RNA (1)...(19): siRNA sense strand
gugcugaugccaauggaaa

SEQ ID NO: 1891176 - RNA, 19 nt, Homo sapiens
  misc_RNA (1)...(19): siRNA sense strand
caaaaucuccccuuucugu

SEQ ID NO: 1891177 - RNA, 19 nt, Homo sapiens
  misc_RNA (1)...(19): siRNA sense strand
uggcaagucuuccguucug

SEQ ID NO: 1891178 - RNA, 19 nt, Homo sapiens
  misc_RNA (1)...(19): siRNA sense strand
caaggcaucuuccccauca

SEQ ID NO: 1891179 - RNA, 19 nt, Homo sapiens
  misc_RNA (1)...(19): siRNA sense strand
ggugauacacaaguagaaa

SEQ ID NO: 1891180 - RNA, 19 nt, Homo sapiens
  misc_RNA (1)...(19): siRNA sense strand
agggagauauuguuuacau

SEQ ID NO: 1891181 - RNA, 19 nt, Homo sapiens
  misc_RNA (1)...(19): siRNA sense strand
gccuaucccuccacaacga

SEQ ID NO: 1891182 - RNA, 19 nt, Homo sapiens
  misc_RNA (1)...(19): siRNA sense strand
uaccacagaaugaugauga

SEQ ID NO: 1891183 - RNA, 19 nt, Homo sapiens
  misc_RNA (1)...(19): siRNA sense strand
uagaaauguccuucagaaa

SEQ ID NO: 1891184 - RNA, 19 nt, Homo sapiens
  misc_RNA (1)...(19): siRNA sense strand
uaagcaaauugaucagaac

SEQ ID NO: 1891185 - RNA, 19 nt, Homo sapiens
  misc_RNA (1)...(19): siRNA sense strand
acagagaugaugauucaga

SEQ ID NO: 1891186 - RNA, 19 nt, Homo sapiens
  misc_RNA (1)...(19): siRNA sense strand
guaggcggguggugaagag

SEQ ID NO: 1891187 - RNA, 19 nt, Homo sapiens
  misc_RNA (1)...(19): siRNA sense strand
ggaagggagcggugacucu

SEQ ID NO: 1891188 - RNA, 19 nt, Homo sapiens
  misc_RNA (1)...(19): siRNA sense strand
gagauaucguugaugucau

SEQ ID NO: 1891189 - RNA, 19 nt, Homo sapiens
  misc_RNA (1)...(19): siRNA sense strand
cagcaaugggcaagacaaa

SEQ ID NO: 1891190 - RNA, 19 nt, Homo sapiens
  misc_RNA (1)...(19): siRNA sense strand
gauuccaguccucuacuaa

SEQ ID NO: 1891191 - RNA, 19 nt, Homo sapiens
  misc_RNA (1)...(19): siRNA sense strand
ucagaaagggugagaggau

SEQ ID NO: 1891192 - RNA, 19 nt, Homo sapiens
  misc_RNA (1)...(19): siRNA sense strand
cccaagagcauuuacgaau

SEQ ID NO: 1891193 - RNA, 19 nt, Homo sapiens
  misc_RNA (1)...(19): siRNA sense strand
gacacaaaaucuccccuuu

SEQ ID NO: 1891194 - RNA, 19 nt, Homo sapiens
  misc_RNA (1)...(19): siRNA sense strand
ccggaacacugagagauca

SEQ ID NO: 1891195 - RNA, 19 nt, Homo sapiens
  misc_RNA (1)...(19): siRNA sense strand
gaacagagaugaugauuca

SEQ ID NO: 1891196 - RNA, 19 nt, Homo sapiens
  misc_RNA (1)...(19): siRNA sense strand
gaagagcacucaggacuua

SEQ ID NO: 1891197 - RNA, 19 nt, Homo sapiens
  misc_RNA (1)...(19): siRNA sense strand
gaucagaacugguaugaag

SEQ ID NO: 1891198 - RNA, 19 nt, Homo sapiens
  misc_RNA (1)...(19): siRNA sense strand
gaacugguaugaaggagaa

SEQ ID NO: 1891199 - RNA, 19 nt, Homo sapiens
  misc_RNA (1)...(19): siRNA sense strand
gagaagcuauugcuaaguu

SEQ ID NO: 1891200 - RNA, 19 nt, Homo sapiens
  misc_RNA (1)...(19): siRNA sense strand
ccaagagcauuuacgaaua

SEQ ID NO: 1891201 - RNA, 19 nt, Homo sapiens
  misc_RNA (1)...(19): siRNA sense strand
guagaaauguccuucagaa

SEQ ID NO: 1891202 - RNA, 19 nt, Homo sapiens
  misc_RNA (1)...(19): siRNA sense strand
gaagggagauauuguuuac

SEQ ID NO: 1891203 - RNA, 19 nt, Homo sapiens
  misc_RNA (1)...(19): siRNA sense strand
gagccaaauuugacuuuaa

SEQ ID NO: 1891204 - RNA, 19 nt, Homo sapiens
  misc_RNA (1)...(19): siRNA sense strand
caagagcauuuacgaauau

SEQ ID NO: 1891205 - RNA, 19 nt, Homo sapiens
  misc_RNA (1)...(19): siRNA sense strand
ggaauccacggaagaauuu

SEQ ID NO: 1891206 - RNA, 19 nt, Homo sapiens
  misc_RNA (1)...(19): siRNA sense strand
gacgauggaugguuuguug

SEQ ID NO: 1891207 - RNA, 19 nt, Homo sapiens
  misc_RNA (1)...(19): siRNA sense strand
agucaaaccucacaagauu

SEQ ID NO: 1891208 - RNA, 19 nt, Homo sapiens
  misc_RNA (1)...(19): siRNA sense strand
gguacaagacuauguuuaa

SEQ ID NO: 1891209 - RNA, 19 nt, Homo sapiens
  misc_RNA (1)...(19): siRNA sense strand
aaacagauccacaaacuga

SEQ ID NO: 1891210 - RNA, 19 nt, Homo sapiens
  misc_RNA (1)...(19): siRNA sense strand
gaagucaagcucagaaaga

SEQ ID NO: 1891211 - RNA, 19 nt, Homo sapiens
  misc_RNA (1)...(19): siRNA sense strand
ucaaaccucacaagauuua

SEQ ID NO: 1891212 - RNA, 19 nt, Homo sapiens
  misc_RNA (1)...(19): siRNA sense strand
uauaccagcugauuacuug

SEQ ID NO: 1891213 - RNA, 19 nt, Homo sapiens
  misc_RNA (1)...(19): siRNA sense strand
gaagcuauugcuaaguuua

SEQ ID NO: 1891214 - RNA, 19 nt, Homo sapiens
  misc_RNA (1)...(19): siRNA sense strand
gcaaugggcaagacaaaga

SEQ ID NO: 1891215 - RNA, 19 nt, Homo sapiens
  misc_RNA (1)...(19): siRNA sense strand
gauccugucucagaaagaa

SEQ ID NO: 1891216 - RNA, 19 nt, Homo sapiens
  misc_RNA (1)...(19): siRNA sense strand
gagcaaaggaugacaguag

SEQ ID NO: 1891217 - RNA, 19 nt, Homo sapiens
  misc_RNA (1)...(19): siRNA sense strand
ucacuagcuuggagaauga

SEQ ID NO: 1891218 - RNA, 19 nt, Homo sapiens
  misc_RNA (1)...(19): siRNA sense strand
gaaaugcccagcccucuuc

SEQ ID NO: 1891219 - RNA, 19 nt, Homo sapiens
  misc_RNA (1)...(19): siRNA sense strand
ccaguccucuacuaaauga

SEQ ID NO: 1891220 - RNA, 19 nt, Homo sapiens
  misc_RNA (1)...(19): siRNA sense strand
gagcaggacucagcaccaa

SEQ ID NO: 1891221 - RNA, 19 nt, Homo sapiens
  misc_RNA (1)...(19): siRNA sense strand
gcagaagggagauauuguu

SEQ ID NO: 1891222 - RNA, 19 nt, Homo sapiens
  misc_RNA (1)...(19): siRNA sense strand
agagacuccuggauauaua

SEQ ID NO: 1891223 - RNA, 19 nt, Homo sapiens
  misc_RNA (1)...(19): siRNA sense strand
gcagagcccaagagcauuu

SEQ ID NO: 1891224 - RNA, 19 nt, Homo sapiens
  misc_RNA (1)...(19): siRNA sense strand
acagaaugaugaugaguug

SEQ ID NO: 1891225 - RNA, 19 nt, Homo sapiens
  misc_RNA (1)...(19): siRNA sense strand
ggagauaucguugauguca

SEQ ID NO: 1891226 - RNA, 19 nt, Homo sapiens
  misc_RNA (1)...(19): siRNA sense strand
uaauggugauacacaagua

SEQ ID NO: 1891227 - RNA, 19 nt, Homo sapiens
  misc_RNA (1)...(19): siRNA sense strand
uuaaacagauccacaaacu

SEQ ID NO: 1891228 - RNA, 19 nt, Homo sapiens
  misc_RNA (1)...(19): siRNA sense strand
gaaugaugaugaguuggaa

SEQ ID NO: 1891229 - RNA, 19 nt, Homo sapiens
  misc_RNA (1)...(19): siRNA sense strand
gauggaugguuuguuggua

SEQ ID NO: 1891230 - RNA, 19 nt, Homo sapiens
  misc_RNA (1)...(19): siRNA sense strand
gcaccuacaucgagcuucu

SEQ ID NO: 1891231 - RNA, 19 nt, Homo sapiens
  misc_RNA (1)...(19): siRNA sense strand
cagaaucgccaagacauuu

SEQ ID NO: 1891232 - RNA, 19 nt, Homo sapiens
  misc_RNA (1)...(19): siRNA sense strand
gcaacuauguaaaaccuuu

SEQ ID NO: 1891233 - RNA, 19 nt, Homo sapiens
  misc_RNA (1)...(19): siRNA sense strand
caagaaggacaaagcaguu

SEQ ID NO: 1891234 - RNA, 19 nt, Homo sapiens
  misc_RNA (1)...(19): siRNA sense strand
gggagauauuguuuacauu

SEQ ID NO: 1891235 - RNA, 19 nt, Homo sapiens
  misc_RNA (1)...(19): siRNA sense strand
uaagcgauguuuccaugga

SEQ ID NO: 1891236 - RNA, 19 nt, Homo sapiens
  misc_RNA (1)...(19): siRNA sense strand
aaauugaucagaacuggua

SEQ ID NO: 1891237 - RNA, 19 nt, Homo sapiens
  misc_RNA (1)...(19): siRNA sense strand
cuucagagacuccuggaua

SEQ ID NO: 1891238 - RNA, 19 nt, Homo sapiens
  misc_RNA (1)...(19): siRNA sense strand
caagaggucggccacacua

SEQ ID NO: 1891239 - RNA, 19 nt, Homo sapiens
  misc_RNA (1)...(19): siRNA sense strand
ucaaaagacugguacaaga

SEQ ID NO: 1891240 - RNA, 19 nt, Homo sapiens
  misc_RNA (1)...(19): siRNA sense strand
ggagucaaaccucacaaga

SEQ ID NO: 1891241 - RNA, 19 nt, Homo sapiens
  misc_RNA (1)...(19): siRNA sense strand
cagaagggagauauuguuu

SEQ ID NO: 1891242 - RNA, 19 nt, Homo sapiens
  misc_RNA (1)...(19): siRNA sense strand
gcaacacaaucgagaacag

SEQ ID NO: 1891243 - RNA, 19 nt, Homo sapiens
  misc_RNA (1)...(19): siRNA sense strand
cagcucugcuuccacuaaa

SEQ ID NO: 1891244 - RNA, 19 nt, Homo sapiens
  misc_RNA (1)...(19): siRNA sense strand
aaacgacucaguagccuuu

SEQ ID NO: 1891245 - RNA, 19 nt, Homo sapiens
  misc_RNA (1)...(19): siRNA sense strand
caaccuuccuucugacaag

SEQ ID NO: 1891246 - RNA, 19 nt, Homo sapiens
  misc_RNA (1)...(19): siRNA sense strand
uaucguugaugucauggaa

SEQ ID NO: 1891247 - RNA, 19 nt, Homo sapiens
  misc_RNA (1)...(19): siRNA sense strand
gcuauauaccacagaauga

SEQ ID NO: 1891248 - RNA, 19 nt, Homo sapiens
  misc_RNA (1)...(19): siRNA sense strand
cuuuaaagcucagacacua

SEQ ID NO: 1891249 - RNA, 19 nt, Homo sapiens
  misc_RNA (1)...(19): siRNA sense strand
agacauggauccuacaaaa

SEQ ID NO: 1891250 - RNA, 19 nt, Homo sapiens
  misc_RNA (1)...(19): siRNA sense strand
aaagugagaugagcuacau

SEQ ID NO: 1891251 - RNA, 19 nt, Homo sapiens
  misc_RNA (1)...(19): siRNA sense strand
ggaaaugcccagcccucuu

SEQ ID NO: 1891252 - RNA, 19 nt, Homo sapiens
  misc_RNA (1)...(19): siRNA sense strand
agaagggagauauuguuua

SEQ ID NO: 1891253 - RNA, 19 nt, Homo sapiens
  misc_RNA (1)...(19): siRNA sense strand
gaugaugauucagaucugu

SEQ ID NO: 1891254 - RNA, 19 nt, Homo sapiens
  misc_RNA (1)...(19): siRNA sense strand
cagagaugaugauucagau

SEQ ID NO: 1891255 - RNA, 19 nt, Homo sapiens
  misc_RNA (1)...(19): siRNA sense strand
agauaucguugaugucaug

SEQ ID NO: 1891256 - RNA, 19 nt, Homo sapiens
  misc_RNA (1)...(19): siRNA sense strand
agaaauguccuucagaaag

SEQ ID NO: 1891257 - RNA, 19 nt, Homo sapiens
  misc_RNA (1)...(19): siRNA sense strand
aaagacugguacaagacua

SEQ ID NO: 1891258 - RNA, 19 nt, Homo sapiens
  misc_RNA (1)...(19): siRNA sense strand
uuaaagcucagacacuaaa

SEQ ID NO: 1891259 - RNA, 19 nt, Homo sapiens
  misc_RNA (1)...(19): siRNA sense strand
gugcagagcccaagagcau

SEQ ID NO: 1891260 - RNA, 19 nt, Homo sapiens
  misc_RNA (1)...(19): siRNA sense strand
gaaacccggcaacacgaaa

SEQ ID NO: 1891261 - RNA, 19 nt, Homo sapiens
  misc_RNA (1)...(19): siRNA sense strand
uggagaagcuauugcuaag

SEQ ID NO: 1891262 - RNA, 19 nt, Homo sapiens
  misc_RNA (1)...(19): siRNA sense strand
ggaaacccggcaacacgaa

SEQ ID NO: 1891263 - RNA, 19 nt, Homo sapiens
  misc_RNA (1)...(19): siRNA sense strand
agagccaaauuugacuuua

SEQ ID NO: 1891264 - RNA, 19 nt, Homo sapiens
  misc_RNA (1)...(19): siRNA sense strand
gcaagacaaagacauggau

SEQ ID NO: 1891265 - RNA, 19 nt, Homo sapiens
  misc_RNA (1)...(19): siRNA sense strand
cagagacuccuggauauau

SEQ ID NO: 1891266 - RNA, 19 nt, Homo sapiens
  misc_RNA (1)...(19): siRNA sense strand
ucagagacuccuggauaua

SEQ ID NO: 1891267 - RNA, 19 nt, Homo sapiens
  misc_RNA (1)...(19): siRNA sense strand
aaacugaacagagaugaug

SEQ ID NO: 1891268 - RNA, 19 nt, Homo sapiens
  misc_RNA (1)...(19): siRNA sense strand
uccacaaacugaacagaga

SEQ ID NO: 1891269 - RNA, 19 nt, Homo sapiens
  misc_RNA (1)...(19): siRNA sense strand
ggacuuaagcgauguuucc

SEQ ID NO: 1891270 - RNA, 19 nt, Homo sapiens
  misc_RNA (1)...(19): siRNA sense strand
gacaaagacauggauccua

SEQ ID NO: 1891271 - RNA, 19 nt, Homo sapiens
  misc_RNA (1)...(19): siRNA sense strand
uuucagauccugucucaga

SEQ ID NO: 1891272 - RNA, 19 nt, Homo sapiens
  misc_RNA (1)...(19): siRNA sense strand
gagucaaaccucacaagau

SEQ ID NO: 1891273 - RNA, 19 nt, Homo sapiens
  misc_RNA (1)...(19): siRNA sense strand
agaagcuauugcuaaguuu

SEQ ID NO: 1891274 - RNA, 19 nt, Homo sapiens
  misc_RNA (1)...(19): siRNA sense strand
aagucaagcucagaaagaa

SEQ ID NO: 1891275 - RNA, 19 nt, Homo sapiens
  misc_RNA (1)...(19): siRNA sense strand
gugcugaugccaauggaaa

SEQ ID NO: 1891276 - RNA, 19 nt, Homo sapiens
  misc_RNA (1)...(19): siRNA sense strand
caaaaucuccccuuucugu

SEQ ID NO: 1891277 - RNA, 19 nt, Homo sapiens
  misc_RNA (1)...(19): siRNA sense strand
uggcaagucuuccguucug

SEQ ID NO: 1891278 - RNA, 19 nt, Homo sapiens
  misc_RNA (1)...(19): siRNA sense strand
caaggcaucuuccccauca

SEQ ID NO: 1891279 - RNA, 19 nt, Homo sapiens
  misc_RNA (1)...(19): siRNA sense strand
ggugauacacaaguagaaa

SEQ ID NO: 1891280 - RNA, 19 nt, Homo sapiens
  misc_RNA (1)...(19): siRNA sense strand
agggagauauuguuuacau

SEQ ID NO: 1891281 - RNA, 19 nt, Homo sapiens
  misc_RNA (1)...(19): siRNA sense strand
gccuaucccuccacaacga

SEQ ID NO: 1891282 - RNA, 19 nt, Homo sapiens
  misc_RNA (1)...(19): siRNA sense strand
uaccacagaaugaugauga

SEQ ID NO: 1891283 - RNA, 19 nt, Homo sapiens
  misc_RNA (1)...(19): siRNA sense strand
uagaaauguccuucagaaa

SEQ ID NO: 1891284 - RNA, 19 nt, Homo sapiens
  misc_RNA (1)...(19): siRNA sense strand
uaagcaaauugaucagaac

SEQ ID NO: 1891285 - RNA, 19 nt, Homo sapiens
  misc_RNA (1)...(19): siRNA sense strand
acagagaugaugauucaga

SEQ ID NO: 1891286 - RNA, 19 nt, Homo sapiens
  misc_RNA (1)...(19): siRNA sense strand
guaggcggguggugaagag

SEQ ID NO: 1891287 - RNA, 19 nt, Homo sapiens
  misc_RNA (1)...(19): siRNA sense strand
ggaagggagcggugacucu

SEQ ID NO: 1891288 - RNA, 19 nt, Homo sapiens
  misc_RNA (1)...(19): siRNA sense strand
gagauaucguugaugucau

SEQ ID NO: 1891289 - RNA, 19 nt, Homo sapiens
  misc_RNA (1)...(19): siRNA sense strand
cagcaaugggcaagacaaa

SEQ ID NO: 1891290 - RNA, 19 nt, Homo sapiens
  misc_RNA (1)...(19): siRNA sense strand
gauuccaguccucuacuaa

SEQ ID NO: 1891291 - RNA, 19 nt, Homo sapiens
  misc_RNA (1)...(19): siRNA sense strand
ucagaaagggugagaggau

SEQ ID NO: 1891292 - RNA, 19 nt, Homo sapiens
  misc_RNA (1)...(19): siRNA sense strand
cccaagagcauuuacgaau

SEQ ID NO: 1891293 - RNA, 19 nt, Homo sapiens
  misc_RNA (1)...(19): siRNA sense strand
gacacaaaaucuccccuuu

SEQ ID NO: 1891294 - RNA, 19 nt, Homo sapiens
  misc_RNA (1)...(19): siRNA sense strand
ccggaacacugagagauca

SEQ ID NO: 1891295 - RNA, 19 nt, Homo sapiens
  misc_RNA (1)...(19): siRNA sense strand
caacagccacggaagauua

SEQ ID NO: 1891296 - RNA, 19 nt, Homo sapiens
  misc_RNA (1)...(19): siRNA sense strand
ucaagaaccucacguccuu

SEQ ID NO: 1891297 - RNA, 19 nt, Homo sapiens
  misc_RNA (1)...(19): siRNA sense strand
gagaccauccugagugaua

SEQ ID NO: 1891298 - RNA, 19 nt, Homo sapiens
  misc_RNA (1)...(19): siRNA sense strand
ucaagacgccaucugcuua

SEQ ID NO: 1891299 - RNA, 19 nt, Homo sapiens
  misc_RNA (1)...(19): siRNA sense strand
gaaccucacguccuucuga

SEQ ID NO: 1891300 - RNA, 19 nt, Homo sapiens
  misc_RNA (1)...(19): siRNA sense strand
gcagaccauucacuacuau

SEQ ID NO: 1891301 - RNA, 19 nt, Homo sapiens
  misc_RNA (1)...(19): siRNA sense strand
ggagauugcagcugacaaa

SEQ ID NO: 1891302 - RNA, 19 nt, Homo sapiens
  misc_RNA (1)...(19): siRNA sense strand
gauugcagcugacaaacug

SEQ ID NO: 1891303 - RNA, 19 nt, Homo sapiens
  misc_RNA (1)...(19): siRNA sense strand
gaugggagcuaucaagaac

SEQ ID NO: 1891304 - RNA, 19 nt, Homo sapiens
  misc_RNA (1)...(19): siRNA sense strand
gccauaaugucucccaaga

SEQ ID NO: 1891305 - RNA, 19 nt, Homo sapiens
  misc_RNA (1)...(19): siRNA sense strand
ggaagcuccuggccauguu

SEQ ID NO: 1891306 - RNA, 19 nt, Homo sapiens
  misc_RNA (1)...(19): siRNA sense strand
cacggaagauuaagcagaa

SEQ ID NO: 1891307 - RNA, 19 nt, Homo sapiens
  misc_RNA (1)...(19): siRNA sense strand
caaggccucuaagcucuuu

SEQ ID NO: 1891308 - RNA, 19 nt, Homo sapiens
  misc_RNA (1)...(19): siRNA sense strand
acaagaagcagaccauuca

SEQ ID NO: 1891309 - RNA, 19 nt, Homo sapiens
  misc_RNA (1)...(19): siRNA sense strand
aaacagauucggauucuca

SEQ ID NO: 1891310 - RNA, 19 nt, Homo sapiens
  misc_RNA (1)...(19): siRNA sense strand
ccagacgccuacaacaaga

SEQ ID NO: 1891311 - RNA, 19 nt, Homo sapiens
  misc_RNA (1)...(19): siRNA sense strand
gagaugggagcuaucaaga

SEQ ID NO: 1891312 - RNA, 19 nt, Homo sapiens
  misc_RNA (1)...(19): siRNA sense strand
gauuauuucugggucaaga

SEQ ID NO: 1891313 - RNA, 19 nt, Homo sapiens
  misc_RNA (1)...(19): siRNA sense strand
gaacagcucacugggagau

SEQ ID NO: 1891314 - RNA, 19 nt, Homo sapiens
  misc_RNA (1)...(19): siRNA sense strand
cuaaacagauucggauucu

SEQ ID NO: 1891315 - RNA, 19 nt, Homo sapiens
  misc_RNA (1)...(19): siRNA sense strand
agaagcagaccauucacua

SEQ ID NO: 1891316 - RNA, 19 nt, Homo sapiens
  misc_RNA (1)...(19): siRNA sense strand
ggagaugggagcuaucaag

SEQ ID NO: 1891317 - RNA, 19 nt, Homo sapiens
  misc_RNA (1)...(19): siRNA sense strand
gaaacagccuccccucauc

SEQ ID NO: 1891318 - RNA, 19 nt, Homo sapiens
  misc_RNA (1)...(19): siRNA sense strand
auaagaagcgggugcgaaa

SEQ ID NO: 1891319 - RNA, 19 nt, Homo sapiens
  misc_RNA (1)...(19): siRNA sense strand
agaccauccugagugauaa

SEQ ID NO: 1891320 - RNA, 19 nt, Homo sapiens
  misc_RNA (1)...(19): siRNA sense strand
caacaagaagcagaccauu

SEQ ID NO: 1891321 - RNA, 19 nt, Homo sapiens
  misc_RNA (1)...(19): siRNA sense strand
gcaacagccacggaagauu

SEQ ID NO: 1891322 - RNA, 19 nt, Homo sapiens
  misc_RNA (1)...(19): siRNA sense strand
gaagcagaccauucacuac

SEQ ID NO: 1891323 - RNA, 19 nt, Homo sapiens
  misc_RNA (1)...(19): siRNA sense strand
gaugucaauccuaaacaga

SEQ ID NO: 1891324 - RNA, 19 nt, Homo sapiens
  misc_RNA (1)...(19): siRNA sense strand
caccaugcgucucuucuac

SEQ ID NO: 1891325 - RNA, 19 nt, Homo sapiens
  misc_RNA (1)...(19): siRNA sense strand
ucacuacuaugagcagauc

SEQ ID NO: 1891326 - RNA, 19 nt, Homo sapiens
  misc_RNA (1)...(19): siRNA sense strand
cauccugagugauaagaag

SEQ ID NO: 1891327 - RNA, 19 nt, Homo sapiens
  misc_RNA (1)...(19): siRNA sense strand
uugagaccauccugaguga

SEQ ID NO: 1891328 - RNA, 19 nt, Homo sapiens
  misc_RNA (1)...(19): siRNA sense strand
agcagaccauucacuacua

SEQ ID NO: 1891329 - RNA, 19 nt, Homo sapiens
  misc_RNA (1)...(19): siRNA sense strand
ccaccaugcgucucuucua

SEQ ID NO: 1891330 - RNA, 19 nt, Homo sapiens
  misc_RNA (1)...(19): siRNA sense strand
uuaagcggaugcuggagau

SEQ ID NO: 1891331 - RNA, 19 nt, Homo sapiens
  misc_RNA (1)...(19): siRNA sense strand
ggugcacauugccggcuuu

SEQ ID NO: 1891332 - RNA, 19 nt, Homo sapiens
  misc_RNA (1)...(19): siRNA sense strand
gcaaggccucuaagcucuu

SEQ ID NO: 1891333 - RNA, 19 nt, Homo sapiens
  misc_RNA (1)...(19): siRNA sense strand
gaagcuccuggccauguug

SEQ ID NO: 1891334 - RNA, 19 nt, Homo sapiens
  misc_RNA (1)...(19): siRNA sense strand
cccugaaucugcccacuuc

SEQ ID NO: 1891335 - RNA, 19 nt, Homo sapiens
  misc_RNA (1)...(19): siRNA sense strand
agaccauucacuacuauga

SEQ ID NO: 1891336 - RNA, 19 nt, Homo sapiens
  misc_RNA (1)...(19): siRNA sense strand
uaagcucuuuggcaacuac

SEQ ID NO: 1891337 - RNA, 19 nt, Homo sapiens
  misc_RNA (1)...(19): siRNA sense strand
gcaacuacucccgggauca

SEQ ID NO: 1891338 - RNA, 19 nt, Homo sapiens
  misc_RNA (1)...(19): siRNA sense strand
gucaagacgccaucugcuu

SEQ ID NO: 1891339 - RNA, 19 nt, Homo sapiens
  misc_RNA (1)...(19): siRNA sense strand
ccuaaacagauucggauuc

SEQ ID NO: 1891340 - RNA, 19 nt, Homo sapiens
  misc_RNA (1)...(19): siRNA sense strand
ggaaacagccuccccucau

SEQ ID NO: 1891341 - RNA, 19 nt, Homo sapiens
  misc_RNA (1)...(19): siRNA sense strand
ucuaagcucuuuggcaacu

SEQ ID NO: 1891342 - RNA, 19 nt, Homo sapiens
  misc_RNA (1)...(19): siRNA sense strand
caacagcacugguggcuuu

SEQ ID NO: 1891343 - RNA, 19 nt, Homo sapiens
  misc_RNA (1)...(19): siRNA sense strand
uagccgagcucucugauua

SEQ ID NO: 1891344 - RNA, 19 nt, Homo sapiens
  misc_RNA (1)...(19): siRNA sense strand
agacccagcugaauaguua

SEQ ID NO: 1891345 - RNA, 19 nt, Homo sapiens
  misc_RNA (1)...(19): siRNA sense strand
gaaggaagcagaugccaaa

SEQ ID NO: 1891346 - RNA, 19 nt, Homo sapiens
  misc_RNA (1)...(19): siRNA sense strand
ccaggcagcuucauauaau

SEQ ID NO: 1891347 - RNA, 19 nt, Homo sapiens
  misc_RNA (1)...(19): siRNA sense strand
guaaccagccauccucuua

SEQ ID NO: 1891348 - RNA, 19 nt, Homo sapiens
  misc_RNA (1)...(19): siRNA sense strand
gagcugcgccgucaugaaa

SEQ ID NO: 1891349 - RNA, 19 nt, Homo sapiens
  misc_RNA (1)...(19): siRNA sense strand
cuacgacgaucccuacaaa

SEQ ID NO: 1891350 - RNA, 19 nt, Homo sapiens
  misc_RNA (1)...(19): siRNA sense strand
ggugaaagacuacgcguuu

SEQ ID NO: 1891351 - RNA, 19 nt, Homo sapiens
  misc_RNA (1)...(19): siRNA sense strand
caaaguccucgcuggauua

SEQ ID NO: 1891352 - RNA, 19 nt, Homo sapiens
  misc_RNA (1)...(19): siRNA sense strand
gugcagacccagcugaaua

SEQ ID NO: 1891353 - RNA, 19 nt, Homo sapiens
  misc_RNA (1)...(19): siRNA sense strand
gcuauucgggcuccuauaa

SEQ ID NO: 1891354 - RNA, 19 nt, Homo sapiens
  misc_RNA (1)...(19): siRNA sense strand
cuucuucgcucaacuccua

SEQ ID NO: 1891355 - RNA, 19 nt, Homo sapiens
  misc_RNA (1)...(19): siRNA sense strand
acaaaguccucgcuggauu

SEQ ID NO: 1891356 - RNA, 19 nt, Homo sapiens
  misc_RNA (1)...(19): siRNA sense strand
gaaagacuacgcguuuguu

SEQ ID NO: 1891357 - RNA, 19 nt, Homo sapiens
  misc_RNA (1)...(19): siRNA sense strand
cccaauggcuggcuccuau

SEQ ID NO: 1891358 - RNA, 19 nt, Homo sapiens
  misc_RNA (1)...(19): siRNA sense strand
gcccaaggccucuuaauac

SEQ ID NO: 1891359 - RNA, 19 nt, Homo sapiens
  misc_RNA (1)...(19): siRNA sense strand
ccucggcccuuuccuccua

SEQ ID NO: 1891360 - RNA, 19 nt, Homo sapiens
  misc_RNA (1)...(19): siRNA sense strand
ccaccaagggucagaagaa

SEQ ID NO: 1891361 - RNA, 19 nt, Homo sapiens
  misc_RNA (1)...(19): siRNA sense strand
ccgaugcccauuccgauua

SEQ ID NO: 1891362 - RNA, 19 nt, Homo sapiens
  misc_RNA (1)...(19): siRNA sense strand
gagcccaggcagcuucaua

SEQ ID NO: 1891363 - RNA, 19 nt, Homo sapiens
  misc_RNA (1)...(19): siRNA sense strand
gcccacaccacccuucuuu

SEQ ID NO: 1891364 - RNA, 19 nt, Homo sapiens
  misc_RNA (1)...(19): siRNA sense strand
guuccucccuugccuccua

SEQ ID NO: 1891365 - RNA, 19 nt, Homo sapiens
  misc_RNA (1)...(19): siRNA sense strand
ucccuugccuccuauggua

SEQ ID NO: 1891366 - RNA, 19 nt, Homo sapiens
  misc_RNA (1)...(19): siRNA sense strand
uauucgggcuccuauaaug

SEQ ID NO: 1891367 - RNA, 19 nt, Homo sapiens
  misc_RNA (1)...(19): siRNA sense strand
gcagcucaacggcaaagaa

SEQ ID NO: 1891368 - RNA, 19 nt, Homo sapiens
  misc_RNA (1)...(19): siRNA sense strand
cgcccaaggccucuuaaua

SEQ ID NO: 1891369 - RNA, 19 nt, Homo sapiens
  misc_RNA (1)...(19): siRNA sense strand
gcucaacggcaaagaagug

SEQ ID NO: 1891370 - RNA, 19 nt, Homo sapiens
  misc_RNA (1)...(19): siRNA sense strand
gugaaagacuacgcguuug

SEQ ID NO: 1891371 - RNA, 19 nt, Homo sapiens
  misc_RNA (1)...(19): siRNA sense strand
cagccuaccuguccauguc

SEQ ID NO: 1891372 - RNA, 19 nt, Homo sapiens
  misc_RNA (1)...(19): siRNA sense strand
gcccaggcagcuucauaua

SEQ ID NO: 1891373 - RNA, 19 nt, Homo sapiens
  misc_RNA (1)...(19): siRNA sense strand
cagagucgcagcuuucguu

SEQ ID NO: 1891374 - RNA, 19 nt, Homo sapiens
  misc_RNA (1)...(19): siRNA sense strand
agugugacguggugaaaga

SEQ ID NO: 1891375 - RNA, 19 nt, Homo sapiens
  misc_RNA (1)...(19): siRNA sense strand
cucauuggcugcuuccuau

SEQ ID NO: 1891376 - RNA, 19 nt, Homo sapiens
  misc_RNA (1)...(19): siRNA sense strand
gugacguggugaaagacua

SEQ ID NO: 1891377 - RNA, 19 nt, Homo sapiens
  misc_RNA (1)...(19): siRNA sense strand
ugaaacaguucgccuucgu

SEQ ID NO: 1891378 - RNA, 19 nt, Homo sapiens
  misc_RNA (1)...(19): siRNA sense strand
ggacaagaccaagaaacca

SEQ ID NO: 1891379 - RNA, 19 nt, Homo sapiens
  misc_RNA (1)...(19): siRNA sense strand
gugcagcugcuucuuccua

SEQ ID NO: 1891380 - RNA, 19 nt, Homo sapiens
  misc_RNA (1)...(19): siRNA sense strand
cuucuucacucggcccaua

SEQ ID NO: 1891381 - RNA, 19 nt, Homo sapiens
  misc_RNA (1)...(19): siRNA sense strand
ccaaccugcugccuaugug

SEQ ID NO: 1891382 - RNA, 19 nt, Homo sapiens
  misc_RNA (1)...(19): siRNA sense strand
uaucagagucgcagcuuuc

SEQ ID NO: 1891383 - RNA, 19 nt, Homo sapiens
  misc_RNA (1)...(19): siRNA sense strand
ucagucaucagccucauug

SEQ ID NO: 1891384 - RNA, 19 nt, Homo sapiens
  misc_RNA (1)...(19): siRNA sense strand
ccacaccacccuucuuugg

SEQ ID NO: 1891385 - RNA, 19 nt, Homo sapiens
  misc_RNA (1)...(19): siRNA sense strand
ccaaggccucuuaauacuu

SEQ ID NO: 1891386 - RNA, 19 nt, Homo sapiens
  misc_RNA (1)...(19): siRNA sense strand
ugaaagacuacgcguuugu

SEQ ID NO: 1891387 - RNA, 19 nt, Homo sapiens
  misc_RNA (1)...(19): siRNA sense strand
cccaggcagcuucauauaa

SEQ ID NO: 1891388 - RNA, 19 nt, Homo sapiens
  misc_RNA (1)...(19): siRNA sense strand
gcagccuccucacuagcuu

SEQ ID NO: 1891389 - RNA, 19 nt, Homo sapiens
  misc_RNA (1)...(19): siRNA sense strand
gcgccgucaugaaacaguu

SEQ ID NO: 1891390 - RNA, 19 nt, Homo sapiens
  misc_RNA (1)...(19): siRNA sense strand
caggcagcuucauauaaug

SEQ ID NO: 1891391 - RNA, 19 nt, Homo sapiens
  misc_RNA (1)...(19): siRNA sense strand
cagcacugguggcuuugau

SEQ ID NO: 1891392 - RNA, 19 nt, Homo sapiens
  misc_RNA (1)...(19): siRNA sense strand
cccaaggccucuuaauacu

SEQ ID NO: 1891393 - RNA, 19 nt, Homo sapiens
  misc_RNA (1)...(19): siRNA sense strand
gcugcgccgucaugaaaca

SEQ ID NO: 1891394 - RNA, 19 nt, Homo sapiens
  misc_RNA (1)...(19): siRNA sense strand
cuacgcguuuguucacaug

SEQ ID NO: 1891395 - RNA, 19 nt, Homo sapiens
  misc_RNA (1)...(19): siRNA sense strand
ccacucuggcagcuccuua

SEQ ID NO: 1891396 - RNA, 19 nt, Homo sapiens
  misc_RNA (1)...(19): siRNA sense strand
gcagcugcuucuuccuaca

SEQ ID NO: 1891397 - RNA, 19 nt, Homo sapiens
  misc_RNA (1)...(19): siRNA sense strand
caccaagggucagaagaag

SEQ ID NO: 1891398 - RNA, 19 nt, Homo sapiens
  misc_RNA (1)...(19): siRNA sense strand
caacggcaaagaagugaag

SEQ ID NO: 1891399 - RNA, 19 nt, Homo sapiens
  misc_RNA (1)...(19): siRNA sense strand
gugaagggcaagcgcauca

SEQ ID NO: 1891400 - RNA, 19 nt, Homo sapiens
  misc_RNA (1)...(19): siRNA sense strand
ccucauuggcugcuuccua

SEQ ID NO: 1891401 - RNA, 19 nt, Homo sapiens
  misc_RNA (1)...(19): siRNA sense strand
gcccucggccucuuacaau

SEQ ID NO: 1891402 - RNA, 19 nt, Homo sapiens
  misc_RNA (1)...(19): siRNA sense strand
gacaaaguccucgcuggau

SEQ ID NO: 1891403 - RNA, 19 nt, Homo sapiens
  misc_RNA (1)...(19): siRNA sense strand
uuaccgcacucagucauca

SEQ ID NO: 1891404 - RNA, 19 nt, Homo sapiens
  misc_RNA (1)...(19): siRNA sense strand
gacgcgucaucgaguguga

SEQ ID NO: 1891405 - RNA, 19 nt, Homo sapiens
  misc_RNA (1)...(19): siRNA sense strand
ggaacugcgcagccucuuc

SEQ ID NO: 1891406 - RNA, 19 nt, Homo sapiens
  misc_RNA (1)...(19): siRNA sense strand
ccuccucacuagcuuaugg

SEQ ID NO: 1891407 - RNA, 19 nt, Homo sapiens
  misc_RNA (1)...(19): siRNA sense strand
gcuacgacgaucccuacaa

SEQ ID NO: 1891408 - RNA, 19 nt, Homo sapiens
  misc_RNA (1)...(19): siRNA sense strand
gaagggcaagcgcaucaac

SEQ ID NO: 1891409 - RNA, 19 nt, Homo sapiens
  misc_RNA (1)...(19): siRNA sense strand
ccagccuucugccucuuug

SEQ ID NO: 1891410 - RNA, 19 nt, Homo sapiens
  misc_RNA (1)...(19): siRNA sense strand
aagcaucaaugggccuuuc

SEQ ID NO: 1891411 - RNA, 19 nt, Homo sapiens
  misc_RNA (1)...(19): siRNA sense strand
uuaucagagucgcagcuuu

SEQ ID NO: 1891412 - RNA, 19 nt, Homo sapiens
  misc_RNA (1)...(19): siRNA sense strand
gggaagagcugccaauauu

SEQ ID NO: 1891413 - RNA, 19 nt, Homo sapiens
  misc_RNA (1)...(19): siRNA sense strand
gaaguaagauuggaucaaa

SEQ ID NO: 1891414 - RNA, 19 nt, Homo sapiens
  misc_RNA (1)...(19): siRNA sense strand
gaagagcugccaauauuua

SEQ ID NO: 1891415 - RNA, 19 nt, Homo sapiens
  misc_RNA (1)...(19): siRNA sense strand
ccaacuaccuuacugguua

SEQ ID NO: 1891416 - RNA, 19 nt, Homo sapiens
  misc_RNA (1)...(19): siRNA sense strand
ugacaaaguucaccaaauu

SEQ ID NO: 1891417 - RNA, 19 nt, Homo sapiens
  misc_RNA (1)...(19): siRNA sense strand
gcaauuucuuguuucguua

SEQ ID NO: 1891418 - RNA, 19 nt, Homo sapiens
  misc_RNA (1)...(19): siRNA sense strand
gaaaguguccucaaugaug

SEQ ID NO: 1891419 - RNA, 19 nt, Homo sapiens
  misc_RNA (1)...(19): siRNA sense strand
gcaccacgcuucugauugu

SEQ ID NO: 1891420 - RNA, 19 nt, Homo sapiens
  misc_RNA (1)...(19): siRNA sense strand
gaugaugauucugaucuua

SEQ ID NO: 1891421 - RNA, 19 nt, Homo sapiens
  misc_RNA (1)...(19): siRNA sense strand
caaugaugcuguugccaua

SEQ ID NO: 1891422 - RNA, 19 nt, Homo sapiens
  misc_RNA (1)...(19): siRNA sense strand
ggaaacaguucugaagaug

SEQ ID NO: 1891423 - RNA, 19 nt, Homo sapiens
  misc_RNA (1)...(19): siRNA sense strand
gaaagaugaugauucugau

SEQ ID NO: 1891424 - RNA, 19 nt, Homo sapiens
  misc_RNA (1)...(19): siRNA sense strand
gugaaaguguccucaauga

SEQ ID NO: 1891425 - RNA, 19 nt, Homo sapiens
  misc_RNA (1)...(19): siRNA sense strand
gguacaacuuugaucauaa

SEQ ID NO: 1891426 - RNA, 19 nt, Homo sapiens
  misc_RNA (1)...(19): siRNA sense strand
gaagugcagucaaguccaa

SEQ ID NO: 1891427 - RNA, 19 nt, Homo sapiens
  misc_RNA (1)...(19): siRNA sense strand
ggugacagcuuuagugaca

SEQ ID NO: 1891428 - RNA, 19 nt, Homo sapiens
  misc_RNA (1)...(19): siRNA sense strand
gaagguaacgggacaacuu

SEQ ID NO: 1891429 - RNA, 19 nt, Homo sapiens
  misc_RNA (1)...(19): siRNA sense strand
gaaaggagaacuaccaaag

SEQ ID NO: 1891430 - RNA, 19 nt, Homo sapiens
  misc_RNA (1)...(19): siRNA sense strand
gaacuggucauucgaggaa

SEQ ID NO: 1891431 - RNA, 19 nt, Homo sapiens
  misc_RNA (1)...(19): siRNA sense strand
ugacuguucuugcuauauu

SEQ ID NO: 1891432 - RNA, 19 nt, Homo sapiens
  misc_RNA (1)...(19): siRNA sense strand
gcauucauguuccgaguga

SEQ ID NO: 1891433 - RNA, 19 nt, Homo sapiens
  misc_RNA (1)...(19): siRNA sense strand
agacaacagucacaccuuu

SEQ ID NO: 1891434 - RNA, 19 nt, Homo sapiens
  misc_RNA (1)...(19): siRNA sense strand
cgagugauguaaauaaugu

SEQ ID NO: 1891435 - RNA, 19 nt, Homo sapiens
  misc_RNA (1)...(19): siRNA sense strand
gggaaacaguucugaagau

SEQ ID NO: 1891436 - RNA, 19 nt, Homo sapiens
  misc_RNA (1)...(19): siRNA sense strand
gacaaaguucaccaaauua

SEQ ID NO: 1891437 - RNA, 19 nt, Homo sapiens
  misc_RNA (1)...(19): siRNA sense strand
ucacagcgauguucaaguc

SEQ ID NO: 1891438 - RNA, 19 nt, Homo sapiens
  misc_RNA (1)...(19): siRNA sense strand
gcagagagugcuuggcuuu

SEQ ID NO: 1891439 - RNA, 19 nt, Homo sapiens
  misc_RNA (1)...(19): siRNA sense strand
ggaagagcugccaauauuu

SEQ ID NO: 1891440 - RNA, 19 nt, Homo sapiens
  misc_RNA (1)...(19): siRNA sense strand
guugaaagaugaugauucu

SEQ ID NO: 1891441 - RNA, 19 nt, Homo sapiens
  misc_RNA (1)...(19): siRNA sense strand
gguagaagaaguaagauug

SEQ ID NO: 1891442 - RNA, 19 nt, Homo sapiens
  misc_RNA (1)...(19): siRNA sense strand
uaacccaacauuuguagua

SEQ ID NO: 1891443 - RNA, 19 nt, Homo sapiens
  misc_RNA (1)...(19): siRNA sense strand
gacaucaguuugacauaug

SEQ ID NO: 1891444 - RNA, 19 nt, Homo sapiens
  misc_RNA (1)...(19): siRNA sense strand
ugaaagaugaugauucuga

SEQ ID NO: 1891445 - RNA, 19 nt, Homo sapiens
  misc_RNA (1)...(19): siRNA sense strand
ugacaucaguuugacauau

SEQ ID NO: 1891446 - RNA, 19 nt, Homo sapiens
  misc_RNA (1)...(19): siRNA sense strand
gaaaccggccuggcuauga

SEQ ID NO: 1891447 - RNA, 19 nt, Homo sapiens
  misc_RNA (1)...(19): siRNA sense strand
caaggagauuuaugggaaa

SEQ ID NO: 1891448 - RNA, 19 nt, Homo sapiens
  misc_RNA (1)...(19): siRNA sense strand
aauaauguauggcugugua

SEQ ID NO: 1891449 - RNA, 19 nt, Homo sapiens
  misc_RNA (1)...(19): siRNA sense strand
cuaccuuacugguuacuuu

SEQ ID NO: 1891450 - RNA, 19 nt, Homo sapiens
  misc_RNA (1)...(19): siRNA sense strand
gagacaugguccagccuaa

SEQ ID NO: 1891451 - RNA, 19 nt, Homo sapiens
  misc_RNA (1)...(19): siRNA sense strand
ccacugcaaugcugucaug

SEQ ID NO: 1891452 - RNA, 19 nt, Homo sapiens
  misc_RNA (1)...(19): siRNA sense strand
gcuaugauuuauggucuuu

SEQ ID NO: 1891453 - RNA, 19 nt, Homo sapiens
  misc_RNA (1)...(19): siRNA sense strand
gaucuuauucucaaugaug

SEQ ID NO: 1891454 - RNA, 19 nt, Homo sapiens
  misc_RNA (1)...(19): siRNA sense strand
ugacagcuuuagugacaaa

SEQ ID NO: 1891455 - RNA, 19 nt, Homo sapiens
  misc_RNA (1)...(19): siRNA sense strand
gcgccaaccugcucaucuu

SEQ ID NO: 1891456 - RNA, 19 nt, Homo sapiens
  misc_RNA (1)...(19): siRNA sense strand
guacaacuuugaucauaac

SEQ ID NO: 1891457 - RNA, 19 nt, Homo sapiens
  misc_RNA (1)...(19): siRNA sense strand
acaagcacauuauacguau

SEQ ID NO: 1891458 - RNA, 19 nt, Homo sapiens
  misc_RNA (1)...(19): siRNA sense strand
caggaacaguugaaagaug

SEQ ID NO: 1891459 - RNA, 19 nt, Homo sapiens
  misc_RNA (1)...(19): siRNA sense strand
caaucuggcucuucaagca

SEQ ID NO: 1891460 - RNA, 19 nt, Homo sapiens
  misc_RNA (1)...(19): siRNA sense strand
gaaaaugaaaggagaacua

SEQ ID NO: 1891461 - RNA, 19 nt, Homo sapiens
  misc_RNA (1)...(19): siRNA sense strand
gcauuugccuuggccauuc

SEQ ID NO: 1891462 - RNA, 19 nt, Homo sapiens
  misc_RNA (1)...(19): siRNA sense strand
aggaacaguugaaagauga

SEQ ID NO: 1891463 - RNA, 19 nt, Homo sapiens
  misc_RNA (1)...(19): siRNA sense strand
ggcagagaauuucaucuuc

SEQ ID NO: 1891464 - RNA, 19 nt, Homo sapiens
  misc_RNA (1)...(19): siRNA sense strand
cacaagcacauuauacgua

SEQ ID NO: 1891465 - RNA, 19 nt, Homo sapiens
  misc_RNA (1)...(19): siRNA sense strand
ugguacaacuuugaucaua

SEQ ID NO: 1891466 - RNA, 19 nt, Homo sapiens
  misc_RNA (1)...(19): siRNA sense strand
guaguaggagcauuuguug

SEQ ID NO: 1891467 - RNA, 19 nt, Homo sapiens
  misc_RNA (1)...(19): siRNA sense strand
gcaucacacaagcacauua

SEQ ID NO: 1891468 - RNA, 19 nt, Homo sapiens
  misc_RNA (1)...(19): siRNA sense strand
gcugugaagugcagucaag

SEQ ID NO: 1891469 - RNA, 19 nt, Homo sapiens
  misc_RNA (1)...(19): siRNA sense strand
guguaacgcugaugaaggu

SEQ ID NO: 1891470 - RNA, 19 nt, Homo sapiens
  misc_RNA (1)...(19): siRNA sense strand
gugcuguccuccucaauag

SEQ ID NO: 1891471 - RNA, 19 nt, Homo sapiens
  misc_RNA (1)...(19): siRNA sense strand
ccuugucccucuuacuuaa

SEQ ID NO: 1891472 - RNA, 19 nt, Homo sapiens
  misc_RNA (1)...(19): siRNA sense strand
ccagaaccaugucuuuaac

SEQ ID NO: 1891473 - RNA, 19 nt, Homo sapiens
  misc_RNA (1)...(19): siRNA sense strand
cagcauagaacuaaacagu

SEQ ID NO: 1891474 - RNA, 19 nt, Homo sapiens
  misc_RNA (1)...(19): siRNA sense strand
gaacucuaugcacuucuuu

SEQ ID NO: 1891475 - RNA, 19 nt, Homo sapiens
  misc_RNA (1)...(19): siRNA sense strand
cagcgauguucaagucuau

SEQ ID NO: 1891476 - RNA, 19 nt, Homo sapiens
  misc_RNA (1)...(19): siRNA sense strand
cauauuacuuccuccuauc

SEQ ID NO: 1891477 - RNA, 19 nt, Homo sapiens
  misc_RNA (1)...(19): siRNA sense strand
aaggagaacuaccaaagca

SEQ ID NO: 1891478 - RNA, 19 nt, Homo sapiens
  misc_RNA (1)...(19): siRNA sense strand
gggcuucacagguguaguu

SEQ ID NO: 1891479 - RNA, 19 nt, Homo sapiens
  misc_RNA (1)...(19): siRNA sense strand
ggccuguucuucuugaugu

SEQ ID NO: 1891480 - RNA, 19 nt, Homo sapiens
  misc_RNA (1)...(19): siRNA sense strand
acauauuacuuccuccuau

SEQ ID NO: 1891481 - RNA, 19 nt, Homo sapiens
  misc_RNA (1)...(19): siRNA sense strand
aaaccggccuggcuaugau

SEQ ID NO: 1891482 - RNA, 19 nt, Homo sapiens
  misc_RNA (1)...(19): siRNA sense strand
ccacgcuucugauuguguu

SEQ ID NO: 1891483 - RNA, 19 nt, Homo sapiens
  misc_RNA (1)...(19): siRNA sense strand
ccacggagucucagcauag

SEQ ID NO: 1891484 - RNA, 19 nt, Homo sapiens
  misc_RNA (1)...(19): siRNA sense strand
cagauugccuacuguuugg

SEQ ID NO: 1891485 - RNA, 19 nt, Homo sapiens
  misc_RNA (1)...(19): siRNA sense strand
uaauuuggguagaagaagu

SEQ ID NO: 1891486 - RNA, 19 nt, Homo sapiens
  misc_RNA (1)...(19): siRNA sense strand
ugaacucuaugcacuucuu

SEQ ID NO: 1891487 - RNA, 19 nt, Homo sapiens
  misc_RNA (1)...(19): siRNA sense strand
ggugaaaguguccucaaug

SEQ ID NO: 1891488 - RNA, 19 nt, Homo sapiens
  misc_RNA (1)...(19): siRNA sense strand
uauggagauucuacuguga

SEQ ID NO: 1891489 - RNA, 19 nt, Homo sapiens
  misc_RNA (1)...(19): siRNA sense strand
ggguugguguugauucaga

SEQ ID NO: 1891490 - RNA, 19 nt, Homo sapiens
  misc_RNA (1)...(19): siRNA sense strand
cugcaaugcugucaugcuu

SEQ ID NO: 1891491 - RNA, 19 nt, Homo sapiens
  misc_RNA (1)...(19): siRNA sense strand
uagaagaaguaagauugga

SEQ ID NO: 1891492 - RNA, 19 nt, Homo sapiens
  misc_RNA (1)...(19): siRNA sense strand
ggacaacuugcaggagauu

SEQ ID NO: 1891493 - RNA, 19 nt, Homo sapiens
  misc_RNA (1)...(19): siRNA sense strand
ggaucgggagcuugcauuu

SEQ ID NO: 1891494 - RNA, 19 nt, Homo sapiens
  misc_RNA (1)...(19): siRNA sense strand
ggaugugguacaacuuuga

SEQ ID NO: 1891495 - RNA, 19 nt, Homo sapiens
  misc_RNA (1)...(19): siRNA sense strand
gcacggcaaaugauguuca

SEQ ID NO: 1891496 - RNA, 19 nt, Homo sapiens
  misc_RNA (1)...(19): siRNA sense strand
acagcgauguucaagucua

SEQ ID NO: 1891497 - RNA, 19 nt, Homo sapiens
  misc_RNA (1)...(19): siRNA sense strand
caucacacaagcacauuau

SEQ ID NO: 1891498 - RNA, 19 nt, Homo sapiens
  misc_RNA (1)...(19): siRNA sense strand
gauguuugcuggccuucgu

SEQ ID NO: 1891499 - RNA, 19 nt, Homo sapiens
  misc_RNA (1)...(19): siRNA sense strand
guaacgcugaugaagguaa

SEQ ID NO: 1891500 - RNA, 19 nt, Homo sapiens
  misc_RNA (1)...(19): siRNA sense strand
caggguugguguugauuca

SEQ ID NO: 1891501 - RNA, 19 nt, Homo sapiens
  misc_RNA (1)...(19): siRNA sense strand
uccagaaccaugucuuuaa

SEQ ID NO: 1891502 - RNA, 19 nt, Homo sapiens
  misc_RNA (1)...(19): siRNA sense strand
uguaguugcaguauuguuu

SEQ ID NO: 1891503 - RNA, 19 nt, Homo sapiens
  misc_RNA (1)...(19): siRNA sense strand
agguguaguugcaguauug

SEQ ID NO: 1891504 - RNA, 19 nt, Homo sapiens
  misc_RNA (1)...(19): siRNA sense strand
cuuggaaucuucaguggau

SEQ ID NO: 1891505 - RNA, 19 nt, Homo sapiens
  misc_RNA (1)...(19): siRNA sense strand
ucaagucuauugggaucuu

SEQ ID NO: 1891506 - RNA, 19 nt, Homo sapiens
  misc_RNA (1)...(19): siRNA sense strand
ucacaccuuugaugucaca

SEQ ID NO: 1891507 - RNA, 19 nt, Homo sapiens
  misc_RNA (1)...(19): siRNA sense strand
guugaacucuaugcacuuc

SEQ ID NO: 1891508 - RNA, 19 nt, Homo sapiens
  misc_RNA (1)...(19): siRNA sense strand
acacugaaccggccacauc

SEQ ID NO: 1891509 - RNA, 19 nt, Homo sapiens
  misc_RNA (1)...(19): siRNA sense strand
gagauacugccacuuaugc

SEQ ID NO: 1891510 - RNA, 19 nt, Homo sapiens
  misc_RNA (1)...(19): siRNA sense strand
agucacaccuuugauguca

SEQ ID NO: 1891511 - RNA, 19 nt, Homo sapiens
  misc_RNA (1)...(19): siRNA sense strand
gaucgggagcuugcauuug

SEQ ID NO: 1891512 - RNA, 19 nt, Homo sapiens
  misc_RNA (1)...(19): siRNA sense strand
ggacggagaucuucaauau

SEQ ID NO: 1891513 - RNA, 19 nt, Homo sapiens
  misc_RNA (1)...(19): siRNA sense strand
gaacaggccuuaugaccua

SEQ ID NO: 1891514 - RNA, 19 nt, Homo sapiens
  misc_RNA (1)...(19): siRNA sense strand
gaaaggcacucauggguaa

SEQ ID NO: 1891515 - RNA, 19 nt, Homo sapiens
  misc_RNA (1)...(19): siRNA sense strand
ggaaugagccugaauacaa

SEQ ID NO: 1891516 - RNA, 19 nt, Homo sapiens
  misc_RNA (1)...(19): siRNA sense strand
caagaaaggucuccuggaa

SEQ ID NO: 1891517 - RNA, 19 nt, Homo sapiens
  misc_RNA (1)...(19): siRNA sense strand
ucucuaagcugaagaagaa

SEQ ID NO: 1891518 - RNA, 19 nt, Homo sapiens
  misc_RNA (1)...(19): siRNA sense strand
gaaugagccugaauacaau

SEQ ID NO: 1891519 - RNA, 19 nt, Homo sapiens
  misc_RNA (1)...(19): siRNA sense strand
gaucaucgauggccucuca

SEQ ID NO: 1891520 - RNA, 19 nt, Homo sapiens
  misc_RNA (1)...(19): siRNA sense strand
gaaccucgaugagaucuug

SEQ ID NO: 1891521 - RNA, 19 nt, Homo sapiens
  misc_RNA (1)...(19): siRNA sense strand
ggaaaagacucaaaguaaa

SEQ ID NO: 1891522 - RNA, 19 nt, Homo sapiens
  misc_RNA (1)...(19): siRNA sense strand
ccaugaagguguacaaaga

SEQ ID NO: 1891523 - RNA, 19 nt, Homo sapiens
  misc_RNA (1)...(19): siRNA sense strand
gcagugggcuguccauguc

SEQ ID NO: 1891524 - RNA, 19 nt, Homo sapiens
  misc_RNA (1)...(19): siRNA sense strand
ggagugagcaggagaagga

SEQ ID NO: 1891525 - RNA, 19 nt, Homo sapiens
  misc_RNA (1)...(19): siRNA sense strand
gaacaugccagcaccaaca

SEQ ID NO: 1891526 - RNA, 19 nt, Homo sapiens
  misc_RNA (1)...(19): siRNA sense strand
gaaaagcaguucccugaga

SEQ ID NO: 1891527 - RNA, 19 nt, Homo sapiens
  misc_RNA (1)...(19): siRNA sense strand
gaaucacgcucggaaacaa

SEQ ID NO: 1891528 - RNA, 19 nt, Homo sapiens
  misc_RNA (1)...(19): siRNA sense strand
ggacagcucugggcucagu

SEQ ID NO: 1891529 - RNA, 19 nt, Homo sapiens
  misc_RNA (1)...(19): siRNA sense strand
cugagugcguccucuauua

SEQ ID NO: 1891530 - RNA, 19 nt, Homo sapiens
  misc_RNA (1)...(19): siRNA sense strand
gcaaggugcgcgaguacua

SEQ ID NO: 1891531 - RNA, 19 nt, Homo sapiens
  misc_RNA (1)...(19): siRNA sense strand
uggaagagcucgacaagag

SEQ ID NO: 1891532 - RNA, 19 nt, Homo sapiens
  misc_RNA (1)...(19): siRNA sense strand
gaacuucuacuucaacuac

SEQ ID NO: 1891533 - RNA, 19 nt, Homo sapiens
  misc_RNA (1)...(19): siRNA sense strand
aagcuaaucuuguacuuca

SEQ ID NO: 1891534 - RNA, 19 nt, Homo sapiens
  misc_RNA (1)...(19): siRNA sense strand
agcaagagaucaacaagaa

SEQ ID NO: 1891535 - RNA, 19 nt, Homo sapiens
  misc_RNA (1)...(19): siRNA sense strand
gcacaucagugaggucauc

SEQ ID NO: 1891536 - RNA, 19 nt, Homo sapiens
  misc_RNA (1)...(19): siRNA sense strand
cuaagaagaaugagaacua

SEQ ID NO: 1891537 - RNA, 19 nt, Homo sapiens
  misc_RNA (1)...(19): siRNA sense strand
cugaagaccucaccaagga

SEQ ID NO: 1891538 - RNA, 19 nt, Homo sapiens
  misc_RNA (1)...(19): siRNA sense strand
ggacagcgccaucacauac

SEQ ID NO: 1891539 - RNA, 19 nt, Homo sapiens
  misc_RNA (1)...(19): siRNA sense strand
agaaaggucuccuggaaca

SEQ ID NO: 1891540 - RNA, 19 nt, Homo sapiens
  misc_RNA (1)...(19): siRNA sense strand
aggaggagcugauccagaa

SEQ ID NO: 1891541 - RNA, 19 nt, Homo sapiens
  misc_RNA (1)...(19): siRNA sense strand
gggcuggaggccauaauua

SEQ ID NO: 1891542 - RNA, 19 nt, Homo sapiens
  misc_RNA (1)...(19): siRNA sense strand
cagcugacguccuguacaa

SEQ ID NO: 1891543 - RNA, 19 nt, Homo sapiens
  misc_RNA (1)...(19): siRNA sense strand
gaaaugaggaggagauggu

SEQ ID NO: 1891544 - RNA, 19 nt, Homo sapiens
  misc_RNA (1)...(19): siRNA sense strand
ggcagaaccucgaugagau

SEQ ID NO: 1891545 - RNA, 19 nt, Homo sapiens
  misc_RNA (1)...(19): siRNA sense strand
gggaaaagacucaaaguaa

SEQ ID NO: 1891546 - RNA, 19 nt, Homo sapiens
  misc_RNA (1)...(19): siRNA sense strand
ugacuaagaagaaugagaa

SEQ ID NO: 1891547 - RNA, 19 nt, Homo sapiens
  misc_RNA (1)...(19): siRNA sense strand
gcagagacccagugugcuu

SEQ ID NO: 1891548 - RNA, 19 nt, Homo sapiens
  misc_RNA (1)...(19): siRNA sense strand
gacagcgacuccagugcua

SEQ ID NO: 1891549 - RNA, 19 nt, Homo sapiens
  misc_RNA (1)...(19): siRNA sense strand
gacagaagaagaaauggaa

SEQ ID NO: 1891550 - RNA, 19 nt, Homo sapiens
  misc_RNA (1)...(19): siRNA sense strand
gcagaucucuaagcugaag

SEQ ID NO: 1891551 - RNA, 19 nt, Homo sapiens
  misc_RNA (1)...(19): siRNA sense strand
ggucuacccuacccucaug

SEQ ID NO: 1891552 - RNA, 19 nt, Homo sapiens
  misc_RNA (1)...(19): siRNA sense strand
acacaggcaugaaggguau

SEQ ID NO: 1891553 - RNA, 19 nt, Homo sapiens
  misc_RNA (1)...(19): siRNA sense strand
gcgcaccuaugacaugaug

SEQ ID NO: 1891554 - RNA, 19 nt, Homo sapiens
  misc_RNA (1)...(19): siRNA sense strand
ggacagaagaagaaaugga

SEQ ID NO: 1891555 - RNA, 19 nt, Homo sapiens
  misc_RNA (1)...(19): siRNA sense strand
caagaacuuuggccugauc

SEQ ID NO: 1891556 - RNA, 19 nt, Homo sapiens
  misc_RNA (1)...(19): siRNA sense strand
gcaucaaguucaucaacau

SEQ ID NO: 1891557 - RNA, 19 nt, Homo sapiens
  misc_RNA (1)...(19): siRNA sense strand
ggaaacaauggaagcagaa

SEQ ID NO: 1891558 - RNA, 19 nt, Homo sapiens
  misc_RNA (1)...(19): siRNA sense strand
gaggguggcaugucuguga

SEQ ID NO: 1891559 - RNA, 19 nt, Homo sapiens
  misc_RNA (1)...(19): siRNA sense strand
gcaccacucccgcgacuau

SEQ ID NO: 1891560 - RNA, 19 nt, Homo sapiens
  misc_RNA (1)...(19): siRNA sense strand
ggaaacagccaagaaaggu

SEQ ID NO: 1891561 - RNA, 19 nt, Homo sapiens
  misc_RNA (1)...(19): siRNA sense strand
gcacucauggguaaauaug

SEQ ID NO: 1891562 - RNA, 19 nt, Homo sapiens
  misc_RNA (1)...(19): siRNA sense strand
ccaagaagcaagagaucaa

SEQ ID NO: 1891563 - RNA, 19 nt, Homo sapiens
  misc_RNA (1)...(19): siRNA sense strand
uuacaugccucugggaaug

SEQ ID NO: 1891564 - RNA, 19 nt, Homo sapiens
  misc_RNA (1)...(19): siRNA sense strand
ggaagucagagauggaguu

SEQ ID NO: 1891565 - RNA, 19 nt, Homo sapiens
  misc_RNA (1)...(19): siRNA sense strand
ccaccuacccgcaccugua

SEQ ID NO: 1891566 - RNA, 19 nt, Homo sapiens
  misc_RNA (1)...(19): siRNA sense strand
ucaaagagcagcaccacau

SEQ ID NO: 1891567 - RNA, 19 nt, Homo sapiens
  misc_RNA (1)...(19): siRNA sense strand
auuacuaccugacuaagaa

SEQ ID NO: 1891568 - RNA, 19 nt, Homo sapiens
  misc_RNA (1)...(19): siRNA sense strand
ggugccaucucccaaggaa

SEQ ID NO: 1891569 - RNA, 19 nt, Homo sapiens
  misc_RNA (1)...(19): siRNA sense strand
gaaauggaaacagccaaga

SEQ ID NO: 1891570 - RNA, 19 nt, Homo sapiens
  misc_RNA (1)...(19): siRNA sense strand
gcaagagccagcagcaaca

SEQ ID NO: 1891571 - RNA, 19 nt, Homo sapiens
  misc_RNA (1)...(19): siRNA sense strand
agaaagaugagaaggagaa

SEQ ID NO: 1891572 - RNA, 19 nt, Homo sapiens
  misc_RNA (1)...(19): siRNA sense strand
gccaggaggagaaagauga

SEQ ID NO: 1891573 - RNA, 19 nt, Homo sapiens
  misc_RNA (1)...(19): siRNA sense strand
acggagaucuucaauaugc

SEQ ID NO: 1891574 - RNA, 19 nt, Homo sapiens
  misc_RNA (1)...(19): siRNA sense strand
ugaguggcguggaccugua

SEQ ID NO: 1891575 - RNA, 19 nt, Homo sapiens
  misc_RNA (1)...(19): siRNA sense strand
ggccacgucuuguccuaug

SEQ ID NO: 1891576 - RNA, 19 nt, Homo sapiens
  misc_RNA (1)...(19): siRNA sense strand
gcucauggaggccuuggaa

SEQ ID NO: 1891577 - RNA, 19 nt, Homo sapiens
  misc_RNA (1)...(19): siRNA sense strand
gaugagaaggagaaggaaa

SEQ ID NO: 1891578 - RNA, 19 nt, Homo sapiens
  misc_RNA (1)...(19): siRNA sense strand
caacaugaacgggcuuaug

SEQ ID NO: 1891579 - RNA, 19 nt, Homo sapiens
  misc_RNA (1)...(19): siRNA sense strand
gaagaaugagaacuauaag

SEQ ID NO: 1891580 - RNA, 19 nt, Homo sapiens
  misc_RNA (1)...(19): siRNA sense strand
agucagagauggaguucau

SEQ ID NO: 1891581 - RNA, 19 nt, Homo sapiens
  misc_RNA (1)...(19): siRNA sense strand
gcaccuaugacaugaugga

SEQ ID NO: 1891582 - RNA, 19 nt, Homo sapiens
  misc_RNA (1)...(19): siRNA sense strand
gaucugaagaccucaccaa

SEQ ID NO: 1891583 - RNA, 19 nt, Homo sapiens
  misc_RNA (1)...(19): siRNA sense strand
gcggaagcaucaccaaagg

SEQ ID NO: 1891584 - RNA, 19 nt, Homo sapiens
  misc_RNA (1)...(19): siRNA sense strand
ggaggaagaagaagaaagc

SEQ ID NO: 1891585 - RNA, 19 nt, Homo sapiens
  misc_RNA (1)...(19): siRNA sense strand
ccaagggccacgucaucua

SEQ ID NO: 1891586 - RNA, 19 nt, Homo sapiens
  misc_RNA (1)...(19): siRNA sense strand
gcuggaggccauaauuaga

SEQ ID NO: 1891587 - RNA, 19 nt, Homo sapiens
  misc_RNA (1)...(19): siRNA sense strand
gaagcaagagaucaacaag

SEQ ID NO: 1891588 - RNA, 19 nt, Homo sapiens
  misc_RNA (1)...(19): siRNA sense strand
cggcagaccaucaucaaug

SEQ ID NO: 1891589 - RNA, 19 nt, Homo sapiens
  misc_RNA (1)...(19): siRNA sense strand
guccaccacuggcuccaaa

SEQ ID NO: 1891590 - RNA, 19 nt, Homo sapiens
  misc_RNA (1)...(19): siRNA sense strand
agagcaaggugcgcgagua

SEQ ID NO: 1891591 - RNA, 19 nt, Homo sapiens
  misc_RNA (1)...(19): siRNA sense strand
ggccuuaugaccuauagaa

SEQ ID NO: 1891592 - RNA, 19 nt, Homo sapiens
  misc_RNA (1)...(19): siRNA sense strand
gaacacccacaaccggaau

SEQ ID NO: 1891593 - RNA, 19 nt, Homo sapiens
  misc_RNA (1)...(19): siRNA sense strand
caagcgcaccuaugacaug

SEQ ID NO: 1891594 - RNA, 19 nt, Homo sapiens
  misc_RNA (1)...(19): siRNA sense strand
agaagccacuggaccugaa

SEQ ID NO: 1891595 - RNA, 19 nt, Homo sapiens
  misc_RNA (1)...(19): siRNA sense strand
gcagccaggaggagaaaga

SEQ ID NO: 1891596 - RNA, 19 nt, Homo sapiens
  misc_RNA (1)...(19): siRNA sense strand
ugaagaagaagcagcaaca

SEQ ID NO: 1891597 - RNA, 19 nt, Homo sapiens
  misc_RNA (1)...(19): siRNA sense strand
cagcagcgcaucaaguuca

SEQ ID NO: 1891598 - RNA, 19 nt, Homo sapiens
  misc_RNA (1)...(19): siRNA sense strand
aggagaaccuggagaagca

SEQ ID NO: 1891599 - RNA, 19 nt, Homo sapiens
  misc_RNA (1)...(19): siRNA sense strand
gguggaggaugaggagaug

SEQ ID NO: 1891600 - RNA, 19 nt, Homo sapiens
  misc_RNA (1)...(19): siRNA sense strand
uggaggccauaauuagaaa

SEQ ID NO: 1891601 - RNA, 19 nt, Homo sapiens
  misc_RNA (1)...(19): siRNA sense strand
caccagcacucgcccaucu

SEQ ID NO: 1891602 - RNA, 19 nt, Homo sapiens
  misc_RNA (1)...(19): siRNA sense strand
gugcagacgagguggauga

SEQ ID NO: 1891603 - RNA, 19 nt, Homo sapiens
  misc_RNA (1)...(19): siRNA sense strand
gcaguaucaugagaacauc

SEQ ID NO: 1891604 - RNA, 19 nt, Homo sapiens
  misc_RNA (1)...(19): siRNA sense strand
guccaacacacuugacaaa

SEQ ID NO: 1891605 - RNA, 19 nt, Homo sapiens
  misc_RNA (1)...(19): siRNA sense strand
ggagguccaacacacuuga

SEQ ID NO: 1891606 - RNA, 19 nt, Homo sapiens
  misc_RNA (1)...(19): siRNA sense strand
gcagaaccucgaugagauc

SEQ ID NO: 1891607 - RNA, 19 nt, Homo sapiens
  misc_RNA (1)...(19): siRNA sense strand
agaaugagaacuauaagag

SEQ ID NO: 1891608 - RNA, 19 nt, Homo sapiens
  misc_RNA (1)...(19): siRNA sense strand
gaucaucuacgacgagaac

SEQ ID NO: 1891609 - RNA, 19 nt, Homo sapiens
  misc_RNA (1)...(19): siRNA sense strand
ggaaucacgcucggaaaca

SEQ ID NO: 1891610 - RNA, 19 nt, Homo sapiens
  misc_RNA (1)...(19): siRNA sense strand
gagaaccggcagaccauca

SEQ ID NO: 1891611 - RNA, 19 nt, Homo sapiens
  misc_RNA (1)...(19): siRNA sense strand
gggacggagaucuucaaua

SEQ ID NO: 1891612 - RNA, 19 nt, Homo sapiens
  misc_RNA (1)...(19): siRNA sense strand
agaagaagaucaagaaaga

SEQ ID NO: 1891613 - RNA, 19 nt, Homo sapiens
  misc_RNA (1)...(19): siRNA sense strand
cagcaucccuuuagcuuuc

SEQ ID NO: 1891614 - RNA, 19 nt, Homo sapiens
  misc_RNA (1)...(19): siRNA sense strand
caugaacacucuccugaau

SEQ ID NO: 1891615 - RNA, 19 nt, Homo sapiens
  misc_RNA (1)...(19): siRNA sense strand
cggagaagauccaggagaa

SEQ ID NO: 1891616 - RNA, 19 nt, Homo sapiens
  misc_RNA (1)...(19): siRNA sense strand
gagagaagcagcaguacau

SEQ ID NO: 1891617 - RNA, 19 nt, Homo sapiens
  misc_RNA (1)...(19): siRNA sense strand
gagaagcagcaguacauga

SEQ ID NO: 1891618 - RNA, 19 nt, Homo sapiens
  misc_RNA (1)...(19): siRNA sense strand
gagaagauccaggagaaga

SEQ ID NO: 1891619 - RNA, 19 nt, Homo sapiens
  misc_RNA (1)...(19): siRNA sense strand
ggagaagaagaucaagaaa

SEQ ID NO: 1891620 - RNA, 19 nt, Homo sapiens
  misc_RNA (1)...(19): siRNA sense strand
ugaacacucuccugaaugg

SEQ ID NO: 1891621 - RNA, 19 nt, Homo sapiens
  misc_RNA (1)...(19): siRNA sense strand
gagaagaagaucaagaaag

SEQ ID NO: 1891622 - RNA, 19 nt, Homo sapiens
  misc_RNA (1)...(19): siRNA sense strand
agagagagaagcagcagua

SEQ ID NO: 1891623 - RNA, 19 nt, Homo sapiens
  misc_RNA (1)...(19): siRNA sense strand
gggcguaccagcagucuga

SEQ ID NO: 1891624 - RNA, 19 nt, Homo sapiens
  misc_RNA (1)...(19): siRNA sense strand
ccagcagucugaagccuau

SEQ ID NO: 1891625 - RNA, 19 nt, Homo sapiens
  misc_RNA (1)...(19): siRNA sense strand
gcucugggcucaugaacac

SEQ ID NO: 1891626 - RNA, 19 nt, Homo sapiens
  misc_RNA (1)...(19): siRNA sense strand
gaagaagaucaagaaagaa

SEQ ID NO: 1891627 - RNA, 19 nt, Homo sapiens
  misc_RNA (1)...(19): siRNA sense strand
ggacacagggcagacgaaa

SEQ ID NO: 1891628 - RNA, 19 nt, Homo sapiens
  misc_RNA (1)...(19): siRNA sense strand
gcagcaucccuuuagcuuu

SEQ ID NO: 1891629 - RNA, 19 nt, Homo sapiens
  misc_RNA (1)...(19): siRNA sense strand
agaagcagcaguacaugaa

SEQ ID NO: 1891630 - RNA, 19 nt, Homo sapiens
  misc_RNA (1)...(19): siRNA sense strand
ggucccauccugcaccuuu

SEQ ID NO: 1891631 - RNA, 19 nt, Homo sapiens
  misc_RNA (1)...(19): siRNA sense strand
ucugaagccuauaagaugu

SEQ ID NO: 1891632 - RNA, 19 nt, Homo sapiens
  misc_RNA (1)...(19): siRNA sense strand
gcugggcacucuggacuuc

SEQ ID NO: 1891633 - RNA, 19 nt, Homo sapiens
  misc_RNA (1)...(19): siRNA sense strand
gaagaucaagaaagaagac

SEQ ID NO: 1891634 - RNA, 19 nt, Homo sapiens
  misc_RNA (1)...(19): siRNA sense strand
gcgauggcuucuccaccuu

SEQ ID NO: 1891635 - RNA, 19 nt, Homo sapiens
  misc_RNA (1)...(19): siRNA sense strand
gaugaggccgagagagaga

SEQ ID NO: 1891636 - RNA, 19 nt, Homo sapiens
  misc_RNA (1)...(19): siRNA sense strand
aggagaagaagaucaagaa

SEQ ID NO: 1891637 - RNA, 19 nt, Homo sapiens
  misc_RNA (1)...(19): siRNA sense strand
gucugaagccuauaagaug

SEQ ID NO: 1891638 - RNA, 19 nt, Homo sapiens
  misc_RNA (1)...(19): siRNA sense strand
gaagauccaggagaagaag

SEQ ID NO: 1891639 - RNA, 19 nt, Homo sapiens
  misc_RNA (1)...(19): siRNA sense strand
uggaugaggccgagagaga

SEQ ID NO: 1891640 - RNA, 19 nt, Homo sapiens
  misc_RNA (1)...(19): siRNA sense strand
gcucaucguccgcaucaag

SEQ ID NO: 1891641 - RNA, 19 nt, Homo sapiens
  misc_RNA (1)...(19): siRNA sense strand
agaagauccaggagaagaa

SEQ ID NO: 1891642 - RNA, 19 nt, Homo sapiens
  misc_RNA (1)...(19): siRNA sense strand
ugggcacucuggacuucua

SEQ ID NO: 1891643 - RNA, 19 nt, Homo sapiens
  misc_RNA (1)...(19): siRNA sense strand
gaagcagcaguacaugaag

SEQ ID NO: 1891644 - RNA, 19 nt, Homo sapiens
  misc_RNA (1)...(19): siRNA sense strand
aagaagaucaagaaagaag

SEQ ID NO: 1891645 - RNA, 19 nt, Homo sapiens
  misc_RNA (1)...(19): siRNA sense strand
cgcgauacacccagaagaa

SEQ ID NO: 1891646 - RNA, 19 nt, Homo sapiens
  misc_RNA (1)...(19): siRNA sense strand
caggagaagaagaucaaga

SEQ ID NO: 1891647 - RNA, 19 nt, Homo sapiens
  misc_RNA (1)...(19): siRNA sense strand
cccuuuagcuuucaaucuc

SEQ ID NO: 1891648 - RNA, 19 nt, Homo sapiens
  misc_RNA (1)...(19): siRNA sense strand
agaugaauguggccuucga

SEQ ID NO: 1891649 - RNA, 19 nt, Homo sapiens
  misc_RNA (1)...(19): siRNA sense strand
gaagagagagccuauauuu

SEQ ID NO: 1891650 - RNA, 19 nt, Homo sapiens
  misc_RNA (1)...(19): siRNA sense strand
gaaaauagaugauguggua

SEQ ID NO: 1891651 - RNA, 19 nt, Homo sapiens
  misc_RNA (1)...(19): siRNA sense strand
gcauuacacuuucugaaua

SEQ ID NO: 1891652 - RNA, 19 nt, Homo sapiens
  misc_RNA (1)...(19): siRNA sense strand
aaacagacauggauaauca

SEQ ID NO: 1891653 - RNA, 19 nt, Homo sapiens
  misc_RNA (1)...(19): siRNA sense strand
gcauugaaaucuugacuga

SEQ ID NO: 1891654 - RNA, 19 nt, Homo sapiens
  misc_RNA (1)...(19): siRNA sense strand
caaaggugguuucucagua

SEQ ID NO: 1891655 - RNA, 19 nt, Homo sapiens
  misc_RNA (1)...(19): siRNA sense strand
ugacagagaaacuuuguua

SEQ ID NO: 1891656 - RNA, 19 nt, Homo sapiens
  misc_RNA (1)...(19): siRNA sense strand
gagaagacauugaauucau

SEQ ID NO: 1891657 - RNA, 19 nt, Homo sapiens
  misc_RNA (1)...(19): siRNA sense strand
gcaaacugcucaagauuac

SEQ ID NO: 1891658 - RNA, 19 nt, Homo sapiens
  misc_RNA (1)...(19): siRNA sense strand
cuaacaaacuggugauuga

SEQ ID NO: 1891659 - RNA, 19 nt, Homo sapiens
  misc_RNA (1)...(19): siRNA sense strand
gcugagcgcuccauucaug

SEQ ID NO: 1891660 - RNA, 19 nt, Homo sapiens
  misc_RNA (1)...(19): siRNA sense strand
gcuggguucugcugaguua

SEQ ID NO: 1891661 - RNA, 19 nt, Homo sapiens
  misc_RNA (1)...(19): siRNA sense strand
ggugguauuuccaacauuu

SEQ ID NO: 1891662 - RNA, 19 nt, Homo sapiens
  misc_RNA (1)...(19): siRNA sense strand
caugaugcccuauguguua

SEQ ID NO: 1891663 - RNA, 19 nt, Homo sapiens
  misc_RNA (1)...(19): siRNA sense strand
gucuaaggcucaagauaua

SEQ ID NO: 1891664 - RNA, 19 nt, Homo sapiens
  misc_RNA (1)...(19): siRNA sense strand
gagaagagagagccuauau

SEQ ID NO: 1891665 - RNA, 19 nt, Homo sapiens
  misc_RNA (1)...(19): siRNA sense strand
ggaacugagugacagagaa

SEQ ID NO: 1891666 - RNA, 19 nt, Homo sapiens
  misc_RNA (1)...(19): siRNA sense strand
uaaaugcagugaugaaagu

SEQ ID NO: 1891667 - RNA, 19 nt, Homo sapiens
  misc_RNA (1)...(19): siRNA sense strand
gaacugagugacagagaaa

SEQ ID NO: 1891668 - RNA, 19 nt, Homo sapiens
  misc_RNA (1)...(19): siRNA sense strand
gaucuugcauuacacuuuc

SEQ ID NO: 1891669 - RNA, 19 nt, Homo sapiens
  misc_RNA (1)...(19): siRNA sense strand
agaguuggcccuacgauua

SEQ ID NO: 1891670 - RNA, 19 nt, Homo sapiens
  misc_RNA (1)...(19): siRNA sense strand
ggcaaacugcucaagauua

SEQ ID NO: 1891671 - RNA, 19 nt, Homo sapiens
  misc_RNA (1)...(19): siRNA sense strand
guuauucguuguuuaguga

SEQ ID NO: 1891672 - RNA, 19 nt, Homo sapiens
  misc_RNA (1)...(19): siRNA sense strand
ccaauuuacugcugacaug

SEQ ID NO: 1891673 - RNA, 19 nt, Homo sapiens
  misc_RNA (1)...(19): siRNA sense strand
cugaggaggucaauuuaaa

SEQ ID NO: 1891674 - RNA, 19 nt, Homo sapiens
  misc_RNA (1)...(19): siRNA sense strand
ugaaagagaagacauugaa

SEQ ID NO: 1891675 - RNA, 19 nt, Homo sapiens
  misc_RNA (1)...(19): siRNA sense strand
gaguguaaaugcagugaug

SEQ ID NO: 1891676 - RNA, 19 nt, Homo sapiens
  misc_RNA (1)...(19): siRNA sense strand
guaauguccuucucauaca

SEQ ID NO: 1891677 - RNA, 19 nt, Homo sapiens
  misc_RNA (1)...(19): siRNA sense strand
agagagagccuauauuuua

SEQ ID NO: 1891678 - RNA, 19 nt, Homo sapiens
  misc_RNA (1)...(19): siRNA sense strand
acucaaaggugguuucuca

SEQ ID NO: 1891679 - RNA, 19 nt, Homo sapiens
  misc_RNA (1)...(19): siRNA sense strand
caagccaguugcucauauu

SEQ ID NO: 1891680 - RNA, 19 nt, Homo sapiens
  misc_RNA (1)...(19): siRNA sense strand
gagagagccuauauuuuaa

SEQ ID NO: 1891681 - RNA, 19 nt, Homo sapiens
  misc_RNA (1)...(19): siRNA sense strand
gaggucaauuuaaaugguu

SEQ ID NO: 1891682 - RNA, 19 nt, Homo sapiens
  misc_RNA (1)...(19): siRNA sense strand
aaaggugguuucucaguau

SEQ ID NO: 1891683 - RNA, 19 nt, Homo sapiens
  misc_RNA (1)...(19): siRNA sense strand
gaauauucacgaacacuga

SEQ ID NO: 1891684 - RNA, 19 nt, Homo sapiens
  misc_RNA (1)...(19): siRNA sense strand
ggaggucaauuuaaauggu

SEQ ID NO: 1891685 - RNA, 19 nt, Homo sapiens
  misc_RNA (1)...(19): siRNA sense strand
uagcugaggaggucaauuu

SEQ ID NO: 1891686 - RNA, 19 nt, Homo sapiens
  misc_RNA (1)...(19): siRNA sense strand
agauugggcuuauucaguu

SEQ ID NO: 1891687 - RNA, 19 nt, Homo sapiens
  misc_RNA (1)...(19): siRNA sense strand
gcccuacgauuaacugaau

SEQ ID NO: 1891688 - RNA, 19 nt, Homo sapiens
  misc_RNA (1)...(19): siRNA sense strand
uuagugaucuugcauuaca

SEQ ID NO: 1891689 - RNA, 19 nt, Homo sapiens
  misc_RNA (1)...(19): siRNA sense strand
ucuuagugaucuugcauua

SEQ ID NO: 1891690 - RNA, 19 nt, Homo sapiens
  misc_RNA (1)...(19): siRNA sense strand
gaagcuuggugggacaauu

SEQ ID NO: 1891691 - RNA, 19 nt, Homo sapiens
  misc_RNA (1)...(19): siRNA sense strand
ggacaauugaugacuguga

SEQ ID NO: 1891692 - RNA, 19 nt, Homo sapiens
  misc_RNA (1)...(19): siRNA sense strand
ccaagccaguugcucauau

SEQ ID NO: 1891693 - RNA, 19 nt, Homo sapiens
  misc_RNA (1)...(19): siRNA sense strand
gaaucccauuucuacagua

SEQ ID NO: 1891694 - RNA, 19 nt, Homo sapiens
  misc_RNA (1)...(19): siRNA sense strand
gaguuggcccuacgauuaa

SEQ ID NO: 1891695 - RNA, 19 nt, Homo sapiens
  misc_RNA (1)...(19): siRNA sense strand
ugagugguauggaauccua

SEQ ID NO: 1891696 - RNA, 19 nt, Homo sapiens
  misc_RNA (1)...(19): siRNA sense strand
aaagggcauugaaaucuug

SEQ ID NO: 1891697 - RNA, 19 nt, Homo sapiens
  misc_RNA (1)...(19): siRNA sense strand
gaaagagaagacauugaau

SEQ ID NO: 1891698 - RNA, 19 nt, Homo sapiens
  misc_RNA (1)...(19): siRNA sense strand
caagucugcuuucuccaau

SEQ ID NO: 1891699 - RNA, 19 nt, Homo sapiens
  misc_RNA (1)...(19): siRNA sense strand
gaggaggucaauuuaaaug

SEQ ID NO: 1891700 - RNA, 19 nt, Homo sapiens
  misc_RNA (1)...(19): siRNA sense strand
caucauuucugagucauuc

SEQ ID NO: 1891701 - RNA, 19 nt, Homo sapiens
  misc_RNA (1)...(19): siRNA sense strand
acaaacuggugauugaaga

SEQ ID NO: 1891702 - RNA, 19 nt, Homo sapiens
  misc_RNA (1)...(19): siRNA sense strand
cagauccgcuucagcaaca

SEQ ID NO: 1891703 - RNA, 19 nt, Homo sapiens
  misc_RNA (1)...(19): siRNA sense strand
gauguaauguccuucucau

SEQ ID NO: 1891704 - RNA, 19 nt, Homo sapiens
  misc_RNA (1)...(19): siRNA sense strand
uugcuuaucugcucccaaa

SEQ ID NO: 1891705 - RNA, 19 nt, Homo sapiens
  misc_RNA (1)...(19): siRNA sense strand
gauugggcuuauucaguuu

SEQ ID NO: 1891706 - RNA, 19 nt, Homo sapiens
  misc_RNA (1)...(19): siRNA sense strand
gugcuaccauucugaaaca

SEQ ID NO: 1891707 - RNA, 19 nt, Homo sapiens
  misc_RNA (1)...(19): siRNA sense strand
gcugaggaggucaauuuaa

SEQ ID NO: 1891708 - RNA, 19 nt, Homo sapiens
  misc_RNA (1)...(19): siRNA sense strand
gaaacuguucggagcauuc

SEQ ID NO: 1891709 - RNA, 19 nt, Homo sapiens
  misc_RNA (1)...(19): siRNA sense strand
ugucuaaggcucaagauau

SEQ ID NO: 1891710 - RNA, 19 nt, Homo sapiens
  misc_RNA (1)...(19): siRNA sense strand
aaaggugauguaaccauua

SEQ ID NO: 1891711 - RNA, 19 nt, Homo sapiens
  misc_RNA (1)...(19): siRNA sense strand
ucauggugauuaaggauau

SEQ ID NO: 1891712 - RNA, 19 nt, Homo sapiens
  misc_RNA (1)...(19): siRNA sense strand
ccacaucaguagucaucau

SEQ ID NO: 1891713 - RNA, 19 nt, Homo sapiens
  misc_RNA (1)...(19): siRNA sense strand
ggucauuccaucuacacua

SEQ ID NO: 1891714 - RNA, 19 nt, Homo sapiens
  misc_RNA (1)...(19): siRNA sense strand
ggaggucauuccaucuaca

SEQ ID NO: 1891715 - RNA, 19 nt, Homo sapiens
  misc_RNA (1)...(19): siRNA sense strand
cuaccauucugaaacaaau

SEQ ID NO: 1891716 - RNA, 19 nt, Homo sapiens
  misc_RNA (1)...(19): siRNA sense strand
caaaugcaaguauuacauc

SEQ ID NO: 1891717 - RNA, 19 nt, Homo sapiens
  misc_RNA (1)...(19): siRNA sense strand
gacagagaaacuuuguuaa

SEQ ID NO: 1891718 - RNA, 19 nt, Homo sapiens
  misc_RNA (1)...(19): siRNA sense strand
aaucuugacugacaugucu

SEQ ID NO: 1891719 - RNA, 19 nt, Homo sapiens
  misc_RNA (1)...(19): siRNA sense strand
uacaguaacagaacuaaga

SEQ ID NO: 1891720 - RNA, 19 nt, Homo sapiens
  misc_RNA (1)...(19): siRNA sense strand
agguggugcuccagaaaua

SEQ ID NO: 1891721 - RNA, 19 nt, Homo sapiens
  misc_RNA (1)...(19): siRNA sense strand
aagagaagacauugaauuc

SEQ ID NO: 1891722 - RNA, 19 nt, Homo sapiens
  misc_RNA (1)...(19): siRNA sense strand
guaaaugcagugaugaaag

SEQ ID NO: 1891723 - RNA, 19 nt, Homo sapiens
  misc_RNA (1)...(19): siRNA sense strand
aaucccauuucuacaguaa

SEQ ID NO: 1891724 - RNA, 19 nt, Homo sapiens
  misc_RNA (1)...(19): siRNA sense strand
auugaaaucuugacugaca

SEQ ID NO: 1891725 - RNA, 19 nt, Homo sapiens
  misc_RNA (1)...(19): siRNA sense strand
gaagcugagcgcuccauuc

SEQ ID NO: 1891726 - RNA, 19 nt, Homo sapiens
  misc_RNA (1)...(19): siRNA sense strand
gaaaagggcauugaaaucu

SEQ ID NO: 1891727 - RNA, 19 nt, Homo sapiens
  misc_RNA (1)...(19): siRNA sense strand
ugaaucccauuucuacagu

SEQ ID NO: 1891728 - RNA, 19 nt, Homo sapiens
  misc_RNA (1)...(19): siRNA sense strand
uuuaaaugguucuggcaaa

SEQ ID NO: 1891729 - RNA, 19 nt, Homo sapiens
  misc_RNA (1)...(19): siRNA sense strand
cauggauaaucaaauagug

SEQ ID NO: 1891730 - RNA, 19 nt, Homo sapiens
  misc_RNA (1)...(19): siRNA sense strand
agugucaaauucuggcaua

SEQ ID NO: 1891731 - RNA, 19 nt, Homo sapiens
  misc_RNA (1)...(19): siRNA sense strand
uaacaaacuggugauugaa

SEQ ID NO: 1891732 - RNA, 19 nt, Homo sapiens
  misc_RNA (1)...(19): siRNA sense strand
uggcauaaccagaguugaa

SEQ ID NO: 1891733 - RNA, 19 nt, Homo sapiens
  misc_RNA (1)...(19): siRNA sense strand
ugagugacagagaaacuuu

SEQ ID NO: 1891734 - RNA, 19 nt, Homo sapiens
  misc_RNA (1)...(19): siRNA sense strand
aaacugcaggcauuaaugu

SEQ ID NO: 1891735 - RNA, 19 nt, Homo sapiens
  misc_RNA (1)...(19): siRNA sense strand
agucugcuuucuccaauga

SEQ ID NO: 1891736 - RNA, 19 nt, Homo sapiens
  misc_RNA (1)...(19): siRNA sense strand
ggcauaaccagaguugaaa

SEQ ID NO: 1891737 - RNA, 19 nt, Homo sapiens
  misc_RNA (1)...(19): siRNA sense strand
gucauuccaucuacacuag

SEQ ID NO: 1891738 - RNA, 19 nt, Homo sapiens
  misc_RNA (1)...(19): siRNA sense strand
ggaaaagggcauugaaauc

SEQ ID NO: 1891739 - RNA, 19 nt, Homo sapiens
  misc_RNA (1)...(19): siRNA sense strand
uagaugaugugguaaacac

SEQ ID NO: 1891740 - RNA, 19 nt, Homo sapiens
  misc_RNA (1)...(19): siRNA sense strand
aagcugagcgcuccauuca

SEQ ID NO: 1891741 - RNA, 19 nt, Homo sapiens
  misc_RNA (1)...(19): siRNA sense strand
gcagugaugaaagugauug

SEQ ID NO: 1891742 - RNA, 19 nt, Homo sapiens
  misc_RNA (1)...(19): siRNA sense strand
ggugguuucucaguauuca

SEQ ID NO: 1891743 - RNA, 19 nt, Homo sapiens
  misc_RNA (1)...(19): siRNA sense strand
cgacaagccagcccagauc

SEQ ID NO: 1891744 - RNA, 19 nt, Homo sapiens
  misc_RNA (1)...(19): siRNA sense strand
caaacuggugauugaagaa

SEQ ID NO: 1891745 - RNA, 19 nt, Homo sapiens
  misc_RNA (1)...(19): siRNA sense strand
caucuacacuagcugaaaa

SEQ ID NO: 1891746 - RNA, 19 nt, Homo sapiens
  misc_RNA (1)...(19): siRNA sense strand
gcgagaagagagagccuau

SEQ ID NO: 1891747 - RNA, 19 nt, Homo sapiens
  misc_RNA (1)...(19): siRNA sense strand
ggauguaauguccuucuca

SEQ ID NO: 1891748 - RNA, 19 nt, Homo sapiens
  misc_RNA (1)...(19): siRNA sense strand
ggagcauucugaaaauaga

SEQ ID NO: 1891749 - RNA, 19 nt, Homo sapiens
  misc_RNA (1)...(19): siRNA sense strand
gaagaagaauuuggacuug

SEQ ID NO: 1891750 - RNA, 19 nt, Homo sapiens
  misc_RNA (1)...(19): siRNA sense strand
caucuaaacuuaaguggaa

SEQ ID NO: 1891751 - RNA, 19 nt, Homo sapiens
  misc_RNA (1)...(19): siRNA sense strand
ugaagaagaugaugaagau

SEQ ID NO: 1891752 - RNA, 19 nt, Homo sapiens
  misc_RNA (1)...(19): siRNA sense strand
ucucacacaucuaaacuua

SEQ ID NO: 1891753 - RNA, 19 nt, Homo sapiens
  misc_RNA (1)...(19): siRNA sense strand
ugaugaagaugaagaugua

SEQ ID NO: 1891754 - RNA, 19 nt, Homo sapiens
  misc_RNA (1)...(19): siRNA sense strand
gggcuuaacagcugaauuu

SEQ ID NO: 1891755 - RNA, 19 nt, Homo sapiens
  misc_RNA (1)...(19): siRNA sense strand
ccaaaucucacacaucuaa

SEQ ID NO: 1891756 - RNA, 19 nt, Homo sapiens
  misc_RNA (1)...(19): siRNA sense strand
ggacgacgaugaagucagu

SEQ ID NO: 1891757 - RNA, 19 nt, Homo sapiens
  misc_RNA (1)...(19): siRNA sense strand
ggaagaaggugggaaaggu

SEQ ID NO: 1891758 - RNA, 19 nt, Homo sapiens
  misc_RNA (1)...(19): siRNA sense strand
ggaguuugaugaagaagau

SEQ ID NO: 1891759 - RNA, 19 nt, Homo sapiens
  misc_RNA (1)...(19): siRNA sense strand
ugaaggagaagaugauuaa

SEQ ID NO: 1891760 - RNA, 19 nt, Homo sapiens
  misc_RNA (1)...(19): siRNA sense strand
ggaagaagaauuuggacuu

SEQ ID NO: 1891761 - RNA, 19 nt, Homo sapiens
  misc_RNA (1)...(19): siRNA sense strand
caagcugccuaaauugaaa

SEQ ID NO: 1891762 - RNA, 19 nt, Homo sapiens
  misc_RNA (1)...(19): siRNA sense strand
uuaccaaccugaaugacua

SEQ ID NO: 1891763 - RNA, 19 nt, Homo sapiens
  misc_RNA (1)...(19): siRNA sense strand
ggacgaagaaggagaagau

SEQ ID NO: 1891764 - RNA, 19 nt, Homo sapiens
  misc_RNA (1)...(19): siRNA sense strand
gaagaggaguuugaugaag

SEQ ID NO: 1891765 - RNA, 19 nt, Homo sapiens
  misc_RNA (1)...(19): siRNA sense strand
ugaagaagaugaagaugag

SEQ ID NO: 1891766 - RNA, 19 nt, Homo sapiens
  misc_RNA (1)...(19): siRNA sense strand
ucacacaucuaaacuuaag

SEQ ID NO: 1891767 - RNA, 19 nt, Homo sapiens
  misc_RNA (1)...(19): siRNA sense strand
cuuaacagcugaauuugug

SEQ ID NO: 1891768 - RNA, 19 nt, Homo sapiens
  misc_RNA (1)...(19): siRNA sense strand
cgaugaggauggugaagaa

SEQ ID NO: 1891769 - RNA, 19 nt, Homo sapiens
  misc_RNA (1)...(19): siRNA sense strand
cagcugaauuugugaacuu

SEQ ID NO: 1891770 - RNA, 19 nt, Homo sapiens
  misc_RNA (1)...(19): siRNA sense strand
ggaggaagaaggugggaaa

SEQ ID NO: 1891771 - RNA, 19 nt, Homo sapiens
  misc_RNA (1)...(19): siRNA sense strand
ugaaagauaucagcaccuu

SEQ ID NO: 1891772 - RNA, 19 nt, Homo sapiens
  misc_RNA (1)...(19): siRNA sense strand
ggaggaagaagaauuugga

SEQ ID NO: 1891773 - RNA, 19 nt, Homo sapiens
  misc_RNA (1)...(19): siRNA sense strand
gaaaagaggaagagagaaa

SEQ ID NO: 1891774 - RNA, 19 nt, Homo sapiens
  misc_RNA (1)...(19): siRNA sense strand
aagaggaguuugaugaaga

SEQ ID NO: 1891775 - RNA, 19 nt, Homo sapiens
  misc_RNA (1)...(19): siRNA sense strand
agaagaugaugaagaugaa

SEQ ID NO: 1891776 - RNA, 19 nt, Homo sapiens
  misc_RNA (1)...(19): siRNA sense strand
ggaggaggacgaagaagga

SEQ ID NO: 1891777 - RNA, 19 nt, Homo sapiens
  misc_RNA (1)...(19): siRNA sense strand
ugaggaggaagaagaauuu

SEQ ID NO: 1891778 - RNA, 19 nt, Homo sapiens
  misc_RNA (1)...(19): siRNA sense strand
gaucucaguuucaaaucuc

SEQ ID NO: 1891779 - RNA, 19 nt, Homo sapiens
  misc_RNA (1)...(19): siRNA sense strand
gggaugaggacgacgauga

SEQ ID NO: 1891780 - RNA, 19 nt, Homo sapiens
  misc_RNA (1)...(19): siRNA sense strand
aagaagaggaguuugauga

SEQ ID NO: 1891781 - RNA, 19 nt, Homo sapiens
  misc_RNA (1)...(19): siRNA sense strand
gaguuccucaguuuaauaa

SEQ ID NO: 1891782 - RNA, 19 nt, Homo sapiens
  misc_RNA (1)...(19): siRNA sense strand
gaagaagaggaguuugaug

SEQ ID NO: 1891783 - RNA, 19 nt, Homo sapiens
  misc_RNA (1)...(19): siRNA sense strand
acuuagaguuccucaguuu

SEQ ID NO: 1891784 - RNA, 19 nt, Homo sapiens
  misc_RNA (1)...(19): siRNA sense strand
gacaauugcaaaucaaaug

SEQ ID NO: 1891785 - RNA, 19 nt, Homo sapiens
  misc_RNA (1)...(19): siRNA sense strand
ggacaauugcaaaucaaau

SEQ ID NO: 1891786 - RNA, 19 nt, Homo sapiens
  misc_RNA (1)...(19): siRNA sense strand
gagagagugucuucaagcu

SEQ ID NO: 1891787 - RNA, 19 nt, Homo sapiens
  misc_RNA (1)...(19): siRNA sense strand
agaagaauuuggacuugau

SEQ ID NO: 1891788 - RNA, 19 nt, Homo sapiens
  misc_RNA (1)...(19): siRNA sense strand
gugaagaagaggaguuuga

SEQ ID NO: 1891789 - RNA, 19 nt, Homo sapiens
  misc_RNA (1)...(19): siRNA sense strand
ggaggacgaagaaggagaa

SEQ ID NO: 1891790 - RNA, 19 nt, Homo sapiens
  misc_RNA (1)...(19): siRNA sense strand
cgagguggaugguguggau

SEQ ID NO: 1891791 - RNA, 19 nt, Homo sapiens
  misc_RNA (1)...(19): siRNA sense strand
uuagaguuccucaguuuaa

SEQ ID NO: 1891792 - RNA, 19 nt, Homo sapiens
  misc_RNA (1)...(19): siRNA sense strand
ggaugaggacgacgaugaa

SEQ ID NO: 1891793 - RNA, 19 nt, Homo sapiens
  misc_RNA (1)...(19): siRNA sense strand
aagaagaugaugaagauga

SEQ ID NO: 1891794 - RNA, 19 nt, Homo sapiens
  misc_RNA (1)...(19): siRNA sense strand
agaggaguuugaugaagaa

SEQ ID NO: 1891795 - RNA, 19 nt, Homo sapiens
  misc_RNA (1)...(19): siRNA sense strand
ccaagcugccuaaauugaa

SEQ ID NO: 1891796 - RNA, 19 nt, Homo sapiens
  misc_RNA (1)...(19): siRNA sense strand
ggaugaagaggaggaagaa

SEQ ID NO: 1891797 - RNA, 19 nt, Homo sapiens
  misc_RNA (1)...(19): siRNA sense strand
aagaagaauuuggacuuga

SEQ ID NO: 1891798 - RNA, 19 nt, Homo sapiens
  misc_RNA (1)...(19): siRNA sense strand
agaaggagaagaugaggaa

SEQ ID NO: 1891799 - RNA, 19 nt, Homo sapiens
  misc_RNA (1)...(19): siRNA sense strand
cugaaugacuaccgagaga

SEQ ID NO: 1891800 - RNA, 19 nt, Homo sapiens
  misc_RNA (1)...(19): siRNA sense strand
gaagaauuuggacuugaug

SEQ ID NO: 1891801 - RNA, 19 nt, Homo sapiens
  misc_RNA (1)...(19): siRNA sense strand
gccuggaccucuuuaacug

SEQ ID NO: 1891802 - RNA, 19 nt, Homo sapiens
  misc_RNA (1)...(19): siRNA sense strand
aauuuggacuugaugaaga

SEQ ID NO: 1891803 - RNA, 19 nt, Homo sapiens
  misc_RNA (1)...(19): siRNA sense strand
ugaagucagugaggaggaa

SEQ ID NO: 1891804 - RNA, 19 nt, Homo sapiens
  misc_RNA (1)...(19): siRNA sense strand
aagaugaggaugaggauga

SEQ ID NO: 1891805 - RNA, 19 nt, Homo sapiens
  misc_RNA (1)...(19): siRNA sense strand
gaaggugggaaaggugaaa

SEQ ID NO: 1891806 - RNA, 19 nt, Homo sapiens
  misc_RNA (1)...(19): siRNA sense strand
ugaagaugaagauguagaa

SEQ ID NO: 1891807 - RNA, 19 nt, Homo sapiens
  misc_RNA (1)...(19): siRNA sense strand
uuccaaaucucacacaucu

SEQ ID NO: 1891808 - RNA, 19 nt, Homo sapiens
  misc_RNA (1)...(19): siRNA sense strand
gaauuuggacuugaugaag

SEQ ID NO: 1891809 - RNA, 19 nt, Homo sapiens
  misc_RNA (1)...(19): siRNA sense strand
ucagugaggaggaagaaga

SEQ ID NO: 1891810 - RNA, 19 nt, Homo sapiens
  misc_RNA (1)...(19): siRNA sense strand
cccggcagcuguucgagaa

SEQ ID NO: 1891811 - RNA, 19 nt, Homo sapiens
  misc_RNA (1)...(19): siRNA sense strand
gugaggaggaagaagaauu

SEQ ID NO: 1891812 - RNA, 19 nt, Homo sapiens
  misc_RNA (1)...(19): siRNA sense strand
cugaauuugugaacuuaga

SEQ ID NO: 1891813 - RNA, 19 nt, Homo sapiens
  misc_RNA (1)...(19): siRNA sense strand
ggacgaugaggauggugaa

SEQ ID NO: 1891814 - RNA, 19 nt, Homo sapiens
  misc_RNA (1)...(19): siRNA sense strand
uggaugguguggaugaaga

SEQ ID NO: 1891815 - RNA, 19 nt, Homo sapiens
  misc_RNA (1)...(19): siRNA sense strand
gaaugacuaccgagagagu

SEQ ID NO: 1891816 - RNA, 19 nt, Homo sapiens
  misc_RNA (1)...(19): siRNA sense strand
agaagaggaguuugaugaa

SEQ ID NO: 1891817 - RNA, 19 nt, Homo sapiens
  misc_RNA (1)...(19): siRNA sense strand
gaugaaggagaagaugauu

SEQ ID NO: 1891818 - RNA, 19 nt, Homo sapiens
  misc_RNA (1)...(19): siRNA sense strand
ugaugaagaagaugaugaa

SEQ ID NO: 1891819 - RNA, 19 nt, Homo sapiens
  misc_RNA (1)...(19): siRNA sense strand
uaacagcugaauuugugaa

SEQ ID NO: 1891820 - RNA, 19 nt, Homo sapiens
  misc_RNA (1)...(19): siRNA sense strand
cuuggacaauugcaaauca

SEQ ID NO: 1891821 - RNA, 19 nt, Homo sapiens
  misc_RNA (1)...(19): siRNA sense strand
uuggaggucuggacauguu

SEQ ID NO: 1891822 - RNA, 19 nt, Homo sapiens
  misc_RNA (1)...(19): siRNA sense strand
ggaagacgaggacgaugag

SEQ ID NO: 1891823 - RNA, 19 nt, Homo sapiens
  misc_RNA (1)...(19): siRNA sense strand
cgaagaaggagaagaugag

SEQ ID NO: 1891824 - RNA, 19 nt, Homo sapiens
  misc_RNA (1)...(19): siRNA sense strand
cuacuuggauggcuaugac

SEQ ID NO: 1891825 - RNA, 19 nt, Homo sapiens
  misc_RNA (1)...(19): siRNA sense strand
guggaaauaaacugaaaga

SEQ ID NO: 1891826 - RNA, 19 nt, Homo sapiens
  misc_RNA (1)...(19): siRNA sense strand
ucagcaccuuggaaccuuu

SEQ ID NO: 1891827 - RNA, 19 nt, Homo sapiens
  misc_RNA (1)...(19): siRNA sense strand
aagaugaagaugaggauga

SEQ ID NO: 1891828 - RNA, 19 nt, Homo sapiens
  misc_RNA (1)...(19): siRNA sense strand
agaguuccucaguuuaaua

SEQ ID NO: 1891829 - RNA, 19 nt, Homo sapiens
  misc_RNA (1)...(19): siRNA sense strand
gaacucagugaaaauagaa

SEQ ID NO: 1891830 - RNA, 19 nt, Homo sapiens
  misc_RNA (1)...(19): siRNA sense strand
uucgagaacuugucuugga

SEQ ID NO: 1891831 - RNA, 19 nt, Homo sapiens
  misc_RNA (1)...(19): siRNA sense strand
uagaguuccucaguuuaau

SEQ ID NO: 1891832 - RNA, 19 nt, Homo sapiens
  misc_RNA (1)...(19): siRNA sense strand
ugaggauggugaagaagag

SEQ ID NO: 1891833 - RNA, 19 nt, Homo sapiens
  misc_RNA (1)...(19): siRNA sense strand
caccuuggaaccuuugaaa

SEQ ID NO: 1891834 - RNA, 19 nt, Homo sapiens
  misc_RNA (1)...(19): siRNA sense strand
ugaugaagaagaugaagau

SEQ ID NO: 1891835 - RNA, 19 nt, Homo sapiens
  misc_RNA (1)...(19): siRNA sense strand
aagcuugaacucagugaaa

SEQ ID NO: 1891836 - RNA, 19 nt, Homo sapiens
  misc_RNA (1)...(19): siRNA sense strand
ugaccgagaggaccaggaa

SEQ ID NO: 1891837 - RNA, 19 nt, Homo sapiens
  misc_RNA (1)...(19): siRNA sense strand
gcuuaacagcugaauuugu

SEQ ID NO: 1891838 - RNA, 19 nt, Homo sapiens
  misc_RNA (1)...(19): siRNA sense strand
ccgagagagugucuucaag

SEQ ID NO: 1891839 - RNA, 19 nt, Homo sapiens
  misc_RNA (1)...(19): siRNA sense strand
gaagaagaugaugaagaug

SEQ ID NO: 1891840 - RNA, 19 nt, Homo sapiens
  misc_RNA (1)...(19): siRNA sense strand
gguggaugguguggaugaa

SEQ ID NO: 1891841 - RNA, 19 nt, Homo sapiens
  misc_RNA (1)...(19): siRNA sense strand
ugaaaagccuggaccucuu

SEQ ID NO: 1891842 - RNA, 19 nt, Homo sapiens
  misc_RNA (1)...(19): siRNA sense strand
aaauguaggcuugaucuca

SEQ ID NO: 1891843 - RNA, 19 nt, Homo sapiens
  misc_RNA (1)...(19): siRNA sense strand
gaagaugaagauguagaag

SEQ ID NO: 1891844 - RNA, 19 nt, Homo sapiens
  misc_RNA (1)...(19): siRNA sense strand
ugaucucaguuucaaaucu

SEQ ID NO: 1891845 - RNA, 19 nt, Homo sapiens
  misc_RNA (1)...(19): siRNA sense strand
cccaagcugccuaaauuga

SEQ ID NO: 1891846 - RNA, 19 nt, Homo sapiens
  misc_RNA (1)...(19): siRNA sense strand
cuggacauguuagcugaaa

SEQ ID NO: 1891847 - RNA, 19 nt, Homo sapiens
  misc_RNA (1)...(19): siRNA sense strand
agaugaggaugaggaugaa

SEQ ID NO: 1891848 - RNA, 19 nt, Homo sapiens
  misc_RNA (1)...(19): siRNA sense strand
uccccaagcugccuaaauu

SEQ ID NO: 1891849 - RNA, 19 nt, Homo sapiens
  misc_RNA (1)...(19): siRNA sense strand
gaacgaagacccucugaug

SEQ ID NO: 1891850 - RNA, 19 nt, Homo sapiens
  misc_RNA (1)...(19): siRNA sense strand
ugaaggagcugagacauau

SEQ ID NO: 1891851 - RNA, 19 nt, Homo sapiens
  misc_RNA (1)...(19): siRNA sense strand
gaaccagagugcucagcua

SEQ ID NO: 1891852 - RNA, 19 nt, Homo sapiens
  misc_RNA (1)...(19): siRNA sense strand
ggaaggagccaacaucaau

SEQ ID NO: 1891853 - RNA, 19 nt, Homo sapiens
  misc_RNA (1)...(19): siRNA sense strand
gaaauccuauaccaugaug

SEQ ID NO: 1891854 - RNA, 19 nt, Homo sapiens
  misc_RNA (1)...(19): siRNA sense strand
gcaaugccaucaucaacga

SEQ ID NO: 1891855 - RNA, 19 nt, Homo sapiens
  misc_RNA (1)...(19): siRNA sense strand
gcagauaugcaaucaaaga

SEQ ID NO: 1891856 - RNA, 19 nt, Homo sapiens
  misc_RNA (1)...(19): siRNA sense strand
gaaggagccaacaucaaua

SEQ ID NO: 1891857 - RNA, 19 nt, Homo sapiens
  misc_RNA (1)...(19): siRNA sense strand
gcaaguguaucgggacauu

SEQ ID NO: 1891858 - RNA, 19 nt, Homo sapiens
  misc_RNA (1)...(19): siRNA sense strand
acauaaagcuggaaaugga

SEQ ID NO: 1891859 - RNA, 19 nt, Homo sapiens
  misc_RNA (1)...(19): siRNA sense strand
gggaaauccuauaccauga

SEQ ID NO: 1891860 - RNA, 19 nt, Homo sapiens
  misc_RNA (1)...(19): siRNA sense strand
agacauugcugaccucaug

SEQ ID NO: 1891861 - RNA, 19 nt, Homo sapiens
  misc_RNA (1)...(19): siRNA sense strand
gagccaacaucaauaaguc

SEQ ID NO: 1891862 - RNA, 19 nt, Homo sapiens
  misc_RNA (1)...(19): siRNA sense strand
gcagcaaggcaucgacaua

SEQ ID NO: 1891863 - RNA, 19 nt, Homo sapiens
  misc_RNA (1)...(19): siRNA sense strand
gaccucuucucucgcguua

SEQ ID NO: 1891864 - RNA, 19 nt, Homo sapiens
  misc_RNA (1)...(19): siRNA sense strand
gaacuuugcccagaaggaa

SEQ ID NO: 1891865 - RNA, 19 nt, Homo sapiens
  misc_RNA (1)...(19): siRNA sense strand
gagaaggucaguaagauca

SEQ ID NO: 1891866 - RNA, 19 nt, Homo sapiens
  misc_RNA (1)...(19): siRNA sense strand
ucaccuggcugcucaagga

SEQ ID NO: 1891867 - RNA, 19 nt, Homo sapiens
  misc_RNA (1)...(19): siRNA sense strand
gaaggaaggagccaacauc

SEQ ID NO: 1891868 - RNA, 19 nt, Homo sapiens
  misc_RNA (1)...(19): siRNA sense strand
ggaagaagggagugucaga

SEQ ID NO: 1891869 - RNA, 19 nt, Homo sapiens
  misc_RNA (1)...(19): siRNA sense strand
ggagacagagaagauuaua

SEQ ID NO: 1891870 - RNA, 19 nt, Homo sapiens
  misc_RNA (1)...(19): siRNA sense strand
ugagcuauauggagaucua

SEQ ID NO: 1891871 - RNA, 19 nt, Homo sapiens
  misc_RNA (1)...(19): siRNA sense strand
gaggagaagcuacgcaaga

SEQ ID NO: 1891872 - RNA, 19 nt, Homo sapiens
  misc_RNA (1)...(19): siRNA sense strand
cauggacuguggaaauaaa

SEQ ID NO: 1891873 - RNA, 19 nt, Homo sapiens
  misc_RNA (1)...(19): siRNA sense strand
gagaaucaguaccggaaag

SEQ ID NO: 1891874 - RNA, 19 nt, Homo sapiens
  misc_RNA (1)...(19): siRNA sense strand
ggacauuggagaagagaug

SEQ ID NO: 1891875 - RNA, 19 nt, Homo sapiens
  misc_RNA (1)...(19): siRNA sense strand
ugaaggagaucugcuacga

SEQ ID NO: 1891876 - RNA, 19 nt, Homo sapiens
  misc_RNA (1)...(19): siRNA sense strand
caccauggcugaccugaag

SEQ ID NO: 1891877 - RNA, 19 nt, Homo sapiens
  misc_RNA (1)...(19): siRNA sense strand
agaagaggcugcaggaucu

SEQ ID NO: 1891878 - RNA, 19 nt, Homo sapiens
  misc_RNA (1)...(19): siRNA sense strand
gagcugagacauaugugaa

SEQ ID NO: 1891879 - RNA, 19 nt, Homo sapiens
  misc_RNA (1)...(19): siRNA sense strand
gugaaggagcugagacaua

SEQ ID NO: 1891880 - RNA, 19 nt, Homo sapiens
  misc_RNA (1)...(19): siRNA sense strand
auauggagaucuacuguga

SEQ ID NO: 1891881 - RNA, 19 nt, Homo sapiens
  misc_RNA (1)...(19): siRNA sense strand
ugcaggaucuggagaauca

SEQ ID NO: 1891882 - RNA, 19 nt, Homo sapiens
  misc_RNA (1)...(19): siRNA sense strand
ccaaguagauauggacauc

SEQ ID NO: 1891883 - RNA, 19 nt, Homo sapiens
  misc_RNA (1)...(19): siRNA sense strand
caacacggagucccagauu

SEQ ID NO: 1891884 - RNA, 19 nt, Homo sapiens
  misc_RNA (1)...(19): siRNA sense strand
gaaauaaagcacggacugu

SEQ ID NO: 1891885 - RNA, 19 nt, Homo sapiens
  misc_RNA (1)...(19): siRNA sense strand
ggaugagaaugaagaaggu

SEQ ID NO: 1891886 - RNA, 19 nt, Homo sapiens
  misc_RNA (1)...(19): siRNA sense strand
cagcaaggcaucgacauaa

SEQ ID NO: 1891887 - RNA, 19 nt, Homo sapiens
  misc_RNA (1)...(19): siRNA sense strand
gaagucagggaauaggauu

SEQ ID NO: 1891888 - RNA, 19 nt, Homo sapiens
  misc_RNA (1)...(19): siRNA sense strand
caggagacagagaagauua

SEQ ID NO: 1891889 - RNA, 19 nt, Homo sapiens
  misc_RNA (1)...(19): siRNA sense strand
gcccugcugacaucaauua

SEQ ID NO: 1891890 - RNA, 19 nt, Homo sapiens
  misc_RNA (1)...(19): siRNA sense strand
caacaccaccuccaucauc

SEQ ID NO: 1891891 - RNA, 19 nt, Homo sapiens
  misc_RNA (1)...(19): siRNA sense strand
ggagcugugucgcaccuau

SEQ ID NO: 1891892 - RNA, 19 nt, Homo sapiens
  misc_RNA (1)...(19): siRNA sense strand
caucaucaauccuaaacag

SEQ ID NO: 1891893 - RNA, 19 nt, Homo sapiens
  misc_RNA (1)...(19): siRNA sense strand
ggauugugaugggcaagaa

SEQ ID NO: 1891894 - RNA, 19 nt, Homo sapiens
  misc_RNA (1)...(19): siRNA sense strand
aagcaaauccgcugcaaug

SEQ ID NO: 1891895 - RNA, 19 nt, Homo sapiens
  misc_RNA (1)...(19): siRNA sense strand
cuacaacgugugcaucuuu

SEQ ID NO: 1891896 - RNA, 19 nt, Homo sapiens
  misc_RNA (1)...(19): siRNA sense strand
cgacauaaagcuggaaaug

SEQ ID NO: 1891897 - RNA, 19 nt, Homo sapiens
  misc_RNA (1)...(19): siRNA sense strand
gcugagacauaugugaaug

SEQ ID NO: 1891898 - RNA, 19 nt, Homo sapiens
  misc_RNA (1)...(19): siRNA sense strand
caucucagcagcaagugua

SEQ ID NO: 1891899 - RNA, 19 nt, Homo sapiens
  misc_RNA (1)...(19): siRNA sense strand
gagcccugcugacaucaau

SEQ ID NO: 1891900 - RNA, 19 nt, Homo sapiens
  misc_RNA (1)...(19): siRNA sense strand
ucucggcccuugcagauau

SEQ ID NO: 1891901 - RNA, 19 nt, Homo sapiens
  misc_RNA (1)...(19): siRNA sense strand
ccagccagauggagaagug

SEQ ID NO: 1891902 - RNA, 19 nt, Homo sapiens
  misc_RNA (1)...(19): siRNA sense strand
gcugggaaauccuauacca

SEQ ID NO: 1891903 - RNA, 19 nt, Homo sapiens
  misc_RNA (1)...(19): siRNA sense strand
gaaggucaguaagaucagu

SEQ ID NO: 1891904 - RNA, 19 nt, Homo sapiens
  misc_RNA (1)...(19): siRNA sense strand
cucauggacuguggaaaua

SEQ ID NO: 1891905 - RNA, 19 nt, Homo sapiens
  misc_RNA (1)...(19): siRNA sense strand
cggagaaggucaguaagau

SEQ ID NO: 1891906 - RNA, 19 nt, Homo sapiens
  misc_RNA (1)...(19): siRNA sense strand
gcaaggcaucgacauaaag

SEQ ID NO: 1891907 - RNA, 19 nt, Homo sapiens
  misc_RNA (1)...(19): siRNA sense strand
cagaagcccugaggaugga

SEQ ID NO: 1891908 - RNA, 19 nt, Homo sapiens
  misc_RNA (1)...(19): siRNA sense strand
caucacccaccacacauaa

SEQ ID NO: 1891909 - RNA, 19 nt, Homo sapiens
  misc_RNA (1)...(19): siRNA sense strand
ucacacagcgcugccauga

SEQ ID NO: 1891910 - RNA, 19 nt, Homo sapiens
  misc_RNA (1)...(19): siRNA sense strand
gcaggagacagagaagauu

SEQ ID NO: 1891911 - RNA, 19 nt, Homo sapiens
  misc_RNA (1)...(19): siRNA sense strand
ggaaauccuauaccaugau

SEQ ID NO: 1891912 - RNA, 19 nt, Homo sapiens
  misc_RNA (1)...(19): siRNA sense strand
gagcagcagcgacuguaug

SEQ ID NO: 1891913 - RNA, 19 nt, Homo sapiens
  misc_RNA (1)...(19): siRNA sense strand
ccaaguguguggucagcau

SEQ ID NO: 1891914 - RNA, 19 nt, Homo sapiens
  misc_RNA (1)...(19): siRNA sense strand
cagccaggaugccaagugu

SEQ ID NO: 1891915 - RNA, 19 nt, Homo sapiens
  misc_RNA (1)...(19): siRNA sense strand
ccucuucucucgcguuagu

SEQ ID NO: 1891916 - RNA, 19 nt, Homo sapiens
  misc_RNA (1)...(19): siRNA sense strand
aaguagauauggacaucaa

SEQ ID NO: 1891917 - RNA, 19 nt, Homo sapiens
  misc_RNA (1)...(19): siRNA sense strand
uggugaaccugaacgaaga

SEQ ID NO: 1891918 - RNA, 19 nt, Homo sapiens
  misc_RNA (1)...(19): siRNA sense strand
ggauggagagagaagcauu

SEQ ID NO: 1891919 - RNA, 19 nt, Homo sapiens
  misc_RNA (1)...(19): siRNA sense strand
ugacuacacuagggaaagu

SEQ ID NO: 1891920 - RNA, 19 nt, Homo sapiens
  misc_RNA (1)...(19): siRNA sense strand
ggagccaacaucaauaagu

SEQ ID NO: 1891921 - RNA, 19 nt, Homo sapiens
  misc_RNA (1)...(19): siRNA sense strand
ucaguaagaucaguuuggu

SEQ ID NO: 1891922 - RNA, 19 nt, Homo sapiens
  misc_RNA (1)...(19): siRNA sense strand
ggagaaggucaguaagauc

SEQ ID NO: 1891923 - RNA, 19 nt, Homo sapiens
  misc_RNA (1)...(19): siRNA sense strand
gugcucagcuauccuacuc

SEQ ID NO: 1891924 - RNA, 19 nt, Homo sapiens
  misc_RNA (1)...(19): siRNA sense strand
cugcugacaucaauuacga

SEQ ID NO: 1891925 - RNA, 19 nt, Homo sapiens
  misc_RNA (1)...(19): siRNA sense strand
uggcugaccugaagaugca

SEQ ID NO: 1891926 - RNA, 19 nt, Homo sapiens
  misc_RNA (1)...(19): siRNA sense strand
aaucaguaccggaaagaaa

SEQ ID NO: 1891927 - RNA, 19 nt, Homo sapiens
  misc_RNA (1)...(19): siRNA sense strand
ccugagcccugcugacauc

SEQ ID NO: 1891928 - RNA, 19 nt, Homo sapiens
  misc_RNA (1)...(19): siRNA sense strand
gaggugaagcugcagaaca

SEQ ID NO: 1891929 - RNA, 19 nt, Homo sapiens
  misc_RNA (1)...(19): siRNA sense strand
ggagaaucaguaccggaaa

SEQ ID NO: 1891930 - RNA, 19 nt, Homo sapiens
  misc_RNA (1)...(19): siRNA sense strand
ggagcugagacauauguga

SEQ ID NO: 1891931 - RNA, 19 nt, Homo sapiens
  misc_RNA (1)...(19): siRNA sense strand
caccagggucggccaagua

SEQ ID NO: 1891932 - RNA, 19 nt, Homo sapiens
  misc_RNA (1)...(19): siRNA sense strand
ccaagcaaauccgcugcaa

SEQ ID NO: 1891933 - RNA, 19 nt, Homo sapiens
  misc_RNA (1)...(19): siRNA sense strand
ccucauggacuguggaaau

SEQ ID NO: 1891934 - RNA, 19 nt, Homo sapiens
  misc_RNA (1)...(19): siRNA sense strand
ucgcaggguuuaucagauc

SEQ ID NO: 1891935 - RNA, 19 nt, Homo sapiens
  misc_RNA (1)...(19): siRNA sense strand
agcaaggcaucgacauaaa

SEQ ID NO: 1891936 - RNA, 19 nt, Homo sapiens
  misc_RNA (1)...(19): siRNA sense strand
caagcugaccggacaguuc

SEQ ID NO: 1891937 - RNA, 19 nt, Homo sapiens
  misc_RNA (1)...(19): siRNA sense strand
gauggagagagaagcauug

SEQ ID NO: 1891938 - RNA, 19 nt, Homo sapiens
  misc_RNA (1)...(19): siRNA sense strand
cagauaugcaaucaaagaa

SEQ ID NO: 1891939 - RNA, 19 nt, Homo sapiens
  misc_RNA (1)...(19): siRNA sense strand
gcuacaacgugugcaucuu

SEQ ID NO: 1891940 - RNA, 19 nt, Homo sapiens
  misc_RNA (1)...(19): siRNA sense strand
ugucugcucuaccacauca

SEQ ID NO: 1891941 - RNA, 19 nt, Homo sapiens
  misc_RNA (1)...(19): siRNA sense strand
aaggagccaacaucaauaa

SEQ ID NO: 1891942 - RNA, 19 nt, Homo sapiens
  misc_RNA (1)...(19): siRNA sense strand
uacaacgugugcaucuuug

SEQ ID NO: 1891943 - RNA, 19 nt, Homo sapiens
  misc_RNA (1)...(19): siRNA sense strand
gcugaccgcaccaagcaaa

SEQ ID NO: 1891944 - RNA, 19 nt, Homo sapiens
  misc_RNA (1)...(19): siRNA sense strand
acucggagaaggucaguaa

SEQ ID NO: 1891945 - RNA, 19 nt, Homo sapiens
  misc_RNA (1)...(19): siRNA sense strand
gaagcuacgcaagacagaa

SEQ ID NO: 1891946 - RNA, 19 nt, Homo sapiens
  misc_RNA (1)...(19): siRNA sense strand
gugaaugggaagcuuguga

SEQ ID NO: 1891947 - RNA, 19 nt, Homo sapiens
  misc_RNA (1)...(19): siRNA sense strand
agacagaagcccugaggau

SEQ ID NO: 1891948 - RNA, 19 nt, Homo sapiens
  misc_RNA (1)...(19): siRNA sense strand
gaaucaguaccggaaagaa

SEQ ID NO: 1891949 - RNA, 19 nt, Homo sapiens
  misc_RNA (1)...(19): siRNA sense strand
caauggagcugugaucaaa

SEQ ID NO: 1891950 - RNA, 19 nt, Homo sapiens
  misc_RNA (1)...(19): siRNA sense strand
gcaccaagacuuccuucua

SEQ ID NO: 1891951 - RNA, 19 nt, Homo sapiens
  misc_RNA (1)...(19): siRNA sense strand
caaaguugauuaacacaca

SEQ ID NO: 1891952 - RNA, 19 nt, Homo sapiens
  misc_RNA (1)...(19): siRNA sense strand
ccacaucauuugaagcauu

SEQ ID NO: 1891953 - RNA, 19 nt, Homo sapiens
  misc_RNA (1)...(19): siRNA sense strand
caccaagacuuccuucuau

SEQ ID NO: 1891954 - RNA, 19 nt, Homo sapiens
  misc_RNA (1)...(19): siRNA sense strand
ggacaccacaucauuugaa

SEQ ID NO: 1891955 - RNA, 19 nt, Homo sapiens
  misc_RNA (1)...(19): siRNA sense strand
caacaucgaugcccaugac

SEQ ID NO: 1891956 - RNA, 19 nt, Homo sapiens
  misc_RNA (1)...(19): siRNA sense strand
agacuuccuucuaugguuu

SEQ ID NO: 1891957 - RNA, 19 nt, Homo sapiens
  misc_RNA (1)...(19): siRNA sense strand
ggucagugccuauggauuc

SEQ ID NO: 1891958 - RNA, 19 nt, Homo sapiens
  misc_RNA (1)...(19): siRNA sense strand
gacuauguauucagacuca

SEQ ID NO: 1891959 - RNA, 19 nt, Homo sapiens
  misc_RNA (1)...(19): siRNA sense strand
acaagcaacuacuggaaau

SEQ ID NO: 1891960 - RNA, 19 nt, Homo sapiens
  misc_RNA (1)...(19): siRNA sense strand
ccaugacuauguauucaga

SEQ ID NO: 1891961 - RNA, 19 nt, Homo sapiens
  misc_RNA (1)...(19): siRNA sense strand
agaacucccucgucuccua

SEQ ID NO: 1891962 - RNA, 19 nt, Homo sapiens
  misc_RNA (1)...(19): siRNA sense strand
gaagcauucuuucaaucca

SEQ ID NO: 1891963 - RNA, 19 nt, Homo sapiens
  misc_RNA (1)...(19): siRNA sense strand
agaagccucugccaguaaa

SEQ ID NO: 1891964 - RNA, 19 nt, Homo sapiens
  misc_RNA (1)...(19): siRNA sense strand
ccagggacaccacaucauu

SEQ ID NO: 1891965 - RNA, 19 nt, Homo sapiens
  misc_RNA (1)...(19): siRNA sense strand
ccucagacauccgcgacua

SEQ ID NO: 1891966 - RNA, 19 nt, Homo sapiens
  misc_RNA (1)...(19): siRNA sense strand
cgaccacuauuucgaacga

SEQ ID NO: 1891967 - RNA, 19 nt, Homo sapiens
  misc_RNA (1)...(19): siRNA sense strand
gcccaugacuauguauuca

SEQ ID NO: 1891968 - RNA, 19 nt, Homo sapiens
  misc_RNA (1)...(19): siRNA sense strand
gccuauggauucaucacaa

SEQ ID NO: 1891969 - RNA, 19 nt, Homo sapiens
  misc_RNA (1)...(19): siRNA sense strand
caucgaugcccaugacuau

SEQ ID NO: 1891970 - RNA, 19 nt, Homo sapiens
  misc_RNA (1)...(19): siRNA sense strand
cgaugcccaugacuaugua

SEQ ID NO: 1891971 - RNA, 19 nt, Homo sapiens
  misc_RNA (1)...(19): siRNA sense strand
ugaacacgaugaagaacuc

SEQ ID NO: 1891972 - RNA, 19 nt, Homo sapiens
  misc_RNA (1)...(19): siRNA sense strand
gaccugcaguauaucuuca

SEQ ID NO: 1891973 - RNA, 19 nt, Homo sapiens
  misc_RNA (1)...(19): siRNA sense strand
aagcaacuacuggaaauuu

SEQ ID NO: 1891974 - RNA, 19 nt, Homo sapiens
  misc_RNA (1)...(19): siRNA sense strand
ccaggucagugccuaugga

SEQ ID NO: 1891975 - RNA, 19 nt, Homo sapiens
  misc_RNA (1)...(19): siRNA sense strand
gaugugggcaccaagacuu

SEQ ID NO: 1891976 - RNA, 19 nt, Homo sapiens
  misc_RNA (1)...(19): siRNA sense strand
ggaccugcaguauaucuuc

SEQ ID NO: 1891977 - RNA, 19 nt, Homo sapiens
  misc_RNA (1)...(19): siRNA sense strand
gacaccacaucauuugaag

SEQ ID NO: 1891978 - RNA, 19 nt, Homo sapiens
  misc_RNA (1)...(19): siRNA sense strand
cagcuuugcauaccuguga

SEQ ID NO: 1891979 - RNA, 19 nt, Homo sapiens
  misc_RNA (1)...(19): siRNA sense strand
ccuguucaaucucuccauu

SEQ ID NO: 1891980 - RNA, 19 nt, Homo sapiens
  misc_RNA (1)...(19): siRNA sense strand
ucacaagcaacuacuggaa

SEQ ID NO: 1891981 - RNA, 19 nt, Homo sapiens
  misc_RNA (1)...(19): siRNA sense strand
cacaucauuugaagcauuc

SEQ ID NO: 1891982 - RNA, 19 nt, Homo sapiens
  misc_RNA (1)...(19): siRNA sense strand
cagggacaccacaucauuu

SEQ ID NO: 1891983 - RNA, 19 nt, Homo sapiens
  misc_RNA (1)...(19): siRNA sense strand
gagagugccaagcuguuug

SEQ ID NO: 1891984 - RNA, 19 nt, Homo sapiens
  misc_RNA (1)...(19): siRNA sense strand
cacaagcaacuacuggaaa

SEQ ID NO: 1891985 - RNA, 19 nt, Homo sapiens
  misc_RNA (1)...(19): siRNA sense strand
gcucagagagugccaagcu

SEQ ID NO: 1891986 - RNA, 19 nt, Homo sapiens
  misc_RNA (1)...(19): siRNA sense strand
aagacuuccuucuaugguu

SEQ ID NO: 1891987 - RNA, 19 nt, Homo sapiens
  misc_RNA (1)...(19): siRNA sense strand
gcugagaucggccauucug

SEQ ID NO: 1891988 - RNA, 19 nt, Homo sapiens
  misc_RNA (1)...(19): siRNA sense strand
ucaauggagcugugaucaa

SEQ ID NO: 1891989 - RNA, 19 nt, Homo sapiens
  misc_RNA (1)...(19): siRNA sense strand
ggcaacggaggcauucuga

SEQ ID NO: 1891990 - RNA, 19 nt, Homo sapiens
  misc_RNA (1)...(19): siRNA sense strand
gaccuauauaugccuagua

SEQ ID NO: 1891991 - RNA, 19 nt, Homo sapiens
  misc_RNA (1)...(19): siRNA sense strand
gcugcuacauccggacuuc

SEQ ID NO: 1891992 - RNA, 19 nt, Homo sapiens
  misc_RNA (1)...(19): siRNA sense strand
ccaagacuuccuucuaugg

SEQ ID NO: 1891993 - RNA, 19 nt, Homo sapiens
  misc_RNA (1)...(19): siRNA sense strand
gcaacggaggcauucugaa

SEQ ID NO: 1891994 - RNA, 19 nt, Homo sapiens
  misc_RNA (1)...(19): siRNA sense strand
cgaauucuuggacaggaaa

SEQ ID NO: 1891995 - RNA, 19 nt, Homo sapiens
  misc_RNA (1)...(19): siRNA sense strand
uccaaggcaucgaauucuu

SEQ ID NO: 1891996 - RNA, 19 nt, Homo sapiens
  misc_RNA (1)...(19): siRNA sense strand
aagcauucuuucaauccaa

SEQ ID NO: 1891997 - RNA, 19 nt, Homo sapiens
  misc_RNA (1)...(19): siRNA sense strand
caagcaacuacuggaaauu

SEQ ID NO: 1891998 - RNA, 19 nt, Homo sapiens
  misc_RNA (1)...(19): siRNA sense strand
caccacaucauuugaagca

SEQ ID NO: 1891999 - RNA, 19 nt, Homo sapiens
  misc_RNA (1)...(19): siRNA sense strand
ccuauggauucaucacaag

SEQ ID NO: 1892000 - RNA, 19 nt, Homo sapiens
  misc_RNA (1)...(19): siRNA sense strand
ucgaauucuuggacaggaa

SEQ ID NO: 1892001 - RNA, 19 nt, Homo sapiens
  misc_RNA (1)...(19): siRNA sense strand
aauccaaggcaucgaauuc

SEQ ID NO: 1892002 - RNA, 19 nt, Homo sapiens
  misc_RNA (1)...(19): siRNA sense strand
agagagugccaagcuguuu

SEQ ID NO: 1892003 - RNA, 19 nt, Homo sapiens
  misc_RNA (1)...(19): siRNA sense strand
gggacaccacaucauuuga

SEQ ID NO: 1892004 - RNA, 19 nt, Homo sapiens
  misc_RNA (1)...(19): siRNA sense strand
accaagacuuccuucuaug

SEQ ID NO: 1892005 - RNA, 19 nt, Homo sapiens
  misc_RNA (1)...(19): siRNA sense strand
ggauucaucacaagcaacu

SEQ ID NO: 1892006 - RNA, 19 nt, Homo sapiens
  misc_RNA (1)...(19): siRNA sense strand
caagacuuccuucuauggu

SEQ ID NO: 1892007 - RNA, 19 nt, Homo sapiens
  misc_RNA (1)...(19): siRNA sense strand
gcccauauguuguaaagua

SEQ ID NO: 1892008 - RNA, 19 nt, Homo sapiens
  misc_RNA (1)...(19): siRNA sense strand
gaaauugcaaccauucuua

SEQ ID NO: 1892009 - RNA, 19 nt, Homo sapiens
  misc_RNA (1)...(19): siRNA sense strand
uaagagaccugaucacaga

SEQ ID NO: 1892010 - RNA, 19 nt, Homo sapiens
  misc_RNA (1)...(19): siRNA sense strand
ggagaagggucuuauggaa

SEQ ID NO: 1892011 - RNA, 19 nt, Homo sapiens
  misc_RNA (1)...(19): siRNA sense strand
aagcaagacuucaagaaua

SEQ ID NO: 1892012 - RNA, 19 nt, Homo sapiens
  misc_RNA (1)...(19): siRNA sense strand
acaaguaccuguugaauca

SEQ ID NO: 1892013 - RNA, 19 nt, Homo sapiens
  misc_RNA (1)...(19): siRNA sense strand
gaaaguuccucaagaugga

SEQ ID NO: 1892014 - RNA, 19 nt, Homo sapiens
  misc_RNA (1)...(19): siRNA sense strand
ggaaguguauuuaaagcaa

SEQ ID NO: 1892015 - RNA, 19 nt, Homo sapiens
  misc_RNA (1)...(19): siRNA sense strand
ugccaaaccuguaucaaua

SEQ ID NO: 1892016 - RNA, 19 nt, Homo sapiens
  misc_RNA (1)...(19): siRNA sense strand
uggaguggcuggucaguua

SEQ ID NO: 1892017 - RNA, 19 nt, Homo sapiens
  misc_RNA (1)...(19): siRNA sense strand
gaacuuugguccgaugauu

SEQ ID NO: 1892018 - RNA, 19 nt, Homo sapiens
  misc_RNA (1)...(19): siRNA sense strand
aaucagaucuucaggaaau

SEQ ID NO: 1892019 - RNA, 19 nt, Homo sapiens
  misc_RNA (1)...(19): siRNA sense strand
gaaaggacuagaauauuug

SEQ ID NO: 1892020 - RNA, 19 nt, Homo sapiens
  misc_RNA (1)...(19): siRNA sense strand
gaagacaguuugacuaagc

SEQ ID NO: 1892021 - RNA, 19 nt, Homo sapiens
  misc_RNA (1)...(19): siRNA sense strand
gaagaauccugagcagaga

SEQ ID NO: 1892022 - RNA, 19 nt, Homo sapiens
  misc_RNA (1)...(19): siRNA sense strand
gcuggucaguuaacagaua

SEQ ID NO: 1892023 - RNA, 19 nt, Homo sapiens
  misc_RNA (1)...(19): siRNA sense strand
caaggaauccggucaaguu

SEQ ID NO: 1892024 - RNA, 19 nt, Homo sapiens
  misc_RNA (1)...(19): siRNA sense strand
ugaggugauucaagaaaua

SEQ ID NO: 1892025 - RNA, 19 nt, Homo sapiens
  misc_RNA (1)...(19): siRNA sense strand
gaagaagauggaacuauga

SEQ ID NO: 1892026 - RNA, 19 nt, Homo sapiens
  misc_RNA (1)...(19): siRNA sense strand
ggacuacuuugauaagcaa

SEQ ID NO: 1892027 - RNA, 19 nt, Homo sapiens
  misc_RNA (1)...(19): siRNA sense strand
agaagaagauggaacuaug

SEQ ID NO: 1892028 - RNA, 19 nt, Homo sapiens
  misc_RNA (1)...(19): siRNA sense strand
gaacuacagaugcgguuaa

SEQ ID NO: 1892029 - RNA, 19 nt, Homo sapiens
  misc_RNA (1)...(19): siRNA sense strand
cuauggagaucaaagcuaa

SEQ ID NO: 1892030 - RNA, 19 nt, Homo sapiens
  misc_RNA (1)...(19): siRNA sense strand
caugaacccuucccuaugu

SEQ ID NO: 1892031 - RNA, 19 nt, Homo sapiens
  misc_RNA (1)...(19): siRNA sense strand
uaagcagccugaagaaguu

SEQ ID NO: 1892032 - RNA, 19 nt, Homo sapiens
  misc_RNA (1)...(19): siRNA sense strand
ccaaaccuguaucaauauu

SEQ ID NO: 1892033 - RNA, 19 nt, Homo sapiens
  misc_RNA (1)...(19): siRNA sense strand
uaacagauacaauggcaaa

SEQ ID NO: 1892034 - RNA, 19 nt, Homo sapiens
  misc_RNA (1)...(19): siRNA sense strand
ccgaugauuucaccgauuu

SEQ ID NO: 1892035 - RNA, 19 nt, Homo sapiens
  misc_RNA (1)...(19): siRNA sense strand
guaaucagaacaugcauga

SEQ ID NO: 1892036 - RNA, 19 nt, Homo sapiens
  misc_RNA (1)...(19): siRNA sense strand
agaaauggcugaaggaaaa

SEQ ID NO: 1892037 - RNA, 19 nt, Homo sapiens
  misc_RNA (1)...(19): siRNA sense strand
gaccaugauugaacauaau

SEQ ID NO: 1892038 - RNA, 19 nt, Homo sapiens
  misc_RNA (1)...(19): siRNA sense strand
gcugauauacauccaauga

SEQ ID NO: 1892039 - RNA, 19 nt, Homo sapiens
  misc_RNA (1)...(19): siRNA sense strand
ggaauccggucaaguuguc

SEQ ID NO: 1892040 - RNA, 19 nt, Homo sapiens
  misc_RNA (1)...(19): siRNA sense strand
agcaagacuucaagaauaa

SEQ ID NO: 1892041 - RNA, 19 nt, Homo sapiens
  misc_RNA (1)...(19): siRNA sense strand
agaccaugauugaacauaa

SEQ ID NO: 1892042 - RNA, 19 nt, Homo sapiens
  misc_RNA (1)...(19): siRNA sense strand
ugacagcccauauguugua

SEQ ID NO: 1892043 - RNA, 19 nt, Homo sapiens
  misc_RNA (1)...(19): siRNA sense strand
gugaagacaguuugacuaa

SEQ ID NO: 1892044 - RNA, 19 nt, Homo sapiens
  misc_RNA (1)...(19): siRNA sense strand
caaccauucuuaaaucuac

SEQ ID NO: 1892045 - RNA, 19 nt, Homo sapiens
  misc_RNA (1)...(19): siRNA sense strand
ugacuaagcagccugaaga

SEQ ID NO: 1892046 - RNA, 19 nt, Homo sapiens
  misc_RNA (1)...(19): siRNA sense strand
gcaaaacgcaauacuguaa

SEQ ID NO: 1892047 - RNA, 19 nt, Homo sapiens
  misc_RNA (1)...(19): siRNA sense strand
gaucaaagcuaaaagacau

SEQ ID NO: 1892048 - RNA, 19 nt, Homo sapiens
  misc_RNA (1)...(19): siRNA sense strand
caagaaugccaaaccugua

SEQ ID NO: 1892049 - RNA, 19 nt, Homo sapiens
  misc_RNA (1)...(19): siRNA sense strand
ccacaagcacgaugaguga

SEQ ID NO: 1892050 - RNA, 19 nt, Homo sapiens
  misc_RNA (1)...(19): siRNA sense strand
cagaagcuauggagaucaa

SEQ ID NO: 1892051 - RNA, 19 nt, Homo sapiens
  misc_RNA (1)...(19): siRNA sense strand
guaaaguacuauggcaguu

SEQ ID NO: 1892052 - RNA, 19 nt, Homo sapiens
  misc_RNA (1)...(19): siRNA sense strand
uaaaguacuauggcaguua

SEQ ID NO: 1892053 - RNA, 19 nt, Homo sapiens
  misc_RNA (1)...(19): siRNA sense strand
aaaguacuauggcaguuau

SEQ ID NO: 1892054 - RNA, 19 nt, Homo sapiens
  misc_RNA (1)...(19): siRNA sense strand
ggaugaagaugagcuggau

SEQ ID NO: 1892055 - RNA, 19 nt, Homo sapiens
  misc_RNA (1)...(19): siRNA sense strand
cgaaacaagacauuaauag

SEQ ID NO: 1892056 - RNA, 19 nt, Homo sapiens
  misc_RNA (1)...(19): siRNA sense strand
gucaaguugucgcaauuaa

SEQ ID NO: 1892057 - RNA, 19 nt, Homo sapiens
  misc_RNA (1)...(19): siRNA sense strand
agaagggucuuauggaagu

SEQ ID NO: 1892058 - RNA, 19 nt, Homo sapiens
  misc_RNA (1)...(19): siRNA sense strand
uuaaagcaauacacaagga

SEQ ID NO: 1892059 - RNA, 19 nt, Homo sapiens
  misc_RNA (1)...(19): siRNA sense strand
gaagauggaacuaugaaaa

SEQ ID NO: 1892060 - RNA, 19 nt, Homo sapiens
  misc_RNA (1)...(19): siRNA sense strand
ggaagaagaagauggaacu

SEQ ID NO: 1892061 - RNA, 19 nt, Homo sapiens
  misc_RNA (1)...(19): siRNA sense strand
gcaaccauucuuaaaucua

SEQ ID NO: 1892062 - RNA, 19 nt, Homo sapiens
  misc_RNA (1)...(19): siRNA sense strand
gcaugaacccuucccuaug

SEQ ID NO: 1892063 - RNA, 19 nt, Homo sapiens
  misc_RNA (1)...(19): siRNA sense strand
caaauccaccaccaacauu

SEQ ID NO: 1892064 - RNA, 19 nt, Homo sapiens
  misc_RNA (1)...(19): siRNA sense strand
gagagcuacugcaacacaa

SEQ ID NO: 1892065 - RNA, 19 nt, Homo sapiens
  misc_RNA (1)...(19): siRNA sense strand
gaacuucgucagagauaca

SEQ ID NO: 1892066 - RNA, 19 nt, Homo sapiens
  misc_RNA (1)...(19): siRNA sense strand
agauggagacuuugacuuu

SEQ ID NO: 1892067 - RNA, 19 nt, Homo sapiens
  misc_RNA (1)...(19): siRNA sense strand
uaagcaagacuucaagaau

SEQ ID NO: 1892068 - RNA, 19 nt, Homo sapiens
  misc_RNA (1)...(19): siRNA sense strand
gaagaagaagauggaacua

SEQ ID NO: 1892069 - RNA, 19 nt, Homo sapiens
  misc_RNA (1)...(19): siRNA sense strand
gaacagcaacgagaauugg

SEQ ID NO: 1892070 - RNA, 19 nt, Homo sapiens
  misc_RNA (1)...(19): siRNA sense strand
ggucaaguugucgcaauua

SEQ ID NO: 1892071 - RNA, 19 nt, Homo sapiens
  misc_RNA (1)...(19): siRNA sense strand
ucaguuaacagauacaaug

SEQ ID NO: 1892072 - RNA, 19 nt, Homo sapiens
  misc_RNA (1)...(19): siRNA sense strand
gcaaugugacagcccauau

SEQ ID NO: 1892073 - RNA, 19 nt, Homo sapiens
  misc_RNA (1)...(19): siRNA sense strand
uguaauaggaacuccauuu

SEQ ID NO: 1892074 - RNA, 19 nt, Homo sapiens
  misc_RNA (1)...(19): siRNA sense strand
agaaggacaugcaaaauug

SEQ ID NO: 1892075 - RNA, 19 nt, Homo sapiens
  misc_RNA (1)...(19): siRNA sense strand
gcgccuaagaguaaacuaa

SEQ ID NO: 1892076 - RNA, 19 nt, Homo sapiens
  misc_RNA (1)...(19): siRNA sense strand
gaugaaauugcaaccauuc

SEQ ID NO: 1892077 - RNA, 19 nt, Homo sapiens
  misc_RNA (1)...(19): siRNA sense strand
uggaugcgauggaugcaaa

SEQ ID NO: 1892078 - RNA, 19 nt, Homo sapiens
  misc_RNA (1)...(19): siRNA sense strand
gauaaacagugaggaugag

SEQ ID NO: 1892079 - RNA, 19 nt, Homo sapiens
  misc_RNA (1)...(19): siRNA sense strand
ggaccauggugauaaacag

SEQ ID NO: 1892080 - RNA, 19 nt, Homo sapiens
  misc_RNA (1)...(19): siRNA sense strand
gauguuggaauccgacuug

SEQ ID NO: 1892081 - RNA, 19 nt, Homo sapiens
  misc_RNA (1)...(19): siRNA sense strand
ucacagaagcuauggagau

SEQ ID NO: 1892082 - RNA, 19 nt, Homo sapiens
  misc_RNA (1)...(19): siRNA sense strand
ggaacgggagauagaagaa

SEQ ID NO: 1892083 - RNA, 19 nt, Homo sapiens
  misc_RNA (1)...(19): siRNA sense strand
ugcgauggaugcaaagaaa

SEQ ID NO: 1892084 - RNA, 19 nt, Homo sapiens
  misc_RNA (1)...(19): siRNA sense strand
ugugacagcccauauguug

SEQ ID NO: 1892085 - RNA, 19 nt, Homo sapiens
  misc_RNA (1)...(19): siRNA sense strand
gauaagcaagacuucaaga

SEQ ID NO: 1892086 - RNA, 19 nt, Homo sapiens
  misc_RNA (1)...(19): siRNA sense strand
caucuuucauggacuacuu

SEQ ID NO: 1892087 - RNA, 19 nt, Homo sapiens
  misc_RNA (1)...(19): siRNA sense strand
ccaccaacauucagaaagc

SEQ ID NO: 1892088 - RNA, 19 nt, Homo sapiens
  misc_RNA (1)...(19): siRNA sense strand
acgcaauacuguaauagga

SEQ ID NO: 1892089 - RNA, 19 nt, Homo sapiens
  misc_RNA (1)...(19): siRNA sense strand
gaucuucaggaaauaauca

SEQ ID NO: 1892090 - RNA, 19 nt, Homo sapiens
  misc_RNA (1)...(19): siRNA sense strand
gagauacacugcgaaaaga

SEQ ID NO: 1892091 - RNA, 19 nt, Homo sapiens
  misc_RNA (1)...(19): siRNA sense strand
ugucgcaauuaaacaagua

SEQ ID NO: 1892092 - RNA, 19 nt, Homo sapiens
  misc_RNA (1)...(19): siRNA sense strand
ccauaaugcagcaauguga

SEQ ID NO: 1892093 - RNA, 19 nt, Homo sapiens
  misc_RNA (1)...(19): siRNA sense strand
uucauggacuacuuugaua

SEQ ID NO: 1892094 - RNA, 19 nt, Homo sapiens
  misc_RNA (1)...(19): siRNA sense strand
cuccugaggugauucaaga

SEQ ID NO: 1892095 - RNA, 19 nt, Homo sapiens
  misc_RNA (1)...(19): siRNA sense strand
ggauuguuauggaguacug

SEQ ID NO: 1892096 - RNA, 19 nt, Homo sapiens
  misc_RNA (1)...(19): siRNA sense strand
uugcaaccauucuuaaauc

SEQ ID NO: 1892097 - RNA, 19 nt, Homo sapiens
  misc_RNA (1)...(19): siRNA sense strand
cuaagcagccugaagaagu

SEQ ID NO: 1892098 - RNA, 19 nt, Homo sapiens
  misc_RNA (1)...(19): siRNA sense strand
ugauaaacagugaggauga

SEQ ID NO: 1892099 - RNA, 19 nt, Homo sapiens
  misc_RNA (1)...(19): siRNA sense strand
ccauggugauaaacaguga

SEQ ID NO: 1892100 - RNA, 19 nt, Homo sapiens
  misc_RNA (1)...(19): siRNA sense strand
cagcccauauguuguaaag

SEQ ID NO: 1892101 - RNA, 19 nt, Homo sapiens
  misc_RNA (1)...(19): siRNA sense strand
cacagaagcuauggagauc

SEQ ID NO: 1892102 - RNA, 19 nt, Homo sapiens
  misc_RNA (1)...(19): siRNA sense strand
caucuggucccuuggcauu

SEQ ID NO: 1892103 - RNA, 19 nt, Homo sapiens
  misc_RNA (1)...(19): siRNA sense strand
caaguugucgcaauuaaac

SEQ ID NO: 1892104 - RNA, 19 nt, Homo sapiens
  misc_RNA (1)...(19): siRNA sense strand
agaugaaauugcaaccauu

SEQ ID NO: 1892105 - RNA, 19 nt, Homo sapiens
  misc_RNA (1)...(19): siRNA sense strand
aagaugaaauugcaaccau

SEQ ID NO: 1892106 - RNA, 19 nt, Homo sapiens
  misc_RNA (1)...(19): siRNA sense strand
ucagagauacacugcgaaa

SEQ ID NO: 1892107 - RNA, 19 nt, Homo sapiens
  misc_RNA (1)...(19): siRNA sense strand
ccaagaagcugauaauuga

SEQ ID NO: 1892108 - RNA, 19 nt, Homo sapiens
  misc_RNA (1)...(19): siRNA sense strand
gaacaaguccacuaaauuu

SEQ ID NO: 1892109 - RNA, 19 nt, Homo sapiens
  misc_RNA (1)...(19): siRNA sense strand
gaagagaaguuuaauaugg

SEQ ID NO: 1892110 - RNA, 19 nt, Homo sapiens
  misc_RNA (1)...(19): siRNA sense strand
gaacaaacacguuauaaga

SEQ ID NO: 1892111 - RNA, 19 nt, Homo sapiens
  misc_RNA (1)...(19): siRNA sense strand
gcaauaggcuuaaacaauc

SEQ ID NO: 1892112 - RNA, 19 nt, Homo sapiens
  misc_RNA (1)...(19): siRNA sense strand
gcaaaccagucauuuauau

SEQ ID NO: 1892113 - RNA, 19 nt, Homo sapiens
  misc_RNA (1)...(19): siRNA sense strand
caaaagagcucaaaucuga

SEQ ID NO: 1892114 - RNA, 19 nt, Homo sapiens
  misc_RNA (1)...(19): siRNA sense strand
gaacaaagcuagagaugac

SEQ ID NO: 1892115 - RNA, 19 nt, Homo sapiens
  misc_RNA (1)...(19): siRNA sense strand
gaaguucuauggaaaguga

SEQ ID NO: 1892116 - RNA, 19 nt, Homo sapiens
  misc_RNA (1)...(19): siRNA sense strand
gaaauccaaggcaauauua

SEQ ID NO: 1892117 - RNA, 19 nt, Homo sapiens
  misc_RNA (1)...(19): siRNA sense strand
gaccaacccuuuauacuug

SEQ ID NO: 1892118 - RNA, 19 nt, Homo sapiens
  misc_RNA (1)...(19): siRNA sense strand
ggaaaucaguaauaugaga

SEQ ID NO: 1892119 - RNA, 19 nt, Homo sapiens
  misc_RNA (1)...(19): siRNA sense strand
gcaacgaucuugugucugu

SEQ ID NO: 1892120 - RNA, 19 nt, Homo sapiens
  misc_RNA (1)...(19): siRNA sense strand
agaaagagaugcuuaugaa

SEQ ID NO: 1892121 - RNA, 19 nt, Homo sapiens
  misc_RNA (1)...(19): siRNA sense strand
gagaauauauggucugcuu

SEQ ID NO: 1892122 - RNA, 19 nt, Homo sapiens
  misc_RNA (1)...(19): siRNA sense strand
gaauguaaaccuucucaua

SEQ ID NO: 1892123 - RNA, 19 nt, Homo sapiens
  misc_RNA (1)...(19): siRNA sense strand
gaggaaaucaguaauauga

SEQ ID NO: 1892124 - RNA, 19 nt, Homo sapiens
  misc_RNA (1)...(19): siRNA sense strand
gaugagcuauuaaagauug

SEQ ID NO: 1892125 - RNA, 19 nt, Homo sapiens
  misc_RNA (1)...(19): siRNA sense strand
gaguuuaccuugcaaaguu

SEQ ID NO: 1892126 - RNA, 19 nt, Homo sapiens
  misc_RNA (1)...(19): siRNA sense strand
gagcgaagccagugaagua

SEQ ID NO: 1892127 - RNA, 19 nt, Homo sapiens
  misc_RNA (1)...(19): siRNA sense strand
ugaaugcacuuaacaagaa

SEQ ID NO: 1892128 - RNA, 19 nt, Homo sapiens
  misc_RNA (1)...(19): siRNA sense strand
gaagaugagcuauuaaaga

SEQ ID NO: 1892129 - RNA, 19 nt, Homo sapiens
  misc_RNA (1)...(19): siRNA sense strand
cggcaaacguucauugaua

SEQ ID NO: 1892130 - RNA, 19 nt, Homo sapiens
  misc_RNA (1)...(19): siRNA sense strand
guacaucaaugaagcuauu

SEQ ID NO: 1892131 - RNA, 19 nt, Homo sapiens
  misc_RNA (1)...(19): siRNA sense strand
gcaaaccguuguaacacua

SEQ ID NO: 1892132 - RNA, 19 nt, Homo sapiens
  misc_RNA (1)...(19): siRNA sense strand
gauggaaguuugcuuaguu

SEQ ID NO: 1892133 - RNA, 19 nt, Homo sapiens
  misc_RNA (1)...(19): siRNA sense strand
ccaaaguacugaagaauuc

SEQ ID NO: 1892134 - RNA, 19 nt, Homo sapiens
  misc_RNA (1)...(19): siRNA sense strand
ggaugaagcugcauuacau

SEQ ID NO: 1892135 - RNA, 19 nt, Homo sapiens
  misc_RNA (1)...(19): siRNA sense strand
gauguaauuucacacagua

SEQ ID NO: 1892136 - RNA, 19 nt, Homo sapiens
  misc_RNA (1)...(19): siRNA sense strand
ggagaucaauuaaacuaga

SEQ ID NO: 1892137 - RNA, 19 nt, Homo sapiens
  misc_RNA (1)...(19): siRNA sense strand
uaagagcgauggagucuau

SEQ ID NO: 1892138 - RNA, 19 nt, Homo sapiens
  misc_RNA (1)...(19): siRNA sense strand
uaucauagcuacugaagau

SEQ ID NO: 1892139 - RNA, 19 nt, Homo sapiens
  misc_RNA (1)...(19): siRNA sense strand
ugagaaagguguccugcua

SEQ ID NO: 1892140 - RNA, 19 nt, Homo sapiens
  misc_RNA (1)...(19): siRNA sense strand
gaaguacacugcagcaaag

SEQ ID NO: 1892141 - RNA, 19 nt, Homo sapiens
  misc_RNA (1)...(19): siRNA sense strand
ggacaaggcauauguggaa

SEQ ID NO: 1892142 - RNA, 19 nt, Homo sapiens
  misc_RNA (1)...(19): siRNA sense strand
ggcaaacguucauugauaa

SEQ ID NO: 1892143 - RNA, 19 nt, Homo sapiens
  misc_RNA (1)...(19): siRNA sense strand
gggaacacauugacagaaa

SEQ ID NO: 1892144 - RNA, 19 nt, Homo sapiens
  misc_RNA (1)...(19): siRNA sense strand
guacaugaauccagccauu

SEQ ID NO: 1892145 - RNA, 19 nt, Homo sapiens
  misc_RNA (1)...(19): siRNA sense strand
ccagauggcuuugauauca

SEQ ID NO: 1892146 - RNA, 19 nt, Homo sapiens
  misc_RNA (1)...(19): siRNA sense strand
gaugcaauaugaaggagua

SEQ ID NO: 1892147 - RNA, 19 nt, Homo sapiens
  misc_RNA (1)...(19): siRNA sense strand
ggcagaacauugcuuauga

SEQ ID NO: 1892148 - RNA, 19 nt, Homo sapiens
  misc_RNA (1)...(19): siRNA sense strand
gcagaaauccaaggcaaua

SEQ ID NO: 1892149 - RNA, 19 nt, Homo sapiens
  misc_RNA (1)...(19): siRNA sense strand
gcagaacauugcuuaugaa

SEQ ID NO: 1892150 - RNA, 19 nt, Homo sapiens
  misc_RNA (1)...(19): siRNA sense strand
aggaguagcuguaaugaaa

SEQ ID NO: 1892151 - RNA, 19 nt, Homo sapiens
  misc_RNA (1)...(19): siRNA sense strand
ggagugugcugacaaauac

SEQ ID NO: 1892152 - RNA, 19 nt, Homo sapiens
  misc_RNA (1)...(19): siRNA sense strand
cagaagaaaugaagcauag

SEQ ID NO: 1892153 - RNA, 19 nt, Homo sapiens
  misc_RNA (1)...(19): siRNA sense strand
ggugagccgugcaaugaua

SEQ ID NO: 1892154 - RNA, 19 nt, Homo sapiens
  misc_RNA (1)...(19): siRNA sense strand
aacagaagaugagcuauua

SEQ ID NO: 1892155 - RNA, 19 nt, Homo sapiens
  misc_RNA (1)...(19): siRNA sense strand
ucauauaccugcugaacaa

SEQ ID NO: 1892156 - RNA, 19 nt, Homo sapiens
  misc_RNA (1)...(19): siRNA sense strand
caaaugcgguuuuaacuuu

SEQ ID NO: 1892157 - RNA, 19 nt, Homo sapiens
  misc_RNA (1)...(19): siRNA sense strand
aaucauggcucacaggaaa

SEQ ID NO: 1892158 - RNA, 19 nt, Homo sapiens
  misc_RNA (1)...(19): siRNA sense strand
aggcauauguggaacguua

SEQ ID NO: 1892159 - RNA, 19 nt, Homo sapiens
  misc_RNA (1)...(19): siRNA sense strand
caaagaaucuaucguaagc

SEQ ID NO: 1892160 - RNA, 19 nt, Homo sapiens
  misc_RNA (1)...(19): siRNA sense strand
gauaaauucugaccaaagg

SEQ ID NO: 1892161 - RNA, 19 nt, Homo sapiens
  misc_RNA (1)...(19): siRNA sense strand
gaaucaugcuucuauaaag

SEQ ID NO: 1892162 - RNA, 19 nt, Homo sapiens
  misc_RNA (1)...(19): siRNA sense strand
gaagaagggcuccggaaug

SEQ ID NO: 1892163 - RNA, 19 nt, Homo sapiens
  misc_RNA (1)...(19): siRNA sense strand
ccaaggauauucgaaauca

SEQ ID NO: 1892164 - RNA, 19 nt, Homo sapiens
  misc_RNA (1)...(19): siRNA sense strand
caaguugccuuaugaugug

SEQ ID NO: 1892165 - RNA, 19 nt, Homo sapiens
  misc_RNA (1)...(19): siRNA sense strand
aaacugcucuggaggaaga

SEQ ID NO: 1892166 - RNA, 19 nt, Homo sapiens
  misc_RNA (1)...(19): siRNA sense strand
gaaauguugucugcuguug

SEQ ID NO: 1892167 - RNA, 19 nt, Homo sapiens
  misc_RNA (1)...(19): siRNA sense strand
gaggaggaaaucaguaaua

SEQ ID NO: 1892168 - RNA, 19 nt, Homo sapiens
  misc_RNA (1)...(19): siRNA sense strand
acaaaguccugaauucuau

SEQ ID NO: 1892169 - RNA, 19 nt, Homo sapiens
  misc_RNA (1)...(19): siRNA sense strand
cagaacaaguccacuaaau

SEQ ID NO: 1892170 - RNA, 19 nt, Homo sapiens
  misc_RNA (1)...(19): siRNA sense strand
gaauaucugugccacuuag

SEQ ID NO: 1892171 - RNA, 19 nt, Homo sapiens
  misc_RNA (1)...(19): siRNA sense strand
aaagaucuaugauguggaa

SEQ ID NO: 1892172 - RNA, 19 nt, Homo sapiens
  misc_RNA (1)...(19): siRNA sense strand
gaaguuugcuuaguugaag

SEQ ID NO: 1892173 - RNA, 19 nt, Homo sapiens
  misc_RNA (1)...(19): siRNA sense strand
guucauggcucaaacucaa

SEQ ID NO: 1892174 - RNA, 19 nt, Homo sapiens
  misc_RNA (1)...(19): siRNA sense strand
gccgaagccucaugauaaa

SEQ ID NO: 1892175 - RNA, 19 nt, Homo sapiens
  misc_RNA (1)...(19): siRNA sense strand
uaacaaggcaaauacacua

SEQ ID NO: 1892176 - RNA, 19 nt, Homo sapiens
  misc_RNA (1)...(19): siRNA sense strand
gacaaaguccugaauucua

SEQ ID NO: 1892177 - RNA, 19 nt, Homo sapiens
  misc_RNA (1)...(19): siRNA sense strand
gaauggaguuuaccuugca

SEQ ID NO: 1892178 - RNA, 19 nt, Homo sapiens
  misc_RNA (1)...(19): siRNA sense strand
acacagaccuggugacagu

SEQ ID NO: 1892179 - RNA, 19 nt, Homo sapiens
  misc_RNA (1)...(19): siRNA sense strand
caacagaagaugagcuauu

SEQ ID NO: 1892180 - RNA, 19 nt, Homo sapiens
  misc_RNA (1)...(19): siRNA sense strand
agaauucgauccaugagaa

SEQ ID NO: 1892181 - RNA, 19 nt, Homo sapiens
  misc_RNA (1)...(19): siRNA sense strand
agaacaagcucuaacauac

SEQ ID NO: 1892182 - RNA, 19 nt, Homo sapiens
  misc_RNA (1)...(19): siRNA sense strand
ggaagaguuugaagcuaga

SEQ ID NO: 1892183 - RNA, 19 nt, Homo sapiens
  misc_RNA (1)...(19): siRNA sense strand
gcaguuauagccauuaaug

SEQ ID NO: 1892184 - RNA, 19 nt, Homo sapiens
  misc_RNA (1)...(19): siRNA sense strand
caaagaagcauguaauguc

SEQ ID NO: 1892185 - RNA, 19 nt, Homo sapiens
  misc_RNA (1)...(19): siRNA sense strand
cagaacaagcucuaacaua

SEQ ID NO: 1892186 - RNA, 19 nt, Homo sapiens
  misc_RNA (1)...(19): siRNA sense strand
gaauaacaccgacaaccaa

SEQ ID NO: 1892187 - RNA, 19 nt, Homo sapiens
  misc_RNA (1)...(19): siRNA sense strand
ggagaaauggaaauacuga

SEQ ID NO: 1892188 - RNA, 19 nt, Homo sapiens
  misc_RNA (1)...(19): siRNA sense strand
aagagaugcuuaugaagaa

SEQ ID NO: 1892189 - RNA, 19 nt, Homo sapiens
  misc_RNA (1)...(19): siRNA sense strand
uaacaagaaggcagcauuu

SEQ ID NO: 1892190 - RNA, 19 nt, Homo sapiens
  misc_RNA (1)...(19): siRNA sense strand
uaacauacccagaagugaa

SEQ ID NO: 1892191 - RNA, 19 nt, Homo sapiens
  misc_RNA (1)...(19): siRNA sense strand
gaggagaaauggaaauacu

SEQ ID NO: 1892192 - RNA, 19 nt, Homo sapiens
  misc_RNA (1)...(19): siRNA sense strand
gaaaagaaaucgaggacau

SEQ ID NO: 1892193 - RNA, 19 nt, Homo sapiens
  misc_RNA (1)...(19): siRNA sense strand
gaaaugaagcauagccaau

SEQ ID NO: 1892194 - RNA, 19 nt, Homo sapiens
  misc_RNA (1)...(19): siRNA sense strand
ccacuaaauuuauggauac

SEQ ID NO: 1892195 - RNA, 19 nt, Homo sapiens
  misc_RNA (1)...(19): siRNA sense strand
gaagaaguagugaccaaga

SEQ ID NO: 1892196 - RNA, 19 nt, Homo sapiens
  misc_RNA (1)...(19): siRNA sense strand
caaacacacuacucucugu

SEQ ID NO: 1892197 - RNA, 19 nt, Homo sapiens
  misc_RNA (1)...(19): siRNA sense strand
aaagguguccugcuagaua

SEQ ID NO: 1892198 - RNA, 19 nt, Homo sapiens
  misc_RNA (1)...(19): siRNA sense strand
cagcaaaccagucauuuau

SEQ ID NO: 1892199 - RNA, 19 nt, Homo sapiens
  misc_RNA (1)...(19): siRNA sense strand
aaagguggauggaaguuug

SEQ ID NO: 1892200 - RNA, 19 nt, Homo sapiens
  misc_RNA (1)...(19): siRNA sense strand
guccugaauucuaucauuu

SEQ ID NO: 1892201 - RNA, 19 nt, Homo sapiens
  misc_RNA (1)...(19): siRNA sense strand
caaguccacuaaauuuaug

SEQ ID NO: 1892202 - RNA, 19 nt, Homo sapiens
  misc_RNA (1)...(19): siRNA sense strand
gggaagaaguagugaccaa

SEQ ID NO: 1892203 - RNA, 19 nt, Homo sapiens
  misc_RNA (1)...(19): siRNA sense strand
ccaagggcaagauaacuua

SEQ ID NO: 1892204 - RNA, 19 nt, Homo sapiens
  misc_RNA (1)...(19): siRNA sense strand
uuggaaaccuccuguacua

SEQ ID NO: 1892205 - RNA, 19 nt, Homo sapiens
  misc_RNA (1)...(19): siRNA sense strand
ggaacacauugacagaaau

SEQ ID NO: 1892206 - RNA, 19 nt, Homo sapiens
  misc_RNA (1)...(19): siRNA sense strand
agaggacggugaagcuaua

SEQ ID NO: 1892207 - RNA, 19 nt, Homo sapiens
  misc_RNA (1)...(19): siRNA sense strand
gggaauaacugccauagaa

SEQ ID NO: 1892208 - RNA, 19 nt, Homo sapiens
  misc_RNA (1)...(19): siRNA sense strand
ccagagcuauggucagaua

SEQ ID NO: 1892209 - RNA, 19 nt, Homo sapiens
  misc_RNA (1)...(19): siRNA sense strand
gaaacagugucuuguaaag

SEQ ID NO: 1892210 - RNA, 19 nt, Homo sapiens
  misc_RNA (1)...(19): siRNA sense strand
caaacaaccagaagaagua

SEQ ID NO: 1892211 - RNA, 19 nt, Homo sapiens
  misc_RNA (1)...(19): siRNA sense strand
gugaaacagugucuuguaa

SEQ ID NO: 1892212 - RNA, 19 nt, Homo sapiens
  misc_RNA (1)...(19): siRNA sense strand
gaugggcacuguccgagua

SEQ ID NO: 1892213 - RNA, 19 nt, Homo sapiens
  misc_RNA (1)...(19): siRNA sense strand
gaagaggaaggaacuauga

SEQ ID NO: 1892214 - RNA, 19 nt, Homo sapiens
  misc_RNA (1)...(19): siRNA sense strand
gaagagauccggcagaagu

SEQ ID NO: 1892215 - RNA, 19 nt, Homo sapiens
  misc_RNA (1)...(19): siRNA sense strand
ggauggagacuacgaguuu

SEQ ID NO: 1892216 - RNA, 19 nt, Homo sapiens
  misc_RNA (1)...(19): siRNA sense strand
gcaggucaacuuacagaua

SEQ ID NO: 1892217 - RNA, 19 nt, Homo sapiens
  misc_RNA (1)...(19): siRNA sense strand
agaaauggcugaaggaaag

SEQ ID NO: 1892218 - RNA, 19 nt, Homo sapiens
  misc_RNA (1)...(19): siRNA sense strand
gaagaaguauuugaugucu

SEQ ID NO: 1892219 - RNA, 19 nt, Homo sapiens
  misc_RNA (1)...(19): siRNA sense strand
gcugauauccauccaauga

SEQ ID NO: 1892220 - RNA, 19 nt, Homo sapiens
  misc_RNA (1)...(19): siRNA sense strand
cagaagaaguauuugaugu

SEQ ID NO: 1892221 - RNA, 19 nt, Homo sapiens
  misc_RNA (1)...(19): siRNA sense strand
gcccucauguagucaaaua

SEQ ID NO: 1892222 - RNA, 19 nt, Homo sapiens
  misc_RNA (1)...(19): siRNA sense strand
ugacagcccucauguaguc

SEQ ID NO: 1892223 - RNA, 19 nt, Homo sapiens
  misc_RNA (1)...(19): siRNA sense strand
ggaauaacugccauagaaa

SEQ ID NO: 1892224 - RNA, 19 nt, Homo sapiens
  misc_RNA (1)...(19): siRNA sense strand
caagcggaauacagugaua

SEQ ID NO: 1892225 - RNA, 19 nt, Homo sapiens
  misc_RNA (1)...(19): siRNA sense strand
uaaagagaccggccagauu

SEQ ID NO: 1892226 - RNA, 19 nt, Homo sapiens
  misc_RNA (1)...(19): siRNA sense strand
ggaccaggacgaugaagaa

SEQ ID NO: 1892227 - RNA, 19 nt, Homo sapiens
  misc_RNA (1)...(19): siRNA sense strand
gcuauggucagauaacuuu

SEQ ID NO: 1892228 - RNA, 19 nt, Homo sapiens
  misc_RNA (1)...(19): siRNA sense strand
gaauaacugccauagaaau

SEQ ID NO: 1892229 - RNA, 19 nt, Homo sapiens
  misc_RNA (1)...(19): siRNA sense strand
uaucaaggcaggaaauauu

SEQ ID NO: 1892230 - RNA, 19 nt, Homo sapiens
  misc_RNA (1)...(19): siRNA sense strand
caacagcuuuggcaagagu

SEQ ID NO: 1892231 - RNA, 19 nt, Homo sapiens
  misc_RNA (1)...(19): siRNA sense strand
cagaagugauucaggaaau

SEQ ID NO: 1892232 - RNA, 19 nt, Homo sapiens
  misc_RNA (1)...(19): siRNA sense strand
gguagcaggucaacuuaca

SEQ ID NO: 1892233 - RNA, 19 nt, Homo sapiens
  misc_RNA (1)...(19): siRNA sense strand
caaauccuccucccacauu

SEQ ID NO: 1892234 - RNA, 19 nt, Homo sapiens
  misc_RNA (1)...(19): siRNA sense strand
ggagauaaucaaagaaauc

SEQ ID NO: 1892235 - RNA, 19 nt, Homo sapiens
  misc_RNA (1)...(19): siRNA sense strand
aagaagagacggcaacaaa

SEQ ID NO: 1892236 - RNA, 19 nt, Homo sapiens
  misc_RNA (1)...(19): siRNA sense strand
ggaaggaacuaugaaaaga

SEQ ID NO: 1892237 - RNA, 19 nt, Homo sapiens
  misc_RNA (1)...(19): siRNA sense strand
ggaaauuggauacaacugu

SEQ ID NO: 1892238 - RNA, 19 nt, Homo sapiens
  misc_RNA (1)...(19): siRNA sense strand
gccagauuguugcuauuaa

SEQ ID NO: 1892239 - RNA, 19 nt, Homo sapiens
  misc_RNA (1)...(19): siRNA sense strand
ggagacuacgaguuucuua

SEQ ID NO: 1892240 - RNA, 19 nt, Homo sapiens
  misc_RNA (1)...(19): siRNA sense strand
cugcgagacuuaauuaaug

SEQ ID NO: 1892241 - RNA, 19 nt, Homo sapiens
  misc_RNA (1)...(19): siRNA sense strand
aaaguuggaugaagauagu

SEQ ID NO: 1892242 - RNA, 19 nt, Homo sapiens
  misc_RNA (1)...(19): siRNA sense strand
ggucagauaacuuuacaga

SEQ ID NO: 1892243 - RNA, 19 nt, Homo sapiens
  misc_RNA (1)...(19): siRNA sense strand
aaagagaccggccagauug

SEQ ID NO: 1892244 - RNA, 19 nt, Homo sapiens
  misc_RNA (1)...(19): siRNA sense strand
gauaucaaggcaggaaaua

SEQ ID NO: 1892245 - RNA, 19 nt, Homo sapiens
  misc_RNA (1)...(19): siRNA sense strand
gaagugauucaggaaauug

SEQ ID NO: 1892246 - RNA, 19 nt, Homo sapiens
  misc_RNA (1)...(19): siRNA sense strand
aaccauccuuucuugaaua

SEQ ID NO: 1892247 - RNA, 19 nt, Homo sapiens
  misc_RNA (1)...(19): siRNA sense strand
agaagaggaugaaauggau

SEQ ID NO: 1892248 - RNA, 19 nt, Homo sapiens
  misc_RNA (1)...(19): siRNA sense strand
ccaaaggagugucaauacu

SEQ ID NO: 1892249 - RNA, 19 nt, Homo sapiens
  misc_RNA (1)...(19): siRNA sense strand
gcaggagauugaagagauc

SEQ ID NO: 1892250 - RNA, 19 nt, Homo sapiens
  misc_RNA (1)...(19): siRNA sense strand
gaagaugaaauagcuacaa

SEQ ID NO: 1892251 - RNA, 19 nt, Homo sapiens
  misc_RNA (1)...(19): siRNA sense strand
cauagaggcuaagaagaga

SEQ ID NO: 1892252 - RNA, 19 nt, Homo sapiens
  misc_RNA (1)...(19): siRNA sense strand
gagacuacgaguuucuuaa

SEQ ID NO: 1892253 - RNA, 19 nt, Homo sapiens
  misc_RNA (1)...(19): siRNA sense strand
acagacuuauggaucguua

SEQ ID NO: 1892254 - RNA, 19 nt, Homo sapiens
  misc_RNA (1)...(19): siRNA sense strand
aaaccauccuuucuugaau

SEQ ID NO: 1892255 - RNA, 19 nt, Homo sapiens
  misc_RNA (1)...(19): siRNA sense strand
ggaagaggaaggaacuaug

SEQ ID NO: 1892256 - RNA, 19 nt, Homo sapiens
  misc_RNA (1)...(19): siRNA sense strand
ccauggaugugaaacugaa

SEQ ID NO: 1892257 - RNA, 19 nt, Homo sapiens
  misc_RNA (1)...(19): siRNA sense strand
ggccagauuguugcuauua

SEQ ID NO: 1892258 - RNA, 19 nt, Homo sapiens
  misc_RNA (1)...(19): siRNA sense strand
gacuacgaguuucuuaaga

SEQ ID NO: 1892259 - RNA, 19 nt, Homo sapiens
  misc_RNA (1)...(19): siRNA sense strand
caggagauaaucaaagaaa

SEQ ID NO: 1892260 - RNA, 19 nt, Homo sapiens
  misc_RNA (1)...(19): siRNA sense strand
uccaggagauaaucaaaga

SEQ ID NO: 1892261 - RNA, 19 nt, Homo sapiens
  misc_RNA (1)...(19): siRNA sense strand
ggugaucaaugcagaggau

SEQ ID NO: 1892262 - RNA, 19 nt, Homo sapiens
  misc_RNA (1)...(19): siRNA sense strand
gauggagccaauacuauga

SEQ ID NO: 1892263 - RNA, 19 nt, Homo sapiens
  misc_RNA (1)...(19): siRNA sense strand
auacugcgagacuuaauua

SEQ ID NO: 1892264 - RNA, 19 nt, Homo sapiens
  misc_RNA (1)...(19): siRNA sense strand
caaaggagugucaauacug

SEQ ID NO: 1892265 - RNA, 19 nt, Homo sapiens
  misc_RNA (1)...(19): siRNA sense strand
caggucaacuuacagauac

SEQ ID NO: 1892266 - RNA, 19 nt, Homo sapiens
  misc_RNA (1)...(19): siRNA sense strand
ggaugaagauaguuuaacc

SEQ ID NO: 1892267 - RNA, 19 nt, Homo sapiens
  misc_RNA (1)...(19): siRNA sense strand
cagaagaggaugaaaugga

SEQ ID NO: 1892268 - RNA, 19 nt, Homo sapiens
  misc_RNA (1)...(19): siRNA sense strand
acaaccagaagaaguauuu

SEQ ID NO: 1892269 - RNA, 19 nt, Homo sapiens
  misc_RNA (1)...(19): siRNA sense strand
gaaacugaaacgccaggaa

SEQ ID NO: 1892270 - RNA, 19 nt, Homo sapiens
  misc_RNA (1)...(19): siRNA sense strand
agaagugauucaggaaauu

SEQ ID NO: 1892271 - RNA, 19 nt, Homo sapiens
  misc_RNA (1)...(19): siRNA sense strand
gugaugagaugggcacugu

SEQ ID NO: 1892272 - RNA, 19 nt, Homo sapiens
  misc_RNA (1)...(19): siRNA sense strand
gucaauacugcgagacuua

SEQ ID NO: 1892273 - RNA, 19 nt, Homo sapiens
  misc_RNA (1)...(19): siRNA sense strand
ccaaugagggcaaucuuca

SEQ ID NO: 1892274 - RNA, 19 nt, Homo sapiens
  misc_RNA (1)...(19): siRNA sense strand
ugauggagcaggagauuga

SEQ ID NO: 1892275 - RNA, 19 nt, Homo sapiens
  misc_RNA (1)...(19): siRNA sense strand
ccaaacaaccagaagaagu

SEQ ID NO: 1892276 - RNA, 19 nt, Homo sapiens
  misc_RNA (1)...(19): siRNA sense strand
gaagaggaugaaauggauu

SEQ ID NO: 1892277 - RNA, 19 nt, Homo sapiens
  misc_RNA (1)...(19): siRNA sense strand
ccagauuguugcuauuaag

SEQ ID NO: 1892278 - RNA, 19 nt, Homo sapiens
  misc_RNA (1)...(19): siRNA sense strand
ugaaacagugucuuguaaa

SEQ ID NO: 1892279 - RNA, 19 nt, Homo sapiens
  misc_RNA (1)...(19): siRNA sense strand
uaaccaaacaaccagaaga

SEQ ID NO: 1892280 - RNA, 19 nt, Homo sapiens
  misc_RNA (1)...(19): siRNA sense strand
acgaguuucuuaagaguug

SEQ ID NO: 1892281 - RNA, 19 nt, Homo sapiens
  misc_RNA (1)...(19): siRNA sense strand
ugucaggagugccaaagga

SEQ ID NO: 1892282 - RNA, 19 nt, Homo sapiens
  misc_RNA (1)...(19): siRNA sense strand
uauggaucguuauggagua

SEQ ID NO: 1892283 - RNA, 19 nt, Homo sapiens
  misc_RNA (1)...(19): siRNA sense strand
ccauagaggcuaagaagag

SEQ ID NO: 1892284 - RNA, 19 nt, Homo sapiens
  misc_RNA (1)...(19): siRNA sense strand
ugcgagacuuaauuaauga

SEQ ID NO: 1892285 - RNA, 19 nt, Homo sapiens
  misc_RNA (1)...(19): siRNA sense strand
ccagaagaaguauuugaug

SEQ ID NO: 1892286 - RNA, 19 nt, Homo sapiens
  misc_RNA (1)...(19): siRNA sense strand
gaagggaugagaccaugca

SEQ ID NO: 1892287 - RNA, 19 nt, Homo sapiens
  misc_RNA (1)...(19): siRNA sense strand
aaacugaaacgccaggaau

SEQ ID NO: 1892288 - RNA, 19 nt, Homo sapiens
  misc_RNA (1)...(19): siRNA sense strand
gagcuauggucagauaacu

SEQ ID NO: 1892289 - RNA, 19 nt, Homo sapiens
  misc_RNA (1)...(19): siRNA sense strand
uugaagagauccggcagaa

SEQ ID NO: 1892290 - RNA, 19 nt, Homo sapiens
  misc_RNA (1)...(19): siRNA sense strand
ggacaguggaggaccuuca

SEQ ID NO: 1892291 - RNA, 19 nt, Homo sapiens
  misc_RNA (1)...(19): siRNA sense strand
ccucauguagucaaauauu

SEQ ID NO: 1892292 - RNA, 19 nt, Homo sapiens
  misc_RNA (1)...(19): siRNA sense strand
gauggagacuacgaguuuc

SEQ ID NO: 1892293 - RNA, 19 nt, Homo sapiens
  misc_RNA (1)...(19): siRNA sense strand
gaaaauaccacaggaugga

SEQ ID NO: 1892294 - RNA, 19 nt, Homo sapiens
  misc_RNA (1)...(19): siRNA sense strand
cgaguagccagcaccauga

SEQ ID NO: 1892295 - RNA, 19 nt, Homo sapiens
  misc_RNA (1)...(19): siRNA sense strand
gagaccggccagauuguug

SEQ ID NO: 1892296 - RNA, 19 nt, Homo sapiens
  misc_RNA (1)...(19): siRNA sense strand
ugagggcaaucuucaugau

SEQ ID NO: 1892297 - RNA, 19 nt, Homo sapiens
  misc_RNA (1)...(19): siRNA sense strand
cggaauacagugauaggaa

SEQ ID NO: 1892298 - RNA, 19 nt, Homo sapiens
  misc_RNA (1)...(19): siRNA sense strand
ugauaucauucgauuacga

SEQ ID NO: 1892299 - RNA, 19 nt, Homo sapiens
  misc_RNA (1)...(19): siRNA sense strand
uaacagaagaugaaauagc

SEQ ID NO: 1892300 - RNA, 19 nt, Homo sapiens
  misc_RNA (1)...(19): siRNA sense strand
cagcguauacaaagcuauu

SEQ ID NO: 1892301 - RNA, 19 nt, Homo sapiens
  misc_RNA (1)...(19): siRNA sense strand
cuacgaguuucuuaagagu

SEQ ID NO: 1892302 - RNA, 19 nt, Homo sapiens
  misc_RNA (1)...(19): siRNA sense strand
uuaaugaagccauggaugu

SEQ ID NO: 1892303 - RNA, 19 nt, Homo sapiens
  misc_RNA (1)...(19): siRNA sense strand
caaagcuauucauaaagag

SEQ ID NO: 1892304 - RNA, 19 nt, Homo sapiens
  misc_RNA (1)...(19): siRNA sense strand
uagaaauggcugaaggaaa

SEQ ID NO: 1892305 - RNA, 19 nt, Homo sapiens
  misc_RNA (1)...(19): siRNA sense strand
ccagaagugauucaggaaa

SEQ ID NO: 1892306 - RNA, 19 nt, Homo sapiens
  misc_RNA (1)...(19): siRNA sense strand
aacagaagaugaaauagcu

SEQ ID NO: 1892307 - RNA, 19 nt, Homo sapiens
  misc_RNA (1)...(19): siRNA sense strand
gaaagugugugagaaaguu

SEQ ID NO: 1892308 - RNA, 19 nt, Homo sapiens
  misc_RNA (1)...(19): siRNA sense strand
gaacuucuccuacagcaaa

SEQ ID NO: 1892309 - RNA, 19 nt, Homo sapiens
  misc_RNA (1)...(19): siRNA sense strand
cacaggaccuucuugguua

SEQ ID NO: 1892310 - RNA, 19 nt, Homo sapiens
  misc_RNA (1)...(19): siRNA sense strand
gcucugaacucuaccauuc

SEQ ID NO: 1892311 - RNA, 19 nt, Homo sapiens
  misc_RNA (1)...(19): siRNA sense strand
cgaaaucccuggugccaaa

SEQ ID NO: 1892312 - RNA, 19 nt, Homo sapiens
  misc_RNA (1)...(19): siRNA sense strand
ugagauccaugaugacaua

SEQ ID NO: 1892313 - RNA, 19 nt, Homo sapiens
  misc_RNA (1)...(19): siRNA sense strand
ccacagagacuaaccaguu

SEQ ID NO: 1892314 - RNA, 19 nt, Homo sapiens
  misc_RNA (1)...(19): siRNA sense strand
acaaugaagucgcugauga

SEQ ID NO: 1892315 - RNA, 19 nt, Homo sapiens
  misc_RNA (1)...(19): siRNA sense strand
guacagagaaaucgacaaa

SEQ ID NO: 1892316 - RNA, 19 nt, Homo sapiens
  misc_RNA (1)...(19): siRNA sense strand
gauccaugaugacauagaa

SEQ ID NO: 1892317 - RNA, 19 nt, Homo sapiens
  misc_RNA (1)...(19): siRNA sense strand
gggaaaggcuugagacacu

SEQ ID NO: 1892318 - RNA, 19 nt, Homo sapiens
  misc_RNA (1)...(19): siRNA sense strand
gugagaaaguucaacgaaa

SEQ ID NO: 1892319 - RNA, 19 nt, Homo sapiens
  misc_RNA (1)...(19): siRNA sense strand
ugucagaguucaccaauuc

SEQ ID NO: 1892320 - RNA, 19 nt, Homo sapiens
  misc_RNA (1)...(19): siRNA sense strand
gaaguggccuuagcaacug

SEQ ID NO: 1892321 - RNA, 19 nt, Homo sapiens
  misc_RNA (1)...(19): siRNA sense strand
gaaaguaaacgaagcaaaa

SEQ ID NO: 1892322 - RNA, 19 nt, Homo sapiens
  misc_RNA (1)...(19): siRNA sense strand
uaaaugugcuaauggcaau

SEQ ID NO: 1892323 - RNA, 19 nt, Homo sapiens
  misc_RNA (1)...(19): siRNA sense strand
cagcugccauucauaauca

SEQ ID NO: 1892324 - RNA, 19 nt, Homo sapiens
  misc_RNA (1)...(19): siRNA sense strand
gcucaggaaugucagaauc

SEQ ID NO: 1892325 - RNA, 19 nt, Homo sapiens
  misc_RNA (1)...(19): siRNA sense strand
ugacauagaaguacuaaag

SEQ ID NO: 1892326 - RNA, 19 nt, Homo sapiens
  misc_RNA (1)...(19): siRNA sense strand
ccacaggaccuucuugguu

SEQ ID NO: 1892327 - RNA, 19 nt, Homo sapiens
  misc_RNA (1)...(19): siRNA sense strand
gcuaauggcaaugaacaua

SEQ ID NO: 1892328 - RNA, 19 nt, Homo sapiens
  misc_RNA (1)...(19): siRNA sense strand
caucuccagugacaaguuu

SEQ ID NO: 1892329 - RNA, 19 nt, Homo sapiens
  misc_RNA (1)...(19): siRNA sense strand
gaacauuaggcgaagaguu

SEQ ID NO: 1892330 - RNA, 19 nt, Homo sapiens
  misc_RNA (1)...(19): siRNA sense strand
caaaugcucucuggaggau

SEQ ID NO: 1892331 - RNA, 19 nt, Homo sapiens
  misc_RNA (1)...(19): siRNA sense strand
gaagaacauuaggcgaaga

SEQ ID NO: 1892332 - RNA, 19 nt, Homo sapiens
  misc_RNA (1)...(19): siRNA sense strand
ccuuugagauccaugauga

SEQ ID NO: 1892333 - RNA, 19 nt, Homo sapiens
  misc_RNA (1)...(19): siRNA sense strand
ggauagaacggauaaagca

SEQ ID NO: 1892334 - RNA, 19 nt, Homo sapiens
  misc_RNA (1)...(19): siRNA sense strand
aaaacgggcuagaaaauuu

SEQ ID NO: 1892335 - RNA, 19 nt, Homo sapiens
  misc_RNA (1)...(19): siRNA sense strand
caaugaaagugugugagaa

SEQ ID NO: 1892336 - RNA, 19 nt, Homo sapiens
  misc_RNA (1)...(19): siRNA sense strand
ggaaaggcuugagacacuu

SEQ ID NO: 1892337 - RNA, 19 nt, Homo sapiens
  misc_RNA (1)...(19): siRNA sense strand
gaguucaccaauucaaaua

SEQ ID NO: 1892338 - RNA, 19 nt, Homo sapiens
  misc_RNA (1)...(19): siRNA sense strand
gcgaagaguuuaugaugcu

SEQ ID NO: 1892339 - RNA, 19 nt, Homo sapiens
  misc_RNA (1)...(19): siRNA sense strand
gaagaguuuaugaugcuuu

SEQ ID NO: 1892340 - RNA, 19 nt, Homo sapiens
  misc_RNA (1)...(19): siRNA sense strand
ugagaaaguucaacgaaaa

SEQ ID NO: 1892341 - RNA, 19 nt, Homo sapiens
  misc_RNA (1)...(19): siRNA sense strand
ccagucaaguguaaaccaa

SEQ ID NO: 1892342 - RNA, 19 nt, Homo sapiens
  misc_RNA (1)...(19): siRNA sense strand
ugacaacaccuuugagauc

SEQ ID NO: 1892343 - RNA, 19 nt, Homo sapiens
  misc_RNA (1)...(19): siRNA sense strand
gaaaagguacaacaucgua

SEQ ID NO: 1892344 - RNA, 19 nt, Homo sapiens
  misc_RNA (1)...(19): siRNA sense strand
ccagugacaaguuugagua

SEQ ID NO: 1892345 - RNA, 19 nt, Homo sapiens
  misc_RNA (1)...(19): siRNA sense strand
ggaagaugaugaggaggau

SEQ ID NO: 1892346 - RNA, 19 nt, Homo sapiens
  misc_RNA (1)...(19): siRNA sense strand
uagaacggauaaagcagaa

SEQ ID NO: 1892347 - RNA, 19 nt, Homo sapiens
  misc_RNA (1)...(19): siRNA sense strand
ggacuacuucugaacucua

SEQ ID NO: 1892348 - RNA, 19 nt, Homo sapiens
  misc_RNA (1)...(19): siRNA sense strand
aacauuaggcgaagaguuu

SEQ ID NO: 1892349 - RNA, 19 nt, Homo sapiens
  misc_RNA (1)...(19): siRNA sense strand
ggaccuucuugguuaaauc

SEQ ID NO: 1892350 - RNA, 19 nt, Homo sapiens
  misc_RNA (1)...(19): siRNA sense strand
gugacaaguuugaguaucu

SEQ ID NO: 1892351 - RNA, 19 nt, Homo sapiens
  misc_RNA (1)...(19): siRNA sense strand
gaaaacgggcuagaaaauu

SEQ ID NO: 1892352 - RNA, 19 nt, Homo sapiens
  misc_RNA (1)...(19): siRNA sense strand
ccuguucguucaaugauga

SEQ ID NO: 1892353 - RNA, 19 nt, Homo sapiens
  misc_RNA (1)...(19): siRNA sense strand
cuucugaacucuacccaau

SEQ ID NO: 1892354 - RNA, 19 nt, Homo sapiens
  misc_RNA (1)...(19): siRNA sense strand
caacaucguacaaugaagu

SEQ ID NO: 1892355 - RNA, 19 nt, Homo sapiens
  misc_RNA (1)...(19): siRNA sense strand
agacuaaccaguucaggaa

SEQ ID NO: 1892356 - RNA, 19 nt, Homo sapiens
  misc_RNA (1)...(19): siRNA sense strand
ucugaacucuacccaauca

SEQ ID NO: 1892357 - RNA, 19 nt, Homo sapiens
  misc_RNA (1)...(19): siRNA sense strand
gaucugaaacuugcgaaau

SEQ ID NO: 1892358 - RNA, 19 nt, Homo sapiens
  misc_RNA (1)...(19): siRNA sense strand
ggaugggaaugucguuugg

SEQ ID NO: 1892359 - RNA, 19 nt, Homo sapiens
  misc_RNA (1)...(19): siRNA sense strand
ccauucagcugccauucau

SEQ ID NO: 1892360 - RNA, 19 nt, Homo sapiens
  misc_RNA (1)...(19): siRNA sense strand
uaccaauucugcucaggaa

SEQ ID NO: 1892361 - RNA, 19 nt, Homo sapiens
  misc_RNA (1)...(19): siRNA sense strand
cuaauggcaaugaacauaa

SEQ ID NO: 1892362 - RNA, 19 nt, Homo sapiens
  misc_RNA (1)...(19): siRNA sense strand
ucaaugaaagugugugaga

SEQ ID NO: 1892363 - RNA, 19 nt, Homo sapiens
  misc_RNA (1)...(19): siRNA sense strand
ugaugaagaugaggaagau

SEQ ID NO: 1892364 - RNA, 19 nt, Homo sapiens
  misc_RNA (1)...(19): siRNA sense strand
cacagagacuaaccaguuc

SEQ ID NO: 1892365 - RNA, 19 nt, Homo sapiens
  misc_RNA (1)...(19): siRNA sense strand
gagcuggugucagaguuca

SEQ ID NO: 1892366 - RNA, 19 nt, Homo sapiens
  misc_RNA (1)...(19): siRNA sense strand
acaggaccuucuugguuaa

SEQ ID NO: 1892367 - RNA, 19 nt, Homo sapiens
  misc_RNA (1)...(19): siRNA sense strand
caggaaguguucugauugg

SEQ ID NO: 1892368 - RNA, 19 nt, Homo sapiens
  misc_RNA (1)...(19): siRNA sense strand
ccauuuggcugcugauucg

SEQ ID NO: 1892369 - RNA, 19 nt, Homo sapiens
  misc_RNA (1)...(19): siRNA sense strand
gggcccagcugcaagaacu

SEQ ID NO: 1892370 - RNA, 19 nt, Homo sapiens
  misc_RNA (1)...(19): siRNA sense strand
gcagaaguggccuuagcaa

SEQ ID NO: 1892371 - RNA, 19 nt, Homo sapiens
  misc_RNA (1)...(19): siRNA sense strand
ggaugcagaaguggccuua

SEQ ID NO: 1892372 - RNA, 19 nt, Homo sapiens
  misc_RNA (1)...(19): siRNA sense strand
ugacaaguuugaguaucuu

SEQ ID NO: 1892373 - RNA, 19 nt, Homo sapiens
  misc_RNA (1)...(19): siRNA sense strand
acagagaaaucgacaaaau

SEQ ID NO: 1892374 - RNA, 19 nt, Homo sapiens
  misc_RNA (1)...(19): siRNA sense strand
uauaagcacaccacagaga

SEQ ID NO: 1892375 - RNA, 19 nt, Homo sapiens
  misc_RNA (1)...(19): siRNA sense strand
cugauucgcaggcuuauga

SEQ ID NO: 1892376 - RNA, 19 nt, Homo sapiens
  misc_RNA (1)...(19): siRNA sense strand
gaugacauagaaguacuaa

SEQ ID NO: 1892377 - RNA, 19 nt, Homo sapiens
  misc_RNA (1)...(19): siRNA sense strand
aaugaaagugugugagaaa

SEQ ID NO: 1892378 - RNA, 19 nt, Homo sapiens
  misc_RNA (1)...(19): siRNA sense strand
gagaagcagaggcggauag

SEQ ID NO: 1892379 - RNA, 19 nt, Homo sapiens
  misc_RNA (1)...(19): siRNA sense strand
guucaccaauucaaauaac

SEQ ID NO: 1892380 - RNA, 19 nt, Homo sapiens
  misc_RNA (1)...(19): siRNA sense strand
gaagaugaggaagaugaug

SEQ ID NO: 1892381 - RNA, 19 nt, Homo sapiens
  misc_RNA (1)...(19): siRNA sense strand
cagcaaaucgcuuucaaaa

SEQ ID NO: 1892382 - RNA, 19 nt, Homo sapiens
  misc_RNA (1)...(19): siRNA sense strand
gcaggcuuaugaucagaag

SEQ ID NO: 1892383 - RNA, 19 nt, Homo sapiens
  misc_RNA (1)...(19): siRNA sense strand
uacaacaucguacaaugaa

SEQ ID NO: 1892384 - RNA, 19 nt, Homo sapiens
  misc_RNA (1)...(19): siRNA sense strand
ccaugaugacauagaagua

SEQ ID NO: 1892385 - RNA, 19 nt, Homo sapiens
  misc_RNA (1)...(19): siRNA sense strand
cagaguucaccaauucaaa

SEQ ID NO: 1892386 - RNA, 19 nt, Homo sapiens
  misc_RNA (1)...(19): siRNA sense strand
aagaugaggaagaugauga

SEQ ID NO: 1892387 - RNA, 19 nt, Homo sapiens
  misc_RNA (1)...(19): siRNA sense strand
uaaagcggaugggaauguc

SEQ ID NO: 1892388 - RNA, 19 nt, Homo sapiens
  misc_RNA (1)...(19): siRNA sense strand
uacagcaaaucgcuuucaa

SEQ ID NO: 1892389 - RNA, 19 nt, Homo sapiens
  misc_RNA (1)...(19): siRNA sense strand
cugauugggaguccauaua

SEQ ID NO: 1892390 - RNA, 19 nt, Homo sapiens
  misc_RNA (1)...(19): siRNA sense strand
gcggauagaacggauaaag

SEQ ID NO: 1892391 - RNA, 19 nt, Homo sapiens
  misc_RNA (1)...(19): siRNA sense strand
gaccuucuugguuaaauca

SEQ ID NO: 1892392 - RNA, 19 nt, Homo sapiens
  misc_RNA (1)...(19): siRNA sense strand
caacaccuuugagauccau

SEQ ID NO: 1892393 - RNA, 19 nt, Homo sapiens
  misc_RNA (1)...(19): siRNA sense strand
agaaguggccuuagcaacu

SEQ ID NO: 1892394 - RNA, 19 nt, Homo sapiens
  misc_RNA (1)...(19): siRNA sense strand
uuaaaucagggacuacuuc

SEQ ID NO: 1892395 - RNA, 19 nt, Homo sapiens
  misc_RNA (1)...(19): siRNA sense strand
gaagcagaggcggauagaa

SEQ ID NO: 1892396 - RNA, 19 nt, Homo sapiens
  misc_RNA (1)...(19): siRNA sense strand
cugggucccuggugauaga

SEQ ID NO: 1892397 - RNA, 19 nt, Homo sapiens
  misc_RNA (1)...(19): siRNA sense strand
gacaaaaugagcagcaaaa

SEQ ID NO: 1892398 - RNA, 19 nt, Homo sapiens
  misc_RNA (1)...(19): siRNA sense strand
ucagacacacauagcagaa

SEQ ID NO: 1892399 - RNA, 19 nt, Homo sapiens
  misc_RNA (1)...(19): siRNA sense strand
gugucagaguucaccaauu

SEQ ID NO: 1892400 - RNA, 19 nt, Homo sapiens
  misc_RNA (1)...(19): siRNA sense strand
augcuuggaugcagaagug

SEQ ID NO: 1892401 - RNA, 19 nt, Homo sapiens
  misc_RNA (1)...(19): siRNA sense strand
gacuacuucugaacucuac

SEQ ID NO: 1892402 - RNA, 19 nt, Homo sapiens
  misc_RNA (1)...(19): siRNA sense strand
cuaaagcggaugggaaugu

SEQ ID NO: 1892403 - RNA, 19 nt, Homo sapiens
  misc_RNA (1)...(19): siRNA sense strand
gacaaguuugaguaucuuu

SEQ ID NO: 1892404 - RNA, 19 nt, Homo sapiens
  misc_RNA (1)...(19): siRNA sense strand
cagcaucuccagugacaag

SEQ ID NO: 1892405 - RNA, 19 nt, Homo sapiens
  misc_RNA (1)...(19): siRNA sense strand
auucagcugccauucauaa

SEQ ID NO: 1892406 - RNA, 19 nt, Homo sapiens
  misc_RNA (1)...(19): siRNA sense strand
auuauaagcacaccacaga

SEQ ID NO: 1892407 - RNA, 19 nt, Homo sapiens
  misc_RNA (1)...(19): siRNA sense strand
ggaacaaacucaucucaaa

SEQ ID NO: 1892408 - RNA, 19 nt, Homo sapiens
  misc_RNA (1)...(19): siRNA sense strand
gacagaggcugcagcauua

SEQ ID NO: 1892409 - RNA, 19 nt, Homo sapiens
  misc_RNA (1)...(19): siRNA sense strand
gcacagaccuuccacugaa

SEQ ID NO: 1892410 - RNA, 19 nt, Homo sapiens
  misc_RNA (1)...(19): siRNA sense strand
ggagaagucuguuaaugaa

SEQ ID NO: 1892411 - RNA, 19 nt, Homo sapiens
  misc_RNA (1)...(19): siRNA sense strand
gaugagaaauacaaccaua

SEQ ID NO: 1892412 - RNA, 19 nt, Homo sapiens
  misc_RNA (1)...(19): siRNA sense strand
ccaaauggcccaaauauug

SEQ ID NO: 1892413 - RNA, 19 nt, Homo sapiens
  misc_RNA (1)...(19): siRNA sense strand
ggaagaagauuuagaagac

SEQ ID NO: 1892414 - RNA, 19 nt, Homo sapiens
  misc_RNA (1)...(19): siRNA sense strand
gcaaaucacucaugcaaac

SEQ ID NO: 1892415 - RNA, 19 nt, Homo sapiens
  misc_RNA (1)...(19): siRNA sense strand
gaacaggucacaauuugaa

SEQ ID NO: 1892416 - RNA, 19 nt, Homo sapiens
  misc_RNA (1)...(19): siRNA sense strand
ggaccaagcuaaacaagca

SEQ ID NO: 1892417 - RNA, 19 nt, Homo sapiens
  misc_RNA (1)...(19): siRNA sense strand
ggacagaggcugcagcauu

SEQ ID NO: 1892418 - RNA, 19 nt, Homo sapiens
  misc_RNA (1)...(19): siRNA sense strand
caauaucucugaucuggaa

SEQ ID NO: 1892419 - RNA, 19 nt, Homo sapiens
  misc_RNA (1)...(19): siRNA sense strand
aaauaaagguggugaaugu

SEQ ID NO: 1892420 - RNA, 19 nt, Homo sapiens
  misc_RNA (1)...(19): siRNA sense strand
guacaugggugaagaacau

SEQ ID NO: 1892421 - RNA, 19 nt, Homo sapiens
  misc_RNA (1)...(19): siRNA sense strand
caaugcagaugaagcagua

SEQ ID NO: 1892422 - RNA, 19 nt, Homo sapiens
  misc_RNA (1)...(19): siRNA sense strand
gauauuagcacaacacuca

SEQ ID NO: 1892423 - RNA, 19 nt, Homo sapiens
  misc_RNA (1)...(19): siRNA sense strand
gaaccaugauucagaagau

SEQ ID NO: 1892424 - RNA, 19 nt, Homo sapiens
  misc_RNA (1)...(19): siRNA sense strand
caugacagcuguugcuuug

SEQ ID NO: 1892425 - RNA, 19 nt, Homo sapiens
  misc_RNA (1)...(19): siRNA sense strand
caagauagcagcugacuuc

SEQ ID NO: 1892426 - RNA, 19 nt, Homo sapiens
  misc_RNA (1)...(19): siRNA sense strand
aagcauauguugacaaguu

SEQ ID NO: 1892427 - RNA, 19 nt, Homo sapiens
  misc_RNA (1)...(19): siRNA sense strand
caaacaauacggugucuaa

SEQ ID NO: 1892428 - RNA, 19 nt, Homo sapiens
  misc_RNA (1)...(19): siRNA sense strand
gugauggaauggaugaaua

SEQ ID NO: 1892429 - RNA, 19 nt, Homo sapiens
  misc_RNA (1)...(19): siRNA sense strand
aaacucaucucaaaguaga

SEQ ID NO: 1892430 - RNA, 19 nt, Homo sapiens
  misc_RNA (1)...(19): siRNA sense strand
ugacuaagcugaaggaaac

SEQ ID NO: 1892431 - RNA, 19 nt, Homo sapiens
  misc_RNA (1)...(19): siRNA sense strand
caugaagucuuuagucgaa

SEQ ID NO: 1892432 - RNA, 19 nt, Homo sapiens
  misc_RNA (1)...(19): siRNA sense strand
uaacacaaccgaaaccaaa

SEQ ID NO: 1892433 - RNA, 19 nt, Homo sapiens
  misc_RNA (1)...(19): siRNA sense strand
gaacagcuuuugauccuuu

SEQ ID NO: 1892434 - RNA, 19 nt, Homo sapiens
  misc_RNA (1)...(19): siRNA sense strand
uaaagguggugaauguuga

SEQ ID NO: 1892435 - RNA, 19 nt, Homo sapiens
  misc_RNA (1)...(19): siRNA sense strand
gaagaacaucuauuuagug

SEQ ID NO: 1892436 - RNA, 19 nt, Homo sapiens
  misc_RNA (1)...(19): siRNA sense strand
uggaauggaugaauaaugu

SEQ ID NO: 1892437 - RNA, 19 nt, Homo sapiens
  misc_RNA (1)...(19): siRNA sense strand
ugacaaguuggaagaauua

SEQ ID NO: 1892438 - RNA, 19 nt, Homo sapiens
  misc_RNA (1)...(19): siRNA sense strand
agaaaggaaugaugcuaaa

SEQ ID NO: 1892439 - RNA, 19 nt, Homo sapiens
  misc_RNA (1)...(19): siRNA sense strand
ugacagcuguugcuuugaa

SEQ ID NO: 1892440 - RNA, 19 nt, Homo sapiens
  misc_RNA (1)...(19): siRNA sense strand
guuagaugcugcacagauu

SEQ ID NO: 1892441 - RNA, 19 nt, Homo sapiens
  misc_RNA (1)...(19): siRNA sense strand
caaauggcccaaauauuga

SEQ ID NO: 1892442 - RNA, 19 nt, Homo sapiens
  misc_RNA (1)...(19): siRNA sense strand
gaagaacucugugcugaac

SEQ ID NO: 1892443 - RNA, 19 nt, Homo sapiens
  misc_RNA (1)...(19): siRNA sense strand
gaugaacaggucacaauuu

SEQ ID NO: 1892444 - RNA, 19 nt, Homo sapiens
  misc_RNA (1)...(19): siRNA sense strand
ggaguuggaauaaagguaa

SEQ ID NO: 1892445 - RNA, 19 nt, Homo sapiens
  misc_RNA (1)...(19): siRNA sense strand
ugaauaaugucaugaaugc

SEQ ID NO: 1892446 - RNA, 19 nt, Homo sapiens
  misc_RNA (1)...(19): siRNA sense strand
ugaugagucugaaaugaaa

SEQ ID NO: 1892447 - RNA, 19 nt, Homo sapiens
  misc_RNA (1)...(19): siRNA sense strand
gaauaucgaaugcuuuaug

SEQ ID NO: 1892448 - RNA, 19 nt, Homo sapiens
  misc_RNA (1)...(19): siRNA sense strand
acaauacggugucuaacuu

SEQ ID NO: 1892449 - RNA, 19 nt, Homo sapiens
  misc_RNA (1)...(19): siRNA sense strand
gaagaagauuuagaagaca

SEQ ID NO: 1892450 - RNA, 19 nt, Homo sapiens
  misc_RNA (1)...(19): siRNA sense strand
uuaaugaagugauggaaug

SEQ ID NO: 1892451 - RNA, 19 nt, Homo sapiens
  misc_RNA (1)...(19): siRNA sense strand
guaagaugauaaugcaaga

SEQ ID NO: 1892452 - RNA, 19 nt, Homo sapiens
  misc_RNA (1)...(19): siRNA sense strand
caacugaggagaaugaaau

SEQ ID NO: 1892453 - RNA, 19 nt, Homo sapiens
  misc_RNA (1)...(19): siRNA sense strand
gaaaccaugcugcuccuuu

SEQ ID NO: 1892454 - RNA, 19 nt, Homo sapiens
  misc_RNA (1)...(19): siRNA sense strand
ggugaagaacaucuauuua

SEQ ID NO: 1892455 - RNA, 19 nt, Homo sapiens
  misc_RNA (1)...(19): siRNA sense strand
gacagaggguaagaugaua

SEQ ID NO: 1892456 - RNA, 19 nt, Homo sapiens
  misc_RNA (1)...(19): siRNA sense strand
ugagaaaccucggauagug

SEQ ID NO: 1892457 - RNA, 19 nt, Homo sapiens
  misc_RNA (1)...(19): siRNA sense strand
gaacaaacucaucucaaag

SEQ ID NO: 1892458 - RNA, 19 nt, Homo sapiens
  misc_RNA (1)...(19): siRNA sense strand
gaagugauggaauggauga

SEQ ID NO: 1892459 - RNA, 19 nt, Homo sapiens
  misc_RNA (1)...(19): siRNA sense strand
acaaacucaucucaaagua

SEQ ID NO: 1892460 - RNA, 19 nt, Homo sapiens
  misc_RNA (1)...(19): siRNA sense strand
gaaggaaacugcugaaaac

SEQ ID NO: 1892461 - RNA, 19 nt, Homo sapiens
  misc_RNA (1)...(19): siRNA sense strand
caagaaaccaguaacagau

SEQ ID NO: 1892462 - RNA, 19 nt, Homo sapiens
  misc_RNA (1)...(19): siRNA sense strand
ucgaaugcuuuaugaauga

SEQ ID NO: 1892463 - RNA, 19 nt, Homo sapiens
  misc_RNA (1)...(19): siRNA sense strand
aggaauauguguaugaguu

SEQ ID NO: 1892464 - RNA, 19 nt, Homo sapiens
  misc_RNA (1)...(19): siRNA sense strand
caaguuggaagaauuaaug

SEQ ID NO: 1892465 - RNA, 19 nt, Homo sapiens
  misc_RNA (1)...(19): siRNA sense strand
cgauuugguuccauugaaa

SEQ ID NO: 1892466 - RNA, 19 nt, Homo sapiens
  misc_RNA (1)...(19): siRNA sense strand
aaucagagaccaccagaaa

SEQ ID NO: 1892467 - RNA, 19 nt, Homo sapiens
  misc_RNA (1)...(19): siRNA sense strand
caaaguagaagaugugagu

SEQ ID NO: 1892468 - RNA, 19 nt, Homo sapiens
  misc_RNA (1)...(19): siRNA sense strand
cagcuguugcuuugaauua

SEQ ID NO: 1892469 - RNA, 19 nt, Homo sapiens
  misc_RNA (1)...(19): siRNA sense strand
gggugaagaacaucuauuu

SEQ ID NO: 1892470 - RNA, 19 nt, Homo sapiens
  misc_RNA (1)...(19): siRNA sense strand
gaaggaaagaauugccaaa

SEQ ID NO: 1892471 - RNA, 19 nt, Homo sapiens
  misc_RNA (1)...(19): siRNA sense strand
gaugagaaaccucggauag

SEQ ID NO: 1892472 - RNA, 19 nt, Homo sapiens
  misc_RNA (1)...(19): siRNA sense strand
caagcuguguggaccauau

SEQ ID NO: 1892473 - RNA, 19 nt, Homo sapiens
  misc_RNA (1)...(19): siRNA sense strand
uggagaaagucccaacuga

SEQ ID NO: 1892474 - RNA, 19 nt, Homo sapiens
  misc_RNA (1)...(19): siRNA sense strand
gaagcuuucuauucugauc

SEQ ID NO: 1892475 - RNA, 19 nt, Homo sapiens
  misc_RNA (1)...(19): siRNA sense strand
ggaauaaagguaauguaca

SEQ ID NO: 1892476 - RNA, 19 nt, Homo sapiens
  misc_RNA (1)...(19): siRNA sense strand
gaauguuacccuaaugaga

SEQ ID NO: 1892477 - RNA, 19 nt, Homo sapiens
  misc_RNA (1)...(19): siRNA sense strand
gcacagaaagauggagaaa

SEQ ID NO: 1892478 - RNA, 19 nt, Homo sapiens
  misc_RNA (1)...(19): siRNA sense strand
ucacagaugcaguuccuuu

SEQ ID NO: 1892479 - RNA, 19 nt, Homo sapiens
  misc_RNA (1)...(19): siRNA sense strand
ucaagaaaccaguaacaga

SEQ ID NO: 1892480 - RNA, 19 nt, Homo sapiens
  misc_RNA (1)...(19): siRNA sense strand
gugaagaacaucuauuuag

SEQ ID NO: 1892481 - RNA, 19 nt, Homo sapiens
  misc_RNA (1)...(19): siRNA sense strand
gcacagauuguuggccuaa

SEQ ID NO: 1892482 - RNA, 19 nt, Homo sapiens
  misc_RNA (1)...(19): siRNA sense strand
gaccaucgccaaugaguuc

SEQ ID NO: 1892483 - RNA, 19 nt, Homo sapiens
  misc_RNA (1)...(19): siRNA sense strand
guggagaagucuguuaaug

SEQ ID NO: 1892484 - RNA, 19 nt, Homo sapiens
  misc_RNA (1)...(19): siRNA sense strand
aagacuggcuguaugaaga

SEQ ID NO: 1892485 - RNA, 19 nt, Homo sapiens
  misc_RNA (1)...(19): siRNA sense strand
aaaaugcaguugaggaaua

SEQ ID NO: 1892486 - RNA, 19 nt, Homo sapiens
  misc_RNA (1)...(19): siRNA sense strand
gaauauguguaugaguuca

SEQ ID NO: 1892487 - RNA, 19 nt, Homo sapiens
  misc_RNA (1)...(19): siRNA sense strand
cagauuguguuauuucagu

SEQ ID NO: 1892488 - RNA, 19 nt, Homo sapiens
  misc_RNA (1)...(19): siRNA sense strand
ggaauugaacaacacaugu

SEQ ID NO: 1892489 - RNA, 19 nt, Homo sapiens
  misc_RNA (1)...(19): siRNA sense strand
gaagucuguuaaugaagug

SEQ ID NO: 1892490 - RNA, 19 nt, Homo sapiens
  misc_RNA (1)...(19): siRNA sense strand
acauguauauugagacaga

SEQ ID NO: 1892491 - RNA, 19 nt, Homo sapiens
  misc_RNA (1)...(19): siRNA sense strand
gaaaagauauuagcacaac

SEQ ID NO: 1892492 - RNA, 19 nt, Homo sapiens
  misc_RNA (1)...(19): siRNA sense strand
cugaauaucgaaugcuuua

SEQ ID NO: 1892493 - RNA, 19 nt, Homo sapiens
  misc_RNA (1)...(19): siRNA sense strand
ugagaggcgaucuguguua

SEQ ID NO: 1892494 - RNA, 19 nt, Homo sapiens
  misc_RNA (1)...(19): siRNA sense strand
cagcaaaucacucaugcaa

SEQ ID NO: 1892495 - RNA, 19 nt, Homo sapiens
  misc_RNA (1)...(19): siRNA sense strand
aaucggaguugcagccaaa

SEQ ID NO: 1892496 - RNA, 19 nt, Homo sapiens
  misc_RNA (1)...(19): siRNA sense strand
agacacugaugcaaaugaa

SEQ ID NO: 1892497 - RNA, 19 nt, Homo sapiens
  misc_RNA (1)...(19): siRNA sense strand
cggcaucuaugguggagaa

SEQ ID NO: 1892498 - RNA, 19 nt, Homo sapiens
  misc_RNA (1)...(19): siRNA sense strand
uggaggcgcuacacgaauu

SEQ ID NO: 1892499 - RNA, 19 nt, Homo sapiens
  misc_RNA (1)...(19): siRNA sense strand
gaagaugugagugcaguug

SEQ ID NO: 1892500 - RNA, 19 nt, Homo sapiens
  misc_RNA (1)...(19): siRNA sense strand
gcugagaggcgaucugugu

SEQ ID NO: 1892501 - RNA, 19 nt, Homo sapiens
  misc_RNA (1)...(19): siRNA sense strand
agaaaccaguaacagauug

SEQ ID NO: 1892502 - RNA, 19 nt, Homo sapiens
  misc_RNA (1)...(19): siRNA sense strand
gaaaacagccucaagaaac

SEQ ID NO: 1892503 - RNA, 19 nt, Homo sapiens
  misc_RNA (1)...(19): siRNA sense strand
gaucuggaaccaugauuca

SEQ ID NO: 1892504 - RNA, 19 nt, Homo sapiens
  misc_RNA (1)...(19): siRNA sense strand
gaauugaacaacacaugug

SEQ ID NO: 1892505 - RNA, 19 nt, Homo sapiens
  misc_RNA (1)...(19): siRNA sense strand
caugaaugcucaggcuaaa

SEQ ID NO: 1892506 - RNA, 19 nt, Homo sapiens
  misc_RNA (1)...(19): siRNA sense strand
aaaauuggcacuccaguua

SEQ ID NO: 1892507 - RNA, 19 nt, Homo sapiens
  misc_RNA (1)...(19): siRNA sense strand
caaaagaugucccuaauaa

SEQ ID NO: 1892508 - RNA, 19 nt, Homo sapiens
  misc_RNA (1)...(19): siRNA sense strand
caaagaggcugaagaugau

SEQ ID NO: 1892509 - RNA, 19 nt, Homo sapiens
  misc_RNA (1)...(19): siRNA sense strand
gcaagaagaagcuggagua

SEQ ID NO: 1892510 - RNA, 19 nt, Homo sapiens
  misc_RNA (1)...(19): siRNA sense strand
ccaaagaggcugaagauga

SEQ ID NO: 1892511 - RNA, 19 nt, Homo sapiens
  misc_RNA (1)...(19): siRNA sense strand
aaagacagcuccaacaagu

SEQ ID NO: 1892512 - RNA, 19 nt, Homo sapiens
  misc_RNA (1)...(19): siRNA sense strand
ggagagcagccacuucuuu

SEQ ID NO: 1892513 - RNA, 19 nt, Homo sapiens
  misc_RNA (1)...(19): siRNA sense strand
caaaagacgucccuaacaa

SEQ ID NO: 1892514 - RNA, 19 nt, Homo sapiens
  misc_RNA (1)...(19): siRNA sense strand
gcagccacuucuuugcaua

SEQ ID NO: 1892515 - RNA, 19 nt, Homo sapiens
  misc_RNA (1)...(19): siRNA sense strand
aaagacggcucuaacaagu

SEQ ID NO: 1892516 - RNA, 19 nt, Homo sapiens
  misc_RNA (1)...(19): siRNA sense strand
gagcagaccucaaaagaca

SEQ ID NO: 1892517 - RNA, 19 nt, Homo sapiens
  misc_RNA (1)...(19): siRNA sense strand
gggaagcuuucuccucaug

SEQ ID NO: 1892518 - RNA, 19 nt, Homo sapiens
  misc_RNA (1)...(19): siRNA sense strand
gagagcagccacuucuuug

SEQ ID NO: 1892519 - RNA, 19 nt, Homo sapiens
  misc_RNA (1)...(19): siRNA sense strand
agacagcccuagcaaguca

SEQ ID NO: 1892520 - RNA, 19 nt, Homo sapiens
  misc_RNA (1)...(19): siRNA sense strand
aaagacggcuccagcaagu

SEQ ID NO: 1892521 - RNA, 19 nt, Homo sapiens
  misc_RNA (1)...(19): siRNA sense strand
aaagaugucccuaauaagu

SEQ ID NO: 1892522 - RNA, 19 nt, Homo sapiens
  misc_RNA (1)...(19): siRNA sense strand
agacagcacuggcaaaucg

SEQ ID NO: 1892523 - RNA, 19 nt, Homo sapiens
  misc_RNA (1)...(19): siRNA sense strand
gcucaccgcccaaagaaga

SEQ ID NO: 1892524 - RNA, 19 nt, Homo sapiens
  misc_RNA (1)...(19): siRNA sense strand
caaaagacagcacuaguaa

SEQ ID NO: 1892525 - RNA, 19 nt, Homo sapiens
  misc_RNA (1)...(19): siRNA sense strand
aaagacagcacuaguaagu

SEQ ID NO: 1892526 - RNA, 19 nt, Homo sapiens
  misc_RNA (1)...(19): siRNA sense strand
ccgaaagcgucaagcaaga

SEQ ID NO: 1892527 - RNA, 19 nt, Homo sapiens
  misc_RNA (1)...(19): siRNA sense strand
aaagacagcccuagcaagu

SEQ ID NO: 1892528 - RNA, 19 nt, Homo sapiens
  misc_RNA (1)...(19): siRNA sense strand
aaagacagcccuagcaagu

SEQ ID NO: 1892529 - RNA, 19 nt, Homo sapiens
  misc_RNA (1)...(19): siRNA sense strand
cuauaucgcucaucacaac

SEQ ID NO: 1892530 - RNA, 19 nt, Homo sapiens
  misc_RNA (1)...(19): siRNA sense strand
gccagugacuaccaacguu

SEQ ID NO: 1892531 - RNA, 19 nt, Homo sapiens
  misc_RNA (1)...(19): siRNA sense strand
ucuccaacccuucugauaa

SEQ ID NO: 1892532 - RNA, 19 nt, Homo sapiens
  misc_RNA (1)...(19): siRNA sense strand
gaaaagauguccgguucug

SEQ ID NO: 1892533 - RNA, 19 nt, Homo sapiens
  misc_RNA (1)...(19): siRNA sense strand
ggcugaagaugaugauaca

SEQ ID NO: 1892534 - RNA, 19 nt, Homo sapiens
  misc_RNA (1)...(19): siRNA sense strand
gcccaaagaagagaaagaa

SEQ ID NO: 1892535 - RNA, 19 nt, Homo sapiens
  misc_RNA (1)...(19): siRNA sense strand
caacccuucugauaacaag

SEQ ID NO: 1892536 - RNA, 19 nt, Homo sapiens
  misc_RNA (1)...(19): siRNA sense strand
agcggaagaucauugcuuu

SEQ ID NO: 1892537 - RNA, 19 nt, Homo sapiens
  misc_RNA (1)...(19): siRNA sense strand
ucuuguggcuguccucuau

SEQ ID NO: 1892538 - RNA, 19 nt, Homo sapiens
  misc_RNA (1)...(19): siRNA sense strand
ccacuucuuugcauaucug

SEQ ID NO: 1892539 - RNA, 19 nt, Homo sapiens
  misc_RNA (1)...(19): siRNA sense strand
gcccaaagaggcugaagau

SEQ ID NO: 1892540 - RNA, 19 nt, Homo sapiens
  misc_RNA (1)...(19): siRNA sense strand
gaagcuuucuccucaugcu

SEQ ID NO: 1892541 - RNA, 19 nt, Homo sapiens
  misc_RNA (1)...(19): siRNA sense strand
ccuggaggcucuaccaagu

SEQ ID NO: 1892542 - RNA, 19 nt, Homo sapiens
  misc_RNA (1)...(19): siRNA sense strand
guacggccuucugcaggaa

SEQ ID NO: 1892543 - RNA, 19 nt, Homo sapiens
  misc_RNA (1)...(19): siRNA sense strand
gaagaucauugcuuuuguc

SEQ ID NO: 1892544 - RNA, 19 nt, Homo sapiens
  misc_RNA (1)...(19): siRNA sense strand
gagcagccacuucuuugca

SEQ ID NO: 1892545 - RNA, 19 nt, Homo sapiens
  misc_RNA (1)...(19): siRNA sense strand
ccaaagaagagaaagaaaa

SEQ ID NO: 1892546 - RNA, 19 nt, Homo sapiens
  misc_RNA (1)...(19): siRNA sense strand
gcaggaggaaguuaagucu

SEQ ID NO: 1892547 - RNA, 19 nt, Homo sapiens
  misc_RNA (1)...(19): siRNA sense strand
gaaagcgucaagcaagaag

SEQ ID NO: 1892548 - RNA, 19 nt, Homo sapiens
  misc_RNA (1)...(19): siRNA sense strand
gguucugccuccagugaga

SEQ ID NO: 1892549 - RNA, 19 nt, Homo sapiens
  misc_RNA (1)...(19): siRNA sense strand
ggaagaucauugcuuuugu

SEQ ID NO: 1892550 - RNA, 19 nt, Homo sapiens
  misc_RNA (1)...(19): siRNA sense strand
ucuggugacugcagccauu

SEQ ID NO: 1892551 - RNA, 19 nt, Homo sapiens
  misc_RNA (1)...(19): siRNA sense strand
caacaagcggaagaucauu

SEQ ID NO: 1892552 - RNA, 19 nt, Homo sapiens
  misc_RNA (1)...(19): siRNA sense strand
aaagacagcacuggcaaau

SEQ ID NO: 1892553 - RNA, 19 nt, Homo sapiens
  misc_RNA (1)...(19): siRNA sense strand
ccagugacuaccaacguuu

SEQ ID NO: 1892554 - RNA, 19 nt, Homo sapiens
  misc_RNA (1)...(19): siRNA sense strand
caucacaacaagcggaaga

SEQ ID NO: 1892555 - RNA, 19 nt, Homo sapiens
  misc_RNA (1)...(19): siRNA sense strand
cggaggcgcagaccacaaa

SEQ ID NO: 1892556 - RNA, 19 nt, Homo sapiens
  misc_RNA (1)...(19): siRNA sense strand
gaagagaaagaaaagaugu

SEQ ID NO: 1892557 - RNA, 19 nt, Homo sapiens
  misc_RNA (1)...(19): siRNA sense strand
caaaagacagcccuaacaa

SEQ ID NO: 1892558 - RNA, 19 nt, Homo sapiens
  misc_RNA (1)...(19): siRNA sense strand
gaggagcagggcccaauag

SEQ ID NO: 1892559 - RNA, 19 nt, Homo sapiens
  misc_RNA (1)...(19): siRNA sense strand
cgaaagcgucaagcaagaa

SEQ ID NO: 1892560 - RNA, 19 nt, Homo sapiens
  misc_RNA (1)...(19): siRNA sense strand
caaaagacggcucuaacaa

SEQ ID NO: 1892561 - RNA, 19 nt, Homo sapiens
  misc_RNA (1)...(19): siRNA sense strand
cacaaaagaugucccuaau

SEQ ID NO: 1892562 - RNA, 19 nt, Homo sapiens
  misc_RNA (1)...(19): siRNA sense strand
cggaggcgcagaccacaaa

SEQ ID NO: 1892563 - RNA, 19 nt, Homo sapiens
  misc_RNA (1)...(19): siRNA sense strand
ccacaaaagaugucccuaa

SEQ ID NO: 1892564 - RNA, 19 nt, Homo sapiens
  misc_RNA (1)...(19): siRNA sense strand
aaaggccagugacuaccaa

SEQ ID NO: 1892565 - RNA, 19 nt, Homo sapiens
  misc_RNA (1)...(19): siRNA sense strand
gcggagagcagccacuucu

SEQ ID NO: 1892566 - RNA, 19 nt, Homo sapiens
  misc_RNA (1)...(19): siRNA sense strand
acaaaagacagcacuagua

SEQ ID NO: 1892567 - RNA, 19 nt, Homo sapiens
  misc_RNA (1)...(19): siRNA sense strand
aaagacgucccuaacaagu

SEQ ID NO: 1892568 - RNA, 19 nt, Homo sapiens
  misc_RNA (1)...(19): siRNA sense strand
gccaaaggccagugacuac

SEQ ID NO: 1892569 - RNA, 19 nt, Homo sapiens
  misc_RNA (1)...(19): siRNA sense strand
aaaggcagcacuagcaagu

SEQ ID NO: 1892570 - RNA, 19 nt, Homo sapiens
  misc_RNA (1)...(19): siRNA sense strand
gaagcagacuccaaaagac

SEQ ID NO: 1892571 - RNA, 19 nt, Homo sapiens
  misc_RNA (1)...(19): siRNA sense strand
cacaacaagcggaagauca

SEQ ID NO: 1892572 - RNA, 19 nt, Homo sapiens
  misc_RNA (1)...(19): siRNA sense strand
caagucgggugcggaggau

SEQ ID NO: 1892573 - RNA, 19 nt, Homo sapiens
  misc_RNA (1)...(19): siRNA sense strand
caagucgggugcggagaag

SEQ ID NO: 1892574 - RNA, 19 nt, Homo sapiens
  misc_RNA (1)...(19): siRNA sense strand
gcgcagaccacaaaagaug

SEQ ID NO: 1892575 - RNA, 19 nt, Homo sapiens
  misc_RNA (1)...(19): siRNA sense strand
acaacaagcggaagaucau

SEQ ID NO: 1892576 - RNA, 19 nt, Homo sapiens
  misc_RNA (1)...(19): siRNA sense strand
ccacggguagcgagaagga

SEQ ID NO: 1892577 - RNA, 19 nt, Homo sapiens
  misc_RNA (1)...(19): siRNA sense strand
caaagaagagaaagaaaag

SEQ ID NO: 1892578 - RNA, 19 nt, Homo sapiens
  misc_RNA (1)...(19): siRNA sense strand
acaagucgggugcggagaa

SEQ ID NO: 1892579 - RNA, 19 nt, Homo sapiens
  misc_RNA (1)...(19): siRNA sense strand
ugacugcagccauucuugu

SEQ ID NO: 1892580 - RNA, 19 nt, Homo sapiens
  misc_RNA (1)...(19): siRNA sense strand
ugacaggcauguuguauaa

SEQ ID NO: 1892581 - RNA, 19 nt, Homo sapiens
  misc_RNA (1)...(19): siRNA sense strand
gaacauggccugguccaaa

SEQ ID NO: 1892582 - RNA, 19 nt, Homo sapiens
  misc_RNA (1)...(19): siRNA sense strand
ggauacagaugaguuuauu

SEQ ID NO: 1892583 - RNA, 19 nt, Homo sapiens
  misc_RNA (1)...(19): siRNA sense strand
gauuugagcuggccuucuu

SEQ ID NO: 1892584 - RNA, 19 nt, Homo sapiens
  misc_RNA (1)...(19): siRNA sense strand
gagcuggccuucuuuacga

SEQ ID NO: 1892585 - RNA, 19 nt, Homo sapiens
  misc_RNA (1)...(19): siRNA sense strand
gaaggaaacccagaacaug

SEQ ID NO: 1892586 - RNA, 19 nt, Homo sapiens
  misc_RNA (1)...(19): siRNA sense strand
ugaacccucugucuccuua

SEQ ID NO: 1892587 - RNA, 19 nt, Homo sapiens
  misc_RNA (1)...(19): siRNA sense strand
gcaggauacagaugaguuu

SEQ ID NO: 1892588 - RNA, 19 nt, Homo sapiens
  misc_RNA (1)...(19): siRNA sense strand
aagaugaccuuaacacagu

SEQ ID NO: 1892589 - RNA, 19 nt, Homo sapiens
  misc_RNA (1)...(19): siRNA sense strand
uaacugggagcacaugaaa

SEQ ID NO: 1892590 - RNA, 19 nt, Homo sapiens
  misc_RNA (1)...(19): siRNA sense strand
cggcuaggauugaaggaaa

SEQ ID NO: 1892591 - RNA, 19 nt, Homo sapiens
  misc_RNA (1)...(19): siRNA sense strand
cagccucuaugcacuauau

SEQ ID NO: 1892592 - RNA, 19 nt, Homo sapiens
  misc_RNA (1)...(19): siRNA sense strand
accaagaaauguacagauu

SEQ ID NO: 1892593 - RNA, 19 nt, Homo sapiens
  misc_RNA (1)...(19): siRNA sense strand
guacagauuuugaauaugg

SEQ ID NO: 1892594 - RNA, 19 nt, Homo sapiens
  misc_RNA (1)...(19): siRNA sense strand
ugacaggacuaacacuuac

SEQ ID NO: 1892595 - RNA, 19 nt, Homo sapiens
  misc_RNA (1)...(19): siRNA sense strand
gugcagaagaugaccuuaa

SEQ ID NO: 1892596 - RNA, 19 nt, Homo sapiens
  misc_RNA (1)...(19): siRNA sense strand
cauuuggugucaucauuga

SEQ ID NO: 1892597 - RNA, 19 nt, Homo sapiens
  misc_RNA (1)...(19): siRNA sense strand
guccaaaccaagaaaugua

SEQ ID NO: 1892598 - RNA, 19 nt, Homo sapiens
  misc_RNA (1)...(19): siRNA sense strand
cccucugucuccuuauuua

SEQ ID NO: 1892599 - RNA, 19 nt, Homo sapiens
  misc_RNA (1)...(19): siRNA sense strand
gcauuuggugucaucauug

SEQ ID NO: 1892600 - RNA, 19 nt, Homo sapiens
  misc_RNA (1)...(19): siRNA sense strand
ucucuggcuuugcucuaua

SEQ ID NO: 1892601 - RNA, 19 nt, Homo sapiens
  misc_RNA (1)...(19): siRNA sense strand
uuaccuaccggagcuaaua

SEQ ID NO: 1892602 - RNA, 19 nt, Homo sapiens
  misc_RNA (1)...(19): siRNA sense strand
cugacaggacuaacacuua

SEQ ID NO: 1892603 - RNA, 19 nt, Homo sapiens
  misc_RNA (1)...(19): siRNA sense strand
guuacucgcacgcggauuu

SEQ ID NO: 1892604 - RNA, 19 nt, Homo sapiens
  misc_RNA (1)...(19): siRNA sense strand
uggaggauguugcaugaca

SEQ ID NO: 1892605 - RNA, 19 nt, Homo sapiens
  misc_RNA (1)...(19): siRNA sense strand
ggucuucggcuaggauuga

SEQ ID NO: 1892606 - RNA, 19 nt, Homo sapiens
  misc_RNA (1)...(19): siRNA sense strand
ugaaggaaacccagaacau

SEQ ID NO: 1892607 - RNA, 19 nt, Homo sapiens
  misc_RNA (1)...(19): siRNA sense strand
gcuccaacagucacucuga

SEQ ID NO: 1892608 - RNA, 19 nt, Homo sapiens
  misc_RNA (1)...(19): siRNA sense strand
uauagugcauuugguguca

SEQ ID NO: 1892609 - RNA, 19 nt, Homo sapiens
  misc_RNA (1)...(19): siRNA sense strand
gaaaacacgaggugcagaa

SEQ ID NO: 1892610 - RNA, 19 nt, Homo sapiens
  misc_RNA (1)...(19): siRNA sense strand
ugcauuuggugucaucauu

SEQ ID NO: 1892611 - RNA, 19 nt, Homo sapiens
  misc_RNA (1)...(19): siRNA sense strand
acacuuaccagccucuaug

SEQ ID NO: 1892612 - RNA, 19 nt, Homo sapiens
  misc_RNA (1)...(19): siRNA sense strand
caggauacagaugaguuua

SEQ ID NO: 1892613 - RNA, 19 nt, Homo sapiens
  misc_RNA (1)...(19): siRNA sense strand
aacacgaggugcagaagau

SEQ ID NO: 1892614 - RNA, 19 nt, Homo sapiens
  misc_RNA (1)...(19): siRNA sense strand
cgauaccucgugcaggaua

SEQ ID NO: 1892615 - RNA, 19 nt, Homo sapiens
  misc_RNA (1)...(19): siRNA sense strand
gauugaaggaaacccagaa

SEQ ID NO: 1892616 - RNA, 19 nt, Homo sapiens
  misc_RNA (1)...(19): siRNA sense strand
gguccaaaccaagaaaugu

SEQ ID NO: 1892617 - RNA, 19 nt, Homo sapiens
  misc_RNA (1)...(19): siRNA sense strand
gcucuauagugcauuuggu

SEQ ID NO: 1892618 - RNA, 19 nt, Homo sapiens
  misc_RNA (1)...(19): siRNA sense strand
gcacuuugggcuaauacuc

SEQ ID NO: 1892619 - RNA, 19 nt, Homo sapiens
  misc_RNA (1)...(19): siRNA sense strand
auuggaggauguugcauga

SEQ ID NO: 1892620 - RNA, 19 nt, Homo sapiens
  misc_RNA (1)...(19): siRNA sense strand
gcagaagaugaccuuaaca

SEQ ID NO: 1892621 - RNA, 19 nt, Homo sapiens
  misc_RNA (1)...(19): siRNA sense strand
cuaauacucuagguucucu

SEQ ID NO: 1892622 - RNA, 19 nt, Homo sapiens
  misc_RNA (1)...(19): siRNA sense strand
ugcagaagaugaccuuaac

SEQ ID NO: 1892623 - RNA, 19 nt, Homo sapiens
  misc_RNA (1)...(19): siRNA sense strand
gaauggucuucggcuagga

SEQ ID NO: 1892624 - RNA, 19 nt, Homo sapiens
  misc_RNA (1)...(19): siRNA sense strand
gggcugcguuuggugcaau

SEQ ID NO: 1892625 - RNA, 19 nt, Homo sapiens
  misc_RNA (1)...(19): siRNA sense strand
agaugaccuuaacacagua

SEQ ID NO: 1892626 - RNA, 19 nt, Homo sapiens
  misc_RNA (1)...(19): siRNA sense strand
aaacacgaggugcagaaga

SEQ ID NO: 1892627 - RNA, 19 nt, Homo sapiens
  misc_RNA (1)...(19): siRNA sense strand
gcuuugcucuauagugcau

SEQ ID NO: 1892628 - RNA, 19 nt, Homo sapiens
  misc_RNA (1)...(19): siRNA sense strand
ccucuaugcacuauauaau

SEQ ID NO: 1892629 - RNA, 19 nt, Homo sapiens
  misc_RNA (1)...(19): siRNA sense strand
gccucuaugcacuauauaa

SEQ ID NO: 1892630 - RNA, 19 nt, Homo sapiens
  misc_RNA (1)...(19): siRNA sense strand
aacccucugucuccuuauu

SEQ ID NO: 1892631 - RNA, 19 nt, Homo sapiens
  misc_RNA (1)...(19): siRNA sense strand
acuuugggcuaauacucua

SEQ ID NO: 1892632 - RNA, 19 nt, Homo sapiens
  misc_RNA (1)...(19): siRNA sense strand
ggaagaugauggcagauua

SEQ ID NO: 1892633 - RNA, 19 nt, Homo sapiens
  misc_RNA (1)...(19): siRNA sense strand
gaacauguccggucuaaga

SEQ ID NO: 1892634 - RNA, 19 nt, Homo sapiens
  misc_RNA (1)...(19): siRNA sense strand
gagaagaccauccaccuua

SEQ ID NO: 1892635 - RNA, 19 nt, Homo sapiens
  misc_RNA (1)...(19): siRNA sense strand
gagcugcccuuguuucuug

SEQ ID NO: 1892636 - RNA, 19 nt, Homo sapiens
  misc_RNA (1)...(19): siRNA sense strand
gcaaugaucgagacuaaga

SEQ ID NO: 1892637 - RNA, 19 nt, Homo sapiens
  misc_RNA (1)...(19): siRNA sense strand
ggaaagagacuggaagaug

SEQ ID NO: 1892638 - RNA, 19 nt, Homo sapiens
  misc_RNA (1)...(19): siRNA sense strand
caucagaaagggcaacuua

SEQ ID NO: 1892639 - RNA, 19 nt, Homo sapiens
  misc_RNA (1)...(19): siRNA sense strand
aagcaaugaucgagacuaa

SEQ ID NO: 1892640 - RNA, 19 nt, Homo sapiens
  misc_RNA (1)...(19): siRNA sense strand
gggauuuaaugaccuuuga

SEQ ID NO: 1892641 - RNA, 19 nt, Homo sapiens
  misc_RNA (1)...(19): siRNA sense strand
agacccagauugugacuug

SEQ ID NO: 1892642 - RNA, 19 nt, Homo sapiens
  misc_RNA (1)...(19): siRNA sense strand
aagaacauguccggucuaa

SEQ ID NO: 1892643 - RNA, 19 nt, Homo sapiens
  misc_RNA (1)...(19): siRNA sense strand
gcagauuacggcaucagaa

SEQ ID NO: 1892644 - RNA, 19 nt, Homo sapiens
  misc_RNA (1)...(19): siRNA sense strand
gcacaagugaaagcaauga

SEQ ID NO: 1892645 - RNA, 19 nt, Homo sapiens
  misc_RNA (1)...(19): siRNA sense strand
gagacuaagacggguauaa

SEQ ID NO: 1892646 - RNA, 19 nt, Homo sapiens
  misc_RNA (1)...(19): siRNA sense strand
gaggaaugggauuuaauga

SEQ ID NO: 1892647 - RNA, 19 nt, Homo sapiens
  misc_RNA (1)...(19): siRNA sense strand
augaggagcugcccuuguu

SEQ ID NO: 1892648 - RNA, 19 nt, Homo sapiens
  misc_RNA (1)...(19): siRNA sense strand
gaaagggcaacuuacucuu

SEQ ID NO: 1892649 - RNA, 19 nt, Homo sapiens
  misc_RNA (1)...(19): siRNA sense strand
cgaggaaugggauuuaaug

SEQ ID NO: 1892650 - RNA, 19 nt, Homo sapiens
  misc_RNA (1)...(19): siRNA sense strand
cagauuacggcaucagaaa

SEQ ID NO: 1892651 - RNA, 19 nt, Homo sapiens
  misc_RNA (1)...(19): siRNA sense strand
gacuugcaauggaaagaga

SEQ ID NO: 1892652 - RNA, 19 nt, Homo sapiens
  misc_RNA (1)...(19): siRNA sense strand
ccugagacccagauuguga

SEQ ID NO: 1892653 - RNA, 19 nt, Homo sapiens
  misc_RNA (1)...(19): siRNA sense strand
gaagaugauggcagauuac

SEQ ID NO: 1892654 - RNA, 19 nt, Homo sapiens
  misc_RNA (1)...(19): siRNA sense strand
gggaagaugauggcagauu

SEQ ID NO: 1892655 - RNA, 19 nt, Homo sapiens
  misc_RNA (1)...(19): siRNA sense strand
gcugggcuccaagaucuua

SEQ ID NO: 1892656 - RNA, 19 nt, Homo sapiens
  misc_RNA (1)...(19): siRNA sense strand
gauuuaaugaccuuugaug

SEQ ID NO: 1892657 - RNA, 19 nt, Homo sapiens
  misc_RNA (1)...(19): siRNA sense strand
uggcacaagugaaagcaau

SEQ ID NO: 1892658 - RNA, 19 nt, Homo sapiens
  misc_RNA (1)...(19): siRNA sense strand
ccauccaccuuacccugaa

SEQ ID NO: 1892659 - RNA, 19 nt, Homo sapiens
  misc_RNA (1)...(19): siRNA sense strand
agacuaagacggguauaau

SEQ ID NO: 1892660 - RNA, 19 nt, Homo sapiens
  misc_RNA (1)...(19): siRNA sense strand
gaggagcugcccuuguuuc

SEQ ID NO: 1892661 - RNA, 19 nt, Homo sapiens
  misc_RNA (1)...(19): siRNA sense strand
gugcaggaccagguucuuu

SEQ ID NO: 1892662 - RNA, 19 nt, Homo sapiens
  misc_RNA (1)...(19): siRNA sense strand
gacuaagacggguauaauc

SEQ ID NO: 1892663 - RNA, 19 nt, Homo sapiens
  misc_RNA (1)...(19): siRNA sense strand
aaagggcaacuuacucuuc

SEQ ID NO: 1892664 - RNA, 19 nt, Homo sapiens
  misc_RNA (1)...(19): siRNA sense strand
gaugccaacccauaugaca

SEQ ID NO: 1892665 - RNA, 19 nt, Homo sapiens
  misc_RNA (1)...(19): siRNA sense strand
agaagaccauccaccuuac

SEQ ID NO: 1892666 - RNA, 19 nt, Homo sapiens
  misc_RNA (1)...(19): siRNA sense strand
gaugaggagcugcccuugu

SEQ ID NO: 1892667 - RNA, 19 nt, Homo sapiens
  misc_RNA (1)...(19): siRNA sense strand
cauccaccuuacccugaaa

SEQ ID NO: 1892668 - RNA, 19 nt, Homo sapiens
  misc_RNA (1)...(19): siRNA sense strand
agaaagggcaacuuacucu

SEQ ID NO: 1892669 - RNA, 19 nt, Homo sapiens
  misc_RNA (1)...(19): siRNA sense strand
ucagaaagggcaacuuacu

SEQ ID NO: 1892670 - RNA, 19 nt, Homo sapiens
  misc_RNA (1)...(19): siRNA sense strand
uccgaggaaugggauuuaa

SEQ ID NO: 1892671 - RNA, 19 nt, Homo sapiens
  misc_RNA (1)...(19): siRNA sense strand
gauuacggcaucagaaagg

SEQ ID NO: 1892672 - RNA, 19 nt, Homo sapiens
  misc_RNA (1)...(19): siRNA sense strand
caauggaaagagacuggaa

SEQ ID NO: 1892673 - RNA, 19 nt, Homo sapiens
  misc_RNA (1)...(19): siRNA sense strand
acaaagagaagaccaucca

SEQ ID NO: 1892674 - RNA, 19 nt, Homo sapiens
  misc_RNA (1)...(19): siRNA sense strand
ccagcucaguggcacaagu

SEQ ID NO: 1892675 - RNA, 19 nt, Homo sapiens
  misc_RNA (1)...(19): siRNA sense strand
acuggaagaugggaagaug

SEQ ID NO: 1892676 - RNA, 19 nt, Homo sapiens
  misc_RNA (1)...(19): siRNA sense strand
ccuuugaugccaacccaua

SEQ ID NO: 1892677 - RNA, 19 nt, Homo sapiens
  misc_RNA (1)...(19): siRNA sense strand
ggagcugcccuuguuucuu

SEQ ID NO: 1892678 - RNA, 19 nt, Homo sapiens
  misc_RNA (1)...(19): siRNA sense strand
cagaaagggcaacuuacuc

SEQ ID NO: 1892679 - RNA, 19 nt, Homo sapiens
  misc_RNA (1)...(19): siRNA sense strand
gcucaguggcacaagugaa

SEQ ID NO: 1892680 - RNA, 19 nt, Homo sapiens
  misc_RNA (1)...(19): siRNA sense strand
cgaauaaacugcuuuguga

SEQ ID NO: 1892681 - RNA, 19 nt, Homo sapiens
  misc_RNA (1)...(19): siRNA sense strand
ggaacaagguaauuugaaa

SEQ ID NO: 1892682 - RNA, 19 nt, Homo sapiens
  misc_RNA (1)...(19): siRNA sense strand
gaaaaugucuggaacaauu

SEQ ID NO: 1892683 - RNA, 19 nt, Homo sapiens
  misc_RNA (1)...(19): siRNA sense strand
ugaaaggacucaguaauuu

SEQ ID NO: 1892684 - RNA, 19 nt, Homo sapiens
  misc_RNA (1)...(19): siRNA sense strand
agauaaagcugaagaagaa

SEQ ID NO: 1892685 - RNA, 19 nt, Homo sapiens
  misc_RNA (1)...(19): siRNA sense strand
gaauucuccuugccaaaua

SEQ ID NO: 1892686 - RNA, 19 nt, Homo sapiens
  misc_RNA (1)...(19): siRNA sense strand
guaagaauguugcagaaga

SEQ ID NO: 1892687 - RNA, 19 nt, Homo sapiens
  misc_RNA (1)...(19): siRNA sense strand
gaacacagugguacuauga

SEQ ID NO: 1892688 - RNA, 19 nt, Homo sapiens
  misc_RNA (1)...(19): siRNA sense strand
aaacauggcuaaagagaau

SEQ ID NO: 1892689 - RNA, 19 nt, Homo sapiens
  misc_RNA (1)...(19): siRNA sense strand
uguaugagguuguaaauga

SEQ ID NO: 1892690 - RNA, 19 nt, Homo sapiens
  misc_RNA (1)...(19): siRNA sense strand
gaagaacaccaaagaguga

SEQ ID NO: 1892691 - RNA, 19 nt, Homo sapiens
  misc_RNA (1)...(19): siRNA sense strand
auaaugagguccaguauug

SEQ ID NO: 1892692 - RNA, 19 nt, Homo sapiens
  misc_RNA (1)...(19): siRNA sense strand
caaauagucaucucucuaa

SEQ ID NO: 1892693 - RNA, 19 nt, Homo sapiens
  misc_RNA (1)...(19): siRNA sense strand
ggaccaaaggcaaauauaa

SEQ ID NO: 1892694 - RNA, 19 nt, Homo sapiens
  misc_RNA (1)...(19): siRNA sense strand
gccaugagccaguuucuua

SEQ ID NO: 1892695 - RNA, 19 nt, Homo sapiens
  misc_RNA (1)...(19): siRNA sense strand
ggaagcauguuuacaccaa

SEQ ID NO: 1892696 - RNA, 19 nt, Homo sapiens
  misc_RNA (1)...(19): siRNA sense strand
ggaugaagaucaagauagu

SEQ ID NO: 1892697 - RNA, 19 nt, Homo sapiens
  misc_RNA (1)...(19): siRNA sense strand
ggcauuaacagaaccauua

SEQ ID NO: 1892698 - RNA, 19 nt, Homo sapiens
  misc_RNA (1)...(19): siRNA sense strand
ggagcugcuucgcuacuua

SEQ ID NO: 1892699 - RNA, 19 nt, Homo sapiens
  misc_RNA (1)...(19): siRNA sense strand
uaaacugcuuugugaagua

SEQ ID NO: 1892700 - RNA, 19 nt, Homo sapiens
  misc_RNA (1)...(19): siRNA sense strand
gaccaaaggcaaauauaaa

SEQ ID NO: 1892701 - RNA, 19 nt, Homo sapiens
  misc_RNA (1)...(19): siRNA sense strand
gaaaggacucaguaauuug

SEQ ID NO: 1892702 - RNA, 19 nt, Homo sapiens
  misc_RNA (1)...(19): siRNA sense strand
gcaaauagucaucucucua

SEQ ID NO: 1892703 - RNA, 19 nt, Homo sapiens
  misc_RNA (1)...(19): siRNA sense strand
caacauggauaaugaucug

SEQ ID NO: 1892704 - RNA, 19 nt, Homo sapiens
  misc_RNA (1)...(19): siRNA sense strand
uaagaauguugcagaagaa

SEQ ID NO: 1892705 - RNA, 19 nt, Homo sapiens
  misc_RNA (1)...(19): siRNA sense strand
gguacucuauuccuuauau

SEQ ID NO: 1892706 - RNA, 19 nt, Homo sapiens
  misc_RNA (1)...(19): siRNA sense strand
ggaaagaaacggacaaagg

SEQ ID NO: 1892707 - RNA, 19 nt, Homo sapiens
  misc_RNA (1)...(19): siRNA sense strand
uaacuaguaugaucaugug

SEQ ID NO: 1892708 - RNA, 19 nt, Homo sapiens
  misc_RNA (1)...(19): siRNA sense strand
caacuaaaguacuaaacuc

SEQ ID NO: 1892709 - RNA, 19 nt, Homo sapiens
  misc_RNA (1)...(19): siRNA sense strand
gugaaaggacucaguaauu

SEQ ID NO: 1892710 - RNA, 19 nt, Homo sapiens
  misc_RNA (1)...(19): siRNA sense strand
ugauuccucugaaacuuua

SEQ ID NO: 1892711 - RNA, 19 nt, Homo sapiens
  misc_RNA (1)...(19): siRNA sense strand
gcaagaaccgcaaauaguc

SEQ ID NO: 1892712 - RNA, 19 nt, Homo sapiens
  misc_RNA (1)...(19): siRNA sense strand
ugaagacagugaauaugaa

SEQ ID NO: 1892713 - RNA, 19 nt, Homo sapiens
  misc_RNA (1)...(19): siRNA sense strand
agucaucucucuaaucuug

SEQ ID NO: 1892714 - RNA, 19 nt, Homo sapiens
  misc_RNA (1)...(19): siRNA sense strand
ccaaauaaccgugaaagga

SEQ ID NO: 1892715 - RNA, 19 nt, Homo sapiens
  misc_RNA (1)...(19): siRNA sense strand
caucuuugguggugaacua

SEQ ID NO: 1892716 - RNA, 19 nt, Homo sapiens
  misc_RNA (1)...(19): siRNA sense strand
gaaagauaaagcugaagaa

SEQ ID NO: 1892717 - RNA, 19 nt, Homo sapiens
  misc_RNA (1)...(19): siRNA sense strand
ucacaaacaccagugcuua

SEQ ID NO: 1892718 - RNA, 19 nt, Homo sapiens
  misc_RNA (1)...(19): siRNA sense strand
caucagggcuguggcagaa

SEQ ID NO: 1892719 - RNA, 19 nt, Homo sapiens
  misc_RNA (1)...(19): siRNA sense strand
ccaguugggucaagugguu

SEQ ID NO: 1892720 - RNA, 19 nt, Homo sapiens
  misc_RNA (1)...(19): siRNA sense strand
gggcagugguuucacauca

SEQ ID NO: 1892721 - RNA, 19 nt, Homo sapiens
  misc_RNA (1)...(19): siRNA sense strand
gugaaaggaagcauguuua

SEQ ID NO: 1892722 - RNA, 19 nt, Homo sapiens
  misc_RNA (1)...(19): siRNA sense strand
gaagaagaaacagaagaaa

SEQ ID NO: 1892723 - RNA, 19 nt, Homo sapiens
  misc_RNA (1)...(19): siRNA sense strand
aagcguaccuccuauuuua

SEQ ID NO: 1892724 - RNA, 19 nt, Homo sapiens
  misc_RNA (1)...(19): siRNA sense strand
ucucuaaucuuguucuuca

SEQ ID NO: 1892725 - RNA, 19 nt, Homo sapiens
  misc_RNA (1)...(19): siRNA sense strand
uauaucaguucacccguaa

SEQ ID NO: 1892726 - RNA, 19 nt, Homo sapiens
  misc_RNA (1)...(19): siRNA sense strand
ccaaccauauuucacaaga

SEQ ID NO: 1892727 - RNA, 19 nt, Homo sapiens
  misc_RNA (1)...(19): siRNA sense strand
aaacaccagugcuuagaga

SEQ ID NO: 1892728 - RNA, 19 nt, Homo sapiens
  misc_RNA (1)...(19): siRNA sense strand
auaugaagcugaaauguca

SEQ ID NO: 1892729 - RNA, 19 nt, Homo sapiens
  misc_RNA (1)...(19): siRNA sense strand
cagaggaaguagauaugaa

SEQ ID NO: 1892730 - RNA, 19 nt, Homo sapiens
  misc_RNA (1)...(19): siRNA sense strand
gaucugaaccucacugucu

SEQ ID NO: 1892731 - RNA, 19 nt, Homo sapiens
  misc_RNA (1)...(19): siRNA sense strand
auacaaggguacucuauuc

SEQ ID NO: 1892732 - RNA, 19 nt, Homo sapiens
  misc_RNA (1)...(19): siRNA sense strand
guaugagguuguaaaugaa

SEQ ID NO: 1892733 - RNA, 19 nt, Homo sapiens
  misc_RNA (1)...(19): siRNA sense strand
gaugauuccucugaaacuu

SEQ ID NO: 1892734 - RNA, 19 nt, Homo sapiens
  misc_RNA (1)...(19): siRNA sense strand
ccacagaggaaguagauau

SEQ ID NO: 1892735 - RNA, 19 nt, Homo sapiens
  misc_RNA (1)...(19): siRNA sense strand
caagaggguguuaugcaua

SEQ ID NO: 1892736 - RNA, 19 nt, Homo sapiens
  misc_RNA (1)...(19): siRNA sense strand
gcagaacugucuccuuggu

SEQ ID NO: 1892737 - RNA, 19 nt, Homo sapiens
  misc_RNA (1)...(19): siRNA sense strand
ugagccaguuucuuaauga

SEQ ID NO: 1892738 - RNA, 19 nt, Homo sapiens
  misc_RNA (1)...(19): siRNA sense strand
gcagagaaagauaauggaa

SEQ ID NO: 1892739 - RNA, 19 nt, Homo sapiens
  misc_RNA (1)...(19): siRNA sense strand
gguguuacguaugugauaa

SEQ ID NO: 1892740 - RNA, 19 nt, Homo sapiens
  misc_RNA (1)...(19): siRNA sense strand
gaauaucugccaagacugu

SEQ ID NO: 1892741 - RNA, 19 nt, Homo sapiens
  misc_RNA (1)...(19): siRNA sense strand
gccuacaacuaaaguacua

SEQ ID NO: 1892742 - RNA, 19 nt, Homo sapiens
  misc_RNA (1)...(19): siRNA sense strand
ggugaaaggaagcauguuu

SEQ ID NO: 1892743 - RNA, 19 nt, Homo sapiens
  misc_RNA (1)...(19): siRNA sense strand
ucaugaaucuuuccuugau

SEQ ID NO: 1892744 - RNA, 19 nt, Homo sapiens
  misc_RNA (1)...(19): siRNA sense strand
guaaaggaauacuuaaagc

SEQ ID NO: 1892745 - RNA, 19 nt, Homo sapiens
  misc_RNA (1)...(19): siRNA sense strand
gagaauccucccaugaauu

SEQ ID NO: 1892746 - RNA, 19 nt, Homo sapiens
  misc_RNA (1)...(19): siRNA sense strand
uccaggcccucuuacuuua

SEQ ID NO: 1892747 - RNA, 19 nt, Homo sapiens
  misc_RNA (1)...(19): siRNA sense strand
aagagugaguaaaggaaua

SEQ ID NO: 1892748 - RNA, 19 nt, Homo sapiens
  misc_RNA (1)...(19): siRNA sense strand
gaacaccaaagagugagua

SEQ ID NO: 1892749 - RNA, 19 nt, Homo sapiens
  misc_RNA (1)...(19): siRNA sense strand
aaacaagccagcauuacaa

SEQ ID NO: 1892750 - RNA, 19 nt, Homo sapiens
  misc_RNA (1)...(19): siRNA sense strand
gcgaauaaacugcuuugug

SEQ ID NO: 1892751 - RNA, 19 nt, Homo sapiens
  misc_RNA (1)...(19): siRNA sense strand
aaaugaagauccagaaacu

SEQ ID NO: 1892752 - RNA, 19 nt, Homo sapiens
  misc_RNA (1)...(19): siRNA sense strand
cuaguaugaucauguguga

SEQ ID NO: 1892753 - RNA, 19 nt, Homo sapiens
  misc_RNA (1)...(19): siRNA sense strand
gauaaugagguccaguauu

SEQ ID NO: 1892754 - RNA, 19 nt, Homo sapiens
  misc_RNA (1)...(19): siRNA sense strand
ggugauauuccacaagauu

SEQ ID NO: 1892755 - RNA, 19 nt, Homo sapiens
  misc_RNA (1)...(19): siRNA sense strand
guaaaugaagauccagaaa

SEQ ID NO: 1892756 - RNA, 19 nt, Homo sapiens
  misc_RNA (1)...(19): siRNA sense strand
ggauaaugaucuggagguu

SEQ ID NO: 1892757 - RNA, 19 nt, Homo sapiens
  misc_RNA (1)...(19): siRNA sense strand
gaggaugaagaucaagaua

SEQ ID NO: 1892758 - RNA, 19 nt, Homo sapiens
  misc_RNA (1)...(19): siRNA sense strand
gaguaagaaugaacaagag

SEQ ID NO: 1892759 - RNA, 19 nt, Homo sapiens
  misc_RNA (1)...(19): siRNA sense strand
ugaagaagaaacagaagaa

SEQ ID NO: 1892760 - RNA, 19 nt, Homo sapiens
  misc_RNA (1)...(19): siRNA sense strand
guaauggaccaaaggcaaa

SEQ ID NO: 1892761 - RNA, 19 nt, Homo sapiens
  misc_RNA (1)...(19): siRNA sense strand
gaauaaacugcuuugugaa

SEQ ID NO: 1892762 - RNA, 19 nt, Homo sapiens
  misc_RNA (1)...(19): siRNA sense strand
acuguaagacugacaauaa

SEQ ID NO: 1892763 - RNA, 19 nt, Homo sapiens
  misc_RNA (1)...(19): siRNA sense strand
ucaguuuggcugugucuua

SEQ ID NO: 1892764 - RNA, 19 nt, Homo sapiens
  misc_RNA (1)...(19): siRNA sense strand
aaagguguaugagguugua

SEQ ID NO: 1892765 - RNA, 19 nt, Homo sapiens
  misc_RNA (1)...(19): siRNA sense strand
gaagcauguuuacaccaau

SEQ ID NO: 1892766 - RNA, 19 nt, Homo sapiens
  misc_RNA (1)...(19): siRNA sense strand
caguuuggcugugucuuaa

SEQ ID NO: 1892767 - RNA, 19 nt, Homo sapiens
  misc_RNA (1)...(19): siRNA sense strand
ucacaagcguaccuccuau

SEQ ID NO: 1892768 - RNA, 19 nt, Homo sapiens
  misc_RNA (1)...(19): siRNA sense strand
gaaccaacgaagacaacaa

SEQ ID NO: 1892769 - RNA, 19 nt, Homo sapiens
  misc_RNA (1)...(19): siRNA sense strand
uggaauaucugccaagacu

SEQ ID NO: 1892770 - RNA, 19 nt, Homo sapiens
  misc_RNA (1)...(19): siRNA sense strand
aaagagaauccucccauga

SEQ ID NO: 1892771 - RNA, 19 nt, Homo sapiens
  misc_RNA (1)...(19): siRNA sense strand
caaagagugaguaaaggaa

SEQ ID NO: 1892772 - RNA, 19 nt, Homo sapiens
  misc_RNA (1)...(19): siRNA sense strand
cuaaaguacuaaacucaca

SEQ ID NO: 1892773 - RNA, 19 nt, Homo sapiens
  misc_RNA (1)...(19): siRNA sense strand
gaaaggaagcauguuuaca

SEQ ID NO: 1892774 - RNA, 19 nt, Homo sapiens
  misc_RNA (1)...(19): siRNA sense strand
cuguaagacugacaauaaa

SEQ ID NO: 1892775 - RNA, 19 nt, Homo sapiens
  misc_RNA (1)...(19): siRNA sense strand
aauauugugucaaccagaa

SEQ ID NO: 1892776 - RNA, 19 nt, Homo sapiens
  misc_RNA (1)...(19): siRNA sense strand
aaagagagaagugauauuc

SEQ ID NO: 1892777 - RNA, 19 nt, Homo sapiens
  misc_RNA (1)...(19): siRNA sense strand
gagguccaguauuguaguu

SEQ ID NO: 1892778 - RNA, 19 nt, Homo sapiens
  misc_RNA (1)...(19): siRNA sense strand
ggcaagaaccgcaaauagu

SEQ ID NO: 1892779 - RNA, 19 nt, Homo sapiens
  misc_RNA (1)...(19): siRNA sense strand
ccaaagagugaguaaagga

SEQ ID NO: 1892780 - RNA, 19 nt, Homo sapiens
  misc_RNA (1)...(19): siRNA sense strand
gcagggaucuugccucuaa

SEQ ID NO: 1892781 - RNA, 19 nt, Homo sapiens
  misc_RNA (1)...(19): siRNA sense strand
ucaggaagauugagaaaua

SEQ ID NO: 1892782 - RNA, 19 nt, Homo sapiens
  misc_RNA (1)...(19): siRNA sense strand
ggcaaacacucuugagaua

SEQ ID NO: 1892783 - RNA, 19 nt, Homo sapiens
  misc_RNA (1)...(19): siRNA sense strand
caaacacucuugagauaaa

SEQ ID NO: 1892784 - RNA, 19 nt, Homo sapiens
  misc_RNA (1)...(19): siRNA sense strand
gaucuugccucuaaucaga

SEQ ID NO: 1892785 - RNA, 19 nt, Homo sapiens
  misc_RNA (1)...(19): siRNA sense strand
cagagaaacugcaggguaa

SEQ ID NO: 1892786 - RNA, 19 nt, Homo sapiens
  misc_RNA (1)...(19): siRNA sense strand
aaacaaaucaccaggauaa

SEQ ID NO: 1892787 - RNA, 19 nt, Homo sapiens
  misc_RNA (1)...(19): siRNA sense strand
agacugagcugauguggaa

SEQ ID NO: 1892788 - RNA, 19 nt, Homo sapiens
  misc_RNA (1)...(19): siRNA sense strand
ggaaacaaaucaccaggau

SEQ ID NO: 1892789 - RNA, 19 nt, Homo sapiens
  misc_RNA (1)...(19): siRNA sense strand
uaagaaggcucagggagaa

SEQ ID NO: 1892790 - RNA, 19 nt, Homo sapiens
  misc_RNA (1)...(19): siRNA sense strand
ccacacagcaucagagaaa

SEQ ID NO: 1892791 - RNA, 19 nt, Homo sapiens
  misc_RNA (1)...(19): siRNA sense strand
ggaagaaaugcaaaugaaa

SEQ ID NO: 1892792 - RNA, 19 nt, Homo sapiens
  misc_RNA (1)...(19): siRNA sense strand
caaacaccaugaggcuuua

SEQ ID NO: 1892793 - RNA, 19 nt, Homo sapiens
  misc_RNA (1)...(19): siRNA sense strand
gaagagggagaaaguguga

SEQ ID NO: 1892794 - RNA, 19 nt, Homo sapiens
  misc_RNA (1)...(19): siRNA sense strand
aaaguggaauguacaaaga

SEQ ID NO: 1892795 - RNA, 19 nt, Homo sapiens
  misc_RNA (1)...(19): siRNA sense strand
uggaagaaaugcaaaugaa

SEQ ID NO: 1892796 - RNA, 19 nt, Homo sapiens
  misc_RNA (1)...(19): siRNA sense strand
gaaacaaaucaccaggaua

SEQ ID NO: 1892797 - RNA, 19 nt, Homo sapiens
  misc_RNA (1)...(19): siRNA sense strand
gcaaacacucuugagauaa

SEQ ID NO: 1892798 - RNA, 19 nt, Homo sapiens
  misc_RNA (1)...(19): siRNA sense strand
cacagagucucacaacauu

SEQ ID NO: 1892799 - RNA, 19 nt, Homo sapiens
  misc_RNA (1)...(19): siRNA sense strand
uauggcaguuguccaauuu

SEQ ID NO: 1892800 - RNA, 19 nt, Homo sapiens
  misc_RNA (1)...(19): siRNA sense strand
gaaaguggaauguacaaag

SEQ ID NO: 1892801 - RNA, 19 nt, Homo sapiens
  misc_RNA (1)...(19): siRNA sense strand
guacaaagaaugaccaagu

SEQ ID NO: 1892802 - RNA, 19 nt, Homo sapiens
  misc_RNA (1)...(19): siRNA sense strand
ccaaacaccaugaggcuuu

SEQ ID NO: 1892803 - RNA, 19 nt, Homo sapiens
  misc_RNA (1)...(19): siRNA sense strand
gggagaaaguggaauguac

SEQ ID NO: 1892804 - RNA, 19 nt, Homo sapiens
  misc_RNA (1)...(19): siRNA sense strand
ggaauugcaccacuggaaa

SEQ ID NO: 1892805 - RNA, 19 nt, Homo sapiens
  misc_RNA (1)...(19): siRNA sense strand
gcaaauggacacucugauc

SEQ ID NO: 1892806 - RNA, 19 nt, Homo sapiens
  misc_RNA (1)...(19): siRNA sense strand
caggaagauugagaaauaa

SEQ ID NO: 1892807 - RNA, 19 nt, Homo sapiens
  misc_RNA (1)...(19): siRNA sense strand
gagguagucucucccaucu

SEQ ID NO: 1892808 - RNA, 19 nt, Homo sapiens
  misc_RNA (1)...(19): siRNA sense strand
aaacaaaacuacagcauuc

SEQ ID NO: 1892809 - RNA, 19 nt, Homo sapiens
  misc_RNA (1)...(19): siRNA sense strand
caaauggacacucugauca

SEQ ID NO: 1892810 - RNA, 19 nt, Homo sapiens
  misc_RNA (1)...(19): siRNA sense strand
gguagucucucccaucucu

SEQ ID NO: 1892811 - RNA, 19 nt, Homo sapiens
  misc_RNA (1)...(19): siRNA sense strand
caaggcagcccacacucua

SEQ ID NO: 1892812 - RNA, 19 nt, Homo sapiens
  misc_RNA (1)...(19): siRNA sense strand
guaaugaggaacuuuggaa

SEQ ID NO: 1892813 - RNA, 19 nt, Homo sapiens
  misc_RNA (1)...(19): siRNA sense strand
ggaagauugagaaauaaga

SEQ ID NO: 1892814 - RNA, 19 nt, Homo sapiens
  misc_RNA (1)...(19): siRNA sense strand
cuccauaccacuuaaauaa

SEQ ID NO: 1892815 - RNA, 19 nt, Homo sapiens
  misc_RNA (1)...(19): siRNA sense strand
gaaagcaauccaucguguu

SEQ ID NO: 1892816 - RNA, 19 nt, Homo sapiens
  misc_RNA (1)...(19): siRNA sense strand
aauggacacucugaucaua

SEQ ID NO: 1892817 - RNA, 19 nt, Homo sapiens
  misc_RNA (1)...(19): siRNA sense strand
uggacacucugaucauaaa

SEQ ID NO: 1892818 - RNA, 19 nt, Homo sapiens
  misc_RNA (1)...(19): siRNA sense strand
gugcugagaugacaaugag

SEQ ID NO: 1892819 - RNA, 19 nt, Homo sapiens
  misc_RNA (1)...(19): siRNA sense strand
gcacugccaaggcugguuu

SEQ ID NO: 1892820 - RNA, 19 nt, Homo sapiens
  misc_RNA (1)...(19): siRNA sense strand
cuaaucagauaagcuguga

SEQ ID NO: 1892821 - RNA, 19 nt, Homo sapiens
  misc_RNA (1)...(19): siRNA sense strand
uacaaagaaugaccaagug

SEQ ID NO: 1892822 - RNA, 19 nt, Homo sapiens
  misc_RNA (1)...(19): siRNA sense strand
ccaaaccaguggaaauuuu

SEQ ID NO: 1892823 - RNA, 19 nt, Homo sapiens
  misc_RNA (1)...(19): siRNA sense strand
ggagaaaguggaauguaca

SEQ ID NO: 1892824 - RNA, 19 nt, Homo sapiens
  misc_RNA (1)...(19): siRNA sense strand
ccaugaggcuuuaaagacu

SEQ ID NO: 1892825 - RNA, 19 nt, Homo sapiens
  misc_RNA (1)...(19): siRNA sense strand
gcauucuccauaccacuua

SEQ ID NO: 1892826 - RNA, 19 nt, Homo sapiens
  misc_RNA (1)...(19): siRNA sense strand
acaggagaauggaaaugaa

SEQ ID NO: 1892827 - RNA, 19 nt, Homo sapiens
  misc_RNA (1)...(19): siRNA sense strand
caggacacaugcaaaugga

SEQ ID NO: 1892828 - RNA, 19 nt, Homo sapiens
  misc_RNA (1)...(19): siRNA sense strand
gggaauugcaccacuggaa

SEQ ID NO: 1892829 - RNA, 19 nt, Homo sapiens
  misc_RNA (1)...(19): siRNA sense strand
uugcaccacuggaaacaaa

SEQ ID NO: 1892830 - RNA, 19 nt, Homo sapiens
  misc_RNA (1)...(19): siRNA sense strand
caccaaaccaguggaaauu

SEQ ID NO: 1892831 - RNA, 19 nt, Homo sapiens
  misc_RNA (1)...(19): siRNA sense strand
ugaaacacguggagaagcu

SEQ ID NO: 1892832 - RNA, 19 nt, Homo sapiens
  misc_RNA (1)...(19): siRNA sense strand
gagaaaguggaauguacaa

SEQ ID NO: 1892833 - RNA, 19 nt, Homo sapiens
  misc_RNA (1)...(19): siRNA sense strand
ggucgaagagggagaaagu

SEQ ID NO: 1892834 - RNA, 19 nt, Homo sapiens
  misc_RNA (1)...(19): siRNA sense strand
ugagcaccgugacauaaug

SEQ ID NO: 1892835 - RNA, 19 nt, Homo sapiens
  misc_RNA (1)...(19): siRNA sense strand
uggcaguuguccaauuuga

SEQ ID NO: 1892836 - RNA, 19 nt, Homo sapiens
  misc_RNA (1)...(19): siRNA sense strand
gagcugggcaugcauggau

SEQ ID NO: 1892837 - RNA, 19 nt, Homo sapiens
  misc_RNA (1)...(19): siRNA sense strand
gagcaccgugacauaauga

SEQ ID NO: 1892838 - RNA, 19 nt, Homo sapiens
  misc_RNA (1)...(19): siRNA sense strand
gcaggguaaugaggaacuu

SEQ ID NO: 1892839 - RNA, 19 nt, Homo sapiens
  misc_RNA (1)...(19): siRNA sense strand
aaagcaauccaucguguug

SEQ ID NO: 1892840 - RNA, 19 nt, Homo sapiens
  misc_RNA (1)...(19): siRNA sense strand
acacagagucucacaacau

SEQ ID NO: 1892841 - RNA, 19 nt, Homo sapiens
  misc_RNA (1)...(19): siRNA sense strand
guggaagaaaugcaaauga

SEQ ID NO: 1892842 - RNA, 19 nt, Homo sapiens
  misc_RNA (1)...(19): siRNA sense strand
ucuaaacccugccugaaac

SEQ ID NO: 1892843 - RNA, 19 nt, Homo sapiens
  misc_RNA (1)...(19): siRNA sense strand
gaaaagggaaagaguuguu

SEQ ID NO: 1892844 - RNA, 19 nt, Homo sapiens
  misc_RNA (1)...(19): siRNA sense strand
caggagaauggaaaugaaa

SEQ ID NO: 1892845 - RNA, 19 nt, Homo sapiens
  misc_RNA (1)...(19): siRNA sense strand
gccaacaggagaauggaaa

SEQ ID NO: 1892846 - RNA, 19 nt, Homo sapiens
  misc_RNA (1)...(19): siRNA sense strand
caaaucaccaggauaaagc

SEQ ID NO: 1892847 - RNA, 19 nt, Homo sapiens
  misc_RNA (1)...(19): siRNA sense strand
uggaauguacaaagaauga

SEQ ID NO: 1892848 - RNA, 19 nt, Homo sapiens
  misc_RNA (1)...(19): siRNA sense strand
gacacagagucucacaaca

SEQ ID NO: 1892849 - RNA, 19 nt, Homo sapiens
  misc_RNA (1)...(19): siRNA sense strand
gauggugacccucgaugga

SEQ ID NO: 1892850 - RNA, 19 nt, Homo sapiens
  misc_RNA (1)...(19): siRNA sense strand
gagaaacugcaggguaaug

SEQ ID NO: 1892851 - RNA, 19 nt, Homo sapiens
  misc_RNA (1)...(19): siRNA sense strand
uuauggcaguuguccaauu

SEQ ID NO: 1892852 - RNA, 19 nt, Homo sapiens
  misc_RNA (1)...(19): siRNA sense strand
guaauggcaaacacucuug

SEQ ID NO: 1892853 - RNA, 19 nt, Homo sapiens
  misc_RNA (1)...(19): siRNA sense strand
gcccaggacacaauccaaa

SEQ ID NO: 1892854 - RNA, 19 nt, Homo sapiens
  misc_RNA (1)...(19): siRNA sense strand
gcucuaaacccugccugaa

SEQ ID NO: 1892855 - RNA, 19 nt, Homo sapiens
  misc_RNA (1)...(19): siRNA sense strand
gaaacacguggagaagcua

SEQ ID NO: 1892856 - RNA, 19 nt, Homo sapiens
  misc_RNA (1)...(19): siRNA sense strand
gaagauugagaaauaagac

SEQ ID NO: 1892857 - RNA, 19 nt, Homo sapiens
  misc_RNA (1)...(19): siRNA sense strand
gcaguuguccaauuugaac

SEQ ID NO: 1892858 - RNA, 19 nt, Homo sapiens
  misc_RNA (1)...(19): siRNA sense strand
gcucagggagaaaguggaa

SEQ ID NO: 1892859 - RNA, 19 nt, Homo sapiens
  misc_RNA (1)...(19): siRNA sense strand
uuuaaagacugagcugaug

SEQ ID NO: 1892860 - RNA, 19 nt, Homo sapiens
  misc_RNA (1)...(19): siRNA sense strand
ccacaggagccaccaugga

SEQ ID NO: 1892861 - RNA, 19 nt, Homo sapiens
  misc_RNA (1)...(19): siRNA sense strand
cagagucucacaacauuca

SEQ ID NO: 1892862 - RNA, 19 nt, Homo sapiens
  misc_RNA (1)...(19): siRNA sense strand
gacccucgauggaauagac

SEQ ID NO: 1892863 - RNA, 19 nt, Homo sapiens
  misc_RNA (1)...(19): siRNA sense strand
uaaugaggaacuuuggaaa

SEQ ID NO: 1892864 - RNA, 19 nt, Homo sapiens
  misc_RNA (1)...(19): siRNA sense strand
gaccacacagcaucagaga

SEQ ID NO: 1892865 - RNA, 19 nt, Homo sapiens
  misc_RNA (1)...(19): siRNA sense strand
ggugacccucgauggaaua

SEQ ID NO: 1892866 - RNA, 19 nt, Homo sapiens
  misc_RNA (1)...(19): siRNA sense strand
caacaggagaauggaaaug

SEQ ID NO: 1892867 - RNA, 19 nt, Homo sapiens
  misc_RNA (1)...(19): siRNA sense strand
gcaaguaauggcaaacacu

SEQ ID NO: 1892868 - RNA, 19 nt, Homo sapiens
  misc_RNA (1)...(19): siRNA sense strand
acaaugaggguuggaauca

SEQ ID NO: 1892869 - RNA, 19 nt, Homo sapiens
  misc_RNA (1)...(19): siRNA sense strand
uccaucguguugucaguaa

SEQ ID NO: 1892870 - RNA, 19 nt, Homo sapiens
  misc_RNA (1)...(19): siRNA sense strand
gaaugaccaagugggaauu

SEQ ID NO: 1892871 - RNA, 19 nt, Homo sapiens
  misc_RNA (1)...(19): siRNA sense strand
ucuugccucuaaucagaua

SEQ ID NO: 1892872 - RNA, 19 nt, Homo sapiens
  misc_RNA (1)...(19): siRNA sense strand
caccaugaggcuuuaaaga

SEQ ID NO: 1892873 - RNA, 19 nt, Homo sapiens
  misc_RNA (1)...(19): siRNA sense strand
ugaccugcauacccaaaca

SEQ ID NO: 1892874 - RNA, 19 nt, Homo sapiens
  misc_RNA (1)...(19): siRNA sense strand
cauaagcccaaccacauca

SEQ ID NO: 1892875 - RNA, 19 nt, Homo sapiens
  misc_RNA (1)...(19): siRNA sense strand
gaauugcaccacuggaaac

SEQ ID NO: 1892876 - RNA, 19 nt, Homo sapiens
  misc_RNA (1)...(19): siRNA sense strand
uaucaggaagauugagaaa

SEQ ID NO: 1892877 - RNA, 19 nt, Homo sapiens
  misc_RNA (1)...(19): siRNA sense strand
uaaagacugagcugaugug

SEQ ID NO: 1892878 - RNA, 19 nt, Homo sapiens
  misc_RNA (1)...(19): siRNA sense strand
ccaggacacaugcaaaugg

SEQ ID NO: 1892879 - RNA, 19 nt, Homo sapiens
  misc_RNA (1)...(19): siRNA sense strand
gacaaugaggguuggaauc

SEQ ID NO: 1892880 - RNA, 19 nt, Homo sapiens
  misc_RNA (1)...(19): siRNA sense strand
gaauacauguucccgaauu

SEQ ID NO: 1892881 - RNA, 19 nt, Homo sapiens
  misc_RNA (1)...(19): siRNA sense strand
gcaaacagacuucggagua

SEQ ID NO: 1892882 - RNA, 19 nt, Homo sapiens
  misc_RNA (1)...(19): siRNA sense strand
caugagaccuggaaacaaa

SEQ ID NO: 1892883 - RNA, 19 nt, Homo sapiens
  misc_RNA (1)...(19): siRNA sense strand
gaucugaacaucccugaua

SEQ ID NO: 1892884 - RNA, 19 nt, Homo sapiens
  misc_RNA (1)...(19): siRNA sense strand
caacuccucugcuagauga

SEQ ID NO: 1892885 - RNA, 19 nt, Homo sapiens
  misc_RNA (1)...(19): siRNA sense strand
caacaacaaugugcaguga

SEQ ID NO: 1892886 - RNA, 19 nt, Homo sapiens
  misc_RNA (1)...(19): siRNA sense strand
gaauauuccuuacugaucu

SEQ ID NO: 1892887 - RNA, 19 nt, Homo sapiens
  misc_RNA (1)...(19): siRNA sense strand
ugaaguuacucgugucaaa

SEQ ID NO: 1892888 - RNA, 19 nt, Homo sapiens
  misc_RNA (1)...(19): siRNA sense strand
acacuuaccuugccaaugg

SEQ ID NO: 1892889 - RNA, 19 nt, Homo sapiens
  misc_RNA (1)...(19): siRNA sense strand
gaaguugucaucagucaga

SEQ ID NO: 1892890 - RNA, 19 nt, Homo sapiens
  misc_RNA (1)...(19): siRNA sense strand
caacaacuccucugcuaga

SEQ ID NO: 1892891 - RNA, 19 nt, Homo sapiens
  misc_RNA (1)...(19): siRNA sense strand
cgaaccagcucugagauga

SEQ ID NO: 1892892 - RNA, 19 nt, Homo sapiens
  misc_RNA (1)...(19): siRNA sense strand
gcaagagccuucggguuca

SEQ ID NO: 1892893 - RNA, 19 nt, Homo sapiens
  misc_RNA (1)...(19): siRNA sense strand
agacagcccuaucuuuaug

SEQ ID NO: 1892894 - RNA, 19 nt, Homo sapiens
  misc_RNA (1)...(19): siRNA sense strand
cggaguaccugcgcuauga

SEQ ID NO: 1892895 - RNA, 19 nt, Homo sapiens
  misc_RNA (1)...(19): siRNA sense strand
ugacauggauggcucucaa

SEQ ID NO: 1892896 - RNA, 19 nt, Homo sapiens
  misc_RNA (1)...(19): siRNA sense strand
guggaggugugugaaguua

SEQ ID NO: 1892897 - RNA, 19 nt, Homo sapiens
  misc_RNA (1)...(19): siRNA sense strand
gucagaggcaaucauauua

SEQ ID NO: 1892898 - RNA, 19 nt, Homo sapiens
  misc_RNA (1)...(19): siRNA sense strand
gagaugaguuggguagauc

SEQ ID NO: 1892899 - RNA, 19 nt, Homo sapiens
  misc_RNA (1)...(19): siRNA sense strand
ggaaacaaauaugaguaca

SEQ ID NO: 1892900 - RNA, 19 nt, Homo sapiens
  misc_RNA (1)...(19): siRNA sense strand
ggcagcagaucaggucuaa

SEQ ID NO: 1892901 - RNA, 19 nt, Homo sapiens
  misc_RNA (1)...(19): siRNA sense strand
caacucaagagacaaagaa

SEQ ID NO: 1892902 - RNA, 19 nt, Homo sapiens
  misc_RNA (1)...(19): siRNA sense strand
caugcugacuuugagaaua

SEQ ID NO: 1892903 - RNA, 19 nt, Homo sapiens
  misc_RNA (1)...(19): siRNA sense strand
cccaacaacuccucugcua

SEQ ID NO: 1892904 - RNA, 19 nt, Homo sapiens
  misc_RNA (1)...(19): siRNA sense strand
agaccaaggugcugacuca

SEQ ID NO: 1892905 - RNA, 19 nt, Homo sapiens
  misc_RNA (1)...(19): siRNA sense strand
gcuccucccugcuauaugg

SEQ ID NO: 1892906 - RNA, 19 nt, Homo sapiens
  misc_RNA (1)...(19): siRNA sense strand
cagaaguugucaucaguca

SEQ ID NO: 1892907 - RNA, 19 nt, Homo sapiens
  misc_RNA (1)...(19): siRNA sense strand
cagaagcuccucccugcua

SEQ ID NO: 1892908 - RNA, 19 nt, Homo sapiens
  misc_RNA (1)...(19): siRNA sense strand
ggucuaagcagcagaacau

SEQ ID NO: 1892909 - RNA, 19 nt, Homo sapiens
  misc_RNA (1)...(19): siRNA sense strand
cagaggcaaucauauuauc

SEQ ID NO: 1892910 - RNA, 19 nt, Homo sapiens
  misc_RNA (1)...(19): siRNA sense strand
gaccuggaaacaaauauga

SEQ ID NO: 1892911 - RNA, 19 nt, Homo sapiens
  misc_RNA (1)...(19): siRNA sense strand
ggaugucauuccugaagau

SEQ ID NO: 1892912 - RNA, 19 nt, Homo sapiens
  misc_RNA (1)...(19): siRNA sense strand
ggaggugugugaaguuacu

SEQ ID NO: 1892913 - RNA, 19 nt, Homo sapiens
  misc_RNA (1)...(19): siRNA sense strand
ucagucagaggcaaucaua

SEQ ID NO: 1892914 - RNA, 19 nt, Homo sapiens
  misc_RNA (1)...(19): siRNA sense strand
caaauaugaguacaaguuc

SEQ ID NO: 1892915 - RNA, 19 nt, Homo sapiens
  misc_RNA (1)...(19): siRNA sense strand
cauauuaucucagggacau

SEQ ID NO: 1892916 - RNA, 19 nt, Homo sapiens
  misc_RNA (1)...(19): siRNA sense strand
caaacagacuucggaguac

SEQ ID NO: 1892917 - RNA, 19 nt, Homo sapiens
  misc_RNA (1)...(19): siRNA sense strand
aaaguuuccugcauguuca

SEQ ID NO: 1892918 - RNA, 19 nt, Homo sapiens
  misc_RNA (1)...(19): siRNA sense strand
gaagcuccucccugcuaua

SEQ ID NO: 1892919 - RNA, 19 nt, Homo sapiens
  misc_RNA (1)...(19): siRNA sense strand
caaguucggcuuugagcuu

SEQ ID NO: 1892920 - RNA, 19 nt, Homo sapiens
  misc_RNA (1)...(19): siRNA sense strand
uaguggaucugguggaugu

SEQ ID NO: 1892921 - RNA, 19 nt, Homo sapiens
  misc_RNA (1)...(19): siRNA sense strand
cggaguggcuaaagugcuu

SEQ ID NO: 1892922 - RNA, 19 nt, Homo sapiens
  misc_RNA (1)...(19): siRNA sense strand
guugaauauuccuuacuga

SEQ ID NO: 1892923 - RNA, 19 nt, Homo sapiens
  misc_RNA (1)...(19): siRNA sense strand
ccagccaacucaagagaca

SEQ ID NO: 1892924 - RNA, 19 nt, Homo sapiens
  misc_RNA (1)...(19): siRNA sense strand
caacaggugagaaugagau

SEQ ID NO: 1892925 - RNA, 19 nt, Homo sapiens
  misc_RNA (1)...(19): siRNA sense strand
ugaguuggguagaucugaa

SEQ ID NO: 1892926 - RNA, 19 nt, Homo sapiens
  misc_RNA (1)...(19): siRNA sense strand
cugugaaggugaugagauu

SEQ ID NO: 1892927 - RNA, 19 nt, Homo sapiens
  misc_RNA (1)...(19): siRNA sense strand
caauaccccugauuuaaug

SEQ ID NO: 1892928 - RNA, 19 nt, Homo sapiens
  misc_RNA (1)...(19): siRNA sense strand
gaguacaaguucggcuuug

SEQ ID NO: 1892929 - RNA, 19 nt, Homo sapiens
  misc_RNA (1)...(19): siRNA sense strand
uggcaccugugucugcuaa

SEQ ID NO: 1892930 - RNA, 19 nt, Homo sapiens
  misc_RNA (1)...(19): siRNA sense strand
ugagaugaguuggguagau

SEQ ID NO: 1892931 - RNA, 19 nt, Homo sapiens
  misc_RNA (1)...(19): siRNA sense strand
agucagaggcaaucauauu

SEQ ID NO: 1892932 - RNA, 19 nt, Homo sapiens
  misc_RNA (1)...(19): siRNA sense strand
uuccauccaugcugacuuu

SEQ ID NO: 1892933 - RNA, 19 nt, Homo sapiens
  misc_RNA (1)...(19): siRNA sense strand
agacacgcuucuucuggaa

SEQ ID NO: 1892934 - RNA, 19 nt, Homo sapiens
  misc_RNA (1)...(19): siRNA sense strand
ucagaggcaaucauauuau

SEQ ID NO: 1892935 - RNA, 19 nt, Homo sapiens
  misc_RNA (1)...(19): siRNA sense strand
caccaccgacuuauacuga

SEQ ID NO: 1892936 - RNA, 19 nt, Homo sapiens
  misc_RNA (1)...(19): siRNA sense strand
gaaguuacucgugucaaag

SEQ ID NO: 1892937 - RNA, 19 nt, Homo sapiens
  misc_RNA (1)...(19): siRNA sense strand
ugagaccuggaaacaaaua

SEQ ID NO: 1892938 - RNA, 19 nt, Homo sapiens
  misc_RNA (1)...(19): siRNA sense strand
acagcccuaucuuuaugua

SEQ ID NO: 1892939 - RNA, 19 nt, Homo sapiens
  misc_RNA (1)...(19): siRNA sense strand
ugaauauuccuuacugauc

SEQ ID NO: 1892940 - RNA, 19 nt, Homo sapiens
  misc_RNA (1)...(19): siRNA sense strand
gucugucucugcucgaauu

SEQ ID NO: 1892941 - RNA, 19 nt, Homo sapiens
  misc_RNA (1)...(19): siRNA sense strand
acuacugggugaaggcuuu

SEQ ID NO: 1892942 - RNA, 19 nt, Homo sapiens
  misc_RNA (1)...(19): siRNA sense strand
gaucugguggaugucaaua

SEQ ID NO: 1892943 - RNA, 19 nt, Homo sapiens
  misc_RNA (1)...(19): siRNA sense strand
aauacauguucccgaauug

SEQ ID NO: 1892944 - RNA, 19 nt, Homo sapiens
  misc_RNA (1)...(19): siRNA sense strand
gcaccugugucugcuaaaa

SEQ ID NO: 1892945 - RNA, 19 nt, Homo sapiens
  misc_RNA (1)...(19): siRNA sense strand
gagaaugagauggugauca

SEQ ID NO: 1892946 - RNA, 19 nt, Homo sapiens
  misc_RNA (1)...(19): siRNA sense strand
uccugaagaucaccgauug

SEQ ID NO: 1892947 - RNA, 19 nt, Homo sapiens
  misc_RNA (1)...(19): siRNA sense strand
gguaauuggcagcagauca

SEQ ID NO: 1892948 - RNA, 19 nt, Homo sapiens
  misc_RNA (1)...(19): siRNA sense strand
guaauuggcagcagaucag

SEQ ID NO: 1892949 - RNA, 19 nt, Homo sapiens
  misc_RNA (1)...(19): siRNA sense strand
cugcucgaauugacagaaa

SEQ ID NO: 1892950 - RNA, 19 nt, Homo sapiens
  misc_RNA (1)...(19): siRNA sense strand
cagcagaucaggucuaagc

SEQ ID NO: 1892951 - RNA, 19 nt, Homo sapiens
  misc_RNA (1)...(19): siRNA sense strand
uauguuagcguuccuggau

SEQ ID NO: 1892952 - RNA, 19 nt, Homo sapiens
  misc_RNA (1)...(19): siRNA sense strand
cgaguugaauauuccuuac

SEQ ID NO: 1892953 - RNA, 19 nt, Homo sapiens
  misc_RNA (1)...(19): siRNA sense strand
ucgaguugaauauuccuua

SEQ ID NO: 1892954 - RNA, 19 nt, Homo sapiens
  misc_RNA (1)...(19): siRNA sense strand
ucccagcagugcaaacaga

SEQ ID NO: 1892955 - RNA, 19 nt, Homo sapiens
  misc_RNA (1)...(19): siRNA sense strand
cauccaugcugacuuugag

SEQ ID NO: 1892956 - RNA, 19 nt, Homo sapiens
  misc_RNA (1)...(19): siRNA sense strand
ucugggaacauccuucaaa

SEQ ID NO: 1892957 - RNA, 19 nt, Homo sapiens
  misc_RNA (1)...(19): siRNA sense strand
auggauggcucucaagaca

SEQ ID NO: 1892958 - RNA, 19 nt, Homo sapiens
  misc_RNA (1)...(19): siRNA sense strand
agaagcuccucccugcuau

SEQ ID NO: 1892959 - RNA, 19 nt, Homo sapiens
  misc_RNA (1)...(19): siRNA sense strand
gccaacaggugagaaugag

SEQ ID NO: 1892960 - RNA, 19 nt, Homo sapiens
  misc_RNA (1)...(19): siRNA sense strand
gauuuaauggcaccugugu

SEQ ID NO: 1892961 - RNA, 19 nt, Homo sapiens
  misc_RNA (1)...(19): siRNA sense strand
gaaaauauggguguguaga

SEQ ID NO: 1892962 - RNA, 19 nt, Homo sapiens
  misc_RNA (1)...(19): siRNA sense strand
ucugcuagaugacauggau

SEQ ID NO: 1892963 - RNA, 19 nt, Homo sapiens
  misc_RNA (1)...(19): siRNA sense strand
agcccuaucuuuauguaug

SEQ ID NO: 1892964 - RNA, 19 nt, Homo sapiens
  misc_RNA (1)...(19): siRNA sense strand
ugaguacaaguucggcuuu

SEQ ID NO: 1892965 - RNA, 19 nt, Homo sapiens
  misc_RNA (1)...(19): siRNA sense strand
ucaugccaccaccgacuua

SEQ ID NO: 1892966 - RNA, 19 nt, Homo sapiens
  misc_RNA (1)...(19): siRNA sense strand
gaucaugagaccuggaaac

SEQ ID NO: 1892967 - RNA, 19 nt, Homo sapiens
  misc_RNA (1)...(19): siRNA sense strand
gaucccagcagugcaaaca

SEQ ID NO: 1892968 - RNA, 19 nt, Homo sapiens
  misc_RNA (1)...(19): siRNA sense strand
gugaaggugaugagauuuc

SEQ ID NO: 1892969 - RNA, 19 nt, Homo sapiens
  misc_RNA (1)...(19): siRNA sense strand
cgagccagccaacucaaga

SEQ ID NO: 1892970 - RNA, 19 nt, Homo sapiens
  misc_RNA (1)...(19): siRNA sense strand
ggaguaccugcgcuaugaa

SEQ ID NO: 1892971 - RNA, 19 nt, Homo sapiens
  misc_RNA (1)...(19): siRNA sense strand
guacaaguucggcuuugag

SEQ ID NO: 1892972 - RNA, 19 nt, Homo sapiens
  misc_RNA (1)...(19): siRNA sense strand
uggaugucauuccugaaga

SEQ ID NO: 1892973 - RNA, 19 nt, Homo sapiens
  misc_RNA (1)...(19): siRNA sense strand
ccaauggccagaccaaggu

SEQ ID NO: 1892974 - RNA, 19 nt, Homo sapiens
  misc_RNA (1)...(19): siRNA sense strand
ccccaaagcugccauugug

SEQ ID NO: 1892975 - RNA, 19 nt, Homo sapiens
  misc_RNA (1)...(19): siRNA sense strand
gauaguggaggugugugaa

SEQ ID NO: 1892976 - RNA, 19 nt, Homo sapiens
  misc_RNA (1)...(19): siRNA sense strand
aaauauggguguguagacu

SEQ ID NO: 1892977 - RNA, 19 nt, Homo sapiens
  misc_RNA (1)...(19): siRNA sense strand
acucagaaguugucaucag

SEQ ID NO: 1892978 - RNA, 19 nt, Homo sapiens
  misc_RNA (1)...(19): siRNA sense strand
gaggcaaucauauuaucuc

SEQ ID NO: 1892979 - RNA, 19 nt, Homo sapiens
  misc_RNA (1)...(19): siRNA sense strand
gaaccagcucugagaugag

SEQ ID NO: 1892980 - RNA, 19 nt, Homo sapiens
  misc_RNA (1)...(19): siRNA sense strand
gcucagaaaucauagaaga

SEQ ID NO: 1892981 - RNA, 19 nt, Homo sapiens
  misc_RNA (1)...(19): siRNA sense strand
gaggagacaugaaauaugg

SEQ ID NO: 1892982 - RNA, 19 nt, Homo sapiens
  misc_RNA (1)...(19): siRNA sense strand
ggaacaacgagaccaguua

SEQ ID NO: 1892983 - RNA, 19 nt, Homo sapiens
  misc_RNA (1)...(19): siRNA sense strand
ugucuaagcuucgaaacua

SEQ ID NO: 1892984 - RNA, 19 nt, Homo sapiens
  misc_RNA (1)...(19): siRNA sense strand
cauauaugcuguagagaau

SEQ ID NO: 1892985 - RNA, 19 nt, Homo sapiens
  misc_RNA (1)...(19): siRNA sense strand
caacaggaagcaaaugaaa

SEQ ID NO: 1892986 - RNA, 19 nt, Homo sapiens
  misc_RNA (1)...(19): siRNA sense strand
ggaagauucuccguucaau

SEQ ID NO: 1892987 - RNA, 19 nt, Homo sapiens
  misc_RNA (1)...(19): siRNA sense strand
cacagagacugaccagauu

SEQ ID NO: 1892988 - RNA, 19 nt, Homo sapiens
  misc_RNA (1)...(19): siRNA sense strand
uauaugcuguagagaauga

SEQ ID NO: 1892989 - RNA, 19 nt, Homo sapiens
  misc_RNA (1)...(19): siRNA sense strand
gugagaagcacaccuuuga

SEQ ID NO: 1892990 - RNA, 19 nt, Homo sapiens
  misc_RNA (1)...(19): siRNA sense strand
ccacagagacugaccagau

SEQ ID NO: 1892991 - RNA, 19 nt, Homo sapiens
  misc_RNA (1)...(19): siRNA sense strand
gaacaacgagaccaguuag

SEQ ID NO: 1892992 - RNA, 19 nt, Homo sapiens
  misc_RNA (1)...(19): siRNA sense strand
ucgagaagcugcacgagau

SEQ ID NO: 1892993 - RNA, 19 nt, Homo sapiens
  misc_RNA (1)...(19): siRNA sense strand
ugaaucggcuacagucuca

SEQ ID NO: 1892994 - RNA, 19 nt, Homo sapiens
  misc_RNA (1)...(19): siRNA sense strand
gcaacaggaagcaaaugaa

SEQ ID NO: 1892995 - RNA, 19 nt, Homo sapiens
  misc_RNA (1)...(19): siRNA sense strand
gaacguaccaagaguagac

SEQ ID NO: 1892996 - RNA, 19 nt, Homo sapiens
  misc_RNA (1)...(19): siRNA sense strand
gagaagcacaccuuugaca

SEQ ID NO: 1892997 - RNA, 19 nt, Homo sapiens
  misc_RNA (1)...(19): siRNA sense strand
gagcaaaagucggaagauu

SEQ ID NO: 1892998 - RNA, 19 nt, Homo sapiens
  misc_RNA (1)...(19): siRNA sense strand
guagagaaugagcauauga

SEQ ID NO: 1892999 - RNA, 19 nt, Homo sapiens
  misc_RNA (1)...(19): siRNA sense strand
cgagaccaguuagaacgua

SEQ ID NO: 1893000 - RNA, 19 nt, Homo sapiens
  misc_RNA (1)...(19): siRNA sense strand
ggaccuugcuaaacuccau

SEQ ID NO: 1893001 - RNA, 19 nt, Homo sapiens
  misc_RNA (1)...(19): siRNA sense strand
gaagauucuccguucaaug

SEQ ID NO: 1893002 - RNA, 19 nt, Homo sapiens
  misc_RNA (1)...(19): siRNA sense strand
ugaacguucucaucggauu

SEQ ID NO: 1893003 - RNA, 19 nt, Homo sapiens
  misc_RNA (1)...(19): siRNA sense strand
gaccagauuggcucagaaa

SEQ ID NO: 1893004 - RNA, 19 nt, Homo sapiens
  misc_RNA (1)...(19): siRNA sense strand
gagaaugagcauaugaauc

SEQ ID NO: 1893005 - RNA, 19 nt, Homo sapiens
  misc_RNA (1)...(19): siRNA sense strand
agaaugagcauaugaaucg

SEQ ID NO: 1893006 - RNA, 19 nt, Homo sapiens
  misc_RNA (1)...(19): siRNA sense strand
ggaggaggagcuacguuau

SEQ ID NO: 1893007 - RNA, 19 nt, Homo sapiens
  misc_RNA (1)...(19): siRNA sense strand
gccgaggagacaugaaaua

SEQ ID NO: 1893008 - RNA, 19 nt, Homo sapiens
  misc_RNA (1)...(19): siRNA sense strand
gaggaggagcuacguuaug

SEQ ID NO: 1893009 - RNA, 19 nt, Homo sapiens
  misc_RNA (1)...(19): siRNA sense strand
uggaggaggagcuacguua

SEQ ID NO: 1893010 - RNA, 19 nt, Homo sapiens
  misc_RNA (1)...(19): siRNA sense strand
gaacguucucaucggauug

SEQ ID NO: 1893011 - RNA, 19 nt, Homo sapiens
  misc_RNA (1)...(19): siRNA sense strand
guuagaacguaccaagagu

SEQ ID NO: 1893012 - RNA, 19 nt, Homo sapiens
  misc_RNA (1)...(19): siRNA sense strand
aagauucuccguucaaugu

SEQ ID NO: 1893013 - RNA, 19 nt, Homo sapiens
  misc_RNA (1)...(19): siRNA sense strand
cgaggagacaugaaauaug

SEQ ID NO: 1893014 - RNA, 19 nt, Homo sapiens
  misc_RNA (1)...(19): siRNA sense strand
ccagaaaagugacaaccaa

SEQ ID NO: 1893015 - RNA, 19 nt, Homo sapiens
  misc_RNA (1)...(19): siRNA sense strand
gggaacaacgagaccaguu

SEQ ID NO: 1893016 - RNA, 19 nt, Homo sapiens
  misc_RNA (1)...(19): siRNA sense strand
augaaacgcuggcagagau

SEQ ID NO: 1893017 - RNA, 19 nt, Homo sapiens
  misc_RNA (1)...(19): siRNA sense strand
agugaaaacuugagcaaaa

SEQ ID NO: 1893018 - RNA, 19 nt, Homo sapiens
  misc_RNA (1)...(19): siRNA sense strand
ugaccagauuggcucagaa

SEQ ID NO: 1893019 - RNA, 19 nt, Homo sapiens
  misc_RNA (1)...(19): siRNA sense strand
gaaaagugacaaccaacaa

SEQ ID NO: 1893020 - RNA, 19 nt, Homo sapiens
  misc_RNA (1)...(19): siRNA sense strand
uagagaaugagcauaugaa

SEQ ID NO: 1893021 - RNA, 19 nt, Homo sapiens
  misc_RNA (1)...(19): siRNA sense strand
guagacugguaaacacaag

SEQ ID NO: 1893022 - RNA, 19 nt, Homo sapiens
  misc_RNA (1)...(19): siRNA sense strand
ccaaaguauugaacguucu

SEQ ID NO: 1893023 - RNA, 19 nt, Homo sapiens
  misc_RNA (1)...(19): siRNA sense strand
gcauaugaaucggcuacag

SEQ ID NO: 1893024 - RNA, 19 nt, Homo sapiens
  misc_RNA (1)...(19): siRNA sense strand
ggauugccacagagacuga

SEQ ID NO: 1893025 - RNA, 19 nt, Homo sapiens
  misc_RNA (1)...(19): siRNA sense strand
caacgagaccaguuagaac

SEQ ID NO: 1893026 - RNA, 19 nt, Homo sapiens
  misc_RNA (1)...(19): siRNA sense strand
acaacgagaccaguuagaa

SEQ ID NO: 1893027 - RNA, 19 nt, Homo sapiens
  misc_RNA (1)...(19): siRNA sense strand
uuagaacguaccaagagua

SEQ ID NO: 1893028 - RNA, 19 nt, Homo sapiens
  misc_RNA (1)...(19): siRNA sense strand
ccgaggagacaugaaauau

SEQ ID NO: 1893029 - RNA, 19 nt, Homo sapiens
  misc_RNA (1)...(19): siRNA sense strand
cugcugcuuuccauuauca

SEQ ID NO: 1893030 - RNA, 19 nt, Homo sapiens
  misc_RNA (1)...(19): siRNA sense strand
cggccuccaugaagaccua

SEQ ID NO: 1893031 - RNA, 19 nt, Homo sapiens
  misc_RNA (1)...(19): siRNA sense strand
agaguagacugguaaacac

SEQ ID NO: 1893032 - RNA, 19 nt, Homo sapiens
  misc_RNA (1)...(19): siRNA sense strand
cugguaaacacaagugaaa

SEQ ID NO: 1893033 - RNA, 19 nt, Homo sapiens
  misc_RNA (1)...(19): siRNA sense strand
aagaguagacugguaaaca

SEQ ID NO: 1893034 - RNA, 19 nt, Homo sapiens
  misc_RNA (1)...(19): siRNA sense strand
uccguucaauguccagaaa

SEQ ID NO: 1893035 - RNA, 19 nt, Homo sapiens
  misc_RNA (1)...(19): siRNA sense strand
gcaaaagucggaagauucu

SEQ ID NO: 1893036 - RNA, 19 nt, Homo sapiens
  misc_RNA (1)...(19): siRNA sense strand
uguagagaaugagcauaug

SEQ ID NO: 1893037 - RNA, 19 nt, Homo sapiens
  misc_RNA (1)...(19): siRNA sense strand
ccaagaguagacugguaaa

SEQ ID NO: 1893038 - RNA, 19 nt, Homo sapiens
  misc_RNA (1)...(19): siRNA sense strand
cauaugaaucggcuacagu

SEQ ID NO: 1893039 - RNA, 19 nt, Homo sapiens
  misc_RNA (1)...(19): siRNA sense strand
ggaggccgaggagacauga

SEQ ID NO: 1893040 - RNA, 19 nt, Homo sapiens
  misc_RNA (1)...(19): siRNA sense strand
gaguagacugguaaacaca

SEQ ID NO: 1893041 - RNA, 19 nt, Homo sapiens
  misc_RNA (1)...(19): siRNA sense strand
ggaaaggccuuaugugugu

SEQ ID NO: 1893042 - RNA, 19 nt, Homo sapiens
  misc_RNA (1)...(19): siRNA sense strand
gaagaaaggccuuaugaau

SEQ ID NO: 1893043 - RNA, 19 nt, Homo sapiens
  misc_RNA (1)...(19): siRNA sense strand
gcaaaucuguccucauuca

SEQ ID NO: 1893044 - RNA, 19 nt, Homo sapiens
  misc_RNA (1)...(19): siRNA sense strand
gaauguagcaaauccuuua

SEQ ID NO: 1893045 - RNA, 19 nt, Homo sapiens
  misc_RNA (1)...(19): siRNA sense strand
gaaaucguuuagucagaua

SEQ ID NO: 1893046 - RNA, 19 nt, Homo sapiens
  misc_RNA (1)...(19): siRNA sense strand
gcaaauccuuuagcuguaa

SEQ ID NO: 1893047 - RNA, 19 nt, Homo sapiens
  misc_RNA (1)...(19): siRNA sense strand
gggaaauccuuuagccaua

SEQ ID NO: 1893048 - RNA, 19 nt, Homo sapiens
  misc_RNA (1)...(19): siRNA sense strand
ggaaacaccuucugaacag

SEQ ID NO: 1893049 - RNA, 19 nt, Homo sapiens
  misc_RNA (1)...(19): siRNA sense strand
gagaaaggccuuaugaaug

SEQ ID NO: 1893050 - RNA, 19 nt, Homo sapiens
  misc_RNA (1)...(19): siRNA sense strand
gagaaaggccuuaugaaug

SEQ ID NO: 1893051 - RNA, 19 nt, Homo sapiens
  misc_RNA (1)...(19): siRNA sense strand
gcagggagaucaggaaaga

SEQ ID NO: 1893052 - RNA, 19 nt, Homo sapiens
  misc_RNA (1)...(19): siRNA sense strand
guucaggacuuccaaagaa

SEQ ID NO: 1893053 - RNA, 19 nt, Homo sapiens
  misc_RNA (1)...(19): siRNA sense strand
agccauagcuccaaccuua

SEQ ID NO: 1893054 - RNA, 19 nt, Homo sapiens
  misc_RNA (1)...(19): siRNA sense strand
agaaaggccuuaugaaugu

SEQ ID NO: 1893055 - RNA, 19 nt, Homo sapiens
  misc_RNA (1)...(19): siRNA sense strand
gcgaagauguaaccucauu

SEQ ID NO: 1893056 - RNA, 19 nt, Homo sapiens
  misc_RNA (1)...(19): siRNA sense strand
ggagaaaggccuuaugaau

SEQ ID NO: 1893057 - RNA, 19 nt, Homo sapiens
  misc_RNA (1)...(19): siRNA sense strand
ggagaaaggccuuaugaau

SEQ ID NO: 1893058 - RNA, 19 nt, Homo sapiens
  misc_RNA (1)...(19): siRNA sense strand
gagaaagagugccacaguu

SEQ ID NO: 1893059 - RNA, 19 nt, Homo sapiens
  misc_RNA (1)...(19): siRNA sense strand
ggaaugggaucuccuugau

SEQ ID NO: 1893060 - RNA, 19 nt, Homo sapiens
  misc_RNA (1)...(19): siRNA sense strand
cugcaaaucuguccucauu

SEQ ID NO: 1893061 - RNA, 19 nt, Homo sapiens
  misc_RNA (1)...(19): siRNA sense strand
gggaaauccuuuagccaaa

SEQ ID NO: 1893062 - RNA, 19 nt, Homo sapiens
  misc_RNA (1)...(19): siRNA sense strand
ccaaaguucuagccucauu

SEQ ID NO: 1893063 - RNA, 19 nt, Homo sapiens
  misc_RNA (1)...(19): siRNA sense strand
cuggagaacuuugcacuua

SEQ ID NO: 1893064 - RNA, 19 nt, Homo sapiens
  misc_RNA (1)...(19): siRNA sense strand
ggagaaaggccuuaugagu

SEQ ID NO: 1893065 - RNA, 19 nt, Homo sapiens
  misc_RNA (1)...(19): siRNA sense strand
ggagaaagacccuaugagu

SEQ ID NO: 1893066 - RNA, 19 nt, Homo sapiens
  misc_RNA (1)...(19): siRNA sense strand
ggagaaagaccucaugagu

SEQ ID NO: 1893067 - RNA, 19 nt, Homo sapiens
  misc_RNA (1)...(19): siRNA sense strand
ggaaaucguuuagucagau

SEQ ID NO: 1893068 - RNA, 19 nt, Homo sapiens
  misc_RNA (1)...(19): siRNA sense strand
gaaaguccacagugaagaa

SEQ ID NO: 1893069 - RNA, 19 nt, Homo sapiens
  misc_RNA (1)...(19): siRNA sense strand
ccagagaguucacauugga

SEQ ID NO: 1893070 - RNA, 19 nt, Homo sapiens
  misc_RNA (1)...(19): siRNA sense strand
cuacuccaguuucauuaua

SEQ ID NO: 1893071 - RNA, 19 nt, Homo sapiens
  misc_RNA (1)...(19): siRNA sense strand
ggaagucauuuaagcaaag

SEQ ID NO: 1893072 - RNA, 19 nt, Homo sapiens
  misc_RNA (1)...(19): siRNA sense strand
aaugggaucuccuugauga

SEQ ID NO: 1893073 - RNA, 19 nt, Homo sapiens
  misc_RNA (1)...(19): siRNA sense strand
ggaaaacaauucuacauca

SEQ ID NO: 1893074 - RNA, 19 nt, Homo sapiens
  misc_RNA (1)...(19): siRNA sense strand
ccaaauaacaguaacaagu

SEQ ID NO: 1893075 - RNA, 19 nt, Homo sapiens
  misc_RNA (1)...(19): siRNA sense strand
ggaaauccuuuagccauag

SEQ ID NO: 1893076 - RNA, 19 nt, Homo sapiens
  misc_RNA (1)...(19): siRNA sense strand
gggaagucauuuaagcaaa

SEQ ID NO: 1893077 - RNA, 19 nt, Homo sapiens
  misc_RNA (1)...(19): siRNA sense strand
gaaagcauguacgcgaaga

SEQ ID NO: 1893078 - RNA, 19 nt, Homo sapiens
  misc_RNA (1)...(19): siRNA sense strand
ccacauagacacacuuguu

SEQ ID NO: 1893079 - RNA, 19 nt, Homo sapiens
  misc_RNA (1)...(19): siRNA sense strand
caaauaacaguaacaagug

SEQ ID NO: 1893080 - RNA, 19 nt, Homo sapiens
  misc_RNA (1)...(19): siRNA sense strand
caccagaggcagcacauua

SEQ ID NO: 1893081 - RNA, 19 nt, Homo sapiens
  misc_RNA (1)...(19): siRNA sense strand
gaaugugggaaauccuuua

SEQ ID NO: 1893082 - RNA, 19 nt, Homo sapiens
  misc_RNA (1)...(19): siRNA sense strand
gaaugugggaaauccuuua

SEQ ID NO: 1893083 - RNA, 19 nt, Homo sapiens
  misc_RNA (1)...(19): siRNA sense strand
agaaaggccuuaugaaugc

SEQ ID NO: 1893084 - RNA, 19 nt, Homo sapiens
  misc_RNA (1)...(19): siRNA sense strand
gaaugugggaaaucguuua

SEQ ID NO: 1893085 - RNA, 19 nt, Homo sapiens
  misc_RNA (1)...(19): siRNA sense strand
agaaaggccuuaugaaugc

SEQ ID NO: 1893086 - RNA, 19 nt, Homo sapiens
  misc_RNA (1)...(19): siRNA sense strand
gaagauguaaccucauuca

SEQ ID NO: 1893087 - RNA, 19 nt, Homo sapiens
  misc_RNA (1)...(19): siRNA sense strand
ggcagaaacuacacacaug

SEQ ID NO: 1893088 - RNA, 19 nt, Homo sapiens
  misc_RNA (1)...(19): siRNA sense strand
gcauguacgcgaagaugua

SEQ ID NO: 1893089 - RNA, 19 nt, Homo sapiens
  misc_RNA (1)...(19): siRNA sense strand
gaccagagaauccucacua

SEQ ID NO: 1893090 - RNA, 19 nt, Homo sapiens
  misc_RNA (1)...(19): siRNA sense strand
gggaaaucguuuagucaga

SEQ ID NO: 1893091 - RNA, 19 nt, Homo sapiens
  misc_RNA (1)...(19): siRNA sense strand
gaagugugaccuuugaaga

SEQ ID NO: 1893092 - RNA, 19 nt, Homo sapiens
  misc_RNA (1)...(19): siRNA sense strand
gaaagagugccacaguuca

SEQ ID NO: 1893093 - RNA, 19 nt, Homo sapiens
  misc_RNA (1)...(19): siRNA sense strand
agaaacaccuguacuucga

SEQ ID NO: 1893094 - RNA, 19 nt, Homo sapiens
  misc_RNA (1)...(19): siRNA sense strand
cgacuccugugaaauaugu

SEQ ID NO: 1893095 - RNA, 19 nt, Homo sapiens
  misc_RNA (1)...(19): siRNA sense strand
cuacaucagugcaaaucuu

SEQ ID NO: 1893096 - RNA, 19 nt, Homo sapiens
  misc_RNA (1)...(19): siRNA sense strand
ggagaaagagugccacagu

SEQ ID NO: 1893097 - RNA, 19 nt, Homo sapiens
  misc_RNA (1)...(19): siRNA sense strand
ggaaauccuuuggcugcaa

SEQ ID NO: 1893098 - RNA, 19 nt, Homo sapiens
  misc_RNA (1)...(19): siRNA sense strand
gcgaaugugggaaaucuuu

SEQ ID NO: 1893099 - RNA, 19 nt, Homo sapiens
  misc_RNA (1)...(19): siRNA sense strand
gggaaugugggaaaucuuu

SEQ ID NO: 1893100 - RNA, 19 nt, Homo sapiens
  misc_RNA (1)...(19): siRNA sense strand
gugaagaaaggccuuauga

SEQ ID NO: 1893101 - RNA, 19 nt, Homo sapiens
  misc_RNA (1)...(19): siRNA sense strand
gguguggaguggaacauga

SEQ ID NO: 1893102 - RNA, 19 nt, Homo sapiens
  misc_RNA (1)...(19): siRNA sense strand
ugccuggucuugagagaua

SEQ ID NO: 1893103 - RNA, 19 nt, Homo sapiens
  misc_RNA (1)...(19): siRNA sense strand
gcuccaaccuuaagaacca

SEQ ID NO: 1893104 - RNA, 19 nt, Homo sapiens
  misc_RNA (1)...(19): siRNA sense strand
gagaagccaaauaacagua

SEQ ID NO: 1893105 - RNA, 19 nt, Homo sapiens
  misc_RNA (1)...(19): siRNA sense strand
guucuagccucauucaaca

SEQ ID NO: 1893106 - RNA, 19 nt, Homo sapiens
  misc_RNA (1)...(19): siRNA sense strand
aagaaaggccuuaugaaug

SEQ ID NO: 1893107 - RNA, 19 nt, Homo sapiens
  misc_RNA (1)...(19): siRNA sense strand
ggagaaagaccuguugagu

SEQ ID NO: 1893108 - RNA, 19 nt, Homo sapiens
  misc_RNA (1)...(19): siRNA sense strand
agagaauccucacuagaga

SEQ ID NO: 1893109 - RNA, 19 nt, Homo sapiens
  misc_RNA (1)...(19): siRNA sense strand
gaacaugaggaaacaccuu

SEQ ID NO: 1893110 - RNA, 19 nt, Homo sapiens
  misc_RNA (1)...(19): siRNA sense strand
caucaagacgccacucaaa

SEQ ID NO: 1893111 - RNA, 19 nt, Homo sapiens
  misc_RNA (1)...(19): siRNA sense strand
gcagaaacuacacacaugu

SEQ ID NO: 1893112 - RNA, 19 nt, Homo sapiens
  misc_RNA (1)...(19): siRNA sense strand
ccaguuucauuauacauca

SEQ ID NO: 1893113 - RNA, 19 nt, Homo sapiens
  misc_RNA (1)...(19): siRNA sense strand
ugagguuucuccaucaaga

SEQ ID NO: 1893114 - RNA, 19 nt, Homo sapiens
  misc_RNA (1)...(19): siRNA sense strand
gagaguucauacuggagaa

SEQ ID NO: 1893115 - RNA, 19 nt, Homo sapiens
  misc_RNA (1)...(19): siRNA sense strand
caccagagaguucacauug

SEQ ID NO: 1893116 - RNA, 19 nt, Homo sapiens
  misc_RNA (1)...(19): siRNA sense strand
cuguaaaucuaaccucauu

SEQ ID NO: 1893117 - RNA, 19 nt, Homo sapiens
  misc_RNA (1)...(19): siRNA sense strand
caucagagaguucauacug

SEQ ID NO: 1893118 - RNA, 19 nt, Homo sapiens
  misc_RNA (1)...(19): siRNA sense strand
uugaagauguggccgugua

SEQ ID NO: 1893119 - RNA, 19 nt, Homo sapiens
  misc_RNA (1)...(19): siRNA sense strand
gaaaggccuuaugaaugug

SEQ ID NO: 1893120 - RNA, 19 nt, Homo sapiens
  misc_RNA (1)...(19): siRNA sense strand
gaaaguucacacuggagaa

SEQ ID NO: 1893121 - RNA, 19 nt, Homo sapiens
  misc_RNA (1)...(19): siRNA sense strand
caauagccauaggaaaguu

SEQ ID NO: 1893122 - RNA, 19 nt, Homo sapiens
  misc_RNA (1)...(19): siRNA sense strand
ccagaaaguccacagugaa

SEQ ID NO: 1893123 - RNA, 19 nt, Homo sapiens
  misc_RNA (1)...(19): siRNA sense strand
uuaaacaccugagaguuca

SEQ ID NO: 1893124 - RNA, 19 nt, Homo sapiens
  misc_RNA (1)...(19): siRNA sense strand
ggaaugugggaaauccuuu

SEQ ID NO: 1893125 - RNA, 19 nt, Homo sapiens
  misc_RNA (1)...(19): siRNA sense strand
cauuauacaucagagaguu

SEQ ID NO: 1893126 - RNA, 19 nt, Homo sapiens
  misc_RNA (1)...(19): siRNA sense strand
gaacaccaaggaacaaacu

SEQ ID NO: 1893127 - RNA, 19 nt, Homo sapiens
  misc_RNA (1)...(19): siRNA sense strand
gcagaguucacacgggaaa

SEQ ID NO: 1893128 - RNA, 19 nt, Homo sapiens
  misc_RNA (1)...(19): siRNA sense strand
cagauauacagccucaaua

SEQ ID NO: 1893129 - RNA, 19 nt, Homo sapiens
  misc_RNA (1)...(19): siRNA sense strand
gaggcaccuuucagaaguu

SEQ ID NO: 1893130 - RNA, 19 nt, Homo sapiens
  misc_RNA (1)...(19): siRNA sense strand
cuacuacuccaguuucauu

SEQ ID NO: 1893131 - RNA, 19 nt, Homo sapiens
  misc_RNA (1)...(19): siRNA sense strand
uguggacacugccucguuu

SEQ ID NO: 1893132 - RNA, 19 nt, Homo sapiens
  misc_RNA (1)...(19): siRNA sense strand
ugaagaaaggccuuaugaa

SEQ ID NO: 1893133 - RNA, 19 nt, Homo sapiens
  misc_RNA (1)...(19): siRNA sense strand
cagagaauccucacuagag

SEQ ID NO: 1893134 - RNA, 19 nt, Homo sapiens
  misc_RNA (1)...(19): siRNA sense strand
ucaagacgccacucaaaca

SEQ ID NO: 1893135 - RNA, 19 nt, Homo sapiens
  misc_RNA (1)...(19): siRNA sense strand
gggagaagccaaauaacag

SEQ ID NO: 1893136 - RNA, 19 nt, Homo sapiens
  misc_RNA (1)...(19): siRNA sense strand
ggagaagccaaauaacagu

SEQ ID NO: 1893137 - RNA, 19 nt, Homo sapiens
  misc_RNA (1)...(19): siRNA sense strand
agaggcaccuuucagaagu

SEQ ID NO: 1893138 - RNA, 19 nt, Homo sapiens
  misc_RNA (1)...(19): siRNA sense strand
cagcgaaugugggaaaucu

SEQ ID NO: 1893139 - RNA, 19 nt, Homo sapiens
  misc_RNA (1)...(19): siRNA sense strand
ggagaacuuugcacuuacg

SEQ ID NO: 1893140 - RNA, 19 nt, Homo sapiens
  misc_RNA (1)...(19): siRNA sense strand
ugccgacuccugugaaaua

SEQ ID NO: 1893141 - RNA, 19 nt, Homo sapiens
  misc_RNA (1)...(19): siRNA sense strand
ggaaaggccuuaugugugu

SEQ ID NO: 1893142 - RNA, 19 nt, Homo sapiens
  misc_RNA (1)...(19): siRNA sense strand
gaagaaaggccuuaugaau

SEQ ID NO: 1893143 - RNA, 19 nt, Homo sapiens
  misc_RNA (1)...(19): siRNA sense strand
gcaaaucuguccucauuca

SEQ ID NO: 1893144 - RNA, 19 nt, Homo sapiens
  misc_RNA (1)...(19): siRNA sense strand
gaauguagcaaauccuuua

SEQ ID NO: 1893145 - RNA, 19 nt, Homo sapiens
  misc_RNA (1)...(19): siRNA sense strand
gaaaucguuuagucagaua

SEQ ID NO: 1893146 - RNA, 19 nt, Homo sapiens
  misc_RNA (1)...(19): siRNA sense strand
gcaaauccuuuagcuguaa

SEQ ID NO: 1893147 - RNA, 19 nt, Homo sapiens
  misc_RNA (1)...(19): siRNA sense strand
gggaaauccuuuagccaua

SEQ ID NO: 1893148 - RNA, 19 nt, Homo sapiens
  misc_RNA (1)...(19): siRNA sense strand
ggaaacaccuucugaacag

SEQ ID NO: 1893149 - RNA, 19 nt, Homo sapiens
  misc_RNA (1)...(19): siRNA sense strand
gagaaaggccuuaugaaug

SEQ ID NO: 1893150 - RNA, 19 nt, Homo sapiens
  misc_RNA (1)...(19): siRNA sense strand
gagaaaggccuuaugaaug

SEQ ID NO: 1893151 - RNA, 19 nt, Homo sapiens
  misc_RNA (1)...(19): siRNA sense strand
gcagggagaucaggaaaga

SEQ ID NO: 1893152 - RNA, 19 nt, Homo sapiens
  misc_RNA (1)...(19): siRNA sense strand
guucaggacuuccaaagaa

SEQ ID NO: 1893153 - RNA, 19 nt, Homo sapiens
  misc_RNA (1)...(19): siRNA sense strand
agccauagcuccaaccuua

SEQ ID NO: 1893154 - RNA, 19 nt, Homo sapiens
  misc_RNA (1)...(19): siRNA sense strand
agaaaggccuuaugaaugu

SEQ ID NO: 1893155 - RNA, 19 nt, Homo sapiens
  misc_RNA (1)...(19): siRNA sense strand
gcgaagauguaaccucauu

SEQ ID NO: 1893156 - RNA, 19 nt, Homo sapiens
  misc_RNA (1)...(19): siRNA sense strand
ggagaaaggccuuaugaau

SEQ ID NO: 1893157 - RNA, 19 nt, Homo sapiens
  misc_RNA (1)...(19): siRNA sense strand
ggagaaaggccuuaugaau

SEQ ID NO: 1893158 - RNA, 19 nt, Homo sapiens
  misc_RNA (1)...(19): siRNA sense strand
gagaaagagugccacaguu

SEQ ID NO: 1893159 - RNA, 19 nt, Homo sapiens
  misc_RNA (1)...(19): siRNA sense strand
ggaaugggaucuccuugau

SEQ ID NO: 1893160 - RNA, 19 nt, Homo sapiens
  misc_RNA (1)...(19): siRNA sense strand
cugcaaaucuguccucauu

SEQ ID NO: 1893161 - RNA, 19 nt, Homo sapiens
  misc_RNA (1)...(19): siRNA sense strand
gggaaauccuuuagccaaa

SEQ ID NO: 1893162 - RNA, 19 nt, Homo sapiens
  misc_RNA (1)...(19): siRNA sense strand
ccaaaguucuagccucauu

SEQ ID NO: 1893163 - RNA, 19 nt, Homo sapiens
  misc_RNA (1)...(19): siRNA sense strand
cuggagaacuuugcacuua

SEQ ID NO: 1893164 - RNA, 19 nt, Homo sapiens
  misc_RNA (1)...(19): siRNA sense strand
ggagaaaggccuuaugagu

SEQ ID NO: 1893165 - RNA, 19 nt, Homo sapiens
  misc_RNA (1)...(19): siRNA sense strand
ggagaaagacccuaugagu

SEQ ID NO: 1893166 - RNA, 19 nt, Homo sapiens
  misc_RNA (1)...(19): siRNA sense strand
ggagaaagaccucaugagu

SEQ ID NO: 1893167 - RNA, 19 nt, Homo sapiens
  misc_RNA (1)...(19): siRNA sense strand
ggaaaucguuuagucagau

SEQ ID NO: 1893168 - RNA, 19 nt, Homo sapiens
  misc_RNA (1)...(19): siRNA sense strand
gaaaguccacagugaagaa

SEQ ID NO: 1893169 - RNA, 19 nt, Homo sapiens
  misc_RNA (1)...(19): siRNA sense strand
ccagagaguucacauugga

SEQ ID NO: 1893170 - RNA, 19 nt, Homo sapiens
  misc_RNA (1)...(19): siRNA sense strand
cuacuccaguuucauuaua

SEQ ID NO: 1893171 - RNA, 19 nt, Homo sapiens
  misc_RNA (1)...(19): siRNA sense strand
ggaagucauuuaagcaaag

SEQ ID NO: 1893172 - RNA, 19 nt, Homo sapiens
  misc_RNA (1)...(19): siRNA sense strand
aaugggaucuccuugauga

SEQ ID NO: 1893173 - RNA, 19 nt, Homo sapiens
  misc_RNA (1)...(19): siRNA sense strand
ggaaaacaauucuacauca

SEQ ID NO: 1893174 - RNA, 19 nt, Homo sapiens
  misc_RNA (1)...(19): siRNA sense strand
ccaaauaacaguaacaagu

SEQ ID NO: 1893175 - RNA, 19 nt, Homo sapiens
  misc_RNA (1)...(19): siRNA sense strand
ggaaauccuuuagccauag

SEQ ID NO: 1893176 - RNA, 19 nt, Homo sapiens
  misc_RNA (1)...(19): siRNA sense strand
gggaagucauuuaagcaaa

SEQ ID NO: 1893177 - RNA, 19 nt, Homo sapiens
  misc_RNA (1)...(19): siRNA sense strand
gaaagcauguacgcgaaga

SEQ ID NO: 1893178 - RNA, 19 nt, Homo sapiens
  misc_RNA (1)...(19): siRNA sense strand
ccacauagacacacuuguu

SEQ ID NO: 1893179 - RNA, 19 nt, Homo sapiens
  misc_RNA (1)...(19): siRNA sense strand
caaauaacaguaacaagug

SEQ ID NO: 1893180 - RNA, 19 nt, Homo sapiens
  misc_RNA (1)...(19): siRNA sense strand
caccagaggcagcacauua

SEQ ID NO: 1893181 - RNA, 19 nt, Homo sapiens
  misc_RNA (1)...(19): siRNA sense strand
gaaugugggaaauccuuua

SEQ ID NO: 1893182 - RNA, 19 nt, Homo sapiens
  misc_RNA (1)...(19): siRNA sense strand
gaaugugggaaauccuuua

SEQ ID NO: 1893183 - RNA, 19 nt, Homo sapiens
  misc_RNA (1)...(19): siRNA sense strand
agaaaggccuuaugaaugc

SEQ ID NO: 1893184 - RNA, 19 nt, Homo sapiens
  misc_RNA (1)...(19): siRNA sense strand
gaaugugggaaaucguuua

SEQ ID NO: 1893185 - RNA, 19 nt, Homo sapiens
  misc_RNA (1)...(19): siRNA sense strand
agaaaggccuuaugaaugc

SEQ ID NO: 1893186 - RNA, 19 nt, Homo sapiens
  misc_RNA (1)...(19): siRNA sense strand
gaagauguaaccucauuca

SEQ ID NO: 1893187 - RNA, 19 nt, Homo sapiens
  misc_RNA (1)...(19): siRNA sense strand
ggcagaaacuacacacaug

SEQ ID NO: 1893188 - RNA, 19 nt, Homo sapiens
  misc_RNA (1)...(19): siRNA sense strand
gcauguacgcgaagaugua

SEQ ID NO: 1893189 - RNA, 19 nt, Homo sapiens
  misc_RNA (1)...(19): siRNA sense strand
gaccagagaauccucacua

SEQ ID NO: 1893190 - RNA, 19 nt, Homo sapiens
  misc_RNA (1)...(19): siRNA sense strand
gggaaaucguuuagucaga

SEQ ID NO: 1893191 - RNA, 19 nt, Homo sapiens
  misc_RNA (1)...(19): siRNA sense strand
gaagugugaccuuugaaga

SEQ ID NO: 1893192 - RNA, 19 nt, Homo sapiens
  misc_RNA (1)...(19): siRNA sense strand
gaaagagugccacaguuca

SEQ ID NO: 1893193 - RNA, 19 nt, Homo sapiens
  misc_RNA (1)...(19): siRNA sense strand
agaaacaccuguacuucga

SEQ ID NO: 1893194 - RNA, 19 nt, Homo sapiens
  misc_RNA (1)...(19): siRNA sense strand
cgacuccugugaaauaugu

SEQ ID NO: 1893195 - RNA, 19 nt, Homo sapiens
  misc_RNA (1)...(19): siRNA sense strand
cuacaucagugcaaaucuu

SEQ ID NO: 1893196 - RNA, 19 nt, Homo sapiens
  misc_RNA (1)...(19): siRNA sense strand
ggagaaagagugccacagu

SEQ ID NO: 1893197 - RNA, 19 nt, Homo sapiens
  misc_RNA (1)...(19): siRNA sense strand
ggaaauccuuuggcugcaa

SEQ ID NO: 1893198 - RNA, 19 nt, Homo sapiens
  misc_RNA (1)...(19): siRNA sense strand
gcgaaugugggaaaucuuu

SEQ ID NO: 1893199 - RNA, 19 nt, Homo sapiens
  misc_RNA (1)...(19): siRNA sense strand
gggaaugugggaaaucuuu

SEQ ID NO: 1893200 - RNA, 19 nt, Homo sapiens
  misc_RNA (1)...(19): siRNA sense strand
gugaagaaaggccuuauga

SEQ ID NO: 1893201 - RNA, 19 nt, Homo sapiens
  misc_RNA (1)...(19): siRNA sense strand
gguguggaguggaacauga

SEQ ID NO: 1893202 - RNA, 19 nt, Homo sapiens
  misc_RNA (1)...(19): siRNA sense strand
ugccuggucuugagagaua

SEQ ID NO: 1893203 - RNA, 19 nt, Homo sapiens
  misc_RNA (1)...(19): siRNA sense strand
gcuccaaccuuaagaacca

SEQ ID NO: 1893204 - RNA, 19 nt, Homo sapiens
  misc_RNA (1)...(19): siRNA sense strand
gagaagccaaauaacagua

SEQ ID NO: 1893205 - RNA, 19 nt, Homo sapiens
  misc_RNA (1)...(19): siRNA sense strand
guucuagccucauucaaca

SEQ ID NO: 1893206 - RNA, 19 nt, Homo sapiens
  misc_RNA (1)...(19): siRNA sense strand
aagaaaggccuuaugaaug

SEQ ID NO: 1893207 - RNA, 19 nt, Homo sapiens
  misc_RNA (1)...(19): siRNA sense strand
ggagaaagaccuguugagu

SEQ ID NO: 1893208 - RNA, 19 nt, Homo sapiens
  misc_RNA (1)...(19): siRNA sense strand
agagaauccucacuagaga

SEQ ID NO: 1893209 - RNA, 19 nt, Homo sapiens
  misc_RNA (1)...(19): siRNA sense strand
gaacaugaggaaacaccuu

SEQ ID NO: 1893210 - RNA, 19 nt, Homo sapiens
  misc_RNA (1)...(19): siRNA sense strand
caucaagacgccacucaaa

SEQ ID NO: 1893211 - RNA, 19 nt, Homo sapiens
  misc_RNA (1)...(19): siRNA sense strand
gcagaaacuacacacaugu

SEQ ID NO: 1893212 - RNA, 19 nt, Homo sapiens
  misc_RNA (1)...(19): siRNA sense strand
ccaguuucauuauacauca

SEQ ID NO: 1893213 - RNA, 19 nt, Homo sapiens
  misc_RNA (1)...(19): siRNA sense strand
ugagguuucuccaucaaga

SEQ ID NO: 1893214 - RNA, 19 nt, Homo sapiens
  misc_RNA (1)...(19): siRNA sense strand
gagaguucauacuggagaa

SEQ ID NO: 1893215 - RNA, 19 nt, Homo sapiens
  misc_RNA (1)...(19): siRNA sense strand
caccagagaguucacauug

SEQ ID NO: 1893216 - RNA, 19 nt, Homo sapiens
  misc_RNA (1)...(19): siRNA sense strand
cuguaaaucuaaccucauu

SEQ ID NO: 1893217 - RNA, 19 nt, Homo sapiens
  misc_RNA (1)...(19): siRNA sense strand
caucagagaguucauacug

SEQ ID NO: 1893218 - RNA, 19 nt, Homo sapiens
  misc_RNA (1)...(19): siRNA sense strand
uugaagauguggccgugua

SEQ ID NO: 1893219 - RNA, 19 nt, Homo sapiens
  misc_RNA (1)...(19): siRNA sense strand
gaaaggccuuaugaaugug

SEQ ID NO: 1893220 - RNA, 19 nt, Homo sapiens
  misc_RNA (1)...(19): siRNA sense strand
gaaaguucacacuggagaa

SEQ ID NO: 1893221 - RNA, 19 nt, Homo sapiens
  misc_RNA (1)...(19): siRNA sense strand
caauagccauaggaaaguu

SEQ ID NO: 1893222 - RNA, 19 nt, Homo sapiens
  misc_RNA (1)...(19): siRNA sense strand
ccagaaaguccacagugaa

SEQ ID NO: 1893223 - RNA, 19 nt, Homo sapiens
  misc_RNA (1)...(19): siRNA sense strand
uuaaacaccugagaguuca

SEQ ID NO: 1893224 - RNA, 19 nt, Homo sapiens
  misc_RNA (1)...(19): siRNA sense strand
ggaaugugggaaauccuuu

SEQ ID NO: 1893225 - RNA, 19 nt, Homo sapiens
  misc_RNA (1)...(19): siRNA sense strand
cauuauacaucagagaguu

SEQ ID NO: 1893226 - RNA, 19 nt, Homo sapiens
  misc_RNA (1)...(19): siRNA sense strand
gaacaccaaggaacaaacu

SEQ ID NO: 1893227 - RNA, 19 nt, Homo sapiens
  misc_RNA (1)...(19): siRNA sense strand
gcagaguucacacgggaaa

SEQ ID NO: 1893228 - RNA, 19 nt, Homo sapiens
  misc_RNA (1)...(19): siRNA sense strand
cagauauacagccucaaua

SEQ ID NO: 1893229 - RNA, 19 nt, Homo sapiens
  misc_RNA (1)...(19): siRNA sense strand
gaggcaccuuucagaaguu

SEQ ID NO: 1893230 - RNA, 19 nt, Homo sapiens
  misc_RNA (1)...(19): siRNA sense strand
cuacuacuccaguuucauu

SEQ ID NO: 1893231 - RNA, 19 nt, Homo sapiens
  misc_RNA (1)...(19): siRNA sense strand
uguggacacugccucguuu

SEQ ID NO: 1893232 - RNA, 19 nt, Homo sapiens
  misc_RNA (1)...(19): siRNA sense strand
ugaagaaaggccuuaugaa

SEQ ID NO: 1893233 - RNA, 19 nt, Homo sapiens
  misc_RNA (1)...(19): siRNA sense strand
cagagaauccucacuagag

SEQ ID NO: 1893234 - RNA, 19 nt, Homo sapiens
  misc_RNA (1)...(19): siRNA sense strand
ucaagacgccacucaaaca

SEQ ID NO: 1893235 - RNA, 19 nt, Homo sapiens
  misc_RNA (1)...(19): siRNA sense strand
gggagaagccaaauaacag

SEQ ID NO: 1893236 - RNA, 19 nt, Homo sapiens
  misc_RNA (1)...(19): siRNA sense strand
ggagaagccaaauaacagu

SEQ ID NO: 1893237 - RNA, 19 nt, Homo sapiens
  misc_RNA (1)...(19): siRNA sense strand
agaggcaccuuucagaagu

SEQ ID NO: 1893238 - RNA, 19 nt, Homo sapiens
  misc_RNA (1)...(19): siRNA sense strand
cagcgaaugugggaaaucu

SEQ ID NO: 1893239 - RNA, 19 nt, Homo sapiens
  misc_RNA (1)...(19): siRNA sense strand
ggagaacuuugcacuuacg

SEQ ID NO: 1893240 - RNA, 19 nt, Homo sapiens
  misc_RNA (1)...(19): siRNA sense strand
ugccgacuccugugaaaua

SEQ ID NO: 1893241 - RNA, 19 nt, Homo sapiens
  misc_RNA (1)...(19): siRNA sense strand
gaaagacccuauaaaugua

SEQ ID NO: 1893242 - RNA, 19 nt, Homo sapiens
  misc_RNA (1)...(19): siRNA sense strand
gagaagcccuaccaaugua

SEQ ID NO: 1893243 - RNA, 19 nt, Homo sapiens
  misc_RNA (1)...(19): siRNA sense strand
ggagaaagacccuauaaau

SEQ ID NO: 1893244 - RNA, 19 nt, Homo sapiens
  misc_RNA (1)...(19): siRNA sense strand
gagaaacccuaucagugua

SEQ ID NO: 1893245 - RNA, 19 nt, Homo sapiens
  misc_RNA (1)...(19): siRNA sense strand
aggcggagcucacaucuua

SEQ ID NO: 1893246 - RNA, 19 nt, Homo sapiens
  misc_RNA (1)...(19): siRNA sense strand
gagaaagacccuauaaaug

SEQ ID NO: 1893247 - RNA, 19 nt, Homo sapiens
  misc_RNA (1)...(19): siRNA sense strand
caagagagacgacauaaau

SEQ ID NO: 1893248 - RNA, 19 nt, Homo sapiens
  misc_RNA (1)...(19): siRNA sense strand
gguaauaucuacuggaauc

SEQ ID NO: 1893249 - RNA, 19 nt, Homo sapiens
  misc_RNA (1)...(19): siRNA sense strand
ggagaaacccuaucagugu

SEQ ID NO: 1893250 - RNA, 19 nt, Homo sapiens
  misc_RNA (1)...(19): siRNA sense strand
gaacacuggucucauucaa

SEQ ID NO: 1893251 - RNA, 19 nt, Homo sapiens
  misc_RNA (1)...(19): siRNA sense strand
ggagagagacccuaugaau

SEQ ID NO: 1893252 - RNA, 19 nt, Homo sapiens
  misc_RNA (1)...(19): siRNA sense strand
gcagauugauauacuagga

SEQ ID NO: 1893253 - RNA, 19 nt, Homo sapiens
  misc_RNA (1)...(19): siRNA sense strand
agaaagacccuauaaaugu

SEQ ID NO: 1893254 - RNA, 19 nt, Homo sapiens
  misc_RNA (1)...(19): siRNA sense strand
ggagaagauugaagacaug

SEQ ID NO: 1893255 - RNA, 19 nt, Homo sapiens
  misc_RNA (1)...(19): siRNA sense strand
gaaaugacagcuacacuuc

SEQ ID NO: 1893256 - RNA, 19 nt, Homo sapiens
  misc_RNA (1)...(19): siRNA sense strand
ggaaaggcagauugauaua

SEQ ID NO: 1893257 - RNA, 19 nt, Homo sapiens
  misc_RNA (1)...(19): siRNA sense strand
gaagucaggccuuauugaa

SEQ ID NO: 1893258 - RNA, 19 nt, Homo sapiens
  misc_RNA (1)...(19): siRNA sense strand
cagcaggguuccagacuuu

SEQ ID NO: 1893259 - RNA, 19 nt, Homo sapiens
  misc_RNA (1)...(19): siRNA sense strand
gaacagggaauuagcuuca

SEQ ID NO: 1893260 - RNA, 19 nt, Homo sapiens
  misc_RNA (1)...(19): siRNA sense strand
ggagaagcccuaccaaugu

SEQ ID NO: 1893261 - RNA, 19 nt, Homo sapiens
  misc_RNA (1)...(19): siRNA sense strand
ggagaaacccuacaaaugc

SEQ ID NO: 1893262 - RNA, 19 nt, Homo sapiens
  misc_RNA (1)...(19): siRNA sense strand
ggaaaucccacacaagaga

SEQ ID NO: 1893263 - RNA, 19 nt, Homo sapiens
  misc_RNA (1)...(19): siRNA sense strand
gcaccagagccuccaaaua

SEQ ID NO: 1893264 - RNA, 19 nt, Homo sapiens
  misc_RNA (1)...(19): siRNA sense strand
gagaagcucugauccaacu

SEQ ID NO: 1893265 - RNA, 19 nt, Homo sapiens
  misc_RNA (1)...(19): siRNA sense strand
gggagaaacccuacaaaug

SEQ ID NO: 1893266 - RNA, 19 nt, Homo sapiens
  misc_RNA (1)...(19): siRNA sense strand
gagagacccuaugaaugua

SEQ ID NO: 1893267 - RNA, 19 nt, Homo sapiens
  misc_RNA (1)...(19): siRNA sense strand
ggucagcccuucuuucaca

SEQ ID NO: 1893268 - RNA, 19 nt, Homo sapiens
  misc_RNA (1)...(19): siRNA sense strand
ggaauuagcuucaaaacag

SEQ ID NO: 1893269 - RNA, 19 nt, Homo sapiens
  misc_RNA (1)...(19): siRNA sense strand
ggcaaagccuucagucaga

SEQ ID NO: 1893270 - RNA, 19 nt, Homo sapiens
  misc_RNA (1)...(19): siRNA sense strand
gggaggagguaguacauuc

SEQ ID NO: 1893271 - RNA, 19 nt, Homo sapiens
  misc_RNA (1)...(19): siRNA sense strand
ggaaaugacagcuacacuu

SEQ ID NO: 1893272 - RNA, 19 nt, Homo sapiens
  misc_RNA (1)...(19): siRNA sense strand
gggagaagcccuaccaaug

SEQ ID NO: 1893273 - RNA, 19 nt, Homo sapiens
  misc_RNA (1)...(19): siRNA sense strand
gagaaacccuacaaaugca

SEQ ID NO: 1893274 - RNA, 19 nt, Homo sapiens
  misc_RNA (1)...(19): siRNA sense strand
guaaaacgcuaucacugua

SEQ ID NO: 1893275 - RNA, 19 nt, Homo sapiens
  misc_RNA (1)...(19): siRNA sense strand
cgagaggaguggcuucuug

SEQ ID NO: 1893276 - RNA, 19 nt, Homo sapiens
  misc_RNA (1)...(19): siRNA sense strand
ggagaagcccuaugagugu

SEQ ID NO: 1893277 - RNA, 19 nt, Homo sapiens
  misc_RNA (1)...(19): siRNA sense strand
gcaaagccuucagucagaa

SEQ ID NO: 1893278 - RNA, 19 nt, Homo sapiens
  misc_RNA (1)...(19): siRNA sense strand
gggagggccuucagucaga

SEQ ID NO: 1893279 - RNA, 19 nt, Homo sapiens
  misc_RNA (1)...(19): siRNA sense strand
cagguaauaucuacuggaa

SEQ ID NO: 1893280 - RNA, 19 nt, Homo sapiens
  misc_RNA (1)...(19): siRNA sense strand
gaaucuagucugcaugaaa

SEQ ID NO: 1893281 - RNA, 19 nt, Homo sapiens
  misc_RNA (1)...(19): siRNA sense strand
ggauauccacaacaaagua

SEQ ID NO: 1893282 - RNA, 19 nt, Homo sapiens
  misc_RNA (1)...(19): siRNA sense strand
gguaguacauucagcaucu

SEQ ID NO: 1893283 - RNA, 19 nt, Homo sapiens
  misc_RNA (1)...(19): siRNA sense strand
agaaggaucuguguagaga

SEQ ID NO: 1893284 - RNA, 19 nt, Homo sapiens
  misc_RNA (1)...(19): siRNA sense strand
ggagguggugacccuauua

SEQ ID NO: 1893285 - RNA, 19 nt, Homo sapiens
  misc_RNA (1)...(19): siRNA sense strand
gagagagacccuaugaaug

SEQ ID NO: 1893286 - RNA, 19 nt, Homo sapiens
  misc_RNA (1)...(19): siRNA sense strand
caagagagagccaugucua

SEQ ID NO: 1893287 - RNA, 19 nt, Homo sapiens
  misc_RNA (1)...(19): siRNA sense strand
gugguaaagccuucaguua

SEQ ID NO: 1893288 - RNA, 19 nt, Homo sapiens
  misc_RNA (1)...(19): siRNA sense strand
agagagacccuaugaaugu

SEQ ID NO: 1893289 - RNA, 19 nt, Homo sapiens
  misc_RNA (1)...(19): siRNA sense strand
agagacagcugccaaaugc

SEQ ID NO: 1893290 - RNA, 19 nt, Homo sapiens
  misc_RNA (1)...(19): siRNA sense strand
gggaaggcuuucagucaga

SEQ ID NO: 1893291 - RNA, 19 nt, Homo sapiens
  misc_RNA (1)...(19): siRNA sense strand
ugaagaagcccgagaccuu

SEQ ID NO: 1893292 - RNA, 19 nt, Homo sapiens
  misc_RNA (1)...(19): siRNA sense strand
acacuggucucauucaaca

SEQ ID NO: 1893293 - RNA, 19 nt, Homo sapiens
  misc_RNA (1)...(19): siRNA sense strand
caccagagccuccaaauac

SEQ ID NO: 1893294 - RNA, 19 nt, Homo sapiens
  misc_RNA (1)...(19): siRNA sense strand
ugggaacacuggucucauu

SEQ ID NO: 1893295 - RNA, 19 nt, Homo sapiens
  misc_RNA (1)...(19): siRNA sense strand
gggaaaagcuuugcucaga

SEQ ID NO: 1893296 - RNA, 19 nt, Homo sapiens
  misc_RNA (1)...(19): siRNA sense strand
gauauccacaacaaaguaa

SEQ ID NO: 1893297 - RNA, 19 nt, Homo sapiens
  misc_RNA (1)...(19): siRNA sense strand
agucagaagucaggccuua

SEQ ID NO: 1893298 - RNA, 19 nt, Homo sapiens
  misc_RNA (1)...(19): siRNA sense strand
gagcucacaucuuauuggu

SEQ ID NO: 1893299 - RNA, 19 nt, Homo sapiens
  misc_RNA (1)...(19): siRNA sense strand
ggccagauuugaacaccaa

SEQ ID NO: 1893300 - RNA, 19 nt, Homo sapiens
  misc_RNA (1)...(19): siRNA sense strand
gaacacaggccugauucug

SEQ ID NO: 1893301 - RNA, 19 nt, Homo sapiens
  misc_RNA (1)...(19): siRNA sense strand
ggagugagaacagggaauu

SEQ ID NO: 1893302 - RNA, 19 nt, Homo sapiens
  misc_RNA (1)...(19): siRNA sense strand
agagauaacaggccagaaa

SEQ ID NO: 1893303 - RNA, 19 nt, Homo sapiens
  misc_RNA (1)...(19): siRNA sense strand
gagagacagcugccaaaug

SEQ ID NO: 1893304 - RNA, 19 nt, Homo sapiens
  misc_RNA (1)...(19): siRNA sense strand
ccgagaagcucugauccaa

SEQ ID NO: 1893305 - RNA, 19 nt, Homo sapiens
  misc_RNA (1)...(19): siRNA sense strand
gaacaccaaggaacagauc

SEQ ID NO: 1893306 - RNA, 19 nt, Homo sapiens
  misc_RNA (1)...(19): siRNA sense strand
auucagaggucaagucuca

SEQ ID NO: 1893307 - RNA, 19 nt, Homo sapiens
  misc_RNA (1)...(19): siRNA sense strand
acacaagagagacgacaua

SEQ ID NO: 1893308 - RNA, 19 nt, Homo sapiens
  misc_RNA (1)...(19): siRNA sense strand
agagagccaugucuacuuc

SEQ ID NO: 1893309 - RNA, 19 nt, Homo sapiens
  misc_RNA (1)...(19): siRNA sense strand
gagagagccaugucuacuu

SEQ ID NO: 1893310 - RNA, 19 nt, Homo sapiens
  misc_RNA (1)...(19): siRNA sense strand
caaauacucagcuccaauc

SEQ ID NO: 1893311 - RNA, 19 nt, Homo sapiens
  misc_RNA (1)...(19): siRNA sense strand
ugaggcaacccaacauaaa

SEQ ID NO: 1893312 - RNA, 19 nt, Homo sapiens
  misc_RNA (1)...(19): siRNA sense strand
gcaugaaaguaacccucuu

SEQ ID NO: 1893313 - RNA, 19 nt, Homo sapiens
  misc_RNA (1)...(19): siRNA sense strand
ccaggaaucuagucugcau

SEQ ID NO: 1893314 - RNA, 19 nt, Homo sapiens
  misc_RNA (1)...(19): siRNA sense strand
gagaggaguggcuucuuga

SEQ ID NO: 1893315 - RNA, 19 nt, Homo sapiens
  misc_RNA (1)...(19): siRNA sense strand
aaaggcagauugauauacu

SEQ ID NO: 1893316 - RNA, 19 nt, Homo sapiens
  misc_RNA (1)...(19): siRNA sense strand
gcggagcucacaucuuauu

SEQ ID NO: 1893317 - RNA, 19 nt, Homo sapiens
  misc_RNA (1)...(19): siRNA sense strand
ggugagaccaggagugaga

SEQ ID NO: 1893318 - RNA, 19 nt, Homo sapiens
  misc_RNA (1)...(19): siRNA sense strand
uggaaaggcagauugauau

SEQ ID NO: 1893319 - RNA, 19 nt, Homo sapiens
  misc_RNA (1)...(19): siRNA sense strand
gaggucaagucucauucga

SEQ ID NO: 1893320 - RNA, 19 nt, Homo sapiens
  misc_RNA (1)...(19): siRNA sense strand
uaaagaaugugggaaagcu

SEQ ID NO: 1893321 - RNA, 19 nt, Homo sapiens
  misc_RNA (1)...(19): siRNA sense strand
ucagaagucaggccuuauu

SEQ ID NO: 1893322 - RNA, 19 nt, Homo sapiens
  misc_RNA (1)...(19): siRNA sense strand
aaucuagucugcaugaaag

SEQ ID NO: 1893323 - RNA, 19 nt, Homo sapiens
  misc_RNA (1)...(19): siRNA sense strand
gaagccauaucagugcaau

SEQ ID NO: 1893324 - RNA, 19 nt, Homo sapiens
  misc_RNA (1)...(19): siRNA sense strand
gaaacccuaucaguguaau

SEQ ID NO: 1893325 - RNA, 19 nt, Homo sapiens
  misc_RNA (1)...(19): siRNA sense strand
caaaacagguaauaucuac

SEQ ID NO: 1893326 - RNA, 19 nt, Homo sapiens
  misc_RNA (1)...(19): siRNA sense strand
ccaagagucacaagagaga

SEQ ID NO: 1893327 - RNA, 19 nt, Homo sapiens
  misc_RNA (1)...(19): siRNA sense strand
gaggcaacccaacauaaau

SEQ ID NO: 1893328 - RNA, 19 nt, Homo sapiens
  misc_RNA (1)...(19): siRNA sense strand
gaaaggcagauugauauac

SEQ ID NO: 1893329 - RNA, 19 nt, Homo sapiens
  misc_RNA (1)...(19): siRNA sense strand
gcugaagaaucaagaaagc

SEQ ID NO: 1893330 - RNA, 19 nt, Homo sapiens
  misc_RNA (1)...(19): siRNA sense strand
agucaggccuuauugaaca

SEQ ID NO: 1893331 - RNA, 19 nt, Homo sapiens
  misc_RNA (1)...(19): siRNA sense strand
ccauaucagugcaaucagu

SEQ ID NO: 1893332 - RNA, 19 nt, Homo sapiens
  misc_RNA (1)...(19): siRNA sense strand
acagggaauuagcuucaaa

SEQ ID NO: 1893333 - RNA, 19 nt, Homo sapiens
  misc_RNA (1)...(19): siRNA sense strand
uggagaagauugaagacau

SEQ ID NO: 1893334 - RNA, 19 nt, Homo sapiens
  misc_RNA (1)...(19): siRNA sense strand
ggaaucuagucugcaugaa

SEQ ID NO: 1893335 - RNA, 19 nt, Homo sapiens
  misc_RNA (1)...(19): siRNA sense strand
cuaccaauguaaugagugu

SEQ ID NO: 1893336 - RNA, 19 nt, Homo sapiens
  misc_RNA (1)...(19): siRNA sense strand
gagaacagggaauuagcuu

SEQ ID NO: 1893337 - RNA, 19 nt, Homo sapiens
  misc_RNA (1)...(19): siRNA sense strand
cuacaaaugcaaugagugu

SEQ ID NO: 1893338 - RNA, 19 nt, Homo sapiens
  misc_RNA (1)...(19): siRNA sense strand
ccuauuagaggauuuggaa

SEQ ID NO: 1893339 - RNA, 19 nt, Homo sapiens
  misc_RNA (1)...(19): siRNA sense strand
gagacccuaugaauguaau

SEQ ID NO: 1893340 - RNA, 19 nt, Homo sapiens
  misc_RNA (1)...(19): siRNA sense strand
ggagggccuucagucagaa

SEQ ID NO: 1893341 - RNA, 19 nt, Homo sapiens
  misc_RNA (1)...(19): siRNA sense strand
acaaggagcugcaccguuu

SEQ ID NO: 1893342 - RNA, 19 nt, Homo sapiens
  misc_RNA (1)...(19): siRNA sense strand
ggaaggacauggugcacaa

SEQ ID NO: 1893343 - RNA, 19 nt, Homo sapiens
  misc_RNA (1)...(19): siRNA sense strand
caucggcgcucauguacuu

SEQ ID NO: 1893344 - RNA, 19 nt, Homo sapiens
  misc_RNA (1)...(19): siRNA sense strand
gcagugaccugagcaccuu

SEQ ID NO: 1893345 - RNA, 19 nt, Homo sapiens
  misc_RNA (1)...(19): siRNA sense strand
gcgcucauguacuucauug

SEQ ID NO: 1893346 - RNA, 19 nt, Homo sapiens
  misc_RNA (1)...(19): siRNA sense strand
gacguggccuucaguguca

SEQ ID NO: 1893347 - RNA, 19 nt, Homo sapiens
  misc_RNA (1)...(19): siRNA sense strand
ggccuacaguggcuacaaa

SEQ ID NO: 1893348 - RNA, 19 nt, Homo sapiens
  misc_RNA (1)...(19): siRNA sense strand
cagccuacguggccaagaa

SEQ ID NO: 1893349 - RNA, 19 nt, Homo sapiens
  misc_RNA (1)...(19): siRNA sense strand
gagcagacguggccuucag

SEQ ID NO: 1893350 - RNA, 19 nt, Homo sapiens
  misc_RNA (1)...(19): siRNA sense strand
ggauggcacugggcauuca

SEQ ID NO: 1893351 - RNA, 19 nt, Homo sapiens
  misc_RNA (1)...(19): siRNA sense strand
acaaauacgugggaaugau

SEQ ID NO: 1893352 - RNA, 19 nt, Homo sapiens
  misc_RNA (1)...(19): siRNA sense strand
gcacugggcauucagaaaa

SEQ ID NO: 1893353 - RNA, 19 nt, Homo sapiens
  misc_RNA (1)...(19): siRNA sense strand
ccucaucggcgcucaugua

SEQ ID NO: 1893354 - RNA, 19 nt, Homo sapiens
  misc_RNA (1)...(19): siRNA sense strand
caauguggcuauggccuau

SEQ ID NO: 1893355 - RNA, 19 nt, Homo sapiens
  misc_RNA (1)...(19): siRNA sense strand
gcucauguacuucauugug

SEQ ID NO: 1893356 - RNA, 19 nt, Homo sapiens
  misc_RNA (1)...(19): siRNA sense strand
cggcagcgauggcuacuac

SEQ ID NO: 1893357 - RNA, 19 nt, Homo sapiens
  misc_RNA (1)...(19): siRNA sense strand
gacacaagcggugguuauu

SEQ ID NO: 1893358 - RNA, 19 nt, Homo sapiens
  misc_RNA (1)...(19): siRNA sense strand
gcaguacagucgugaugcu

SEQ ID NO: 1893359 - RNA, 19 nt, Homo sapiens
  misc_RNA (1)...(19): siRNA sense strand
ugacacaagcggugguuau

SEQ ID NO: 1893360 - RNA, 19 nt, Homo sapiens
  misc_RNA (1)...(19): siRNA sense strand
cuacaaauacgugggaaug

SEQ ID NO: 1893361 - RNA, 19 nt, Homo sapiens
  misc_RNA (1)...(19): siRNA sense strand
caaauacgugggaaugauc

SEQ ID NO: 1893362 - RNA, 19 nt, Homo sapiens
  misc_RNA (1)...(19): siRNA sense strand
caacgccccugaccucuau

SEQ ID NO: 1893363 - RNA, 19 nt, Homo sapiens
  misc_RNA (1)...(19): siRNA sense strand
ucauauacuggcugacuuu

SEQ ID NO: 1893364 - RNA, 19 nt, Homo sapiens
  misc_RNA (1)...(19): siRNA sense strand
gggacccaauggccaaugu

SEQ ID NO: 1893365 - RNA, 19 nt, Homo sapiens
  misc_RNA (1)...(19): siRNA sense strand
uauacuggcugacuuucca

SEQ ID NO: 1893366 - RNA, 19 nt, Homo sapiens
  misc_RNA (1)...(19): siRNA sense strand
cuacaguggcuacaaauac

SEQ ID NO: 1893367 - RNA, 19 nt, Homo sapiens
  misc_RNA (1)...(19): siRNA sense strand
gugcugggccugugugcaa

SEQ ID NO: 1893368 - RNA, 19 nt, Homo sapiens
  misc_RNA (1)...(19): siRNA sense strand
ccuacaguggcuacaaaua

SEQ ID NO: 1893369 - RNA, 19 nt, Homo sapiens
  misc_RNA (1)...(19): siRNA sense strand
ugggaaugauccucagugu

SEQ ID NO: 1893370 - RNA, 19 nt, Homo sapiens
  misc_RNA (1)...(19): siRNA sense strand
cacaagcggugguuauucc

SEQ ID NO: 1893371 - RNA, 19 nt, Homo sapiens
  misc_RNA (1)...(19): siRNA sense strand
cuacguggccaagaagcua

SEQ ID NO: 1893372 - RNA, 19 nt, Homo sapiens
  misc_RNA (1)...(19): siRNA sense strand
ccacuauccugauguguau

SEQ ID NO: 1893373 - RNA, 19 nt, Homo sapiens
  misc_RNA (1)...(19): siRNA sense strand
gaguguggcuggcuucaug

SEQ ID NO: 1893374 - RNA, 19 nt, Homo sapiens
  misc_RNA (1)...(19): siRNA sense strand
ccauggaguuggccaagaa

SEQ ID NO: 1893375 - RNA, 19 nt, Homo sapiens
  misc_RNA (1)...(19): siRNA sense strand
ccucagauggugacuauaa

SEQ ID NO: 1893376 - RNA, 19 nt, Homo sapiens
  misc_RNA (1)...(19): siRNA sense strand
gcacgaccuucagcacauu

SEQ ID NO: 1893377 - RNA, 19 nt, Homo sapiens
  misc_RNA (1)...(19): siRNA sense strand
ccaugcaugucuccauauu

SEQ ID NO: 1893378 - RNA, 19 nt, Homo sapiens
  misc_RNA (1)...(19): siRNA sense strand
uggaggagcuggagaaggu

SEQ ID NO: 1893379 - RNA, 19 nt, Homo sapiens
  misc_RNA (1)...(19): siRNA sense strand
gccaagaacaagagcaaga

SEQ ID NO: 1893380 - RNA, 19 nt, Homo sapiens
  misc_RNA (1)...(19): siRNA sense strand
ccaagaacaagagcaagaa

SEQ ID NO: 1893381 - RNA, 19 nt, Homo sapiens
  misc_RNA (1)...(19): siRNA sense strand
ggaguuggccaagaacaag

SEQ ID NO: 1893382 - RNA, 19 nt, Homo sapiens
  misc_RNA (1)...(19): siRNA sense strand
gccugcaucuuccucuuuc

SEQ ID NO: 1893383 - RNA, 19 nt, Homo sapiens
  misc_RNA (1)...(19): siRNA sense strand
uuccucagauggugacuau

SEQ ID NO: 1893384 - RNA, 19 nt, Homo sapiens
  misc_RNA (1)...(19): siRNA sense strand
cccacuauccugaugugua

SEQ ID NO: 1893385 - RNA, 19 nt, Homo sapiens
  misc_RNA (1)...(19): siRNA sense strand
ccgcggaagcugaggagaa

SEQ ID NO: 1893386 - RNA, 19 nt, Homo sapiens
  misc_RNA (1)...(19): siRNA sense strand
caagaacaagagcaagaag

SEQ ID NO: 1893387 - RNA, 19 nt, Homo sapiens
  misc_RNA (1)...(19): siRNA sense strand
caaauuuggugucaguuaa

SEQ ID NO: 1893388 - RNA, 19 nt, Homo sapiens
  misc_RNA (1)...(19): siRNA sense strand
ggauuagccuugguaguua

SEQ ID NO: 1893389 - RNA, 19 nt, Homo sapiens
  misc_RNA (1)...(19): siRNA sense strand
ugaaagcgcugugagcuaa

SEQ ID NO: 1893390 - RNA, 19 nt, Homo sapiens
  misc_RNA (1)...(19): siRNA sense strand
ccagagaacccagaaauga

SEQ ID NO: 1893391 - RNA, 19 nt, Homo sapiens
  misc_RNA (1)...(19): siRNA sense strand
gggauuagccuugguaguu

SEQ ID NO: 1893392 - RNA, 19 nt, Homo sapiens
  misc_RNA (1)...(19): siRNA sense strand
ccaauacgauaucauccaa

SEQ ID NO: 1893393 - RNA, 19 nt, Homo sapiens
  misc_RNA (1)...(19): siRNA sense strand
ucacaaauuuggugucagu

SEQ ID NO: 1893394 - RNA, 19 nt, Homo sapiens
  misc_RNA (1)...(19): siRNA sense strand
gaaaguuuaauggccaaua

SEQ ID NO: 1893395 - RNA, 19 nt, Homo sapiens
  misc_RNA (1)...(19): siRNA sense strand
ccaguaggacauugacaua

SEQ ID NO: 1893396 - RNA, 19 nt, Homo sapiens
  misc_RNA (1)...(19): siRNA sense strand
ugacauacauccgagaaca

SEQ ID NO: 1893397 - RNA, 19 nt, Homo sapiens
  misc_RNA (1)...(19): siRNA sense strand
acaaauuuggugucaguua

SEQ ID NO: 1893398 - RNA, 19 nt, Homo sapiens
  misc_RNA (1)...(19): siRNA sense strand
ugaccgugcucacacaaga

SEQ ID NO: 1893399 - RNA, 19 nt, Homo sapiens
  misc_RNA (1)...(19): siRNA sense strand
gauuagccuugguaguuau

SEQ ID NO: 1893400 - RNA, 19 nt, Homo sapiens
  misc_RNA (1)...(19): siRNA sense strand
caauaucacacucacaaau

SEQ ID NO: 1893401 - RNA, 19 nt, Homo sapiens
  misc_RNA (1)...(19): siRNA sense strand
aauacgauaucauccaaug

SEQ ID NO: 1893402 - RNA, 19 nt, Homo sapiens
  misc_RNA (1)...(19): siRNA sense strand
aagaagccaucaucacugu

SEQ ID NO: 1893403 - RNA, 19 nt, Homo sapiens
  misc_RNA (1)...(19): siRNA sense strand
gauaauugaacacucugaa

SEQ ID NO: 1893404 - RNA, 19 nt, Homo sapiens
  misc_RNA (1)...(19): siRNA sense strand
ggaaccaguaggacauuga

SEQ ID NO: 1893405 - RNA, 19 nt, Homo sapiens
  misc_RNA (1)...(19): siRNA sense strand
uuaaugagagguuggugua

SEQ ID NO: 1893406 - RNA, 19 nt, Homo sapiens
  misc_RNA (1)...(19): siRNA sense strand
uuuaauggccaauacgaua

SEQ ID NO: 1893407 - RNA, 19 nt, Homo sapiens
  misc_RNA (1)...(19): siRNA sense strand
gauaucauccaaugcaaag

SEQ ID NO: 1893408 - RNA, 19 nt, Homo sapiens
  misc_RNA (1)...(19): siRNA sense strand
guaggacauugacauacau

SEQ ID NO: 1893409 - RNA, 19 nt, Homo sapiens
  misc_RNA (1)...(19): siRNA sense strand
gggcugcuaucgaguggau

SEQ ID NO: 1893410 - RNA, 19 nt, Homo sapiens
  misc_RNA (1)...(19): siRNA sense strand
guggauaauugaacacucu

SEQ ID NO: 1893411 - RNA, 19 nt, Homo sapiens
  misc_RNA (1)...(19): siRNA sense strand
aaaguuuaauggccaauac

SEQ ID NO: 1893412 - RNA, 19 nt, Homo sapiens
  misc_RNA (1)...(19): siRNA sense strand
uaucauccaaugcaaagaa

SEQ ID NO: 1893413 - RNA, 19 nt, Homo sapiens
  misc_RNA (1)...(19): siRNA sense strand
gguaguuauuuggaaaguu

SEQ ID NO: 1893414 - RNA, 19 nt, Homo sapiens
  misc_RNA (1)...(19): siRNA sense strand
aguaggacauugacauaca

SEQ ID NO: 1893415 - RNA, 19 nt, Homo sapiens
  misc_RNA (1)...(19): siRNA sense strand
gggaaccaguaggacauug

SEQ ID NO: 1893416 - RNA, 19 nt, Homo sapiens
  misc_RNA (1)...(19): siRNA sense strand
uaauugaacacucugaaag

SEQ ID NO: 1893417 - RNA, 19 nt, Homo sapiens
  misc_RNA (1)...(19): siRNA sense strand
cuugguaguuauuuggaaa

SEQ ID NO: 1893418 - RNA, 19 nt, Homo sapiens
  misc_RNA (1)...(19): siRNA sense strand
ccaauaucacacucacaaa

SEQ ID NO: 1893419 - RNA, 19 nt, Homo sapiens
  misc_RNA (1)...(19): siRNA sense strand
ucgaguggauaauugaaca

SEQ ID NO: 1893420 - RNA, 19 nt, Homo sapiens
  misc_RNA (1)...(19): siRNA sense strand
uagccuugguaguuauuug

SEQ ID NO: 1893421 - RNA, 19 nt, Homo sapiens
  misc_RNA (1)...(19): siRNA sense strand
acaagaagccaucaucacu

SEQ ID NO: 1893422 - RNA, 19 nt, Homo sapiens
  misc_RNA (1)...(19): siRNA sense strand
aaugagagguugguguaca

SEQ ID NO: 1893423 - RNA, 19 nt, Homo sapiens
  misc_RNA (1)...(19): siRNA sense strand
acacaagaagccaucauca

SEQ ID NO: 1893424 - RNA, 19 nt, Homo sapiens
  misc_RNA (1)...(19): siRNA sense strand
acacaccucauccagagaa

SEQ ID NO: 1893425 - RNA, 19 nt, Homo sapiens
  misc_RNA (1)...(19): siRNA sense strand
ggauaauugaacacucuga

SEQ ID NO: 1893426 - RNA, 19 nt, Homo sapiens
  misc_RNA (1)...(19): siRNA sense strand
cgauaucauccaaugcaaa

SEQ ID NO: 1893427 - RNA, 19 nt, Homo sapiens
  misc_RNA (1)...(19): siRNA sense strand
aaaugaccgugcucacaca

SEQ ID NO: 1893428 - RNA, 19 nt, Homo sapiens
  misc_RNA (1)...(19): siRNA sense strand
uaucacacucacaaauuug

SEQ ID NO: 1893429 - RNA, 19 nt, Homo sapiens
  misc_RNA (1)...(19): siRNA sense strand
acucacaaauuugguguca

SEQ ID NO: 1893430 - RNA, 19 nt, Homo sapiens
  misc_RNA (1)...(19): siRNA sense strand
uuaauggccaauacgauau

SEQ ID NO: 1893431 - RNA, 19 nt, Homo sapiens
  misc_RNA (1)...(19): siRNA sense strand
acauacauccgagaacauu

SEQ ID NO: 1893432 - RNA, 19 nt, Homo sapiens
  misc_RNA (1)...(19): siRNA sense strand
gggcguggaugugcuacag

SEQ ID NO: 1893433 - RNA, 19 nt, Homo sapiens
  misc_RNA (1)...(19): siRNA sense strand
agaaaugaccgugcucaca

SEQ ID NO: 1893434 - RNA, 19 nt, Homo sapiens
  misc_RNA (1)...(19): siRNA sense strand
gauauuggauggugugaaa

SEQ ID NO: 1893435 - RNA, 19 nt, Homo sapiens
  misc_RNA (1)...(19): siRNA sense strand
uuaaagaacugccucaauu

SEQ ID NO: 1893436 - RNA, 19 nt, Homo sapiens
  misc_RNA (1)...(19): siRNA sense strand
gaacaaugcccuauuaagu

SEQ ID NO: 1893437 - RNA, 19 nt, Homo sapiens
  misc_RNA (1)...(19): siRNA sense strand
gcgauuagcagcucaauuu

SEQ ID NO: 1893438 - RNA, 19 nt, Homo sapiens
  misc_RNA (1)...(19): siRNA sense strand
gaacaagauuaaagucguu

SEQ ID NO: 1893439 - RNA, 19 nt, Homo sapiens
  misc_RNA (1)...(19): siRNA sense strand
cagaaaagcucaaagauuu

SEQ ID NO: 1893440 - RNA, 19 nt, Homo sapiens
  misc_RNA (1)...(19): siRNA sense strand
gagaggacauuguuagaga

SEQ ID NO: 1893441 - RNA, 19 nt, Homo sapiens
  misc_RNA (1)...(19): siRNA sense strand
gaagauacugucuggguua

SEQ ID NO: 1893442 - RNA, 19 nt, Homo sapiens
  misc_RNA (1)...(19): siRNA sense strand
ucaguuauguggaauguuu

SEQ ID NO: 1893443 - RNA, 19 nt, Homo sapiens
  misc_RNA (1)...(19): siRNA sense strand
uaaagucguugcauugaaa

SEQ ID NO: 1893444 - RNA, 19 nt, Homo sapiens
  misc_RNA (1)...(19): siRNA sense strand
cagaugaagucuuaacaaa

SEQ ID NO: 1893445 - RNA, 19 nt, Homo sapiens
  misc_RNA (1)...(19): siRNA sense strand
caagguuugugacauauuu

SEQ ID NO: 1893446 - RNA, 19 nt, Homo sapiens
  misc_RNA (1)...(19): siRNA sense strand
gaaaggugguacuaaggaa

SEQ ID NO: 1893447 - RNA, 19 nt, Homo sapiens
  misc_RNA (1)...(19): siRNA sense strand
gaugaagucuuaacaaagg

SEQ ID NO: 1893448 - RNA, 19 nt, Homo sapiens
  misc_RNA (1)...(19): siRNA sense strand
cagaagagaacaagauuaa

SEQ ID NO: 1893449 - RNA, 19 nt, Homo sapiens
  misc_RNA (1)...(19): siRNA sense strand
gaagagaacaagauuaaag

SEQ ID NO: 1893450 - RNA, 19 nt, Homo sapiens
  misc_RNA (1)...(19): siRNA sense strand
aaagaugccuaucaaguga

SEQ ID NO: 1893451 - RNA, 19 nt, Homo sapiens
  misc_RNA (1)...(19): siRNA sense strand
ccacauuccuccuucuuau

SEQ ID NO: 1893452 - RNA, 19 nt, Homo sapiens
  misc_RNA (1)...(19): siRNA sense strand
agaugacucugcagaauuu

SEQ ID NO: 1893453 - RNA, 19 nt, Homo sapiens
  misc_RNA (1)...(19): siRNA sense strand
agugaacaaugcccuauua

SEQ ID NO: 1893454 - RNA, 19 nt, Homo sapiens
  misc_RNA (1)...(19): siRNA sense strand
gcaauuugggcaacuuuaa

SEQ ID NO: 1893455 - RNA, 19 nt, Homo sapiens
  misc_RNA (1)...(19): siRNA sense strand
uaaagaacugccucaauuu

SEQ ID NO: 1893456 - RNA, 19 nt, Homo sapiens
  misc_RNA (1)...(19): siRNA sense strand
gcuuagcucuccaggguaa

SEQ ID NO: 1893457 - RNA, 19 nt, Homo sapiens
  misc_RNA (1)...(19): siRNA sense strand
gaagacagcaacuuguaga

SEQ ID NO: 1893458 - RNA, 19 nt, Homo sapiens
  misc_RNA (1)...(19): siRNA sense strand
gaauguuuguuguacaguu

SEQ ID NO: 1893459 - RNA, 19 nt, Homo sapiens
  misc_RNA (1)...(19): siRNA sense strand
aguggaaggucuugauaua

SEQ ID NO: 1893460 - RNA, 19 nt, Homo sapiens
  misc_RNA (1)...(19): siRNA sense strand
ggaaguggaagagcuuaua

SEQ ID NO: 1893461 - RNA, 19 nt, Homo sapiens
  misc_RNA (1)...(19): siRNA sense strand
agagaaugcugguaaugaa

SEQ ID NO: 1893462 - RNA, 19 nt, Homo sapiens
  misc_RNA (1)...(19): siRNA sense strand
gagcuuauacuaacugaau

SEQ ID NO: 1893463 - RNA, 19 nt, Homo sapiens
  misc_RNA (1)...(19): siRNA sense strand
acaaugcccuauuaaguau

SEQ ID NO: 1893464 - RNA, 19 nt, Homo sapiens
  misc_RNA (1)...(19): siRNA sense strand
ucaaggaucucuuccacau

SEQ ID NO: 1893465 - RNA, 19 nt, Homo sapiens
  misc_RNA (1)...(19): siRNA sense strand
gugagcagguucucccuaa

SEQ ID NO: 1893466 - RNA, 19 nt, Homo sapiens
  misc_RNA (1)...(19): siRNA sense strand
gauauacuaacgcaacuuu

SEQ ID NO: 1893467 - RNA, 19 nt, Homo sapiens
  misc_RNA (1)...(19): siRNA sense strand
gauuaaagucguugcauug

SEQ ID NO: 1893468 - RNA, 19 nt, Homo sapiens
  misc_RNA (1)...(19): siRNA sense strand
gagagaaugcugguaauga

SEQ ID NO: 1893469 - RNA, 19 nt, Homo sapiens
  misc_RNA (1)...(19): siRNA sense strand
ccgaaauucuuuaagcauu

SEQ ID NO: 1893470 - RNA, 19 nt, Homo sapiens
  misc_RNA (1)...(19): siRNA sense strand
ggacauuguuagagaacga

SEQ ID NO: 1893471 - RNA, 19 nt, Homo sapiens
  misc_RNA (1)...(19): siRNA sense strand
uaacaaaggaaguggaaga

SEQ ID NO: 1893472 - RNA, 19 nt, Homo sapiens
  misc_RNA (1)...(19): siRNA sense strand
uaucagacaacuucgcuua

SEQ ID NO: 1893473 - RNA, 19 nt, Homo sapiens
  misc_RNA (1)...(19): siRNA sense strand
uuuaccagaugaagucuua

SEQ ID NO: 1893474 - RNA, 19 nt, Homo sapiens
  misc_RNA (1)...(19): siRNA sense strand
gcaaguuuauaucagacaa

SEQ ID NO: 1893475 - RNA, 19 nt, Homo sapiens
  misc_RNA (1)...(19): siRNA sense strand
uaaagaugccuaucaagug

SEQ ID NO: 1893476 - RNA, 19 nt, Homo sapiens
  misc_RNA (1)...(19): siRNA sense strand
uggaagagcuuauacuaac

SEQ ID NO: 1893477 - RNA, 19 nt, Homo sapiens
  misc_RNA (1)...(19): siRNA sense strand
aaagagagccagugaagau

SEQ ID NO: 1893478 - RNA, 19 nt, Homo sapiens
  misc_RNA (1)...(19): siRNA sense strand
gaaugcugguaaugaagaa

SEQ ID NO: 1893479 - RNA, 19 nt, Homo sapiens
  misc_RNA (1)...(19): siRNA sense strand
gaauuuaaccuagugaaca

SEQ ID NO: 1893480 - RNA, 19 nt, Homo sapiens
  misc_RNA (1)...(19): siRNA sense strand
uaagagcacaguaacacua

SEQ ID NO: 1893481 - RNA, 19 nt, Homo sapiens
  misc_RNA (1)...(19): siRNA sense strand
gcaagugggccagcauaaa

SEQ ID NO: 1893482 - RNA, 19 nt, Homo sapiens
  misc_RNA (1)...(19): siRNA sense strand
gccgaaaacuuccagauuu

SEQ ID NO: 1893483 - RNA, 19 nt, Homo sapiens
  misc_RNA (1)...(19): siRNA sense strand
aacaaugcccuauuaagua

SEQ ID NO: 1893484 - RNA, 19 nt, Homo sapiens
  misc_RNA (1)...(19): siRNA sense strand
gaggagcuuuaccgcaauu

SEQ ID NO: 1893485 - RNA, 19 nt, Homo sapiens
  misc_RNA (1)...(19): siRNA sense strand
uggaaggucuugauauaca

SEQ ID NO: 1893486 - RNA, 19 nt, Homo sapiens
  misc_RNA (1)...(19): siRNA sense strand
aaggaucucuuccacauuc

SEQ ID NO: 1893487 - RNA, 19 nt, Homo sapiens
  misc_RNA (1)...(19): siRNA sense strand
gagcaagugggccagcaua

SEQ ID NO: 1893488 - RNA, 19 nt, Homo sapiens
  misc_RNA (1)...(19): siRNA sense strand
caaggagaggacauuguua

SEQ ID NO: 1893489 - RNA, 19 nt, Homo sapiens
  misc_RNA (1)...(19): siRNA sense strand
aaacagaagagaacaagau

SEQ ID NO: 1893490 - RNA, 19 nt, Homo sapiens
  misc_RNA (1)...(19): siRNA sense strand
guuagagaacgagcaauua

SEQ ID NO: 1893491 - RNA, 19 nt, Homo sapiens
  misc_RNA (1)...(19): siRNA sense strand
aaaucaggcugcaguacuu

SEQ ID NO: 1893492 - RNA, 19 nt, Homo sapiens
  misc_RNA (1)...(19): siRNA sense strand
ggaagagcuuauacuaacu

SEQ ID NO: 1893493 - RNA, 19 nt, Homo sapiens
  misc_RNA (1)...(19): siRNA sense strand
aaagaacugccucaauuug

SEQ ID NO: 1893494 - RNA, 19 nt, Homo sapiens
  misc_RNA (1)...(19): siRNA sense strand
agauuaaagucguugcauu

SEQ ID NO: 1893495 - RNA, 19 nt, Homo sapiens
  misc_RNA (1)...(19): siRNA sense strand
gcagaaaagcucaaagauu

SEQ ID NO: 1893496 - RNA, 19 nt, Homo sapiens
  misc_RNA (1)...(19): siRNA sense strand
ccaagcuacaguucaguua

SEQ ID NO: 1893497 - RNA, 19 nt, Homo sapiens
  misc_RNA (1)...(19): siRNA sense strand
ugaacaggccgaccuagaa

SEQ ID NO: 1893498 - RNA, 19 nt, Homo sapiens
  misc_RNA (1)...(19): siRNA sense strand
uuagagaacgagcaauuaa

SEQ ID NO: 1893499 - RNA, 19 nt, Homo sapiens
  misc_RNA (1)...(19): siRNA sense strand
ucaaggagaggacauuguu

SEQ ID NO: 1893500 - RNA, 19 nt, Homo sapiens
  misc_RNA (1)...(19): siRNA sense strand
uuaaagucguugcauugaa

SEQ ID NO: 1893501 - RNA, 19 nt, Homo sapiens
  misc_RNA (1)...(19): siRNA sense strand
gagcuuuaccgcaauuaug

SEQ ID NO: 1893502 - RNA, 19 nt, Homo sapiens
  misc_RNA (1)...(19): siRNA sense strand
gauuagcagcucaauuuau

SEQ ID NO: 1893503 - RNA, 19 nt, Homo sapiens
  misc_RNA (1)...(19): siRNA sense strand
guggaagagcuuauacuaa

SEQ ID NO: 1893504 - RNA, 19 nt, Homo sapiens
  misc_RNA (1)...(19): siRNA sense strand
cuuaagacuuuaccagaug

SEQ ID NO: 1893505 - RNA, 19 nt, Homo sapiens
  misc_RNA (1)...(19): siRNA sense strand
agauacaacuucagguuca

SEQ ID NO: 1893506 - RNA, 19 nt, Homo sapiens
  misc_RNA (1)...(19): siRNA sense strand
gagagccagugaagauaca

SEQ ID NO: 1893507 - RNA, 19 nt, Homo sapiens
  misc_RNA (1)...(19): siRNA sense strand
acaguucaguuauguggaa

SEQ ID NO: 1893508 - RNA, 19 nt, Homo sapiens
  misc_RNA (1)...(19): siRNA sense strand
gaagaacccaagcuacagu

SEQ ID NO: 1893509 - RNA, 19 nt, Homo sapiens
  misc_RNA (1)...(19): siRNA sense strand
cgacaguagaggagcuuua

SEQ ID NO: 1893510 - RNA, 19 nt, Homo sapiens
  misc_RNA (1)...(19): siRNA sense strand
ugcuaucaaugcacaguua

SEQ ID NO: 1893511 - RNA, 19 nt, Homo sapiens
  misc_RNA (1)...(19): siRNA sense strand
caguaacacuauccuggaa

SEQ ID NO: 1893512 - RNA, 19 nt, Homo sapiens
  misc_RNA (1)...(19): siRNA sense strand
gaagagcuuauacuaacug

SEQ ID NO: 1893513 - RNA, 19 nt, Homo sapiens
  misc_RNA (1)...(19): siRNA sense strand
caagugggccagcauaaag

SEQ ID NO: 1893514 - RNA, 19 nt, Homo sapiens
  misc_RNA (1)...(19): siRNA sense strand
cgauuagcagcucaauuua

SEQ ID NO: 1893515 - RNA, 19 nt, Homo sapiens
  misc_RNA (1)...(19): siRNA sense strand
uaaugaagaacccaagcua

SEQ ID NO: 1893516 - RNA, 19 nt, Homo sapiens
  misc_RNA (1)...(19): siRNA sense strand
ggagguauugaaauuguug

SEQ ID NO: 1893517 - RNA, 19 nt, Homo sapiens
  misc_RNA (1)...(19): siRNA sense strand
ggaagacagcaacuuguag

SEQ ID NO: 1893518 - RNA, 19 nt, Homo sapiens
  misc_RNA (1)...(19): siRNA sense strand
gcagcaauuugggcaacuu

SEQ ID NO: 1893519 - RNA, 19 nt, Homo sapiens
  misc_RNA (1)...(19): siRNA sense strand
gacuuuagguggguuguuc

SEQ ID NO: 1893520 - RNA, 19 nt, Homo sapiens
  misc_RNA (1)...(19): siRNA sense strand
acagaagagaacaagauua

SEQ ID NO: 1893521 - RNA, 19 nt, Homo sapiens
  misc_RNA (1)...(19): siRNA sense strand
uaaaacgggugaggccuua

SEQ ID NO: 1893522 - RNA, 19 nt, Homo sapiens
  misc_RNA (1)...(19): siRNA sense strand
aagcuacaguucaguuaug

SEQ ID NO: 1893523 - RNA, 19 nt, Homo sapiens
  misc_RNA (1)...(19): siRNA sense strand
ugaaauuguuggcggagau

SEQ ID NO: 1893524 - RNA, 19 nt, Homo sapiens
  misc_RNA (1)...(19): siRNA sense strand
ccaguggaaggucuugaua

SEQ ID NO: 1893525 - RNA, 19 nt, Homo sapiens
  misc_RNA (1)...(19): siRNA sense strand
gaacaggccgaccuagaac

SEQ ID NO: 1893526 - RNA, 19 nt, Homo sapiens
  misc_RNA (1)...(19): siRNA sense strand
gauacugucuggguuaaaa

SEQ ID NO: 1893527 - RNA, 19 nt, Homo sapiens
  misc_RNA (1)...(19): siRNA sense strand
ugggcaacuuuaauuauga

SEQ ID NO: 1893528 - RNA, 19 nt, Homo sapiens
  misc_RNA (1)...(19): siRNA sense strand
ccugcaaguuuauaucaga

SEQ ID NO: 1893529 - RNA, 19 nt, Homo sapiens
  misc_RNA (1)...(19): siRNA sense strand
ggagagaaugcugguaaug

SEQ ID NO: 1893530 - RNA, 19 nt, Homo sapiens
  misc_RNA (1)...(19): siRNA sense strand
aguuggagguauugaaauu

SEQ ID NO: 1893531 - RNA, 19 nt, Homo sapiens
  misc_RNA (1)...(19): siRNA sense strand
guaccccucuucucuaaaa

SEQ ID NO: 1893532 - RNA, 19 nt, Homo sapiens
  misc_RNA (1)...(19): siRNA sense strand
acauuccuccuucuuauaa

SEQ ID NO: 1893533 - RNA, 19 nt, Homo sapiens
  misc_RNA (1)...(19): siRNA sense strand
guaacacuauccuggaaac

SEQ ID NO: 1893534 - RNA, 19 nt, Homo sapiens
  misc_RNA (1)...(19): siRNA sense strand
gaagagaacauucaagaua

SEQ ID NO: 1893535 - RNA, 19 nt, Homo sapiens
  misc_RNA (1)...(19): siRNA sense strand
ccagauggcucuucaagua

SEQ ID NO: 1893536 - RNA, 19 nt, Homo sapiens
  misc_RNA (1)...(19): siRNA sense strand
uaacagaacugcuauugga

SEQ ID NO: 1893537 - RNA, 19 nt, Homo sapiens
  misc_RNA (1)...(19): siRNA sense strand
gcacuuauuuggcuacuug

SEQ ID NO: 1893538 - RNA, 19 nt, Homo sapiens
  misc_RNA (1)...(19): siRNA sense strand
gaacggagacgcugaauag

SEQ ID NO: 1893539 - RNA, 19 nt, Homo sapiens
  misc_RNA (1)...(19): siRNA sense strand
gcagaaagaccugugaaua

SEQ ID NO: 1893540 - RNA, 19 nt, Homo sapiens
  misc_RNA (1)...(19): siRNA sense strand
gaagaaggcucugugcaau

SEQ ID NO: 1893541 - RNA, 19 nt, Homo sapiens
  misc_RNA (1)...(19): siRNA sense strand
gaagaacuauuugacauuc

SEQ ID NO: 1893542 - RNA, 19 nt, Homo sapiens
  misc_RNA (1)...(19): siRNA sense strand
gaugggagcuaccaaacuu

SEQ ID NO: 1893543 - RNA, 19 nt, Homo sapiens
  misc_RNA (1)...(19): siRNA sense strand
cggagacgcugaauaguuu

SEQ ID NO: 1893544 - RNA, 19 nt, Homo sapiens
  misc_RNA (1)...(19): siRNA sense strand
ggauaaggcuucauauguc

SEQ ID NO: 1893545 - RNA, 19 nt, Homo sapiens
  misc_RNA (1)...(19): siRNA sense strand
gggcaacuaucucuaaaug

SEQ ID NO: 1893546 - RNA, 19 nt, Homo sapiens
  misc_RNA (1)...(19): siRNA sense strand
gggccaggcugaaguauug

SEQ ID NO: 1893547 - RNA, 19 nt, Homo sapiens
  misc_RNA (1)...(19): siRNA sense strand
gaaguugguuuaucuguac

SEQ ID NO: 1893548 - RNA, 19 nt, Homo sapiens
  misc_RNA (1)...(19): siRNA sense strand
ucaauacgcugugcaaaga

SEQ ID NO: 1893549 - RNA, 19 nt, Homo sapiens
  misc_RNA (1)...(19): siRNA sense strand
gauaaggcuucauauguca

SEQ ID NO: 1893550 - RNA, 19 nt, Homo sapiens
  misc_RNA (1)...(19): siRNA sense strand
cgccagaucuugcauaguu

SEQ ID NO: 1893551 - RNA, 19 nt, Homo sapiens
  misc_RNA (1)...(19): siRNA sense strand
caccaucucuuaaaucgaa

SEQ ID NO: 1893552 - RNA, 19 nt, Homo sapiens
  misc_RNA (1)...(19): siRNA sense strand
gaaguuaagcggauucugu

SEQ ID NO: 1893553 - RNA, 19 nt, Homo sapiens
  misc_RNA (1)...(19): siRNA sense strand
ugaccaggauccaauugua

SEQ ID NO: 1893554 - RNA, 19 nt, Homo sapiens
  misc_RNA (1)...(19): siRNA sense strand
uacaagaacucccugauuc

SEQ ID NO: 1893555 - RNA, 19 nt, Homo sapiens
  misc_RNA (1)...(19): siRNA sense strand
uaaugcuccuuauguguua

SEQ ID NO: 1893556 - RNA, 19 nt, Homo sapiens
  misc_RNA (1)...(19): siRNA sense strand
ucaauggucugcgggauaa

SEQ ID NO: 1893557 - RNA, 19 nt, Homo sapiens
  misc_RNA (1)...(19): siRNA sense strand
ggaugugucugcggacuuu

SEQ ID NO: 1893558 - RNA, 19 nt, Homo sapiens
  misc_RNA (1)...(19): siRNA sense strand
gggauaaggcuucauaugu

SEQ ID NO: 1893559 - RNA, 19 nt, Homo sapiens
  misc_RNA (1)...(19): siRNA sense strand
gaaacaaaaugaagcaaga

SEQ ID NO: 1893560 - RNA, 19 nt, Homo sapiens
  misc_RNA (1)...(19): siRNA sense strand
accgaggucucuucuauua

SEQ ID NO: 1893561 - RNA, 19 nt, Homo sapiens
  misc_RNA (1)...(19): siRNA sense strand
uaggacguuuguuguauua

SEQ ID NO: 1893562 - RNA, 19 nt, Homo sapiens
  misc_RNA (1)...(19): siRNA sense strand
ggaagaacuauuugacauu

SEQ ID NO: 1893563 - RNA, 19 nt, Homo sapiens
  misc_RNA (1)...(19): siRNA sense strand
ggaaggaggcguugucauc

SEQ ID NO: 1893564 - RNA, 19 nt, Homo sapiens
  misc_RNA (1)...(19): siRNA sense strand
guacaagaacucccugauu

SEQ ID NO: 1893565 - RNA, 19 nt, Homo sapiens
  misc_RNA (1)...(19): siRNA sense strand
agaagaaguugguuuaucu

SEQ ID NO: 1893566 - RNA, 19 nt, Homo sapiens
  misc_RNA (1)...(19): siRNA sense strand
gaagcaagcacuuauuugg

SEQ ID NO: 1893567 - RNA, 19 nt, Homo sapiens
  misc_RNA (1)...(19): siRNA sense strand
gggaagcaagcacuuauuu

SEQ ID NO: 1893568 - RNA, 19 nt, Homo sapiens
  misc_RNA (1)...(19): siRNA sense strand
uagaggaaauucugaaaca

SEQ ID NO: 1893569 - RNA, 19 nt, Homo sapiens
  misc_RNA (1)...(19): siRNA sense strand
ggacuuacacagaucaaug

SEQ ID NO: 1893570 - RNA, 19 nt, Homo sapiens
  misc_RNA (1)...(19): siRNA sense strand
gcuaggacguuuguuguau

SEQ ID NO: 1893571 - RNA, 19 nt, Homo sapiens
  misc_RNA (1)...(19): siRNA sense strand
gaggcguugucaucaauaa

SEQ ID NO: 1893572 - RNA, 19 nt, Homo sapiens
  misc_RNA (1)...(19): siRNA sense strand
cgaggucucuucuauuauc

SEQ ID NO: 1893573 - RNA, 19 nt, Homo sapiens
  misc_RNA (1)...(19): siRNA sense strand
agaaguugguuuaucugua

SEQ ID NO: 1893574 - RNA, 19 nt, Homo sapiens
  misc_RNA (1)...(19): siRNA sense strand
guacugaagcuguauguca

SEQ ID NO: 1893575 - RNA, 19 nt, Homo sapiens
  misc_RNA (1)...(19): siRNA sense strand
gaucaauguguucagauuu

SEQ ID NO: 1893576 - RNA, 19 nt, Homo sapiens
  misc_RNA (1)...(19): siRNA sense strand
gauacuggcugucuguucu

SEQ ID NO: 1893577 - RNA, 19 nt, Homo sapiens
  misc_RNA (1)...(19): siRNA sense strand
cagaaagaccugugaauag

SEQ ID NO: 1893578 - RNA, 19 nt, Homo sapiens
  misc_RNA (1)...(19): siRNA sense strand
ucauggagacucugaagua

SEQ ID NO: 1893579 - RNA, 19 nt, Homo sapiens
  misc_RNA (1)...(19): siRNA sense strand
ggaagcaagcacuuauuug

SEQ ID NO: 1893580 - RNA, 19 nt, Homo sapiens
  misc_RNA (1)...(19): siRNA sense strand
ucucuuaaaucgaauguca

SEQ ID NO: 1893581 - RNA, 19 nt, Homo sapiens
  misc_RNA (1)...(19): siRNA sense strand
aagagaacauucaagauag

SEQ ID NO: 1893582 - RNA, 19 nt, Homo sapiens
  misc_RNA (1)...(19): siRNA sense strand
ucaaucuguuggauaguuu

SEQ ID NO: 1893583 - RNA, 19 nt, Homo sapiens
  misc_RNA (1)...(19): siRNA sense strand
cagaagaaguugguuuauc

SEQ ID NO: 1893584 - RNA, 19 nt, Homo sapiens
  misc_RNA (1)...(19): siRNA sense strand
gaauuccuaaugcuccuua

SEQ ID NO: 1893585 - RNA, 19 nt, Homo sapiens
  misc_RNA (1)...(19): siRNA sense strand
uagaggacuuuguugagaa

SEQ ID NO: 1893586 - RNA, 19 nt, Homo sapiens
  misc_RNA (1)...(19): siRNA sense strand
gaaggaggcguugucauca

SEQ ID NO: 1893587 - RNA, 19 nt, Homo sapiens
  misc_RNA (1)...(19): siRNA sense strand
gcagugaggaagaacuauu

SEQ ID NO: 1893588 - RNA, 19 nt, Homo sapiens
  misc_RNA (1)...(19): siRNA sense strand
gugcaauccucacauucaa

SEQ ID NO: 1893589 - RNA, 19 nt, Homo sapiens
  misc_RNA (1)...(19): siRNA sense strand
gaacaaggagaggguacaa

SEQ ID NO: 1893590 - RNA, 19 nt, Homo sapiens
  misc_RNA (1)...(19): siRNA sense strand
ggacguuuguuguauuacu

SEQ ID NO: 1893591 - RNA, 19 nt, Homo sapiens
  misc_RNA (1)...(19): siRNA sense strand
gugaacuggugaacgauga

SEQ ID NO: 1893592 - RNA, 19 nt, Homo sapiens
  misc_RNA (1)...(19): siRNA sense strand
cguacaaacugauguccuu

SEQ ID NO: 1893593 - RNA, 19 nt, Homo sapiens
  misc_RNA (1)...(19): siRNA sense strand
ccugguaaaugaauuauac

SEQ ID NO: 1893594 - RNA, 19 nt, Homo sapiens
  misc_RNA (1)...(19): siRNA sense strand
ugaagaaggcucugugcaa

SEQ ID NO: 1893595 - RNA, 19 nt, Homo sapiens
  misc_RNA (1)...(19): siRNA sense strand
uagauauuguccagaagaa

SEQ ID NO: 1893596 - RNA, 19 nt, Homo sapiens
  misc_RNA (1)...(19): siRNA sense strand
ccagaucuugcauaguuua

SEQ ID NO: 1893597 - RNA, 19 nt, Homo sapiens
  misc_RNA (1)...(19): siRNA sense strand
gaugugccaagaugcauaa

SEQ ID NO: 1893598 - RNA, 19 nt, Homo sapiens
  misc_RNA (1)...(19): siRNA sense strand
cuaggacguuuguuguauu

SEQ ID NO: 1893599 - RNA, 19 nt, Homo sapiens
  misc_RNA (1)...(19): siRNA sense strand
uuagaggacuuuguugaga

SEQ ID NO: 1893600 - RNA, 19 nt, Homo sapiens
  misc_RNA (1)...(19): siRNA sense strand
gaucuugcauaguuuacca

SEQ ID NO: 1893601 - RNA, 19 nt, Homo sapiens
  misc_RNA (1)...(19): siRNA sense strand
uggagacucugaaguagau

SEQ ID NO: 1893602 - RNA, 19 nt, Homo sapiens
  misc_RNA (1)...(19): siRNA sense strand
ggacuuuguugagaaugug

SEQ ID NO: 1893603 - RNA, 19 nt, Homo sapiens
  misc_RNA (1)...(19): siRNA sense strand
ugcacaggcugccaucuuu

SEQ ID NO: 1893604 - RNA, 19 nt, Homo sapiens
  misc_RNA (1)...(19): siRNA sense strand
ggugaacgaugagaaugug

SEQ ID NO: 1893605 - RNA, 19 nt, Homo sapiens
  misc_RNA (1)...(19): siRNA sense strand
gaaaguggaggugcugugu

SEQ ID NO: 1893606 - RNA, 19 nt, Homo sapiens
  misc_RNA (1)...(19): siRNA sense strand
cuacaucaaacuacagaaa

SEQ ID NO: 1893607 - RNA, 19 nt, Homo sapiens
  misc_RNA (1)...(19): siRNA sense strand
guagauauuguccagaaga

SEQ ID NO: 1893608 - RNA, 19 nt, Homo sapiens
  misc_RNA (1)...(19): siRNA sense strand
ugaggucucuagaggaaau

SEQ ID NO: 1893609 - RNA, 19 nt, Homo sapiens
  misc_RNA (1)...(19): siRNA sense strand
gaggaagaacuauuugaca

SEQ ID NO: 1893610 - RNA, 19 nt, Homo sapiens
  misc_RNA (1)...(19): siRNA sense strand
ccgaggacguggugaagga

SEQ ID NO: 1893611 - RNA, 19 nt, Homo sapiens
  misc_RNA (1)...(19): siRNA sense strand
ccucuuaguuggcauugau

SEQ ID NO: 1893612 - RNA, 19 nt, Homo sapiens
  misc_RNA (1)...(19): siRNA sense strand
agaucaauguguucagauu

SEQ ID NO: 1893613 - RNA, 19 nt, Homo sapiens
  misc_RNA (1)...(19): siRNA sense strand
gcaggaguauauacaacag

SEQ ID NO: 1893614 - RNA, 19 nt, Homo sapiens
  misc_RNA (1)...(19): siRNA sense strand
gacccuugauuccugaaga

SEQ ID NO: 1893615 - RNA, 19 nt, Homo sapiens
  misc_RNA (1)...(19): siRNA sense strand
ggacaugcuaggacguuug

SEQ ID NO: 1893616 - RNA, 19 nt, Homo sapiens
  misc_RNA (1)...(19): siRNA sense strand
uccgagaccugguuugguu

SEQ ID NO: 1893617 - RNA, 19 nt, Homo sapiens
  misc_RNA (1)...(19): siRNA sense strand
gauauuguccagaagaagu

SEQ ID NO: 1893618 - RNA, 19 nt, Homo sapiens
  misc_RNA (1)...(19): siRNA sense strand
aaguggaggugcuguguga

SEQ ID NO: 1893619 - RNA, 19 nt, Homo sapiens
  misc_RNA (1)...(19): siRNA sense strand
cuugaggucucuagaggaa

SEQ ID NO: 1893620 - RNA, 19 nt, Homo sapiens
  misc_RNA (1)...(19): siRNA sense strand
caacagccuauucucaaug

SEQ ID NO: 1893621 - RNA, 19 nt, Homo sapiens
  misc_RNA (1)...(19): siRNA sense strand
guuaagcggauucugugua

SEQ ID NO: 1893622 - RNA, 19 nt, Homo sapiens
  misc_RNA (1)...(19): siRNA sense strand
ugugugaacuggugaacga

SEQ ID NO: 1893623 - RNA, 19 nt, Homo sapiens
  misc_RNA (1)...(19): siRNA sense strand
gccagaucuugcauaguuu

SEQ ID NO: 1893624 - RNA, 19 nt, Homo sapiens
  misc_RNA (1)...(19): siRNA sense strand
guagauggugcccugguaa

SEQ ID NO: 1893625 - RNA, 19 nt, Homo sapiens
  misc_RNA (1)...(19): siRNA sense strand
ggaugugccaagaugcaua

SEQ ID NO: 1893626 - RNA, 19 nt, Homo sapiens
  misc_RNA (1)...(19): siRNA sense strand
gccuuaaaguugcucauca

SEQ ID NO: 1893627 - RNA, 19 nt, Homo sapiens
  misc_RNA (1)...(19): siRNA sense strand
agaaagaccugugaauagc

SEQ ID NO: 1893628 - RNA, 19 nt, Homo sapiens
  misc_RNA (1)...(19): siRNA sense strand
uuaagcggauucuguguag

SEQ ID NO: 1893629 - RNA, 19 nt, Homo sapiens
  misc_RNA (1)...(19): siRNA sense strand
gcacaggcugccaucuuug

SEQ ID NO: 1893630 - RNA, 19 nt, Homo sapiens
  misc_RNA (1)...(19): siRNA sense strand
uuggauaguuuccucaaga

SEQ ID NO: 1893631 - RNA, 19 nt, Homo sapiens
  misc_RNA (1)...(19): siRNA sense strand
acaaggagaggguacaaga

SEQ ID NO: 1893632 - RNA, 19 nt, Homo sapiens
  misc_RNA (1)...(19): siRNA sense strand
caagaacggagacgcugaa

SEQ ID NO: 1893633 - RNA, 19 nt, Homo sapiens
  misc_RNA (1)...(19): siRNA sense strand
caaggagaggguacaagaa

SEQ ID NO: 1893634 - RNA, 19 nt, Homo sapiens
  misc_RNA (1)...(19): siRNA sense strand
ggaaauagccauaguuaua

SEQ ID NO: 1893635 - RNA, 19 nt, Homo sapiens
  misc_RNA (1)...(19): siRNA sense strand
ggacaaggguugaauauga

SEQ ID NO: 1893636 - RNA, 19 nt, Homo sapiens
  misc_RNA (1)...(19): siRNA sense strand
gaucagaagugacuauuaa

SEQ ID NO: 1893637 - RNA, 19 nt, Homo sapiens
  misc_RNA (1)...(19): siRNA sense strand
ugacaaaugugcaaucuua

SEQ ID NO: 1893638 - RNA, 19 nt, Homo sapiens
  misc_RNA (1)...(19): siRNA sense strand
gcacaggaaugauugguaa

SEQ ID NO: 1893639 - RNA, 19 nt, Homo sapiens
  misc_RNA (1)...(19): siRNA sense strand
gcagugagcuggacaacuu

SEQ ID NO: 1893640 - RNA, 19 nt, Homo sapiens
  misc_RNA (1)...(19): siRNA sense strand
gaaccucgcucaaggagaa

SEQ ID NO: 1893641 - RNA, 19 nt, Homo sapiens
  misc_RNA (1)...(19): siRNA sense strand
guaagaagguguauucaga

SEQ ID NO: 1893642 - RNA, 19 nt, Homo sapiens
  misc_RNA (1)...(19): siRNA sense strand
ccaggaagcucaucagaaa

SEQ ID NO: 1893643 - RNA, 19 nt, Homo sapiens
  misc_RNA (1)...(19): siRNA sense strand
gaaagagaaugcacuacuu

SEQ ID NO: 1893644 - RNA, 19 nt, Homo sapiens
  misc_RNA (1)...(19): siRNA sense strand
gaagguguauucagaaguu

SEQ ID NO: 1893645 - RNA, 19 nt, Homo sapiens
  misc_RNA (1)...(19): siRNA sense strand
uaaugaaccucaacuugua

SEQ ID NO: 1893646 - RNA, 19 nt, Homo sapiens
  misc_RNA (1)...(19): siRNA sense strand
caacgaacuuugaugauga

SEQ ID NO: 1893647 - RNA, 19 nt, Homo sapiens
  misc_RNA (1)...(19): siRNA sense strand
ggagauugauagagccuua

SEQ ID NO: 1893648 - RNA, 19 nt, Homo sapiens
  misc_RNA (1)...(19): siRNA sense strand
gcacagcaguuuccauuuc

SEQ ID NO: 1893649 - RNA, 19 nt, Homo sapiens
  misc_RNA (1)...(19): siRNA sense strand
aagaagagcugaugaacaa

SEQ ID NO: 1893650 - RNA, 19 nt, Homo sapiens
  misc_RNA (1)...(19): siRNA sense strand
gaucaaagaacaagagaaa

SEQ ID NO: 1893651 - RNA, 19 nt, Homo sapiens
  misc_RNA (1)...(19): siRNA sense strand
gaacagccauaccuucaau

SEQ ID NO: 1893652 - RNA, 19 nt, Homo sapiens
  misc_RNA (1)...(19): siRNA sense strand
gaaagcauccugccuauag

SEQ ID NO: 1893653 - RNA, 19 nt, Homo sapiens
  misc_RNA (1)...(19): siRNA sense strand
ugauagagccuuaggaaua

SEQ ID NO: 1893654 - RNA, 19 nt, Homo sapiens
  misc_RNA (1)...(19): siRNA sense strand
gaauggauaugauuaagca

SEQ ID NO: 1893655 - RNA, 19 nt, Homo sapiens
  misc_RNA (1)...(19): siRNA sense strand
caaaguccaucaaagaaga

SEQ ID NO: 1893656 - RNA, 19 nt, Homo sapiens
  misc_RNA (1)...(19): siRNA sense strand
gcaacgaacuuugaugaug

SEQ ID NO: 1893657 - RNA, 19 nt, Homo sapiens
  misc_RNA (1)...(19): siRNA sense strand
gaagaaagagaaugcacua

SEQ ID NO: 1893658 - RNA, 19 nt, Homo sapiens
  misc_RNA (1)...(19): siRNA sense strand
gcaagaagaguucccauga

SEQ ID NO: 1893659 - RNA, 19 nt, Homo sapiens
  misc_RNA (1)...(19): siRNA sense strand
caacuaagacuucaacuuc

SEQ ID NO: 1893660 - RNA, 19 nt, Homo sapiens
  misc_RNA (1)...(19): siRNA sense strand
gaagaggagggucaugaua

SEQ ID NO: 1893661 - RNA, 19 nt, Homo sapiens
  misc_RNA (1)...(19): siRNA sense strand
ggaauguccugaccaacuu

SEQ ID NO: 1893662 - RNA, 19 nt, Homo sapiens
  misc_RNA (1)...(19): siRNA sense strand
caacacaggcaccuauuaa

SEQ ID NO: 1893663 - RNA, 19 nt, Homo sapiens
  misc_RNA (1)...(19): siRNA sense strand
caagaaagcgcaaggaaug

SEQ ID NO: 1893664 - RNA, 19 nt, Homo sapiens
  misc_RNA (1)...(19): siRNA sense strand
agacagauccugccaguaa

SEQ ID NO: 1893665 - RNA, 19 nt, Homo sapiens
  misc_RNA (1)...(19): siRNA sense strand
gcuauuugcuagauaaaga

SEQ ID NO: 1893666 - RNA, 19 nt, Homo sapiens
  misc_RNA (1)...(19): siRNA sense strand
cagcacagcuccuggauca

SEQ ID NO: 1893667 - RNA, 19 nt, Homo sapiens
  misc_RNA (1)...(19): siRNA sense strand
caagaagaguucccaugaa

SEQ ID NO: 1893668 - RNA, 19 nt, Homo sapiens
  misc_RNA (1)...(19): siRNA sense strand
gcaaauucgucagaucaaa

SEQ ID NO: 1893669 - RNA, 19 nt, Homo sapiens
  misc_RNA (1)...(19): siRNA sense strand
cagaaucgccagccacuua

SEQ ID NO: 1893670 - RNA, 19 nt, Homo sapiens
  misc_RNA (1)...(19): siRNA sense strand
caugcaagauccaaacuuu

SEQ ID NO: 1893671 - RNA, 19 nt, Homo sapiens
  misc_RNA (1)...(19): siRNA sense strand
cuucaaaccugacaaaugu

SEQ ID NO: 1893672 - RNA, 19 nt, Homo sapiens
  misc_RNA (1)...(19): siRNA sense strand
ggaaggcaacguuguguuu

SEQ ID NO: 1893673 - RNA, 19 nt, Homo sapiens
  misc_RNA (1)...(19): siRNA sense strand
uauagcaucuugcauguug

SEQ ID NO: 1893674 - RNA, 19 nt, Homo sapiens
  misc_RNA (1)...(19): siRNA sense strand
ggauuggcauucagucaaa

SEQ ID NO: 1893675 - RNA, 19 nt, Homo sapiens
  misc_RNA (1)...(19): siRNA sense strand
gccaaagucuauaguaaau

SEQ ID NO: 1893676 - RNA, 19 nt, Homo sapiens
  misc_RNA (1)...(19): siRNA sense strand
cacaguaucuaagguauaa

SEQ ID NO: 1893677 - RNA, 19 nt, Homo sapiens
  misc_RNA (1)...(19): siRNA sense strand
gaggcaaccuguucccaaa

SEQ ID NO: 1893678 - RNA, 19 nt, Homo sapiens
  misc_RNA (1)...(19): siRNA sense strand
guaacaacaugaacaucaa

SEQ ID NO: 1893679 - RNA, 19 nt, Homo sapiens
  misc_RNA (1)...(19): siRNA sense strand
ggacagcggccuaguuaug

SEQ ID NO: 1893680 - RNA, 19 nt, Homo sapiens
  misc_RNA (1)...(19): siRNA sense strand
acaacaagcuccuccaaau

SEQ ID NO: 1893681 - RNA, 19 nt, Homo sapiens
  misc_RNA (1)...(19): siRNA sense strand
ggaagccacugaauccaau

SEQ ID NO: 1893682 - RNA, 19 nt, Homo sapiens
  misc_RNA (1)...(19): siRNA sense strand
ucacagagcacuuuuaaua

SEQ ID NO: 1893683 - RNA, 19 nt, Homo sapiens
  misc_RNA (1)...(19): siRNA sense strand
caaagucuauaguaaaugg

SEQ ID NO: 1893684 - RNA, 19 nt, Homo sapiens
  misc_RNA (1)...(19): siRNA sense strand
aaugugaacuugacucuga

SEQ ID NO: 1893685 - RNA, 19 nt, Homo sapiens
  misc_RNA (1)...(19): siRNA sense strand
gaagaguucccaugaagga

SEQ ID NO: 1893686 - RNA, 19 nt, Homo sapiens
  misc_RNA (1)...(19): siRNA sense strand
gagaaucuguguccuaugc

SEQ ID NO: 1893687 - RNA, 19 nt, Homo sapiens
  misc_RNA (1)...(19): siRNA sense strand
caggaaauagccauaguua

SEQ ID NO: 1893688 - RNA, 19 nt, Homo sapiens
  misc_RNA (1)...(19): siRNA sense strand
gaagcaaauucgucagauc

SEQ ID NO: 1893689 - RNA, 19 nt, Homo sapiens
  misc_RNA (1)...(19): siRNA sense strand
uauagggccaucugaauua

SEQ ID NO: 1893690 - RNA, 19 nt, Homo sapiens
  misc_RNA (1)...(19): siRNA sense strand
gaauauagggccaucugaa

SEQ ID NO: 1893691 - RNA, 19 nt, Homo sapiens
  misc_RNA (1)...(19): siRNA sense strand
aaacagcacugcgaauuuc

SEQ ID NO: 1893692 - RNA, 19 nt, Homo sapiens
  misc_RNA (1)...(19): siRNA sense strand
gaacccaggucaggacaug

SEQ ID NO: 1893693 - RNA, 19 nt, Homo sapiens
  misc_RNA (1)...(19): siRNA sense strand
gaaucuguguccuaugcua

SEQ ID NO: 1893694 - RNA, 19 nt, Homo sapiens
  misc_RNA (1)...(19): siRNA sense strand
gggaggaccugguaagaag

SEQ ID NO: 1893695 - RNA, 19 nt, Homo sapiens
  misc_RNA (1)...(19): siRNA sense strand
caaccaaaguccaucaaag

SEQ ID NO: 1893696 - RNA, 19 nt, Homo sapiens
  misc_RNA (1)...(19): siRNA sense strand
gauagagccuuaggaauac

SEQ ID NO: 1893697 - RNA, 19 nt, Homo sapiens
  misc_RNA (1)...(19): siRNA sense strand
ggaaauuuagggaacagua

SEQ ID NO: 1893698 - RNA, 19 nt, Homo sapiens
  misc_RNA (1)...(19): siRNA sense strand
ucagucaaaucuaucguuu

SEQ ID NO: 1893699 - RNA, 19 nt, Homo sapiens
  misc_RNA (1)...(19): siRNA sense strand
caaagaagaaggagaagau

SEQ ID NO: 1893700 - RNA, 19 nt, Homo sapiens
  misc_RNA (1)...(19): siRNA sense strand
aacaaagacuccacaggua

SEQ ID NO: 1893701 - RNA, 19 nt, Homo sapiens
  misc_RNA (1)...(19): siRNA sense strand
uaucuggccuugcggaauu

SEQ ID NO: 1893702 - RNA, 19 nt, Homo sapiens
  misc_RNA (1)...(19): siRNA sense strand
gcaaagggcagaccaaacu

SEQ ID NO: 1893703 - RNA, 19 nt, Homo sapiens
  misc_RNA (1)...(19): siRNA sense strand
gaaccagccaaaucaacua

SEQ ID NO: 1893704 - RNA, 19 nt, Homo sapiens
  misc_RNA (1)...(19): siRNA sense strand
gaaccucaacuuguaauau

SEQ ID NO: 1893705 - RNA, 19 nt, Homo sapiens
  misc_RNA (1)...(19): siRNA sense strand
acacaacacggaaauauug

SEQ ID NO: 1893706 - RNA, 19 nt, Homo sapiens
  misc_RNA (1)...(19): siRNA sense strand
gauaggaaaccaaggaaau

SEQ ID NO: 1893707 - RNA, 19 nt, Homo sapiens
  misc_RNA (1)...(19): siRNA sense strand
caaagcagcccuggcauga

SEQ ID NO: 1893708 - RNA, 19 nt, Homo sapiens
  misc_RNA (1)...(19): siRNA sense strand
ccagaugacuugcuauguc

SEQ ID NO: 1893709 - RNA, 19 nt, Homo sapiens
  misc_RNA (1)...(19): siRNA sense strand
ccaccaaucagaaacagua

SEQ ID NO: 1893710 - RNA, 19 nt, Homo sapiens
  misc_RNA (1)...(19): siRNA sense strand
gaauuuaccacuugacauc

SEQ ID NO: 1893711 - RNA, 19 nt, Homo sapiens
  misc_RNA (1)...(19): siRNA sense strand
gcacugcgaauuucacaga

SEQ ID NO: 1893712 - RNA, 19 nt, Homo sapiens
  misc_RNA (1)...(19): siRNA sense strand
gaaauagccauaguuauac

SEQ ID NO: 1893713 - RNA, 19 nt, Homo sapiens
  misc_RNA (1)...(19): siRNA sense strand
gugcagaagucagauguau

SEQ ID NO: 1893714 - RNA, 19 nt, Homo sapiens
  misc_RNA (1)...(19): siRNA sense strand
caaaucaacuaagacuuca

SEQ ID NO: 1893715 - RNA, 19 nt, Homo sapiens
  misc_RNA (1)...(19): siRNA sense strand
ggaucagaagugacuauua

SEQ ID NO: 1893716 - RNA, 19 nt, Homo sapiens
  misc_RNA (1)...(19): siRNA sense strand
gcacagcuccuggaucaga

SEQ ID NO: 1893717 - RNA, 19 nt, Homo sapiens
  misc_RNA (1)...(19): siRNA sense strand
guucucagacuacuaauga

SEQ ID NO: 1893718 - RNA, 19 nt, Homo sapiens
  misc_RNA (1)...(19): siRNA sense strand
ggcauucagucaaaucuau

SEQ ID NO: 1893719 - RNA, 19 nt, Homo sapiens
  misc_RNA (1)...(19): siRNA sense strand
caucaaagaagaaggagaa

SEQ ID NO: 1893720 - RNA, 19 nt, Homo sapiens
  misc_RNA (1)...(19): siRNA sense strand
gaacaaaaguguauauagc

SEQ ID NO: 1893721 - RNA, 19 nt, Homo sapiens
  misc_RNA (1)...(19): siRNA sense strand
gauggguucuucuuuguag

SEQ ID NO: 1893722 - RNA, 19 nt, Homo sapiens
  misc_RNA (1)...(19): siRNA sense strand
gcuaagaggcaucaucaug

SEQ ID NO: 1893723 - RNA, 19 nt, Homo sapiens
  misc_RNA (1)...(19): siRNA sense strand
ccaaaucaacuaagacuuc

SEQ ID NO: 1893724 - RNA, 19 nt, Homo sapiens
  misc_RNA (1)...(19): siRNA sense strand
cagaaugugugugugauga

SEQ ID NO: 1893725 - RNA, 19 nt, Homo sapiens
  misc_RNA (1)...(19): siRNA sense strand
gagcagaauguguguguga

SEQ ID NO: 1893726 - RNA, 19 nt, Homo sapiens
  misc_RNA (1)...(19): siRNA sense strand
ggaagcucaucagaaauau

SEQ ID NO: 1893727 - RNA, 19 nt, Homo sapiens
  misc_RNA (1)...(19): siRNA sense strand
acaccagcauguacaguaa

SEQ ID NO: 1893728 - RNA, 19 nt, Homo sapiens
  misc_RNA (1)...(19): siRNA sense strand
ucagcaauguuuccaaugu

SEQ ID NO: 1893729 - RNA, 19 nt, Homo sapiens
  misc_RNA (1)...(19): siRNA sense strand
gcagaauagucaauuacca

SEQ ID NO: 1893730 - RNA, 19 nt, Homo sapiens
  misc_RNA (1)...(19): siRNA sense strand
gacccucaguagcaauaua

SEQ ID NO: 1893731 - RNA, 19 nt, Homo sapiens
  misc_RNA (1)...(19): siRNA sense strand
ccacgggccuagugcagaa

SEQ ID NO: 1893732 - RNA, 19 nt, Homo sapiens
  misc_RNA (1)...(19): siRNA sense strand
ccaacacaggcaccuauua

SEQ ID NO: 1893733 - RNA, 19 nt, Homo sapiens
  misc_RNA (1)...(19): siRNA sense strand
gccagccacuuaugaauca

SEQ ID NO: 1893734 - RNA, 19 nt, Homo sapiens
  misc_RNA (1)...(19): siRNA sense strand
ccaaagugcuugaggaaga

SEQ ID NO: 1893735 - RNA, 19 nt, Homo sapiens
  misc_RNA (1)...(19): siRNA sense strand
gcuauaaucuguacacucu

SEQ ID NO: 1893736 - RNA, 19 nt, Homo sapiens
  misc_RNA (1)...(19): siRNA sense strand
gcacagagcaucacguaca

SEQ ID NO: 1893737 - RNA, 19 nt, Homo sapiens
  misc_RNA (1)...(19): siRNA sense strand
ucagggaccuuuauaccaa

SEQ ID NO: 1893738 - RNA, 19 nt, Homo sapiens
  misc_RNA (1)...(19): siRNA sense strand
gaacgaguggccuccauug

SEQ ID NO: 1893739 - RNA, 19 nt, Homo sapiens
  misc_RNA (1)...(19): siRNA sense strand
caaagugcuugaggaagaa

SEQ ID NO: 1893740 - RNA, 19 nt, Homo sapiens
  misc_RNA (1)...(19): siRNA sense strand
gcggagaucugagcucuag

SEQ ID NO: 1893741 - RNA, 19 nt, Homo sapiens
  misc_RNA (1)...(19): siRNA sense strand
auacagggcucugcucuga

SEQ ID NO: 1893742 - RNA, 19 nt, Homo sapiens
  misc_RNA (1)...(19): siRNA sense strand
cgaguggccuccauuguag

SEQ ID NO: 1893743 - RNA, 19 nt, Homo sapiens
  misc_RNA (1)...(19): siRNA sense strand
ucugugggcucaccauuug

SEQ ID NO: 1893744 - RNA, 19 nt, Homo sapiens
  misc_RNA (1)...(19): siRNA sense strand
gacuggagcucauggacau

SEQ ID NO: 1893745 - RNA, 19 nt, Homo sapiens
  misc_RNA (1)...(19): siRNA sense strand
caccauuugugccgcuaua

SEQ ID NO: 1893746 - RNA, 19 nt, Homo sapiens
  misc_RNA (1)...(19): siRNA sense strand
cacagagcaucacguacaa

SEQ ID NO: 1893747 - RNA, 19 nt, Homo sapiens
  misc_RNA (1)...(19): siRNA sense strand
uauaaucuguacacucucu

SEQ ID NO: 1893748 - RNA, 19 nt, Homo sapiens
  misc_RNA (1)...(19): siRNA sense strand
cagccaggccacucucuuu

SEQ ID NO: 1893749 - RNA, 19 nt, Homo sapiens
  misc_RNA (1)...(19): siRNA sense strand
uguacacucucugcuauug

SEQ ID NO: 1893750 - RNA, 19 nt, Homo sapiens
  misc_RNA (1)...(19): siRNA sense strand
ucuguacacucucugcuau

SEQ ID NO: 1893751 - RNA, 19 nt, Homo sapiens
  misc_RNA (1)...(19): siRNA sense strand
acgaguggccuccauugua

SEQ ID NO: 1893752 - RNA, 19 nt, Homo sapiens
  misc_RNA (1)...(19): siRNA sense strand
cagggaccuuuauaccaaa

SEQ ID NO: 1893753 - RNA, 19 nt, Homo sapiens
  misc_RNA (1)...(19): siRNA sense strand
acagggcucugcucugaag

SEQ ID NO: 1893754 - RNA, 19 nt, Homo sapiens
  misc_RNA (1)...(19): siRNA sense strand
cagagcaucacguacaaug

SEQ ID NO: 1893755 - RNA, 19 nt, Homo sapiens
  misc_RNA (1)...(19): siRNA sense strand
ugcuggaccuggaggaauu

SEQ ID NO: 1893756 - RNA, 19 nt, Homo sapiens
  misc_RNA (1)...(19): siRNA sense strand
ugacuucagggaccuuuau

SEQ ID NO: 1893757 - RNA, 19 nt, Homo sapiens
  misc_RNA (1)...(19): siRNA sense strand
ggaccuggaggaauuuguc

SEQ ID NO: 1893758 - RNA, 19 nt, Homo sapiens
  misc_RNA (1)...(19): siRNA sense strand
ccuuguacccuaccgauug

SEQ ID NO: 1893759 - RNA, 19 nt, Homo sapiens
  misc_RNA (1)...(19): siRNA sense strand
gccaggccacucucuuuga

SEQ ID NO: 1893760 - RNA, 19 nt, Homo sapiens
  misc_RNA (1)...(19): siRNA sense strand
cuccagauauccaggaaag

SEQ ID NO: 1893761 - RNA, 19 nt, Homo sapiens
  misc_RNA (1)...(19): siRNA sense strand
cguggacuacguucucuuu

SEQ ID NO: 1893762 - RNA, 19 nt, Homo sapiens
  misc_RNA (1)...(19): siRNA sense strand
uaccaaagugcuugaggaa

SEQ ID NO: 1893763 - RNA, 19 nt, Homo sapiens
  misc_RNA (1)...(19): siRNA sense strand
gacuucagggaccuuuaua

SEQ ID NO: 1893764 - RNA, 19 nt, Homo sapiens
  misc_RNA (1)...(19): siRNA sense strand
ccaccgagagcaucaagag

SEQ ID NO: 1893765 - RNA, 19 nt, Homo sapiens
  misc_RNA (1)...(19): siRNA sense strand
ucagcaugguggccucuuc

SEQ ID NO: 1893766 - RNA, 19 nt, Homo sapiens
  misc_RNA (1)...(19): siRNA sense strand
ucacucguuuccuccagau

SEQ ID NO: 1893767 - RNA, 19 nt, Homo sapiens
  misc_RNA (1)...(19): siRNA sense strand
ccaaagugcuugaggaaga

SEQ ID NO: 1893768 - RNA, 19 nt, Homo sapiens
  misc_RNA (1)...(19): siRNA sense strand
gcuauaaucuguacacucu

SEQ ID NO: 1893769 - RNA, 19 nt, Homo sapiens
  misc_RNA (1)...(19): siRNA sense strand
gcacagagcaucacguaca

SEQ ID NO: 1893770 - RNA, 19 nt, Homo sapiens
  misc_RNA (1)...(19): siRNA sense strand
ucagggaccuuuauaccaa

SEQ ID NO: 1893771 - RNA, 19 nt, Homo sapiens
  misc_RNA (1)...(19): siRNA sense strand
gaacgaguggccuccauug

SEQ ID NO: 1893772 - RNA, 19 nt, Homo sapiens
  misc_RNA (1)...(19): siRNA sense strand
caaagugcuugaggaagaa

SEQ ID NO: 1893773 - RNA, 19 nt, Homo sapiens
  misc_RNA (1)...(19): siRNA sense strand
gcggagaucugagcucuag

SEQ ID NO: 1893774 - RNA, 19 nt, Homo sapiens
  misc_RNA (1)...(19): siRNA sense strand
auacagggcucugcucuga

SEQ ID NO: 1893775 - RNA, 19 nt, Homo sapiens
  misc_RNA (1)...(19): siRNA sense strand
cgaguggccuccauuguag

SEQ ID NO: 1893776 - RNA, 19 nt, Homo sapiens
  misc_RNA (1)...(19): siRNA sense strand
ucugugggcucaccauuug

SEQ ID NO: 1893777 - RNA, 19 nt, Homo sapiens
  misc_RNA (1)...(19): siRNA sense strand
gacuggagcucauggacau

SEQ ID NO: 1893778 - RNA, 19 nt, Homo sapiens
  misc_RNA (1)...(19): siRNA sense strand
caccauuugugccgcuaua

SEQ ID NO: 1893779 - RNA, 19 nt, Homo sapiens
  misc_RNA (1)...(19): siRNA sense strand
cacagagcaucacguacaa

SEQ ID NO: 1893780 - RNA, 19 nt, Homo sapiens
  misc_RNA (1)...(19): siRNA sense strand
uauaaucuguacacucucu

SEQ ID NO: 1893781 - RNA, 19 nt, Homo sapiens
  misc_RNA (1)...(19): siRNA sense strand
cagccaggccacucucuuu

SEQ ID NO: 1893782 - RNA, 19 nt, Homo sapiens
  misc_RNA (1)...(19): siRNA sense strand
uguacacucucugcuauug

SEQ ID NO: 1893783 - RNA, 19 nt, Homo sapiens
  misc_RNA (1)...(19): siRNA sense strand
ucuguacacucucugcuau

SEQ ID NO: 1893784 - RNA, 19 nt, Homo sapiens
  misc_RNA (1)...(19): siRNA sense strand
acgaguggccuccauugua

SEQ ID NO: 1893785 - RNA, 19 nt, Homo sapiens
  misc_RNA (1)...(19): siRNA sense strand
cagggaccuuuauaccaaa

SEQ ID NO: 1893786 - RNA, 19 nt, Homo sapiens
  misc_RNA (1)...(19): siRNA sense strand
acagggcucugcucugaag

SEQ ID NO: 1893787 - RNA, 19 nt, Homo sapiens
  misc_RNA (1)...(19): siRNA sense strand
cagagcaucacguacaaug

SEQ ID NO: 1893788 - RNA, 19 nt, Homo sapiens
  misc_RNA (1)...(19): siRNA sense strand
ugcuggaccuggaggaauu

SEQ ID NO: 1893789 - RNA, 19 nt, Homo sapiens
  misc_RNA (1)...(19): siRNA sense strand
ugacuucagggaccuuuau

SEQ ID NO: 1893790 - RNA, 19 nt, Homo sapiens
  misc_RNA (1)...(19): siRNA sense strand
ggaccuggaggaauuuguc

SEQ ID NO: 1893791 - RNA, 19 nt, Homo sapiens
  misc_RNA (1)...(19): siRNA sense strand
ccuuguacccuaccgauug

SEQ ID NO: 1893792 - RNA, 19 nt, Homo sapiens
  misc_RNA (1)...(19): siRNA sense strand
gccaggccacucucuuuga

SEQ ID NO: 1893793 - RNA, 19 nt, Homo sapiens
  misc_RNA (1)...(19): siRNA sense strand
cuccagauauccaggaaag

SEQ ID NO: 1893794 - RNA, 19 nt, Homo sapiens
  misc_RNA (1)...(19): siRNA sense strand
cguggacuacguucucuuu

SEQ ID NO: 1893795 - RNA, 19 nt, Homo sapiens
  misc_RNA (1)...(19): siRNA sense strand
uaccaaagugcuugaggaa

SEQ ID NO: 1893796 - RNA, 19 nt, Homo sapiens
  misc_RNA (1)...(19): siRNA sense strand
gacuucagggaccuuuaua

SEQ ID NO: 1893797 - RNA, 19 nt, Homo sapiens
  misc_RNA (1)...(19): siRNA sense strand
ccaccgagagcaucaagag

SEQ ID NO: 1893798 - RNA, 19 nt, Homo sapiens
  misc_RNA (1)...(19): siRNA sense strand
ucagcaugguggccucuuc

SEQ ID NO: 1893799 - RNA, 19 nt, Homo sapiens
  misc_RNA (1)...(19): siRNA sense strand
ucacucguuuccuccagau

SEQ ID NO: 1893800 - RNA, 19 nt, Homo sapiens
  misc_RNA (1)...(19): siRNA sense strand
gaagaugcauuuauccuua

SEQ ID NO: 1893801 - RNA, 19 nt, Homo sapiens
  misc_RNA (1)...(19): siRNA sense strand
gcugaugccuuacucauua

SEQ ID NO: 1893802 - RNA, 19 nt, Homo sapiens
  misc_RNA (1)...(19): siRNA sense strand
ugaacuggcugaugucuua

SEQ ID NO: 1893803 - RNA, 19 nt, Homo sapiens
  misc_RNA (1)...(19): siRNA sense strand
gcaaugugcugcucgauga

SEQ ID NO: 1893804 - RNA, 19 nt, Homo sapiens
  misc_RNA (1)...(19): siRNA sense strand
ggagaugaagcauaaauua

SEQ ID NO: 1893805 - RNA, 19 nt, Homo sapiens
  misc_RNA (1)...(19): siRNA sense strand
uaauggagaugaagcauaa

SEQ ID NO: 1893806 - RNA, 19 nt, Homo sapiens
  misc_RNA (1)...(19): siRNA sense strand
gcuagaacaucauuacaaa

SEQ ID NO: 1893807 - RNA, 19 nt, Homo sapiens
  misc_RNA (1)...(19): siRNA sense strand
gaagaaauauggaaagacu

SEQ ID NO: 1893808 - RNA, 19 nt, Homo sapiens
  misc_RNA (1)...(19): siRNA sense strand
gguaaaagcugaaagaaaa

SEQ ID NO: 1893809 - RNA, 19 nt, Homo sapiens
  misc_RNA (1)...(19): siRNA sense strand
uaaaggauuugucgucauu

SEQ ID NO: 1893810 - RNA, 19 nt, Homo sapiens
  misc_RNA (1)...(19): siRNA sense strand
uccaacagcuuccuugaua

SEQ ID NO: 1893811 - RNA, 19 nt, Homo sapiens
  misc_RNA (1)...(19): siRNA sense strand
cugaagcucuuguuacaua

SEQ ID NO: 1893812 - RNA, 19 nt, Homo sapiens
  misc_RNA (1)...(19): siRNA sense strand
caaaggagaugaaaagaaa

SEQ ID NO: 1893813 - RNA, 19 nt, Homo sapiens
  misc_RNA (1)...(19): siRNA sense strand
uaauagaccugaaggacaa

SEQ ID NO: 1893814 - RNA, 19 nt, Homo sapiens
  misc_RNA (1)...(19): siRNA sense strand
ucuguuaccuuguugguua

SEQ ID NO: 1893815 - RNA, 19 nt, Homo sapiens
  misc_RNA (1)...(19): siRNA sense strand
gcacagugauugccaccaa

SEQ ID NO: 1893816 - RNA, 19 nt, Homo sapiens
  misc_RNA (1)...(19): siRNA sense strand
gaacagauacaaaguugau

SEQ ID NO: 1893817 - RNA, 19 nt, Homo sapiens
  misc_RNA (1)...(19): siRNA sense strand
gagcugggaugucuucuca

SEQ ID NO: 1893818 - RNA, 19 nt, Homo sapiens
  misc_RNA (1)...(19): siRNA sense strand
aaagggaauugauccauuu

SEQ ID NO: 1893819 - RNA, 19 nt, Homo sapiens
  misc_RNA (1)...(19): siRNA sense strand
gaauacaggugagccaaug

SEQ ID NO: 1893820 - RNA, 19 nt, Homo sapiens
  misc_RNA (1)...(19): siRNA sense strand
caaagucugugcucaguca

SEQ ID NO: 1893821 - RNA, 19 nt, Homo sapiens
  misc_RNA (1)...(19): siRNA sense strand
gcugggaugucuucucaaa

SEQ ID NO: 1893822 - RNA, 19 nt, Homo sapiens
  misc_RNA (1)...(19): siRNA sense strand
gaugaagcauaaauuagga

SEQ ID NO: 1893823 - RNA, 19 nt, Homo sapiens
  misc_RNA (1)...(19): siRNA sense strand
gcgaguagaagaugcauuu

SEQ ID NO: 1893824 - RNA, 19 nt, Homo sapiens
  misc_RNA (1)...(19): siRNA sense strand
ggaggaaguuaaagugaca

SEQ ID NO: 1893825 - RNA, 19 nt, Homo sapiens
  misc_RNA (1)...(19): siRNA sense strand
gaagaccaccuuacccuau

SEQ ID NO: 1893826 - RNA, 19 nt, Homo sapiens
  misc_RNA (1)...(19): siRNA sense strand
caccaaagauggcaaugug

SEQ ID NO: 1893827 - RNA, 19 nt, Homo sapiens
  misc_RNA (1)...(19): siRNA sense strand
ccacaggaaacauuaguaa

SEQ ID NO: 1893828 - RNA, 19 nt, Homo sapiens
  misc_RNA (1)...(19): siRNA sense strand
cagaagagaaagagaaauu

SEQ ID NO: 1893829 - RNA, 19 nt, Homo sapiens
  misc_RNA (1)...(19): siRNA sense strand
aagcugaccuguacauuuc

SEQ ID NO: 1893830 - RNA, 19 nt, Homo sapiens
  misc_RNA (1)...(19): siRNA sense strand
gagaugguacuacaacaaa

SEQ ID NO: 1893831 - RNA, 19 nt, Homo sapiens
  misc_RNA (1)...(19): siRNA sense strand
gcaggaguuugggauaauu

SEQ ID NO: 1893832 - RNA, 19 nt, Homo sapiens
  misc_RNA (1)...(19): siRNA sense strand
gagauggacuucgugcuau

SEQ ID NO: 1893833 - RNA, 19 nt, Homo sapiens
  misc_RNA (1)...(19): siRNA sense strand
ucgaugagaugcaaauuca

SEQ ID NO: 1893834 - RNA, 19 nt, Homo sapiens
  misc_RNA (1)...(19): siRNA sense strand
ggcaauggcugaagcucuu

SEQ ID NO: 1893835 - RNA, 19 nt, Homo sapiens
  misc_RNA (1)...(19): siRNA sense strand
guagauugcuugggacaug

SEQ ID NO: 1893836 - RNA, 19 nt, Homo sapiens
  misc_RNA (1)...(19): siRNA sense strand
ccucuuagauguagcuaga

SEQ ID NO: 1893837 - RNA, 19 nt, Homo sapiens
  misc_RNA (1)...(19): siRNA sense strand
caagcugaccuguacauuu

SEQ ID NO: 1893838 - RNA, 19 nt, Homo sapiens
  misc_RNA (1)...(19): siRNA sense strand
ggccugcacccuagaauaa

SEQ ID NO: 1893839 - RNA, 19 nt, Homo sapiens
  misc_RNA (1)...(19): siRNA sense strand
gggcguagauuugaauaca

SEQ ID NO: 1893840 - RNA, 19 nt, Homo sapiens
  misc_RNA (1)...(19): siRNA sense strand
ugaagaugguuguaugguu

SEQ ID NO: 1893841 - RNA, 19 nt, Homo sapiens
  misc_RNA (1)...(19): siRNA sense strand
cauaagagauggacuucgu

SEQ ID NO: 1893842 - RNA, 19 nt, Homo sapiens
  misc_RNA (1)...(19): siRNA sense strand
agucaaggaugccauaaga

SEQ ID NO: 1893843 - RNA, 19 nt, Homo sapiens
  misc_RNA (1)...(19): siRNA sense strand
uaaaggccgucaacuccaa

SEQ ID NO: 1893844 - RNA, 19 nt, Homo sapiens
  misc_RNA (1)...(19): siRNA sense strand
ugggaugucuucucaaaug

SEQ ID NO: 1893845 - RNA, 19 nt, Homo sapiens
  misc_RNA (1)...(19): siRNA sense strand
gaaguuaaagugacaaagg

SEQ ID NO: 1893846 - RNA, 19 nt, Homo sapiens
  misc_RNA (1)...(19): siRNA sense strand
gaagcucuuguuacauaua

SEQ ID NO: 1893847 - RNA, 19 nt, Homo sapiens
  misc_RNA (1)...(19): siRNA sense strand
ccaaauaagcauacucuca

SEQ ID NO: 1893848 - RNA, 19 nt, Homo sapiens
  misc_RNA (1)...(19): siRNA sense strand
gaagaagcgaguagaagau

SEQ ID NO: 1893849 - RNA, 19 nt, Homo sapiens
  misc_RNA (1)...(19): siRNA sense strand
gcauuuauccuuauuugca

SEQ ID NO: 1893850 - RNA, 19 nt, Homo sapiens
  misc_RNA (1)...(19): siRNA sense strand
gggaugucuucucaaauga

SEQ ID NO: 1893851 - RNA, 19 nt, Homo sapiens
  misc_RNA (1)...(19): siRNA sense strand
acaucaaacucaccaaaga

SEQ ID NO: 1893852 - RNA, 19 nt, Homo sapiens
  misc_RNA (1)...(19): siRNA sense strand
uugaagaucucacuguaga

SEQ ID NO: 1893853 - RNA, 19 nt, Homo sapiens
  misc_RNA (1)...(19): siRNA sense strand
gaagagaaagagaaauugg

SEQ ID NO: 1893854 - RNA, 19 nt, Homo sapiens
  misc_RNA (1)...(19): siRNA sense strand
gaugucuucucaaaugaug

SEQ ID NO: 1893855 - RNA, 19 nt, Homo sapiens
  misc_RNA (1)...(19): siRNA sense strand
gagaaagagaaauugguaa

SEQ ID NO: 1893856 - RNA, 19 nt, Homo sapiens
  misc_RNA (1)...(19): siRNA sense strand
ccugcacccuagaauaaua

SEQ ID NO: 1893857 - RNA, 19 nt, Homo sapiens
  misc_RNA (1)...(19): siRNA sense strand
gagaugaagcauaaauuag

SEQ ID NO: 1893858 - RNA, 19 nt, Homo sapiens
  misc_RNA (1)...(19): siRNA sense strand
gaauaauagcugaaggauu

SEQ ID NO: 1893859 - RNA, 19 nt, Homo sapiens
  misc_RNA (1)...(19): siRNA sense strand
ggagaugguacuacaacaa

SEQ ID NO: 1893860 - RNA, 19 nt, Homo sapiens
  misc_RNA (1)...(19): siRNA sense strand
gaguuugggauaauuauug

SEQ ID NO: 1893861 - RNA, 19 nt, Homo sapiens
  misc_RNA (1)...(19): siRNA sense strand
ggcugaagcucuuguuaca

SEQ ID NO: 1893862 - RNA, 19 nt, Homo sapiens
  misc_RNA (1)...(19): siRNA sense strand
cauugaagaugguuguaug

SEQ ID NO: 1893863 - RNA, 19 nt, Homo sapiens
  misc_RNA (1)...(19): siRNA sense strand
gacaaagucugugcucagu

SEQ ID NO: 1893864 - RNA, 19 nt, Homo sapiens
  misc_RNA (1)...(19): siRNA sense strand
ugaagaagcgaguagaaga

SEQ ID NO: 1893865 - RNA, 19 nt, Homo sapiens
  misc_RNA (1)...(19): siRNA sense strand
uggcugaugucuuaacaga

SEQ ID NO: 1893866 - RNA, 19 nt, Homo sapiens
  misc_RNA (1)...(19): siRNA sense strand
gcaggugacaucaaacuca

SEQ ID NO: 1893867 - RNA, 19 nt, Homo sapiens
  misc_RNA (1)...(19): siRNA sense strand
ggucuuguguaugaguaua

SEQ ID NO: 1893868 - RNA, 19 nt, Homo sapiens
  misc_RNA (1)...(19): siRNA sense strand
agagaaagagaaauuggua

SEQ ID NO: 1893869 - RNA, 19 nt, Homo sapiens
  misc_RNA (1)...(19): siRNA sense strand
aguagaagaugcauuuauc

SEQ ID NO: 1893870 - RNA, 19 nt, Homo sapiens
  misc_RNA (1)...(19): siRNA sense strand
aggaacagauacaaaguug

SEQ ID NO: 1893871 - RNA, 19 nt, Homo sapiens
  misc_RNA (1)...(19): siRNA sense strand
guagaaauaauggagauga

SEQ ID NO: 1893872 - RNA, 19 nt, Homo sapiens
  misc_RNA (1)...(19): siRNA sense strand
gaguagaagaugcauuuau

SEQ ID NO: 1893873 - RNA, 19 nt, Homo sapiens
  misc_RNA (1)...(19): siRNA sense strand
ucaaggaugccauaagaga

SEQ ID NO: 1893874 - RNA, 19 nt, Homo sapiens
  misc_RNA (1)...(19): siRNA sense strand
aaggauuugucgucauuaa

SEQ ID NO: 1893875 - RNA, 19 nt, Homo sapiens
  misc_RNA (1)...(19): siRNA sense strand
gaguauacauuaggugaag

SEQ ID NO: 1893876 - RNA, 19 nt, Homo sapiens
  misc_RNA (1)...(19): siRNA sense strand
augcuggucuuguguauga

SEQ ID NO: 1893877 - RNA, 19 nt, Homo sapiens
  misc_RNA (1)...(19): siRNA sense strand
cagcuuccuugauagcaaa

SEQ ID NO: 1893878 - RNA, 19 nt, Homo sapiens
  misc_RNA (1)...(19): siRNA sense strand
cacaggagaugguacuaca

SEQ ID NO: 1893879 - RNA, 19 nt, Homo sapiens
  misc_RNA (1)...(19): siRNA sense strand
uaagacugcagaagagaaa

SEQ ID NO: 1893880 - RNA, 19 nt, Homo sapiens
  misc_RNA (1)...(19): siRNA sense strand
agcuuuggcugucaauaua

SEQ ID NO: 1893881 - RNA, 19 nt, Homo sapiens
  misc_RNA (1)...(19): siRNA sense strand
ucuccugguugaugaaauu

SEQ ID NO: 1893882 - RNA, 19 nt, Homo sapiens
  misc_RNA (1)...(19): siRNA sense strand
ugacccacaggaaacauua

SEQ ID NO: 1893883 - RNA, 19 nt, Homo sapiens
  misc_RNA (1)...(19): siRNA sense strand
gaugguacuacaacaaaug

SEQ ID NO: 1893884 - RNA, 19 nt, Homo sapiens
  misc_RNA (1)...(19): siRNA sense strand
uaagcauacucucacacaa

SEQ ID NO: 1893885 - RNA, 19 nt, Homo sapiens
  misc_RNA (1)...(19): siRNA sense strand
gggacaugcuggucuugug

SEQ ID NO: 1893886 - RNA, 19 nt, Homo sapiens
  misc_RNA (1)...(19): siRNA sense strand
acguuucacuggaauauga

SEQ ID NO: 1893887 - RNA, 19 nt, Homo sapiens
  misc_RNA (1)...(19): siRNA sense strand
gcaaauucaacauccaaca

SEQ ID NO: 1893888 - RNA, 19 nt, Homo sapiens
  misc_RNA (1)...(19): siRNA sense strand
ggaguuugggauaauuauu

SEQ ID NO: 1893889 - RNA, 19 nt, Homo sapiens
  misc_RNA (1)...(19): siRNA sense strand
agagauggacuucgugcua

SEQ ID NO: 1893890 - RNA, 19 nt, Homo sapiens
  misc_RNA (1)...(19): siRNA sense strand
ggacaugcuggucuugugu

SEQ ID NO: 1893891 - RNA, 19 nt, Homo sapiens
  misc_RNA (1)...(19): siRNA sense strand
cuauugaucucuucauggu

SEQ ID NO: 1893892 - RNA, 19 nt, Homo sapiens
  misc_RNA (1)...(19): siRNA sense strand
aagaccaccuuacccuauu

SEQ ID NO: 1893893 - RNA, 19 nt, Homo sapiens
  misc_RNA (1)...(19): siRNA sense strand
gaugcaggaguuugggaua

SEQ ID NO: 1893894 - RNA, 19 nt, Homo sapiens
  misc_RNA (1)...(19): siRNA sense strand
gguuaugacccacaggaaa

SEQ ID NO: 1893895 - RNA, 19 nt, Homo sapiens
  misc_RNA (1)...(19): siRNA sense strand
ucagaaugcugguuaugac

SEQ ID NO: 1893896 - RNA, 19 nt, Homo sapiens
  misc_RNA (1)...(19): siRNA sense strand
uccuggagcuggugcaauu

SEQ ID NO: 1893897 - RNA, 19 nt, Homo sapiens
  misc_RNA (1)...(19): siRNA sense strand
ugacaucaaacucaccaaa

SEQ ID NO: 1893898 - RNA, 19 nt, Homo sapiens
  misc_RNA (1)...(19): siRNA sense strand
caacguuucacuggaauau

SEQ ID NO: 1893899 - RNA, 19 nt, Homo sapiens
  misc_RNA (1)...(19): siRNA sense strand
gaccaaauaagcauacucu

SEQ ID NO: 1893900 - RNA, 19 nt, Homo sapiens
  misc_RNA (1)...(19): siRNA sense strand
gaagauagccuccuuacau

SEQ ID NO: 1893901 - RNA, 19 nt, Homo sapiens
  misc_RNA (1)...(19): siRNA sense strand
uaaacuauccugcagaaua

SEQ ID NO: 1893902 - RNA, 19 nt, Homo sapiens
  misc_RNA (1)...(19): siRNA sense strand
gacaacagauugccuugaa

SEQ ID NO: 1893903 - RNA, 19 nt, Homo sapiens
  misc_RNA (1)...(19): siRNA sense strand
gaccuuagcugaugaggau

SEQ ID NO: 1893904 - RNA, 19 nt, Homo sapiens
  misc_RNA (1)...(19): siRNA sense strand
aaacuauccugcagaauau

SEQ ID NO: 1893905 - RNA, 19 nt, Homo sapiens
  misc_RNA (1)...(19): siRNA sense strand
ugguaacgcuuuaugaaua

SEQ ID NO: 1893906 - RNA, 19 nt, Homo sapiens
  misc_RNA (1)...(19): siRNA sense strand
ggauagcaaagaagaaaua

SEQ ID NO: 1893907 - RNA, 19 nt, Homo sapiens
  misc_RNA (1)...(19): siRNA sense strand
caacaauuccucuucagaa

SEQ ID NO: 1893908 - RNA, 19 nt, Homo sapiens
  misc_RNA (1)...(19): siRNA sense strand
aagaugcucuguauaguga

SEQ ID NO: 1893909 - RNA, 19 nt, Homo sapiens
  misc_RNA (1)...(19): siRNA sense strand
gaggaugaccgggaaauuu

SEQ ID NO: 1893910 - RNA, 19 nt, Homo sapiens
  misc_RNA (1)...(19): siRNA sense strand
caagaauccuuuuggcuua

SEQ ID NO: 1893911 - RNA, 19 nt, Homo sapiens
  misc_RNA (1)...(19): siRNA sense strand
uauaaacuauccugcagaa

SEQ ID NO: 1893912 - RNA, 19 nt, Homo sapiens
  misc_RNA (1)...(19): siRNA sense strand
ugaagacuuugguacagua

SEQ ID NO: 1893913 - RNA, 19 nt, Homo sapiens
  misc_RNA (1)...(19): siRNA sense strand
gcagaagcauguuuauugc

SEQ ID NO: 1893914 - RNA, 19 nt, Homo sapiens
  misc_RNA (1)...(19): siRNA sense strand
cagauugccuugaagauag

SEQ ID NO: 1893915 - RNA, 19 nt, Homo sapiens
  misc_RNA (1)...(19): siRNA sense strand
gcauaaccuugacaacaga

SEQ ID NO: 1893916 - RNA, 19 nt, Homo sapiens
  misc_RNA (1)...(19): siRNA sense strand
caaggucaauuucaugauc

SEQ ID NO: 1893917 - RNA, 19 nt, Homo sapiens
  misc_RNA (1)...(19): siRNA sense strand
guauugggaugguuugguu

SEQ ID NO: 1893918 - RNA, 19 nt, Homo sapiens
  misc_RNA (1)...(19): siRNA sense strand
gaagaugcucuguauagug

SEQ ID NO: 1893919 - RNA, 19 nt, Homo sapiens
  misc_RNA (1)...(19): siRNA sense strand
caacagauugccuugaaga

SEQ ID NO: 1893920 - RNA, 19 nt, Homo sapiens
  misc_RNA (1)...(19): siRNA sense strand
agagcaagauaaagacaaa

SEQ ID NO: 1893921 - RNA, 19 nt, Homo sapiens
  misc_RNA (1)...(19): siRNA sense strand
gaaauauauugccaguuac

SEQ ID NO: 1893922 - RNA, 19 nt, Homo sapiens
  misc_RNA (1)...(19): siRNA sense strand
gauaaagacaaaccgaaga

SEQ ID NO: 1893923 - RNA, 19 nt, Homo sapiens
  misc_RNA (1)...(19): siRNA sense strand
uaugaauacucgccgcuuu

SEQ ID NO: 1893924 - RNA, 19 nt, Homo sapiens
  misc_RNA (1)...(19): siRNA sense strand
gggacucucugaaagugaa

SEQ ID NO: 1893925 - RNA, 19 nt, Homo sapiens
  misc_RNA (1)...(19): siRNA sense strand
gcauguuuauugcuucaga

SEQ ID NO: 1893926 - RNA, 19 nt, Homo sapiens
  misc_RNA (1)...(19): siRNA sense strand
caaaugagacaagucaaga

SEQ ID NO: 1893927 - RNA, 19 nt, Homo sapiens
  misc_RNA (1)...(19): siRNA sense strand
uagaagaugcucuguauag

SEQ ID NO: 1893928 - RNA, 19 nt, Homo sapiens
  misc_RNA (1)...(19): siRNA sense strand
aagauagccuccuuacaug

SEQ ID NO: 1893929 - RNA, 19 nt, Homo sapiens
  misc_RNA (1)...(19): siRNA sense strand
ggcauaaccuugacaacag

SEQ ID NO: 1893930 - RNA, 19 nt, Homo sapiens
  misc_RNA (1)...(19): siRNA sense strand
gaccgggaaauuuaugaua

SEQ ID NO: 1893931 - RNA, 19 nt, Homo sapiens
  misc_RNA (1)...(19): siRNA sense strand
gaucacuaauccaucuuca

SEQ ID NO: 1893932 - RNA, 19 nt, Homo sapiens
  misc_RNA (1)...(19): siRNA sense strand
gcaaggacuguguuguuug

SEQ ID NO: 1893933 - RNA, 19 nt, Homo sapiens
  misc_RNA (1)...(19): siRNA sense strand
ccgggaaauuuaugauauu

SEQ ID NO: 1893934 - RNA, 19 nt, Homo sapiens
  misc_RNA (1)...(19): siRNA sense strand
aggaugaccgggaaauuua

SEQ ID NO: 1893935 - RNA, 19 nt, Homo sapiens
  misc_RNA (1)...(19): siRNA sense strand
auuagaagaugcucuguau

SEQ ID NO: 1893936 - RNA, 19 nt, Homo sapiens
  misc_RNA (1)...(19): siRNA sense strand
gcaaaugagacaagucaag

SEQ ID NO: 1893937 - RNA, 19 nt, Homo sapiens
  misc_RNA (1)...(19): siRNA sense strand
gguaacgcuuuaugaauac

SEQ ID NO: 1893938 - RNA, 19 nt, Homo sapiens
  misc_RNA (1)...(19): siRNA sense strand
cagcaaggacuguguuguu

SEQ ID NO: 1893939 - RNA, 19 nt, Homo sapiens
  misc_RNA (1)...(19): siRNA sense strand
cuacaucgcgguggucuuu

SEQ ID NO: 1893940 - RNA, 19 nt, Homo sapiens
  misc_RNA (1)...(19): siRNA sense strand
guacccagaucucgcuauc

SEQ ID NO: 1893941 - RNA, 19 nt, Homo sapiens
  misc_RNA (1)...(19): siRNA sense strand
ugcagaagcauguuuauug

SEQ ID NO: 1893942 - RNA, 19 nt, Homo sapiens
  misc_RNA (1)...(19): siRNA sense strand
acagauugccuugaagaua

SEQ ID NO: 1893943 - RNA, 19 nt, Homo sapiens
  misc_RNA (1)...(19): siRNA sense strand
gauguuccaguaauucuga

SEQ ID NO: 1893944 - RNA, 19 nt, Homo sapiens
  misc_RNA (1)...(19): siRNA sense strand
gcugcgguguuucugguaa

SEQ ID NO: 1893945 - RNA, 19 nt, Homo sapiens
  misc_RNA (1)...(19): siRNA sense strand
ccagaucucgcuauccauu

SEQ ID NO: 1893946 - RNA, 19 nt, Homo sapiens
  misc_RNA (1)...(19): siRNA sense strand
ucaauuacaacuggcauaa

SEQ ID NO: 1893947 - RNA, 19 nt, Homo sapiens
  misc_RNA (1)...(19): siRNA sense strand
caaggacuguguuguuugc

SEQ ID NO: 1893948 - RNA, 19 nt, Homo sapiens
  misc_RNA (1)...(19): siRNA sense strand
uaauccaucuucagcuuca

SEQ ID NO: 1893949 - RNA, 19 nt, Homo sapiens
  misc_RNA (1)...(19): siRNA sense strand
uauaugaagcucugcagaa

SEQ ID NO: 1893950 - RNA, 19 nt, Homo sapiens
  misc_RNA (1)...(19): siRNA sense strand
ugauucauauuccugauag

SEQ ID NO: 1893951 - RNA, 19 nt, Homo sapiens
  misc_RNA (1)...(19): siRNA sense strand
cuauugaccuuagcugaug

SEQ ID NO: 1893952 - RNA, 19 nt, Homo sapiens
  misc_RNA (1)...(19): siRNA sense strand
caguucagcacaagaguuu

SEQ ID NO: 1893953 - RNA, 19 nt, Homo sapiens
  misc_RNA (1)...(19): siRNA sense strand
agcaaggacuguguuguuu

SEQ ID NO: 1893954 - RNA, 19 nt, Homo sapiens
  misc_RNA (1)...(19): siRNA sense strand
guugggauguuccaguaau

SEQ ID NO: 1893955 - RNA, 19 nt, Homo sapiens
  misc_RNA (1)...(19): siRNA sense strand
gaugcucuguauagugaau

SEQ ID NO: 1893956 - RNA, 19 nt, Homo sapiens
  misc_RNA (1)...(19): siRNA sense strand
gcucaaggucaauuucaug

SEQ ID NO: 1893957 - RNA, 19 nt, Homo sapiens
  misc_RNA (1)...(19): siRNA sense strand
gcaguuuguucaggaaucu

SEQ ID NO: 1893958 - RNA, 19 nt, Homo sapiens
  misc_RNA (1)...(19): siRNA sense strand
ugagacaagucaagaaucc

SEQ ID NO: 1893959 - RNA, 19 nt, Homo sapiens
  misc_RNA (1)...(19): siRNA sense strand
ccaaugugcaggcaguuug

SEQ ID NO: 1893960 - RNA, 19 nt, Homo sapiens
  misc_RNA (1)...(19): siRNA sense strand
ugguugggauguuccagua

SEQ ID NO: 1893961 - RNA, 19 nt, Homo sapiens
  misc_RNA (1)...(19): siRNA sense strand
gacaagucaagaauccuuu

SEQ ID NO: 1893962 - RNA, 19 nt, Homo sapiens
  misc_RNA (1)...(19): siRNA sense strand
ccaacaauuccucuucaga

SEQ ID NO: 1893963 - RNA, 19 nt, Homo sapiens
  misc_RNA (1)...(19): siRNA sense strand
guagcgcuauugaccuuag

SEQ ID NO: 1893964 - RNA, 19 nt, Homo sapiens
  misc_RNA (1)...(19): siRNA sense strand
agaagaugcucuguauagu

SEQ ID NO: 1893965 - RNA, 19 nt, Homo sapiens
  misc_RNA (1)...(19): siRNA sense strand
gagacccaguucagcacaa

SEQ ID NO: 1893966 - RNA, 19 nt, Homo sapiens
  misc_RNA (1)...(19): siRNA sense strand
acuaauccaucuucagcuu

SEQ ID NO: 1893967 - RNA, 19 nt, Homo sapiens
  misc_RNA (1)...(19): siRNA sense strand
ggaugaccgggaaauuuau

SEQ ID NO: 1893968 - RNA, 19 nt, Homo sapiens
  misc_RNA (1)...(19): siRNA sense strand
ucaggaaucuuuugcacuu

SEQ ID NO: 1893969 - RNA, 19 nt, Homo sapiens
  misc_RNA (1)...(19): siRNA sense strand
uuucagcagugcccaaugu

SEQ ID NO: 1893970 - RNA, 19 nt, Homo sapiens
  misc_RNA (1)...(19): siRNA sense strand
ugugaacuggguacucuua

SEQ ID NO: 1893971 - RNA, 19 nt, Homo sapiens
  misc_RNA (1)...(19): siRNA sense strand
gugauucauauuccugaua

SEQ ID NO: 1893972 - RNA, 19 nt, Homo sapiens
  misc_RNA (1)...(19): siRNA sense strand
caacuggcauaaccuugac

SEQ ID NO: 1893973 - RNA, 19 nt, Homo sapiens
  misc_RNA (1)...(19): siRNA sense strand
ggucaauuucaugaucuua

SEQ ID NO: 1893974 - RNA, 19 nt, Homo sapiens
  misc_RNA (1)...(19): siRNA sense strand
ucuaucaggaacaguauuu

SEQ ID NO: 1893975 - RNA, 19 nt, Homo sapiens
  misc_RNA (1)...(19): siRNA sense strand
acaacuggcauaaccuuga

SEQ ID NO: 1893976 - RNA, 19 nt, Homo sapiens
  misc_RNA (1)...(19): siRNA sense strand
accgggaaauuuaugauau

SEQ ID NO: 1893977 - RNA, 19 nt, Homo sapiens
  misc_RNA (1)...(19): siRNA sense strand
uaaccuugacaacagauug

SEQ ID NO: 1893978 - RNA, 19 nt, Homo sapiens
  misc_RNA (1)...(19): siRNA sense strand
gugggacucucugaaagug

SEQ ID NO: 1893979 - RNA, 19 nt, Homo sapiens
  misc_RNA (1)...(19): siRNA sense strand
aagcaaaugagacaaguca

SEQ ID NO: 1893980 - RNA, 19 nt, Homo sapiens
  misc_RNA (1)...(19): siRNA sense strand
cauuagaagaugcucugua

SEQ ID NO: 1893981 - RNA, 19 nt, Homo sapiens
  misc_RNA (1)...(19): siRNA sense strand
gcucugcagaagcauguuu

SEQ ID NO: 1893982 - RNA, 19 nt, Homo sapiens
  misc_RNA (1)...(19): siRNA sense strand
cauguuuauugcuucagaa

SEQ ID NO: 1893983 - RNA, 19 nt, Homo sapiens
  misc_RNA (1)...(19): siRNA sense strand
cagaagagacccaguucag

SEQ ID NO: 1893984 - RNA, 19 nt, Homo sapiens
  misc_RNA (1)...(19): siRNA sense strand
ugugauggcugugugaagu

SEQ ID NO: 1893985 - RNA, 19 nt, Homo sapiens
  misc_RNA (1)...(19): siRNA sense strand
aaggauagcaaagaagaaa

SEQ ID NO: 1893986 - RNA, 19 nt, Homo sapiens
  misc_RNA (1)...(19): siRNA sense strand
ggucuuuaccugcuucauc

SEQ ID NO: 1893987 - RNA, 19 nt, Homo sapiens
  misc_RNA (1)...(19): siRNA sense strand
agaaugggacugugaacug

SEQ ID NO: 1893988 - RNA, 19 nt, Homo sapiens
  misc_RNA (1)...(19): siRNA sense strand
guugagccaucggaagaga

SEQ ID NO: 1893989 - RNA, 19 nt, Homo sapiens
  misc_RNA (1)...(19): siRNA sense strand
ccaucuucagcuucaauua

SEQ ID NO: 1893990 - RNA, 19 nt, Homo sapiens
  misc_RNA (1)...(19): siRNA sense strand
gaugaccgggaaauuuaug

SEQ ID NO: 1893991 - RNA, 19 nt, Homo sapiens
  misc_RNA (1)...(19): siRNA sense strand
augaagcucugcagaagca

SEQ ID NO: 1893992 - RNA, 19 nt, Homo sapiens
  misc_RNA (1)...(19): siRNA sense strand
ugguagcgcuauugaccuu

SEQ ID NO: 1893993 - RNA, 19 nt, Homo sapiens
  misc_RNA (1)...(19): siRNA sense strand
ggcaguuuguucaggaauc

SEQ ID NO: 1893994 - RNA, 19 nt, Homo sapiens
  misc_RNA (1)...(19): siRNA sense strand
ccugauaggacuuauaaac

SEQ ID NO: 1893995 - RNA, 19 nt, Homo sapiens
  misc_RNA (1)...(19): siRNA sense strand
auaugaagcucugcagaag
